United States Patent Application Publication US 2025/0084491 A1 - sequence listing, part 28

SEQ ID NO: 529609 - DNA, 75 bp, synthetic construct
  source 1..75: mol_type = other DNA
gttgataatgaaatcagcaaggcagatgttcatcagaaccaggcgccagcggaagaggctaaacaagaaatttat

SEQ ID NO: 529610 - DNA, 75 bp, synthetic construct
  source 1..75: mol_type = other DNA
cgtgccacgtttgccccaacgcggtttggtttacggaatccacgggagaggaaaaccgcccgaatctgtccgtat

SEQ ID NO: 529611 - DNA, 75 bp, synthetic construct
  source 1..75: mol_type = other DNA
cattgcgcactatgtattgccgaagcaaagattacagcaagccgtcactgttatttcggcagtttgcacacatcc

SEQ ID NO: 529612 - DNA, 75 bp, synthetic construct
  source 1..75: mol_type = other DNA
tgccacggtttatcggtataaccgtatcgcgcttgataccaatacgatggggaattccatcgatgttgaaaaaaa

SEQ ID NO: 529613 - DNA, 75 bp, synthetic construct
  source 1..75: mol_type = other DNA
cgcgctttgagagaggcaatcatcaacctgcgggcgtgtatcgggtggatctctggcgtaatgatgagttcattg

SEQ ID NO: 529614 - DNA, 75 bp, synthetic construct
  source 1..75: mol_type = other DNA
tctctggtacccatcaaaaatactggaatacttcggattcagatacgtggtatcaggtggggggtgatgctgcca

SEQ ID NO: 529615 - DNA, 75 bp, synthetic construct
  source 1..75: mol_type = other DNA
tctggtgaattactggttcagtggggagacggcgcgaactcacgctgcattgcgcactatgtattgccgaagcaa

SEQ ID NO: 529616 - DNA, 75 bp, synthetic construct
  source 1..75: mol_type = other DNA
tgaacaccttcggtaccaattttcagttaatgggttaccgctattcgacacaaggtttttatacccttgatgatg

SEQ ID NO: 529617 - DNA, 75 bp, synthetic construct
  source 1..75: mol_type = other DNA
ctatttttgacagaactgttgaggttctggatattcaccccgggcatacattaagccagaaagttgatattctca

SEQ ID NO: 529618 - DNA, 75 bp, synthetic construct
  source 1..75: mol_type = other DNA
ggccacagagcaggcgcaggccgcagagcaggcgcaggccgcagagcaggcgcaggccacagagcaggcgcaggc

SEQ ID NO: 529619 - DNA, 75 bp, synthetic construct
  source 1..75: mol_type = other DNA
gacattaacacttgagaaaccaacacacaaagagatagaaaagagacttaatacctggttaaataaaacaagcca

SEQ ID NO: 529620 - DNA, 75 bp, synthetic construct
  source 1..75: mol_type = other DNA
tatggtgaacttcgtataagaaatgctggtaaaaccaatgagtatctggctgtaaaattgcctggagataaaaaa

SEQ ID NO: 529621 - DNA, 75 bp, synthetic construct
  source 1..75: mol_type = other DNA
aggagccactggtcgagagccgctatctctacgacccgctgggccgccggacggggaaacgggtgtggcgtcgcg

SEQ ID NO: 529622 - DNA, 75 bp, synthetic construct
  source 1..75: mol_type = other DNA
gacattaacgctagagaaaccctcgcgtaaagaggtagaaaaacgacttaatacctggttaaataagacaagtca

SEQ ID NO: 529623 - DNA, 75 bp, synthetic construct
  source 1..75: mol_type = other DNA
acggattcactcgtgaaatggcagaagatgctcttggaaaacaatttgtccaggccagagaagatcatcaggaat

SEQ ID NO: 529624 - DNA, 75 bp, synthetic construct
  source 1..75: mol_type = other DNA
atgcaacccagccccgccatgcaggcattaattgagcagatttattatatttttcgtcgttatcctgtgccatcg

SEQ ID NO: 529625 - DNA, 75 bp, synthetic construct
  source 1..75: mol_type = other DNA
cattgcgtgcactacggtcagggctggctctacagcaaggcattaccgaaagaagatttcttacgctgggccgag

SEQ ID NO: 529626 - DNA, 75 bp, synthetic construct
  source 1..75: mol_type = other DNA
aattacacgcagacccgctttgatgtacttgacgggcatattaatgccatgaccctgacaccgagggtggggtat

SEQ ID NO: 529627 - DNA, 75 bp, synthetic construct
  source 1..75: mol_type = other DNA
cggctgctggacaggctggagggggaaatccgggcagaccgtgtgagtgacgaaagccgggcgtggcttgcgcag

SEQ ID NO: 529628 - DNA, 75 bp, synthetic construct
  source 1..75: mol_type = other DNA
agctagcactacatccataacccgcagtgagcccatcgagaacaagatcatcctacattcaccaactaacgtgat

SEQ ID NO: 529629 - DNA, 75 bp, synthetic construct
  source 1..75: mol_type = other DNA
gcgttgtcatcacgacacttgtcctttatttgttgggtgaaaaatttggtaatcgactgaaaaccatagatgaac

SEQ ID NO: 529630 - DNA, 75 bp, synthetic construct
  source 1..75: mol_type = other DNA
ataaaaatattgatttttatataaaagcatcgtccacatataaaggacatatagaaaataatagcgacttagtaa

SEQ ID NO: 529631 - DNA, 75 bp, synthetic construct
  source 1..75: mol_type = other DNA
attgaagatgcaataaagcgtaataaaagattgcttgatgaaattgaagctattaaaaactcagctcctttggac

SEQ ID NO: 529632 - DNA, 75 bp, synthetic construct
  source 1..75: mol_type = other DNA
gtgaacgcgagagtattccgaccagtgagtcgcatggtgcgctgttgcagacagccgaacctgaatacctggacg

SEQ ID NO: 529633 - DNA, 75 bp, synthetic construct
  source 1..75: mol_type = other DNA
tctgttccatttttatactcccggtaaaggtgttaataatgtcacaacatgtcaatataaaatcttatttgacag

SEQ ID NO: 529634 - DNA, 75 bp, synthetic construct
  source 1..75: mol_type = other DNA
ggaacgctatatcacaattatttaaaatagcaacacagcttataagtatgatttatcttgccagattaattgcac

SEQ ID NO: 529635 - DNA, 75 bp, synthetic construct
  source 1..75: mol_type = other DNA
tttcatgtctcaagggagaacaggtattttgcttcttttaggcatccaaggaactatattaacagcggtatcatt

SEQ ID NO: 529636 - DNA, 75 bp, synthetic construct
  source 1..75: mol_type = other DNA
tgcgcacgttggtggccattgccgacctgggttcgtttgccgaggcggcccgtgtgctgcacctcgcgccaccca

SEQ ID NO: 529637 - DNA, 75 bp, synthetic construct
  source 1..75: mol_type = other DNA
tgtcaccactgcaggtgatatgaacgttatgcctgggggggcactgcgtgtcgctaaaaccactatcggcggcaa

SEQ ID NO: 529638 - DNA, 75 bp, synthetic construct
  source 1..75: mol_type = other DNA
acgttcaacgcgacgctgggcggcgataattcacccacggataaaatgaacgtgaaaggcgatacccaagggaac

SEQ ID NO: 529639 - DNA, 75 bp, synthetic construct
  source 1..75: mol_type = other DNA
ctatcgacaaagagcttcgtgaaccttggcagagagctttgggaaatgtgatcgagcacgccctcaagccattgc

SEQ ID NO: 529640 - DNA, 75 bp, synthetic construct
  source 1..75: mol_type = other DNA
agactttgtgcaggcaaaatattggttcgagaaatccgcagggcaaggcaataatgatgcgttattaaatttggc

SEQ ID NO: 529641 - DNA, 75 bp, synthetic construct
  source 1..75: mol_type = other DNA
caaggcgctgttgtcttcttatcagcaactacaagaagatgacagaagtcataaatggttcaaagtggctttatt

SEQ ID NO: 529642 - DNA, 75 bp, synthetic construct
  source 1..75: mol_type = other DNA
ttttatttatgagaatgatttcttgagagaaaagattgaagcagtaaaaaaacaaaatgaattctcacgaacttt

SEQ ID NO: 529643 - DNA, 75 bp, synthetic construct
  source 1..75: mol_type = other DNA
gccaaaagacgctgatatcagtaagcgagaatcctggcttgctgcgaacccggcgctgggaacgttcagatctga

SEQ ID NO: 529644 - DNA, 75 bp, synthetic construct
  source 1..75: mol_type = other DNA
gcatttccggtactgatgaaacaacttgagctgatgctctccaccggagaacttaatccccgccactcgcacagc

SEQ ID NO: 529645 - DNA, 75 bp, synthetic construct
  source 1..75: mol_type = other DNA
atgagcaatatcacatggggcctgcagcgggctatcacgccgcgcctgggagcccgtctggtgcaggagggtaac

SEQ ID NO: 529646 - DNA, 75 bp, synthetic construct
  source 1..75: mol_type = other DNA
ttgtcgatgataaaatatggatggatgtcactaaggtttatctagataaaataagagacaattttatggattttt

SEQ ID NO: 529647 - DNA, 75 bp, synthetic construct
  source 1..75: mol_type = other DNA
ctggatctgtcagccaggaacgacttaacggcgctggttatcgctggtgaagcagatgatggtgtctgggatgtt

SEQ ID NO: 529648 - DNA, 75 bp, synthetic construct
  source 1..75: mol_type = other DNA
ctggatctgtcggccaggaacgacttaacggcgctggttatcgctggtgaggctgatgatggtgtctgggatatc

SEQ ID NO: 529649 - DNA, 75 bp, synthetic construct
  source 1..75: mol_type = other DNA
cactattgatactcctgataaggatattctccgccaggctaataattccggctgtgtgcgtatttctgcctgtgt

SEQ ID NO: 529650 - DNA, 75 bp, synthetic construct
  source 1..75: mol_type = other DNA
ccagagtggaagagtgctggcatttaactgaacaaaatgccatgtacgaaacctttattcagtcattccgcccgc

SEQ ID NO: 529651 - DNA, 75 bp, synthetic construct
  source 1..75: mol_type = other DNA
aatggctcctgttgctctcggaaggtttagataaatcaacgctggctgatgtcaaaaagcagttgatctggcaag

SEQ ID NO: 529652 - DNA, 75 bp, synthetic construct
  source 1..75: mol_type = other DNA
caagatttcacgctggaagaggtgggtaaacagtttgatgtcacgcgagaaaggatacgtcagatagaagccaaa

SEQ ID NO: 529653 - DNA, 75 bp, synthetic construct
  source 1..75: mol_type = other DNA
atcaaggccgttgaaaaattcgactatcggcgtggatttaaattctccacctatgcctcctggtggatccgccag

SEQ ID NO: 529654 - DNA, 75 bp, synthetic construct
  source 1..75: mol_type = other DNA
ctgaatagttcaggttgtgttttatcaccatttgctcagttcagcaccctgctcggatggctttttattgctgta

SEQ ID NO: 529655 - DNA, 75 bp, synthetic construct
  source 1..75: mol_type = other DNA
aattccttcttctactaaacgtaaaaacctggaaagtaatcttaaggcacaaaatttacagcttgatgccgaaga

SEQ ID NO: 529656 - DNA, 75 bp, synthetic construct
  source 1..75: mol_type = other DNA
aagaaagaaggggaaaaatggagatatgtgggtgatggcatatatgaacgtacatatatggcctaccaagaagga

SEQ ID NO: 529657 - DNA, 75 bp, synthetic construct
  source 1..75: mol_type = other DNA
gagaagttttagtagtggaaggggcggatttacctgtcagtgctttattagttgatgattttggaaatccggtgg

SEQ ID NO: 529658 - DNA, 75 bp, synthetic construct
  source 1..75: mol_type = other DNA
ggagatctctgtcaccagccagaccgccggaatcagtgcggtcactgccagcattaacagcagcagccagagccg

SEQ ID NO: 529659 - DNA, 75 bp, synthetic construct
  source 1..75: mol_type = other DNA
gtgatggctatagcagcaatatatacaatctttaaagtgaaggattggtatgctgataaaattaatgagaaaggt

SEQ ID NO: 529660 - DNA, 75 bp, synthetic construct
  source 1..75: mol_type = other DNA
atgaaacctgagcacctcaagctgctgtccgataaaggctggcggctgaataatctttactggatcaccgacaaa

SEQ ID NO: 529661 - DNA, 75 bp, synthetic construct
  source 1..75: mol_type = other DNA
ttctattgattgtattcatattgtttatggtcattttgttatagaaaaaattccatataaattagatataccagt

SEQ ID NO: 529662 - DNA, 75 bp, synthetic construct
  source 1..75: mol_type = other DNA
gaaggggcggatttacctgtcagtgctttattagttgatgattttggaaatccggtggataacggtctggatttg

SEQ ID NO: 529663 - DNA, 75 bp, synthetic construct
  source 1..75: mol_type = other DNA
ttccagaaacagggtttgatggtgcaaaattcacgctgttactaacccataatatgaaaaatacggattataatt

SEQ ID NO: 529664 - DNA, 75 bp, synthetic construct
  source 1..75: mol_type = other DNA
cacagttagccgctaatggtgtgctgacggtggctggcaccgacccgtcagaaacgggaagctgggttgaatcag

SEQ ID NO: 529665 - DNA, 75 bp, synthetic construct
  source 1..75: mol_type = other DNA
tagcggacctggtggttattaaggacggctcagtggcagacggcgcgacggcgaatacgctgcaggtgaaggtta

SEQ ID NO: 529666 - DNA, 75 bp, synthetic construct
  source 1..75: mol_type = other DNA
ggttcgacggcgaacacgctgcgggcgagggtcacggatgcgttcggtaatacgcttgccgggcagacggtcagc

SEQ ID NO: 529667 - DNA, 75 bp, synthetic construct
  source 1..75: mol_type = other DNA
agccggaacgtcacgtttgtcgccgatgtcagcacggcaaaaatagcggatctggtcgttatccaggataactca

SEQ ID NO: 529668 - DNA, 75 bp, synthetic construct
  source 1..75: mol_type = other DNA
agcggaactgttacatttaaacatttcacagttatattattacaatgaaaacaaaaatattaacccaggcgatct

SEQ ID NO: 529669 - DNA, 75 bp, synthetic construct
  source 1..75: mol_type = other DNA
tgttttgatactggccattgtatcatgactacccgcagagcaaatccggtgataccaagccgttatgacattgtg

SEQ ID NO: 529670 - DNA, 75 bp, synthetic construct
  source 1..75: mol_type = other DNA
gactgcgagaagtggtttaagcctgccaaaggccaattcaagatgtactacaaacgcggtagcgagcatcctgaa

SEQ ID NO: 529671 - DNA, 75 bp, synthetic construct
  source 1..75: mol_type = other DNA
aacacgcgtattagatcgcccagaagacgatgtaaccaaacaaagtgtgcaggttaaatcgaacctagagcagca

SEQ ID NO: 529672 - DNA, 75 bp, synthetic construct
  source 1..75: mol_type = other DNA
ggatctaaaattagcctttaactggtttacccgcgccgcgcagcataatgttatcgatgctctgtatgcgctggg

SEQ ID NO: 529673 - DNA, 75 bp, synthetic construct
  source 1..75: mol_type = other DNA
ggctatctgcgagaaaagcataatgaagaatggcgctgtcgtttttatatcagacttctggatcgcagtgttatt

SEQ ID NO: 529674 - DNA, 75 bp, synthetic construct
  source 1..75: mol_type = other DNA
gcttacatgatcgtcgtcgtttaactcgcataccggctaatatcgaagagcctcacagggttaccagaagcgaat

SEQ ID NO: 529675 - DNA, 75 bp, synthetic construct
  source 1..75: mol_type = other DNA
ctattataaccaacaccctaaaacaaaagctaagtttatcaccacaaaaatctttaacaaaaatacaagatgaag

SEQ ID NO: 529676 - DNA, 75 bp, synthetic construct
  source 1..75: mol_type = other DNA
attagatatattacgagtttgggacattgaagtacatccaaacaagtctaacgaacttgaaaaatgtataacaca

SEQ ID NO: 529677 - DNA, 75 bp, synthetic construct
  source 1..75: mol_type = other DNA
ctcaaattctcccatttgaatggttgacttcatggaaaagcctatttgtagtagctaatcaaactaatattgata

SEQ ID NO: 529678 - DNA, 75 bp, synthetic construct
  source 1..75: mol_type = other DNA
atgttatatatagataaggcaacaattttgaagtttgatctggatatgcttaagaagcatcgtagagcgatccag

SEQ ID NO: 529679 - DNA, 75 bp, synthetic construct
  source 1..75: mol_type = other DNA
attacggcgagtacaccgtcactgtcactggcggcgtagagggcagagcgactctcattcctatgctgaacggtg

SEQ ID NO: 529680 - DNA, 75 bp, synthetic construct
  source 1..75: mol_type = other DNA
agccaaagaaattatggcgagtacaccgtgactgtcactggcggaaaagagggaacagcgacactcattcccatg

SEQ ID NO: 529681 - DNA, 75 bp, synthetic construct
  source 1..75: mol_type = other DNA
cgatatattcagttttaatgaatccggaggcaagatttttgtcggatattccgatgcgtataaattcgcgagaaa

SEQ ID NO: 529682 - DNA, 75 bp, synthetic construct
  source 1..75: mol_type = other DNA
cagtattcgcgagcggttgaacataatgaaagcgagtccacacaacaataatgtctggggggcgacgtataacac

SEQ ID NO: 529683 - DNA, 75 bp, synthetic construct
  source 1..75: mol_type = other DNA
atgagattgattgataaattttctggtggtcttgatgatattttcaaggtgtcagtcgaacctcattccttagat

SEQ ID NO: 529684 - DNA, 75 bp, synthetic construct
  source 1..75: mol_type = other DNA
cagggtggaaggtgaaggctggtcggccataacagaaggagagcacaagctggttaaagccggcgaggaagagca

SEQ ID NO: 529685 - DNA, 75 bp, synthetic construct
  source 1..75: mol_type = other DNA
acttaggtcagaaggcgagctttgaaaaaacaataacagaggcagatgttttaattttttctggtatttctggcg

SEQ ID NO: 529686 - DNA, 75 bp, synthetic construct
  source 1..75: mol_type = other DNA
gggacgcccggaaaaggcataagcaggagaacaacaaaacagacaataatcagggcagcagtaatcagagtcaga

SEQ ID NO: 529687 - DNA, 75 bp, synthetic construct
  source 1..75: mol_type = other DNA
caaagctgtggtaagtattaatcccataaaactagccaccaaagatgcgttgcaacagtttaaagatgtactgcc

SEQ ID NO: 529688 - DNA, 75 bp, synthetic construct
  source 1..75: mol_type = other DNA
tcatcagcaaattgttgtgctccagccaaaacttcgccggggacgacatatacgccaataaaagtgagttgctgt

SEQ ID NO: 529689 - DNA, 75 bp, synthetic construct
  source 1..75: mol_type = other DNA
cacttttttatttgtttcaccgttacttaatcccattatcgtcggactaatgtgggtaacctttggctggaaagt

SEQ ID NO: 529690 - DNA, 75 bp, synthetic construct
  source 1..75: mol_type = other DNA
atgtttcaaattccacatctctagctgagatctttaatgaatgtttttcttgggtaaacgactcaccacatacaa

SEQ ID NO: 529691 - DNA, 75 bp, synthetic construct
  source 1..75: mol_type = other DNA
actggacgatgagaataatcgtctctatttgaccgaaggcttcaacggcagcgtggggattgttgataccgccac

SEQ ID NO: 529692 - DNA, 75 bp, synthetic construct
  source 1..75: mol_type = other DNA
ccctcatcctaatagtctggctttcgatgcggagaaaaaatatctgttcctcaccgtgaagaatgacgaaacgtt

SEQ ID NO: 529693 - DNA, 75 bp, synthetic construct
  source 1..75: mol_type = other DNA
caggtgagctgagggatggaatgaagatagcgaccggccggattatctgccgtgaggcgcataccggttttcata

SEQ ID NO: 529694 - DNA, 75 bp, synthetic construct
  source 1..75: mol_type = other DNA
tccgttaaagagtgaaatagtaatgggggatagtaatacaggaagtgatatttttgatagtgtcggttttcgcgg

SEQ ID NO: 529695 - DNA, 75 bp, synthetic construct
  source 1..75: mol_type = other DNA
atagaatgcaggacagagggataacgccatctgttattgaaaatgtgattaaaaatgggaaatcaactcccagca

SEQ ID NO: 529696 - DNA, 75 bp, synthetic construct
  source 1..75: mol_type = other DNA
ggatggacggaaaatgacattctccgctattgccgcctttcgtctggccggaattatgccagcgagttagaacgc

SEQ ID NO: 529697 - DNA, 75 bp, synthetic construct
  source 1..75: mol_type = other DNA
tcagaagggagttcagcaacctttttatctggttatgaatacatttcttggctgtaacattggcgctgactttta

SEQ ID NO: 529698 - DNA, 75 bp, synthetic construct
  source 1..75: mol_type = other DNA
atgttattgcagatgcggtaatgagtgccgctcgacgctggcttgatgataaacctaaccagtataaccccgtat

SEQ ID NO: 529699 - DNA, 75 bp, synthetic construct
  source 1..75: mol_type = other DNA
gctgggttggcatcagttattcactctcattttcgtggaatgaatctgtagggatccccgataacgaacgtattg

SEQ ID NO: 529700 - DNA, 75 bp, synthetic construct
  source 1..75: mol_type = other DNA
ggacggggaggctggcattttgcatacgacgggggttttctctttacctaaagaagcagaagcgctgacgcaagg

SEQ ID NO: 529701 - DNA, 75 bp, synthetic construct
  source 1..75: mol_type = other DNA
atggacgaagtcaagaaaattgaacattgtaaaattttaaacacagacacacccgataattctgcttcggattta

SEQ ID NO: 529702 - DNA, 75 bp, synthetic construct
  source 1..75: mol_type = other DNA
cttaccggatgtgctgggaaaaaactatatcgaccaccaggattttaacctgttgccggacgccgtcaaaaccct

SEQ ID NO: 529703 - DNA, 75 bp, synthetic construct
  source 1..75: mol_type = other DNA
cgacgctgggggctatcagggactttctcagcctgaaattgccgacattctcaatctatacccggacaatctcac

SEQ ID NO: 529704 - DNA, 75 bp, synthetic construct
  source 1..75: mol_type = other DNA
gatagccaaagttatatcgctttaatggaatattttctttcaggtgagcatggctcaaatgcatttaaagaacac

SEQ ID NO: 529705 - DNA, 75 bp, synthetic construct
  source 1..75: mol_type = other DNA
atgaaaaaagttttattacaaaaccatccagggagtgaaaagtattcttttaacggctgggaaatatttaatatt

SEQ ID NO: 529706 - DNA, 75 bp, synthetic construct
  source 1..75: mol_type = other DNA
ggatattggtgtagttagtgggattctggctctggtgctgtataattttatttttgatctcaaggcgtactgggc

SEQ ID NO: 529707 - DNA, 75 bp, synthetic construct
  source 1..75: mol_type = other DNA
atagtcgccaattctcactcaatactgatggtggatttgtgttacatagcggcgggctgacgttcagtaatgaca

SEQ ID NO: 529708 - DNA, 75 bp, synthetic construct
  source 1..75: mol_type = other DNA
tgatcagcgacgacccgcctgtttataacatctcggcaatcacaaacgcaggttcaaaaataattacacaggtgg

SEQ ID NO: 529709 - DNA, 75 bp, synthetic construct
  source 1..75: mol_type = other DNA
gtgccggggagctgcttcacccggatttacggcacgttaaatgtgctgataaacagctttgaaagtcgttataac

SEQ ID NO: 529710 - DNA, 75 bp, synthetic construct
  source 1..75: mol_type = other DNA
actgaagattgccgagaagtcgcgtcgtaccggtctgacctgggcggaagccgctgacgcggccctcaacggctc

SEQ ID NO: 529711 - DNA, 75 bp, synthetic construct
  source 1..75: mol_type = other DNA
atcagggcactggatatgcgggactggcttgagcgtgttgtactccccgaactgaataagttgccgcaaaacctt

SEQ ID NO: 529712 - DNA, 75 bp, synthetic construct
  source 1..75: mol_type = other DNA
atgttgttgcagatcgatacattgcagccacccctgagctggctgatattcgtgaggcagctttgggtcgcaacc

SEQ ID NO: 529713 - DNA, 75 bp, synthetic construct
  source 1..75: mol_type = other DNA
tcggcataaacggcggcaactcaggtgtacgcgaaggtagctgggatctgggggtagaatggttcccgatgctcg

SEQ ID NO: 529714 - DNA, 75 bp, synthetic construct
  source 1..75: mol_type = other DNA
tatttctggctgctcttttttggctataaatccggcgttgcggctctcggaaaattatccgaacaggcagataag

SEQ ID NO: 529715 - DNA, 75 bp, synthetic construct
  source 1..75: mol_type = other DNA
ttgatgcagaactggacaccgtgcgtgggcgtcttggtagcgtaaaaggcgttaattacgatacggcgatgtgga

SEQ ID NO: 529716 - DNA, 75 bp, synthetic construct
  source 1..75: mol_type = other DNA
gtctcaactcccatcaatatgggcggtgctgcaatcggtagtagtatcaagggagaagatccaactaactcagtt

SEQ ID NO: 529717 - DNA, 75 bp, synthetic construct
  source 1..75: mol_type = other DNA
aagcaggaggcggttctgcagcagatgatgagtcgtcagcctgggtttttggctctgcccggtcagaaggcaaaa

SEQ ID NO: 529718 - DNA, 75 bp, synthetic construct
  source 1..75: mol_type = other DNA
cagttagccggtgaacatccccagctgcaggaaacaaacgctgaaaatggcaacgtggcgcaggaatatcaggac

SEQ ID NO: 529719 - DNA, 75 bp, synthetic construct
  source 1..75: mol_type = other DNA
tgaacaactggatgaggtactcaaggcggtcacaccactgaccacgtggggcggtaaggttcgccttatctctac

SEQ ID NO: 529720 - DNA, 75 bp, synthetic construct
  source 1..75: mol_type = other DNA
gactacgataaattactcaggatcgaattcgaaagcataaccattagattaaaagaagttggtggctcacgtagg

SEQ ID NO: 529721 - DNA, 75 bp, synthetic construct
  source 1..75: mol_type = other DNA
ctgcgttataactattcctttaggatttttattttcagattatctttcaacatggctgtttgaaacaaaagaatt

SEQ ID NO: 529722 - DNA, 75 bp, synthetic construct
  source 1..75: mol_type = other DNA
ttccactttttcaattacatggcgcgaattatgcctatcttctaagttatagtttatatggtgtagtaattataa

SEQ ID NO: 529723 - DNA, 75 bp, synthetic construct
  source 1..75: mol_type = other DNA
ccactctagaggcttaattggcatgttgaaattaatatgcataggctctgtgtgcttaattctaattggtgtaat

SEQ ID NO: 529724 - DNA, 75 bp, synthetic construct
  source 1..75: mol_type = other DNA
ttttcacttggtgctgaaaatattagcttgaaaccaacagctcttttatgttcatttaccatggttgaagtgctt

SEQ ID NO: 529725 - DNA, 75 bp, synthetic construct
  source 1..75: mol_type = other DNA
gcacagattatttttgccactcattctcctgatatagtaggcgttgctcaagatgctattattgacatggaggat

SEQ ID NO: 529726 - DNA, 75 bp, synthetic construct
  source 1..75: mol_type = other DNA
agcaatcccctttggctcgccaggcatgtgaaatcgcactcgcagcccaccagcaaagatacggcgactatgggc

SEQ ID NO: 529727 - DNA, 75 bp, synthetic construct
  source 1..75: mol_type = other DNA
tgaaaaactggacgagctgctgaaggctgtgctgccgctgaaaacatggggcggcaaaattcgccttatttccac

SEQ ID NO: 529728 - DNA, 75 bp, synthetic construct
  source 1..75: mol_type = other DNA
tgagctgatccttccgaagcatgaagacgtgatcaatgacctcggggccattcagttactgcgtggcgttcccgg

SEQ ID NO: 529729 - DNA, 75 bp, synthetic construct
  source 1..75: mol_type = other DNA
aagaaggtctggcaagggcaaaggctgagggtaaaaagttaggccgtccggcggctaaggatactattaagcgag

SEQ ID NO: 529730 - DNA, 75 bp, synthetic construct
  source 1..75: mol_type = other DNA
gaatattcctctggatatccgacaaaataacagtagtggcgacgatgatatccctcatcttacttcactggcaga

SEQ ID NO: 529731 - DNA, 75 bp, synthetic construct
  source 1..75: mol_type = other DNA
catcaaaaccctgccgccggtaaagctggatgagaaaacgcagtttattggtgtcgtggcctatttctccgatga

SEQ ID NO: 529732 - DNA, 75 bp, synthetic construct
  source 1..75: mol_type = other DNA
ggaccgttataacccggcagaccaagacagttcgtgctggatccgtgtggcacaggcgtgggcaggcaccggttt

SEQ ID NO: 529733 - DNA, 75 bp, synthetic construct
  source 1..75: mol_type = other DNA
actcatttccatgaggaactttatgatttatgctctttttttgcagatgtcgctcgggaatacgatatgcaaata

SEQ ID NO: 529734 - DNA, 75 bp, synthetic construct
  source 1..75: mol_type = other DNA
ctgcagctaaaggcgtagccagtgttgccataggaccatcagcatctactggtcgtgatggatatggtagcgcct

SEQ ID NO: 529735 - DNA, 75 bp, synthetic construct
  source 1..75: mol_type = other DNA
ccgatctggcctgggcaaccatgcacgcactgtttaacgaaccgctgcagggcgagtccgccaataccagcaata

SEQ ID NO: 529736 - DNA, 75 bp, synthetic construct
  source 1..75: mol_type = other DNA
acatggaatttgatagccctatgatggttaccactcaaaatatgcaatcagggcagactgtaacagataatgtaa

SEQ ID NO: 529737 - DNA, 75 bp, synthetic construct
  source 1..75: mol_type = other DNA
ccacgcgcggatcggcaagtttaacaatggcggcaacgaagccgacttaaaccctaacgttgccaaccgcaacaa

SEQ ID NO: 529738 - DNA, 75 bp, synthetic construct
  source 1..75: mol_type = other DNA
ggaccagccgattattatggggcgtacctaccaccaggaaaaccgcacacccggcagcctgccggggacgaagac

SEQ ID NO: 529739 - DNA, 75 bp, synthetic construct
  source 1..75: mol_type = other DNA
tggtggtgctaccagtaaaaagaatacaggtaacgtgaccactgaacgcaataacgcgcctatgctatcgtgcaa

SEQ ID NO: 529740 - DNA, 75 bp, synthetic construct
  source 1..75: mol_type = other DNA
gtgcatgcacgccattatcaatgaaccactggaaagctctggcggcgcgaacagcgggcggggcttaattaaggt

SEQ ID NO: 529741 - DNA, 75 bp, synthetic construct
  source 1..75: mol_type = other DNA
atttctgcatgaagtacgaccgcgacgaattcatggatatgaccttgcggcattacgacaagctgatgatcggaa

SEQ ID NO: 529742 - DNA, 75 bp, synthetic construct
  source 1..75: mol_type = other DNA
atggacggtattgatacagatcgcacgtatcaccttcgcaaggcgcttgagtatggtcgtggattcgcagcacag

SEQ ID NO: 529743 - DNA, 75 bp, synthetic construct
  source 1..75: mol_type = other DNA
cttttacccctacgggaacgcgtaaattgttttgggagcacgaatgtaaagaatggctgtacagaacagaacgat

SEQ ID NO: 529744 - DNA, 75 bp, synthetic construct
  source 1..75: mol_type = other DNA
accgacatagcgcagtcattcatggcaatccggcgcgccaccaccgcgagcggcaaccgcccaacctatgaagcc

SEQ ID NO: 529745 - DNA, 75 bp, synthetic construct
  source 1..75: mol_type = other DNA
tgatgtggtgcaaggaaataatatagtagatcttgatttactacgtaatttcaatggggtgccaggtttaaacag

SEQ ID NO: 529746 - DNA, 75 bp, synthetic construct
  source 1..75: mol_type = other DNA
cacctttgcaccatgctttccttcccccgcgaagccaccctttacccggggattacacaggtaatcgaagcctgt

SEQ ID NO: 529747 - DNA, 75 bp, synthetic construct
  source 1..75: mol_type = other DNA
tttcaggaaattaactttaaagctattgttggtcagactgatatttctgctgctactggaaagacagctactaca

SEQ ID NO: 529748 - DNA, 75 bp, synthetic construct
  source 1..75: mol_type = other DNA
actattatcgtttactgcagcgcatcatcttgggtaatgcgcaagccttacataaaacgcttccctggcttgacg

SEQ ID NO: 529749 - DNA, 75 bp, synthetic construct
  source 1..75: mol_type = other DNA
tgaagcaatcatgcgcgttcagcagaaaaatatagacggttcgattttctccaatgcattctttttgctggtcaa

SEQ ID NO: 529750 - DNA, 75 bp, synthetic construct
  source 1..75: mol_type = other DNA
atttttttaaatataaaacaacggaacgaaaaaaatcatgcaataaatatgtttcgtgaagtctcaattagtaat

SEQ ID NO: 529751 - DNA, 75 bp, synthetic construct
  source 1..75: mol_type = other DNA
tcacaagaaatggcgacagacctatttttccacgccatccagcctgacccacagtgcttatccgttctggtccgg

SEQ ID NO: 529752 - DNA, 75 bp, synthetic construct
  source 1..75: mol_type = other DNA
ggttaccactcaaaatatgcaatcagggcaaaccgtcacagataatgttcaaagagcacccagaacaattactat

SEQ ID NO: 529753 - DNA, 75 bp, synthetic construct
  source 1..75: mol_type = other DNA
gggcaaaccgtcacagataatgttcaaagagcacccagaacaattactattagtggtgtggttgtggttggtgaa

SEQ ID NO: 529754 - DNA, 75 bp, synthetic construct
  source 1..75: mol_type = other DNA
cgccgacttcgttgtcttttaaacacgccgatctgtcaggtttaagctataagaatgccaggcttgaacttaccc

SEQ ID NO: 529755 - DNA, 75 bp, synthetic construct
  source 1..75: mol_type = other DNA
cttatcatgcctacaagtctgtgccgaaccgtaggccggataaggcgtttacgccgcatccggcagttggcgcac

SEQ ID NO: 529756 - DNA, 75 bp, synthetic construct
  source 1..75: mol_type = other DNA
cctgctgtgcgcagacgggcaataccgccagatagtcaccgtggaagatgcggtacgcggcggctgtaacctgtt

SEQ ID NO: 529757 - DNA, 75 bp, synthetic construct
  source 1..75: mol_type = other DNA
tctaaagatgttactatctctaacggtcttcgtatccaactaacatttcaggaaattaacttcaaagccattgta

SEQ ID NO: 529758 - DNA, 75 bp, synthetic construct
  source 1..75: mol_type = other DNA
gaatggggcaaccagcttaatgaggagaacccgcatcacctgcaccagccgtaccggatgccggggcagcagtat

SEQ ID NO: 529759 - DNA, 75 bp, synthetic construct
  source 1..75: mol_type = other DNA
cgtgacgttatggagcgtcagcgaacaggtggcgcaaagccgcacccaggcggagaaacagttcttaacgttgtt

SEQ ID NO: 529760 - DNA, 75 bp, synthetic construct
  source 1..75: mol_type = other DNA
ctatgctgtcggttacgaaagctatcccatttcagtcgggaatattcgcggatgtttggagagtcacccaagaga

SEQ ID NO: 529761 - DNA, 75 bp, synthetic construct
  source 1..75: mol_type = other DNA
accttgtgggtgtcatgcagaagtacgaccgcggccgatgcatttcgcgccatgcccaacgtgcgcgtgtatcag

SEQ ID NO: 529762 - DNA, 75 bp, synthetic construct
  source 1..75: mol_type = other DNA
cggtcggcgtatccgccgccctgggggccttcctcgccgggatggtgctgggcgagagcgacttccggcaccaca

SEQ ID NO: 529763 - DNA, 75 bp, synthetic construct
  source 1..75: mol_type = other DNA
aatggcaatttgcgcccggaccaggccgcaggggtgaaactctgcggcctttttcgtaagaaaaatgcaacggtt

SEQ ID NO: 529764 - DNA, 75 bp, synthetic construct
  source 1..75: mol_type = other DNA
tgattttactcgtgtacggctagaggtgacatcaatcagaaactttcttggtgtcattaaaaaatatagtcttca

SEQ ID NO: 529765 - DNA, 75 bp, synthetic construct
  source 1..75: mol_type = other DNA
acagcctcagctaatgagcaagcttcaaaggtgcttaagtcgggtaatgctttacggaagtactctgtgaatccg

SEQ ID NO: 529766 - DNA, 75 bp, synthetic construct
  source 1..75: mol_type = other DNA
ttaagggtgcggtaatgagcgcggctcgtcgctggctggatgataaaccaaaccagtatagcccactaaagcagg

SEQ ID NO: 529767 - DNA, 75 bp, synthetic construct
  source 1..75: mol_type = other DNA
aataaggcgtcatcaggcccagcgacaggaaataatggaaatcatggatatattcttgtgtgggagtatcagtaa

SEQ ID NO: 529768 - DNA, 75 bp, synthetic construct
  source 1..75: mol_type = other DNA
aataactgtggtgtaagtgctgccggttccaacggggcatatgctaaagcatttttttatcagtctatacctgaa

SEQ ID NO: 529769 - DNA, 75 bp, synthetic construct
  source 1..75: mol_type = other DNA
ggcttttgggggttcaggtatttggatcatctgggacttatcacaaatcacctggtgtaacgaaaattatagtgg

SEQ ID NO: 529770 - DNA, 75 bp, synthetic construct
  source 1..75: mol_type = other DNA
acactggcaaagatggcgtttactttcatctacaaggccagccagataatttcttgtcactatcagctactgaga

SEQ ID NO: 529771 - DNA, 75 bp, synthetic construct
  source 1..75: mol_type = other DNA
aaaagaagctgctggccgttgtgacctcgttgaaaccgataatagttgtgtggagaactgtttaaaagggaagtt

SEQ ID NO: 529772 - DNA, 75 bp, synthetic construct
  source 1..75: mol_type = other DNA
gtaaagatggtattaaaattgatgattccattattacaagttttaaagcctctaaagatgttactatctctaacg

SEQ ID NO: 529773 - DNA, 75 bp, synthetic construct
  source 1..75: mol_type = other DNA
gctggcagctggtgccattcgcgcatttcatgaagccggattgtggaaccactttcaggaaatcgccttcgatat

SEQ ID NO: 529774 - DNA, 75 bp, synthetic construct
  source 1..75: mol_type = other DNA
ttatatcaccgcgagaatgaaccttgccagtaagttgctcagaaccggtaaatacagcgttaccaatgtggcagt

SEQ ID NO: 529775 - DNA, 75 bp, synthetic construct
  source 1..75: mol_type = other DNA
ataaacagtggaaactggatgatgtgtcctcagctatttttatgagtgcctccactctcaaaagaaaactggcca

SEQ ID NO: 529776 - DNA, 75 bp, synthetic construct
  source 1..75: mol_type = other DNA
agaagctgaaaaaaccaacgtcaccaatgctaatagtaacgctggtcgagtagcttcaaagcttaaaaagtactc

SEQ ID NO: 529777 - DNA, 75 bp, synthetic construct
  source 1..75: mol_type = other DNA
ctgtacacccccacatgttgcggcatgcctgtggttatgcgctggccgataatggtattgacacacgattaatcc

SEQ ID NO: 529778 - DNA, 75 bp, synthetic construct
  source 1..75: mol_type = other DNA
aaacgcgtctggcggtttacacctacgaggctgattaccttgaaatggaagttcatatgccagagcttctggctg

SEQ ID NO: 529779 - DNA, 75 bp, synthetic construct
  source 1..75: mol_type = other DNA
cagaagagaaaggtgctgataaaaagaaagctgacaaggcaaccctgcaggtaaatctttccgtcagcagttgtg

SEQ ID NO: 529780 - DNA, 75 bp, synthetic construct
  source 1..75: mol_type = other DNA
gcggcaccaacgatatcgtcacgttctctaccgagttcaaagtgggcgatgccagcaccatcgaagttaacgaag

SEQ ID NO: 529781 - DNA, 75 bp, synthetic construct
  source 1..75: mol_type = other DNA
agcgccgggaggtggccccggtattgcgtggatgcaggggatgcagattgtcaacggtgggcagactacggcttc

SEQ ID NO: 529782 - DNA, 75 bp, synthetic construct
  source 1..75: mol_type = other DNA
gccacgcgacgaactgcaggttaattttgatgaggtggcggggggcgcactcccctgtgtctggatcccggatga

SEQ ID NO: 529783 - DNA, 75 bp, synthetic construct
  source 1..75: mol_type = other DNA
tatgtctcgcgtgccggattttacgtttcgacgcagccgaccttgtttatgcgcaatgtcccgacgcgttattac

SEQ ID NO: 529784 - DNA, 75 bp, synthetic construct
  source 1..75: mol_type = other DNA
accagagctggttgaaaaaactcgcacgccgcctggggcctggtcatatcgttaatctctgctttatcgtggcat

SEQ ID NO: 529785 - DNA, 75 bp, synthetic construct
  source 1..75: mol_type = other DNA
cgaaaatgaaagcctcgacaatgaaattaccgctgcactggaagttggttacttgctgcgactagcgcacaactc

SEQ ID NO: 529786 - DNA, 75 bp, synthetic construct
  source 1..75: mol_type = other DNA
acaatacagctcataataagaatctcgataaaacaacgctcgatgaacaacctggttatgaaacaagagtatctc

SEQ ID NO: 529787 - DNA, 75 bp, synthetic construct
  source 1..75: mol_type = other DNA
ggtgcagaacttgcgaagcccgcgggaaagatagatgatatcgcagaaaaccaggaacaaaatacagacaaacca

SEQ ID NO: 529788 - DNA, 75 bp, synthetic construct
  source 1..75: mol_type = other DNA
acaaatactaaatttattagtctgatagagtctgtccgtgctctctctcctgaattacaatgtaaggtactagat

SEQ ID NO: 529789 - DNA, 75 bp, synthetic construct
  source 1..75: mol_type = other DNA
gtttgcttctttgtgttaagtggcatggtaataccttacagcctaaaggaagggaaaagagcgatatccgggttc

SEQ ID NO: 529790 - DNA, 75 bp, synthetic construct
  source 1..75: mol_type = other DNA
atggacacagattttaattttattatttttgttttatacctattagctacgatcgcactagcaactatttcttat

SEQ ID NO: 529791 - DNA, 75 bp, synthetic construct
  source 1..75: mol_type = other DNA
gtgcaatacgaatggcgaaaagccgagctcatcggtcagcttctcaaccttggggttacccccggcggtgtgctg

SEQ ID NO: 529792 - DNA, 75 bp, synthetic construct
  source 1..75: mol_type = other DNA
cacggctcgtcgacagcggcaagatcgacgaagccaaagcagagctcgcccgagcactgaacacgctggtggtca

SEQ ID NO: 529793 - DNA, 75 bp, synthetic construct
  source 1..75: mol_type = other DNA
agatttaaaaataaaaaagctcacttattgtttttaagggaaattacatcgtggttgatacagttatttattgcg

SEQ ID NO: 529794 - DNA, 75 bp, synthetic construct
  source 1..75: mol_type = other DNA
aaaaggccatcctgacggatggcctttcgctttatttgatgcctggcagtttatggcgggcgtcctgcccgccac

SEQ ID NO: 529795 - DNA, 75 bp, synthetic construct
  source 1..75: mol_type = other DNA
gaaaatgacacaaaacaagaacaacttagtaaattagaaaaagaaaaagatagtatcaataagcaaattgctgat

SEQ ID NO: 529796 - DNA, 75 bp, synthetic construct
  source 1..75: mol_type = other DNA
gtcgctgatggcagacgtcgacgactacggcgaatggaaaaccggtaaacgcatcaccggcatcagcttctccgg

SEQ ID NO: 529797 - DNA, 75 bp, synthetic construct
  source 1..75: mol_type = other DNA
tgtcgatcacggctatgtccatgagatcgacaactttgaatttatcgacggtgttattgacgccatgcgcgagct

SEQ ID NO: 529798 - DNA, 75 bp, synthetic construct
  source 1..75: mol_type = other DNA
tgttattgtaagcggtgagtcatcggttaaggcaaacagtgcggttaacaccaatatatcatatgctgatatttc

SEQ ID NO: 529799 - DNA, 75 bp, synthetic construct
  source 1..75: mol_type = other DNA
caataaattgcaaattgcattatcaacttcctgcacagccagaaacacttggaagtacaaacaccttattattaa

SEQ ID NO: 529800 - DNA, 75 bp, synthetic construct
  source 1..75: mol_type = other DNA
taaatcagccgttgagttttgcttatgaggattacggttcactctttttatctggcagctggacaaactactggg

SEQ ID NO: 529801 - DNA, 75 bp, synthetic construct
  source 1..75: mol_type = other DNA
taatgggtgagagtactcagtttgcaaccctctttattagcctcggcgttgtcggaatgatgatcggcagtatgt

SEQ ID NO: 529802 - DNA, 75 bp, synthetic construct
  source 1..75: mol_type = other DNA
cgtgatggatttcctggtccgcgcaggcgaacagggttacagcgtgccgacagacgccattaaccggggtaatga

SEQ ID NO: 529803 - DNA, 75 bp, synthetic construct
  source 1..75: mol_type = other DNA
gccggtcaatcacgtcaatattgtcgcgcagcaggcgctgccggtaacgctcaacgaacagggcgaaggctcggt

SEQ ID NO: 529804 - DNA, 75 bp, synthetic construct
  source 1..75: mol_type = other DNA
tggaaaaccggtgccggcgaaattatcgatgtgtcattcagtgatgtggcaaccgggaacacccaccacctttac

SEQ ID NO: 529805 - DNA, 75 bp, synthetic construct
  source 1..75: mol_type = other DNA
caatagtagatgaaaacggtaatattattgatgaaacttactggcagaccaattccgtatatctgatggggggcg

SEQ ID NO: 529806 - DNA, 75 bp, synthetic construct
  source 1..75: mol_type = other DNA
gtgcaggtaacaggaaataataccgtcaatataagtggtcattccgtaatgaatacccgacagatattgggatcc

SEQ ID NO: 529807 - DNA, 75 bp, synthetic construct
  source 1..75: mol_type = other DNA
gggagttcgggtacgctcagcgcgaataacctggttattggcgacaacgtgagtgttaacgccgggtttagtgca

SEQ ID NO: 529808 - DNA, 75 bp, synthetic construct
  source 1..75: mol_type = other DNA
cgtcatgccctcgtggtcaggtctggacgacgagccgttcgatcctgccacgtcgcccgttacaccagaccttgg

SEQ ID NO: 529809 - DNA, 75 bp, synthetic construct
  source 1..75: mol_type = other DNA
gaacacctggactggcaagattatgcactgttgctgctcagcagcatgcctgagaaaacggctgaacattaccgt

SEQ ID NO: 529810 - DNA, 75 bp, synthetic construct
  source 1..75: mol_type = other DNA
tctcgttttatcaacccggaatgaccttcgaacaattcgtgcgtgaatttgccgattggttttcgcaaaaacgtc

SEQ ID NO: 529811 - DNA, 75 bp, synthetic construct
  source 1..75: mol_type = other DNA
cttcgaacaatttgtacgtgagtttgccgaatggttttcacaaaaacgtccggcggcgatgatgatcggcatccg

SEQ ID NO: 529812 - DNA, 75 bp, synthetic construct
  source 1..75: mol_type = other DNA
gtgacagataaaccagtagtaccagcgaagcaggtaaaaacggttaataccggcatcgcaatcaaagaaaatccc

SEQ ID NO: 529813 - DNA, 75 bp, synthetic construct
  source 1..75: mol_type = other DNA
tgaatgggttcgacagccaccagaagatgcgataaccgacccggcatttttctcgttttatcaatcgggtatgac

SEQ ID NO: 529814 - DNA, 75 bp, synthetic construct
  source 1..75: mol_type = other DNA
agaccgtatcacctggacacttaatactctgcctcgcgtatgcgtctctttttctggtggtaaagattctggctt

SEQ ID NO: 529815 - DNA, 75 bp, synthetic construct
  source 1..75: mol_type = other DNA
tggcggttactctggagctggcccgcgcaatggggctgcgttcacaggaagcggtacagtgctgtcagtcactga

SEQ ID NO: 529816 - DNA, 75 bp, synthetic construct
  source 1..75: mol_type = other DNA
aaatactgtcacggaaagtgcaggcctggatgtgatggaaatcatgtttccggcgcatcctgttgatatggataa

SEQ ID NO: 529817 - DNA, 75 bp, synthetic construct
  source 1..75: mol_type = other DNA
tagcaaagaataagattaataccttatccgaggaagagttacataaaatattttcgtatacacatgcaacaatgg

SEQ ID NO: 529818 - DNA, 75 bp, synthetic construct
  source 1..75: mol_type = other DNA
ggctgagtataaaggaagccagggcgatggttgcgatggatcttggtcatggcgatggtcgagggcgctacatcc

SEQ ID NO: 529819 - DNA, 75 bp, synthetic construct
  source 1..75: mol_type = other DNA
ccatccggtcacgaagacggcggacaaatgcgatttctgccgtaagaccaatttgcaggccggtaagctgcccgc

SEQ ID NO: 529820 - DNA, 75 bp, synthetic construct
  source 1..75: mol_type = other DNA
tttggcaccaaaggttcacgcccccgaaagacactggtgctggagccagaacgcttacgggagatcctgagccgg

SEQ ID NO: 529821 - DNA, 75 bp, synthetic construct
  source 1..75: mol_type = other DNA
atccgtatcgctggagaaaacggttttcctgcatggtctgaaattccaccaccaacacatgaggaacagattgct

SEQ ID NO: 529822 - DNA, 75 bp, synthetic construct
  source 1..75: mol_type = other DNA
tctacgaaacactaaagtgattgatattatttcagagttaaaagaatacaatatcaatatagatattatagatcc

SEQ ID NO: 529823 - DNA, 75 bp, synthetic construct
  source 1..75: mol_type = other DNA
tctttgtttcaatactgcttgccgatttgatgcaccgtaaacaactagtggaaagagataaggtgacctctaaag

SEQ ID NO: 529824 - DNA, 75 bp, synthetic construct
  source 1..75: mol_type = other DNA
taatcctgacagtaaaacctgataatttttggctggtagattcaccgatcatggacgttggcatgattcgatact

SEQ ID NO: 529825 - DNA, 75 bp, synthetic construct
  source 1..75: mol_type = other DNA
accgccgcccgctggttctgtcgccagaagctgcgcgggaatggatgcggcaagacattggcggtaaagaagcct

SEQ ID NO: 529826 - DNA, 75 bp, synthetic construct
  source 1..75: mol_type = other DNA
atggcaagttttcagaatgggttaaacttagtgatcttagcagtgaaaggccatcagatcctgctgaaaatgcga

SEQ ID NO: 529827 - DNA, 75 bp, synthetic construct
  source 1..75: mol_type = other DNA
tattgtaactgttccaactccaattgataaacataaacagccagatctaacacctctaattaaagcatctgaaac

SEQ ID NO: 529828 - DNA, 75 bp, synthetic construct
  source 1..75: mol_type = other DNA
agtaaaacgccacgactcattgatatctggcaacaacttaagcagctttatccgccagaaactattccccacgcc

SEQ ID NO: 529829 - DNA, 75 bp, synthetic construct
  source 1..75: mol_type = other DNA
ccagcagtgtggaaattgtgttatccgtgccatatgtcaccacatcaggacagacgatcacccacgtcaccatgc

SEQ ID NO: 529830 - DNA, 75 bp, synthetic construct
  source 1..75: mol_type = other DNA
tgggattatagttataacaaggaagaaaattaaaatgggcgactcagtaaaatatataaaacttgatgatagagt

SEQ ID NO: 529831 - DNA, 75 bp, synthetic construct
  source 1..75: mol_type = other DNA
taatgcgtggatcacaacgctggagtttccactgctcattcgtagctactggatgccggaggacgcagaccccga

SEQ ID NO: 529832 - DNA, 75 bp, synthetic construct
  source 1..75: mol_type = other DNA
gtgagtgccggaagagtgaagttatgcagcgtgtactggcgttctatcagggagattttcaggaggtgatggagt

SEQ ID NO: 529833 - DNA, 75 bp, synthetic construct
  source 1..75: mol_type = other DNA
tctggcaacaacttcagcggctttatccgccaaacattattccctgcacccagcagttacccgctaaagaattgc

SEQ ID NO: 529834 - DNA, 75 bp, synthetic construct
  source 1..75: mol_type = other DNA
gggcagtttcagctgttgttgataagagaactggcaaaatatattatggagaaagtggctggcctcacccaacag

SEQ ID NO: 529835 - DNA, 75 bp, synthetic construct
  source 1..75: mol_type = other DNA
ctctgggttggcaatgacttcgaaaatagtcaataaactaccttctgcaaaagatcttgctacaaaaagggccag

SEQ ID NO: 529836 - DNA, 75 bp, synthetic construct
  source 1..75: mol_type = other DNA
gatttcatgataagacacaaaaaaatgcttgggttatctgatgaggatgtagcaatactcaaaatattgaaagac

SEQ ID NO: 529837 - DNA, 75 bp, synthetic construct
  source 1..75: mol_type = other DNA
aattaccgccggtattctgttaaaacagcttgataatgttacgcaaattgtcaaacatacgacaaagcttacttc

SEQ ID NO: 529838 - DNA, 75 bp, synthetic construct
  source 1..75: mol_type = other DNA
tgagacgctgacgttcagccgtgatgaggcgggacgtgaagtgctccggcacagtaaccggggttttgcctgtga

SEQ ID NO: 529839 - DNA, 75 bp, synthetic construct
  source 1..75: mol_type = other DNA
tgggcaatcgagaactgtgcggaatttaaagctgtaaatgaagctttgaaggcaaatgcgaaaattagtgatctt

SEQ ID NO: 529840 - DNA, 75 bp, synthetic construct
  source 1..75: mol_type = other DNA
attacacaatggtaaatatgttcagataaatcatcgaacacttgctaatctaataaaaaaatcaggccattcagg

SEQ ID NO: 529841 - DNA, 75 bp, synthetic construct
  source 1..75: mol_type = other DNA
ttatatgaggtatatcatgaggtaaaaaatgttaacaagggagttggcctggtgggagataatggtatcgtcctg

SEQ ID NO: 529842 - DNA, 75 bp, synthetic construct
  source 1..75: mol_type = other DNA
aactggccggaaacactcaccgacgtgatgggccgcgaacaccacaccgaatacagcggtcacgacctgccggtg

SEQ ID NO: 529843 - DNA, 75 bp, synthetic construct
  source 1..75: mol_type = other DNA
agccggaaaccggaatgtacctggtgagtgatccgctggggttgctggggggtgagcagacttaccggtatgtgc

SEQ ID NO: 529844 - DNA, 75 bp, synthetic construct
  source 1..75: mol_type = other DNA
atacgaacaaatattatgctgatgttgaggcacgactcgcagacgcagctaaggctaatgggaaacaaggtgttc

SEQ ID NO: 529845 - DNA, 75 bp, synthetic construct
  source 1..75: mol_type = other DNA
ggattggtagaagccaaagtggaacaaatcctgcgacgaatcaaggctatggttgggagtatggttctcctgatg

SEQ ID NO: 529846 - DNA, 75 bp, synthetic construct
  source 1..75: mol_type = other DNA
ttccaaatatgttcttcagttagcggtttcaaaaaaatgaatgttaacgatgtttacggtacgagctttcacaat

SEQ ID NO: 529847 - DNA, 75 bp, synthetic construct
  source 1..75: mol_type = other DNA
gccagcgtgacgattcatacgtcaccagcatattctgctaataagccggaagggttaacggacggtacagtttat

SEQ ID NO: 529848 - DNA, 75 bp, synthetic construct
  source 1..75: mol_type = other DNA
atgaagcgacaggaagcgaagaaacactcagggcggttaccttctgcccgtaaggtgaatggtaaggcgctttca

SEQ ID NO: 529849 - DNA, 75 bp, synthetic construct
  source 1..75: mol_type = other DNA
gcaaatagtgccggtgcgcaccaacacaagagttccggtgcatttggtggcacgaacacgagcattttccctaat

SEQ ID NO: 529850 - DNA, 75 bp, synthetic construct
  source 1..75: mol_type = other DNA
accaccgggccgattgcgcgcacgaataccagttatgacggcacagatcgccgtaaccgccatgataattggcag

SEQ ID NO: 529851 - DNA, 75 bp, synthetic construct
  source 1..75: mol_type = other DNA
tcacacccatgaggtgcttcaggatgacagcaagtgcgagatgattgttggcattgaccacttcatgactgcctc

SEQ ID NO: 529852 - DNA, 75 bp, synthetic construct
  source 1..75: mol_type = other DNA
tgtctggtactgcagcaagttctggcgcacatgcacatactgtaggtattggtgcgcatacgcactccgttgcga

SEQ ID NO: 529853 - DNA, 75 bp, synthetic construct
  source 1..75: mol_type = other DNA
tcaacggcactatcgacaacgaaaccactcttctagttaacgctcgtgatctacactcttttcttggtgtgggca

SEQ ID NO: 529854 - DNA, 75 bp, synthetic construct
  source 1..75: mol_type = other DNA
atgtacaaagctggaaagtgaaaaagccgtttcaccttgggataaatattgccgcggaacatcttgcacatcctg

SEQ ID NO: 529855 - DNA, 75 bp, synthetic construct
  source 1..75: mol_type = other DNA
atgatttcggattttacgaaagtcctgatgaaaggctgcgctactgcactcacggatttaattgttattcctaat

SEQ ID NO: 529856 - DNA, 75 bp, synthetic construct
  source 1..75: mol_type = other DNA
gtaaatagtaaaaggagtgcatcatccagaaatcttaatatcctattttctaccgctggatttaagcctaaaaag

SEQ ID NO: 529857 - DNA, 75 bp, synthetic construct
  source 1..75: mol_type = other DNA
gagcgggcatagttgcagaaaataactatcatgtccatctattttctgacgatatggtcattatatcctctcggg

SEQ ID NO: 529858 - DNA, 75 bp, synthetic construct
  source 1..75: mol_type = other DNA
gaaagcctggactatattttgatttgccaaaatgggcaaaccaaaggtcgaggaggtgatcgccgccgcaaggac

SEQ ID NO: 529859 - DNA, 75 bp, synthetic construct
  source 1..75: mol_type = other DNA
tgatataacacttaataaaacaaaaccatcagcagtggatatatattcagatgtgtttggtgggattgatattaa

SEQ ID NO: 529860 - DNA, 75 bp, synthetic construct
  source 1..75: mol_type = other DNA
atgccagtatttttggcttgaccaattggttgctgaaacagaatgcctcagatacggatatcgatccgttacgga

SEQ ID NO: 529861 - DNA, 75 bp, synthetic construct
  source 1..75: mol_type = other DNA
tatctggcacaggcgcaatgggttcaggaaccacctgaatgtctgggtcagttgctcgacgggggacgcagatta

SEQ ID NO: 529862 - DNA, 75 bp, synthetic construct
  source 1..75: mol_type = other DNA
taaagctatccattttgcgaaacatgcgaacagaagcatcttttctaagcatttttggtggcacgtaagtagtat

SEQ ID NO: 529863 - DNA, 75 bp, synthetic construct
  source 1..75: mol_type = other DNA
gtcctggccccaccagcaaagccgactgtctgaacaacgtgctggacgccatcacccaatttgaacgtagcgcca

SEQ ID NO: 529864 - DNA, 75 bp, synthetic construct
  source 1..75: mol_type = other DNA
tgagcctgcgctgatttgtctgttaaccgcagaatgtcagaagaaaaagggctttagtgatgcttatcaggccgc

SEQ ID NO: 529865 - DNA, 75 bp, synthetic construct
  source 1..75: mol_type = other DNA
tctctcgccagtcgtaatcttgtctttgcactgtcggctacgtcatatattgaaagagcctgtaatcacttcgat

SEQ ID NO: 529866 - DNA, 75 bp, synthetic construct
  source 1..75: mol_type = other DNA
cggtaacgatagcgcattcatcaatatgggggacatcagcgtcagtgatggctcagccagtgaaaacgcaatcgg

SEQ ID NO: 529867 - DNA, 75 bp, synthetic construct
  source 1..75: mol_type = other DNA
gtcgctttatcaacgatggaacgattgatgtctctgctaagtcgctggtggttagcgccagtaatgctggggatc

SEQ ID NO: 529868 - DNA, 75 bp, synthetic construct
  source 1..75: mol_type = other DNA
gtttatcctcgataacaacaagaatgctgtacatattaatcagtccggtacgctttataacactggtcacatgga

SEQ ID NO: 529869 - DNA, 75 bp, synthetic construct
  source 1..75: mol_type = other DNA
gtgtgttatttactgaaacactagtgttgatttctagattaggtttatatttctatcttattctcaagaatgata

SEQ ID NO: 529870 - DNA, 75 bp, synthetic construct
  source 1..75: mol_type = other DNA
cacttatcttcttgaaaaagcgcgcgagaaatcgaacgccaaaatgattgttatcgatccgcgggtaatgactcc

SEQ ID NO: 529871 - DNA, 75 bp, synthetic construct
  source 1..75: mol_type = other DNA
cgcaggcagtcagcactttaatgtcgatgacggtcagaagggcggcggcatcaacagcctggcaagcgtcggcgt

SEQ ID NO: 529872 - DNA, 75 bp, synthetic construct
  source 1..75: mol_type = other DNA
taaaataaaatttattggaaattggaatggcagcgagttcggaaagaaacttaggctgcattattctaactatcc

SEQ ID NO: 529873 - DNA, 75 bp, synthetic construct
  source 1..75: mol_type = other DNA
tacgggaataccgttacgacagcgcgggtaacgtatcaggcgtcaccagccgggaagattacggacgggaaacac

SEQ ID NO: 529874 - DNA, 75 bp, synthetic construct
  source 1..75: mol_type = other DNA
cactcccctgccgggcgggtggagaagtttgaatacaacgccgcacacggtcagttaagccgttacacggcggca

SEQ ID NO: 529875 - DNA, 75 bp, synthetic construct
  source 1..75: mol_type = other DNA
tgatcaatcaacatggcgacatcaatcacacccatgaggtgcttcaggatgacagcaagtgcgagatgattgttg

SEQ ID NO: 529876 - DNA, 75 bp, synthetic construct
  source 1..75: mol_type = other DNA
tttagggctggcaacttgtccgataatcagacagcgggtgctggctaacattgaagccagtcgggcggctagagc

SEQ ID NO: 529877 - DNA, 75 bp, synthetic construct
  source 1..75: mol_type = other DNA
ataactgtggccgggtgacggaagagcgtgactggggcggcgtggtctggcgttaccgctatgacgccgatggcc

SEQ ID NO: 529878 - DNA, 75 bp, synthetic construct
  source 1..75: mol_type = other DNA
taaatggtaagtggacatccggcactcattatacaggtggttccaaacgtctagatgccggtattattgatatca

SEQ ID NO: 529879 - DNA, 75 bp, synthetic construct
  source 1..75: mol_type = other DNA
tttttatcattgcctctgaaaccatgaacttccgcgaagcagccataaagctgtcggtttcaccatcagtagtaa

SEQ ID NO: 529880 - DNA, 75 bp, synthetic construct
  source 1..75: mol_type = other DNA
cagctcagcttgttctgtctgatgagcaacttaacaatgtaataaataaaatgcgcgatattggcgcggagataa

SEQ ID NO: 529881 - DNA, 75 bp, synthetic construct
  source 1..75: mol_type = other DNA
gatagctggcacaacgacaccttcagctactacctgtcgattgcatgtaatcattgcgatcaacccacctgcgta

SEQ ID NO: 529882 - DNA, 75 bp, synthetic construct
  source 1..75: mol_type = other DNA
cccgacctgatgccaacagagcaagaagaccttatctctcatgaatctgccgggaatatgggctatgtgatcctc

SEQ ID NO: 529883 - DNA, 75 bp, synthetic construct
  source 1..75: mol_type = other DNA
tggccccggtttcttccgatgcgctcatccgcctgcgccaaggggatgagatccagctcggtgcactggcgttga

SEQ ID NO: 529884 - DNA, 75 bp, synthetic construct
  source 1..75: mol_type = other DNA
tcgagcatcgtatcgatataggtatacgtgtagggcgagaacctaatccaaactttataattaaaaatatcgggc

SEQ ID NO: 529885 - DNA, 75 bp, synthetic construct
  source 1..75: mol_type = other DNA
gcggtaaatcgctacaagttgttgaaaaaagatgtccgcacggtagctgcacaacagatttcgcgtctggaagcc

SEQ ID NO: 529886 - DNA, 75 bp, synthetic construct
  source 1..75: mol_type = other DNA
ctcaacaatgaactgctggcacagggtaagatcatgattgacagcgcgtcaggcacactgcccgacggcaccgtc

SEQ ID NO: 529887 - DNA, 75 bp, synthetic construct
  source 1..75: mol_type = other DNA
acggtggatggacagactatcaggcagagttcggtaagtaaccgttatggtacgacgaaagtgtttgaaagccag

SEQ ID NO: 529888 - DNA, 75 bp, synthetic construct
  source 1..75: mol_type = other DNA
gtgaaatcctggctgaccgggtgagtgaggaaagccgccgctggctggcatcgtgcggcctgacagtggagcaga

SEQ ID NO: 529889 - DNA, 75 bp, synthetic construct
  source 1..75: mol_type = other DNA
gcaagaaatattttacaacatcggcggagaagcaaagtgctaaagccgccagggagaaaaagcaggaggctgctg

SEQ ID NO: 529890 - DNA, 75 bp, synthetic construct
  source 1..75: mol_type = other DNA
tggaataaggaaatttggttattcgcgcgtcaggattttgacgagcgtgtattcaccaatccttatgagcccgtt

SEQ ID NO: 529891 - DNA, 75 bp, synthetic construct
  source 1..75: mol_type = other DNA
ggaaaacaatttgtccaggccagagaagatcatcaggaatcgcagcagcagcgtgacgattcacaggacatgcac

SEQ ID NO: 529892 - DNA, 75 bp, synthetic construct
  source 1..75: mol_type = other DNA
caaattggccatgaatgtaatacgtacaccgttacgtattttgacaaagcagaagctgagcggtgggtacatatt

SEQ ID NO: 529893 - DNA, 75 bp, synthetic construct
  source 1..75: mol_type = other DNA
cttcacccttaacggcaaagcccgcattttcgccagtggcagtgcgggctatcagctggaaatcttcgagcgccg

SEQ ID NO: 529894 - DNA, 75 bp, synthetic construct
  source 1..75: mol_type = other DNA
tgacagaggatgtggaaggtaacaagaaaatttataatgctgaagttgctgaatgggataatttactgcaaagat

SEQ ID NO: 529895 - DNA, 75 bp, synthetic construct
  source 1..75: mol_type = other DNA
ggcactggagaaaacgggcggcaacaaaaccgaagccgcccgtcagttagggatcacgcgcaaaacgctattggc

SEQ ID NO: 529896 - DNA, 75 bp, synthetic construct
  source 1..75: mol_type = other DNA
tagggaaggtggaaatcgcgccgttcgcctacatgcgtggacgtacctttgaaaatgcagttgtcattcttgacg

SEQ ID NO: 529897 - DNA, 75 bp, synthetic construct
  source 1..75: mol_type = other DNA
gagcggttttataacttgcacccagatgtgaaacatcgatattatgcaagtacaagtggacctacactgtactca

SEQ ID NO: 529898 - DNA, 75 bp, synthetic construct
  source 1..75: mol_type = other DNA
taacctgacggcgatttcccgcgccatgagccgcctggcgcacggcgaagcggacgtcacttttccggcgttaca

SEQ ID NO: 529899 - DNA, 75 bp, synthetic construct
  source 1..75: mol_type = other DNA
agcaacgaactgcaaaccagcgtcggcggtatgctggagcgcgggcaaaggcggcatctggagcgcaacgcgctg

SEQ ID NO: 529900 - DNA, 75 bp, synthetic construct
  source 1..75: mol_type = other DNA
gccagcgcgaacctatgttccgcctggcgggaaaaattctcggcgtcgtcggttttggccggatctcccgctgct

SEQ ID NO: 529901 - DNA, 75 bp, synthetic construct
  source 1..75: mol_type = other DNA
cagcagcggcgaacaggcgctggatctgctggcggcatcagcggaaatcgatatctttatcagcgacttaatgct

SEQ ID NO: 529902 - DNA, 75 bp, synthetic construct
  source 1..75: mol_type = other DNA
cagacgggaatcatcaaaattcgtacctggaatcagcgcgttactcgcagcagtgggcagcgtcaggacatggtg

SEQ ID NO: 529903 - DNA, 75 bp, synthetic construct
  source 1..75: mol_type = other DNA
tcagcggtggtagaacagacagccgtcagcggcgataagctggtgttggtgctggaagatgaagctgcagtacgc

SEQ ID NO: 529904 - DNA, 75 bp, synthetic construct
  source 1..75: mol_type = other DNA
ctgacattcacggtcacgtccacacggcattcgggaaatattccgccggatacgttcgccagtgatgtacaggtt

SEQ ID NO: 529905 - DNA, 75 bp, synthetic construct
  source 1..75: mol_type = other DNA
cgctggcggcggcgaaaggcattaataatggcgatcgtgtcactgtctcaagcaagcgtggctttatccgcgcgg

SEQ ID NO: 529906 - DNA, 75 bp, synthetic construct
  source 1..75: mol_type = other DNA
aagtgagtatacgacggatgttcaagctgaaatactggtatttgaaaaaattcctccctcatatattataagcac

SEQ ID NO: 529907 - DNA, 75 bp, synthetic construct
  source 1..75: mol_type = other DNA
cctcggcggcagagaaagcgatcttatccgccaacagcgactggtgggttttcgccagaccctggcaaaattcgg

SEQ ID NO: 529908 - DNA, 75 bp, synthetic construct
  source 1..75: mol_type = other DNA
gaggaaaacgccaggcagatagcgcaggtccgccagtacgtggatgacaaagggagtgaaatcacctcgaccacg

SEQ ID NO: 529909 - DNA, 75 bp, synthetic construct
  source 1..75: mol_type = other DNA
ggcattcgggaaatattccgccggatacgttcgccagtgatgtacaggttcttgtgatgaaaaagggggcatcag

SEQ ID NO: 529910 - DNA, 75 bp, synthetic construct
  source 1..75: mol_type = other DNA
gcaatgggcgcgacgctggtaatgcttatgcgcaaagtagtaagcgcgatgatatcttggataatactgagccgt

SEQ ID NO: 529911 - DNA, 75 bp, synthetic construct
  source 1..75: mol_type = other DNA
cagtccaacaaaggaagacggacttcaggcaaaaccaatcagcttttgggccagctttgctttgcagtttgtgaa

SEQ ID NO: 529912 - DNA, 75 bp, synthetic construct
  source 1..75: mol_type = other DNA
ccttggtttatattggtgcgcataatgtatattatgttaaattgactgtgaaggtcctttacttcaccattcaca

SEQ ID NO: 529913 - DNA, 75 bp, synthetic construct
  source 1..75: mol_type = other DNA
atgcaaaatggcgtggtaaggcctttaatgaacttacagtttcagaaaaaaagaaaattcgctcaacaactatac

SEQ ID NO: 529914 - DNA, 75 bp, synthetic construct
  source 1..75: mol_type = other DNA
atggatttcgtcaaagtactcgcgtgctggcagggatgagtctgggatttttgattgtgatgttactgtgtgcgg

SEQ ID NO: 529915 - DNA, 75 bp, synthetic construct
  source 1..75: mol_type = other DNA
tctggctggcgtggaaaatcgctaccagtccaacaaaggaagatgggcttcagacaaaaccaatcagtttttggg

SEQ ID NO: 529916 - DNA, 75 bp, synthetic construct
  source 1..75: mol_type = other DNA
cagacaaaaccaatcagtttttgggccagctttgctttgcagtttgtgaacgtcaaaatcattttgtatggcgtt

SEQ ID NO: 529917 - DNA, 75 bp, synthetic construct
  source 1..75: mol_type = other DNA
taggtatagacagaacacaggctttgattcaggagcagctttcttctcaacaggagcaggctgctgtgcaggaga

SEQ ID NO: 529918 - DNA, 75 bp, synthetic construct
  source 1..75: mol_type = other DNA
accaccctgaacagacagtatggcgcgagagtcatacgcagattgggttgcggacggacaccaatggagacagcg

SEQ ID NO: 529919 - DNA, 75 bp, synthetic construct
  source 1..75: mol_type = other DNA
ctgcccgaaaagtctgaacatgctctgttcatcagtgcgagacagaaagaccagtcgcgtatctggacctcggct

SEQ ID NO: 529920 - DNA, 75 bp, synthetic construct
  source 1..75: mol_type = other DNA
tcaagctggtttcttctgctggtactggtcacttctataccactacgaagaacaaacgtactaagccggaaaaac

SEQ ID NO: 529921 - DNA, 75 bp, synthetic construct
  source 1..75: mol_type = other DNA
tatcgaaatgcgcaatctaacgttgtaaaagcgtataaagatcttgattcggcaatcatacaaaacttccgctaa

SEQ ID NO: 529922 - DNA, 75 bp, synthetic construct
  source 1..75: mol_type = other DNA
tactgtgtaaactttagtcacctccatgatgagaatgagggcgttgtatttcattctaaagatgctgccattgac

SEQ ID NO: 529923 - DNA, 75 bp, synthetic construct
  source 1..75: mol_type = other DNA
atcgagagcgtgctgctcgaagtgttgggcgtgctggtgttgttcgcggcagcggcggttgcctcgcgtcgtctg

SEQ ID NO: 529924 - DNA, 75 bp, synthetic construct
  source 1..75: mol_type = other DNA
tcaacaaaacctcaaatacgttcgagaaaaagtcgctagagaagatagcattagtactaactcagttaatgacaa

SEQ ID NO: 529925 - DNA, 75 bp, synthetic construct
  source 1..75: mol_type = other DNA
gcataaccgtgggtactcgcgacacaagcaaaattgaacttacggaattagggaagagtttagtatatcctaaat

SEQ ID NO: 529926 - DNA, 75 bp, synthetic construct
  source 1..75: mol_type = other DNA
gtcgtgtcaggttacatttccgctgcacctcataaaacgggtgccgggatttccaccccgctgacaaacgaagcg

SEQ ID NO: 529927 - DNA, 75 bp, synthetic construct
  source 1..75: mol_type = other DNA
gtaacaaaagaggatttgcttttcgtaaggagagatctgttgaccggttatcaaaagctttctaacggaaaaatt

SEQ ID NO: 529928 - DNA, 75 bp, synthetic construct
  source 1..75: mol_type = other DNA
gcaacagataatggttatacctcaggaaacccatttaacggtctggctcccttaaaaaagtccaaggtaaaacca

SEQ ID NO: 529929 - DNA, 75 bp, synthetic construct
  source 1..75: mol_type = other DNA
tcgtaaggagagatttgttgaccggttaccaaaagctttctaatggaaagacttcttccataaaagggcgctcag

SEQ ID NO: 529930 - DNA, 75 bp, synthetic construct
  source 1..75: mol_type = other DNA
aaagctggaaccgcgcaaacccggcaaagccaggggaacggataaggcggaaaacgagggatatctggctggccg

SEQ ID NO: 529931 - DNA, 75 bp, synthetic construct
  source 1..75: mol_type = other DNA
cccgcgaccgtcgtccaacccatgctggtcgcgctggtgctcagcatggccctggcaccgctactgatccgccat

SEQ ID NO: 529932 - DNA, 75 bp, synthetic construct
  source 1..75: mol_type = other DNA
tggcatgtcgaccgagctgattgaaggacacatcagcgcaatgcgccgccgtctcgacagcagccgttttccagg

SEQ ID NO: 529933 - DNA, 75 bp, synthetic construct
  source 1..75: mol_type = other DNA
gaagggagcttatcactcatcagaaacaccccgcgtatgcagacaatcaccagttgccaggtgatattaattcgc

SEQ ID NO: 529934 - DNA, 75 bp, synthetic construct
  source 1..75: mol_type = other DNA
tcgacaaggctggaaaccaactatgggatgtacccgtgcacagaatgaagatgtagatgagttgtgtaagaaagt

SEQ ID NO: 529935 - DNA, 75 bp, synthetic construct
  source 1..75: mol_type = other DNA
cagaacgtcctgagcagctgtgggtggctgattttacttacgtcagtacatggcagggcttcgtctatgtggcgt

SEQ ID NO: 529936 - DNA, 75 bp, synthetic construct
  source 1..75: mol_type = other DNA
cgggggccagtggctatgtggtgaaaccatttaccgccgcgacgctggaggaaaaactcaacaaaatctttgaga

SEQ ID NO: 529937 - DNA, 75 bp, synthetic construct
  source 1..75: mol_type = other DNA
tcaccgtggcgctcggcgcgccgatactcggcattaacaccattgccgtcgacgacatcatcaacgccacggaga

SEQ ID NO: 529938 - DNA, 75 bp, synthetic construct
  source 1..75: mol_type = other DNA
ccgacgcctccggcaactggagcgttaccgtgcctgcctctgctgtcagcgcgctgggcgaagccacctacagcg

SEQ ID NO: 529939 - DNA, 75 bp, synthetic construct
  source 1..75: mol_type = other DNA
caaaaagaaaaaacccgccgttcgctggtggaagccgcatttagccaattaagtgctgaacgcagcttcgccagc

SEQ ID NO: 529940 - DNA, 75 bp, synthetic construct
  source 1..75: mol_type = other DNA
tcaactttattaatgcagatattgtcatttagcgacaaagtattgccacttttcccttatgcgactatattatct

SEQ ID NO: 529941 - DNA, 75 bp, synthetic construct
  source 1..75: mol_type = other DNA
ttcggaattcctctatctgcacgcccgtttacgtggtttaagcaaaaaagcagccaatagcgcctccgggcctgc

SEQ ID NO: 529942 - DNA, 75 bp, synthetic construct
  source 1..75: mol_type = other DNA
gcaagccgtcttgctgctgctttcaaccacggatttatcaataagtctttacgtgaagttttcgacgttacgcgc

SEQ ID NO: 529943 - DNA, 75 bp, synthetic construct
  source 1..75: mol_type = other DNA
agcaggatgagctatctgatgcgtatatctgcgcaacagatggagggatgccgcaaattccagccaccgatgctt

SEQ ID NO: 529944 - DNA, 75 bp, synthetic construct
  source 1..75: mol_type = other DNA
aagcaggcattgctcccacctctttttatcggcatttccgcgacgtagacgaactgggtctgaccatggttgatg

SEQ ID NO: 529945 - DNA, 75 bp, synthetic construct
  source 1..75: mol_type = other DNA
gcgatttgcagctctccggcaccacctccgatgtggaagcggggcaaaccatcaccgttatcttcggcggcaaaa

SEQ ID NO: 529946 - DNA, 75 bp, synthetic construct
  source 1..75: mol_type = other DNA
gccgttggtaatcgttgttatgatgaaataacagctgaagatgagttgtttctaaattcttatatggataatata

SEQ ID NO: 529947 - DNA, 75 bp, synthetic construct
  source 1..75: mol_type = other DNA
ctgacaaggtatacagtcatgaagagcatcagggtaaagtaaaattactgatattttacggtaaatatggcgata

SEQ ID NO: 529948 - DNA, 75 bp, synthetic construct
  source 1..75: mol_type = other DNA
tggtaaatgatatagagccagactctaagttattagttaatattgcagatcacgcagaagttcgccagcgtacaa

SEQ ID NO: 529949 - DNA, 75 bp, synthetic construct
  source 1..75: mol_type = other DNA
cgtgctgaatggtgcggttgaagtggtggtttgggtgaacgcatccgcactggtgcctgactcaactatgttctg

SEQ ID NO: 529950 - DNA, 75 bp, synthetic construct
  source 1..75: mol_type = other DNA
aaatgtatcctgcatttacccgagtttatatttaatgataacaagaatttgcttgctttagataccgacacgtcg

SEQ ID NO: 529951 - DNA, 75 bp, synthetic construct
  source 1..75: mol_type = other DNA
ttgtcttttaaaaaagaatttattgatagttgcttgaatgacaaaaaatgcatactgcatttacccgagtttata

SEQ ID NO: 529952 - DNA, 75 bp, synthetic construct
  source 1..75: mol_type = other DNA
cacaggccatgatatctcctgcaatttaggttcgttgaatattgctcacaccatggattcccccgactttgcccg

SEQ ID NO: 529953 - DNA, 75 bp, synthetic construct
  source 1..75: mol_type = other DNA
agttgtaccgtgaaatgtgcagagtagtcggtaaagtagtgctggaaatgcgcgatctgggacaagaacctaagc

SEQ ID NO: 529954 - DNA, 75 bp, synthetic construct
  source 1..75: mol_type = other DNA
gtgaagatactggtttttatattttacctggtagttcttttgtacctaagtcatctattgaaattacagcagaac

SEQ ID NO: 529955 - DNA, 75 bp, synthetic construct
  source 1..75: mol_type = other DNA
gccggggtaatgaccgtggggtgcggctcgaccgggcatgtggaaaatcgtctgtacaccgaaacggaagtcgcc

SEQ ID NO: 529956 - DNA, 75 bp, synthetic construct
  source 1..75: mol_type = other DNA
tgccgcgaaggcgctggttgaggcagccgaagcgaagcaggctgaagcggaaggtgcgctgacggaggccaataa

SEQ ID NO: 529957 - DNA, 75 bp, synthetic construct
  source 1..75: mol_type = other DNA
atgagcagaagccggttcagcctgaaggcggtcaggaggctgaaaaaacagaagtatcctccacaggctcaattg

SEQ ID NO: 529958 - DNA, 75 bp, synthetic construct
  source 1..75: mol_type = other DNA
tacctccctcctgaactttttgctcaggcttacaagttaaacaataaggaaatgaatgcgcaactcgactattta

SEQ ID NO: 529959 - DNA, 75 bp, synthetic construct
  source 1..75: mol_type = other DNA
atgcggtgccgtacaagggcgaagcgcagaaagtcagggttgtgcttaccggtgcagatttcaaactgcgcccgg

SEQ ID NO: 529960 - DNA, 75 bp, synthetic construct
  source 1..75: mol_type = other DNA
ttctgattaattatttgtttctgagaaaacccgtaaacatcgcccaagaatatcagtcttcgaaacttcgcatca

SEQ ID NO: 529961 - DNA, 75 bp, synthetic construct
  source 1..75: mol_type = other DNA
ttataaccatgctcaatattttagtggaaggaagtctatgatggactggtacagtaatttgatatttgaaagact

SEQ ID NO: 529962 - DNA, 75 bp, synthetic construct
  source 1..75: mol_type = other DNA
taattactatcttaccaagggatttgcatgggatgaagcaaacacatctggacagacatgtttcaatatcggaga

SEQ ID NO: 529963 - DNA, 75 bp, synthetic construct
  source 1..75: mol_type = other DNA
ggccgggttgaatgcgagctacatgatctcaataagcgcgatactgtcatttatcgcgtcgagtctgaacatatt

SEQ ID NO: 529964 - DNA, 75 bp, synthetic construct
  source 1..75: mol_type = other DNA
atggtgctggtggaaccggagattatcctcaatgcaccgcaacaatatctgctggcggggatcggtgacacgctg

SEQ ID NO: 529965 - DNA, 75 bp, synthetic construct
  source 1..75: mol_type = other DNA
cgaagtctggcagtgggtcgatgatgcgctgatattcgaactgccagaaattatcgacctgcgaaccaatattga

SEQ ID NO: 529966 - DNA, 75 bp, synthetic construct
  source 1..75: mol_type = other DNA
tggcaacccgactggcggctcaactgaaaaaaatgcgtcgccatcaacgttacgatgccgaacaaattgtccgtg

SEQ ID NO: 529967 - DNA, 75 bp, synthetic construct
  source 1..75: mol_type = other DNA
taaaagtgatgaggcatttgatttagtataccaattaattaatcaagcatgccgcagttgggcagaaaagatggg

SEQ ID NO: 529968 - DNA, 75 bp, synthetic construct
  source 1..75: mol_type = other DNA
ataatgtcgattttttaatatctcatcgattacctatcttactcgaggctcagaaaaatgggtttcaggttcatg

SEQ ID NO: 529969 - DNA, 75 bp, synthetic construct
  source 1..75: mol_type = other DNA
aaggactagtcttagaattgaatgaaaaacaccgaaaaaaaggtgagttcgaagccattattaaccaaattgaga

SEQ ID NO: 529970 - DNA, 75 bp, synthetic construct
  source 1..75: mol_type = other DNA
ttttgccctgttagcggtggtgatcaccgcatttgcaggttggtatatctatcgcaatctcggctcaaacctgac

SEQ ID NO: 529971 - DNA, 75 bp, synthetic construct
  source 1..75: mol_type = other DNA
accaaacttccgccagcgtttggacttccaggggcaaagcatattttgtttcgtggtcattgcagcgaaagcgat

SEQ ID NO: 529972 - DNA, 72 bp, synthetic construct
  source 1..72: mol_type = other DNA
atgggaaaaggtggcggtaaggcacacacgcctcgtgaggcgaaggataatctcaaatccacgcagatgatg

SEQ ID NO: 529973 - DNA, 75 bp, synthetic construct
  source 1..75: mol_type = other DNA
accaacactttatggtgggattgctgccagaatcgccaaagtgcctcatgtcgttgcagctgtctctgggctggg

SEQ ID NO: 529974 - DNA, 75 bp, synthetic construct
  source 1..75: mol_type = other DNA
atggacttagaaaataaattctcatatcattttcttgagggattaacgctcacggaagatggaattcttactcaa

SEQ ID NO: 529975 - DNA, 75 bp, synthetic construct
  source 1..75: mol_type = other DNA
acgacccgctgctcaccgtggttggactgctcggcgcactgtttcatctgctcaaccatgcgctgttcaaagggc

SEQ ID NO: 529976 - DNA, 75 bp, synthetic construct
  source 1..75: mol_type = other DNA
cgggcgcgattatttcgcgtttgcatacccacgacatggaaaaatgggggcactggcgaaacggatgccgtggac

SEQ ID NO: 529977 - DNA, 75 bp, synthetic construct
  source 1..75: mol_type = other DNA
tggtgctggttatctccttgctggtggtggtttgttcgctctattcattgacttatatgcgcgaatacgagggca

SEQ ID NO: 529978 - DNA, 75 bp, synthetic construct
  source 1..75: mol_type = other DNA
tatcagcagccgcaacaaccggttgcaccgcagcagcaatatcagcagccgcaacagccggttgcacagcagccg

SEQ ID NO: 529979 - DNA, 75 bp, synthetic construct
  source 1..75: mol_type = other DNA
aagcgggcattgctcccacctctttttaccggcattttcgcgacgtagacgaactcggtctgaccatggttgatg

SEQ ID NO: 529980 - DNA, 75 bp, synthetic construct
  source 1..75: mol_type = other DNA
ctcgaccctacgctgaggctaaataaaggttttgcgcacgtcaccgccagggctcagagcacagaacccttctgg

SEQ ID NO: 529981 - DNA, 75 bp, synthetic construct
  source 1..75: mol_type = other DNA
atagacaaatcactacaactcgaacccagaagacgaaaagcagttgtgataaaagaatgtgtagatatgtatgtg

SEQ ID NO: 529982 - DNA, 75 bp, synthetic construct
  source 1..75: mol_type = other DNA
attacttgaatccgctggtcatgtcgtactgaaagatatgatcatcgaatcagtatggaaaaatattattgtaag

SEQ ID NO: 529983 - DNA, 75 bp, synthetic construct
  source 1..75: mol_type = other DNA
ttgtgataaaagaatgtgtagatatgtatgtgcctaacccgctcaaaaacaacattaaactctactataaagaaa

SEQ ID NO: 529984 - DNA, 75 bp, synthetic construct
  source 1..75: mol_type = other DNA
gtcctgaatttaccagcgtgccattatttaaagatgaaatggtgctggtagccagcaaaaatcatccaacaatta

SEQ ID NO: 529985 - DNA, 75 bp, synthetic construct
  source 1..75: mol_type = other DNA
cggaatgagcaattagcaggaactaaatcaaccagccgatttaaaatcattaaattgcatgacgcagaagcacaa

SEQ ID NO: 529986 - DNA, 75 bp, synthetic construct
  source 1..75: mol_type = other DNA
catttttatttattaacttcctttatgtctttttcagatcttatatattcttcgcctgttttccctagtgtaata

SEQ ID NO: 529987 - DNA, 75 bp, synthetic construct
  source 1..75: mol_type = other DNA
tattgttgatggtggtgctcaactggatgacaattcagtgaaggtcaataatactgatactcttgcaggagaaaa

SEQ ID NO: 529988 - DNA, 75 bp, synthetic construct
  source 1..75: mol_type = other DNA
acgtcaaggtaaccttcaatgttaattcagcagaggcgaaactgagccaaaccgaagtgaatagccacgacggga

SEQ ID NO: 529989 - DNA, 75 bp, synthetic construct
  source 1..75: mol_type = other DNA
ggagacagcgatgatatctttagtgttgccagttttgataatgaaaacgatgcaaaagaattttgcaatattgtt

SEQ ID NO: 529990 - DNA, 75 bp, synthetic construct
  source 1..75: mol_type = other DNA
gcgtcaacaacagcagccagagccggaacgtgacgtttgtcgccgatgtcaggacggcgaagatcgctgatctgg

SEQ ID NO: 529991 - DNA, 75 bp, synthetic construct
  source 1..75: mol_type = other DNA
ccgactctatcagtgtattgtcagatatttcgcagcgtgatctggcagagcaattaccgcaaagagaacatcctg

SEQ ID NO: 529992 - DNA, 75 bp, synthetic construct
  source 1..75: mol_type = other DNA
tttcttattcagttgctggctctctctctctttttgttttagtccagcaattgctttcaatggcaaacttaattt

SEQ ID NO: 529993 - DNA, 75 bp, synthetic construct
  source 1..75: mol_type = other DNA
aaaagtcttgaacgctcttcttttttgtgtgaaacgatgtttcagactctgaatgaggcggcagagaaaaacgaa

SEQ ID NO: 529994 - DNA, 75 bp, synthetic construct
  source 1..75: mol_type = other DNA
aaaaaggttaactccaaactaaaagatcttgtgatggataagcaggattccaggattgtttatcgcgatcaggaa

SEQ ID NO: 529995 - DNA, 75 bp, synthetic construct
  source 1..75: mol_type = other DNA
tcaacttctttttcgaccacgaccttagccgttaccactcccgcgccggcattggcgcggagtactggcgcgact

SEQ ID NO: 529996 - DNA, 75 bp, synthetic construct
  source 1..75: mol_type = other DNA
atgcgttcggtaatgcgctggacgggcagacggtcagcgtgttggcggacaacggcgcaacggtcgctccgacgg

SEQ ID NO: 529997 - DNA, 75 bp, synthetic construct
  source 1..75: mol_type = other DNA
agacggtcagcgtgacggcagacaacagtgcaacggtcgcttcgactgtcatcacaaggccggacggcacggtgg

SEQ ID NO: 529998 - DNA, 75 bp, synthetic construct
  source 1..75: mol_type = other DNA
acgactgccccgacggtcatcacagagccggacgggacggtggagatctcagtcaccagccagacggcgggagtc

SEQ ID NO: 529999 - DNA, 75 bp, synthetic construct
  source 1..75: mol_type = other DNA
aggacggcgaagatcgctgatctggtggccattaaggacggctcagtggctgacggcgcaatggcgaacacgctg

SEQ ID NO: 530000 - DNA, 75 bp, synthetic construct
  source 1..75: mol_type = other DNA
ctggtcagccatacaaacgtacacgaacagaacgaaggggtcattttccattcaaaagaggctgcttacagctac

SEQ ID NO: 530001 - DNA, 75 bp, synthetic construct
  source 1..75: mol_type = other DNA
aatacgcttgccggacagacggtcagcgtgttggcaggcaacggtgccacgactgcttcgacggtcaccacgcaa

SEQ ID NO: 530002 - DNA, 75 bp, synthetic construct
  source 1..75: mol_type = other DNA
aggataacgcgatcgcagacggcgcaatggcgaatacgctgcgggtgagggtgaccgatgcgttcggtaatgcgc

SEQ ID NO: 530003 - DNA, 75 bp, synthetic construct
  source 1..75: mol_type = other DNA
agcacggcgcagatcgcggatctggtggtcacccgggataactcggtggctgacggtgcaatggcgaacacgctg

SEQ ID NO: 530004 - DNA, 75 bp, synthetic construct
  source 1..75: mol_type = other DNA
tgagccagagcgtgacgtttgtcgcggatgtcaggacggcgcagatagcgagtctggaggtgacgcaggataact

SEQ ID NO: 530005 - DNA, 75 bp, synthetic construct
  source 1..75: mol_type = other DNA
aaaaaacggtgattatagggttacggcctctgtgagctctggttcccaggccaatcaacaggtgaattttatcgg

SEQ ID NO: 530006 - DNA, 75 bp, synthetic construct
  source 1..75: mol_type = other DNA
gcagcagtcagagccgggacgtgacatttatcgcggatgtcagaacggcgcagatcgcggacctggtggtcatta

SEQ ID NO: 530007 - DNA, 75 bp, synthetic construct
  source 1..75: mol_type = other DNA
cagcgtgttggcggataacggcgcaacggtcgctccggtggtcaccacgcagccggacggcacggtggaaatcag

SEQ ID NO: 530008 - DNA, 75 bp, synthetic construct
  source 1..75: mol_type = other DNA
aaatcgctggtttcttccttgcaaaccaaatatgcgctgaaaggttatgacattgaagccgcctccctgcaatca

SEQ ID NO: 530009 - DNA, 75 bp, synthetic construct
  source 1..75: mol_type = other DNA
aggacggcgcagatcgcggatctggtggtcatccgggataactcggtggctgacggttcgacggcgaatacgctg

SEQ ID NO: 530010 - DNA, 75 bp, synthetic construct
  source 1..75: mol_type = other DNA
ccaaatatgcgctgaaaggttatgacattgaagccgcctccctgcaatcagcgggcggaaaagtagctgtttccg

SEQ ID NO: 530011 - DNA, 75 bp, synthetic construct
  source 1..75: mol_type = other DNA
ggatttatgagcgagtgaaagatatgcataaaatttcccgttctaataaatatcctgttgttttgaaaagaaaaa

SEQ ID NO: 530012 - DNA, 75 bp, synthetic construct
  source 1..75: mol_type = other DNA
ttaaaaataacagccaatgctaagcgtaatacgtcaggtgacatagttaagtacatgatatttggtgcaagtaag

SEQ ID NO: 530013 - DNA, 75 bp, synthetic construct
  source 1..75: mol_type = other DNA
aatctttttaatctaactacggatattaactctattgaaatagatgctatcgttacaagatttaattctttcaca

SEQ ID NO: 530014 - DNA, 75 bp, synthetic construct
  source 1..75: mol_type = other DNA
tagtagacaaggataaagaatctactatcacctgggttaatagcttgagcaaaaagaacatttaccacatagctg

SEQ ID NO: 530015 - DNA, 75 bp, synthetic construct
  source 1..75: mol_type = other DNA
gcaatagaaataacataccggtattaaaaatacatggctcagtaaacttcataccagttgcaaatatcgttaata

SEQ ID NO: 530016 - DNA, 75 bp, synthetic construct
  source 1..75: mol_type = other DNA
gtaatgccgcatataaactgaccagcacatacacccccgcaggccagttacagagccagcacctgaacagcctgg

SEQ ID NO: 530017 - DNA, 75 bp, synthetic construct
  source 1..75: mol_type = other DNA
aaaagccagtcgcaggttcaccccggtcagctaccgtgcgcatggtctgccggtatcagagaatctgctgaagca

SEQ ID NO: 530018 - DNA, 75 bp, synthetic construct
  source 1..75: mol_type = other DNA
ggctttgattcttttgccaatacgactaaccaattgagagttaatggtaccaagttagttatccctgtcacagaa

SEQ ID NO: 530019 - DNA, 75 bp, synthetic construct
  source 1..75: mol_type = other DNA
gcctaacggccttgtaggccgcgataatacaggggcaatactttcgtgccaatccggtacttggagaaaggtagg

SEQ ID NO: 530020 - DNA, 75 bp, synthetic construct
  source 1..75: mol_type = other DNA
ggatttctgagcgagtgaaagatatgcataaaatttcccgttctaacaaataccctgttgttttgaaaagaaaga

SEQ ID NO: 530021 - DNA, 75 bp, synthetic construct
  source 1..75: mol_type = other DNA
aatctttttaatctaactacggataataactccgttgaaatagatgcgatcgttacaagatttaattccttcacg

SEQ ID NO: 530022 - DNA, 75 bp, synthetic construct
  source 1..75: mol_type = other DNA
aggtggaatgtatccacggggaacgctttagccgccgggaaataatgcgggcaacggtgtttaattatatcgagt

SEQ ID NO: 530023 - DNA, 75 bp, synthetic construct
  source 1..75: mol_type = other DNA
tgggttggaaggggaaagcgccctgactggctaaaaaagtatcttgacgaaggccgcgaactttcggagtttgag

SEQ ID NO: 530024 - DNA, 75 bp, synthetic construct
  source 1..75: mol_type = other DNA
tgccttagtcactgccccgctatggcattatctcgatcaactgcatccctcgttgtggcggcaaggtaaagattt

SEQ ID NO: 530025 - DNA, 75 bp, synthetic construct
  source 1..75: mol_type = other DNA
gagctatctgatgaagcgctaaaagcccgtagtaattgctctaaaaatgtcacggtgaaagatggtgtaagcacc

SEQ ID NO: 530026 - DNA, 75 bp, synthetic construct
  source 1..75: mol_type = other DNA
gccgggtgctgaggacgtactgccagcgccgctgccgccgtaccgggtgcttaccgggatgcggaccgcttcggg

SEQ ID NO: 530027 - DNA, 75 bp, synthetic construct
  source 1..75: mol_type = other DNA
cagggaagaccgctaccacaaatgatggaggcacaaccagtaaaaagaatgcgggtaacgtgactactgaacgca

SEQ ID NO: 530028 - DNA, 75 bp, synthetic construct
  source 1..75: mol_type = other DNA
ctatatcggtattgagcagatggattacatcaatgagatcaccgtgccacgtttgcaaaaagtcattgagggtga

SEQ ID NO: 530029 - DNA, 75 bp, synthetic construct
  source 1..75: mol_type = other DNA
gctgcagccacacatcctgaaattaaattattacaatttaaattaatactagggcagggtattaataaggccatt

SEQ ID NO: 530030 - DNA, 75 bp, synthetic construct
  source 1..75: mol_type = other DNA
gtatctgctggcggatggcaccacggttatcaactccaacattaatttcgagtggataggcaataactatctcgg

SEQ ID NO: 530031 - DNA, 75 bp, synthetic construct
  source 1..75: mol_type = other DNA
aagcgatgaaaccagaagagattcgtgcggtcgaagacctggtgaacacacagattcgtcgcaatttgccgatcg

SEQ ID NO: 530032 - DNA, 75 bp, synthetic construct
  source 1..75: mol_type = other DNA
tggtttgtactggtttattggggtgtcgtgtattattatatttgtcgttggaccattgggattaatctactatgg

SEQ ID NO: 530033 - DNA, 75 bp, synthetic construct
  source 1..75: mol_type = other DNA
cagttgtccgggttgagcggtgatggtgctgacttggtgaacaaggcatttaccggacaacaacctgttctgact

SEQ ID NO: 530034 - DNA, 75 bp, synthetic construct
  source 1..75: mol_type = other DNA
ctcagcaccttgaggccgcctgtcgcgtccttgctgataccgaacgtggcttgagtgggtcgcagatcgagcgac

SEQ ID NO: 530035 - DNA, 75 bp, synthetic construct
  source 1..75: mol_type = other DNA
acccgacgcttgcggaaaatctcgcaaataatggcgcatcactgacagaagcccgaacggtgcttactgcaaagg

SEQ ID NO: 530036 - DNA, 75 bp, synthetic construct
  source 1..75: mol_type = other DNA
aaactaacagagcaacaagtacgcaggcttttggcttcaagaacagcaaacttaatcggtcacggcttaacgttc

SEQ ID NO: 530037 - DNA, 75 bp, synthetic construct
  source 1..75: mol_type = other DNA
acggcacactctgcgctcccgctgatgcggatatcctgcatcgccgtctgtgggaacatgccctcggctggctga

SEQ ID NO: 530038 - DNA, 75 bp, synthetic construct
  source 1..75: mol_type = other DNA
gtccagcctggtggattcgatgagctggttcagatctatgaggccggaggcgatggaatagagccactcaattgt

SEQ ID NO: 530039 - DNA, 75 bp, synthetic construct
  source 1..75: mol_type = other DNA
cggatggacgtgtctggttaaccagtgggatcggtaacgctccgacctggttactgcgggccaagaaagtaatca

SEQ ID NO: 530040 - DNA, 75 bp, synthetic construct
  source 1..75: mol_type = other DNA
atgtatcgggattatctgcatcgctatctggaaaatgcgcctggcggacatattcaccacgatcttagccacgtc

SEQ ID NO: 530041 - DNA, 75 bp, synthetic construct
  source 1..75: mol_type = other DNA
atcgctatctggaaaatgcgcctggcggacatattcaccacgatcttagccacgtcggtgatgctgccaacttac

SEQ ID NO: 530042 - DNA, 75 bp, synthetic construct
  source 1..75: mol_type = other DNA
gccagtgccgcgaaaacgtcagaaacgaatgcttcagcgtcacaacaatcagcagccacatctgcatccaccgcg

SEQ ID NO: 530043 - DNA, 75 bp, synthetic construct
  source 1..75: mol_type = other DNA
tatttaaaaactgccaagactggtctaatgattctttagaaacatgtaagatgaagtgctccggaaataacattg

SEQ ID NO: 530044 - DNA, 75 bp, synthetic construct
  source 1..75: mol_type = other DNA
ccagatgggcttaaaaaacattaaaatggccacggagttatttaatacagtcgtaacctatagtcaaaatgaaaa

SEQ ID NO: 530045 - DNA, 75 bp, synthetic construct
  source 1..75: mol_type = other DNA
gcactaccagttcccggcgcagccacaaacgcagggaagcaccaacaccttattacttaacaatcttacctgtca

SEQ ID NO: 530046 - DNA, 75 bp, synthetic construct
  source 1..75: mol_type = other DNA
tctgagatagcaaaagatgatccgaaaatgatgtcaaaaatcgtgacgtcattgccggcagacacggtaacagag

SEQ ID NO: 530047 - DNA, 75 bp, synthetic construct
  source 1..75: mol_type = other DNA
atcctggtgttattaccagggcaaataccctggattcacagatgcttagtaaaggcacaaatggtgaatttggct

SEQ ID NO: 530048 - DNA, 75 bp, synthetic construct
  source 1..75: mol_type = other DNA
cccggaatggccgcaggcgggcagcgtgggggtaacgtttgttcaggataataacccggatattttccccggtga

SEQ ID NO: 530049 - DNA, 75 bp, synthetic construct
  source 1..75: mol_type = other DNA
gcggtgatgctggggaggctggagcgggaactgcgtgcgggagcggtgagtgcggagagtgaggcatggcttgcg

SEQ ID NO: 530050 - DNA, 75 bp, synthetic construct
  source 1..75: mol_type = other DNA
attaatcatgaaattatgcatcagctcggccttgctgttatgtatgaaccagagacggggatgtctggcggggca

SEQ ID NO: 530051 - DNA, 75 bp, synthetic construct
  source 1..75: mol_type = other DNA
ccgcacaagcacctgcttatcccgcacgtcggcgggcggcgctggaacctcgactggcaccatcctgaacttgag

SEQ ID NO: 530052 - DNA, 75 bp, synthetic construct
  source 1..75: mol_type = other DNA
cccagttcccgtttgataatcaggggcgactggtacgctctttcgagtggaacgagtttaccgccggcaccatca

SEQ ID NO: 530053 - DNA, 75 bp, synthetic construct
  source 1..75: mol_type = other DNA
gaaatggcagaagatgtacttggaaaacaatttatccaggccagagaggaacagcatacagaatcgcagcagcaa

SEQ ID NO: 530054 - DNA, 75 bp, synthetic construct
  source 1..75: mol_type = other DNA
atgtttgtattcgcagcgataacatccaacggtttgaatgaaagaggcctgattaccgcgggatgctcttttctt

SEQ ID NO: 530055 - DNA, 75 bp, synthetic construct
  source 1..75: mol_type = other DNA
agagacggggatgtctggcggggcaatggtagccacggatggagcatggaactattcagatgaacagatggagcg

SEQ ID NO: 530056 - DNA, 75 bp, synthetic construct
  source 1..75: mol_type = other DNA
atggcaaaaattcacgaggtaaagctgcacgcaaaatattttgaccttgtgctggaaggaaagaaacgcgcagag

SEQ ID NO: 530057 - DNA, 75 bp, synthetic construct
  source 1..75: mol_type = other DNA
catcaatggaacaaaaaaagccgagtttcgccgtgctgaccgtgattttgctgtaggggatttactttgcttaaa

SEQ ID NO: 530058 - DNA, 75 bp, synthetic construct
  source 1..75: mol_type = other DNA
gttatgagcggaaatggtttaccaagcatcgcgaagggttactccgttttgccatgcttgtggttgtagctgtgc

SEQ ID NO: 530059 - DNA, 75 bp, synthetic construct
  source 1..75: mol_type = other DNA
ctcaggattaatgaccatgcgcgcgctggaggcggcgaagcagctgcgtaaggataacgtcagcgtggcggtgtt

SEQ ID NO: 530060 - DNA, 75 bp, synthetic construct
  source 1..75: mol_type = other DNA
tccttttgccaccacttatgccgtttttgccacccgtcgcgcctatgactttatccatcaggtcatcgctgaaga

SEQ ID NO: 530061 - DNA, 75 bp, synthetic construct
  source 1..75: mol_type = other DNA
gatgaattcctgctggccggagcgttaccgacactgcatgaccgttacggtatttcaactgccatgatggtcaat

SEQ ID NO: 530062 - DNA, 75 bp, synthetic construct
  source 1..75: mol_type = other DNA
cagtctgcctggcctgcgggtggataccgtcgcgggtgatgatgtggtcaatatcatcgaacacagtcaggcgca

SEQ ID NO: 530063 - DNA, 75 bp, synthetic construct
  source 1..75: mol_type = other DNA
gctggtgatctccggcaccagcagcggcggggaagcgggcgatgtggtgagcgttgtgctcaacggcaaaaccta

SEQ ID NO: 530064 - DNA, 75 bp, synthetic construct
  source 1..75: mol_type = other DNA
ggggttagagttttaccgaagaggagtttacccgcaaaaaccttctcgctatacgtcactcttcgcatggggtaa

SEQ ID NO: 530065 - DNA, 75 bp, synthetic construct
  source 1..75: mol_type = other DNA
ctggtcggcggtctgcaaaacattggttccggcgtgctggcgtcgctctctgcgatgttgccgcaaaccggtcag

SEQ ID NO: 530066 - DNA, 75 bp, synthetic construct
  source 1..75: mol_type = other DNA
atgaaaaaaatggcgattgttgataaaaagggtttggagtacattcctaacatcgatcgtatgatccgtgagaaa

SEQ ID NO: 530067 - DNA, 75 bp, synthetic construct
  source 1..75: mol_type = other DNA
ggggcggtatatcactcaggatccgattgggctgaaggggggatggaacctgtatacatatccgctgagcccggt

SEQ ID NO: 530068 - DNA, 75 bp, synthetic construct
  source 1..75: mol_type = other DNA
atctgcgaaatatccttaatacccggtccggtagttgccggggcgcgcctgagctaggaattaatgaaccggaag

SEQ ID NO: 530069 - DNA, 75 bp, synthetic construct
  source 1..75: mol_type = other DNA
tgccggagtgcgcctgaactggggattgatgaacaggaaggggctaaaaacttccgcgaatcaatgagtcgggct

SEQ ID NO: 530070 - DNA, 75 bp, synthetic construct
  source 1..75: mol_type = other DNA
ggcaggcaggtagaaatcaaaaaaaatacgcaatcttccaagctaccgtgattgcctcctcctcagagcaagagt

SEQ ID NO: 530071 - DNA, 75 bp, synthetic construct
  source 1..75: mol_type = other DNA
ccgacaacggcgcaacctgggtgaacgtgacgctagcagcagacggcctgaactggagttacgttgacggacgaa

SEQ ID NO: 530072 - DNA, 75 bp, synthetic construct
  source 1..75: mol_type = other DNA
atcttctgcaatagaaaaatatgaaagcaattatttaaatggtgatggttttgatactgttgtgcttatgtctaa

SEQ ID NO: 530073 - DNA, 75 bp, synthetic construct
  source 1..75: mol_type = other DNA
gggtacggtgaatatcacggtaagtggcactaacacagccggaacaacatctaccattacccatccggtcaccgt

SEQ ID NO: 530074 - DNA, 75 bp, synthetic construct
  source 1..75: mol_type = other DNA
gccgaagtggggcaaattgttacggtaacgctcaatagcccgaccgtgcagacgtatcaggcaacggtacaggcc

SEQ ID NO: 530075 - DNA, 75 bp, synthetic construct
  source 1..75: mol_type = other DNA
gccctgtaggccagtgtacggtgcgtcgggtcagggaagggctggaaatcacggcaatgctggtgaagccggagc

SEQ ID NO: 530076 - DNA, 75 bp, synthetic construct
  source 1..75: mol_type = other DNA
ctgaaagccaggaaatggtattagggcttgcaaaagcattgggcatgggcgcgtcacttgctgagttgcatggtg

SEQ ID NO: 530077 - DNA, 75 bp, synthetic construct
  source 1..75: mol_type = other DNA
cggtgttctggctgtgtggtggctgttgcggcggtctgctctgtcttcagcgttatctgtatggaggtttcccgt

SEQ ID NO: 530078 - DNA, 75 bp, synthetic construct
  source 1..75: mol_type = other DNA
agccgcacggtcaccgtaagtctcgccgcgccaaccattggcatcaacactatcgccagcgatgatgtgattaac

SEQ ID NO: 530079 - DNA, 75 bp, synthetic construct
  source 1..75: mol_type = other DNA
taaccatcagcggcagcagcaccgccgaagcggggcagacggtaaccgtcacccttaatggcgtgacttacaccg

SEQ ID NO: 530080 - DNA, 75 bp, synthetic construct
  source 1..75: mol_type = other DNA
gtaaaacctacactgcaagcgtcgccgccaacgggagctggagtgtaaacgttccggcggcagatctggcaactc

SEQ ID NO: 530081 - DNA, 75 bp, synthetic construct
  source 1..75: mol_type = other DNA
gagttttaccactaccgtgcaggccgatggctcctggagtctgacggtacctgccgccgcgatgggaaatctgcc

SEQ ID NO: 530082 - DNA, 75 bp, synthetic construct
  source 1..75: mol_type = other DNA
gctttctggtgcactgatggttacagggcttacaacgaaaaactaccaaaagcaaagcatatcgttggtaagctg

SEQ ID NO: 530083 - DNA, 75 bp, synthetic construct
  source 1..75: mol_type = other DNA
gccgaagcgggcaatgcgcaaaccatcagcgggcaggtgacgggtgccgcggcgggagataccgttaccatcacg

SEQ ID NO: 530084 - DNA, 75 bp, synthetic construct
  source 1..75: mol_type = other DNA
cgccagaaaaatagttttcacgtactggacagtcagaacaacggcgttaacgccaacggcactgcgaatggattg

SEQ ID NO: 530085 - DNA, 75 bp, synthetic construct
  source 1..75: mol_type = other DNA
tggatattagctgtgataacacgccgcgccagcaggttattgggggaacgcaggcctcgttgaatgaatttgcca

SEQ ID NO: 530086 - DNA, 75 bp, synthetic construct
  source 1..75: mol_type = other DNA
ctcctgcggacacagcgttggtgaatacagtgcgctctacgccgccggagctatttctcttgagacgctatttgg

SEQ ID NO: 530087 - DNA, 75 bp, synthetic construct
  source 1..75: mol_type = other DNA
gtcaattatcaaagaaaatctctcattacacttaactcatacggtgaaatggactgaatctctcgatacatttct

SEQ ID NO: 530088 - DNA, 75 bp, synthetic construct
  source 1..75: mol_type = other DNA
cagtatggaaaaatattattgttagtgacgagtccctgacaagatgtatctattctttgcgctgcatttttgggt

SEQ ID NO: 530089 - DNA, 75 bp, synthetic construct
  source 1..75: mol_type = other DNA
gccaggaacaaaacggatcagggtcacaataactggcggcggtggcggagggggcggctgcaaggctacatccaa

SEQ ID NO: 530090 - DNA, 75 bp, synthetic construct
  source 1..75: mol_type = other DNA
atccggtgttcctagcttaaattcaagtactatcgaaaatgttgcagtagcgtatccacagaaaaaagaacaaac

SEQ ID NO: 530091 - DNA, 75 bp, synthetic construct
  source 1..75: mol_type = other DNA
gagacgatgaagctcatcactccgcagccgcgttcgggttattttgtcgcacaacggaaagcccaaccgccagtg

SEQ ID NO: 530092 - DNA, 75 bp, synthetic construct
  source 1..75: mol_type = other DNA
gccaaacaagaacgttccggggctgattagaggcgcagagatatgcgtaagtattgctgaacagcttcgcaaagg

SEQ ID NO: 530093 - DNA, 75 bp, synthetic construct
  source 1..75: mol_type = other DNA
tagatgtctgcgggtatttgcgactcaggattacactcccggcagtgcaaatgttggctatatagcttgtgccgg

SEQ ID NO: 530094 - DNA, 75 bp, synthetic construct
  source 1..75: mol_type = other DNA
ccatttgccgatatcaaatcagatggagcagcggcgatttctacggctctcacaaaccttggtttaggagaagcg

SEQ ID NO: 530095 - DNA, 75 bp, synthetic construct
  source 1..75: mol_type = other DNA
gaacgccttttcttacaatctatcccgatgaattttatgttgaaatcactacccaacgtgggggggccacgccag

SEQ ID NO: 530096 - DNA, 75 bp, synthetic construct
  source 1..75: mol_type = other DNA
ccggtcaggcgaccctggaggttgatggcagcacgccaaaagtggcaaacgacaatgatgcctttacgctgacgg

SEQ ID NO: 530097 - DNA, 75 bp, synthetic construct
  source 1..75: mol_type = other DNA
ccaacggtctgctgatgcaactggtgatggacctcaagagcggctacctgcgtcgctgcgaatctctggggctgg

SEQ ID NO: 530098 - DNA, 75 bp, synthetic construct
  source 1..75: mol_type = other DNA
aggctgccaacgggctgctgatgcagctggtgatggatctgaaaagtggctatctccgtcgctgtgagtcgctgg

SEQ ID NO: 530099 - DNA, 75 bp, synthetic construct
  source 1..75: mol_type = other DNA
cgagcttcagtcaggccttgctgaaaacacaggaacgcgttaaaacgcatacggacgcgtttctggcggtcaaaa

SEQ ID NO: 530100 - DNA, 75 bp, synthetic construct
  source 1..75: mol_type = other DNA
atccgcatcgaaacagacaacggcgagcgggagaaagcgcagcgccgcagcctggcggagaagctgcagcaggaa

SEQ ID NO: 530101 - DNA, 75 bp, synthetic construct
  source 1..75: mol_type = other DNA
cagcctttaccgccgctatgacaaccgtggccggttaacctcggtgaaagacgcacagggccgtgaaacgcagta

SEQ ID NO: 530102 - DNA, 75 bp, synthetic construct
  source 1..75: mol_type = other DNA
atgtggcggcgcgccgtcgcattgccggtattgatgttcgcccgggacgtggcatcacactgagtgatgaggaaa

SEQ ID NO: 530103 - DNA, 75 bp, synthetic construct
  source 1..75: mol_type = other DNA
tatacatcaaattgtattatggatatatattcggaagaagagaaaattacatgttttagtaacagacttgtattt

SEQ ID NO: 530104 - DNA, 75 bp, synthetic construct
  source 1..75: mol_type = other DNA
tgttcataactggaattattaattcaactcaagccaaacaatggttattagaccgtcaaaatggaataacacaag

SEQ ID NO: 530105 - DNA, 75 bp, synthetic construct
  source 1..75: mol_type = other DNA
gacgattaccagcaggcctggctgcgttactgctacggctttgatttgagctataaacaccaggtgataatgtgt

SEQ ID NO: 530106 - DNA, 75 bp, synthetic construct
  source 1..75: mol_type = other DNA
atggcccgtcgctgggatggtaaccaaagacaggctaaaatgttgtcagcgcgtttccggtgcatttttttggat

SEQ ID NO: 530107 - DNA, 75 bp, synthetic construct
  source 1..75: mol_type = other DNA
tggtatgtcaaaaatagatatcaatgattgtagaaaaatgtcaagcaaaataattaaaacagaagtagataaaac

SEQ ID NO: 530108 - DNA, 75 bp, synthetic construct
  source 1..75: mol_type = other DNA
gcttgtagaagcatgtcaagaaaaataatgacaacagaggtgaataaaaccttgttggatgaattaaaaaatata

SEQ ID NO: 530109 - DNA, 75 bp, synthetic construct
  source 1..75: mol_type = other DNA
gttctggacgcgctgggataagccaaaggccgacgttgatttgattgctgccgtagagaacatgcgtcgacagtc

SEQ ID NO: 530110 - DNA, 75 bp, synthetic construct
  source 1..75: mol_type = other DNA
ggttgccgccaatggcacctgggcgcttaacgtgcctgcggcggatcttgccgcgctcgggcagggcgcgcagac

SEQ ID NO: 530111 - DNA, 75 bp, synthetic construct
  source 1..75: mol_type = other DNA
ctgcgaccgcctataacgtcaccgcgcaggtaaaaagctcggcgggcaacggcaataacgccaatattagcaacg

SEQ ID NO: 530112 - DNA, 75 bp, synthetic construct
  source 1..75: mol_type = other DNA
ctgcgggcaacgtcggtgccaccgacagccagaatgtggtgatcgacaccatcgcgccagatcccgcggtgaaaa

SEQ ID NO: 530113 - DNA, 75 bp, synthetic construct
  source 1..75: mol_type = other DNA
cgaaggcatttccggctcgaattttaacgacactctgaccggcagcagcggcgataaccaactggaagggcgcgg

SEQ ID NO: 530114 - DNA, 75 bp, synthetic construct
  source 1..75: mol_type = other DNA
gcaacctacagcggtaatgtgcaggcagacggtagctggagcgtcagcgttcccccttcagccttaggcgcgctg

SEQ ID NO: 530115 - DNA, 75 bp, synthetic construct
  source 1..75: mol_type = other DNA
cgcctctcgacggtgggcgtgaccgcgaacttaagcagcaccgccgcgcaggccaccggctttaacacctcgaca

SEQ ID NO: 530116 - DNA, 75 bp, synthetic construct
  source 1..75: mol_type = other DNA
agcgtcggcattccggcggcaagcgtcagtgcatggcctgcggggccgttaaccgttgaggtagccgggcaaagc

SEQ ID NO: 530117 - DNA, 75 bp, synthetic construct
  source 1..75: mol_type = other DNA
ttacggtagggacatgggaaggcaccgccgacaccgatcgcattgatattcgcgaactgttacagggcagcggct

SEQ ID NO: 530118 - DNA, 75 bp, synthetic construct
  source 1..75: mol_type = other DNA
actgggacggcgcggtggatgtgctggtgaccaaacagtcgggcagcgtgttcctgatccgcaacaccaacacgg

SEQ ID NO: 530119 - DNA, 75 bp, synthetic construct
  source 1..75: mol_type = other DNA
ttaactggagttacgttgacggacgcacgctcaccaacggcaccaccacctggcaggtgcgggtggtggatctgg

SEQ ID NO: 530120 - DNA, 75 bp, synthetic construct
  source 1..75: mol_type = other DNA
tcggaaacggcggtcacgataccttgctctataaattgctcaacgccagtgacgctaccggcggcaacggctcag

SEQ ID NO: 530121 - DNA, 75 bp, synthetic construct
  source 1..75: mol_type = other DNA
cctataccgccaccgtagcgggcgatggtagctggacaaccaccgtacccgccgccgatctcagctcgttacgcg

SEQ ID NO: 530122 - DNA, 75 bp, synthetic construct
  source 1..75: mol_type = other DNA
acttacgccgccacggtgctggcgaacggtagctggagcgttggcgttcctgcgacggatgtcagtaactggcct

SEQ ID NO: 530123 - DNA, 75 bp, synthetic construct
  source 1..75: mol_type = other DNA
caccgctatggtttgttcagtgaagttcgcggcttaggtttgttgattggctgtgtactgaatgccgattacgcc

SEQ ID NO: 530124 - DNA, 75 bp, synthetic construct
  source 1..75: mol_type = other DNA
taggatattttgcctatattaactgcgttaaggggagagtaattggaggtagtgcgcatcactctacaggtggaa

SEQ ID NO: 530125 - DNA, 75 bp, synthetic construct
  source 1..75: mol_type = other DNA
acaaaaggttttactcagttaagcagcgacaccaccagtacatcagagacccgggcagccacgccaaaggccata

SEQ ID NO: 530126 - DNA, 75 bp, synthetic construct
  source 1..75: mol_type = other DNA
tggttgccagaatatggactccagtggactgctctcatcaggagcggaagcttttcaggcttacagtttgagtga

SEQ ID NO: 530127 - DNA, 75 bp, synthetic construct
  source 1..75: mol_type = other DNA
tcagtatcctttaaatccactacaacaaattgaccctatgggattattgcagacttgggatgatgccagatctgg

SEQ ID NO: 530128 - DNA, 75 bp, synthetic construct
  source 1..75: mol_type = other DNA
ctaacctcagaacaggttgcggacatgactttatcaattatgtcctctgattatacagggcaagtagtagctgtg

SEQ ID NO: 530129 - DNA, 75 bp, synthetic construct
  source 1..75: mol_type = other DNA
tgtaagcattcgtgagaaagcgaagaagcagtctcgcgtgaaagcagctctggagctggctgagcagcgtgaaaa

SEQ ID NO: 530130 - DNA, 75 bp, synthetic construct
  source 1..75: mol_type = other DNA
tggcgcggggagtatgatgaatggggcaaccagcttaatgaggagaacccgcatcacctgcaccagccgtaccgt

SEQ ID NO: 530131 - DNA, 75 bp, synthetic construct
  source 1..75: mol_type = other DNA
cggcaccacatggcagaacctttcggtaagcggtttgacctggagctatcttgacgggcgtacgctgaccgatgg

SEQ ID NO: 530132 - DNA, 75 bp, synthetic construct
  source 1..75: mol_type = other DNA
tctgatattgagaatttcttaaaaaattgtgaagaagctaccaagttctatttagagtggttaagaaatgcctct

SEQ ID NO: 530133 - DNA, 75 bp, synthetic construct
  source 1..75: mol_type = other DNA
ttgtatattgcgctatcacaacaaattgttgtgactgacaatataaagttcaatggcgaacttataaattctgta

SEQ ID NO: 530134 - DNA, 75 bp, synthetic construct
  source 1..75: mol_type = other DNA
gcaaaaggttttggtactcatccgcaccggaacatggaaattatatcctatgtgcttgaaggagcgcttgagcat

SEQ ID NO: 530135 - DNA, 75 bp, synthetic construct
  source 1..75: mol_type = other DNA
tacgcttccgggacagttccggaaccgactcctaatcctgaacccacaccagctcccgctcagcctcccatagtc

SEQ ID NO: 530136 - DNA, 75 bp, synthetic construct
  source 1..75: mol_type = other DNA
gataaaaccgtagagtgcgattgctgtgaacaacagacgttggatttgcccctatatttccagacatctgttatc

SEQ ID NO: 530137 - DNA, 75 bp, synthetic construct
  source 1..75: mol_type = other DNA
tgtcgatattgttgaaggccgttttgatgccgggatacgtctgggtgaaactgttgataaagatatgattgcagt

SEQ ID NO: 530138 - DNA, 75 bp, synthetic construct
  source 1..75: mol_type = other DNA
ctcaacacatgcatcgccggactatagcggaggcgacggtaccgcacgttcagactacatgggaatgtacgccag

SEQ ID NO: 530139 - DNA, 75 bp, synthetic construct
  source 1..75: mol_type = other DNA
atgaccccagcaggaaacacgcctggcaatatcaacctgggtaatgatgtcaccgtcaatgtcaacgacgcctct

SEQ ID NO: 530140 - DNA, 75 bp, synthetic construct
  source 1..75: mol_type = other DNA
gacgatggttatgccgccagccgcatcaacgcttcgggtcgtatgcttatcaacggtagcgttctttccaaaggt

SEQ ID NO: 530141 - DNA, 75 bp, synthetic construct
  source 1..75: mol_type = other DNA
acatgaattagtgaaggaatatggtttttataatgagcatcaaaatggttacactttaagaataagcaatttatt

SEQ ID NO: 530142 - DNA, 75 bp, synthetic construct
  source 1..75: mol_type = other DNA
ggttgcggataagatgcaaatggtactggctgcacctagtactaaagggtatgacgctacaacaactgacgatcg

SEQ ID NO: 530143 - DNA, 75 bp, synthetic construct
  source 1..75: mol_type = other DNA
acagcaaccggcgcattcggcgcctggacagacaaaccgggggattacggactcacctgttcggcaggtcacatt

SEQ ID NO: 530144 - DNA, 75 bp, synthetic construct
  source 1..75: mol_type = other DNA
ctggataacgtcatggaatttgaagatatcgccgataacgcagtggacgcaccgactgaaacctgcttcatgcac

SEQ ID NO: 530145 - DNA, 75 bp, synthetic construct
  source 1..75: mol_type = other DNA
agagattttagaaagtaattttacgcttgttgaaaaacacgatttattaagaaatatttctgaagaaattctaaa

SEQ ID NO: 530146 - DNA, 75 bp, synthetic construct
  source 1..75: mol_type = other DNA
acgtcgataaaaaacagattgcggcggtgattgccgaatggaccggcgtgccgcttaaccgcctgtcgcagaatg

SEQ ID NO: 530147 - DNA, 75 bp, synthetic construct
  source 1..75: mol_type = other DNA
cgcaacaaatcaagagcgactgcgagacgctggcggataacgtacagcagaatgcagaatccgttgccgaagata

SEQ ID NO: 530148 - DNA, 75 bp, synthetic construct
  source 1..75: mol_type = other DNA
aataattattacactgcgtacgcgataaaatttgcattaagttattatccagattcattctggatatataatttt

SEQ ID NO: 530149 - DNA, 75 bp, synthetic construct
  source 1..75: mol_type = other DNA
tatttttatgatatgaacacgctagttgatgccggaacagaaggtttaagactcattaaaacctggcagcaagca

SEQ ID NO: 530150 - DNA, 75 bp, synthetic construct
  source 1..75: mol_type = other DNA
aacaccaactcagccacaaaaaagacatttaacaaccttgataacttatcatatattcagaagacttcttttcgg

SEQ ID NO: 530151 - DNA, 75 bp, synthetic construct
  source 1..75: mol_type = other DNA
accaaagctattttcccggtgataattatacatcactattaggtactgttaactcaggtcaaacatggagataca

SEQ ID NO: 530152 - DNA, 75 bp, synthetic construct
  source 1..75: mol_type = other DNA
atgccgcagcacgtcttaagcaagaacgtgctgcggttggatgctattttttccctgaagcggaaaacattacta

SEQ ID NO: 530153 - DNA, 75 bp, synthetic construct
  source 1..75: mol_type = other DNA
tcaataaagcatcgacattgacaattggccgtgaaggtatgagtttgaccgaagcactcagctcatcagaaggcc

SEQ ID NO: 530154 - DNA, 75 bp, synthetic construct
  source 1..75: mol_type = other DNA
ggcagatagatctttatccagagctgaaatcaatgctgaaaatccctaaccgtttgtcagaaattgcagcagagg

SEQ ID NO: 530155 - DNA, 75 bp, synthetic construct
  source 1..75: mol_type = other DNA
ctggactgccagtggtggttatctggttggctgggagaacctgaaggtcaacgaggcttcactcagggcactgat

SEQ ID NO: 530156 - DNA, 75 bp, synthetic construct
  source 1..75: mol_type = other DNA
agaggcgcaaaaccggggcgttatctggtttatgcaaaccccggcatagtgataccaaaagtgctattcagtgga

SEQ ID NO: 530157 - DNA, 75 bp, synthetic construct
  source 1..75: mol_type = other DNA
ttaaaacctgatccgtcagataaaagatcttcttgtccggacgtttcactgccggacgaaaaacaatcatcacca

SEQ ID NO: 530158 - DNA, 75 bp, synthetic construct
  source 1..75: mol_type = other DNA
gatgattgaccccgatccgtcagtattaaaacctgatccgtcagataaaagatcttcttgtccggacgtttcact

SEQ ID NO: 530159 - DNA, 75 bp, synthetic construct
  source 1..75: mol_type = other DNA
tgtcgatattgttgaaggtcgttttgatgccgggatacgtctgggtgaaactgtcgataaagatatgattgcagt

SEQ ID NO: 530160 - DNA, 75 bp, synthetic construct
  source 1..75: mol_type = other DNA
ttctccctttggtcagagttatatcaccggtatccgccgtaaccagaccaccgggcgtctggaagccctgacctg

SEQ ID NO: 530161 - DNA, 75 bp, synthetic construct
  source 1..75: mol_type = other DNA
tagcagtgatggtttcatatactggccgacaaaggatgaagatgcatacgccctgaaatgtgttggtgattcaat

SEQ ID NO: 530162 - DNA, 75 bp, synthetic construct
  source 1..75: mol_type = other DNA
tgctggtccaggaatagatacatatgcttttcatcgttggctcgataagcatcgtaatgatttatcctgcaaaaa

SEQ ID NO: 530163 - DNA, 75 bp, synthetic construct
  source 1..75: mol_type = other DNA
gcgaagcagctgcatgacgcggacacctcaccagtggacacgccaccagcgaagagaaacaccacgccagcggag

SEQ ID NO: 530164 - DNA, 75 bp, synthetic construct
  source 1..75: mol_type = other DNA
aggccgacgcgactatgaaggtttcgatccgtctaaatcaacgctggccgcccgcgcgcgcaactttgcgcaggt

SEQ ID NO: 530165 - DNA, 75 bp, synthetic construct
  source 1..75: mol_type = other DNA
atctttccccggatattacctctactacccgagccgcaagcagcatccccccgcttttgcgctgatgatcgatgc

SEQ ID NO: 530166 - DNA, 75 bp, synthetic construct
  source 1..75: mol_type = other DNA
ccgccgtctcaagagcgttcagtccacggtgaaaaaagcggaaatcaaggtggagctgctgccgaaatatgccgc

SEQ ID NO: 530167 - DNA, 75 bp, synthetic construct
  source 1..75: mol_type = other DNA
tcgcaagattattgctgcagaggtatttgccagcgaatctggaaaacatgcagcagaactactccagcgggcagt

SEQ ID NO: 530168 - DNA, 75 bp, synthetic construct
  source 1..75: mol_type = other DNA
tattctctactactgcggtgcccgcgttgaagaaatcgcacagctccgtaagggtgacatcgtggaagttggcgg

SEQ ID NO: 530169 - DNA, 75 bp, synthetic construct
  source 1..75: mol_type = other DNA
ccttcagtgcggcgtaaaacctgaaaaacagaaaatgaccgaaattctgtctgatgagttttatgctgccgaaaa

SEQ ID NO: 530170 - DNA, 75 bp, synthetic construct
  source 1..75: mol_type = other DNA
atgaccgccttatcattccgacaggtgcgcgaccgccttaatctttcctccgatgatgatttactctcgctgatt

SEQ ID NO: 530171 - DNA, 75 bp, synthetic construct
  source 1..75: mol_type = other DNA
ccagccagtaacgaccgtagacgatttaccggcccgactggagacgatgcggcccggtggtgaactccagtcggt

SEQ ID NO: 530172 - DNA, 75 bp, synthetic construct
  source 1..75: mol_type = other DNA
gatacatatgtagcggacaaatatgcattatctagtttttttcaacgaatacctggagtgatatatcaaacaaat

SEQ ID NO: 530173 - DNA, 75 bp, synthetic construct
  source 1..75: mol_type = other DNA
tccgcatcattaaaaaccacgcccagcttatggcgctgctcgacgcgctggcgctggttattccggtcacgaagg

SEQ ID NO: 530174 - DNA, 75 bp, synthetic construct
  source 1..75: mol_type = other DNA
aaaattaatatcggtaatggatatatcggtgggggtgaaaaagcccagacagtgctgacgttgaaggattctgcg

SEQ ID NO: 530175 - DNA, 75 bp, synthetic construct
  source 1..75: mol_type = other DNA
catgaaaggaggcatttctgctgcaggccagttagagttaaatatggacaatagttcaaacctgcatgttgataa

SEQ ID NO: 530176 - DNA, 75 bp, synthetic construct
  source 1..75: mol_type = other DNA
atctcgcttagcatatgccaaaaatattgacggcagcagtaccattagcaatagggatatttcaggatcattaaa

SEQ ID NO: 530177 - DNA, 75 bp, synthetic construct
  source 1..75: mol_type = other DNA
ataatgtctggtatgtcaataattatgcgtggggtaattatgagtcaggtggaacgatatctgttacgtgtctca

SEQ ID NO: 530178 - DNA, 75 bp, synthetic construct
  source 1..75: mol_type = other DNA
tcactaatgcagtgctgtctgctgattctctgtctcttggtggaggagaggctgctaaagtcataatgagcggaa

SEQ ID NO: 530179 - DNA, 75 bp, synthetic construct
  source 1..75: mol_type = other DNA
gctaatgtttctgtcggggctggtagtaacatgtcaataaaagggaatgctagtattggcgttggagatcaggct

SEQ ID NO: 530180 - DNA, 75 bp, synthetic construct
  source 1..75: mol_type = other DNA
ggcagggcttcgtctatgtggcgttcatcattgatgtgtttgccggatacattgtggggtggcgggtctcaccgt

SEQ ID NO: 530181 - DNA, 75 bp, synthetic construct
  source 1..75: mol_type = other DNA
atgaaattcacacggaacgggttatccgcacggaaaccattaagccggtttttagcaacgtttgcgcttctgatg

SEQ ID NO: 530182 - DNA, 75 bp, synthetic construct
  source 1..75: mol_type = other DNA
aaccagccgtacccacaagtttattgaagtcagaacggttaacagcggcattaacgccgaatttaaccgccgtta

SEQ ID NO: 530183 - DNA, 75 bp, synthetic construct
  source 1..75: mol_type = other DNA
gaactggtggttgataacggcttcgtcgatattgttgaggggcgttttgacgccgggatccgcctaggcgaaagc

SEQ ID NO: 530184 - DNA, 75 bp, synthetic construct
  source 1..75: mol_type = other DNA
ctaatctgctgctgaaacgcgcaggggaaagtcgagaggtgagcggctgcggcggtgatgatgaggtgcttacca

SEQ ID NO: 530185 - DNA, 75 bp, synthetic construct
  source 1..75: mol_type = other DNA
caaatgaaaataattttgaacgtccatttacacaagatgtctttgttcatcttagaggcggtgattatcaaacgg

SEQ ID NO: 530186 - DNA, 75 bp, synthetic construct
  source 1..75: mol_type = other DNA
ccaactctttcttaacctgcttgaagctcaaggatatgccgtcgttcctatggaaaacaatgtgctgaaagtcgt

SEQ ID NO: 530187 - DNA, 75 bp, synthetic construct
  source 1..75: mol_type = other DNA
agtaatcagagcagcagaaaaaagaggaacagtagcagtagcagtagcagtagcagtagcagtagcagtagcagt

SEQ ID NO: 530188 - DNA, 75 bp, synthetic construct
  source 1..75: mol_type = other DNA
ggcgttgccccttacatcccggcgtctttttgccgggatgccgggagcgcaggccacggcgcgacagaggcggcg

SEQ ID NO: 530189 - DNA, 75 bp, synthetic construct
  source 1..75: mol_type = other DNA
ggtggcaatgttctgtcatttcacagtaatgcgctcagtgcgttttataacctgattaaggatgacagtcgtttc

SEQ ID NO: 530190 - DNA, 75 bp, synthetic construct
  source 1..75: mol_type = other DNA
agtttttatctgacggataaacaggaaccgcgtcagttttttaaaacctattttcagcacctgaatatcgccgtc

SEQ ID NO: 530191 - DNA, 75 bp, synthetic construct
  source 1..75: mol_type = other DNA
cgccatcgaacgcttgtttaaatcagacatcgaagcgaagcaggtcgcggccattattttcgaaccggtgcaggg

SEQ ID NO: 530192 - DNA, 75 bp, synthetic construct
  source 1..75: mol_type = other DNA
ctatctgcttgttactcatagcagtaaaggtcaattaggtcatgcattaactatttcaggttatcagaaaatttt

SEQ ID NO: 530193 - DNA, 75 bp, synthetic construct
  source 1..75: mol_type = other DNA
tgcattttctgaatggggagcatgttaaggctgccacagcttttcgtcatggctttgctacaaacacttacatcg

SEQ ID NO: 530194 - DNA, 75 bp, synthetic construct
  source 1..75: mol_type = other DNA
cagataatcagaacgatcatgaggttcatacagaaacatgttttcgacttcctgatgcaaacaatcgtaaagagc

SEQ ID NO: 530195 - DNA, 75 bp, synthetic construct
  source 1..75: mol_type = other DNA
gctagttatgaaggcatattttgacaagatggaatcaaatgacatcagtgttatggctgccatattattggtaga

SEQ ID NO: 530196 - DNA, 75 bp, synthetic construct
  source 1..75: mol_type = other DNA
tgatccaaatgtaactaacgataaaataagaatcatgagcgaaagtaaagaggatattaaacactattcactgat

SEQ ID NO: 530197 - DNA, 75 bp, synthetic construct
  source 1..75: mol_type = other DNA
tattgattcttctcgttatgaagcaatcagtcgagcatttgattttataaagccaagaatagagaacggaaagaa

SEQ ID NO: 530198 - DNA, 75 bp, synthetic construct
  source 1..75: mol_type = other DNA
tggggcagatcaggacggatgagaaatctaatgagatcacagctatccctgaacttcttaacattttgtatatta

SEQ ID NO: 530199 - DNA, 75 bp, synthetic construct
  source 1..75: mol_type = other DNA
acagtttatttcaattcgattattttattatatgttgctttatgtaatatcctgatatttaccctatattacaag

SEQ ID NO: 530200 - DNA, 75 bp, synthetic construct
  source 1..75: mol_type = other DNA
gcatcaacaaaggctactgaagcatcaaaaagtgctgccgctgcagagtcctcaaaaagcgcggcagccaccagt

SEQ ID NO: 530201 - DNA, 75 bp, synthetic construct
  source 1..75: mol_type = other DNA
accaaagattaatatagctattattcaggtcggcctttattacaaaaacggtggaaccacagaacagttttacga

SEQ ID NO: 530202 - DNA, 75 bp, synthetic construct
  source 1..75: mol_type = other DNA
gtttggcgccattctgggttatgcctcccgccgttttgcggtggaagacgatccggtcgttgagaaaattgacga

SEQ ID NO: 530203 - DNA, 75 bp, synthetic construct
  source 1..75: mol_type = other DNA
tgttcttgcatgtggataattcgcaattacatcagaaaacagcattaattccttttatagaaaaaagaggcgtat

SEQ ID NO: 530204 - DNA, 75 bp, synthetic construct
  source 1..75: mol_type = other DNA
caagttggtctttattataaaaatggaggaacacctgaaaggttttataatgacatggcgaaatttataaaagaa

SEQ ID NO: 530205 - DNA, 75 bp, synthetic construct
  source 1..75: mol_type = other DNA
acaggcgaaggcgcggcaccggagcctggcggaggtgttgcaggaggacacgggtgtgacgctaccggcggagct

SEQ ID NO: 530206 - DNA, 75 bp, synthetic construct
  source 1..75: mol_type = other DNA
cgtctggtgttctacacgcggatacagcacggtgagccgcaggtggagagccgctacctctatgacccgctgggc

SEQ ID NO: 530207 - DNA, 75 bp, synthetic construct
  source 1..75: mol_type = other DNA
ggatggatcgcagctgtacccggcggctatgtccgattgaggagggcatgccatgttcgacgtactaatgtattt

SEQ ID NO: 530208 - DNA, 75 bp, synthetic construct
  source 1..75: mol_type = other DNA
agcgagtatgatgaggcggggaggctgaaggcgcagacggatgcggcggggcggcggacggagtaccggctgcat

SEQ ID NO: 530209 - DNA, 75 bp, synthetic construct
  source 1..75: mol_type = other DNA
acgggcgtccacactacggcagcgaacctggatatcgatatcccgtatgcgacggacccggcaggaaaccggctg

SEQ ID NO: 530210 - DNA, 75 bp, synthetic construct
  source 1..75: mol_type = other DNA
gacctgaccggaaaactcacgcagagtgaagatgaggggcttatcaccctctggcattacgatgcgtcagaccgt

SEQ ID NO: 530211 - DNA, 75 bp, synthetic construct
  source 1..75: mol_type = other DNA
ataaaaatgctcagagcaatggagatcatgaagtgcatgctgaggggtgttcatatctccctgaggtatctaatc

SEQ ID NO: 530212 - DNA, 75 bp, synthetic construct
  source 1..75: mol_type = other DNA
gccagaaaaaggcggccaccgtctattaccccgcgcaggttgtgcgcggaaatcgcgatgtaacaacgaaagagg

SEQ ID NO: 530213 - DNA, 75 bp, synthetic construct
  source 1..75: mol_type = other DNA
ccggcaatttcagtaccggacaacagcaggaacccgctttttcaaagacgagctatgtacagcggattggctact

SEQ ID NO: 530214 - DNA, 75 bp, synthetic construct
  source 1..75: mol_type = other DNA
ataattttgatctgataccagagtttcgtattattggtgacttcccggttgatagtcacattatctctgcactat

SEQ ID NO: 530215 - DNA, 75 bp, synthetic construct
  source 1..75: mol_type = other DNA
atggcggatgtcaaacccctcctagatctggaacatttaccatcaaacatggtgctctggggtgagtccatggcc

SEQ ID NO: 530216 - DNA, 75 bp, synthetic construct
  source 1..75: mol_type = other DNA
ttcactatcagcaagccccacagcaattaggggtaatctatcaatattattttgaacaagcaggagtatgtcatt

SEQ ID NO: 530217 - DNA, 75 bp, synthetic construct
  source 1..75: mol_type = other DNA
atttgatgttagtcgcagcgctgttaacccaaaaagataataacctgatacatcaactgtctgcgctttttgaat

SEQ ID NO: 530218 - DNA, 75 bp, synthetic construct
  source 1..75: mol_type = other DNA
ggtatcgcaaacaagatatcgttgatttctttgcaaagcatccagcaaggcgatacgggagcaaatataatggct

SEQ ID NO: 530219 - DNA, 75 bp, synthetic construct
  source 1..75: mol_type = other DNA
tcggctttctgttcacctggctgatgattgctttaagccagcccaccctgcaccggatagccctgcacgacggaa

SEQ ID NO: 530220 - DNA, 75 bp, synthetic construct
  source 1..75: mol_type = other DNA
gatgattttcacttatcggcgttaatggtggatggcggcccgaccaaaaatgactggttgatgcaatatcaggcg

SEQ ID NO: 530221 - DNA, 75 bp, synthetic construct
  source 1..75: mol_type = other DNA
atcaccacctccgaagggcaaagttacggcatgttctttgccctggcggctaacgaccgtgcagctttcgataat

SEQ ID NO: 530222 - DNA, 75 bp, synthetic construct
  source 1..75: mol_type = other DNA
tgacgatgctgctgctggctgcctttagtgttcaggcagcctgtacctggcctgcctgggagcagtttaaaaagg

SEQ ID NO: 530223 - DNA, 75 bp, synthetic construct
  source 1..75: mol_type = other DNA
catccagtaatgttctgcttttgcctggccgggaggagaaacaaagatggttaaaaggtaagaagaagactgagg

SEQ ID NO: 530224 - DNA, 75 bp, synthetic construct
  source 1..75: mol_type = other DNA
atcgcggttatcttgctgaatatcctgacagcccagtgtacaaacaacttcttaataatgaggaagatagtgaag

SEQ ID NO: 530225 - DNA, 75 bp, synthetic construct
  source 1..75: mol_type = other DNA
atgactaaattttcccttgtcttatgcactataaataataggaaagatatcccaaaatttatcgaatcattatca

SEQ ID NO: 530226 - DNA, 75 bp, synthetic construct
  source 1..75: mol_type = other DNA
tcgcgccgccagtctgatatcacccgcgcggattatgtttcgaatgacggcattgtcgccggtcgggcacagtat

SEQ ID NO: 530227 - DNA, 75 bp, synthetic construct
  source 1..75: mol_type = other DNA
tatgacagttttgtgccggttgaattcggtcgcttcaatggcggggtaattgatgcaaagatcaaacgcttcaac

SEQ ID NO: 530228 - DNA, 75 bp, synthetic construct
  source 1..75: mol_type = other DNA
tcactggacaagatggtgcttatcttgctgaacttttgcttggtaaagggtataaagtatatggtacataccgcc

SEQ ID NO: 530229 - DNA, 75 bp, synthetic construct
  source 1..75: mol_type = other DNA
ttactataaggtcattaaccagaacaatcgccgcgtcacaatcggcctgaacaacatgatctggcattacgacaa

SEQ ID NO: 530230 - DNA, 75 bp, synthetic construct
  source 1..75: mol_type = other DNA
taaccatgctttgacggtccggctaagaataaagaacacaactgaaggatgtacccattacgtggtttcggttta

SEQ ID NO: 530231 - DNA, 75 bp, synthetic construct
  source 1..75: mol_type = other DNA
atggacagtgttggcattgaggttattgcattatatgataaaaaaaataaaaaatgggagtctgctacagactct

SEQ ID NO: 530232 - DNA, 75 bp, synthetic construct
  source 1..75: mol_type = other DNA
gatgtaaggaggaaaaaacatggtcgtctgaagaaaaaaagaaaatagaggcattcggatggaatgctaagaaga

SEQ ID NO: 530233 - DNA, 75 bp, synthetic construct
  source 1..75: mol_type = other DNA
atgcgcagcctgaaaggcggcaaaccttttgtgctgatggagtccacgccgagtaccaccaactggcagccgacc

SEQ ID NO: 530234 - DNA, 75 bp, synthetic construct
  source 1..75: mol_type = other DNA
cacgccagaattatggtgggctgggcaggggagccgaaaggctcgccggtttccttgagcgccggtagttccaac

SEQ ID NO: 530235 - DNA, 75 bp, synthetic construct
  source 1..75: mol_type = other DNA
catttaggcaagcggtgatgacaaatataaatagtacatttaatcctttcttagatttgaatcctctggtagtag

SEQ ID NO: 530236 - DNA, 75 bp, synthetic construct
  source 1..75: mol_type = other DNA
agtaaagcttgatgactccagtatcgatctttctgttatgcgtttcgttcaatcctcattaagcctagggaaggt

SEQ ID NO: 530237 - DNA, 75 bp, synthetic construct
  source 1..75: mol_type = other DNA
gctcagccgataaaccagctagtacctcagcacccttatcttaacgacgtcccactcattgatgagttaaggcgt

SEQ ID NO: 530238 - DNA, 75 bp, synthetic construct
  source 1..75: mol_type = other DNA
ttcattttatcactacacatccttcaggtataaaagatacactcgcctggttagttaacgcgggtaaattaatga

SEQ ID NO: 530239 - DNA, 75 bp, synthetic construct
  source 1..75: mol_type = other DNA
aaaattaaaagatgcgattagagatggactaaaacggcaacaggaaattgataaatggaaaagggaaaacatgac

SEQ ID NO: 530240 - DNA, 75 bp, synthetic construct
  source 1..75: mol_type = other DNA
taggcctgataagtcgcgtcagcgacgcatcaggcatcggctgtcgaatacaatcaacgggcgttttttatttca

SEQ ID NO: 530241 - DNA, 75 bp, synthetic construct
  source 1..75: mol_type = other DNA
actcaataatgcgctacccatatccatcatgaccagcacatggtcggcatcagcaacagattcgatggcctccat

SEQ ID NO: 530242 - DNA, 75 bp, synthetic construct
  source 1..75: mol_type = other DNA
acacacagaatgcacagtgggctgattatgtaggtgacattcttcgagggactcaaccaataaaccagctagtac

SEQ ID NO: 530243 - DNA, 75 bp, synthetic construct
  source 1..75: mol_type = other DNA
attacgacgcaatggacaactatattcgtaaccttcgtgaccctgtaagaccgcaggatgcggctacaaaaaaat

SEQ ID NO: 530244 - DNA, 75 bp, synthetic construct
  source 1..75: mol_type = other DNA
ctattttagatgaacgaatggaaataaaaagcaaaacaaaaaaagacaatccaaatagaattgataagatactta

SEQ ID NO: 530245 - DNA, 75 bp, synthetic construct
  source 1..75: mol_type = other DNA
ttgaagcttttatcaggacttatgtgaaggatctcgaagaaggggttgccgccgtttttgctggtgcgggcctat

SEQ ID NO: 530246 - DNA, 75 bp, synthetic construct
  source 1..75: mol_type = other DNA
gggatgcttcgtttacgctgggtaatactggcggtttcgttgatcttgggacctatgagtatgtcctgaaaagcg

SEQ ID NO: 530247 - DNA, 75 bp, synthetic construct
  source 1..75: mol_type = other DNA
ccggagaaacgcatcacgccttctacggcagccgtactcaatatggcagcaacattaccgttggtctttgatgct

SEQ ID NO: 530248 - DNA, 75 bp, synthetic construct
  source 1..75: mol_type = other DNA
agcagttcgttaagcgggcatctcggggtggggtatagccatggtgccggtgtggaatccccgtggaacgcggtg

SEQ ID NO: 530249 - DNA, 75 bp, synthetic construct
  source 1..75: mol_type = other DNA
tacgaatctgttggcacgattggtaaacgttgcggctgcaagcccgaagccgttcgcaatttcaggaacaagctt

SEQ ID NO: 530250 - DNA, 75 bp, synthetic construct
  source 1..75: mol_type = other DNA
tgccggtgagttcgcgcaaatcagcattgatggcggcaccacctggcagaatctttcggtaagcggtttgacctg

SEQ ID NO: 530251 - DNA, 75 bp, synthetic construct
  source 1..75: mol_type = other DNA
cctggcgctataacgacagccgcacgctgaccgatggcaactatctctatcaggtgcgggtgattgacgcagcgg

SEQ ID NO: 530252 - DNA, 75 bp, synthetic construct
  source 1..75: mol_type = other DNA
agctggagctacaccctaggcagcgccgatgttaccgcgctggcggacggcaatgcttacgtgattaacgcctcg

SEQ ID NO: 530253 - DNA, 75 bp, synthetic construct
  source 1..75: mol_type = other DNA
cgctggtaggcaactccaccacgtcgaacagcggcggtagcgccacggtgggcggggcggtgacggggtatcttt

SEQ ID NO: 530254 - DNA, 75 bp, synthetic construct
  source 1..75: mol_type = other DNA
ggctttgccgcaggcacggcgttgacggtggtgataaataatcaaacttacgccgccacggtgctggcgaacggc

SEQ ID NO: 530255 - DNA, 75 bp, synthetic construct
  source 1..75: mol_type = other DNA
tgatctggcgctttctggcaccagcgatcagccagcgggcacggcgatcaccgtcacgctgaacggacaaaacta

SEQ ID NO: 530256 - DNA, 75 bp, synthetic construct
  source 1..75: mol_type = other DNA
tcagtatatagacccttttggattagctgatatgaatttctatgatgaggggatacgcagaaatgtatcactgca

SEQ ID NO: 530257 - DNA, 75 bp, synthetic construct
  source 1..75: mol_type = other DNA
aatccatacaattcaagcggactggtctgaatacgagcatggcacatcttttcattggagagcaaaagatgttgt

SEQ ID NO: 530258 - DNA, 75 bp, synthetic construct
  source 1..75: mol_type = other DNA
tcatataacgatgagcttagcttactgaggtccatgtccgctcagttcctgaaatgcgggaatcagaagctctat

SEQ ID NO: 530259 - DNA, 75 bp, synthetic construct
  source 1..75: mol_type = other DNA
agcagctccggctttgccgcaggcacggcgttgacggtggtgattaacaaccaaacttacgccgccacggtgctg

SEQ ID NO: 530260 - DNA, 75 bp, synthetic construct
  source 1..75: mol_type = other DNA
tgtttccttttttttcttgcgccttcagtgttgattcaatgataaagttttcaggcgaagatgacttttttcttg

SEQ ID NO: 530261 - DNA, 75 bp, synthetic construct
  source 1..75: mol_type = other DNA
taatttcgatgaggctagcgtccagggaatgggtattaccattctccgtggtgaggaaaatatctccattaatag

SEQ ID NO: 530262 - DNA, 75 bp, synthetic construct
  source 1..75: mol_type = other DNA
agcgtaaaacggtaaccagcatcctgatggcgtgggtgtttactttaccggcggcgatttttctttctggtgggt

SEQ ID NO: 530263 - DNA, 75 bp, synthetic construct
  source 1..75: mol_type = other DNA
ttctccggacgacgaaaaagccttttactggctgaagctggccgctgagcaaggtcattgtgaagcacagtattc

SEQ ID NO: 530264 - DNA, 75 bp, synthetic construct
  source 1..75: mol_type = other DNA
ggggtcgtgtcagtagaaacaggatctgtaacaaagagatgtacgacgtggacgtctcgcacacgctgatatcta

SEQ ID NO: 530265 - DNA, 75 bp, synthetic construct
  source 1..75: mol_type = other DNA
tatcgaagggctggtctgggagcaggcattttctttgtggtatacgcgtttctgggggttccggcgaatcttttg

SEQ ID NO: 530266 - DNA, 75 bp, synthetic construct
  source 1..75: mol_type = other DNA
cttcttctccatctccggatcagagtttgtcgagatgttcgtcggcgtgggtgcagcgcgcgtgcgcgacctgtt

SEQ ID NO: 530267 - DNA, 75 bp, synthetic construct
  source 1..75: mol_type = other DNA
ttgaattgccttatctcccgggctaagggatacgatacgacagaagctgacttcctcacatggtctaagtctaat

SEQ ID NO: 530268 - DNA, 75 bp, synthetic construct
  source 1..75: mol_type = other DNA
gatgaatattatccgctggattcgatttcccgtgatgtgaaggcgttcgtaaagtctgttgaccgtcattaccgg

SEQ ID NO: 530269 - DNA, 75 bp, synthetic construct
  source 1..75: mol_type = other DNA
tctgaacataaaacactatcaataagttggagtcattacctgtattctgaagaaaaaatcaagtttgtcgaaagt

SEQ ID NO: 530270 - DNA, 75 bp, synthetic construct
  source 1..75: mol_type = other DNA
gcaggcacgtacaacggtacagcaaaccattcccgcagtgactcggcttgctgccgcgaccattacgaggagctg

SEQ ID NO: 530271 - DNA, 75 bp, synthetic construct
  source 1..75: mol_type = other DNA
ggttacttgaaaaaggtttccccagatttaaaggcatcagacatcccggtattatgtaattgctgtacttacact

SEQ ID NO: 530272 - DNA, 75 bp, synthetic construct
  source 1..75: mol_type = other DNA
ccgtattatgcaactgaaccggattaaagccgtgcgcggctataaagcgccgcgtcgtatcgctggcagaccttc

SEQ ID NO: 530273 - DNA, 75 bp, synthetic construct
  source 1..75: mol_type = other DNA
aattaattatactatggatttaaacatagaagactctagctcagaagagttactttcagataataccctcgagaa

SEQ ID NO: 530274 - DNA, 75 bp, synthetic construct
  source 1..75: mol_type = other DNA
atttgcaattataaaatctataccaagggcaactcttacagataaattagaaaatgaattaacaaaagaaatata

SEQ ID NO: 530275 - DNA, 75 bp, synthetic construct
  source 1..75: mol_type = other DNA
aggaaaaagaagcaacatcatttggtgaggaacatgttattccagagactattggtggtaattatattataaata

SEQ ID NO: 530276 - DNA, 75 bp, synthetic construct
  source 1..75: mol_type = other DNA
agcctctggctacagaggtgaggtaattaccgcgtctaacggaatagatacactgaaaatgaaagaggatgggac

SEQ ID NO: 530277 - DNA, 75 bp, synthetic construct
  source 1..75: mol_type = other DNA
ataacattaccgatccgcttgagacgttgcccgtctataccaacgtgtttggtaagattggtctggtcacgctgg

SEQ ID NO: 530278 - DNA, 75 bp, synthetic construct
  source 1..75: mol_type = other DNA
acacaatccgcgccgggatgggagctatataacacccctgatgattttgaccagcgcccgccgtttgatgatgaa

SEQ ID NO: 530279 - DNA, 75 bp, synthetic construct
  source 1..75: mol_type = other DNA
tgagccaccaggagcgcaacagcgtgcgggcggcatatgtgcataaagcagagcatctggaggccagaaaggcca

SEQ ID NO: 530280 - DNA, 75 bp, synthetic construct
  source 1..75: mol_type = other DNA
tgtcatttggttattattaataacatccaaaagttaaagcaattgacaaaaacgaacaatagtatcgattttaac

SEQ ID NO: 530281 - DNA, 75 bp, synthetic construct
  source 1..75: mol_type = other DNA
gatattaaaacagaaacggtggcggacattgtgcaatcgctgccatcgtttactgaaacgcgagcggatgacctg

SEQ ID NO: 530282 - DNA, 75 bp, synthetic construct
  source 1..75: mol_type = other DNA
ttattctttatgcccccagcggcgttattgccgataaattttcacaccgcaaaatgattacttccgcgatgatca

SEQ ID NO: 530283 - DNA, 75 bp, synthetic construct
  source 1..75: mol_type = other DNA
agacctttgaacagaagacacaggaacaacaggattactggaactccttgagtcatcctaaccacaatgctctta

SEQ ID NO: 530284 - DNA, 75 bp, synthetic construct
  source 1..75: mol_type = other DNA
ggtgtccactattctctcaggaatttcaggatctgccagacggtgctgagacgacgcttacacttgatcatgaaa

SEQ ID NO: 530285 - DNA, 75 bp, synthetic construct
  source 1..75: mol_type = other DNA
gtggtggcattcggcaaacaggccgacgcactggcaggacacgttaaaggcgatttagtcagtgttgccggagcg

SEQ ID NO: 530286 - DNA, 75 bp, synthetic construct
  source 1..75: mol_type = other DNA
gcaaaaaaggtcaacagggccaggctactgacgcactgaacagggcaaaacaacaggcgggtaacgatgatccgt

SEQ ID NO: 530287 - DNA, 75 bp, synthetic construct
  source 1..75: mol_type = other DNA
tccacacacagataaatcaatacgttgtgatttctgacttccctcccgtttcggtagaaaaattcaacctctgtt

SEQ ID NO: 530288 - DNA, 75 bp, synthetic construct
  source 1..75: mol_type = other DNA
tgttacatttaaagtaagtaatgtaaatcagtccatgtatattttagcaatgggtggtgcatttaaagatgcaaa

SEQ ID NO: 530289 - DNA, 75 bp, synthetic construct
  source 1..75: mol_type = other DNA
atggaggatgttgcaggtgtcacgcagttaatgcgcgaaatgctgcaattaataaaatttcagttcagccttaat

SEQ ID NO: 530290 - DNA, 75 bp, synthetic construct
  source 1..75: mol_type = other DNA
ggcgcaagatcaccgacaggttgcgcagcggtacggcgttacacctgtacctgcccggtgctcacggcggcgtgt

SEQ ID NO: 530291 - DNA, 75 bp, synthetic construct
  source 1..75: mol_type = other DNA
gataatattattgaaaggagagttttcaatttacctttaaatattaatgatctagcgagagatgttgaaagtaca

SEQ ID NO: 530292 - DNA, 75 bp, synthetic construct
  source 1..75: mol_type = other DNA
tgtggcgatattttgcgaacgccggtcggctctcgcgtgatgcgtcgcgattatggctcgctgttgttctccctg

SEQ ID NO: 530293 - DNA, 75 bp, synthetic construct
  source 1..75: mol_type = other DNA
ttacggctcgttgctggcatcaatgattgaccagccgcagaccccggcgcttgagttgcagattaaggtcgcctg

SEQ ID NO: 530294 - DNA, 75 bp, synthetic construct
  source 1..75: mol_type = other DNA
gcaaaacattacccgtgccgctcatgttctgggtatgtcgcaacctgcggtcagtaacgctgttgcacgcctgag

SEQ ID NO: 530295 - DNA, 75 bp, synthetic construct
  source 1..75: mol_type = other DNA
tatttattttagtttttatcagtgggtttattctcttcactgtctattcttacacagcagaaaaaatgatatata

SEQ ID NO: 530296 - DNA, 75 bp, synthetic construct
  source 1..75: mol_type = other DNA
gttctgttatgttaaggaacatcactcttgggatgaaaaattaaaacctctaattaacaaaattgacgaaatatt

SEQ ID NO: 530297 - DNA, 75 bp, synthetic construct
  source 1..75: mol_type = other DNA
attaggttatgttcaacaaaatcattcgtggtctgagaaattacaacccctaattcaagtaattaataatttaat

SEQ ID NO: 530298 - DNA, 75 bp, synthetic construct
  source 1..75: mol_type = other DNA
taaatttaattagagcaaaagattatgcttctaaattaaatggtgtcacttcctttgatgtatcattcttacgta

SEQ ID NO: 530299 - DNA, 75 bp, synthetic construct
  source 1..75: mol_type = other DNA
gaaagatgtgatagttttgtaacattacatttaatgccactgctgaatgtaattggtaaatcccgtgagggtgaa

SEQ ID NO: 530300 - DNA, 75 bp, synthetic construct
  source 1..75: mol_type = other DNA
aattgagcgaggagtaaggaaccccacgcttgttgtcatttgtgcaatctcggacggtctggggatggatcttag

SEQ ID NO: 530301 - DNA, 75 bp, synthetic construct
  source 1..75: mol_type = other DNA
taacgatttagaggtttacgggatgcgtgttgtcgaaccgcaccacgacgggacgccacactggcacatgatgct

SEQ ID NO: 530302 - DNA, 75 bp, synthetic construct
  source 1..75: mol_type = other DNA
agggaacgacactgtaattatactaaatgccatgggtgtaaaagctggcgaagcggcagcaaaagcatacttagg

SEQ ID NO: 530303 - DNA, 75 bp, synthetic construct
  source 1..75: mol_type = other DNA
agtgaggaaagccgccgctggctggcatcgtgcggcctgaccgtggagcagatgcaaaaccagatggacccggtg

SEQ ID NO: 530304 - DNA, 75 bp, synthetic construct
  source 1..75: mol_type = other DNA
agatttgtctttctcgtccggttcttgatggtatgacttttcctggtgtttataaaggtgatgacgggacccgtt

SEQ ID NO: 530305 - DNA, 75 bp, synthetic construct
  source 1..75: mol_type = other DNA
acgcctgacggatgaactgcgtgctcagggttaccactttaacgtaaaaaccgtggcggcaagcctgcaccgtca

SEQ ID NO: 530306 - DNA, 75 bp, synthetic construct
  source 1..75: mol_type = other DNA
gagcgccttgatatcggaacttacccggcaactggattaaaagaggccagagaagaagttatccgtctccgtggt

SEQ ID NO: 530307 - DNA, 75 bp, synthetic construct
  source 1..75: mol_type = other DNA
gctggcggtactgaggtcgagggtgaatacataaagaccatgtgtttattagtcgccagactgggagtttatcag

SEQ ID NO: 530308 - DNA, 75 bp, synthetic construct
  source 1..75: mol_type = other DNA
gctggcgcgtggggcaacggtgatttatggcgataaaaaattcaaatacgtggctgctgatgagtggccgggatt

SEQ ID NO: 530309 - DNA, 75 bp, synthetic construct
  source 1..75: mol_type = other DNA
agcaaagaagcaatgcgccactcaaaacgagcgagcaagctccatcagccaggatgacaaaaccagaaagggatc

SEQ ID NO: 530310 - DNA, 75 bp, synthetic construct
  source 1..75: mol_type = other DNA
cgcttaccgcgaactgcgcaagctgccgcgcggcgtgagtatcgccagtgaatttgacgaccgggtcgaggctgt

SEQ ID NO: 530311 - DNA, 75 bp, synthetic construct
  source 1..75: mol_type = other DNA
gaagcaatgcgccgctcaaaaccagcgagcaagcgccatcagccagaatgagtaaatatgaaagagatcgtataa

SEQ ID NO: 530312 - DNA, 75 bp, synthetic construct
  source 1..75: mol_type = other DNA
cacaagatcctcgccatcgcggaagaggaaggtgtgcgccaggcggcctacgcgctcaagctgttgcagtcggac

SEQ ID NO: 530313 - DNA, 75 bp, synthetic construct
  source 1..75: mol_type = other DNA
cgaatcactgatcgatgccatgtcgttctgggtcgccggggtccgcaacgtcacggcggcttacggggtgaacgg

SEQ ID NO: 530314 - DNA, 75 bp, synthetic construct
  source 1..75: mol_type = other DNA
gaagcgctttaggcattatcgggtatggtttactgatggctgtcaccggtgcgctgattgatgaatcgcttgtgg

SEQ ID NO: 530315 - DNA, 75 bp, synthetic construct
  source 1..75: mol_type = other DNA
gggcaaccctgccagtggtcgggccgtattctctcaggaacaggacggcattaaatcgcatacccacagcgccag

SEQ ID NO: 530316 - DNA, 75 bp, synthetic construct
  source 1..75: mol_type = other DNA
gggcaatcctgccagtggtcgggccgtattgtctcaggaacaggacggcattaaatcgcaaacccacagcgccag

SEQ ID NO: 530317 - DNA, 75 bp, synthetic construct
  source 1..75: mol_type = other DNA
acattaataaggctattaccacatcaattatcagtgccagtatttttattggtgtattgttctcatctttttatt

SEQ ID NO: 530318 - DNA, 75 bp, synthetic construct
  source 1..75: mol_type = other DNA
gtattttctcaggaacaggacggcattaaatcgcacacccacagcgccagcgcatccagtacggatttggggacg

SEQ ID NO: 530319 - DNA, 75 bp, synthetic construct
  source 1..75: mol_type = other DNA
gtattatctcaggaacaggacggcattaaatcgcatacccacagcgccagcgcatccagtaccgatttggggacg

SEQ ID NO: 530320 - DNA, 75 bp, synthetic construct
  source 1..75: mol_type = other DNA
gggcaagcctgccagtggtcgggccgtattttctcaggaacaggacggcattaaatcgcaaacccacagcgccag

SEQ ID NO: 530321 - DNA, 75 bp, synthetic construct
  source 1..75: mol_type = other DNA
tgaaagaaagtaatcagcgatggtgctctgacggggtcgagttccgctgtgataacggagagagactgcgtgtca

SEQ ID NO: 530322 - DNA, 75 bp, synthetic construct
  source 1..75: mol_type = other DNA
taattgagcatatatgttttattcttattatggtcgccgataaaatattatgtgtattagatccgagtgttcatg

SEQ ID NO: 530323 - DNA, 75 bp, synthetic construct
  source 1..75: mol_type = other DNA
cgccgtacttgcctgtggagggacggtgcagtcagaccgcccgttgaagcaggaaccagacgctgagcaatcagc

SEQ ID NO: 530324 - DNA, 75 bp, synthetic construct
  source 1..75: mol_type = other DNA
atctggtataatgtgtttcaaggtgtacctgctgtcctttcagctttggagaattcctatcctaataccgctata

SEQ ID NO: 530325 - DNA, 75 bp, synthetic construct
  source 1..75: mol_type = other DNA
catgcaccacttttgattactgattggaacaattttttactgggttgccctcgctgtaaccgagattttaaaaaa

SEQ ID NO: 530326 - DNA, 75 bp, synthetic construct
  source 1..75: mol_type = other DNA
atacaagcagctctggcgtggcggtcaggtgcttgctgttccgccagcgtatacaagccagcgttgcgcgtgctg

SEQ ID NO: 530327 - DNA, 75 bp, synthetic construct
  source 1..75: mol_type = other DNA
gtattctctcaggaacaggacggcattaaatcgcatacccacagcgccagcgcatccagtacagatttggggacg

SEQ ID NO: 530328 - DNA, 75 bp, synthetic construct
  source 1..75: mol_type = other DNA
ttcacccgccaggggcaacaaagtgcagagttgcgtctgcacccacaggatttaggtgaagtgcaaatttccctc

SEQ ID NO: 530329 - DNA, 75 bp, synthetic construct
  source 1..75: mol_type = other DNA
gcgtctgcgctgggcgcagggtggggctgaggtgtttattgttaacatgcgccgcctgtggtcgtgggaattccg

SEQ ID NO: 530330 - DNA, 75 bp, synthetic construct
  source 1..75: mol_type = other DNA
actggatcgcgatgcggtggcctatattgtggccccgctgatccagttcccgcgtgtgggggcggtaaccgggaa

SEQ ID NO: 530331 - DNA, 75 bp, synthetic construct
  source 1..75: mol_type = other DNA
aaaatattcacgttctgaacggatgaaaatggcagcacaatacggccccaacaagcaagataattgcccaccagc

SEQ ID NO: 530332 - DNA, 75 bp, synthetic construct
  source 1..75: mol_type = other DNA
cgtttgctcttgagatattcctaaaagagtacaggaaaacgcgcccattgcaggtatggaaacgtaacgaaccaa

SEQ ID NO: 530333 - DNA, 75 bp, synthetic construct
  source 1..75: mol_type = other DNA
acgcccaggtcacggcgcaactggacttcgccagtaaagaacaaacggaagaacagtatcgccctaacggtgatg

SEQ ID NO: 530334 - DNA, 75 bp, synthetic construct
  source 1..75: mol_type = other DNA
tgtatacattatctatggtgtttgttggggaaaagattccattatttgggaatgtttttgtaccctcattcgtag

SEQ ID NO: 530335 - DNA, 75 bp, synthetic construct
  source 1..75: mol_type = other DNA
catcggcctcatttagaaagcagacttaaggaaaactcagtagtaacaatacatcatgacttgtatgatacagac

SEQ ID NO: 530336 - DNA, 75 bp, synthetic construct
  source 1..75: mol_type = other DNA
gtattctctcaggaacaggacggcattaaatcgcagacccacagcgccagcgcatccagtactgatttggggacg

SEQ ID NO: 530337 - DNA, 75 bp, synthetic construct
  source 1..75: mol_type = other DNA
ttatcaccgggaatggcttgatagtgttggcagggagcgccagaaattgattgatgattttctcagtaatcagaa

SEQ ID NO: 530338 - DNA, 75 bp, synthetic construct
  source 1..75: mol_type = other DNA
atgttccctgtttcatcaattggtaatgatattagtagtgatttagtccgtcgaaaaatgaatgatcttcctgaa

SEQ ID NO: 530339 - DNA, 75 bp, synthetic construct
  source 1..75: mol_type = other DNA
aaatgacagggagacacttgaggagattctctcaaagctttctgattcacttgaaaaaattaaatgcgatgctaa

SEQ ID NO: 530340 - DNA, 75 bp, synthetic construct
  source 1..75: mol_type = other DNA
ccatgagcagtgcggaaatggtggtaaaaggcgctccccgttctgtgtctggtgcaacagttgattactccgcca

SEQ ID NO: 530341 - DNA, 75 bp, synthetic construct
  source 1..75: mol_type = other DNA
gatgccgatgccaaaggaaaaaacattctgcaactggctttccgcacccgtatcaagctgttctatcgcccaacc

SEQ ID NO: 530342 - DNA, 75 bp, synthetic construct
  source 1..75: mol_type = other DNA
agccgttttcagcctcaccgcgcaagcagatatcgtgctttccggtacgcgcattatttacaatgcagaccagaa

SEQ ID NO: 530343 - DNA, 75 bp, synthetic construct
  source 1..75: mol_type = other DNA
gctggctttccataccttgctttttggtatcggcatcgtgtgcggccttctgctgatgttcctgattttttcttt

SEQ ID NO: 530344 - DNA, 75 bp, synthetic construct
  source 1..75: mol_type = other DNA
ctagcgcattatttattattacgttgttgaccagtatacctgcattcgctgatattattatttctggtactcgta

SEQ ID NO: 530345 - DNA, 75 bp, synthetic construct
  source 1..75: mol_type = other DNA
atgtttcccattataaaaaaaaccgtcaacgcgttatttattagtacgttgttaaccagtgcacctgcattcgcc

SEQ ID NO: 530346 - DNA, 75 bp, synthetic construct
  source 1..75: mol_type = other DNA
aaatacggatgtatgcgtgcaggttcttcggataatcgaagcacacggaggcaggggctttggaaatacagggga

SEQ ID NO: 530347 - DNA, 75 bp, synthetic construct
  source 1..75: mol_type = other DNA
accagtaatgccagcgtgacgattcatacgtcaccagcatattctgctaataagccggaagggttaacggacggt

SEQ ID NO: 530348 - DNA, 75 bp, synthetic construct
  source 1..75: mol_type = other DNA
cctttgccatgcgtcgtcagatgttgtcacctgattacacgacagactggcgctcaataccaatagccaccatca

SEQ ID NO: 530349 - DNA, 75 bp, synthetic construct
  source 1..75: mol_type = other DNA
atctataggcggcgcaaaattacgctattcagcaattagtgattatggcagtgaaattaaaggtgaaagcaatct

SEQ ID NO: 530350 - DNA, 75 bp, synthetic construct
  source 1..75: mol_type = other DNA
cggtatgagtggcaaatcaagctctgcaaaagttcatttctacgccattaatgattttggcggagccatagaagg

SEQ ID NO: 530351 - DNA, 75 bp, synthetic construct
  source 1..75: mol_type = other DNA
cagcattttgtatcgcggcttgtatggcttttagcgcaccagcgttagcggatattgtaatttctggtacgcgtg

SEQ ID NO: 530352 - DNA, 75 bp, synthetic construct
  source 1..75: mol_type = other DNA
gacggtaaacgtgggcagacggtgaaaatcgcctggaataccagccaaacgttgcccgccgatcgcgaaagtgtt

SEQ ID NO: 530353 - DNA, 75 bp, synthetic construct
  source 1..75: mol_type = other DNA
taatgtttttgctgatagcggttgtggttggtggcggcgggttattgctggcgcaaaaagccttacataaaacgt

SEQ ID NO: 530354 - DNA, 75 bp, synthetic construct
  source 1..75: mol_type = other DNA
ctggcgctttgattctcctgagagcaccgggaatatcggctgtgactggacgctttatggtgaagatatcccgga

SEQ ID NO: 530355 - DNA, 75 bp, synthetic construct
  source 1..75: mol_type = other DNA
gatgaatgaggtgaaatttggcaaagcatctctgccgaagatagaaggctggagtcgtaaaaaggaatcgttcga

SEQ ID NO: 530356 - DNA, 75 bp, synthetic construct
  source 1..75: mol_type = other DNA
tacagtgtcagtgaatggtgcaaacctaccgacagcttcattcccttcgcagggatttaccggggcgtattatca

SEQ ID NO: 530357 - DNA, 75 bp, synthetic construct
  source 1..75: mol_type = other DNA
tatcctgcctggtcatggcgatgccttgcgcattggcggtcgaatttaatctgaatgttctcgataaatcaatgc

SEQ ID NO: 530358 - DNA, 75 bp, synthetic construct
  source 1..75: mol_type = other DNA
gaatatcagggaactgtccacttttcaggtaatgactccaacttattgatagtgttttatgttcagataatgccc

SEQ ID NO: 530359 - DNA, 75 bp, synthetic construct
  source 1..75: mol_type = other DNA
aaacaagttggtggttttgatgtttcatttccggcctggcaagattacgatctttggtatagactgatacataag

SEQ ID NO: 530360 - DNA, 75 bp, synthetic construct
  source 1..75: mol_type = other DNA
aaacaaaggcgtagcggcattcgctggcttcgtcggatatgcggtaatgaacctcgcggtaaacttctggttgac

SEQ ID NO: 530361 - DNA, 75 bp, synthetic construct
  source 1..75: mol_type = other DNA
atttttcaggtggttatttttataacttactcatttttattctggacttatttttggactttggacttataaaag

SEQ ID NO: 530362 - DNA, 75 bp, synthetic construct
  source 1..75: mol_type = other DNA
ccgtatgtttatatatcgtggcgcggacacgataagaaaccagaggatttgtgggttgagcttcaggatggtgtt

SEQ ID NO: 530363 - DNA, 75 bp, synthetic construct
  source 1..75: mol_type = other DNA
aagcctggctggaggcgatgatcgccgtggcgcgctattaccgcctcgatttttcccaggagaatgtgcgcgcga

SEQ ID NO: 530364 - DNA, 75 bp, synthetic construct
  source 1..75: mol_type = other DNA
aaaagcaggctgaaattcaggaggccagacaggagtacatccagcgactgcgggatatggcaaaaaggctggtca

SEQ ID NO: 530365 - DNA, 75 bp, synthetic construct
  source 1..75: mol_type = other DNA
atacgcgcctaatccgtaagacgtttggtgttgtgcttgaaagaacggtacgggagctacgcggcgaggcttgct

SEQ ID NO: 530366 - DNA, 75 bp, synthetic construct
  source 1..75: mol_type = other DNA
tcgcccctgccactctggtcgcctgctttccagcaacggcttctctttttattttacctaactaccccacggtga

SEQ ID NO: 530367 - DNA, 75 bp, synthetic construct
  source 1..75: mol_type = other DNA
gttggtgataaaccccttcacgaacgtcctgcggctgcaagcgtggtcgttgaggcattacaaaaggaaggtgag

SEQ ID NO: 530368 - DNA, 75 bp, synthetic construct
  source 1..75: mol_type = other DNA
gacataatcaacgcagttcatgggggaggtgatggtcccccatctttttgtctgttattcctgtgcccagccaac

SEQ ID NO: 530369 - DNA, 75 bp, synthetic construct
  source 1..75: mol_type = other DNA
ccaaaactgttagatgagatgtacgtggctccagtgatcgccaaaccaaaccctacccttgaaaagcaactttca

SEQ ID NO: 530370 - DNA, 75 bp, synthetic construct
  source 1..75: mol_type = other DNA
ccggatcatcccggctgcttgttgccggcctgcaaaaagcggtgggtaaccccgggataatactggttgatgaag

SEQ ID NO: 530371 - DNA, 75 bp, synthetic construct
  source 1..75: mol_type = other DNA
tagccgccgtgactcttgatgatacggggtcaacgaaattaggaaatcgaataatcgatcatccgtttattgttc

SEQ ID NO: 530372 - DNA, 75 bp, synthetic construct
  source 1..75: mol_type = other DNA
tagccaagtggaattgagtagttttcaggctgctgtgaacacagcaactaaaactaatatgccatatggagagcg

SEQ ID NO: 530373 - DNA, 75 bp, synthetic construct
  source 1..75: mol_type = other DNA
gagcgcggcggggaagtccagcttaatggatgcggtgctcaacctgatcccgccagaggaacggctgcaatacag

SEQ ID NO: 530374 - DNA, 75 bp, synthetic construct
  source 1..75: mol_type = other DNA
taagcataaaagatttgattatcaacgaaaaagttgatgcggaaatagaaccttcattaaataaatggatagata

SEQ ID NO: 530375 - DNA, 75 bp, synthetic construct
  source 1..75: mol_type = other DNA
aggcgggggcgactattcagattaaagacagtaacggcaatactattgccagtactcaggtagacaacaacggtc

SEQ ID NO: 530376 - DNA, 75 bp, synthetic construct
  source 1..75: mol_type = other DNA
ggctggcgggggcggcggtaggtggtggcgcgcttggtgcactgctggcaagcggtggagatggcgactcgaaaa

SEQ ID NO: 530377 - DNA, 75 bp, synthetic construct
  source 1..75: mol_type = other DNA
cgtcagcgtggaaaccctggctgatggcgaactgatggtagccttaccgggcgaacgctggacgatccggggcgt

SEQ ID NO: 530378 - DNA, 75 bp, synthetic construct
  source 1..75: mol_type = other DNA
acagatatgcacacgcaggaactgaatcgcactgaaacggcgcgggaagtccagagaccgagcattgatgctcac

SEQ ID NO: 530379 - DNA, 75 bp, synthetic construct
  source 1..75: mol_type = other DNA
ttctgaatatcaggacggctccggtatcgctgacgaacggcaatttaggggcagcctgtgtcactgctgtcactt

SEQ ID NO: 530380 - DNA, 75 bp, synthetic construct
  source 1..75: mol_type = other DNA
gaaaaaggggataaaggtgaccccggcccggcaggccctgtcggtgagcgggggcctgccgggccgacgggcccc

SEQ ID NO: 530381 - DNA, 75 bp, synthetic construct
  source 1..75: mol_type = other DNA
actggccccagaggggagccggggcctcagggcccggcaggtccgaggggacctgccggagagagagggccgcaa

SEQ ID NO: 530382 - DNA, 75 bp, synthetic construct
  source 1..75: mol_type = other DNA
ctcgtatcaacgaagtacaacacaatgcaatcgcaaaattgatcgccgaaggtaaagcaaagaatgcaaatgaag

SEQ ID NO: 530383 - DNA, 75 bp, synthetic construct
  source 1..75: mol_type = other DNA
ctccttttattttaggtattagtgcaaacatttctgccgaggactatttcgatccatctcttttagcttctgatg

SEQ ID NO: 530384 - DNA, 75 bp, synthetic construct
  source 1..75: mol_type = other DNA
gtggttaatgccagcggtgtgtccggtatcggcaccagtgcgggcggacgaaccacctgggcgggaacggcgctg

SEQ ID NO: 530385 - DNA, 75 bp, synthetic construct
  source 1..75: mol_type = other DNA
aatatatgtctgagcatgattatcaacaacatagtgtttcttcgggggccagtgttatttttagttacgacagcc

SEQ ID NO: 530386 - DNA, 75 bp, synthetic construct
  source 1..75: mol_type = other DNA
ctggttcagatggtggatgacaatccggccccgcagttactggtctcaagtacaggcgatgtgatggggtatttc

SEQ ID NO: 530387 - DNA, 75 bp, synthetic construct
  source 1..75: mol_type = other DNA
cctgacagacgatgatccggatatgaaacaccgcaggaaactgctggaaagcatcccgggtatcggagagaaaac

SEQ ID NO: 530388 - DNA, 75 bp, synthetic construct
  source 1..75: mol_type = other DNA
tattgccgacaagaaggcgtttattcgtaagcttggggtggcaagagcgtacgggcgtgatctcaaaacaggaga

SEQ ID NO: 530389 - DNA, 75 bp, synthetic construct
  source 1..75: mol_type = other DNA
aaaggtgagcgaggtgcaacgggccccgtggggccgcagggggcgacggggccaaagggcgataaaggcgagaga

SEQ ID NO: 530390 - DNA, 75 bp, synthetic construct
  source 1..75: mol_type = other DNA
aaccgtgtgatcacggatgtggatactgatttgggtaagaaaaaaatcaccctgagaggatgtgccattgaagtg

SEQ ID NO: 530391 - DNA, 75 bp, synthetic construct
  source 1..75: mol_type = other DNA
tactattgcacgcgtaccccaagggaaaagtcttttgattgggggatatacacgagatacgaatacctatgaaag

SEQ ID NO: 530392 - DNA, 75 bp, synthetic construct
  source 1..75: mol_type = other DNA
gtgctaccacgatttgctgcgcgaaatcaaattgaattactcttgaatattgaagatggcaatgaaatcaattcc

SEQ ID NO: 530393 - DNA, 75 bp, synthetic construct
  source 1..75: mol_type = other DNA
gtccagtcgttttaacacaagagaatattcctgctatatttgataataaccgcactttctatactaaattagtcg

SEQ ID NO: 530394 - DNA, 75 bp, synthetic construct
  source 1..75: mol_type = other DNA
gaccagccgggcactccgcaggggtttggtcagacgcagccggcagataactccttaggcctagcgttcaacaac

SEQ ID NO: 530395 - DNA, 75 bp, synthetic construct
  source 1..75: mol_type = other DNA
aagccttcatcattcagtcgcttgcgtgctatgacacgccatcgcaggtggtcgaggctgtccaaaaagaattcg

SEQ ID NO: 530396 - DNA, 75 bp, synthetic construct
  source 1..75: mol_type = other DNA
aaaagtcttttgattgggggatatacacgagatacgaatacctatgaaagtcgcaagatcccaaatattaggcag

SEQ ID NO: 530397 - DNA, 75 bp, synthetic construct
  source 1..75: mol_type = other DNA
ggtgcaggttttcagtggtacggggctgatggtgtaagcagtgttttcaattgcccatttggtatcgtcggcgat

SEQ ID NO: 530398 - DNA, 75 bp, synthetic construct
  source 1..75: mol_type = other DNA
aagtcaaaagtaaaagcacctttcctaactctatgacttttgtgcaaaaccctgcctatcaagcggttcactcgg

SEQ ID NO: 530399 - DNA, 75 bp, synthetic construct
  source 1..75: mol_type = other DNA
agagacaattcgaaagcgccttagttactttgctagtgagcatgaaaaagtaggaatagtgcatcaggtactggc

SEQ ID NO: 530400 - DNA, 75 bp, synthetic construct
  source 1..75: mol_type = other DNA
agaacatagtgcattttcaaccataacagaaatggtgcagacatacattcaagagcagaagaaaagacagaaaag

SEQ ID NO: 530401 - DNA, 75 bp, synthetic construct
  source 1..75: mol_type = other DNA
gcaggggcggtatatcaccccggacccgattgggttgagaggtggatggaatatgtatcagtatccgttgaatcc

SEQ ID NO: 530402 - DNA, 75 bp, synthetic construct
  source 1..75: mol_type = other DNA
taaaaaaaataaaagaaagtgtaaaccctgttgaaatctataacataaaggatgattcttatgttattaacttat

SEQ ID NO: 530403 - DNA, 75 bp, synthetic construct
  source 1..75: mol_type = other DNA
ggggcggggaagggcgaccgcaatccttcagcagtttctgggatggatttacagggaaagacaataccggaacgg

SEQ ID NO: 530404 - DNA, 75 bp, synthetic construct
  source 1..75: mol_type = other DNA
cggtgagcttctacgggcagatgatcggcgaagatgagtctggtttcctgccttcagcaaatatgttcctcggcg

SEQ ID NO: 530405 - DNA, 75 bp, synthetic construct
  source 1..75: mol_type = other DNA
tgccgtaaactggtacctggaagcgcatgatacgcgtacaaatatgagccggaccaattacagctatacccacca

SEQ ID NO: 530406 - DNA, 75 bp, synthetic construct
  source 1..75: mol_type = other DNA
ggatgaggcgggttatctaccatcatcaaatatgttcctcgcaggtgtagaagggcatcatagcttgggaaaaaa

SEQ ID NO: 530407 - DNA, 75 bp, synthetic construct
  source 1..75: mol_type = other DNA
gaccagccgggcactccgcaggggtttggccagacgcagccggcagataactcgttaggtctggcgttcaacaac

SEQ ID NO: 530408 - DNA, 75 bp, synthetic construct
  source 1..75: mol_type = other DNA
ggatgtttatcagtcggttcgtttgaatacttcactgtggtacaccaacgctaataacagcgacagcgacgacgt

SEQ ID NO: 530409 - DNA, 75 bp, synthetic construct
  source 1..75: mol_type = other DNA
gaagcgcatgatactcgtaccaatatgagccggaccaattacagttatacgcatcatatctataaggatggctac

SEQ ID NO: 530410 - DNA, 75 bp, synthetic construct
  source 1..75: mol_type = other DNA
ttaggcgcatcgcgcattatgcagtggggcggagaaggtcggccagagtcatttagtagtttttggaatggtttg

SEQ ID NO: 530411 - DNA, 75 bp, synthetic construct
  source 1..75: mol_type = other DNA
gagcaggcagcgccagagacctggtggctgcgctgggtggggccatggcaataccagatctccgccagccagatg

SEQ ID NO: 530412 - DNA, 75 bp, synthetic construct
  source 1..75: mol_type = other DNA
ctttggccaggtaccgcagtggtggggacctgggtatgaaggtagcttgatccgcggggatgcgatgcggccgat

SEQ ID NO: 530413 - DNA, 75 bp, synthetic construct
  source 1..75: mol_type = other DNA
aacgccaacggtgcatacggtgcggtgaaactctggaatcagtggctctcctttggtcaggttccgcagtggtgg

SEQ ID NO: 530414 - DNA, 75 bp, synthetic construct
  source 1..75: mol_type = other DNA
gtttctatgggcagatggttggtgaggatgagtctggttacctaccatctgcgaatatgtttcttggcggggttg

SEQ ID NO: 530415 - DNA, 75 bp, synthetic construct
  source 1..75: mol_type = other DNA
ttagtagtaaatgacaacgacttgcgtaacgacctggcctggctttccgatcgtggggtcatccatctgagcctg

SEQ ID NO: 530416 - DNA, 75 bp, synthetic construct
  source 1..75: mol_type = other DNA
aaatatctccttttcatcgctgtatgcgcggcaccaatcagaaaaatccccgatgtgtcgctctggccggccccc

SEQ ID NO: 530417 - DNA, 75 bp, synthetic construct
  source 1..75: mol_type = other DNA
tttacaggacaagatggttggtcgccagcaggagcagcaaagaattaacgaaacaatccgtaataatgacatgac

SEQ ID NO: 530418 - DNA, 75 bp, synthetic construct
  source 1..75: mol_type = other DNA
gtcaacaggcggcggcgcgatttattcacccacaatcaatatccccataaatggtaacccttccgatgcgacagt

SEQ ID NO: 530419 - DNA, 75 bp, synthetic construct
  source 1..75: mol_type = other DNA
taacaatcgacctgatcgcaaaagtgggtggatttgttcagggtatggacaaagccgaaagatcttctcaaaagt

SEQ ID NO: 530420 - DNA, 75 bp, synthetic construct
  source 1..75: mol_type = other DNA
caataacttttattgcggtaattgctgtaatgtgtacagtggatctttcatcatatgtaccttcaatttacatcg

SEQ ID NO: 530421 - DNA, 75 bp, synthetic construct
  source 1..75: mol_type = other DNA
aggttgaacaaagtggctctcactttgcaattttaataaacaccggtgaaaatagtgagaactataatgttagtg

SEQ ID NO: 530422 - DNA, 75 bp, synthetic construct
  source 1..75: mol_type = other DNA
tcgctggcaagagctgtcatagaaaaatcagcgctgccaactgtttttagcgaagatacctctgtagagtcatat

SEQ ID NO: 530423 - DNA, 75 bp, synthetic construct
  source 1..75: mol_type = other DNA
gcagcggtgacggtattgtgtcgccgttttccggcacactgagtggcggtgaagatgaaccgtttccgctgaaca

SEQ ID NO: 530424 - DNA, 75 bp, synthetic construct
  source 1..75: mol_type = other DNA
tttgggggttatatacattcctggtcaagataaagataaagataaagataaagataaagataaagataatgtaaa

SEQ ID NO: 530425 - DNA, 75 bp, synthetic construct
  source 1..75: mol_type = other DNA
actgatatccgtgctgcagtgctggatgcactcgagcagcatgaacacggggcgacgctgtttgatggtcgcccc

SEQ ID NO: 530426 - DNA, 75 bp, synthetic construct
  source 1..75: mol_type = other DNA
gcgaggatttattaaagcaataccaatctggtgatatttctaaaagtctttatgacgctgaaactgaagctttgc

SEQ ID NO: 530427 - DNA, 75 bp, synthetic construct
  source 1..75: mol_type = other DNA
aagaggatttattaaagcaatatcaatctggtgatataaccaagagtttgtatgattctgaaacatcagctttgc

SEQ ID NO: 530428 - DNA, 75 bp, synthetic construct
  source 1..75: mol_type = other DNA
atttcggtggttgccgtcgctgccacagaacaaaacgcgcagacagtggcatcgctggaaggcacaaccctgacg

SEQ ID NO: 530429 - DNA, 75 bp, synthetic construct
  source 1..75: mol_type = other DNA
gctggcaggcatgaagctcggcgacacaccgctggtggatttcacccgcgaccgcctgcaccgggaaacgctgcg

SEQ ID NO: 530430 - DNA, 75 bp, synthetic construct
  source 1..75: mol_type = other DNA
gtgcatgccgggtgcgtcaaatgcagcaatgcgcaaaataacagaaacaatcaagaagttgaaccgccccggaaa

SEQ ID NO: 530431 - DNA, 75 bp, synthetic construct
  source 1..75: mol_type = other DNA
atttcaaaggcgaactgtaccgaaagtgcatgccgggtgcgtcaaatgcagcaatgcgcaaaataacagaaacaa

SEQ ID NO: 530432 - DNA, 75 bp, synthetic construct
  source 1..75: mol_type = other DNA
ctaaagatagcttatattataacggtgggtttattatagatacgctgaaacgtttcgatgaaattgaattgatag

SEQ ID NO: 530433 - DNA, 75 bp, synthetic construct
  source 1..75: mol_type = other DNA
tgtcgatattgttgaaggacgttttgatgccgggatacgtctgggtgaaactgtagataatgatatgattgcagt

SEQ ID NO: 530434 - DNA, 75 bp, synthetic construct
  source 1..75: mol_type = other DNA
ttgccggaagattttcacgaatgggaatatctggcgaactctcgtactcccgaagcatataacaagattgttaaa

SEQ ID NO: 530435 - DNA, 75 bp, synthetic construct
  source 1..75: mol_type = other DNA
gggggtaatgccgctggcgatagcaaccggcgcaggggcgaacagccgcatcgccattggtacgggcattattgg

SEQ ID NO: 530436 - DNA, 75 bp, synthetic construct
  source 1..75: mol_type = other DNA
agctcgcacgccagcagcgttttggtaaaaaatgcgaatcgctggccgggatgcaacgttccctgtttgaagagg

SEQ ID NO: 530437 - DNA, 75 bp, synthetic construct
  source 1..75: mol_type = other DNA
gcagatgctcgaccggctggaaagtgaaatcctggctgaccgggtgagtgaggaaagccgccgctggctggcatc

SEQ ID NO: 530438 - DNA, 75 bp, synthetic construct
  source 1..75: mol_type = other DNA
acaatacagaacgacagaacccgcatccagacgatttatcagccggggagcttcacgccactcatcagagttgaa

SEQ ID NO: 530439 - DNA, 75 bp, synthetic construct
  source 1..75: mol_type = other DNA
atgcgctgtctcatcgcgtggaactgagccgcttcctggaagatggtgcggtgccgctggataataatgtgtgtg

SEQ ID NO: 530440 - DNA, 75 bp, synthetic construct
  source 1..75: mol_type = other DNA
tgggacggcgaccggctgacgacggtacagaccgacaccacgcgtatccagacggtatatcagccggggagcttc

SEQ ID NO: 530441 - DNA, 75 bp, synthetic construct
  source 1..75: mol_type = other DNA
atatggtcggtgttgctggcgctgcactggccccgctggcaaaattgttacgccacgagcttctgacacgggatg

SEQ ID NO: 530442 - DNA, 75 bp, synthetic construct
  source 1..75: mol_type = other DNA
atgatgttggaatgtaaacaaagagaggtaatgccaagggatataaacgattattccaggtacaaagatgggatt

SEQ ID NO: 530443 - DNA, 75 bp, synthetic construct
  source 1..75: mol_type = other DNA
atgctgaagtggctaaaaagaccatcccagagccagccacctacgccagacgctacgctgccggagggctggttt

SEQ ID NO: 530444 - DNA, 75 bp, synthetic construct
  source 1..75: mol_type = other DNA
accctcgccattactggactggctggccggatacccggcggcttttgcgtccctgatttatcagctcaccggaca

SEQ ID NO: 530445 - DNA, 75 bp, synthetic construct
  source 1..75: mol_type = other DNA
gcgcggtggtaaggcagcgcagccggacggccacacgctggggcggctgtggggggcgctgccgccggatatccg

SEQ ID NO: 530446 - DNA, 75 bp, synthetic construct
  source 1..75: mol_type = other DNA
cgcgcggctggcgctttcggtgcatataaccctgcccgatggttcggtgaggcccatgattttttacgctgatct

SEQ ID NO: 530447 - DNA, 75 bp, synthetic construct
  source 1..75: mol_type = other DNA
aaaagccaacttcgcaacgccagaaggcgaaaaagtccgcgctcgcttaattaaccgcttcgagaaatacggtaa

SEQ ID NO: 530448 - DNA, 75 bp, synthetic construct
  source 1..75: mol_type = other DNA
tggcgcggtatttacgggcaagagaactggctatctaacccgtgggtatgggtaattgagtttaagcgtattcag

SEQ ID NO: 530449 - DNA, 75 bp, synthetic construct
  source 1..75: mol_type = other DNA
gttcattgcttgataaatgataaaaacatgcctgaacaaaaattagtcgaggcaaagaaaaactatgcagcaagc

SEQ ID NO: 530450 - DNA, 75 bp, synthetic construct
  source 1..75: mol_type = other DNA
ggcatatttttaatggcattaccgcctgtgtatctgcaagaccttccattaacgctgcgtcctctgctcagtaac

SEQ ID NO: 530451 - DNA, 75 bp, synthetic construct
  source 1..75: mol_type = other DNA
tattcgtgttgtcgatattgaagagagaaatatttgcgatgagctaagtaatgtaagtagcgtaagattagcttt

SEQ ID NO: 530452 - DNA, 75 bp, synthetic construct
  source 1..75: mol_type = other DNA
attcatgcgggtgagactggaaatgctgataacataaggaatgccataattagttatggagctgatcgtatcgga

SEQ ID NO: 530453 - DNA, 75 bp, synthetic construct
  source 1..75: mol_type = other DNA
gtgcagtcactgcaaccatcaacagcagtactcagagtcagaacgtgacatttatcgccgatgtcaggacggcga

SEQ ID NO: 530454 - DNA, 75 bp, synthetic construct
  source 1..75: mol_type = other DNA
gatatccgcttacagctgcgcgataacacactgatactcagtgagaacggcggcagaagcctgtattttgagcac

SEQ ID NO: 530455 - DNA, 75 bp, synthetic construct
  source 1..75: mol_type = other DNA
gaaaagctggtttttatcacgttaaaatcccgtaaagtttatattggctatgtggccgcgccgagaattgaacac

SEQ ID NO: 530456 - DNA, 75 bp, synthetic construct
  source 1..75: mol_type = other DNA
tgatcggaacaacagctgacggagcaaccatatatcaaactagcaatccaggtattggcgttgcatatcaactca

SEQ ID NO: 530457 - DNA, 75 bp, synthetic construct
  source 1..75: mol_type = other DNA
gcataggggcaattgttggcgcattgctttctcttgcgacctttaactctgcatggccgatgatttggtcaattg

SEQ ID NO: 530458 - DNA, 75 bp, synthetic construct
  source 1..75: mol_type = other DNA
gcaattgcgtctgaactgggggacgccgacgggcaactggcaggggaaagcctcggtttatgtcagccgtgattt

SEQ ID NO: 530459 - DNA, 75 bp, synthetic construct
  source 1..75: mol_type = other DNA
ccgcataggcgtgcgggcgctcattaccgttacccagggcggaaaaccggtgccgtttggatcactggtacggga

SEQ ID NO: 530460 - DNA, 75 bp, synthetic construct
  source 1..75: mol_type = other DNA
gccaatggtaggcaatgttcccgattatgaggcaacactcgtggaatatgcgtcgttggcggagcagaaagatga

SEQ ID NO: 530461 - DNA, 75 bp, synthetic construct
  source 1..75: mol_type = other DNA
taaaggcatttcgacgggcactggagcttggtggcggtgaacgggctgacgggtgtcgtcattttccccgctgga

SEQ ID NO: 530462 - DNA, 75 bp, synthetic construct
  source 1..75: mol_type = other DNA
gcgaaaaaatcagccagcgatgccggtacatcagcccgtgaggcggcaacccatgcgactgatgctgcggactca

SEQ ID NO: 530463 - DNA, 75 bp, synthetic construct
  source 1..75: mol_type = other DNA
ttttccgtaacgataatgaagatgctggccggaaaacagcctttaaatcccgttctgactgcgttaggcagtctt

SEQ ID NO: 530464 - DNA, 75 bp, synthetic construct
  source 1..75: mol_type = other DNA
gaggacggaagggatttttatgaatctatcccgcttttcacaaagaaatacaaactctgtatttcgcctgtaacg

SEQ ID NO: 530465 - DNA, 75 bp, synthetic construct
  source 1..75: mol_type = other DNA
gttgcaaaagcatcttgtgcagaaggtgaaaccatccacaacatgcctggcggcgcgacgccagatcaggtttac

SEQ ID NO: 530466 - DNA, 75 bp, synthetic construct
  source 1..75: mol_type = other DNA
cggtaaaaacccgccagattgatctcgatggtggcgaagagctgtatgcctggttacgcgataccgccgacgaag

SEQ ID NO: 530467 - DNA, 75 bp, synthetic construct
  source 1..75: mol_type = other DNA
ctccgtgccggtgttcgctatgaagttctggaggcggcatttgaaagtgatgatttcgaagagctgatgtcgtca

SEQ ID NO: 530468 - DNA, 75 bp, synthetic construct
  source 1..75: mol_type = other DNA
gtgttggatctcacagtaaatgaactaatggccaacttagacggaaaattagttccattatcaacaatagctaga

SEQ ID NO: 530469 - DNA, 75 bp, synthetic construct
  source 1..75: mol_type = other DNA
gaacccagcgaatgagtccgatgccagtagtgcaaccaatattagcgggatgtcacagggtattatcttgatgtc

SEQ ID NO: 530470 - DNA, 75 bp, synthetic construct
  source 1..75: mol_type = other DNA
tgatgcaaagatcaaacgcttcaacgctgatgatagcaaggtgaaattgggttatcgcactacgcgttcggactg

SEQ ID NO: 530471 - DNA, 75 bp, synthetic construct
  source 1..75: mol_type = other DNA
accttacagtaagcaatgaagaaatcgttgcagaagatataatggattcattagatgaatctaaacagaaagttt

SEQ ID NO: 530472 - DNA, 75 bp, synthetic construct
  source 1..75: mol_type = other DNA
cagaccatggaacgaatgataaaacgtggaaaataggttactcaaaacatgcttatttagagcttccgaataaat

SEQ ID NO: 530473 - DNA, 75 bp, synthetic construct
  source 1..75: mol_type = other DNA
ttaattggagaaatggtagcctagatcatattgggaagtctgttttaatatccgaaaatatggaatacactcatg

SEQ ID NO: 530474 - DNA, 75 bp, synthetic construct
  source 1..75: mol_type = other DNA
gtcgagactacaggtaaggacggcgggccgatcagggcggagaccacaagccttaccgcagaagaagccggagag

SEQ ID NO: 530475 - DNA, 75 bp, synthetic construct
  source 1..75: mol_type = other DNA
aagccttcatcgttcagtctcttgcctgctttgataccccctctcaagtggttgagtcggtcaaaaaagaatttg

SEQ ID NO: 530476 - DNA, 75 bp, synthetic construct
  source 1..75: mol_type = other DNA
gaccggtttcctgatgcagcgcgccgagcaggcggcgccagagacctggtggttgcgctgggtggggccatggca

SEQ ID NO: 530477 - DNA, 75 bp, synthetic construct
  source 1..75: mol_type = other DNA
caacgcattcgcctttccttttatcctccccttatcttaaaaatgtcggcttgtttgttttcaaaaaagagaata

SEQ ID NO: 530478 - DNA, 75 bp, synthetic construct
  source 1..75: mol_type = other DNA
gtcttcatccttcagggcagcaaaagcttttagaagctttaatgattatctccaaaagtagacaggtttttgtta

SEQ ID NO: 530479 - DNA, 75 bp, synthetic construct
  source 1..75: mol_type = other DNA
tgagtatagagcgttttctgagcaataccatcgcgtattcaatcaccctgaatcagagttgagacagaaaatatc

SEQ ID NO: 530480 - DNA, 75 bp, synthetic construct
  source 1..75: mol_type = other DNA
gtattcactttaaatattgctaattctacaattgatgacgattacgaaggtttatacttcactgaatcgccacgg

SEQ ID NO: 530481 - DNA, 75 bp, synthetic construct
  source 1..75: mol_type = other DNA
cgaaaagcagatattgttggtgtttcctcattgcgccgcggcgtagcagaagctattgaagccgttgctcacggt

SEQ ID NO: 530482 - DNA, 75 bp, synthetic construct
  source 1..75: mol_type = other DNA
atttagtgcgatttacaaggaatggtacgaacacaagaagcaagtctggtcagtagggtatgcgactgaacttgc

SEQ ID NO: 530483 - DNA, 75 bp, synthetic construct
  source 1..75: mol_type = other DNA
cagggcgaaggtaaagacctgaataacgaaagtacgccaatggctttcgaaaatattaaacaagttattgatgac

SEQ ID NO: 530484 - DNA, 75 bp, synthetic construct
  source 1..75: mol_type = other DNA
ttctggaagcggcatttgaaagcgatgatttcgaagagcttatgtcgtcgttcaaacgtgaattaactggcgtca

SEQ ID NO: 530485 - DNA, 75 bp, synthetic construct
  source 1..75: mol_type = other DNA
accccgacagacgacgtatatttaccagtaagaccagtccggttgcgccctttgaaccagaagtcaaacgtcagg

SEQ ID NO: 530486 - DNA, 75 bp, synthetic construct
  source 1..75: mol_type = other DNA
gcgtctaatgacgccttattatttccctttgattatcagggattaattaaattcactcctggcaggaaaatagct

SEQ ID NO: 530487 - DNA, 75 bp, synthetic construct
  source 1..75: mol_type = other DNA
cactggtatggattagtcaaccagatgtacaaaaaactaaaggtaacagagcaggagagcatacaccaatctggt

SEQ ID NO: 530488 - DNA, 75 bp, synthetic construct
  source 1..75: mol_type = other DNA
tccaacctattcagcaaaatgctataaaagaacttcttggtgaaaaagatattctacagtttttagatggtataa

SEQ ID NO: 530489 - DNA, 75 bp, synthetic construct
  source 1..75: mol_type = other DNA
gactaactgataaactggatttgtctttaaatgagagaaagctttcattaattacatcaaactttataacaaaca

SEQ ID NO: 530490 - DNA, 75 bp, synthetic construct
  source 1..75: mol_type = other DNA
aagtacgccaatggctttcgaaaatattaaacaagttattgatgacatggcgaccgatgccaccatgtttgacgt

SEQ ID NO: 530491 - DNA, 75 bp, synthetic construct
  source 1..75: mol_type = other DNA
gctgattgatgcagcgactaataaaccggttatcaaagtcgttcgtcagggcgaaggtaaagacctgaataacga

SEQ ID NO: 530492 - DNA, 75 bp, synthetic construct
  source 1..75: mol_type = other DNA
tatctaagaagttatccgaaatgccagatacttttgcaggaatgaaagagtttcgtctccatggtcaaaactatc

SEQ ID NO: 530493 - DNA, 75 bp, synthetic construct
  source 1..75: mol_type = other DNA
tgctttaaatggaaattaactttagtcgaagatgcggcagaaagtttaggctcattttataaaggaaggcatacg

SEQ ID NO: 530494 - DNA, 75 bp, synthetic construct
  source 1..75: mol_type = other DNA
ggtattttgtgctttctgcggctgcgggtctgtttgtcgatgccggtgtcggtccggtcattgctaattatgggc

SEQ ID NO: 530495 - DNA, 75 bp, synthetic construct
  source 1..75: mol_type = other DNA
ggtattttgtgctttctgcggctgcgggtctgtttgtcgatgccggtgtcggtccggtcattgctaactacgggc

SEQ ID NO: 530496 - DNA, 75 bp, synthetic construct
  source 1..75: mol_type = other DNA
cacgccataaaacttgacaaattattttatcaggaaaacataggcaaaccatattttaagggagttattaataat

SEQ ID NO: 530497 - DNA, 75 bp, synthetic construct
  source 1..75: mol_type = other DNA
gcgggcgtcgctgatccagacagccacgtctctggaagtcacctttctgccacccctgaaaggagtctcatcatg

SEQ ID NO: 530498 - DNA, 75 bp, synthetic construct
  source 1..75: mol_type = other DNA
aaatacgacaacgcaaaaaaaaaatgggatacaataagctcaattctttcaaaaaaaacaaagatatatgtaaca

SEQ ID NO: 530499 - DNA, 75 bp, synthetic construct
  source 1..75: mol_type = other DNA
gagtatgtcctccacaagtgccattgagtccaaagacgtcgatacaacgatatacattaaatagtgatacacttt

SEQ ID NO: 530500 - DNA, 75 bp, synthetic construct
  source 1..75: mol_type = other DNA
ctataaagctcaccattatattgaaaaacagttattcgaaacgttatcagataaatataaaataagttttataag

SEQ ID NO: 530501 - DNA, 75 bp, synthetic construct
  source 1..75: mol_type = other DNA
tccatcattttataaatggaaagttacctgctgacgaatacaataaattagttgggctacttgcattcgctaaaa

SEQ ID NO: 530502 - DNA, 75 bp, synthetic construct
  source 1..75: mol_type = other DNA
tggagctggcgagctttgtggttgaatatagccaacaacgagtaccggttattgcgtccgggcatatttctgatg

SEQ ID NO: 530503 - DNA, 75 bp, synthetic construct
  source 1..75: mol_type = other DNA
gtgagaatgaactcaccatgaaactgatactttgcctttgctgccgaaaaatggagttgtgcgccgcacagtggg

SEQ ID NO: 530504 - DNA, 75 bp, synthetic construct
  source 1..75: mol_type = other DNA
caaatatcctgcgttctgaccgccctcttaacgatgatcagatcatgcgttatgccccgtctatctttgccactg

SEQ ID NO: 530505 - DNA, 75 bp, synthetic construct
  source 1..75: mol_type = other DNA
gcttattaatttttatcgtaaaagtaaggcgcttaaggatgttctggcgctggcagaagaacagaaggatgccaa

SEQ ID NO: 530506 - DNA, 75 bp, synthetic construct
  source 1..75: mol_type = other DNA
acattggttgttccacaagaagaagcaaaataccccttgtggaaaaagctctggctcaatgtgctaccacaaaca

SEQ ID NO: 530507 - DNA, 75 bp, synthetic construct
  source 1..75: mol_type = other DNA
atgtcaaaatattcttgtattaacattatcaaaaccaaagcaaaaaaaatggtgcgctctaatactgcactcacg

SEQ ID NO: 530508 - DNA, 75 bp, synthetic construct
  source 1..75: mol_type = other DNA
aaacctgcgagaggtatctgagagtgtgcgcagtgaatttccacgcgcccgcatcatcattgccgccgataatga

SEQ ID NO: 530509 - DNA, 75 bp, synthetic construct
  source 1..75: mol_type = other DNA
cccttcatccatcatcacaaaaaaggctaatacaattttgcaatgagatgtcacaaaaaaacaacatctgcatta

SEQ ID NO: 530510 - DNA, 75 bp, synthetic construct
  source 1..75: mol_type = other DNA
ttaatgggctatttcataacacaaagatagttattgttcttgatggtgatataaaaagtaatttctataaggaat

SEQ ID NO: 530511 - DNA, 75 bp, synthetic construct
  source 1..75: mol_type = other DNA
acagtcagcaccggctggtgcactacacgcggacacaatatgaagagccgctggtcgaaagtcgctatctttacg

SEQ ID NO: 530512 - DNA, 75 bp, synthetic construct
  source 1..75: mol_type = other DNA
acgcagggccatgaaacgcggtatgaatacaacatcgccggtgacctgaccgccgtcattgccccggacggcagc

SEQ ID NO: 530513 - DNA, 75 bp, synthetic construct
  source 1..75: mol_type = other DNA
gcccggatgtggtgacgggcctcatcacgcgcatcaccacgccggatggcagggcatcggcgttttactataacc

SEQ ID NO: 530514 - DNA, 75 bp, synthetic construct
  source 1..75: mol_type = other DNA
gtggctttcacatattacccagccgctttttaccgtgctgacgctggagatttcgttccgcacgttgattctgct

SEQ ID NO: 530515 - DNA, 75 bp, synthetic construct
  source 1..75: mol_type = other DNA
cgtttactgcacagttaagacgccagcaggtgattatctaacggaagagatgagtctggctgaaattgaggctgt

SEQ ID NO: 530516 - DNA, 75 bp, synthetic construct
  source 1..75: mol_type = other DNA
acgatgaatggggtaacctgctgaatgaagagaacccgcatcagctgcagcagcttatccgcctgccggggcagc

SEQ ID NO: 530517 - DNA, 75 bp, synthetic construct
  source 1..75: mol_type = other DNA
attggcgttaactatactcgttatgctgatgacttaaccttttcaacaaataataaagatgttttgtttgatata

SEQ ID NO: 530518 - DNA, 75 bp, synthetic construct
  source 1..75: mol_type = other DNA
gaaaggattcatcaaaacggggttaggacgacgtatcgcctatttactgattcgcggatttggcggcagctcgtt

SEQ ID NO: 530519 - DNA, 75 bp, synthetic construct
  source 1..75: mol_type = other DNA
ttgatgatggctctttctggcccgtactggaaggtatcccggcaacagagatgttcaaagttattccactgtcgc

SEQ ID NO: 530520 - DNA, 75 bp, synthetic construct
  source 1..75: mol_type = other DNA
ctaatatgatccctgagaatttagatgcattaatgactgttcttgatactcaaagtcagcagttctcactaaacc

SEQ ID NO: 530521 - DNA, 75 bp, synthetic construct
  source 1..75: mol_type = other DNA
ggaatccagcgacgggcagttacagcgttgccagcgaaacggcgaagagtcgtggcaaaaagagcgggcgcagta

SEQ ID NO: 530522 - DNA, 75 bp, synthetic construct
  source 1..75: mol_type = other DNA
gaaaggattcatcaaaacggggttggggcggcgtatcgcctatttgctgattcgcggatttggcggcagctcgtt

SEQ ID NO: 530523 - DNA, 75 bp, synthetic construct
  source 1..75: mol_type = other DNA
ctattcccactatttctttgccggaagtacgccgcatgtagtggcgatgtatgccgcttttggcagcgtctcggt

SEQ ID NO: 530524 - DNA, 75 bp, synthetic construct
  source 1..75: mol_type = other DNA
tgttattgctgctacaacatggagtgaatataaaaaatatttcgaaaaagatgcagcgcttgctcgacgctttca

SEQ ID NO: 530525 - DNA, 75 bp, synthetic construct
  source 1..75: mol_type = other DNA
aaatggttattcaatgactgtacagccagttcaggcatccacacgaacagcagcgcgtggcatttttgaaatgga

SEQ ID NO: 530526 - DNA, 75 bp, synthetic construct
  source 1..75: mol_type = other DNA
atcctgacgatctgtcccgtcaggcgctggtcacgatattcggtgatgtggtcaccaatccactgtcaaccagcg

SEQ ID NO: 530527 - DNA, 75 bp, synthetic construct
  source 1..75: mol_type = other DNA
gttgataatttattgattgagcaggatactcccgatgggactacccgactcatccctgcgatagattcttgctat

SEQ ID NO: 530528 - DNA, 75 bp, synthetic construct
  source 1..75: mol_type = other DNA
cttttattgatctctcctcgcctgatgcgttaagaaatagttggccatggatccttaaacccgtacaaaatgaat

SEQ ID NO: 530529 - DNA, 75 bp, synthetic construct
  source 1..75: mol_type = other DNA
gtttatttatttgcaggaccatctggtatcggtaaaacagaaactgcacatgctttagctgaacttgtttatggg

SEQ ID NO: 530530 - DNA, 75 bp, synthetic construct
  source 1..75: mol_type = other DNA
ggaatccagcgacgggcagttacagcgttgccagcgaaacggcgaagagccgtggtaaaaaaagcgggcgcagta

SEQ ID NO: 530531 - DNA, 75 bp, synthetic construct
  source 1..75: mol_type = other DNA
acatcctgcattgaaaatagtacaggataaacctgaaggcactgttgcaaagttagcgatgaggcagccttttgt

SEQ ID NO: 530532 - DNA, 75 bp, synthetic construct
  source 1..75: mol_type = other DNA
cgcgctggaagcgatcgataccacgctggatgacgccctgctgtgggatgccacagccaatgatggtaatggtgc

SEQ ID NO: 530533 - DNA, 75 bp, synthetic construct
  source 1..75: mol_type = other DNA
cgaccgccaagggcggtgacggtgcgtttagcgccggtcgcggaaaagataacacggccagcatcattactaatg

SEQ ID NO: 530534 - DNA, 75 bp, synthetic construct
  source 1..75: mol_type = other DNA
cgttgcctctgacgaacttaacagtctgtggcgtgaatattcgcccgtcacgtatgccagaaccgatgccctgtt

SEQ ID NO: 530535 - DNA, 75 bp, synthetic construct
  source 1..75: mol_type = other DNA
tgctgaatgttgcgtgccggtcggtatttgaattcagtatcagtggtttttgttttaagggactgcgttttacgg

SEQ ID NO: 530536 - DNA, 75 bp, synthetic construct
  source 1..75: mol_type = other DNA
gaattatatttgattccgggtggtattttctgaaattacgggatgtgaaatggcttgaaccgcaatatccaaacc

SEQ ID NO: 530537 - DNA, 75 bp, synthetic construct
  source 1..75: mol_type = other DNA
cggcagttggtactaacgcggaggcaaatggacttaatagtatcgcgttgggctccggcagtattgcagatgtcg

SEQ ID NO: 530538 - DNA, 75 bp, synthetic construct
  source 1..75: mol_type = other DNA
attgcgttaggaaatacggctaaagcttacgaaattatgagcatcgccctcggtgatcatgccaatgcgtcaaaa

SEQ ID NO: 530539 - DNA, 75 bp, synthetic construct
  source 1..75: mol_type = other DNA
atatggcagcaggtgatatcagcactaccagtactgatgccatcaatggatcacagctttatgctatcagtaagt

SEQ ID NO: 530540 - DNA, 75 bp, synthetic construct
  source 1..75: mol_type = other DNA
acgattccctgctgtggaacgctacagcgggggcattcagcgccgcacacggtactgatgccaccagcaaaatca

SEQ ID NO: 530541 - DNA, 75 bp, synthetic construct
  source 1..75: mol_type = other DNA
ggagtaattaaaaaagttgatttgaacacaaatgaagcggaaattaaaataaaagagggtgcccctattaagttg

SEQ ID NO: 530542 - DNA, 75 bp, synthetic construct
  source 1..75: mol_type = other DNA
aggccgatcagctttatgccctggtaagggcgggcggtggtgcgcctcatacaatcgttaaggaggcgttagccg

SEQ ID NO: 530543 - DNA, 75 bp, synthetic construct
  source 1..75: mol_type = other DNA
ttagtgagcgcacgttaaattcatctttatatattactcctggtgaaagtggttttgtcagttttgttaatcgtg

SEQ ID NO: 530544 - DNA, 75 bp, synthetic construct
  source 1..75: mol_type = other DNA
tgacagtttatcttgtttccggcgaatctattgaacttgtgactggcttatacggttcaatgaaagaatgcatgg

SEQ ID NO: 530545 - DNA, 75 bp, synthetic construct
  source 1..75: mol_type = other DNA
atatcactcaggatccgattggactgaaggggggatggaacctgtatggatatcaattgaatccgatatcagaca

SEQ ID NO: 530546 - DNA, 75 bp, synthetic construct
  source 1..75: mol_type = other DNA
agccaatatggtggtgtgcatctcagcggtacggacaccggtccggttgcgaccattaaaggcactgattcactt

SEQ ID NO: 530547 - DNA, 75 bp, synthetic construct
  source 1..75: mol_type = other DNA
tgcgggcggcaatatcaccaacagcggcggcagcatcaacgcacagaacgacctctcgctcgacagttccggcta

SEQ ID NO: 530548 - DNA, 75 bp, synthetic construct
  source 1..75: mol_type = other DNA
catggagtattcatcattatcaaatttgtatggctttgccctaaggtttttgctattgtcatttattgtttttaa

SEQ ID NO: 530549 - DNA, 75 bp, synthetic construct
  source 1..75: mol_type = other DNA
gacatgattgaaataaaaccaccggaagaaagtcgtatgcataaatataaagacattgtgacatcccttggaatc

SEQ ID NO: 530550 - DNA, 75 bp, synthetic construct
  source 1..75: mol_type = other DNA
tagtcatggagaatattgggacgaaatattttcaggtaaagatgagaaaatagttaaaagtaaagataacaatat

SEQ ID NO: 530551 - DNA, 75 bp, synthetic construct
  source 1..75: mol_type = other DNA
ggacacaaataatagttcatttagctacggagataaccgattcgagaagtctcaaggtagcaactggacatttca

SEQ ID NO: 530552 - DNA, 75 bp, synthetic construct
  source 1..75: mol_type = other DNA
aaccgctggaaatagccaacctcggcagcgtgacggtcgggcaggcgtgctcgtcaatcatcagcaatatcggca

SEQ ID NO: 530553 - DNA, 75 bp, synthetic construct
  source 1..75: mol_type = other DNA
atgcttcaatctctgaaccacttaacgcttgctgtcagtaatttgcaaagtagcctgacattctggcgcgatttg

SEQ ID NO: 530554 - DNA, 75 bp, synthetic construct
  source 1..75: mol_type = other DNA
tcagccgtaccgtctgccagggcagcagcatgatgaggaatcagggctgtactataaccgtcaccggtactacga

SEQ ID NO: 530555 - DNA, 75 bp, synthetic construct
  source 1..75: mol_type = other DNA
ccaatatgctttattaacccgggaaaattaccctgttgcatattgtagttgggctaatttaagtttagaaaatga

SEQ ID NO: 530556 - DNA, 75 bp, synthetic construct
  source 1..75: mol_type = other DNA
aattatggagactattacgatgttgattattatgataacaatttgaaaaatgaagtttttgactggattggtaaa

SEQ ID NO: 530557 - DNA, 75 bp, synthetic construct
  source 1..75: mol_type = other DNA
ttatttctgtgaaaaaagattgtgggaaaattcttcatgataagtattcactaatgatgatctttgtcccaattt

SEQ ID NO: 530558 - DNA, 75 bp, synthetic construct
  source 1..75: mol_type = other DNA
tcctgacgtcggtgtccggttggtttcatttgcggtccactgggttaaatctgaaatccatgaatatatcttacg

SEQ ID NO: 530559 - DNA, 75 bp, synthetic construct
  source 1..75: mol_type = other DNA
cctcttcctgatttagaaaaattagtagggtattatgaattatgtggggaggataagaaaatatcagaaaggaat

SEQ ID NO: 530560 - DNA, 75 bp, synthetic construct
  source 1..75: mol_type = other DNA
tatctggaccaaacagtattccgtgccgaagaactggatatgtatatcacgtcaacgattccagacgatgtgcga

SEQ ID NO: 530561 - DNA, 75 bp, synthetic construct
  source 1..75: mol_type = other DNA
tccgatgtcatgagcaacaccacccgcgcagagcgtctggacgatggttcttatcggctggtggggcataaatga

SEQ ID NO: 530562 - DNA, 75 bp, synthetic construct
  source 1..75: mol_type = other DNA
cgcacctacagcagctaccggactaggactcctgccccggtgggcgtctttggccccggctggaaagcgccttct

SEQ ID NO: 530563 - DNA, 75 bp, synthetic construct
  source 1..75: mol_type = other DNA
cgcacctacagcagctaccggactatgactcctgccccggtgggcgtgttcggccccggctggaaagcgccttct

SEQ ID NO: 530564 - DNA, 75 bp, synthetic construct
  source 1..75: mol_type = other DNA
tacaagcagtatgtcttccccttgctgttttataaacgcctgtcagatgtctatctggaagaatataacgaagcg

SEQ ID NO: 530565 - DNA, 75 bp, synthetic construct
  source 1..75: mol_type = other DNA
actagccaatgcccatgtgtatcgtatcacccacccgctgggtgaatgggtgatcagcaacgcgcttcaacgtga

SEQ ID NO: 530566 - DNA, 75 bp, synthetic construct
  source 1..75: mol_type = other DNA
ccggcagagcagtggcagtatgatgaccacggctggctgacagacatcagccacctgagcgaaggccaccgtgtc

SEQ ID NO: 530567 - DNA, 75 bp, synthetic construct
  source 1..75: mol_type = other DNA
aatgccgcattgtggctggtttcttgctaatgcgatttttgattatgtacacccttatgtacacggttttttctg

SEQ ID NO: 530568 - DNA, 75 bp, synthetic construct
  source 1..75: mol_type = other DNA
taagtgacagtgaattaaataaaattaataactatgttgacgaatattataaacaatggggtaaacaatatgtaa

SEQ ID NO: 530569 - DNA, 75 bp, synthetic construct
  source 1..75: mol_type = other DNA
ggaaaatgaacaattaccaaactgccgtgtgctgcgcttcccccctgtcagtccactgctggatgaagacgctcg

SEQ ID NO: 530570 - DNA, 75 bp, synthetic construct
  source 1..75: mol_type = other DNA
tttaccggcagtattaccgaccagacatgtaccgtggacagcggttcgcaaaacctgaacgtcgatctgggcaat

SEQ ID NO: 530571 - DNA, 75 bp, synthetic construct
  source 1..75: mol_type = other DNA
atgggatacatcaagaaaacgaagaaagccacgtccggcgctggtggcggtgagctatccatcatggagaagcct

SEQ ID NO: 530572 - DNA, 75 bp, synthetic construct
  source 1..75: mol_type = other DNA
ttagccaactgcttagtgatcatggagaaaaatgctaatagatggttgaaatcacacatacggaaaatgcaggat

SEQ ID NO: 530573 - DNA, 75 bp, synthetic construct
  source 1..75: mol_type = other DNA
ctttatataatgggttatggatcacaatccttatctcttttgttgtatctgtatttacaattcgtttcatcatgt

SEQ ID NO: 530574 - DNA, 75 bp, synthetic construct
  source 1..75: mol_type = other DNA
acacctttgttaatgataattgtagtattcatagggttggattcagtcgcatatataagcggttatttcaaaaat

SEQ ID NO: 530575 - DNA, 75 bp, synthetic construct
  source 1..75: mol_type = other DNA
agtttcatgatgccatactgttaggcataaaggacgtggcctacaatactgcccgccttaaggacgagagtatcc

SEQ ID NO: 530576 - DNA, 75 bp, synthetic construct
  source 1..75: mol_type = other DNA
atgactcaagcaaccttaatattaactggaacaaagcgttcaaacacgccacggtttccgtcaactggcagcatc

SEQ ID NO: 530577 - DNA, 75 bp, synthetic construct
  source 1..75: mol_type = other DNA
aatatgacgattatgtagattctggggttgaatggttgggacgagtacctgcttcttgggaattaacacgattag

SEQ ID NO: 530578 - DNA, 75 bp, synthetic construct
  source 1..75: mol_type = other DNA
tgaacatcctctcatcatgataaatggcgacgtcttgaccaatgttgattacgagcgtttgattaaattccacat

SEQ ID NO: 530579 - DNA, 75 bp, synthetic construct
  source 1..75: mol_type = other DNA
cctgagattatcaaagaacatttcggtgatggtgagcggtttgattcaaaaatccgctatgtacatgaagaaaaa

SEQ ID NO: 530580 - DNA, 75 bp, synthetic construct
  source 1..75: mol_type = other DNA
tgggctaaggaaagccagtttgcaattcagtatttccagaaaaacgattacctggctaaaacagcactggcaaat

SEQ ID NO: 530581 - DNA, 75 bp, synthetic construct
  source 1..75: mol_type = other DNA
ccggggcgttgtgcctgttctggtcgtggctggtagcgcgatatctcgaccgtacacagctgtctgttggtggag

SEQ ID NO: 530582 - DNA, 75 bp, synthetic construct
  source 1..75: mol_type = other DNA
actggcaaagaatgtcgccgttcggatcccggtaattcctggatttaatgatgatgaacaaagtattgaggctat

SEQ ID NO: 530583 - DNA, 75 bp, synthetic construct
  source 1..75: mol_type = other DNA
ttctcatgctagctattctgtgcaagagcatattgaaaatggaaaactttcaactcaactgatatccactacgaa

SEQ ID NO: 530584 - DNA, 75 bp, synthetic construct
  source 1..75: mol_type = other DNA
tccgcccacaaagtccatctggtagcgaccggacacattgtttgctcgcggcatctccggccaggcaaagggaat

SEQ ID NO: 530585 - DNA, 75 bp, synthetic construct
  source 1..75: mol_type = other DNA
gtgtatttcaatatcattggtacgttaagtgacagtgaattaaataaaattaataactatgttgacgaatattat

SEQ ID NO: 530586 - DNA, 75 bp, synthetic construct
  source 1..75: mol_type = other DNA
ttctgacgatgaaagatacgatattcttatggggaatagttccactcatccgtcatcaaattcaaattcgatgtc

SEQ ID NO: 530587 - DNA, 75 bp, synthetic construct
  source 1..75: mol_type = other DNA
tcacttttctatcagatatagtattggatggaatgaaaaatgtaaataagacaatgtattatttacaggttgggg

SEQ ID NO: 530588 - DNA, 75 bp, synthetic construct
  source 1..75: mol_type = other DNA
aatccacattagagttgtttgacgagcttgtttcatgtgatctgttaactaaacgaaacgcttttggcaagttag

SEQ ID NO: 530589 - DNA, 75 bp, synthetic construct
  source 1..75: mol_type = other DNA
cgtactcaaacctgaactcgttcatgaacggatgcaacagctttccggcgaatgggtgacggtagggacgggctg

SEQ ID NO: 530590 - DNA, 75 bp, synthetic construct
  source 1..75: mol_type = other DNA
atgtttgccgagggaaaaactgtcgcggtggaacatgccgagccggtttatttacgtaacaacgtcgcgtggaag

SEQ ID NO: 530591 - DNA, 75 bp, synthetic construct
  source 1..75: mol_type = other DNA
tacggatggggcaattgttacggttgctcgattaattgagagttgtagatttgatctattaattgagtcgcttaa

SEQ ID NO: 530592 - DNA, 75 bp, synthetic construct
  source 1..75: mol_type = other DNA
tgcccaagttattgagaattgccatagtgttatagattataaatataatcctctcgtgcaaagtaaaattattca

SEQ ID NO: 530593 - DNA, 75 bp, synthetic construct
  source 1..75: mol_type = other DNA
gatgtcaggtggtattgccgtaaatgatcagggagtgaccttttcaccgtggactatcaatgacactttcgccat

SEQ ID NO: 530594 - DNA, 75 bp, synthetic construct
  source 1..75: mol_type = other DNA
cggaaggcggtctgacgcgcagcatggggtatgacgctgccgggcgcatcactgtgctgaccaacgagaacggca

SEQ ID NO: 530595 - DNA, 75 bp, synthetic construct
  source 1..75: mol_type = other DNA
ggatgcgcaggggcgtgaaatccgttatgagtacagcgccgcaggcgacctgacagcaacggtatcaccggacgg

SEQ ID NO: 530596 - DNA, 75 bp, synthetic construct
  source 1..75: mol_type = other DNA
ttctagatttgatggtgaacaaacggaatggagaaatattgagcgcatatatgacgtggttcttagcctgaaata

SEQ ID NO: 530597 - DNA, 75 bp, synthetic construct
  source 1..75: mol_type = other DNA
agaaaataagagtatgatgtatttatactcgtttgtattgattctttccttttccggtataattataactgactc

SEQ ID NO: 530598 - DNA, 75 bp, synthetic construct
  source 1..75: mol_type = other DNA
gcatttttcttatgcatatataatactaagctaagttattcgcttttatctaaagaattgtcgactttaattaaa

SEQ ID NO: 530599 - DNA, 75 bp, synthetic construct
  source 1..75: mol_type = other DNA
gtcgcagtttgtgccgacggtttcaggctactactccgacagtaaaaccggacacttactctcccagccgttcaa

SEQ ID NO: 530600 - DNA, 75 bp, synthetic construct
  source 1..75: mol_type = other DNA
aagctggctacactcttttggacgatggaacagtcaggagggggcatttagcaagccgcatagatagaagttaca

SEQ ID NO: 530601 - DNA, 75 bp, synthetic construct
  source 1..75: mol_type = other DNA
atgattaatcaacgattcattagacctaaaaatcttgctgaagaattaggtatttcaatgccgtcattatggcgc

SEQ ID NO: 530602 - DNA, 75 bp, synthetic construct
  source 1..75: mol_type = other DNA
cttgatgtagcaaaaaatttaacatttaacaaaaataaactatttagaaaaagagatgatgctaattctgaactc

SEQ ID NO: 530603 - DNA, 75 bp, synthetic construct
  source 1..75: mol_type = other DNA
agtgtatatggcaaaggatgtgaacgcctttgcgatggccaacggctgcatccgtgtttatagcggactgatgga

SEQ ID NO: 530604 - DNA, 75 bp, synthetic construct
  source 1..75: mol_type = other DNA
ttgatattttatttgagatatcaaagaaagaaatcgaattatctctgcttaaatataaaaaatatttacctgata

SEQ ID NO: 530605 - DNA, 75 bp, synthetic construct
  source 1..75: mol_type = other DNA
caagcttgtgatgcggtatgatgtgttggcactatctgtttttgccatagtatccttcttatgtgtatacaacat

SEQ ID NO: 530606 - DNA, 75 bp, synthetic construct
  source 1..75: mol_type = other DNA
ttttgcaggtttatgaagttggcaccgccaccatgatggcatcgaaagccattaaaccggtatatgacgtgttta

SEQ ID NO: 530607 - DNA, 75 bp, synthetic construct
  source 1..75: mol_type = other DNA
gaaacgcatcggcaacctgccggcggtacgcgtcccgtacttcccggcggatgcgatgctcatcacgaagctgga

SEQ ID NO: 530608 - DNA, 75 bp, synthetic construct
  source 1..75: mol_type = other DNA
ttgcggcggcaatggtcaaggcgatgcagtctctgacaggcagcgcaccggctgaaattggcaccactgacggca

SEQ ID NO: 530609 - DNA, 75 bp, synthetic construct
  source 1..75: mol_type = other DNA
acgccgcgttggctggtttgaggatgaggtgaaatcatggcttgagaagaaagtagaggagcgttatcagcagga

SEQ ID NO: 530610 - DNA, 75 bp, synthetic construct
  source 1..75: mol_type = other DNA
actcgaattacaaacttgataaattatatgaaaataacttctttaatttgcatatgagttctaagagaataacca

SEQ ID NO: 530611 - DNA, 75 bp, synthetic construct
  source 1..75: mol_type = other DNA
agccgtccgtgcagcagacattggaagaccagatccagcaatccgccgctttcctgacgctgattaacgtcacgc

SEQ ID NO: 530612 - DNA, 75 bp, synthetic construct
  source 1..75: mol_type = other DNA
tatcaggaagaccctgacctggtggtgattgtgggacgtcagctactggcggacaagtatttccccatcgtcaac

SEQ ID NO: 530613 - DNA, 75 bp, synthetic construct
  source 1..75: mol_type = other DNA
atctcaatcacaactcggtgatctgggcgagaaattagtcaattcgcaattctcccagcgccaggaagcagaagc

SEQ ID NO: 530614 - DNA, 75 bp, synthetic construct
  source 1..75: mol_type = other DNA
gaaagccgccgctggctggcatcgtgcggcctgacggtggagcagatacaaaaccagatggacccggtgtacacg

SEQ ID NO: 530615 - DNA, 75 bp, synthetic construct
  source 1..75: mol_type = other DNA
aagccgccgctggctggcatcgtgcggcctgacggtggagcagatgcaaaaccagatggacccggtgtacacgcc

SEQ ID NO: 530616 - DNA, 75 bp, synthetic construct
  source 1..75: mol_type = other DNA
ccgtgacgcgcactatctttaccggtatgaccgtcacggcaggctgacagagaaaaccgacctcatcccggaagg

SEQ ID NO: 530617 - DNA, 75 bp, synthetic construct
  source 1..75: mol_type = other DNA
gaacccgcatccagacggtttatcagccggggagcttcacgccactcatcagagttgaaaccgccaccggtgagc

SEQ ID NO: 530618 - DNA, 75 bp, synthetic construct
  source 1..75: mol_type = other DNA
tggccggataaccgtatcgcccgtgacgcgcactatctttaccggtatgaccgtcacggcaggctgacggagaaa

SEQ ID NO: 530619 - DNA, 75 bp, synthetic construct
  source 1..75: mol_type = other DNA
atagaacaggaacaataattgctggttataacggaacaagcagtcaggatatgacgatgcaaggagggcttattg

SEQ ID NO: 530620 - DNA, 75 bp, synthetic construct
  source 1..75: mol_type = other DNA
attttctatccttatatcggtaaggtgcaggtggcgggtaaaacccttagccaagttcgccaagatattgcaagt

SEQ ID NO: 530621 - DNA, 75 bp, synthetic construct
  source 1..75: mol_type = other DNA
cgtcagctaaaaggtgataagcaaggtaaaattgctaacatttatcagctcaatgcccaagatgcttcagcaatg

SEQ ID NO: 530622 - DNA, 75 bp, synthetic construct
  source 1..75: mol_type = other DNA
gatgaaccaggatgcggcgatagcggcggcaatagacaaagggacagacctgaccgggcaccacgggaaactggc

SEQ ID NO: 530623 - DNA, 75 bp, synthetic construct
  source 1..75: mol_type = other DNA
aaacgctcgctgaaatccgcagtgatattaccgggcgcttagcgacgtacatcgctgatccgcaggtggacgtta

SEQ ID NO: 530624 - DNA, 75 bp, synthetic construct
  source 1..75: mol_type = other DNA
cagtaaccttgataagcggttgcacagtacttccgggcagcaatatgtcgacgatgggtaaagacgtcatcaaac

SEQ ID NO: 530625 - DNA, 75 bp, synthetic construct
  source 1..75: mol_type = other DNA
ataagacaactgaaaaatgacaagcaaggtaaaatagctaatatttatcaacttaatgcacaagatgcatcagcg

SEQ ID NO: 530626 - DNA, 75 bp, synthetic construct
  source 1..75: mol_type = other DNA
gctttaatactaatcttgtcgggaatgctgttgggattacattaccagcaggagaacattatgttagttttggtt

SEQ ID NO: 530627 - DNA, 75 bp, synthetic construct
  source 1..75: mol_type = other DNA
acgtggcgttaggccatgtgaagaaagggatgcaggtcgcgcttggaacaaacgcagtgcgagtagctgcggcat

SEQ ID NO: 530628 - DNA, 75 bp, synthetic construct
  source 1..75: mol_type = other DNA
tgggttctatatagagccgcaaacccagctcacatacagccaccagaatgagatggctatgaaggcgagtaatgg

SEQ ID NO: 530629 - DNA, 75 bp, synthetic construct
  source 1..75: mol_type = other DNA
ataaaatactctccaggaaacccggggcggttcacaccgcaaaaacggatgttaatggcctggcgacttttgatc

SEQ ID NO: 530630 - DNA, 75 bp, synthetic construct
  source 1..75: mol_type = other DNA
ttaattttactgagctagaaggtaattcaagaattcaatgtgaaggaaatatacccttaccaaaggaatttattg

SEQ ID NO: 530631 - DNA, 75 bp, synthetic construct
  source 1..75: mol_type = other DNA
ttggctattgcaaattattttcgttctcctgtaacactaataaaggcaccagtaaacattgcttcatactgcatc

SEQ ID NO: 530632 - DNA, 75 bp, synthetic construct
  source 1..75: mol_type = other DNA
taatgggaaagatacaaaagtgtctctctacgcattaatgcaaaagggtgatcttactcagaatcatctgcttta

SEQ ID NO: 530633 - DNA, 75 bp, synthetic construct
  source 1..75: mol_type = other DNA
agcagccaatcactaatatccctttaacagttatggatgcgataaacgctgccgggggactatccgaaaacgctg

SEQ ID NO: 530634 - DNA, 75 bp, synthetic construct
  source 1..75: mol_type = other DNA
cggcattagcattggcaattgggtttttatcaggttgtacaatcatccctggtcagggattgaacagtctgcgta

SEQ ID NO: 530635 - DNA, 75 bp, synthetic construct
  source 1..75: mol_type = other DNA
cggcattagcgttggtaattgggtttttatcgggttgtacgattattcctgggcagggattaaatagcctgcgta

SEQ ID NO: 530636 - DNA, 75 bp, synthetic construct
  source 1..75: mol_type = other DNA
tagtcaagtctcagccaaattgtaacataataatcctgttgagcattgttgctatttgtgcaagtatagcatcat

SEQ ID NO: 530637 - DNA, 75 bp, synthetic construct
  source 1..75: mol_type = other DNA
aatggttaccagaaaatagtcatgtgatcgctggagccctcgccgaaggtattactggaattatcatgagagaga

SEQ ID NO: 530638 - DNA, 75 bp, synthetic construct
  source 1..75: mol_type = other DNA
tatattcattacctttctgacaggcggattggattcagaaacagaattgatttgttgttaaacttcatgatactg

SEQ ID NO: 530639 - DNA, 75 bp, synthetic construct
  source 1..75: mol_type = other DNA
actggggaagttgctaaatcaggacaacaaccgattacaaacattcctcttactgtcatggatgctattaatgca

SEQ ID NO: 530640 - DNA, 75 bp, synthetic construct
  source 1..75: mol_type = other DNA
cggcattagcgttggctattgggtttttatcgggttgtacaattatccctggtcagggattaaatagtctgcgga

SEQ ID NO: 530641 - DNA, 75 bp, synthetic construct
  source 1..75: mol_type = other DNA
cgattaacaacatatattgagagccctcaagtagacgtaagtatcgctgcttttagatcgcaaaaaacttatgtt

SEQ ID NO: 530642 - DNA, 75 bp, synthetic construct
  source 1..75: mol_type = other DNA
aatcgtgtcatatcacagctggtgccgacgataacaggcgtacatgatatgacagaaactgcccgttatattaaa

SEQ ID NO: 530643 - DNA, 75 bp, synthetic construct
  source 1..75: mol_type = other DNA
aatatcgcattggagtgggtgatgtactgatggttacggtatgggaccatccggaacttacaactcctgcaggtc

SEQ ID NO: 530644 - DNA, 75 bp, synthetic construct
  source 1..75: mol_type = other DNA
tgatgggtgaagttggtaaacaaaccacaatgaagatggatcgaagtggtatgaccctagccgaggctttaggga

SEQ ID NO: 530645 - DNA, 75 bp, synthetic construct
  source 1..75: mol_type = other DNA
ggatattcccgccattgccgaggcgctaaccaaccatgcagaatggcttttagagctagcgccagatcccattga

SEQ ID NO: 530646 - DNA, 75 bp, synthetic construct
  source 1..75: mol_type = other DNA
attttcaaacaactggcccacgagccgcatgacgttgctgaccctatttacgccatgctcgccacgtttgaccgc

SEQ ID NO: 530647 - DNA, 75 bp, synthetic construct
  source 1..75: mol_type = other DNA
atacctggccacaggcattaattgccagagaagcagaattccctaccgggataggtgatgctgccaacttactga

SEQ ID NO: 530648 - DNA, 75 bp, synthetic construct
  source 1..75: mol_type = other DNA
tattctcgctttaaagatctcttaatgccgattaaatttctgggaaatgcagggagtcatagctatgaaaaagtc

SEQ ID NO: 530649 - DNA, 75 bp, synthetic construct
  source 1..75: mol_type = other DNA
agatctgcccaggagctgcggcaaatctgataaggatttctattgaagagttacttacagctatcgacgtcccta

SEQ ID NO: 530650 - DNA, 75 bp, synthetic construct
  source 1..75: mol_type = other DNA
gcaacggccctcctgcgttacaacctgcacatctactcaaactatatgccgcaggttaactggttccttcagggg

SEQ ID NO: 530651 - DNA, 75 bp, synthetic construct
  source 1..75: mol_type = other DNA
gtgaaaaggacgaaaatgaattcttacccgctcatctggaattaattgaaacgccggtatccagacggccgcgtc

SEQ ID NO: 530652 - DNA, 75 bp, synthetic construct
  source 1..75: mol_type = other DNA
tgtaccctcggagtcgatcaagataacacagagatatttaagattacaagtattgatggagtttataaaaaagaa

SEQ ID NO: 530653 - DNA, 75 bp, synthetic construct
  source 1..75: mol_type = other DNA
ttatattgattagtttattgccaaatatagcacatccccattcattgtcatggtatggcatacttagaggtgatg

SEQ ID NO: 530654 - DNA, 75 bp, synthetic construct
  source 1..75: mol_type = other DNA
gctatgggcttcactggtaaacgtgccgcccggttcaaagaggcatacatcaatgcctttaaccagatggagagg

SEQ ID NO: 530655 - DNA, 75 bp, synthetic construct
  source 1..75: mol_type = other DNA
agccatatccgatccgacgccggctacctcgcgctcccgcaggatggcgagaaggttgcgccggtagaagacgcg

SEQ ID NO: 530656 - DNA, 75 bp, synthetic construct
  source 1..75: mol_type = other DNA
atggacaccggaacgccttatcgagcagggaaaacgtacgggcccgtccacaggccgggtggttgaatccatgct

SEQ ID NO: 530657 - DNA, 75 bp, synthetic construct
  source 1..75: mol_type = other DNA
tggtttgacttagagtatacaagctcggtattcagttgcatgtcacagtgcgtaagacctcaatgtaaggaggta

SEQ ID NO: 530658 - DNA, 75 bp, synthetic construct
  source 1..75: mol_type = other DNA
tcgttggactttgaggcggcatacaaacgcaataaagacatagttgaggcgtggtctgaagtgctgcgtatctac

SEQ ID NO: 530659 - DNA, 75 bp, synthetic construct
  source 1..75: mol_type = other DNA
aatgtcgaataataatataaaagttcatttaactgaacccgagataatatttttacatgccgatcttcagcaata

SEQ ID NO: 530660 - DNA, 75 bp, synthetic construct
  source 1..75: mol_type = other DNA
cggccgtctgattcaggaaaccgcccctgacggcgatatcacccgctaccgttatgataatccacacagtgactt

SEQ ID NO: 530661 - DNA, 75 bp, synthetic construct
  source 1..75: mol_type = other DNA
catcgaggcgagtatcaatcagcctatattggtcgaaattgaatcattctttggagcctttaaaagtaaagtgga

SEQ ID NO: 530662 - DNA, 75 bp, synthetic construct
  source 1..75: mol_type = other DNA
aaaaccgatgactggggctgggaagattacagcgttgatgtcacccgtagtgtggtagatattcgcaagattaaa

SEQ ID NO: 530663 - DNA, 75 bp, synthetic construct
  source 1..75: mol_type = other DNA
tgtgtaatgaagcagagcgattattgcagcttaatattagtttgctgcaaaaaatggttgatgagccgaatttcc

SEQ ID NO: 530664 - DNA, 75 bp, synthetic construct
  source 1..75: mol_type = other DNA
caagaacgctaataataatgttgttagaaaaaaattgacatctatttttgatggcttgcttaattctcaggatga

SEQ ID NO: 530665 - DNA, 75 bp, synthetic construct
  source 1..75: mol_type = other DNA
aatagaattaacctccataatagaattgagatgatccctagtgaacattctggctttaaaagcctgttatttgcg

SEQ ID NO: 530666 - DNA, 75 bp, synthetic construct
  source 1..75: mol_type = other DNA
gacagagcagctaaacccggcaggcttaagctacacgtatcagtatgagaaagaccgcatcaccatcaccgacag

SEQ ID NO: 530667 - DNA, 75 bp, synthetic construct
  source 1..75: mol_type = other DNA
gcgagcgtatgaagatcaggaaaacgatagcagggaataccaaaaactgcttaatgaggctaagcgattggtaga

SEQ ID NO: 530668 - DNA, 75 bp, synthetic construct
  source 1..75: mol_type = other DNA
gcattaaggtttatcagggatgatgattttgatgattcggagcttgaagtattaatacccgtaattattgatata

SEQ ID NO: 530669 - DNA, 75 bp, synthetic construct
  source 1..75: mol_type = other DNA
ttttattgggtagtttattaccaaatgtttctcactcatatttattgtcatggtatggtatactaagaggggagt

SEQ ID NO: 530670 - DNA, 75 bp, synthetic construct
  source 1..75: mol_type = other DNA
taaaccaaacaagacaactgcctatattgagcgaaaagagtcattaagaccattatcagaatacgaattgaagaa

SEQ ID NO: 530671 - DNA, 75 bp, synthetic construct
  source 1..75: mol_type = other DNA
tcaggcatgaaactcggcgacacaccgctggtggagtacacccgcgaccgcctgcaccgggaaacgctgcgcagc

SEQ ID NO: 530672 - DNA, 75 bp, synthetic construct
  source 1..75: mol_type = other DNA
gcagcttatccggctgccggggcagcagtatgatgaggagtccggcctgtattacaaccgccaccgctattatga

SEQ ID NO: 530673 - DNA, 75 bp, synthetic construct
  source 1..75: mol_type = other DNA
ttatttatcgcccaaagggtataacaagagtcgataaagagagtttttcccggattaatatcagacccgttgata

SEQ ID NO: 530674 - DNA, 75 bp, synthetic construct
  source 1..75: mol_type = other DNA
cagtcatggattgatgatggcgataccagtctacccccagaaaaaattcatgttccgtttgtgttgacgccaccg

SEQ ID NO: 530675 - DNA, 75 bp, synthetic construct
  source 1..75: mol_type = other DNA
taaccgtaacggtcccatctgcgtggggcggtgtctatatttacggcactcgcgttatttatccggaacagaaaa

SEQ ID NO: 530676 - DNA, 75 bp, synthetic construct
  source 1..75: mol_type = other DNA
ctgaatgcctgaactatgtgcaaataggctctcctgaaaaagttttaatttatgcagaagatctaagcatagaat

SEQ ID NO: 530677 - DNA, 75 bp, synthetic construct
  source 1..75: mol_type = other DNA
gcggggacatgttcgaaggcctggccatctacaaccttctgcgtgaatacgaaggccgtgtgactgtgaaggtgc

SEQ ID NO: 530678 - DNA, 75 bp, synthetic construct
  source 1..75: mol_type = other DNA
gtatccgttgaatccagttacgaatacagatcctctggggttagaagtttttcctagaccattccccttgccaat

SEQ ID NO: 530679 - DNA, 75 bp, synthetic construct
  source 1..75: mol_type = other DNA
aatccgatctcaaatatagatccattaggattagaaacactaaaatgcattaagccactgcattcaatgggcgga

SEQ ID NO: 530680 - DNA, 75 bp, synthetic construct
  source 1..75: mol_type = other DNA
atgactaccttttagtcatgctaatgatatattcaggtagaagaccaatgcagatcgcccaattaaaaaggaagg

SEQ ID NO: 530681 - DNA, 75 bp, synthetic construct
  source 1..75: mol_type = other DNA
gcttgtcgagagcatcgacaggctaagccgcctgacgcaaaaggaatgggcgacactgaaacagaggattcagga

SEQ ID NO: 530682 - DNA, 75 bp, synthetic construct
  source 1..75: mol_type = other DNA
cgactgcaaaataagaaggggaaaggcagcagaattattttcaaggataaggcatatcgccattaatattttgac

SEQ ID NO: 530683 - DNA, 75 bp, synthetic construct
  source 1..75: mol_type = other DNA
gccgctaccatcgaaggatgaagtgtcggatacatcgcggccagtgtttggtgtgatcacctacagcatcaacga

SEQ ID NO: 530684 - DNA, 75 bp, synthetic construct
  source 1..75: mol_type = other DNA
actacgttgaagagcgcatttcactcgataagcgtcttatcgctcatccggcagccacgtacatgatgattgctg

SEQ ID NO: 530685 - DNA, 75 bp, synthetic construct
  source 1..75: mol_type = other DNA
cgggaacatttagcggcagcgaagggacgctgaatacctggtacgtccagccacaggtgcaaatcacctggatgg

SEQ ID NO: 530686 - DNA, 75 bp, synthetic construct
  source 1..75: mol_type = other DNA
tgtactccaggttcagataaagatgacaccaggatatttaagatcgcaagcgtagataatgtttctaaaaaggat

SEQ ID NO: 530687 - DNA, 75 bp, synthetic construct
  source 1..75: mol_type = other DNA
actttgcagagcagcgcatatcgctcgatgagctcatcgtgtcgaggccagcggcgacgtacttcatgagggctg

SEQ ID NO: 530688 - DNA, 75 bp, synthetic construct
  source 1..75: mol_type = other DNA
gcacagtccctgtatgcaccactgcgcacccttgaaccggtggcggggatcagaccggtggtgccacatcttccc

SEQ ID NO: 530689 - DNA, 75 bp, synthetic construct
  source 1..75: mol_type = other DNA
gtggaagtggaagaactggaagatttcaccttacaaatggcgcaccacatctctgagaaagcgccgttagccatt

SEQ ID NO: 530690 - DNA, 75 bp, synthetic construct
  source 1..75: mol_type = other DNA
gcgcaccacatctctgagaaagcgccgttagccattgccgttatcaaagaagagctgcgtgtactgggcgaagca

SEQ ID NO: 530691 - DNA, 75 bp, synthetic construct
  source 1..75: mol_type = other DNA
cagatcagcagccgtttatgattgatgggataattggatttctcggacattatcctgatttatataaggttgttg

SEQ ID NO: 530692 - DNA, 75 bp, synthetic construct
  source 1..75: mol_type = other DNA
atcagagaatgagatggcggggaagagctttgctgctgcctggaattccggtgtggctgattaccggactttgta

SEQ ID NO: 530693 - DNA, 75 bp, synthetic construct
  source 1..75: mol_type = other DNA
tcttgagttaactcgtgattcaaataacgacattagaattgcagcaaccaaagctctcggacgtatttttcggag

SEQ ID NO: 530694 - DNA, 75 bp, synthetic construct
  source 1..75: mol_type = other DNA
aaaatgaagctcaggataaattaagcaaagaagaattagataatctcccattatttattgacccaagctttttta

SEQ ID NO: 530695 - DNA, 75 bp, synthetic construct
  source 1..75: mol_type = other DNA
cgttggccggatcgattgagtatgaccatcgcggtgtcggggatctccttcccggcatttgccctggggatgctt

SEQ ID NO: 530696 - DNA, 75 bp, synthetic construct
  source 1..75: mol_type = other DNA
acaaatgacacaaccttaacgttggttgaaaactatactggtgaaacgcaaagtaatatcccatgtaggatcata

SEQ ID NO: 530697 - DNA, 75 bp, synthetic construct
  source 1..75: mol_type = other DNA
tgattagtggtttggtcgctatcgtagcggttgtcattcccgcctttaatcagaatcgaataaacaaaataaatc

SEQ ID NO: 530698 - DNA, 75 bp, synthetic construct
  source 1..75: mol_type = other DNA
aatcaatcacactgacggataagtatggcagcagcgttcacctgaacacggtgctcacttatctgcttgaacttt

SEQ ID NO: 530699 - DNA, 75 bp, synthetic construct
  source 1..75: mol_type = other DNA
aatggggatgacacctgagcagattaagcaggccaccggactttccgaagctgaactgaaaaaagtcattcactg

SEQ ID NO: 530700 - DNA, 75 bp, synthetic construct
  source 1..75: mol_type = other DNA
caagactggtccacaagggccacgtggtcttcagggggatactggtcctgttggacctcgtggagttccaggacc

SEQ ID NO: 530701 - DNA, 75 bp, synthetic construct
  source 1..75: mol_type = other DNA
aaggggagtggacgacagaagagttcatcaactggctgaaatcacagggtgcttttgagggcccttactgggtaa

SEQ ID NO: 530702 - DNA, 75 bp, synthetic construct
  source 1..75: mol_type = other DNA
acaagttaacgttcccggccgtaagtatacagtcacagaaaatcatttctcatcagtcacacaaagtgacgacga

SEQ ID NO: 530703 - DNA, 75 bp, synthetic construct
  source 1..75: mol_type = other DNA
aagcagagcccagaggcgattgattcaatggagaaaaataaatatatttcagcttcagcatcagaatatgaacgg

SEQ ID NO: 530704 - DNA, 75 bp, synthetic construct
  source 1..75: mol_type = other DNA
aagccgatgatttgaagcttaggaatttcgagttgtgggtaacggttaggatacctattaaaggtttttctccta

SEQ ID NO: 530705 - DNA, 75 bp, synthetic construct
  source 1..75: mol_type = other DNA
tattaacgctaaagtttgattgccgcccatgcgagatgcacgtcattggcaaaatcaaaaatcacatactgaaaa

SEQ ID NO: 530706 - DNA, 75 bp, synthetic construct
  source 1..75: mol_type = other DNA
attgacgaggttgatcttaaggttatcgctaatctgttggtaaggcattcgtatttatttgttcataaatcttta

SEQ ID NO: 530707 - DNA, 75 bp, synthetic construct
  source 1..75: mol_type = other DNA
acaagtctacaaaactgttccttgatcttgctaaaagatcttttgaggcaagttggatcagtttacaaaatgatc

SEQ ID NO: 530708 - DNA, 75 bp, synthetic construct
  source 1..75: mol_type = other DNA
tgcgtgttctgattcattacatcgttaacgcaggggacactgtatcaccggaatttatgcgggcgctggccgagc

SEQ ID NO: 530709 - DNA, 75 bp, synthetic construct
  source 1..75: mol_type = other DNA
cagcttcagatgaaagcagaggttgaggcgctgacagaactgaaggcgatccgcagttatattatcggatggcct

SEQ ID NO: 530710 - DNA, 75 bp, synthetic construct
  source 1..75: mol_type = other DNA
atagcgctgagtgaagcggcagagcaggcgatgttcaccaaagggatggaaatccacgtccggcagcgcaccatg

SEQ ID NO: 530711 - DNA, 75 bp, synthetic construct
  source 1..75: mol_type = other DNA
ggctcaagccccgtgtgaaaaaacttcgcagaaaaggtcatgaaatggcgatgcatgcactaattgccaaaaaat

SEQ ID NO: 530712 - DNA, 75 bp, synthetic construct
  source 1..75: mol_type = other DNA
tcaagcgtattgcgctcgatcgcatcatgatcggcttcaacggtaccagctacgcggagaaatcagaccgcgccg

SEQ ID NO: 530713 - DNA, 75 bp, synthetic construct
  source 1..75: mol_type = other DNA
gcagcgttttgaaaacgcctcaaaggatagcaccgaacttacaaaaaaaattaacgtgatcggtgtgaccgacca

SEQ ID NO: 530714 - DNA, 75 bp, synthetic construct
  source 1..75: mol_type = other DNA
gataaaatcagaaatcatgaaaacacttgaaagcgtaaaaattattgcttacgaacgccatcgtaataaagacca

SEQ ID NO: 530715 - DNA, 75 bp, synthetic construct
  source 1..75: mol_type = other DNA
tgtttgttccacaatttattgaggcacaaaacacgggtatgacgttgaccatgatcttcctagtcggtctgttgt

SEQ ID NO: 530716 - DNA, 75 bp, synthetic construct
  source 1..75: mol_type = other DNA
atcttatgccttgcttggtctggcgaccattctttctccactctttattggtatggtcgccgaccgttttttctc

SEQ ID NO: 530717 - DNA, 75 bp, synthetic construct
  source 1..75: mol_type = other DNA
agctggagcggacgttactgacgaccgcgttgcgacatacgcaggggcataaacaggaagcggcgcggctactcg

SEQ ID NO: 530718 - DNA, 75 bp, synthetic construct
  source 1..75: mol_type = other DNA
ttcccagggctggccccggaagccggtatacgctgctgttcgaatcgttcgttcactcatggctgaaaatcagca

SEQ ID NO: 530719 - DNA, 75 bp, synthetic construct
  source 1..75: mol_type = other DNA
agtgcccgcgcggcacgtccaggcgggaacagacgcaaaaccacaggcacacagggtaatcagccaccagcggga

SEQ ID NO: 530720 - DNA, 75 bp, synthetic construct
  source 1..75: mol_type = other DNA
ggggtgaaatatttcccctttattcgtgtgttcggcacatttggctttatggtcatcggttttattattggtgaa

SEQ ID NO: 530721 - DNA, 75 bp, synthetic construct
  source 1..75: mol_type = other DNA
cagaggtaacaggatgggaggtagggataatgaaaaagctgatcttcttaccgtatactcactagattacctgac

SEQ ID NO: 530722 - DNA, 75 bp, synthetic construct
  source 1..75: mol_type = other DNA
acggttcaggtttatggcgtattttctgcatgggatattccgcaaactatcccggatataacgcctgcgaaaata

SEQ ID NO: 530723 - DNA, 75 bp, synthetic construct
  source 1..75: mol_type = other DNA
atattcctgataaagatcgcttcctgagtaacattaatgtttacagcaaaggcgaggtggataagaaaaaaggaa

SEQ ID NO: 530724 - DNA, 75 bp, synthetic construct
  source 1..75: mol_type = other DNA
atggtgatggggtgctggatgcttatgctaatggtgtgcatgtattccgctttataaatggttcagcaagatcat

SEQ ID NO: 530725 - DNA, 75 bp, synthetic construct
  source 1..75: mol_type = other DNA
agggcaatgcggaatacagtgtgacggatgccagcggaaagatgtttaccatcaactgcacgggaaatccggacc

SEQ ID NO: 530726 - DNA, 75 bp, synthetic construct
  source 1..75: mol_type = other DNA
ttgtactggcaagtacaatgttcgccagctttacagcctctgcggtccccggactctggcaacaggggtacggtc

SEQ ID NO: 530727 - DNA, 75 bp, synthetic construct
  source 1..75: mol_type = other DNA
attcagtcggcaaagcttaaaaccggggaaacggttcaggtttatggcgtattttctgcatgggatattccgtaa

SEQ ID NO: 530728 - DNA, 75 bp, synthetic construct
  source 1..75: mol_type = other DNA
actctgccgataacattggtggcgtatattacaggccggttcagaaatacattaacgggacgtggtacaacgtgg

SEQ ID NO: 530729 - DNA, 75 bp, synthetic construct
  source 1..75: mol_type = other DNA
tggacaaccgctcagtttattgactggctagagtctcagggagcctttaatcatccttattggatgtgcaagtgt

SEQ ID NO: 530730 - DNA, 75 bp, synthetic construct
  source 1..75: mol_type = other DNA
caggctggcatttctatagtcagcgaaatacagataactcggtgacatttgctgtaaacggtcagatacaaccaa

SEQ ID NO: 530731 - DNA, 75 bp, synthetic construct
  source 1..75: mol_type = other DNA
atgccatgcaggccggaaacagccattatccaaaacctcggtttgcaggaaacggtaaatcaggcttctggcgca

SEQ ID NO: 530732 - DNA, 75 bp, synthetic construct
  source 1..75: mol_type = other DNA
aaatacactgcacaggacgccaccacaacgcgaaaaggccttgttcagctcagtagcgccaccaacagtgattct

SEQ ID NO: 530733 - DNA, 75 bp, synthetic construct
  source 1..75: mol_type = other DNA
ctgacctgatgaatgacaaactggtgacgatggcatttattaccacgtttactggcctgactgacaaatggtttt

SEQ ID NO: 530734 - DNA, 75 bp, synthetic construct
  source 1..75: mol_type = other DNA
cgtcaacgtatctgccgactctttttgcgctctccgctgccggcgccgccggggaagcactcagtgaggggcagt

SEQ ID NO: 530735 - DNA, 75 bp, synthetic construct
  source 1..75: mol_type = other DNA
agtaagatccttgccattataaatgcaatgaacaaaaatagtaacgccaagatactctttcagaacattcagccg

SEQ ID NO: 530736 - DNA, 75 bp, synthetic construct
  source 1..75: mol_type = other DNA
ccatcaattttattacgtattcattgatgctttctctggtaggagtgcctgtctatgccgtcgattttaatacgg

SEQ ID NO: 530737 - DNA, 75 bp, synthetic construct
  source 1..75: mol_type = other DNA
ctacctgttccgcccgttaccgcaaataggttcccgattaaccctgggcgaaaccgattttagctctaacatttt

SEQ ID NO: 530738 - DNA, 75 bp, synthetic construct
  source 1..75: mol_type = other DNA
tgtctttaatgacgattcaaataatcatgatgatgataaggataaagtagcccagaccattatggttctaaacca

SEQ ID NO: 530739 - DNA, 75 bp, synthetic construct
  source 1..75: mol_type = other DNA
cacagcaagtggcccgtttattcggtgttaataagaggacgattttaaggtggatcgatagcatccctggctttc

SEQ ID NO: 530740 - DNA, 75 bp, synthetic construct
  source 1..75: mol_type = other DNA
ttcccattccggtaagtccagaaggcgctaacgtgaagtttattaagagagaagtacttgagtatttctaccgtg

SEQ ID NO: 530741 - DNA, 75 bp, synthetic construct
  source 1..75: mol_type = other DNA
gcctcgttcttcttataaaaatgtcttcctgactctggatggaactcgccccatccgtgatatctacatgcttgt

SEQ ID NO: 530742 - DNA, 75 bp, synthetic construct
  source 1..75: mol_type = other DNA
tgcagattatgctgatgatcaccaagggccagaaggtcaatgagatctcagaacagctcaatctcagtccgaaaa

SEQ ID NO: 530743 - DNA, 75 bp, synthetic construct
  source 1..75: mol_type = other DNA
gctatgcgccaactgctatcacatccgctgcgtcctcaggccgtctttaccggaaatgacgctatggctgttggc

SEQ ID NO: 530744 - DNA, 75 bp, synthetic construct
  source 1..75: mol_type = other DNA
gacacttccgcgacacctgttgatcaccacgttagtattagtgcaaaacgcggtggcagcaaatcaacagcacaa

SEQ ID NO: 530745 - DNA, 75 bp, synthetic construct
  source 1..75: mol_type = other DNA
taagaaaggttgtgctggcgttggctgttgcggggtattgtgccattcctgcaattgcatctgcagcatggacca

SEQ ID NO: 530746 - DNA, 75 bp, synthetic construct
  source 1..75: mol_type = other DNA
taagattttatgataaaaaatcttcatttataactttacctatttcgcttagtgaagttcagttgaatgaaataa

SEQ ID NO: 530747 - DNA, 75 bp, synthetic construct
  source 1..75: mol_type = other DNA
atgtttccattaaatgatctgtcgttaaaagctcagtcggttcaattaaataaaatcacatctaatactgagtct

SEQ ID NO: 530748 - DNA, 75 bp, synthetic construct
  source 1..75: mol_type = other DNA
taaaagattcttctgttattatccattgtcaatgttgttatttttatatgattatttgaacatgagattaccaca

SEQ ID NO: 530749 - DNA, 75 bp, synthetic construct
  source 1..75: mol_type = other DNA
cgcgaatccgattaaccattctcggtgaagggcctgaacaggaagcattgcaaaaaaccataacgcaacacgcgt

SEQ ID NO: 530750 - DNA, 75 bp, synthetic construct
  source 1..75: mol_type = other DNA
accgccatttacagatctgtccggatgctcagcttggcctggcggaacaattgctgccggtgtcgttgatacggc

SEQ ID NO: 530751 - DNA, 75 bp, synthetic construct
  source 1..75: mol_type = other DNA
tttataacttatccgacagtgcctacagtcgaatgagtggttacaccgtcaagcctcctaccggagacagcaatg

SEQ ID NO: 530752 - DNA, 75 bp, synthetic construct
  source 1..75: mol_type = other DNA
agagtttatatcgactaatattgcagagtttctagacaacttaacgaaaattacagattccagactttgcaaagg

SEQ ID NO: 530753 - DNA, 75 bp, synthetic construct
  source 1..75: mol_type = other DNA
gctgtttcaggcttggattatttcattgttagaaatggtgtttctgcagaaatatcacaatatgccggtaaagac

SEQ ID NO: 530754 - DNA, 75 bp, synthetic construct
  source 1..75: mol_type = other DNA
gttcttgacggtgaggttcttgatgaggtggatgtgaagggcattctgacacatctcattaaccgtgcagtggaa

SEQ ID NO: 530755 - DNA, 75 bp, synthetic construct
  source 1..75: mol_type = other DNA
caagcgtgaagcctctaagcacaaagcgcccgaacaacccgccatcaccgaagttaatcgcataacgcgccacgg

SEQ ID NO: 530756 - DNA, 75 bp, synthetic construct
  source 1..75: mol_type = other DNA
tatgggcgcggcaccgcgtctgaaagcggccggtttatcctggtgtttattatcaaatcggcggcgttctgttcc

SEQ ID NO: 530757 - DNA, 75 bp, synthetic construct
  source 1..75: mol_type = other DNA
cccgcctgctgaccgtgacgcgcaaaggaaaaggctgccatctgctgacgtcgatgacggacgccatgcgcttcc

SEQ ID NO: 530758 - DNA, 75 bp, synthetic construct
  source 1..75: mol_type = other DNA
acattttagcggcggggcacgccgttcttgcctgtggagagatggtgcagtcaggccgctcgttgaagcaggaac

SEQ ID NO: 530759 - DNA, 75 bp, synthetic construct
  source 1..75: mol_type = other DNA
tcaaggaggaaataaatcagcaggattcactctggcctctcctaggttttcttacattccgaataatccaacaaa

SEQ ID NO: 530760 - DNA, 75 bp, synthetic construct
  source 1..75: mol_type = other DNA
gaaaagcgccttgctattattaatggctctttcggcatcgtcagctttttaattgcgccaatatgcactacagca

SEQ ID NO: 530761 - DNA, 75 bp, synthetic construct
  source 1..75: mol_type = other DNA
aaggtctggaaagcggtcacggattcaggcatgaattcagcacgattatgaacgagcacgaatggcctgctgacg

SEQ ID NO: 530762 - DNA, 75 bp, synthetic construct
  source 1..75: mol_type = other DNA
tcttaaatatattattatttgcaatagctcgagattattttcggaatatatttatattcatgcaaaaataattac

SEQ ID NO: 530763 - DNA, 75 bp, synthetic construct
  source 1..75: mol_type = other DNA
atagattataatttatggattgatacttcaaatactggtataaactataaaaacccagcaatatatgaaggggag

SEQ ID NO: 530764 - DNA, 75 bp, synthetic construct
  source 1..75: mol_type = other DNA
caggttttataattaatgatgggaagacaagaaatcagtataaagactcgaggcaagatgtaacaggcttagtgg

SEQ ID NO: 530765 - DNA, 75 bp, synthetic construct
  source 1..75: mol_type = other DNA
aaaaaaccaatcagaattggccattgcaaaagaagcctatgataataccttgatggcttataatgaacttaacac

SEQ ID NO: 530766 - DNA, 75 bp, synthetic construct
  source 1..75: mol_type = other DNA
ccgaagatacccaccgctacgccaccgattatctgtggaatgaagtgctactgccggacaacttattaaaaatcc

SEQ ID NO: 530767 - DNA, 75 bp, synthetic construct
  source 1..75: mol_type = other DNA
atacggtaatgagtgatctctgtacgggctgcaatttatgtgttgatccgtgcccgacgcactgcatctcgttgc

SEQ ID NO: 530768 - DNA, 75 bp, synthetic construct
  source 1..75: mol_type = other DNA
tacaaaccaatcatttatcggtcttgagttcataggcaactaccttgtagcaccaacagatttccctgatctgag

SEQ ID NO: 530769 - DNA, 75 bp, synthetic construct
  source 1..75: mol_type = other DNA
ttaccgatcagcacgacgggtaaagcgccgaaagccggtacgtttgaaggcataacgaccatctatctggaaatg

SEQ ID NO: 530770 - DNA, 75 bp, synthetic construct
  source 1..75: mol_type = other DNA
cagcagaagctgaagagatgggaggtgaaaaagcggaagaagtagcagcaaaacaagcgcccaacgacaagaaag

SEQ ID NO: 530771 - DNA, 75 bp, synthetic construct
  source 1..75: mol_type = other DNA
atataagtgataactgcagtgggtataatgttgtggacaaagaagtatctgtaaaaatctcgattgttacttatt

SEQ ID NO: 530772 - DNA, 75 bp, synthetic construct
  source 1..75: mol_type = other DNA
gcaataaaaagatgatcgtctttaccgcgttcgccgacacggctcaatacctgtatgtccatctggcgcaatggg

SEQ ID NO: 530773 - DNA, 75 bp, synthetic construct
  source 1..75: mol_type = other DNA
gctggatgaagaaatgtggctgcacggcacgtccgaacagcgtctgcaatatctgacgcaaatgcgcattcgcgc

SEQ ID NO: 530774 - DNA, 75 bp, synthetic construct
  source 1..75: mol_type = other DNA
atcgagtggagaactacttttaagcatactgctgctaagtaatataagtaagatcaaaaatcaacattttattta

SEQ ID NO: 530775 - DNA, 75 bp, synthetic construct
  source 1..75: mol_type = other DNA
ggaagggtgggattattttttagcaacacttgcctcaacattgctaacaaacagtgctgtttttattcttggtat

SEQ ID NO: 530776 - DNA, 75 bp, synthetic construct
  source 1..75: mol_type = other DNA
atgaatatatcatatgtgaatagcaacaaaacgacatctttacctattgagttagatgcacaaaataacaaagat

SEQ ID NO: 530777 - DNA, 75 bp, synthetic construct
  source 1..75: mol_type = other DNA
tccttatattttagactctaaccatgttgctgtaataattgtattagtgacattaagtaatgttctaaaaaagat

SEQ ID NO: 530778 - DNA, 75 bp, synthetic construct
  source 1..75: mol_type = other DNA
aagaaaattgcaaacggaatatatcactatcctgttattttaatatttctattagctctttttataaattttatt

SEQ ID NO: 530779 - DNA, 75 bp, synthetic construct
  source 1..75: mol_type = other DNA
ctggaattaatggcagttgctctggctgtcgaaaacctcactatgcaaaaaaacgttgctatgttgtgccagcaa

SEQ ID NO: 530780 - DNA, 75 bp, synthetic construct
  source 1..75: mol_type = other DNA
atgagacgttccggcggcacactgtatcttatcgccctgctaacagcgacaacagtcctgacagcctgtacgcca

SEQ ID NO: 530781 - DNA, 75 bp, synthetic construct
  source 1..75: mol_type = other DNA
acaggcaagaatatccgaatgtgcctttagtgttagccaggagaagcttcaatgcccggaagagggaaaacggtg

SEQ ID NO: 530782 - DNA, 75 bp, synthetic construct
  source 1..75: mol_type = other DNA
caaaagaagaaaatcaaagaggcgatatcaaaatataaaatgcctttactcgattcagctgagtcattgaatcat

SEQ ID NO: 530783 - DNA, 75 bp, synthetic construct
  source 1..75: mol_type = other DNA
agaaagcaataactattctcgaatgcaaatctaaaattgccaatctctgtaattccctgaaattaataaaagaga

SEQ ID NO: 530784 - DNA, 75 bp, synthetic construct
  source 1..75: mol_type = other DNA
ggatatgggagcaaaggataaagcggcagggaaatcacgaaatgatgtgcagcaacatattcagcagtttcacag

SEQ ID NO: 530785 - DNA, 75 bp, synthetic construct
  source 1..75: mol_type = other DNA
ggatttgcatccttttggcatgatcgaatctaaaaactactatcgcgccttcaaacttgtgcctgaagacggtaa

SEQ ID NO: 530786 - DNA, 75 bp, synthetic construct
  source 1..75: mol_type = other DNA
accagcaaagcggacgtttcgctcgaaaatagcgcatggaccatcattgccgatatcactacgacgaaccaaaac

SEQ ID NO: 530787 - DNA, 75 bp, synthetic construct
  source 1..75: mol_type = other DNA
tgccgatatcaataatataaaccaaaacacccgtctcaatttagcaaacctggtgatgtcagacggaactgtcgt

SEQ ID NO: 530788 - DNA, 75 bp, synthetic construct
  source 1..75: mol_type = other DNA
atgcatcaatctggttctgtttctctttgtcgttccgcaatatctgttctggtggctacagcgttatattcaccc

SEQ ID NO: 530789 - DNA, 75 bp, synthetic construct
  source 1..75: mol_type = other DNA
ctatttcctcacgttatttcatttgttcaaagacttcctcgaagacatcgacgaagacaacatcatccgcagtaa

SEQ ID NO: 530790 - DNA, 75 bp, synthetic construct
  source 1..75: mol_type = other DNA
aagttttgccatcagcggcagtgccacgctcagtccaactgggcttggcgacgtgcgctgcgactccctgcacat

SEQ ID NO: 530791 - DNA, 75 bp, synthetic construct
  source 1..75: mol_type = other DNA
aaaggcgtgtatgtctctgtaccgttggatctcttctcgtctggcccgacacgcagccgtgcggcgattggctgg

SEQ ID NO: 530792 - DNA, 75 bp, synthetic construct
  source 1..75: mol_type = other DNA
ccaggcttttagtgcgtttccagaagaagaccaagaaaaaatgcttcaggaaatcaaagacaagaaaaaatcaat

SEQ ID NO: 530793 - DNA, 75 bp, synthetic construct
  source 1..75: mol_type = other DNA
cagcttgctggtccgttaaatcagaaaaagatcgctgattttattgcgaaaaaagtcgatctggctgcccaggat

SEQ ID NO: 530794 - DNA, 75 bp, synthetic construct
  source 1..75: mol_type = other DNA
atctgatactggaacgaattgaaagccctaagtttttgaaaaacgatggcttgggcaatgaaattggattttggg

SEQ ID NO: 530795 - DNA, 75 bp, synthetic construct
  source 1..75: mol_type = other DNA
cgatgtctggcgcaaatgtgattatgatggctgagccagtgactcgttcatctgtgacagcaagtgcggaaaatt

SEQ ID NO: 530796 - DNA, 75 bp, synthetic construct
  source 1..75: mol_type = other DNA
tattcaaagaatcactcataatttatggcatgcacgtaaaaaaaatgtgtttttaattgagcaaataactaatgg

SEQ ID NO: 530797 - DNA, 75 bp, synthetic construct
  source 1..75: mol_type = other DNA
ggatataattattgcaaaaatagatttgtttattcaacgaatcacgcataatttatggcatgcacgtaaaaaaat

SEQ ID NO: 530798 - DNA, 75 bp, synthetic construct
  source 1..75: mol_type = other DNA
cctgcattatacatcgccatgagcaagggtaatgaagacgtcgtgttatcttatatatcgacgctgggtgctttt

SEQ ID NO: 530799 - DNA, 75 bp, synthetic construct
  source 1..75: mol_type = other DNA
atttattaaaaggcgcgacagcacatggaacccctgctttatacatcgccatgagcaagggtaataaagacgtcg

SEQ ID NO: 530800 - DNA, 75 bp, synthetic construct
  source 1..75: mol_type = other DNA
gaactcattataagtctcctcatagattgcacatcgatagcgacataccaacgccttcatcagagcctattaatc

SEQ ID NO: 530801 - DNA, 75 bp, synthetic construct
  source 1..75: mol_type = other DNA
aacggagaacagtaaacgtacaataccaattcatcaaaaattgatagatataggatttttggtgtatgtacagaa

SEQ ID NO: 530802 - DNA, 75 bp, synthetic construct
  source 1..75: mol_type = other DNA
acctatttcagcgtgcattatcgcaaccccaaactcatcagtagtcctgtgaaggttccgcgcaaagaggaagaa

SEQ ID NO: 530803 - DNA, 75 bp, synthetic construct
  source 1..75: mol_type = other DNA
atgagtcaaaacgacattattatcagaactcattataagtctcctcatagattgcacatcgatagcgacatacca

SEQ ID NO: 530804 - DNA, 75 bp, synthetic construct
  source 1..75: mol_type = other DNA
tccgggatgcggagttcagagcattacttcgccatcctcctgcagggagtcgcgttatcgcgagtaaggattttg

SEQ ID NO: 530805 - DNA, 75 bp, synthetic construct
  source 1..75: mol_type = other DNA
aatttaccgcaaactgtcgaaaaatatcacaaaattgttattccactgccctttttaccattaactttgccactt

SEQ ID NO: 530806 - DNA, 75 bp, synthetic construct
  source 1..75: mol_type = other DNA
ccctctctgacgcttggcgcagcggtagcggcggtgatggcgcgctttacccgcgcttcatttgttgatgtttta

SEQ ID NO: 530807 - DNA, 75 bp, synthetic construct
  source 1..75: mol_type = other DNA
atcctcctgcagggagtcgcgttatcgcgagtaaggattttggcttcgctttagatattttcttttgtcgaatga

SEQ ID NO: 530808 - DNA, 75 bp, synthetic construct
  source 1..75: mol_type = other DNA
cgcccattaaagctaaccatttgcgaagcatactggattatattgaacaggaacagtcaactgccgaaaaacgta

SEQ ID NO: 530809 - DNA, 75 bp, synthetic construct
  source 1..75: mol_type = other DNA
gtgtctggaaatataggggcaaatccatactgtgttattcaggaatttaccgcaaactgtcgaaaaatatcacaa

SEQ ID NO: 530810 - DNA, 75 bp, synthetic construct
  source 1..75: mol_type = other DNA
aacggggaacagtaaacgtacaataccaattcataacaaattgatagatattggatttttggactatgtacagaa

SEQ ID NO: 530811 - DNA, 75 bp, synthetic construct
  source 1..75: mol_type = other DNA
atgtcggcatctcgaatgggtgaaaagaaccatcgctatggtaaacctagtgcaatgagaggcaaaaaagtaaca

SEQ ID NO: 530812 - DNA, 75 bp, synthetic construct
  source 1..75: mol_type = other DNA
atgtcggcatctcgaatgggtgaaaagaaccatcgctatggtaaacctagtgcaatgaaagggaagaaaataacc

SEQ ID NO: 530813 - DNA, 75 bp, synthetic construct
  source 1..75: mol_type = other DNA
tacggctgacgatagggagtattgataagtaccagaatcaggcagagctaaacgttggctccacccaacaaacct

SEQ ID NO: 530814 - DNA, 75 bp, synthetic construct
  source 1..75: mol_type = other DNA
aatgcgatgatcccggtggttaccatgatgggcttacagtttggcttcttgctcggcggctccattgtcgtggag

SEQ ID NO: 530815 - DNA, 75 bp, synthetic construct
  source 1..75: mol_type = other DNA
caacccggtaaggaaattgcggttaaaacggaagagcagcaatcggtacaggttctgcaccggacccgcaggtgt

SEQ ID NO: 530816 - DNA, 75 bp, synthetic construct
  source 1..75: mol_type = other DNA
aacggtaagcccggcgcggcaagattacgaacaatcatgattggcttaggccatccaaaatatgatcttcgtaga

SEQ ID NO: 530817 - DNA, 75 bp, synthetic construct
  source 1..75: mol_type = other DNA
ggccaatcctttccccaagcagtaagaatacagatgataatttttggtttttgctggagaacacaaacctacaaa

SEQ ID NO: 530818 - DNA, 75 bp, synthetic construct
  source 1..75: mol_type = other DNA
atggtggtgaactgtacaaagaactagctaaagtcctttcaatggatgggaaatacaaaatatcagcacatgaat

SEQ ID NO: 530819 - DNA, 75 bp, synthetic construct
  source 1..75: mol_type = other DNA
ctttgggcggcgtaaaggtcttgatgatccacgaggaaacttagttttcgaatatgtaagattaattaaagaatt

SEQ ID NO: 530820 - DNA, 75 bp, synthetic construct
  source 1..75: mol_type = other DNA
gggatttgttgctgacggatgtgttccataaaacatggccgctggcttctgatccggatgtgcgcatgcgtctga

SEQ ID NO: 530821 - DNA, 75 bp, synthetic construct
  source 1..75: mol_type = other DNA
tttaccgaggataaagagcacctccctattcgtaaatcctctattgaggattcactggagattgaggatgggcag

SEQ ID NO: 530822 - DNA, 75 bp, synthetic construct
  source 1..75: mol_type = other DNA
cactttctgccggtgatatttgaacaccctcctgaaatggtggaaagcggggctcacctgctgatggaaaacctc

SEQ ID NO: 530823 - DNA, 75 bp, synthetic construct
  source 1..75: mol_type = other DNA
cgcgaatttgcgccagtggtcaggggaattgctcggactcaggctcggattgaggtgaggcagaacggctatctg

SEQ ID NO: 530824 - DNA, 75 bp, synthetic construct
  source 1..75: mol_type = other DNA
ctttcactctgaaaaggacatgtatggtaagccgtacctaaagacttgtctgactcgggaaatgttggtgcgtta

SEQ ID NO: 530825 - DNA, 75 bp, synthetic construct
  source 1..75: mol_type = other DNA
tcagtattcttcagaaggatattacaccttatatgatgtactggaaacatacagagagggaaaccattattccta

SEQ ID NO: 530826 - DNA, 75 bp, synthetic construct
  source 1..75: mol_type = other DNA
atgaacacgaatcccaatatattaactatccgcgaagtgtcggaattaaccggaatcagcgtaggaagtatcaga

SEQ ID NO: 530827 - DNA, 75 bp, synthetic construct
  source 1..75: mol_type = other DNA
ccaccggtgagctggcgaaaacgcagcgccgcagcctggcggatgcccttcagcagtccggcggcgaagacggtg

SEQ ID NO: 530828 - DNA, 75 bp, synthetic construct
  source 1..75: mol_type = other DNA
gctgaccggttccggtggtgacttacaggtgactgtgctggaatcagacggtacgacacagttttttaccgtgcc

SEQ ID NO: 530829 - DNA, 75 bp, synthetic construct
  source 1..75: mol_type = other DNA
ataacaagtcgtttgagctgacagggacgagttttacggcagcgagttatcagtactcatcggatggttaccata

SEQ ID NO: 530830 - DNA, 75 bp, synthetic construct
  source 1..75: mol_type = other DNA
cggatgccttttcgcgatgtgattgaccgtgttgagcaggcattagtatccgccggttggcaggtggagcgccgt

SEQ ID NO: 530831 - DNA, 75 bp, synthetic construct
  source 1..75: mol_type = other DNA
aggcacgcgcccgttaccgccgctgcggatgccttttcgcgatgtgattgaccgtgttgagcaggcattagtttc

SEQ ID NO: 530832 - DNA, 75 bp, synthetic construct
  source 1..75: mol_type = other DNA
gttcgtcagaatggctatctcgttcagagtttgacggtagctccaggggaattttcactgacaaatttgcctgta

SEQ ID NO: 530833 - DNA, 75 bp, synthetic construct
  source 1..75: mol_type = other DNA
atatttttgacagtgtaccgtttcgtgggcttatgctggcctccgatgaaaacatggttccatatagccagcgtg

SEQ ID NO: 530834 - DNA, 75 bp, synthetic construct
  source 1..75: mol_type = other DNA
tgccgctgggacgctggtttggggggacggataacgacatcagtgccacggcgcagatgcagcgttccacgggac

SEQ ID NO: 530835 - DNA, 75 bp, synthetic construct
  source 1..75: mol_type = other DNA
cgtttcaggtcatcgcaggtgactcaagtggcagtggttttagcttcatccgtgaagatttagttgtcactaatt

SEQ ID NO: 530836 - DNA, 75 bp, synthetic construct
  source 1..75: mol_type = other DNA
ccctcttcaaaatggggggccaggcatagtgatttatggcatcccacaatgtcatccgtatctgcaggaaataaa

SEQ ID NO: 530837 - DNA, 75 bp, synthetic construct
  source 1..75: mol_type = other DNA
tttttaatgaacccctattttctctcttaattattctttccaataaggttgcattagaatataaatattttatat

SEQ ID NO: 530838 - DNA, 75 bp, synthetic construct
  source 1..75: mol_type = other DNA
actgcatatggttaatttaattgtatatacggtaatgacatttaacatgttatcagtaatgggcttgattcctta

SEQ ID NO: 530839 - DNA, 75 bp, synthetic construct
  source 1..75: mol_type = other DNA
cggatattacgctttcgcgaatggggttggggacatgggccattggcggcggtcctgcatggaatggcgatctcg

SEQ ID NO: 530840 - DNA, 75 bp, synthetic construct
  source 1..75: mol_type = other DNA
tgatggtcataatcctgaccgactccctgctttcccgctttaataaactgaatgtgccactctatcttcatcccg

SEQ ID NO: 530841 - DNA, 75 bp, synthetic construct
  source 1..75: mol_type = other DNA
taaccgataataatattccacgctgtactgcagtgatgaatggagtatcttctgatcttatcggttcaaattcgt

SEQ ID NO: 530842 - DNA, 75 bp, synthetic construct
  source 1..75: mol_type = other DNA
atcctggctgagatgatgaagttgccgcccccggtggaagaaggggaaatggatcctcatgaccgtaaagcctgg

SEQ ID NO: 530843 - DNA, 75 bp, synthetic construct
  source 1..75: mol_type = other DNA
cctcaagctgtataaacttactgatattctggcagaattaatgaagttgccaccgcctgtcgctgaaggagaaat

SEQ ID NO: 530844 - DNA, 75 bp, synthetic construct
  source 1..75: mol_type = other DNA
ttcttaacgtcagccagcttgcggcactgtctggagtacaccgacagacagtggcatcacgaatcaaaaatatca

SEQ ID NO: 530845 - DNA, 75 bp, synthetic construct
  source 1..75: mol_type = other DNA
cgccggtcgctgaaggggaaatggatccccatgaccgaaaagcctggtatcagtcagaacgggaacgtctgaaat

SEQ ID NO: 530846 - DNA, 75 bp, synthetic construct
  source 1..75: mol_type = other DNA
taagttgtacaagctcactgatattctggctgagttattgaagttgccaccgccggtcgctgaaggggaaatgga

SEQ ID NO: 530847 - DNA, 75 bp, synthetic construct
  source 1..75: mol_type = other DNA
tgacgaaattgcgcggcgggtggcagatgacagcaaacaggaagatacagaggaggaaaatcaggaggacgaata

SEQ ID NO: 530848 - DNA, 75 bp, synthetic construct
  source 1..75: mol_type = other DNA
tagcactttccaccaaagacaataatgttgtaagtgattattcattaccgtggaaaagggatgtgatacttaaca

SEQ ID NO: 530849 - DNA, 75 bp, synthetic construct
  source 1..75: mol_type = other DNA
attaatccattttggagtgactggtcagaaatttttggtaagtttttttgcggaattaaaagacaaaagtcacga

SEQ ID NO: 530850 - DNA, 75 bp, synthetic construct
  source 1..75: mol_type = other DNA
ctgcgcatgatcgttttggaatccttatcggtaacaacaccgatagtcgcactgagtgatgacttaattaatatt

SEQ ID NO: 530851 - DNA, 75 bp, synthetic construct
  source 1..75: mol_type = other DNA
aatgagtaatgagcttttttctattttagaaggtgcattagtctgtgagattgatgattggcgggtaaaaattaa

SEQ ID NO: 530852 - DNA, 75 bp, synthetic construct
  source 1..75: mol_type = other DNA
gatatgtcgttttacatttgcagcagttatcaagggaagaacagacagcgattctgcatgctcatggcatagagc

SEQ ID NO: 530853 - DNA, 75 bp, synthetic construct
  source 1..75: mol_type = other DNA
gtgcttatttattcgctccagacaagtgtcaggatctatttttatctgaatcaaaatccacggcagaaatgatag

SEQ ID NO: 530854 - DNA, 75 bp, synthetic construct
  source 1..75: mol_type = other DNA
gtcgcattgttgccggtccctatgactacaacgtggtaaaaagcgacaaccagaactggtttttaaccagtgaaa

SEQ ID NO: 530855 - DNA, 75 bp, synthetic construct
  source 1..75: mol_type = other DNA
cagggtcacgagttcacgccgaccacactgaccattaacggcaactacaccgccaatgatggcctgttagtcatg

SEQ ID NO: 530856 - DNA, 75 bp, synthetic construct
  source 1..75: mol_type = other DNA
aaatcccgcgagttccagccgtttgtagaagtgaactggctgcataacagtaaggatttcagcaccagtatggat

SEQ ID NO: 530857 - DNA, 75 bp, synthetic construct
  source 1..75: mol_type = other DNA
gcgatcccccgcccggcgaaaaacacgccccccccagtaagtgccaggacaatggcggacattcttaatgaggct

SEQ ID NO: 530858 - DNA, 75 bp, synthetic construct
  source 1..75: mol_type = other DNA
aatttacgtattactaatggcggcacactcactacctcagctcaggtagctattggatatgcttatccaggcaat

SEQ ID NO: 530859 - DNA, 75 bp, synthetic construct
  source 1..75: mol_type = other DNA
taatgctattgatgatcataaagcgcgttccttccagcctttcgtggaagccaactggatttataactcccgcaa

SEQ ID NO: 530860 - DNA, 75 bp, synthetic construct
  source 1..75: mol_type = other DNA
atattatgaatggtggtatgctatattggcgggaagtgacgaactatgggaaatggaagatgacataactctttg

SEQ ID NO: 530861 - DNA, 75 bp, synthetic construct
  source 1..75: mol_type = other DNA
ctgaacacgctgaacgagctggcggcggcgctgggaaacgacccgaattttgcgaccaccatgactaacgcgctt

SEQ ID NO: 530862 - DNA, 75 bp, synthetic construct
  source 1..75: mol_type = other DNA
tttactcagttaagcagtgcgaccaacagcacgtctgaaacactggccgcaacgccgaaagcggtaaaggccgct

SEQ ID NO: 530863 - DNA, 75 bp, synthetic construct
  source 1..75: mol_type = other DNA
acaatgctgaaaaacgtcttcagaaagatcagaacggtgcggatattcctgataaagaacgcttcctgagtaaca

SEQ ID NO: 530864 - DNA, 75 bp, synthetic construct
  source 1..75: mol_type = other DNA
ggcaattcaatagttttaggagataacgataccgggtttaaacaaaatggtgatggggtgctggatgcttatgct

SEQ ID NO: 530865 - DNA, 75 bp, synthetic construct
  source 1..75: mol_type = other DNA
tgtcggtcaaacaacatataagtggggagcaactaatcccgcgacagaaagcacgaacgcacaagctattctgga

SEQ ID NO: 530866 - DNA, 75 bp, synthetic construct
  source 1..75: mol_type = other DNA
cgttggccggatcgattaagtatgactatcgcggtatcagggatttcattcccggcatttgcgttaggaatactg

SEQ ID NO: 530867 - DNA, 75 bp, synthetic construct
  source 1..75: mol_type = other DNA
tactagcgatatttatttttcatttgttattcataatattggccttatatgcacgaaaacttgataataaggtat

SEQ ID NO: 530868 - DNA, 75 bp, synthetic construct
  source 1..75: mol_type = other DNA
ctggggggacactgcgtgtcgctaaaaccacaatcggcggcaacctggagaatggcggcacggttcaaatgaata

SEQ ID NO: 530869 - DNA, 75 bp, synthetic construct
  source 1..75: mol_type = other DNA
tggacgcatcaggctccgtcaggttgcgtatataccggcattattgttcaggataccggctcaaactctgccgat

SEQ ID NO: 530870 - DNA, 75 bp, synthetic construct
  source 1..75: mol_type = other DNA
ggtgcatttgcacttcggcagacaggtaatacggttaatggtgatacagccgtgggatggaattgggacagtggc

SEQ ID NO: 530871 - DNA, 75 bp, synthetic construct
  source 1..75: mol_type = other DNA
tgctctatatagatacagtacgaaaacttaccgaagaagatctactacgtgattttggtcttacaagtgagatga

SEQ ID NO: 530872 - DNA, 75 bp, synthetic construct
  source 1..75: mol_type = other DNA
cgttatggcatgtaaaaaaaattataatactcatgaagttgctggctgtgtaaccctctcttttcgtgaggttaa

SEQ ID NO: 530873 - DNA, 75 bp, synthetic construct
  source 1..75: mol_type = other DNA
aatggttctggttctgtggcgaatactgcggcgactaaagacgaactggctgctgctgcggcggcggcgggtaca

SEQ ID NO: 530874 - DNA, 75 bp, synthetic construct
  source 1..75: mol_type = other DNA
aattttactactgacgctgaaactaaagctgcaaccaccgccgatccactgaaagctctggacgaagccatcagc

SEQ ID NO: 530875 - DNA, 75 bp, synthetic construct
  source 1..75: mol_type = other DNA
ggatgacgccgcaggtcaggcgattgctaaccgttttacttctaacattaaaggcctgactcaggctgcacgtaa

SEQ ID NO: 530876 - DNA, 75 bp, synthetic construct
  source 1..75: mol_type = other DNA
ggtctttactggtctgagtattttgcatggctggttgttcctaaacatgtttcctataatggatataatatatat

SEQ ID NO: 530877 - DNA, 75 bp, synthetic construct
  source 1..75: mol_type = other DNA
gggctttactgttggtactggcgctacaggtctgaccgtaggtactgatggtaaagtgactatcggcgggactac

SEQ ID NO: 530878 - DNA, 75 bp, synthetic construct
  source 1..75: mol_type = other DNA
actcgttaattagagtgctgttaaaaattctaagagtagattgctttttagctaatataaaacatgccgcaacaa

SEQ ID NO: 530879 - DNA, 75 bp, synthetic construct
  source 1..75: mol_type = other DNA
aaccgccgatcccctgaaagctctggacgaagccatcagctccatcgacaaattccgctcctccctcggtgccgt

SEQ ID NO: 530880 - DNA, 75 bp, synthetic construct
  source 1..75: mol_type = other DNA
attgccaaagatggcactattacagatacgaatggtgatgcgctctatctggatactaccggcaacctgactaag

SEQ ID NO: 530881 - DNA, 75 bp, synthetic construct
  source 1..75: mol_type = other DNA
cgagtgaatctgaagcgactaccaacccgctggcagcattggatgacgctatcgcgtccatcgacaaattccgtt

SEQ ID NO: 530882 - DNA, 75 bp, synthetic construct
  source 1..75: mol_type = other DNA
tcgaaagcgcagatcatccagcaggccggtaactccgtgctggcaaaagctaaccaggtaccgcagcaggttctg

SEQ ID NO: 530883 - DNA, 75 bp, synthetic construct
  source 1..75: mol_type = other DNA
gcaaaagacgggtctaaactttatattgacaccacagggaatttaacccaaaacggtggaggtactttagaagaa

SEQ ID NO: 530884 - DNA, 75 bp, synthetic construct
  source 1..75: mol_type = other DNA
cgccaacgacggtatctccgttgcgcagaccaccgaaggcgcgctgtccgaaatcaacaacaacttacagcgtgt

SEQ ID NO: 530885 - DNA, 75 bp, synthetic construct
  source 1..75: mol_type = other DNA
ttgctggggtagctggatcttgaatgagcgtaaaactcacaccgctgcattagaaagttatttactgataaataa

SEQ ID NO: 530886 - DNA, 75 bp, synthetic construct
  source 1..75: mol_type = other DNA
ttaaagtgtattttggccgttacccggatgtggggcttaaggtcgcgcgagagttacggcaggagtgtcgggaat

SEQ ID NO: 530887 - DNA, 75 bp, synthetic construct
  source 1..75: mol_type = other DNA
cgggaaagacctggcatggttataagccggatgaacacatacatcatcagtaccatcggttcgcgtccgctggat

SEQ ID NO: 530888 - DNA, 75 bp, synthetic construct
  source 1..75: mol_type = other DNA
ctgttaattccatttatcgcccgaatgatattactaaaccggtggcagaatcttttgaaggaagtggggtgttgc

SEQ ID NO: 530889 - DNA, 75 bp, synthetic construct
  source 1..75: mol_type = other DNA
aagacgcagcagcggagcgcggcattcattcgttcagcaaagtaggacagcgtgacaagaaaggcagaacgcggg

SEQ ID NO: 530890 - DNA, 75 bp, synthetic construct
  source 1..75: mol_type = other DNA
agtggcttctgactgaacgtagtagccggacaatctgcggcgtgcatttcggggcgggtacgctggtattgccaa

SEQ ID NO: 530891 - DNA, 75 bp, synthetic construct
  source 1..75: mol_type = other DNA
gcggtttgttggtgtcattcagcgccgtcgcaggacggatcaccatgaatgcaccagagcagtcaacgacggaga

SEQ ID NO: 530892 - DNA, 75 bp, synthetic construct
  source 1..75: mol_type = other DNA
ggttttttgtaaatgatttaccggtggattttttaattgaagctttcccacggcgtgggttattgtatgaaaaaa

SEQ ID NO: 530893 - DNA, 75 bp, synthetic construct
  source 1..75: mol_type = other DNA
tgttgagactggatataaaggcattgtttccctaagcgatattaccgaagaattagttgttgagtttgactgcta

SEQ ID NO: 530894 - DNA, 75 bp, synthetic construct
  source 1..75: mol_type = other DNA
gaatctgatcccgaccgactggcaggaagaagctgcgcggcaatccaacgatggcggcagcagtcagggcttcgg

SEQ ID NO: 530895 - DNA, 75 bp, synthetic construct
  source 1..75: mol_type = other DNA
ggcgaccatcgccgagaacgtcggccttatcagatccatccccgagaagtatttcaccgaggtggaagggctggt

SEQ ID NO: 530896 - DNA, 75 bp, synthetic construct
  source 1..75: mol_type = other DNA
tttctaatattctgactccctgtgcgatagttttactggcatttagcggtgtaagagttggagagttaaatagct

SEQ ID NO: 530897 - DNA, 75 bp, synthetic construct
  source 1..75: mol_type = other DNA
ataaatagagtgtatcacaagaataaatatatacaggataatcgtaatttatattataacatgaactatggacga

SEQ ID NO: 530898 - DNA, 75 bp, synthetic construct
  source 1..75: mol_type = other DNA
aagccgcgtgtatggctcatgcccggagaaaaatccacgatgtgcatgcaagagtgcccaccgacatcaccacgg

SEQ ID NO: 530899 - DNA, 75 bp, synthetic construct
  source 1..75: mol_type = other DNA
tcaatgccatgaacggtaaccgcgcagaaatgagcccggaagccgccggtattgccgcctgtctgatgacgtaca

SEQ ID NO: 530900 - DNA, 75 bp, synthetic construct
  source 1..75: mol_type = other DNA
gaaccggatgatgatgatgacgaaacatgggtactgttcaatgccatgaacggtaaccgtgtagtggtcaagtaa

SEQ ID NO: 530901 - DNA, 75 bp, synthetic construct
  source 1..75: mol_type = other DNA
gtatctggaatctgtacactctgaacaacggcggggcatttatggcgcccgaaccggatgacgatgatgacgaaa

SEQ ID NO: 530902 - DNA, 75 bp, synthetic construct
  source 1..75: mol_type = other DNA
gtatctggaatctgtacactctgaacaacggcggggcatttatggcacccgaaccggatgacgatgatggcgaaa

SEQ ID NO: 530903 - DNA, 75 bp, synthetic construct
  source 1..75: mol_type = other DNA
gtatctggaatctgtacacactgaacaacggcggggcatttatggctcccgaaccggatgacgatgatgacgaaa

SEQ ID NO: 530904 - DNA, 75 bp, synthetic construct
  source 1..75: mol_type = other DNA
atgaacggcaaccgcgctgaaatgagcccggaagccgccggtattgctgcctgtctgatgacgtacagtcatcat

SEQ ID NO: 530905 - DNA, 75 bp, synthetic construct
  source 1..75: mol_type = other DNA
agaaagctggaatcgtggtccacaaatgcccacgcaatccgtttaccggaaaccgcatttttgcattgaactgcg

SEQ ID NO: 530906 - DNA, 75 bp, synthetic construct
  source 1..75: mol_type = other DNA
gtgaatgatgccctgtaccgttatgtaatgaacacccgcaagattcacactgatgacacaccggtaaaggtactg

SEQ ID NO: 530907 - DNA, 75 bp, synthetic construct
  source 1..75: mol_type = other DNA
ttggttgccactcccgtccctgatgaacagcgtatcagcttctggccgcagcattttggcctcattccacagtgg

SEQ ID NO: 530908 - DNA, 75 bp, synthetic construct
  source 1..75: mol_type = other DNA
ttggttgccactcccgtccctgatgaacatcgaatcagcttctggccgcagcattttggcctcattccacagtgg

SEQ ID NO: 530909 - DNA, 75 bp, synthetic construct
  source 1..75: mol_type = other DNA
ctactgcgggggcatctggaatctgtacaccctgaacaacggtggcgcatttatagcacctgaaccggatgaaga

SEQ ID NO: 530910 - DNA, 75 bp, synthetic construct
  source 1..75: mol_type = other DNA
gtatctggaatctgtacaccctgaacaacggcggggcatttatggctcccgaaccggatgacgatgatgccgaaa

SEQ ID NO: 530911 - DNA, 75 bp, synthetic construct
  source 1..75: mol_type = other DNA
aaagcctgtacaaaatgtgactgtattgttgaagcaccggcgccgtcccgcccgatagagcgtggtatcgcgagc

SEQ ID NO: 530912 - DNA, 75 bp, synthetic construct
  source 1..75: mol_type = other DNA
gcagaataacggaagccgcgtgtatggctcatgcccggagaaaaatccacgatgtacatgcaagagcgcccacct

SEQ ID NO: 530913 - DNA, 75 bp, synthetic construct
  source 1..75: mol_type = other DNA
gtaccggaacagaacgccacgctaaccatttcgctaccaacgcatcacgcagcaacatccgctacagtctgagcg

SEQ ID NO: 530914 - DNA, 75 bp, synthetic construct
  source 1..75: mol_type = other DNA
gcttctggccgcagcattttggcctcattccacagtgggtgaccctagagccccgtatcttcggctggatggacc

SEQ ID NO: 530915 - DNA, 75 bp, synthetic construct
  source 1..75: mol_type = other DNA
cccgctatgcagaagatggctgggtggaggtggataataacattgccgaaaacgccctacgactggtcagtctgg

SEQ ID NO: 530916 - DNA, 75 bp, synthetic construct
  source 1..75: mol_type = other DNA
gacagcgttatgcccgtccgatactggaagatctgtggtcatggcttgaagagcaggaaccgcaatgttctccgg

SEQ ID NO: 530917 - DNA, 75 bp, synthetic construct
  source 1..75: mol_type = other DNA
ggagtgtggcggtaagctggattatctgggggaagtcagcgctgaacagctggaactggtgagcagtgccctgaa

SEQ ID NO: 530918 - DNA, 75 bp, synthetic construct
  source 1..75: mol_type = other DNA
tgacgtcctacgccagtatgtgctgatgcccggtaaagtccatgccgatgatatccccgttccggtccaggaggc

SEQ ID NO: 530919 - DNA, 75 bp, synthetic construct
  source 1..75: mol_type = other DNA
gtatctggaatctgtacacgctgaacaacggcggggcatttatggctcccgaaccggatgacgatgatggcgaaa

SEQ ID NO: 530920 - DNA, 75 bp, synthetic construct
  source 1..75: mol_type = other DNA
gggcattactctccaactgggttgacgcatattgtcagttaatgactctgctgaatgataccctgtaccgttacg

SEQ ID NO: 530921 - DNA, 75 bp, synthetic construct
  source 1..75: mol_type = other DNA
ccgccgaacagctggagttaatgcgtagcgccttccgggttatccggacggtacgggaaaaacatgcctgtactc

SEQ ID NO: 530922 - DNA, 75 bp, synthetic construct
  source 1..75: mol_type = other DNA
acattatacgaagcacttcgaacggttgatcgtctgcttcgcgggcaaagttttattaaacagactgatttataa

SEQ ID NO: 530923 - DNA, 75 bp, synthetic construct
  source 1..75: mol_type = other DNA
caccttccccgtgaaatacaccgcctggagccagaagaaagctgttgcccggagtgtggcggtaagctggattat

SEQ ID NO: 530924 - DNA, 75 bp, synthetic construct
  source 1..75: mol_type = other DNA
ccgccgaacagctggagctgatgcgcagcgccttccgggttatccggactgtacgtgaaaaacatgcctgtactc

SEQ ID NO: 530925 - DNA, 75 bp, synthetic construct
  source 1..75: mol_type = other DNA
caggccgatgcttacggtggttaccgggtgttatacgaatccggcagaataacggaagccgcgtgtatggctcat

SEQ ID NO: 530926 - DNA, 75 bp, synthetic construct
  source 1..75: mol_type = other DNA
gggcctacgtccgtgatgaccgtaatgccggttcacagatgcccccagcggtctggttcgcgtactcaccggacc

SEQ ID NO: 530927 - DNA, 75 bp, synthetic construct
  source 1..75: mol_type = other DNA
attgcagaactggaaagccagctccgtcagaaagaccagcaactgagtctggttgaagagacggaggccttcctg

SEQ ID NO: 530928 - DNA, 75 bp, synthetic construct
  source 1..75: mol_type = other DNA
atgacgcgagggtgtcatgtacggttccgtgagcagccggggggggggggaaattctctccggctgactcgactc

SEQ ID NO: 530929 - DNA, 75 bp, synthetic construct
  source 1..75: mol_type = other DNA
cggaagccgcgtgtatggctcatgcccggagaaaaatccacgatgtgcatgcaagagcgcccacctacatcacca

SEQ ID NO: 530930 - DNA, 75 bp, synthetic construct
  source 1..75: mol_type = other DNA
accagatgggcacgctgtaaaacaaatcggcgaacacacctggctgattgagaaagctggaatcgtggttcacag

SEQ ID NO: 530931 - DNA, 75 bp, synthetic construct
  source 1..75: mol_type = other DNA
acccgcaaggttcacactgacgacataccagtaaaagtgctggcaccgggcagaaaaaaggcaaaaacaggacgc

SEQ ID NO: 530932 - DNA, 75 bp, synthetic construct
  source 1..75: mol_type = other DNA
tcagaaatatacggccggcaaggtgtggagctgagccgttcactgctgtcgggctgggtggatgcatgctgctgg

SEQ ID NO: 530933 - DNA, 75 bp, synthetic construct
  source 1..75: mol_type = other DNA
atgaaaattatcacccgtggtgaagccatgcgtattcaccaacagcatcctgcatcccgtctatttccgttctgc

SEQ ID NO: 530934 - DNA, 75 bp, synthetic construct
  source 1..75: mol_type = other DNA
caggatttcacattgtacgaagcgctacgcacggttgatcgtctgctgcgcggacagaatttcattaaacaggct

SEQ ID NO: 530935 - DNA, 75 bp, synthetic construct
  source 1..75: mol_type = other DNA
cggcagaagaagccctgaagcgaatcagtgaactgtacgccatcgaggatgaaatacggggattaccggagtcag

SEQ ID NO: 530936 - DNA, 75 bp, synthetic construct
  source 1..75: mol_type = other DNA
caatccgtttaccggaaaccgcatttttgcactaagcagcggcgacaatcagttcgggcaggatttcacattata

SEQ ID NO: 530937 - DNA, 75 bp, synthetic construct
  source 1..75: mol_type = other DNA
acgtcatcgtcgtctgttaccagcacattttccccgtgaaatacaccgcctggagcctgaagaaagttgttgccc

SEQ ID NO: 530938 - DNA, 75 bp, synthetic construct
  source 1..75: mol_type = other DNA
tatcggtgaactgtatgccatcgaggcagaggtccggggctgttcagcagaacagcgtctggcggcaagaaaacc

SEQ ID NO: 530939 - DNA, 75 bp, synthetic construct
  source 1..75: mol_type = other DNA
ccggagaaaaatccacgatgtgcatgcaagagcgcccaccgacatcaccacggaagccctgcagcgtatcggtga

SEQ ID NO: 530940 - DNA, 75 bp, synthetic construct
  source 1..75: mol_type = other DNA
tggcctcattccacagtgggtgaccctggagccccgtatcttcggctggatggaccgtctgtgtgaagactactg

SEQ ID NO: 530941 - DNA, 75 bp, synthetic construct
  source 1..75: mol_type = other DNA
atgaagcaacaacgaaattcttcacagcaacgcttccgcaacggggcggaacgccacgctaaccgtttcgccacc

SEQ ID NO: 530942 - DNA, 75 bp, synthetic construct
  source 1..75: mol_type = other DNA
tgaaatcaaccggctgaaggcgctggttgcgaaactgcagcgtatgcagttcggtaaaagctcagaaaaacttcg

SEQ ID NO: 530943 - DNA, 75 bp, synthetic construct
  source 1..75: mol_type = other DNA
atgaaaagcgtttctcagaatacccccacaatttattcagctacaacaccagagaataatccgcctcagttggtt

SEQ ID NO: 530944 - DNA, 75 bp, synthetic construct
  source 1..75: mol_type = other DNA
tgcctgtcgtacggagaattatgccatgacggtccattattaccggttgcgggattacgccctgcagcatccgga

SEQ ID NO: 530945 - DNA, 75 bp, synthetic construct
  source 1..75: mol_type = other DNA
catgccgtctgaacaatgtggagccagaaaagtggctgcgttacgtcattgaacatatccaggactggccggcaa

SEQ ID NO: 530946 - DNA, 75 bp, synthetic construct
  source 1..75: mol_type = other DNA
gtgtgcttcaggccgatgcttacggtggttaccgggcgttatacgaatccggcagaataacggaagccgcgtgta

SEQ ID NO: 530947 - DNA, 75 bp, synthetic construct
  source 1..75: mol_type = other DNA
cacattgtacgaagcactgcgcacagtcgatcgtctgcttcgcgggcaaagttttattaaacaggctgatttata

SEQ ID NO: 530948 - DNA, 75 bp, synthetic construct
  source 1..75: mol_type = other DNA
tgagcaggctgaagccctccgtcagagagatctgcaactgagtctggttggagagacggaggccttcctgcgctc

SEQ ID NO: 530949 - DNA, 75 bp, synthetic construct
  source 1..75: mol_type = other DNA
ctactgcggtggtatctggaatctgtacaccctgaacaacggcggggcatttatggcaccgaacctgatgacgat

SEQ ID NO: 530950 - DNA, 75 bp, synthetic construct
  source 1..75: mol_type = other DNA
gtgatctcctttcatgaaaatacgcaaacgcagggtgagcaatatgacccggtactgccatccgccctgcgccag

SEQ ID NO: 530951 - DNA, 75 bp, synthetic construct
  source 1..75: mol_type = other DNA
cccgccgaaagatccacgatgagcacgtccgcatcccgtcagcactgacggaagaagccctggagcagatcggtc

SEQ ID NO: 530952 - DNA, 75 bp, synthetic construct
  source 1..75: mol_type = other DNA
gccatattctgagcgtactgccggaatggccctccaaccgggttgatgaactcctgccatggaacgtagtactca

SEQ ID NO: 530953 - DNA, 75 bp, synthetic construct
  source 1..75: mol_type = other DNA
caactggttgccaccctcgtccctgatgaacagcgcatcagcttctggccgcagcactttggcctcattccacag

SEQ ID NO: 530954 - DNA, 75 bp, synthetic construct
  source 1..75: mol_type = other DNA
tgctgcctgtctgatgacgtacggtcatcacgcctgccgtacggagtgttacgccatgacggttcattattaccg

SEQ ID NO: 530955 - DNA, 75 bp, synthetic construct
  source 1..75: mol_type = other DNA
tgtacgggctgatcggcacctgccgtctgaacggtatcgatccggaagcgtatctgcgccatatcctgagcgtac

SEQ ID NO: 530956 - DNA, 75 bp, synthetic construct
  source 1..75: mol_type = other DNA
gccctgaaagtgatccgcactgttcgggtaaaaaagcctgtacaaaatgtgactgcatcgttgaagcaccggcgc

SEQ ID NO: 530957 - DNA, 75 bp, synthetic construct
  source 1..75: mol_type = other DNA
agacagccgcgccatcgtcgtccgttaccggcacaccttccccatgcaatacaccgtctggagtctgaagaaagc

SEQ ID NO: 530958 - DNA, 75 bp, synthetic construct
  source 1..75: mol_type = other DNA
atgacggtccattattaccggctgcgggattacgccctgcagcatccggaatgcagcgccattatgcgcatcatc

SEQ ID NO: 530959 - DNA, 75 bp, synthetic construct
  source 1..75: mol_type = other DNA
atggtggagaagaatggcacgctgtcgaaaaaatccagactgggcgaagcgttcagctatgtactgaatcagtgg

SEQ ID NO: 530960 - DNA, 75 bp, synthetic construct
  source 1..75: mol_type = other DNA
aaaagtgcgacggcagaagaagccctgaagcgaatcagtgaactgtacgccatcgaggatgaaatacggggatta

SEQ ID NO: 530961 - DNA, 75 bp, synthetic construct
  source 1..75: mol_type = other DNA
cgctggcacggcagtgccggggcgtatacaggtcgtgaagtacaggatattcctggtgtgctggccgtgtttgct

SEQ ID NO: 530962 - DNA, 75 bp, synthetic construct
  source 1..75: mol_type = other DNA
ctgcgttacgttattgagcatctccaggactggccggcaaaccgggtacgcgatctgttgccctggaaagttgat

SEQ ID NO: 530963 - DNA, 75 bp, synthetic construct
  source 1..75: mol_type = other DNA
gctggcacggcagcgctgaagcacatacctgtcgtgaagtgcaggatattcccggcgtgctggctgtgtttgccg

SEQ ID NO: 530964 - DNA, 75 bp, synthetic construct
  source 1..75: mol_type = other DNA
aacggatcggcgaactgtacgccatcgaggcagagataaggggaatgacggcggagcagcgccttgccgaacgtc

SEQ ID NO: 530965 - DNA, 75 bp, synthetic construct
  source 1..75: mol_type = other DNA
tgaaatacggggattaccggagtcagagcgtcttgccgtcaggcagcagcgaagcaaagtgttactgacgtcgct

SEQ ID NO: 530966 - DNA, 75 bp, synthetic construct
  source 1..75: mol_type = other DNA
ggatgaccggaatgcgggctcatcagacaggcagggaaaacatccggtacaacaccttcgtcccttccggggtat

SEQ ID NO: 530967 - DNA, 75 bp, synthetic construct
  source 1..75: mol_type = other DNA
ttgttcggtcgcagcagcgagaaaagccgcaagaagatagaaaagaagatcgcacgggcagaaacgcgtataacc

SEQ ID NO: 530968 - DNA, 75 bp, synthetic construct
  source 1..75: mol_type = other DNA
catatcctgagcgtactgccggaatggccttccaaccgagttgatgaactcctgccatggaacgtagtactcacc

SEQ ID NO: 530969 - DNA, 75 bp, synthetic construct
  source 1..75: mol_type = other DNA
aaaatccacgatgtatacatcagcagcaaaagtacgacggcagaagaagccctgaagcgcatcagtgaactgtac

SEQ ID NO: 530970 - DNA, 75 bp, synthetic construct
  source 1..75: mol_type = other DNA
ccaggttttctcctttgcggaacacggcctgctttaacccgtcaccgccacaatcacatcacacctgttttcact

SEQ ID NO: 530971 - DNA, 75 bp, synthetic construct
  source 1..75: mol_type = other DNA
ttcactgctgtcgggctgggtggatgcatgctgccggctactgtcaccgctggaagaagcgcttcaggactatgt

SEQ ID NO: 530972 - DNA, 75 bp, synthetic construct
  source 1..75: mol_type = other DNA
aacggtggcgcatttatggcacccgaaccggatgacgatgatgacgaaacatgggtactgttcaatgccatgaac

SEQ ID NO: 530973 - DNA, 75 bp, synthetic construct
  source 1..75: mol_type = other DNA
ttgctgaactgctggagccgctgtatgacgtcctgcgccagtatgtgctgatgcccggtaaagtccatgcggatg

SEQ ID NO: 530974 - DNA, 75 bp, synthetic construct
  source 1..75: mol_type = other DNA
gattaccagagtcagagcgtcttgcagccaggcagcagcgaagcaaagcgttactgacgtcgctgcatgaatgga

SEQ ID NO: 530975 - DNA, 75 bp, synthetic construct
  source 1..75: mol_type = other DNA
tacaaaatgtgactgcatcgttgaagcaccggcaccgtcccgtccgatagcgcgtggtgtcgcgggcccggggtt

SEQ ID NO: 530976 - DNA, 75 bp, synthetic construct
  source 1..75: mol_type = other DNA
aacatccgacatcccgtctttttccgttctgcaccggtaagtaccgctggcacggtggcactgaatcgtataccg

SEQ ID NO: 530977 - DNA, 75 bp, synthetic construct
  source 1..75: mol_type = other DNA
atccggcgtgaacgcctgcccggagaactggcatccgcgctgaaacaacaactgaggattgcgataaaacgatga

SEQ ID NO: 530978 - DNA, 75 bp, synthetic construct
  source 1..75: mol_type = other DNA
gccacgtgatcagtgtcatcaacaccttgccagccaaccgcgtgaaagagttgttgccctggaacgtcactctat

SEQ ID NO: 530979 - DNA, 75 bp, synthetic construct
  source 1..75: mol_type = other DNA
gccagcctcgtccctgatgaacagcgcatcagtttctggccacagcactttggcctcattccacagtgggtgacc

SEQ ID NO: 530980 - DNA, 75 bp, synthetic construct
  source 1..75: mol_type = other DNA
ccacagtgggtgaccctggagccccgggtcttcggctggatggaccgtctgtatgaagactactgcggtggtatc

SEQ ID NO: 530981 - DNA, 75 bp, synthetic construct
  source 1..75: mol_type = other DNA
ccagttgcgacagtcgcgccatcgtcgtccgttaccggcacatcttccccgtgaaatacagcgtctggaatctga

SEQ ID NO: 530982 - DNA, 75 bp, synthetic construct
  source 1..75: mol_type = other DNA
ctttgcccgtcagggtgtggatctgagtcgtgcgctgctctccaactgggtggatgcgtgctgccggttaatggc

SEQ ID NO: 530983 - DNA, 75 bp, synthetic construct
  source 1..75: mol_type = other DNA
gccagtctgaaatgtacggccgccagggcgtggagctgagtcgttcactgctgtcgggctgggtggatgcatgct

SEQ ID NO: 530984 - DNA, 75 bp, synthetic construct
  source 1..75: mol_type = other DNA
gaacctccggcggtctggttcgcctactcaccggaccatcagggtaaacatccggagcagcaccttcgtcccttc

SEQ ID NO: 530985 - DNA, 75 bp, synthetic construct
  source 1..75: mol_type = other DNA
tggaactggtgagcagcgccctgaaagtgatccgcacagaacgggtaaaaaaagcctgtacaaaatgtgactgta

SEQ ID NO: 530986 - DNA, 75 bp, synthetic construct
  source 1..75: mol_type = other DNA
gcccgccagggtgtcgaactgagccgggccttactctccaactgggttgatgcgtgctgccagttaatgactccg

SEQ ID NO: 530987 - DNA, 75 bp, synthetic construct
  source 1..75: mol_type = other DNA
ccagactgaaacgggcgacggtcagaaatccgaatgcaaaaattatcgttaaccgcggtgatctcccagtgatta

SEQ ID NO: 530988 - DNA, 75 bp, synthetic construct
  source 1..75: mol_type = other DNA
atgagtcagaaatacctcattcgcattgcagaactggaaagccagctccgtcagaaagatcagcaactgagtctg

SEQ ID NO: 530989 - DNA, 75 bp, synthetic construct
  source 1..75: mol_type = other DNA
tcactgagctggaaaggctgctctctgagcaggctgaagccctccgtcagagagatctgcaactgagtctggttg

SEQ ID NO: 530990 - DNA, 75 bp, synthetic construct
  source 1..75: mol_type = other DNA
tggaacctgaagaaagttgttgccaggagtgtggcagtgagctggattatctgggggaagtcagtgctgagcagc

SEQ ID NO: 530991 - DNA, 75 bp, synthetic construct
  source 1..75: mol_type = other DNA
atgggtgctgttcaatgtcatgaacggtaaccgcgctgaaatgagcccggaagccgccggcattgctgcctgtct

SEQ ID NO: 530992 - DNA, 75 bp, synthetic construct
  source 1..75: mol_type = other DNA
ggtaaccgcgctgatatgagtccggaagctgccggcattgccgcctgtctgatggcgtacagtcatcacgcctgt

SEQ ID NO: 530993 - DNA, 75 bp, synthetic construct
  source 1..75: mol_type = other DNA
tacatcgttgaagcaccggtgccgtcccgcccgatagagcgtggtatcgcgggccccggattacttgcccgcgtg

SEQ ID NO: 530994 - DNA, 75 bp, synthetic construct
  source 1..75: mol_type = other DNA
agcgtactgccggaatggccttccaaccgggttgacgaactcctgccatggaacgtagtactcaccaataaataa

SEQ ID NO: 530995 - DNA, 75 bp, synthetic construct
  source 1..75: mol_type = other DNA
atggatggtggagaagaatggcacgctgtcgaaaaaatccagactgggcgaagcgttcagctatgtactgaatca

SEQ ID NO: 530996 - DNA, 75 bp, synthetic construct
  source 1..75: mol_type = other DNA
ttcgccatgtgcctggcgtcatagcagactggccggtcaaccgggtcagcgaactgcttccgtggcgcatagcac

SEQ ID NO: 530997 - DNA, 75 bp, synthetic construct
  source 1..75: mol_type = other DNA
tcgggcaggatttcaccctgcacgaagcattaagaacggcagaccggttaatcagcggtcgcagttttcagcacc

SEQ ID NO: 530998 - DNA, 75 bp, synthetic construct
  source 1..75: mol_type = other DNA
aacggcggggcatttatggcccccgaaccggatgatgacgaaacatgggtactgtccaatgccatgaacggtaac

SEQ ID NO: 530999 - DNA, 75 bp, synthetic construct
  source 1..75: mol_type = other DNA
gaacaatgtggagccagaaaagtggctgcgttacgtcattgaacatatccaggactggccggcaaaccgggtacg

SEQ ID NO: 531000 - DNA, 75 bp, synthetic construct
  source 1..75: mol_type = other DNA
ggcatgctgacgtatctgacaaatctttatttcaagattaaagaagacaggcgtaaggctgcgagaggagagtaa

SEQ ID NO: 531001 - DNA, 75 bp, synthetic construct
  source 1..75: mol_type = other DNA
tggtagtgcgggatactggtttttacagtggttggatcaggtcagtccatcacagtgggctgcgattggagtgct

SEQ ID NO: 531002 - DNA, 75 bp, synthetic construct
  source 1..75: mol_type = other DNA
gatgggcgtctaagttaccaattctcgtctgatggctacatacggcggtcagtttacgcttacgataaagtcacg

SEQ ID NO: 531003 - DNA, 75 bp, synthetic construct
  source 1..75: mol_type = other DNA
ggtgtgtcatacaccacgtcagcggtggggacgggatactggttactgcagctgctggacaaagtctctccgtcc

SEQ ID NO: 531004 - DNA, 75 bp, synthetic construct
  source 1..75: mol_type = other DNA
gggacgggatactggttactgcagctgctggacaaagtctctccgtcccagtgggtggcaataggtgtactgggg

SEQ ID NO: 531005 - DNA, 75 bp, synthetic construct
  source 1..75: mol_type = other DNA
ccaggctgaaaagggcgacggtcagaaatccgaatgcaaaaattatcgttaaccgcggtgatcttcctgtgatta

SEQ ID NO: 531006 - DNA, 75 bp, synthetic construct
  source 1..75: mol_type = other DNA
tcgtccggacagcatactcaaagccggtcagcatcgttatcagcgggcatttatccagcgattaaataatgggcg

SEQ ID NO: 531007 - DNA, 75 bp, synthetic construct
  source 1..75: mol_type = other DNA
aattatcctggtgggcgctctgcaatcaggtagcggacgcactaccggaggcagtattacatcgttctctggggt

SEQ ID NO: 531008 - DNA, 75 bp, synthetic construct
  source 1..75: mol_type = other DNA
atgggtacaaaagcgcatgacctttttgtgctgcctttgtgcagaaaacaccacgacgaactgcatgcggatacc

SEQ ID NO: 531009 - DNA, 75 bp, synthetic construct
  source 1..75: mol_type = other DNA
gggaagtctggttctgggcttcctgacttatctgacaaatctgtacttcaaaatcagagaagacaagcgtaaggc

SEQ ID NO: 531010 - DNA, 75 bp, synthetic construct
  source 1..75: mol_type = other DNA
cggcaataggtgtgctgggtagtctggtatttggcctgctgacgtacctgacaaacctttatttcaagattaaag

SEQ ID NO: 531011 - DNA, 75 bp, synthetic construct
  source 1..75: mol_type = other DNA
atggccttttttctttccgatagcacaggtctgtcggggggggggcgggatatgtatcagatggaaaaaatatca

SEQ ID NO: 531012 - DNA, 75 bp, synthetic construct
  source 1..75: mol_type = other DNA
gatactggttactgcagctgctggacaaagtctctccgtcccagtgggtggcaataggtgtgctgggaagtctgc

SEQ ID NO: 531013 - DNA, 75 bp, synthetic construct
  source 1..75: mol_type = other DNA
gggtagcttggtatttggcctgctgacgtacctgacaaacctttatttcaagattaaagaatgtagtggcacagt

SEQ ID NO: 531014 - DNA, 75 bp, synthetic construct
  source 1..75: mol_type = other DNA
gggctgctgacatatctgactaacctgtatttcaaaatcagagaggaccgtcgtaaggcggcacggggagagtaa

SEQ ID NO: 531015 - DNA, 75 bp, synthetic construct
  source 1..75: mol_type = other DNA
atgtaccagatggaaaaaatcacaacaggtgtgtcatacaccacgtctgcggtggggacgggatactggtttctg

SEQ ID NO: 531016 - DNA, 75 bp, synthetic construct
  source 1..75: mol_type = other DNA
tggcaatcggtgtgctggggagtctgctgtttggcctgctgacgtatctgactaacctgtatttcaaaatcagag

SEQ ID NO: 531017 - DNA, 75 bp, synthetic construct
  source 1..75: mol_type = other DNA
aggcagtgctggctactggtttttacagtggcttgatcaggtcagtccgtcacagtgggctgcgattggtgtact

SEQ ID NO: 531018 - DNA, 75 bp, synthetic construct
  source 1..75: mol_type = other DNA
ttgctggacaaagtctccccatcccagtgggtggcaataggcgtattgggtagcgccagatatcgagtggccggt

SEQ ID NO: 531019 - DNA, 75 bp, synthetic construct
  source 1..75: mol_type = other DNA
tgggtggcaataggtgtgctggggagtctgctgtttggcctgctgacgtatctgacaaacctttatttcaagatt

SEQ ID NO: 531020 - DNA, 75 bp, synthetic construct
  source 1..75: mol_type = other DNA
gagtctgctgtttggcctgctgacgtatctgactaacctgtatttcaaaatcagggaggaccgccgtaagacggc

SEQ ID NO: 531021 - DNA, 75 bp, synthetic construct
  source 1..75: mol_type = other DNA
ttgggctgctgacatatctgactaacctgtatttcaaaatcagagaggaccgtcgtaaggcggcgcggggagagt

SEQ ID NO: 531022 - DNA, 75 bp, synthetic construct
  source 1..75: mol_type = other DNA
cagtgggtggcgataggtgtgctggggagtctgctgtttggcctgctgacgtatctgactaacctgtatttcaaa

SEQ ID NO: 531023 - DNA, 75 bp, synthetic construct
  source 1..75: mol_type = other DNA
ggcactgggctttctgacttatctgacgaatctgtatttcaaaatcagagaagacagaagaaaggctgcgagagg

SEQ ID NO: 531024 - DNA, 75 bp, synthetic construct
  source 1..75: mol_type = other DNA
atccgctccgtataccgtgagagtgacatcgtaccgggagaacagacagccatcagcatactgaagcagcgcaca

SEQ ID NO: 531025 - DNA, 75 bp, synthetic construct
  source 1..75: mol_type = other DNA
gtgcgggtattacttcgacctgttctggtaccggaactcgggctggtggtccttaagcccggtcgtgaatccatg

SEQ ID NO: 531026 - DNA, 75 bp, synthetic construct
  source 1..75: mol_type = other DNA
agcatggatgattgatgtcatccgccacgcaatgaatggcacgcaggagcgggaattatcgctggctgaattatc

SEQ ID NO: 531027 - DNA, 75 bp, synthetic construct
  source 1..75: mol_type = other DNA
gcgcggtctgccgtccggagtcgttcctgctgttcgccagccgctggcggaggataaatcattactgccattttt

SEQ ID NO: 531028 - DNA, 75 bp, synthetic construct
  source 1..75: mol_type = other DNA
gtgctggcactgcgacaaccagctgcgcgaccagacctccgactcactggaacatctggctcaacaaaacctggc

SEQ ID NO: 531029 - DNA, 75 bp, synthetic construct
  source 1..75: mol_type = other DNA
gcgcggtctgccgtcaggagctgttcctgccgtgcgccagccgctcgcggaagataaatcattactgccattttt

SEQ ID NO: 531030 - DNA, 75 bp, synthetic construct
  source 1..75: mol_type = other DNA
tcaccggctcagtatctccagcgccagaaaccacaacgggaagagatgcctgtatacacgcgctgggtaaaaacg

SEQ ID NO: 531031 - DNA, 75 bp, synthetic construct
  source 1..75: mol_type = other DNA
atccgctcagtgtaccgtgaaagcgacatcgtaccgggagagcagaccgccaccagcatactgaagcagcgcaca

SEQ ID NO: 531032 - DNA, 75 bp, synthetic construct
  source 1..75: mol_type = other DNA
tcatgcagacccgctgaagtttgagaaaaagtacggctctcaggttgagttaatttttcgttttcttgatcacgc

SEQ ID NO: 531033 - DNA, 75 bp, synthetic construct
  source 1..75: mol_type = other DNA
tgtacgtgttgtggtaagacagcagacgatccacatcacctgattggtcacggtcagggcggaatggggacaaaa

SEQ ID NO: 531034 - DNA, 75 bp, synthetic construct
  source 1..75: mol_type = other DNA
ggaattatcgctggctgaattatgctggtgggcggtgtgcaatcaggtgacggatgcactacccgagacagtatt

SEQ ID NO: 531035 - DNA, 75 bp, synthetic construct
  source 1..75: mol_type = other DNA
tacgtcgttcactgggattgcccgtagaaaaaatctgctctgtgtaccgggagagcgacattgtaccgggagagc

SEQ ID NO: 531036 - DNA, 75 bp, synthetic construct
  source 1..75: mol_type = other DNA
ccgaatcactcgggcaacttgctcaccaaaacctgtctgcatggatgattgacgtcatacgccatgcaatgaatg

SEQ ID NO: 531037 - DNA, 75 bp, synthetic construct
  source 1..75: mol_type = other DNA
tccgcaatcaggtggcggacgcgctaccggaagcggtattacgtcgttcgctggggttgcgtgcggaaaaaatcc

SEQ ID NO: 531038 - DNA, 75 bp, synthetic construct
  source 1..75: mol_type = other DNA
gcgcacaaaaaatcttgcgccgctgccctcacgcccaccagcaacagaacccacaacaggaaaagacggtggtca

SEQ ID NO: 531039 - DNA, 75 bp, synthetic construct
  source 1..75: mol_type = other DNA
tggtcaggggggaatgggaacaaaggcccacgatattttcacgctaccgttgtgccgggagccccacaacgaact

SEQ ID NO: 531040 - DNA, 75 bp, synthetic construct
  source 1..75: mol_type = other DNA
gtgctggcactgcgacaaccagctgcgtgaccagacctcagaatcacttgagcaacttgctcaacaaaacctgac

SEQ ID NO: 531041 - DNA, 75 bp, synthetic construct
  source 1..75: mol_type = other DNA
gtcgccggtgggttaaagaaaaatacacacactgggtgaagagtcagccgtgtgcatgttgtggtaagccagccg

SEQ ID NO: 531042 - DNA, 75 bp, synthetic construct
  source 1..75: mol_type = other DNA
acatcgtaccgggagagcagaccgccaccagcatactgaagcagcgcacaaaaaatcttgcgccgctgcctcacg

SEQ ID NO: 531043 - DNA, 75 bp, synthetic construct
  source 1..75: mol_type = other DNA
ggcaacttgctcatcaaaacctggctgcatgggtgactgacgtcatccgtcacgtaatgaatggcacgcaggagc

SEQ ID NO: 531044 - DNA, 75 bp, synthetic construct
  source 1..75: mol_type = other DNA
tcgttcactgggattaccggtggaaaaaatccgctccgtataccgtgagagtgacatcgtaccgggagaacagac

SEQ ID NO: 531045 - DNA, 75 bp, synthetic construct
  source 1..75: mol_type = other DNA
gttacggtaccggcgcgatggtgttgtgctggcactgtgacaaccagctgcgcaaccagacatcagaatcactcg

SEQ ID NO: 531046 - DNA, 75 bp, synthetic construct
  source 1..75: mol_type = other DNA
gcagccgttagccagccgttggctgaggataaaacattactaccatttttcagcgatgagcgggtaattcgtgca

SEQ ID NO: 531047 - DNA, 75 bp, synthetic construct
  source 1..75: mol_type = other DNA
ggttaagacgcagccgtgtgcatgttgtggaaagcctgctgatgatccccaccacctgataggccacggtcaggg

SEQ ID NO: 531048 - DNA, 75 bp, synthetic construct
  source 1..75: mol_type = other DNA
gtccgcaatcaggtggcggacgcgctaccggaagcggtattacgtcgttcgctggggttgcgtgcggaaaaaatc

SEQ ID NO: 531049 - DNA, 75 bp, synthetic construct
  source 1..75: mol_type = other DNA
ttgtgttgcctttgtgcagaaaacaccatgacggactgcatgcggataccgtggcatttgaagagaagtatggtt

SEQ ID NO: 531050 - DNA, 75 bp, synthetic construct
  source 1..75: mol_type = other DNA
gtctgaccgatgtcagctgcggatacgacgcgctctataagcagctctcgcccggcaagggaaaacaacaccaaa

SEQ ID NO: 531051 - DNA, 75 bp, synthetic construct
  source 1..75: mol_type = other DNA
gcatcagcttctggccgcagcactttggcctcattccacagtgggttaccctggagccccgtgtcttcggctgga

SEQ ID NO: 531052 - DNA, 75 bp, synthetic construct
  source 1..75: mol_type = other DNA
gcatcagcttctggccgcagcactttggcctcattccacagtgggtaaccctggatccccgtgtcttcggctgga

SEQ ID NO: 531053 - DNA, 75 bp, synthetic construct
  source 1..75: mol_type = other DNA
aaatgagcccggaagccgccggcattgccgcctgtctgatgacgtacaatcatcatgcctgtcgtacggagtgtt

SEQ ID NO: 531054 - DNA, 75 bp, synthetic construct
  source 1..75: mol_type = other DNA
atgaaatatttcttcactacacgcctgggcgaaacgcgctatctgcaggcggacggctctctgctttgtaaagac

SEQ ID NO: 531055 - DNA, 75 bp, synthetic construct
  source 1..75: mol_type = other DNA
catcacgcctgccgtacggagtgttacgccatgacggttcattattaccgtctgcgggattacgccctgcagcat

SEQ ID NO: 531056 - DNA, 75 bp, synthetic construct
  source 1..75: mol_type = other DNA
tggaccgtctgtgcgaagactactgcggaggtatctggaatctgtacaccctgaacaacgggggcgcatttatgg

SEQ ID NO: 531057 - DNA, 75 bp, synthetic construct
  source 1..75: mol_type = other DNA
atgaacggtaaccgcgctgaaatgagcccggaagctgtcggcattgccgcctgtctgatggcgtacagtcatcac

SEQ ID NO: 531058 - DNA, 75 bp, synthetic construct
  source 1..75: mol_type = other DNA
gcccggaagccgccggtattgctgcctgtctgatgacgtacagccatcatgcctgtcgtacggagaattatgcca

SEQ ID NO: 531059 - DNA, 75 bp, synthetic construct
  source 1..75: mol_type = other DNA
gtttctgctccgcatggggatactggctgtgcgcagttatcgccaacgtctcctatctggtgatcgtcttttccg

SEQ ID NO: 531060 - DNA, 75 bp, synthetic construct
  source 1..75: mol_type = other DNA
gcatcagcttctggccgcagcaatttggcctcattccacagtgggtcaccctggatccccgtgtcttcggctgga

SEQ ID NO: 531061 - DNA, 75 bp, synthetic construct
  source 1..75: mol_type = other DNA
tggaccgtctgtgcgaagactactgcggagggatctggaatctgtacaccctgaacaacggcggtgcatttatgg

SEQ ID NO: 531062 - DNA, 75 bp, synthetic construct
  source 1..75: mol_type = other DNA
gcgcaacctgatcgccgatgcggaaattatctgccctggcttccagcctgctggcgataagagcctgaagcgtca

SEQ ID NO: 531063 - DNA, 75 bp, synthetic construct
  source 1..75: mol_type = other DNA
agaaagctggaatagtggtccacaaatacccgcgcaatccgtttaccggaaaccgcatttttgctctgagctgcg

SEQ ID NO: 531064 - DNA, 75 bp, synthetic construct
  source 1..75: mol_type = other DNA
tgacggtctggcggaggcggacaataacacagcggaaagagcgcttcgtgcagtctgtctcggaaagaaaaatta

SEQ ID NO: 531065 - DNA, 75 bp, synthetic construct
  source 1..75: mol_type = other DNA
cgcttcgtgcagtctgtctcggaaagaattcttatgacctttgtcaaatattaagcccaaaaagaccttacgcag

SEQ ID NO: 531066 - DNA, 75 bp, synthetic construct
  source 1..75: mol_type = other DNA
cggggtatcctgcaggcggatgcattcagcggttacgatcggctgttcagtgccgaacgtgaaggtggtacactg

SEQ ID NO: 531067 - DNA, 75 bp, synthetic construct
  source 1..75: mol_type = other DNA
acagcctgagcgaaacacacgccacacctgatggccatcccgtaaaacaaattggcgaacacacctggctgattg

SEQ ID NO: 531068 - DNA, 75 bp, synthetic construct
  source 1..75: mol_type = other DNA
ttcggctggatggaccgtctgtatgaagactactgcggtggtatctggaatctgtacaccctgaacaacggtggc

SEQ ID NO: 531069 - DNA, 75 bp, synthetic construct
  source 1..75: mol_type = other DNA
gtgccgtctgtctcgggaaaaagaattcttatgacctttgtcaaatattaagtccaaaaagaccttacgcagctc

SEQ ID NO: 531070 - DNA, 75 bp, synthetic construct
  source 1..75: mol_type = other DNA
tcgcagagctggaaaggttgctctctgagcaggctgaagccctccgtcagaaagaccaacaactgagtctggttg

SEQ ID NO: 531071 - DNA, 75 bp, synthetic construct
  source 1..75: mol_type = other DNA
ctgtctgatggcgtacagtcatcacgcctgtcgtacggagtgttacgccatgacggtccactattaccggctgcg

SEQ ID NO: 531072 - DNA, 75 bp, synthetic construct
  source 1..75: mol_type = other DNA
gcggacaataacacagcggaaagagcgcttcgtgcagtctgtctcggaaagaaaaattcttatgacctttgtcaa

SEQ ID NO: 531073 - DNA, 75 bp, synthetic construct
  source 1..75: mol_type = other DNA
tcgcgggccccggattacttgcccgcgtgttaacgggaaaatactgcgaacatctgccactgtatcgtcagagtg

SEQ ID NO: 531074 - DNA, 75 bp, synthetic construct
  source 1..75: mol_type = other DNA
cgaagcaaagcgttactgacgtcgctgcatgaatggatggtggagaagaatggcacgctgtcgaaaaaatccaga

SEQ ID NO: 531075 - DNA, 75 bp, synthetic construct
  source 1..75: mol_type = other DNA
agtgcaggatattcccggcgttcttgccgtgtttgcagaacgccgtaaggacacttttggcccgtatgtccggct

SEQ ID NO: 531076 - DNA, 75 bp, synthetic construct
  source 1..75: mol_type = other DNA
tatctggaatctgtacaccctgaacaacggcggggcatttatggcccccgaaccggatgatgatgatgacgaaac

SEQ ID NO: 531077 - DNA, 75 bp, synthetic construct
  source 1..75: mol_type = other DNA
tgaagtgcaggatattcccggtgtgctggccgtgtttgctgaacgccgtaaggacagttttggcccctatgtccg

SEQ ID NO: 531078 - DNA, 75 bp, synthetic construct
  source 1..75: mol_type = other DNA
agtctgtctcggaagaaaaactttatgttctttggcagcgatcacggcggcgagcgtggagcactgttgtacggg

SEQ ID NO: 531079 - DNA, 75 bp, synthetic construct
  source 1..75: mol_type = other DNA
gatcgttacagtgggcgggaagacgatccacaggttccccgccagttgcggcagtcgcgccatcgtcgtccgttc

SEQ ID NO: 531080 - DNA, 75 bp, synthetic construct
  source 1..75: mol_type = other DNA
gtgcattaatctccaactgggttgacgcgtgctgccagttaatgactccgctaaatgatgccctgtaccgttacg

SEQ ID NO: 531081 - DNA, 75 bp, synthetic construct
  source 1..75: mol_type = other DNA
agctggggatcaggatgccggggcgtcgtccggacagcatactcaaagccggtcagcatcgttatcagcgggcat

SEQ ID NO: 531082 - DNA, 75 bp, synthetic construct
  source 1..75: mol_type = other DNA
ctggagtcgcctatggcacctcagcaggtagtgccggttactggtttttacagctgctcgataaagtcactccct

SEQ ID NO: 531083 - DNA, 75 bp, synthetic construct
  source 1..75: mol_type = other DNA
tatccggcgagaacgtctgccaaaagaactgagctatgcgttgaaacaacaactaaggattgtgataaagcgatg

SEQ ID NO: 531084 - DNA, 75 bp, synthetic construct
  source 1..75: mol_type = other DNA
ctggacaaagtctctccgtcccagtgggtggcaataggtgtgctgggaagtctgctgtttggcctgctgacgtat

SEQ ID NO: 531085 - DNA, 75 bp, synthetic construct
  source 1..75: mol_type = other DNA
tgcagtctgtctcggaaagaaaaactttatgttctttggcagcgatcacggcggcgagcgtggagcactgtgtac

SEQ ID NO: 531086 - DNA, 75 bp, synthetic construct
  source 1..75: mol_type = other DNA
ggaagcgtatctgcgccatattctgagcgtactgccggaatggccctccaaccgtgttgacgaactcctgccatg

SEQ ID NO: 531087 - DNA, 75 bp, synthetic construct
  source 1..75: mol_type = other DNA
accggcaaataccgctggcacggcagcactgaatcgtataccggtcgtgaagtgcaggatattcccggtgtgctg

SEQ ID NO: 531088 - DNA, 75 bp, synthetic construct
  source 1..75: mol_type = other DNA
ccggcacaccttccccgtgaaatacaccgtctggagtctgaagaaagctgttgcccggagtgtggcggtgagctg

SEQ ID NO: 531089 - DNA, 75 bp, synthetic construct
  source 1..75: mol_type = other DNA
gtctgtgcgaagactactgcggtggtatctggaatctgtacaccctgaacaacggcggggcatttatggcacccg

SEQ ID NO: 531090 - DNA, 75 bp, synthetic construct
  source 1..75: mol_type = other DNA
gcccggaagccgccggcattgccgcctgtctgatgacgtacagtcatcacgcctgccgtacggagtgttatgcca

SEQ ID NO: 531091 - DNA, 75 bp, synthetic construct
  source 1..75: mol_type = other DNA
aatgccatgaacggtaaccacgctgaaatgagtccggaagccgctggcattgccgcctgtctgatgacgtacagt

SEQ ID NO: 531092 - DNA, 75 bp, synthetic construct
  source 1..75: mol_type = other DNA
ggtaaccgcgcagaaatgagcccggaagccgccggcattgccgcctgtctgatgacgtacagccatcatgcctgt

SEQ ID NO: 531093 - DNA, 75 bp, synthetic construct
  source 1..75: mol_type = other DNA
aataaacatgatgtcggcaaagcgacactcctggcggtactttccgcgctgggcgtttatttactggtcactctg

SEQ ID NO: 531094 - DNA, 75 bp, synthetic construct
  source 1..75: mol_type = other DNA
ccccgtgtcttcggctggatggaccgtctgtgcgaagactactgcgggggcatctggaatctgtacaccctgaac

SEQ ID NO: 531095 - DNA, 75 bp, synthetic construct
  source 1..75: mol_type = other DNA
cgccaccattgattcccagctttaccacgataatccagagaagttttttagccttttagccggtaatgggcttaa

SEQ ID NO: 531096 - DNA, 75 bp, synthetic construct
  source 1..75: mol_type = other DNA
atgagaatgttgaccgtatccggcgtgaacgcctgcctaaagaactggcatacgcgctgaaacaacaactgagga

SEQ ID NO: 531097 - DNA, 75 bp, synthetic construct
  source 1..75: mol_type = other DNA
ggtacccgttctgaaaaactgcagcgtgaggttgaacaggctgaggccctgctgaaacaacgcgaacaggacagc

SEQ ID NO: 531098 - DNA, 75 bp, synthetic construct
  source 1..75: mol_type = other DNA
cgctgcatcaagctgtaggtgttggcgcctgcatttatggtttatggttattgtatgcctctggcccaatgcacc

SEQ ID NO: 531099 - DNA, 75 bp, synthetic construct
  source 1..75: mol_type = other DNA
tgagttgtcgttcctcaactccggcgtttccattcgtctgcgcgacaagcgcgacggcaaagaagaccacttcca

SEQ ID NO: 531100 - DNA, 75 bp, synthetic construct
  source 1..75: mol_type = other DNA
agaatccaacatgcctcgctcttcggtcccttcttttacgatcgacacgggtactttgaggctgaacttccggcg

SEQ ID NO: 531101 - DNA, 75 bp, synthetic construct
  source 1..75: mol_type = other DNA
agtgcaggatattcccggtgtgctggccgtatttgcagaacgtcgtaaggacagttttggcccgtatgtccggct

SEQ ID NO: 531102 - DNA, 75 bp, synthetic construct
  source 1..75: mol_type = other DNA
ggtgaacgcactctggccacactggagcgtcttctgagcctgctgtcgacctttgaggtcgtggtatggatgacg

SEQ ID NO: 531103 - DNA, 75 bp, synthetic construct
  source 1..75: mol_type = other DNA
agctgcacgttatcagcaagcgatatacgcagcgcattgagcgacataatctgaatctgagacaacatctggcaa

SEQ ID NO: 531104 - DNA, 75 bp, synthetic construct
  source 1..75: mol_type = other DNA
atgacggatggctggccgctgtatgaatcacgcctgaagagaaagctgcacgttatcagcaagcattacactcag

SEQ ID NO: 531105 - DNA, 75 bp, synthetic construct
  source 1..75: mol_type = other DNA
ggatgccagtgcttgaaatggacgaacagtggggctatgtcggggctaaatcgcgccagcgctggctgttttacg

SEQ ID NO: 531106 - DNA, 75 bp, synthetic construct
  source 1..75: mol_type = other DNA
gttttacgcgtatgacaggatacgcagggcggtggtagcccacgttttcggtgaacgcactatggccacactgga

SEQ ID NO: 531107 - DNA, 75 bp, synthetic construct
  source 1..75: mol_type = other DNA
caagggcaggaaaaagcgtaatcgccttcccattcaggtggtgaaaatcccgatggcggccccactgaaacaggc

SEQ ID NO: 531108 - DNA, 75 bp, synthetic construct
  source 1..75: mol_type = other DNA
gtggcgcacgtcttcggtgaacgcactctggccacactggagcgtcttatgagcctgctgtcggcctttgacgtg

SEQ ID NO: 531109 - DNA, 75 bp, synthetic construct
  source 1..75: mol_type = other DNA
gtgatgtgattgtctgcgctgaaatggacgaacagtggggctacgtcggtgctaaatcacgtcagcgctggctgt

SEQ ID NO: 531110 - DNA, 75 bp, synthetic construct
  source 1..75: mol_type = other DNA
agcctgctgtcggcctttgaggtcgtggtatggatgacggatggctggctgctgtatgaatcacgcctgaaggga

SEQ ID NO: 531111 - DNA, 75 bp, synthetic construct
  source 1..75: mol_type = other DNA
cacgtcttcggtgaacgcactctggccacactggagtgtcttctgagcctgctgtcggcctttgaggtcgtggta

SEQ ID NO: 531112 - DNA, 75 bp, synthetic construct
  source 1..75: mol_type = other DNA
aatcacgcctgaagagaaagctgcacgttatcagcaagcattacactcagcgcattgagcgacataatctgaatc

SEQ ID NO: 531113 - DNA, 75 bp, synthetic construct
  source 1..75: mol_type = other DNA
acatctggcaaggctgggacggaagtcactgtcgttctcaaaatcgatggagctgcatgacaaggtcatcgggca

SEQ ID NO: 531114 - DNA, 75 bp, synthetic construct
  source 1..75: mol_type = other DNA
caggcctgggagtattaccacacccctcgcgcgcagtatccaacagcaccgggttacgctactttgcgcagcctt

SEQ ID NO: 531115 - DNA, 75 bp, synthetic construct
  source 1..75: mol_type = other DNA
gacggttgtggcgcacgtcttcggtgaacgcactctggccacactggagcgtcttctgagcctgctgtcggcctt

SEQ ID NO: 531116 - DNA, 75 bp, synthetic construct
  source 1..75: mol_type = other DNA
cccgaattggtgcgatgggaatttgtgccggtgcaggatatacagccaatgctgcaattcaggatcgccgcatca

SEQ ID NO: 531117 - DNA, 75 bp, synthetic construct
  source 1..75: mol_type = other DNA
cgtttttgatccgaaaggcgacgcggatctgctgaagcgtatgtggacagaagcgcagcgcgccggacgcggcga

SEQ ID NO: 531118 - DNA, 75 bp, synthetic construct
  source 1..75: mol_type = other DNA
acgataagggaaggaaaaagcgtaatcgtcttcccattcaggtggtgaaaattccgatggcggctccactgaaac

SEQ ID NO: 531119 - DNA, 75 bp, synthetic construct
  source 1..75: mol_type = other DNA
tgatgggattaagtttgaacgcatttgcgggtggcagcggctggaacccagacagggtagacccgagccgttgtg

SEQ ID NO: 531120 - DNA, 75 bp, synthetic construct
  source 1..75: mol_type = other DNA
ttgtttgcgaccggaaaccgtggaacacctggctacaatgccgcgatgaatgtgcgtattgccagcagaacgcat

SEQ ID NO: 531121 - DNA, 75 bp, synthetic construct
  source 1..75: mol_type = other DNA
cacgcgccacaggatgcagaagctattctgacaaacaccagttcaccggagattgcagaacgtcgtcgggcgatg

SEQ ID NO: 531122 - DNA, 75 bp, synthetic construct
  source 1..75: mol_type = other DNA
agaaaagtcggctcaggaaagaatgcccggggctgacagtccacaggaacttatgaaaagggcaaaggaatatca

SEQ ID NO: 531123 - DNA, 75 bp, synthetic construct
  source 1..75: mol_type = other DNA
atcaccctgctcatctctgtattaccgtcattgtgacggcactggtaactaagaaagacctctgcaagggaggaa

SEQ ID NO: 531124 - DNA, 75 bp, synthetic construct
  source 1..75: mol_type = other DNA
aaccggggggatttgcccgtaatcaggctgggtaatgcgcgggttgtcctgtcccgacgcaggcgtcgtaaaaag

SEQ ID NO: 531125 - DNA, 75 bp, synthetic construct
  source 1..75: mol_type = other DNA
gccagtgctggcaatgtcggtatgaaaggtcttgatgattttgccgtcttgcttggctggaaccaggcgtcagct

SEQ ID NO: 531126 - DNA, 75 bp, synthetic construct
  source 1..75: mol_type = other DNA
tacagcaacttgggtttgatatcaccgcagcagaactgtcagcgtatcttttaaaccgggtcatgcctgacagct

SEQ ID NO: 531127 - DNA, 75 bp, synthetic construct
  source 1..75: mol_type = other DNA
ccgtgatactgcagagaaaaaactggcagaattaatcagacaactcgagtttgatataactgcagcagaactgtc

SEQ ID NO: 531128 - DNA, 75 bp, synthetic construct
  source 1..75: mol_type = other DNA
atggacgatgagcggctgaagaatccgcctgtcggttcttctgtcctcgaacgcatccgcgatatgcgcgccagc

SEQ ID NO: 531129 - DNA, 75 bp, synthetic construct
  source 1..75: mol_type = other DNA
atgagcaagaaggagttgaaacccgaactgctaacagtaggcaagctattcacggacaattatctgattcctatt

SEQ ID NO: 531130 - DNA, 75 bp, synthetic construct
  source 1..75: mol_type = other DNA
cgcttgttgcgtaattatcattccagtatgaaacaggcaacgagtgaacttgaacctgagctggattttttcggt

SEQ ID NO: 531131 - DNA, 75 bp, synthetic construct
  source 1..75: mol_type = other DNA
aactcagggctatcgactcccataccggaggcgagccgacccggttgattattgatggctttcccgatctcggta

SEQ ID NO: 531132 - DNA, 75 bp, synthetic construct
  source 1..75: mol_type = other DNA
aaccgacgctcgccctcaaggcgttaatgaaaaaggaaaaacagcgatggtcgacaagcatgaagagattactct

SEQ ID NO: 531133 - DNA, 75 bp, synthetic construct
  source 1..75: mol_type = other DNA
ctcgactcttgcgcagggcgagcgtattgaaatccgcggtttcggcagtttctctttgcactacgcgcaccacgt

SEQ ID NO: 531134 - DNA, 75 bp, synthetic construct
  source 1..75: mol_type = other DNA
agagcttgatttaatgcatttatcaagaagcacaccatttaagaaatcaatttatttgaagaaaggatatttaaa

SEQ ID NO: 531135 - DNA, 75 bp, synthetic construct
  source 1..75: mol_type = other DNA
aaaacgttaataggaaatacaaaattctgcatccaaatcgagcagttcagagagaatttatatctgctaataagt

SEQ ID NO: 531136 - DNA, 75 bp, synthetic construct
  source 1..75: mol_type = other DNA
tttgtctatcccgatcatgggcgaatctggctgacgcagcgtgtgctgcgtgagcaaggtgctattcagatgcca

SEQ ID NO: 531137 - DNA, 75 bp, synthetic construct
  source 1..75: mol_type = other DNA
aatataatagtttattctctgaaattaaaaaaatctttcgttggtttttttagagctattcttacagcaagaaaa

SEQ ID NO: 531138 - DNA, 75 bp, synthetic construct
  source 1..75: mol_type = other DNA
cgtcgcagtggaaaacagggtgtcggcacaccgggattcttcggtcttggcggtgggatcaacagtgaaaacgac

SEQ ID NO: 531139 - DNA, 75 bp, synthetic construct
  source 1..75: mol_type = other DNA
ttttttgtcgtgtaatgcagaaaaattgaaaatcaaaagccagctgaaaggattaattgaatcaatcggatctaa

SEQ ID NO: 531140 - DNA, 75 bp, synthetic construct
  source 1..75: mol_type = other DNA
tgcttgctgaaataaacctagagcgtctgggctttaagccgacgcaccaggatatgcagcatattgttttggccg

SEQ ID NO: 531141 - DNA, 75 bp, synthetic construct
  source 1..75: mol_type = other DNA
gtgacggaaaggacgagcgttcccccccctgaattgctgattctggctcccgtctgggacgactctcctggcgac

SEQ ID NO: 531142 - DNA, 75 bp, synthetic construct
  source 1..75: mol_type = other DNA
cgtcaaaacttaccgattacgctaaagaatatcctgaattaacaactgctatttcaggtgccaccactggcatta

SEQ ID NO: 531143 - DNA, 75 bp, synthetic construct
  source 1..75: mol_type = other DNA
gtggcgcacgtcttcggtgaacgcactctggccacactagagcgtcttctgagcctgctgtcggcctttgaggtc

SEQ ID NO: 531144 - DNA, 75 bp, synthetic construct
  source 1..75: mol_type = other DNA
tggatgacggatggctgtccgctgtatgaatcacgcctgaagggaaagctgcacgttatcagcaagcgttacact

SEQ ID NO: 531145 - DNA, 75 bp, synthetic construct
  source 1..75: mol_type = other DNA
gctgtcggcctttgaggtcgtggtatggatgacggatggctgtccgctgtatgaatcacgcctgaagggaaagct

SEQ ID NO: 531146 - DNA, 75 bp, synthetic construct
  source 1..75: mol_type = other DNA
agttcctgctgaatattgcgatgtgattctgtgcgatgatctcgggaatgtattccccggttcctgggacaaggt

SEQ ID NO: 531147 - DNA, 75 bp, synthetic construct
  source 1..75: mol_type = other DNA
ttgtggcgcacgttttcggtgaacgcactctggccacactggcgcgtcttctgagcctgctgtcggcctttgagg

SEQ ID NO: 531148 - DNA, 75 bp, synthetic construct
  source 1..75: mol_type = other DNA
gtcactgtcgttctcaaaatcggtggagctgcatgacaaggtcatcgggcattatctgactatcagtaagttgga

SEQ ID NO: 531149 - DNA, 75 bp, synthetic construct
  source 1..75: mol_type = other DNA
cctcgctgtacgcttaccactatggcgacgctggggcgtcttatgagcctgctgtcaccctttgacgtggtgata

SEQ ID NO: 531150 - DNA, 75 bp, synthetic construct
  source 1..75: mol_type = other DNA
gtgaacgcactatggcgacgctggagcgtcttctgagcctgctgtcggcctttgaggtcgtggtatggatgacgg

SEQ ID NO: 531151 - DNA, 75 bp, synthetic construct
  source 1..75: mol_type = other DNA
atggctggccgctgtatgaatcacgcctgaagggaaagctgcacgttatcagcaagcgatatacgcagcgcattg

SEQ ID NO: 531152 - DNA, 75 bp, synthetic construct
  source 1..75: mol_type = other DNA
atgaataaagcgtttgagctatgggtacgccagcgttacggcaatagctatgacctgacgcgagatgttgacggt

SEQ ID NO: 531153 - DNA, 75 bp, synthetic construct
  source 1..75: mol_type = other DNA
taaagggaaatatgcaaaactaagaggagggtatatcaaaaataatgaattgcagcgcgtcaatggaagtattga

SEQ ID NO: 531154 - DNA, 75 bp, synthetic construct
  source 1..75: mol_type = other DNA
gtcccgatggtttttattctttgaaggattactttttttataccaataaaaatgaagactattcattctataata

SEQ ID NO: 531155 - DNA, 75 bp, synthetic construct
  source 1..75: mol_type = other DNA
aggatatcaatggacccattatctttaccctctgacatctcacttgattctactagtacatctgttattccgaca

SEQ ID NO: 531156 - DNA, 75 bp, synthetic construct
  source 1..75: mol_type = other DNA
taaaatcacaagtgctgatattcaaaatactttgaagaagtataaattcagagggaaaggtggaaaggcacttgg

SEQ ID NO: 531157 - DNA, 75 bp, synthetic construct
  source 1..75: mol_type = other DNA
taaataatttgagaaagagcggagacctgcaaggggcttgggagtttggttttcaagcgttgcaggcagctcccc

SEQ ID NO: 531158 - DNA, 75 bp, synthetic construct
  source 1..75: mol_type = other DNA
ctcattgcaatagcatgggagaagatacgctgattgatatttttgcatcttcagcagcacctcagcaggaggata

SEQ ID NO: 531159 - DNA, 75 bp, synthetic construct
  source 1..75: mol_type = other DNA
gggagcgccgcgccgccatgcttcagggtgccgatggcaactctcctgtgattgcgaaagcatacgacattgaag

SEQ ID NO: 531160 - DNA, 75 bp, synthetic construct
  source 1..75: mol_type = other DNA
acacgcgagcaagcctctgacactaaacatatgatgtggcttgattacgaccaagcgaagtgccttgttgttgcg

SEQ ID NO: 531161 - DNA, 75 bp, synthetic construct
  source 1..75: mol_type = other DNA
gaggatacttttgttcctccctttgttataggtaatttaaaaaatgaaacaaaagtcagagcactccgtatcatg

SEQ ID NO: 531162 - DNA, 75 bp, synthetic construct
  source 1..75: mol_type = other DNA
agagaatatccataaatccggtaaaggctttcaagtattcgtaaataagtcgacatcactatcagttcgcatggg

SEQ ID NO: 531163 - DNA, 75 bp, synthetic construct
  source 1..75: mol_type = other DNA
cattccacagtgggtcaccctggacccccgtgtcttcggctggatggaccgtctctgcgaaaactactgcggtgg

SEQ ID NO: 531164 - DNA, 75 bp, synthetic construct
  source 1..75: mol_type = other DNA
cattccacagtgggtcaccctggaaccccgtgtcttcggctggatggaccgtctatgcgaaaactactgcggtgg

SEQ ID NO: 531165 - DNA, 75 bp, synthetic construct
  source 1..75: mol_type = other DNA
cattccacagtgggttaccctggacccccgtgtcttcggctggatggaccgtctttgcgaaaactactgcggtgg

SEQ ID NO: 531166 - DNA, 75 bp, synthetic construct
  source 1..75: mol_type = other DNA
ctgctctttcttcagccacagcaccagggaataaccagccccaactggttgccactcccgtccctgatgaacaac

SEQ ID NO: 531167 - DNA, 75 bp, synthetic construct
  source 1..75: mol_type = other DNA
cattccacagtgggtgaccctggacccccgtgtcttcggctggatggaccgtctgtgcgaaaactactgcggtgg

SEQ ID NO: 531168 - DNA, 75 bp, synthetic construct
  source 1..75: mol_type = other DNA
cattccacagtgggtcaccctggagccccgtgtcttcggctggatggaccgtctgtgcgaaaactactgcggtgg

SEQ ID NO: 531169 - DNA, 75 bp, synthetic construct
  source 1..75: mol_type = other DNA
gcttctggccgcagcattttggcctcattccacagtgggtaaccctggaaccccgtgtcttcggctggatggacc

SEQ ID NO: 531170 - DNA, 75 bp, synthetic construct
  source 1..75: mol_type = other DNA
aggatatatctggacgtatgtccgggatgacaggaatgccggttcgccagagcctccagcggtctggttcgccta

SEQ ID NO: 531171 - DNA, 75 bp, synthetic construct
  source 1..75: mol_type = other DNA
atgtatcgtcagagtgaaatctttgcccgccagggcgtcgaactgagccgtgcattactctccaactgggttgac

SEQ ID NO: 531172 - DNA, 75 bp, synthetic construct
  source 1..75: mol_type = other DNA
cattccacagtgggtaaccctggacccccgtgtcttcggctggatggaccgtctatgcgaaaactactgcggtgg

SEQ ID NO: 531173 - DNA, 75 bp, synthetic construct
  source 1..75: mol_type = other DNA
gcttctggccgcagcattttggcctcattccacagtgggtcaccctggacccccgtgtcttcggctggatggacc

SEQ ID NO: 531174 - DNA, 75 bp, synthetic construct
  source 1..75: mol_type = other DNA
gcttctggccgcagcattttggcctcattccacagtgggttaccctggatccccgtgtcttcggctggatggacc

SEQ ID NO: 531175 - DNA, 75 bp, synthetic construct
  source 1..75: mol_type = other DNA
cgatggcaattcagcaacagcatccggattcccggatctttcgttactgcacaggcaaataccagtggcacgaca

SEQ ID NO: 531176 - DNA, 75 bp, synthetic construct
  source 1..75: mol_type = other DNA
gctgctggcggcagacaggattgcgatgattaatcctgcgaatggcaacacaaaaccgatgtttgttggtcaggg

SEQ ID NO: 531177 - DNA, 75 bp, synthetic construct
  source 1..75: mol_type = other DNA
cgattgaaggaccggtggacggaatgaaaagcgtgttgctgaacagtacgccggtgctggacagtgaaggtaagg

SEQ ID NO: 531178 - DNA, 75 bp, synthetic construct
  source 1..75: mol_type = other DNA
ggaagtgaaatacgacacgccgatcacccggaccatcacgtcggcaaacatcgaccgtctgcgcctgaccttcgg

SEQ ID NO: 531179 - DNA, 75 bp, synthetic construct
  source 1..75: mol_type = other DNA
ccggtactggacagcggggggaataccaacttttccggtgccacggtggtgttccgttccggtgaacaggagcag

SEQ ID NO: 531180 - DNA, 75 bp, synthetic construct
  source 1..75: mol_type = other DNA
aacactgtcgcgtcactcggatacggcaaaagcgttcgcatacctgctgaaacagtgggatggcctgaacgtgta

SEQ ID NO: 531181 - DNA, 75 bp, synthetic construct
  source 1..75: mol_type = other DNA
aaaaccgaacggcagatacaggaagcacaggagcgaatcagcgcacttcaggaagaaatggcggaaacgctgggt

SEQ ID NO: 531182 - DNA, 75 bp, synthetic construct
  source 1..75: mol_type = other DNA
ctactgcggtggtatctggagtctgtacaccctgaacaacggtggcgcatttatggcgcccgaaccggatgatga

SEQ ID NO: 531183 - DNA, 75 bp, synthetic construct
  source 1..75: mol_type = other DNA
actgtacgattaagggcatgctggaggcgaatcaggtcagaggcgattttgttaaaacagtatccaaatcattcc

SEQ ID NO: 531184 - DNA, 75 bp, synthetic construct
  source 1..75: mol_type = other DNA
aacgatggctgggtggaaatcgacaacaacatcgctgaaaatgccctgcgggcggtcagtctggatcgtaaaaac

SEQ ID NO: 531185 - DNA, 75 bp, synthetic construct
  source 1..75: mol_type = other DNA
gggtctacgtccgtgatgaccgcaacgccggttcacagatgcctccggcggtctggttcgcgtacagtccggacc

SEQ ID NO: 531186 - DNA, 75 bp, synthetic construct
  source 1..75: mol_type = other DNA
ctggagccccgagtcttcggctggatggaccgtctttgcgaagactactgtggtggtatctggaatctgtatacc

SEQ ID NO: 531187 - DNA, 75 bp, synthetic construct
  source 1..75: mol_type = other DNA
aaatatgcagaccatctgccgttataccgccagtcagaaatataccgtcgtcagggcgtggagctgagccgtgcc

SEQ ID NO: 531188 - DNA, 75 bp, synthetic construct
  source 1..75: mol_type = other DNA
ccggaccggaaaggtatccatccacagaatcatctggccggttacagcggagtgcttcaggccgatgcttacggt

SEQ ID NO: 531189 - DNA, 75 bp, synthetic construct
  source 1..75: mol_type = other DNA
atcggcacctgccgtctgaacggtatcgatccggaagcgtatctgcgccatattctgagcgtactaccggaatag

SEQ ID NO: 531190 - DNA, 75 bp, synthetic construct
  source 1..75: mol_type = other DNA
tcggcctgtgcaccggagactggcctgcaacaactggttgccaccatagtccctgatgaacagcgcatcagcttc

SEQ ID NO: 531191 - DNA, 75 bp, synthetic construct
  source 1..75: mol_type = other DNA
cctcttcggtctcagcaccggagactgacctgcaacaactggttgccaccatagtccctgatgaacagcgcatca

SEQ ID NO: 531192 - DNA, 75 bp, synthetic construct
  source 1..75: mol_type = other DNA
agttccggatatcacaggagtcctggctgtgtacgccgaacgccgccaggaccgcagcggaccgtatgcctgcct

SEQ ID NO: 531193 - DNA, 75 bp, synthetic construct
  source 1..75: mol_type = other DNA
ccatgcgtattcaccaacaacatccggcatcccgtctttttccgttctgtaccggcaaataccgcaggcacggca

SEQ ID NO: 531194 - DNA, 75 bp, synthetic construct
  source 1..75: mol_type = other DNA
cgtccgttaccggcacatctcccccgtgaaatataccgcctggagcctgagaaagctgttgcccggagtgtggcg

SEQ ID NO: 531195 - DNA, 75 bp, synthetic construct
  source 1..75: mol_type = other DNA
ggaagcactgggttgcgttgtgcaacttctgtgataacggtctggcggaagtggataataatgccgcggaaagag

SEQ ID NO: 531196 - DNA, 75 bp, synthetic construct
  source 1..75: mol_type = other DNA
ccatgcgtattcaccaacaacatcaggcatcccgtctttttcctttctgtaccggcaaataccgctggcacggca

SEQ ID NO: 531197 - DNA, 75 bp, synthetic construct
  source 1..75: mol_type = other DNA
accggcaaataccgctggcacggcagtgctgaagcgtataccagtcgtgaagtgcaggatattcccggtgtgctg

SEQ ID NO: 531198 - DNA, 75 bp, synthetic construct
  source 1..75: mol_type = other DNA
tatctgcgccatattctgagcgtactgccggaatggccctccaactgtgttgacgaactcctgccatggaacgta

SEQ ID NO: 531199 - DNA, 75 bp, synthetic construct
  source 1..75: mol_type = other DNA
ggaaaggtatccatccacagaatcacctagccggttacagcggtgtgcttcaggcagatgcttacggtggttacc

SEQ ID NO: 531200 - DNA, 75 bp, synthetic construct
  source 1..75: mol_type = other DNA
tccgatagagcgtggtatcgcgggcccgggggttacttgcccgcgtgttaacgggaaaatactgcgaacacctgc

SEQ ID NO: 531201 - DNA, 75 bp, synthetic construct
  source 1..75: mol_type = other DNA
acatgcggcggtgttgtactcgctgatcggcacatgccgtctgaacaatgtggagccagaaaagtggctgcgtta

SEQ ID NO: 531202 - DNA, 75 bp, synthetic construct
  source 1..75: mol_type = other DNA
ttagtgctgagcagctggaactggtgagtagcgccctgaaagtgatccgcactgttcgggtaaaaaaagcctgta

SEQ ID NO: 531203 - DNA, 75 bp, synthetic construct
  source 1..75: mol_type = other DNA
gttgcgaaactgcagcgtatgcagttcggtaaaagctcagaaaaacttcgtgcaaaaaccgaacggcagatacag

SEQ ID NO: 531204 - DNA, 75 bp, synthetic construct
  source 1..75: mol_type = other DNA
cggtccactattaccggctgcgggattacgccctgcaacatccggaatgcaacgccattatgcgcatcattgact

SEQ ID NO: 531205 - DNA, 75 bp, synthetic construct
  source 1..75: mol_type = other DNA
ctgatgacgtacagtcatcatgcctgtcgtacggagtgttatgccattgcgtattaccgtgaaggagatcggtga

SEQ ID NO: 531206 - DNA, 75 bp, synthetic construct
  source 1..75: mol_type = other DNA
ccacaccttctgtttccgtaaccactgcatcagggaataaccagtctcagctggttgccaccatagtccctgatg

SEQ ID NO: 531207 - DNA, 75 bp, synthetic construct
  source 1..75: mol_type = other DNA
aacggcggggcatttatggcccccgaaccggatgatgatgacgaaacatgggtactgttcaatgccatgaacggt

SEQ ID NO: 531208 - DNA, 75 bp, synthetic construct
  source 1..75: mol_type = other DNA
tacgaatccggcagaataacggaagccgcgtgtatggcccatgcccggagaaaaatccacgatgtgcatgcaaga

SEQ ID NO: 531209 - DNA, 75 bp, synthetic construct
  source 1..75: mol_type = other DNA
gtctacgtccgtgatgaccgtaacgccggttcacagatgcccccggcggtctggttcgcgtacagtccggaccgg

SEQ ID NO: 531210 - DNA, 75 bp, synthetic construct
  source 1..75: mol_type = other DNA
acccgaaccggatgacgatgatgacgaaacatgggtactgttcaatgccatgaacggtaaccgcgctgaaatgag

SEQ ID NO: 531211 - DNA, 75 bp, synthetic construct
  source 1..75: mol_type = other DNA
agacggaaactggttaaggaacggtccagactgaaacgggcgacggtcagaaatccgaatgccagaatcaaagtt

SEQ ID NO: 531212 - DNA, 75 bp, synthetic construct
  source 1..75: mol_type = other DNA
ccgctcctgacttccctgtataagctgatgcaggagaaagaacacacgttatcgaagaaatgtcgtctgggagat

SEQ ID NO: 531213 - DNA, 75 bp, synthetic construct
  source 1..75: mol_type = other DNA
cagtaccaaaagtgcgacagcggaagaagccctgaaactaataggtgaactgtacgccatcgagcacgaaatatg

SEQ ID NO: 531214 - DNA, 75 bp, synthetic construct
  source 1..75: mol_type = other DNA
tgagcgacataatctgaatctgagacaacatctggcaaggctgggacggaagtcactgtcgttctcaaaatcggt

SEQ ID NO: 531215 - DNA, 75 bp, synthetic construct
  source 1..75: mol_type = other DNA
caaaacggcagtgcccggtgcctccgcaatggccattaaccgcgtggccacaacggcaatgaatcagtcggcgtc

SEQ ID NO: 531216 - DNA, 75 bp, synthetic construct
  source 1..75: mol_type = other DNA
gcctgaagggaaagctgcacgttatcagcaagcgatacactcagcgaattgagcgacataacctgaatctgagac

SEQ ID NO: 531217 - DNA, 75 bp, synthetic construct
  source 1..75: mol_type = other DNA
atgcaacaccgccagtcaacatccagggcgtacctctgccgttcaccatgatttatctgtttatatgcccttttc

SEQ ID NO: 531218 - DNA, 75 bp, synthetic construct
  source 1..75: mol_type = other DNA
tggccgctttatgaatcacgcctgaagggagaactgcacgttatcagcaagcgatatacgcagcgcattgagcgg

SEQ ID NO: 531219 - DNA, 75 bp, synthetic construct
  source 1..75: mol_type = other DNA
gtggcgcacatcttcggtgaacgcactctggccacactggagcgtcttctgagcctgctgtcggcctttgaggtc

SEQ ID NO: 531220 - DNA, 75 bp, synthetic construct
  source 1..75: mol_type = other DNA
tcggtggagctgcatgacaaagtcatcgggcattacctgaaagtggactattccccggcggatacatttgaagcc

SEQ ID NO: 531221 - DNA, 75 bp, synthetic construct
  source 1..75: mol_type = other DNA
atgtcaccccgccactgaatatttatggtgtcccgttgccgtttaccatgatttacctgctgctgtttccgtatc

SEQ ID NO: 531222 - DNA, 75 bp, synthetic construct
  source 1..75: mol_type = other DNA
gggaataaccagtctcaactggttgccaccatagtccctgatgaacagcgcatcagcttctggccgcagcacttt

SEQ ID NO: 531223 - DNA, 75 bp, synthetic construct
  source 1..75: mol_type = other DNA
tgcaggcttcagtggcgtactgcaggctgatgcctacgccgggttcaacgagctctaccgcgacggccatataaa

SEQ ID NO: 531224 - DNA, 75 bp, synthetic construct
  source 1..75: mol_type = other DNA
aagcgttactgacgtcgctgcatgaatggatggtggagaagaatggcacgttgtcgaaaaaatccagactgggcg

SEQ ID NO: 531225 - DNA, 75 bp, synthetic construct
  source 1..75: mol_type = other DNA
atccggaagcgtatctgcgccatatcctgagcgtactgccggaatggccttccaaccgagttgatgaactcctgc

SEQ ID NO: 531226 - DNA, 75 bp, synthetic construct
  source 1..75: mol_type = other DNA
aacagcgcatcagcttctggccgcagcattttggcctcattccacagtgggtgcccctggagccccgtgttttcg

SEQ ID NO: 531227 - DNA, 75 bp, synthetic construct
  source 1..75: mol_type = other DNA
aaatcgacaacaacatcgcagagaacgccttacggggagtggacgtaggccggaaaaactggttgttcgcgggtt

SEQ ID NO: 531228 - DNA, 75 bp, synthetic construct
  source 1..75: mol_type = other DNA
ttgaactgcttaaagccatgttgcgtacgcaacagagtcggcttcgccagtatgcctgtcaggtcgcgggctatg

SEQ ID NO: 531229 - DNA, 75 bp, synthetic construct
  source 1..75: mol_type = other DNA
tcggtgtcagcatggctggtgaataactggtatcccaccgcaagtatcagcgatttgctggttgtggtgatgaaa

SEQ ID NO: 531230 - DNA, 75 bp, synthetic construct
  source 1..75: mol_type = other DNA
cgaaccggcaggggaaacacccggagcaacacctccgccccttccggggtatcctgcaggcggatgcgttcacag

SEQ ID NO: 531231 - DNA, 75 bp, synthetic construct
  source 1..75: mol_type = other DNA
acggtctggcggaggtggacaataacacagcggaaagagcgcttcgtgcagtctgtctcggaaagaaaaattacg

SEQ ID NO: 531232 - DNA, 75 bp, synthetic construct
  source 1..75: mol_type = other DNA
gagcgcttcgtgcagtctgtctcggaaagaaaaactttatgttcttcggcagcgatcacggtggagagcgtggtg

SEQ ID NO: 531233 - DNA, 75 bp, synthetic construct
  source 1..75: mol_type = other DNA
aggttccccgccagttgcgacagtcgcgccatcgtcgtccgttaccggcacaccttccccgagaaatactgaggt

SEQ ID NO: 531234 - DNA, 75 bp, synthetic construct
  source 1..75: mol_type = other DNA
gttgaggagacggaggccttcctgcgctctgcactggcacgtgccgaagaaaagatcgaagaagatgcacgggaa

SEQ ID NO: 531235 - DNA, 75 bp, synthetic construct
  source 1..75: mol_type = other DNA
gacaataacacagcggaaagagcgcttcgtgcagtctgtctcggaaagaaaaattacgtgttcttcggtagcgat

SEQ ID NO: 531236 - DNA, 75 bp, synthetic construct
  source 1..75: mol_type = other DNA
cttgccgtcaggcagcagcgaagcaaagtgttactgacgtcgctgcatgaatggatggtggagaagaatggtacg

SEQ ID NO: 531237 - DNA, 75 bp, synthetic construct
  source 1..75: mol_type = other DNA
caggggaaacacccggagcaacacctccgccccttccggggtatcctgcaggcggatgcgttcacaggttacgac

SEQ ID NO: 531238 - DNA, 75 bp, synthetic construct
  source 1..75: mol_type = other DNA
aaatgagcccggaagccgccggcattgccgcctgtctgatggcgtacagtcatcacgcctgtcgtacagagaatt

SEQ ID NO: 531239 - DNA, 75 bp, synthetic construct
  source 1..75: mol_type = other DNA
gtcccggtgctgttgccaggcaataagaaaacgaagaccgggcggttgtgggcgtatgttcgtgacgaccgtaac

SEQ ID NO: 531240 - DNA, 75 bp, synthetic construct
  source 1..75: mol_type = other DNA
acagcccggctgtgggtctacgtccgtgatgaccgtaacgccggttcacagatgcccccggcggtctggttcgcg

SEQ ID NO: 531241 - DNA, 75 bp, synthetic construct
  source 1..75: mol_type = other DNA
ggtcgtgaagtgcaggatattcccggtgtgctggctgtgtttgctgaacgccgtaaggacagttttagcccgtaa

SEQ ID NO: 531242 - DNA, 75 bp, synthetic construct
  source 1..75: mol_type = other DNA
ccacaccttctgtttccgtaaccactgcatcagggaataaccagtctcagctggttgccaccctcgtccctgatg

SEQ ID NO: 531243 - DNA, 75 bp, synthetic construct
  source 1..75: mol_type = other DNA
tgttgccggtgcgaccatatcgtgcaggcaccagtaccttcaaaacccattgcacgcagttatgccggagcgggg

SEQ ID NO: 531244 - DNA, 75 bp, synthetic construct
  source 1..75: mol_type = other DNA
cagagctgcgccactgatgcagtcgttgtacgactggatacagactcagatgaaaacactgtcgcgtcactcgga

SEQ ID NO: 531245 - DNA, 75 bp, synthetic construct
  source 1..75: mol_type = other DNA
gatgacggtgaactaccatatccgcggtcgcatcatccaggtaccgtcaaactatgacccggaaaaacgcacgta

SEQ ID NO: 531246 - DNA, 75 bp, synthetic construct
  source 1..75: mol_type = other DNA
tgctggaaacgcagacggtggatttcacgctcgggtcacaggggctgcgtcacacacccggtgacattattgaaa

SEQ ID NO: 531247 - DNA, 75 bp, synthetic construct
  source 1..75: mol_type = other DNA
atgaacgacgtgttcctgaaacgcctgacggctcccaccattaccagcggcggtaatcctccggcattttccctg

SEQ ID NO: 531248 - DNA, 75 bp, synthetic construct
  source 1..75: mol_type = other DNA
gatacaaataataacctgaacagcatgtgggccgtgaaactgcagcagatgcaggacggacgcctttatattgcg

SEQ ID NO: 531249 - DNA, 75 bp, synthetic construct
  source 1..75: mol_type = other DNA
ggcagattgttattccggcggtggcattcagcggcgctaaacatgagagagagagcatactgatatttactcctc

SEQ ID NO: 531250 - DNA, 75 bp, synthetic construct
  source 1..75: mol_type = other DNA
aggagagatagggaaaacccatctggctcaggagttgtggacgcagattgataacggtcagcttgcgcctgacct

SEQ ID NO: 531251 - DNA, 75 bp, synthetic construct
  source 1..75: mol_type = other DNA
catccgtccgcctgctgattcagatacagcgtaacggtaactgggtgacggaaaaggatgtcaccattaacggca

SEQ ID NO: 531252 - DNA, 75 bp, synthetic construct
  source 1..75: mol_type = other DNA
ggataatacgctggtttacagtggtgttattgatatgcctgctggtcgcggcgacatgacgctggagttttctgt

SEQ ID NO: 531253 - DNA, 75 bp, synthetic construct
  source 1..75: mol_type = other DNA
accagattgaaggcgatctcgttaaaacagtgggtaaggctttccctcgtgactcccgtgcaccgaagcgttggc

SEQ ID NO: 531254 - DNA, 75 bp, synthetic construct
  source 1..75: mol_type = other DNA
tgcaccggagcggtggccatcagggaccattaccgtcagggtttatgacgatcagccgtttgaccggcaaattgt

SEQ ID NO: 531255 - DNA, 75 bp, synthetic construct
  source 1..75: mol_type = other DNA
cagcggtggcaatcccccaacgttttcactgacacctgatggtcgactttctgcgagaaatgcggatatcagcgg

SEQ ID NO: 531256 - DNA, 75 bp, synthetic construct
  source 1..75: mol_type = other DNA
cgtctgatagtgcggaaaaacggtgctgaaatttataaccgtaccgcgctggataatacgctgatttacagtggc

SEQ ID NO: 531257 - DNA, 75 bp, synthetic construct
  source 1..75: mol_type = other DNA
tgcagagtcaggtgctgctggcggcagacaggattgcgatgattaatcctgcgaatggcaacacaaagccgatgt

SEQ ID NO: 531258 - DNA, 75 bp, synthetic construct
  source 1..75: mol_type = other DNA
aaggagaaatcgggaaaacacatctggcccaggagctgtggacgcagattgataacggtcagcttgcgccggacc

SEQ ID NO: 531259 - DNA, 75 bp, synthetic construct
  source 1..75: mol_type = other DNA
gtcagatagtagtcctgaaccgccccgggtttcctggagagtgttttatctgtgaactcaggctgccagatcatc

SEQ ID NO: 531260 - DNA, 75 bp, synthetic construct
  source 1..75: mol_type = other DNA
ggacgccgacaacatacatcagtgatttactggttgtggtcatgaaaaaatccacggcggggatcggcatcagtt

SEQ ID NO: 531261 - DNA, 75 bp, synthetic construct
  source 1..75: mol_type = other DNA
cattgagctgacgccggggtattatcagataacagcagtaccggtgctggcggtgtatgacccgacggtacagtt

SEQ ID NO: 531262 - DNA, 75 bp, synthetic construct
  source 1..75: mol_type = other DNA
ggattaacgcgccagcaaaacccgccaccattgaactgacgccggggtattttcagataacggcggtcccgcgtc

SEQ ID NO: 531263 - DNA, 75 bp, synthetic construct
  source 1..75: mol_type = other DNA
cctggtgaccagcgccatcactgccgacacggagtaccgtttcagtggcctgccgctcggggaatacaccctgac

SEQ ID NO: 531264 - DNA, 75 bp, synthetic construct
  source 1..75: mol_type = other DNA
gaaacccgcaatgaaatcacacagacggtcagtaaaacactggagaaccagagcgccaccatacagcagatacag

SEQ ID NO: 531265 - DNA, 75 bp, synthetic construct
  source 1..75: mol_type = other DNA
atgagaactgtcagattaaggggaaactgtcagccaaccagattgaaggcgatattgtcaaaacggtcagcaagt

SEQ ID NO: 531266 - DNA, 75 bp, synthetic construct
  source 1..75: mol_type = other DNA
agggtttatgacgatcagccgtttgaccggcaaattgttattccggcggtggcattcagcggcgctaaacatgag

SEQ ID NO: 531267 - DNA, 75 bp, synthetic construct
  source 1..75: mol_type = other DNA
acccggagagcggcaacaccacgccgttatttgtggcgcaggggaatcagttgttcatgaacgatgtgttcctga

SEQ ID NO: 531268 - DNA, 75 bp, synthetic construct
  source 1..75: mol_type = other DNA
tccacgcagatgatgagcgtgattgatgccattggtgagggaccggtggaaggtccggtgaagggactgcagagt

SEQ ID NO: 531269 - DNA, 75 bp, synthetic construct
  source 1..75: mol_type = other DNA
gactctccctgccgtcactgcgtcgtcgcctgttccgctgtgtttccatccgggaaaacacggacggcacctttg

SEQ ID NO: 531270 - DNA, 75 bp, synthetic construct
  source 1..75: mol_type = other DNA
ctggtgaagacggtggggaaagcctttccccggaataacagttatgccagcgggacggtaaccgtcacagtttac

SEQ ID NO: 531271 - DNA, 75 bp, synthetic construct
  source 1..75: mol_type = other DNA
ccggcattttccctgacatcagacgggagactgacggcgaaaaatgcggatatcagtggtagtgtgaatgcgaac

SEQ ID NO: 531272 - DNA, 75 bp, synthetic construct
  source 1..75: mol_type = other DNA
cagggcgatccggcgtcggtatcgttcaggattgccgcaccggtagcaccgtcgcggattgagctgacgccgggc

SEQ ID NO: 531273 - DNA, 75 bp, synthetic construct
  source 1..75: mol_type = other DNA
aaacctctggcgttaatgccgcaatggcttacggcactgacggtccggtcgcggcgctggggctgcaaaccttaa

SEQ ID NO: 531274 - DNA, 75 bp, synthetic construct
  source 1..75: mol_type = other DNA
cacgccgctgtttgtggcgcaggggaatcagctgttcatgaacgacgtgttcctgaagcgactgtttgcggtgag

SEQ ID NO: 531275 - DNA, 75 bp, synthetic construct
  source 1..75: mol_type = other DNA
cgtcagtcagagtacggaggaaaacgccaggcagatagcgccactgggatgtcccagcctacgaggctttaactt

SEQ ID NO: 531276 - DNA, 75 bp, synthetic construct
  source 1..75: mol_type = other DNA
aggagaatgcacgccagatagcgcaggttcgccagtatgtggatcaaaaaagcagtgaaatcatgacgacaacgg

SEQ ID NO: 531277 - DNA, 75 bp, synthetic construct
  source 1..75: mol_type = other DNA
tcctgaagcgactgtttgcagtgagcatcacctcgtccggcaatcccccgacgttctccctgacgccggagggca

SEQ ID NO: 531278 - DNA, 75 bp, synthetic construct
  source 1..75: mol_type = other DNA
ttgattttgcggaaattacgggggttcttcgttcttcgggatttgaagtcaggggacagggaggctgggatctga

SEQ ID NO: 531279 - DNA, 75 bp, synthetic construct
  source 1..75: mol_type = other DNA
aatcagctgttcatgaacgacgtgttcctgaagcgactgtttgcggtgagtatcacgtcatccggcaatcccccg

SEQ ID NO: 531280 - DNA, 75 bp, synthetic construct
  source 1..75: mol_type = other DNA
ggataatacgctgatttacagtggcgttattgatatgcctgccggtcacggtcacatgacgctggagttttcggt

SEQ ID NO: 531281 - DNA, 75 bp, synthetic construct
  source 1..75: mol_type = other DNA
ttccgctgtgtctccatccgggaaaacacggacggcacctttgccatcacggcagtgcagcacgtaccggaaaaa

SEQ ID NO: 531282 - DNA, 75 bp, synthetic construct
  source 1..75: mol_type = other DNA
gcgtcactctggagtttaaggttttccataaaggcaatcagtgggcaggtaatatcaccgactgtacggtgattg

SEQ ID NO: 531283 - DNA, 75 bp, synthetic construct
  source 1..75: mol_type = other DNA
aaaacacggacggcacctttgccatcacggcggtgcagcacgtaccggaaaaggaagccatcgtggataacgggg

SEQ ID NO: 531284 - DNA, 75 bp, synthetic construct
  source 1..75: mol_type = other DNA
ggacagcagggcgatccggcatcggtatcgttcaggattgccgcaccggcagcgccgtctcggattgagctgacg

SEQ ID NO: 531285 - DNA, 75 bp, synthetic construct
  source 1..75: mol_type = other DNA
gaaatcacgcagaccgtcaataagaaactggaagaccagagtgcagcgatccagcagatacagaaggttcaggtt

SEQ ID NO: 531286 - DNA, 75 bp, synthetic construct
  source 1..75: mol_type = other DNA
atggtgtggagacatacggtgtatggggactctccctgccgtcactgcgtcgtcgcctgttccgctgtgtctcca

SEQ ID NO: 531287 - DNA, 75 bp, synthetic construct
  source 1..75: mol_type = other DNA
atcagtccacgacggatgctcagggcgtattttcctcagttatagatatgcctgccggacaggggacgctgacac

SEQ ID NO: 531288 - DNA, 75 bp, synthetic construct
  source 1..75: mol_type = other DNA
atttgtggcgcaggggaatcagttgttcatgaacgatgtgttcctgaagcggctgtttgcggtgagtatcacctc

SEQ ID NO: 531289 - DNA, 75 bp, synthetic construct
  source 1..75: mol_type = other DNA
ggagcggggattgaggatactgatggccagcccctgagcaacatactgctgctggctgaccgtattgcgatgatt

SEQ ID NO: 531290 - DNA, 75 bp, synthetic construct
  source 1..75: mol_type = other DNA
ggaaaaaataggaaaactgcatctggctcaggggctgtgggaactgatagacaacagccagcttgcagatgagat

SEQ ID NO: 531291 - DNA, 75 bp, synthetic construct
  source 1..75: mol_type = other DNA
cagcatggctggtaaataacaggtatcccacagcaagtatcagcgatttgctggttgtggtgatgaagaaagcca

SEQ ID NO: 531292 - DNA, 75 bp, synthetic construct
  source 1..75: mol_type = other DNA
gctgaagttgccgacgttgcgccagcgcctgttccgctgtgtgagtatccgtgagaacgatgacggcacgtatgc

SEQ ID NO: 531293 - DNA, 75 bp, synthetic construct
  source 1..75: mol_type = other DNA
aacgagaactgtcgggttctgggaaaattgtccgccaaccagattgaaggcgatctcgttaaaacagtgggcaaa

SEQ ID NO: 531294 - DNA, 75 bp, synthetic construct
  source 1..75: mol_type = other DNA
aagcggagaagacagccgtctggtgaccaccgccatcactgcggatacagagcatcgttccagtggtctgccgct

SEQ ID NO: 531295 - DNA, 75 bp, synthetic construct
  source 1..75: mol_type = other DNA
gccagcttgcggatgagatggcggagatgaagaccaccatcacggaaacccgcaatgaaatcacacagacggtca

SEQ ID NO: 531296 - DNA, 75 bp, synthetic construct
  source 1..75: mol_type = other DNA
tgtacatgctgaaggttcaaaaaacgaaagacggcattccctatgtggccgggattggtgcagggattgaggata

SEQ ID NO: 531297 - DNA, 75 bp, synthetic construct
  source 1..75: mol_type = other DNA
ataaccgccacgccgcatcttgcggtttatgatccgacggtgcagtttgagttctggttctcggaaacgcggatt

SEQ ID NO: 531298 - DNA, 75 bp, synthetic construct
  source 1..75: mol_type = other DNA
taccacgctgataagcctggttgacggccagggcaatccggtcagcgtggaggtacagtccgtcaccgacggcgt

SEQ ID NO: 531299 - DNA, 75 bp, synthetic construct
  source 1..75: mol_type = other DNA
taccacgctgataagcctggttgacggtcaggggattccggtcagcgtggaggtacagtccgtcaccgacggcgt

SEQ ID NO: 531300 - DNA, 75 bp, synthetic construct
  source 1..75: mol_type = other DNA
taccacgctgataagcctggttgacggacaggggagtccggtcagcgtggaggtacagtccgtcaccgacggcgt

SEQ ID NO: 531301 - DNA, 75 bp, synthetic construct
  source 1..75: mol_type = other DNA
taccacgctgataagcctggttgacgggcaggggaatccggtcagcgtggaggtacagtccgtcaccgacggcgt

SEQ ID NO: 531302 - DNA, 75 bp, synthetic construct
  source 1..75: mol_type = other DNA
ctgattaaaactgaactgctggagacgcagaccgtggatttcagcgtcggggcggaagggcttcgccatgtaccg

SEQ ID NO: 531303 - DNA, 75 bp, synthetic construct
  source 1..75: mol_type = other DNA
ctgattaaaactgaactgctggagacgcagaccgtggatttcagcgttggcgctgaagggcttcgccatgtaccg

SEQ ID NO: 531304 - DNA, 75 bp, synthetic construct
  source 1..75: mol_type = other DNA
taccacgctgataagcctggttgacggacagggcactccggtcagcgtggaggtacagtccgtcaccgacggcgt

SEQ ID NO: 531305 - DNA, 75 bp, synthetic construct
  source 1..75: mol_type = other DNA
taccacgctgataagcctggttgacggacagggaaatccggtcagcgtggaggtacagtccgtcaccgacggcgt

SEQ ID NO: 531306 - DNA, 75 bp, synthetic construct
  source 1..75: mol_type = other DNA
ctgattaaaactgaactgctggagacgcagaccgtggatttcagcgtgggagcagaagggcttcgccatgtaccg

SEQ ID NO: 531307 - DNA, 75 bp, synthetic construct
  source 1..75: mol_type = other DNA
ccctgacaccggacgggcggctgacggcgaaaaatgccgatatcagcggtaacgtgaatgcgaactccgggacgc

SEQ ID NO: 531308 - DNA, 75 bp, synthetic construct
  source 1..75: mol_type = other DNA
ccaccgccatcaccgcggatacagagcaccgtttcagcggtctgccgccgggggaatacaccctgacggtcagat

SEQ ID NO: 531309 - DNA, 75 bp, synthetic construct
  source 1..75: mol_type = other DNA
gattgagctgacgccggggtattttcagataacggcggtcccgcgtcttgcggtgtatgacccgacggtacagtt

SEQ ID NO: 531310 - DNA, 75 bp, synthetic construct
  source 1..75: mol_type = other DNA
ccgccagattattattccgcccattatttttaacggtatagcgtatgacgatccggggagcggaaataaccccgg

SEQ ID NO: 531311 - DNA, 75 bp, synthetic construct
  source 1..75: mol_type = other DNA
tgcatcgacggtgaacctgattaacggtggcggtaagccggtgagcgtggccatcacctcacaccctgcgccgga

SEQ ID NO: 531312 - DNA, 75 bp, synthetic construct
  source 1..75: mol_type = other DNA
ggtgattctggataatctgcctccccgcccctttaacatccggatggtctgggagacggcggacagcaccacgga

SEQ ID NO: 531313 - DNA, 75 bp, synthetic construct
  source 1..75: mol_type = other DNA
atggcaaggtccgattacgatattatcaatcagtctccggaacatgaactgaatgagtggctggcagagagaggt

SEQ ID NO: 531314 - DNA, 75 bp, synthetic construct
  source 1..75: mol_type = other DNA
ccgtgatacacggtgtgacagcggtctggcgcgccggggagcaggagcagacaccaccggaaggctttgagtcct

SEQ ID NO: 531315 - DNA, 75 bp, synthetic construct
  source 1..75: mol_type = other DNA
gtaatgctgatatcagcggacatatcagtgcgaactcgggcacgctcaataatgtcgtgatagcggagaactgta

SEQ ID NO: 531316 - DNA, 75 bp, synthetic construct
  source 1..75: mol_type = other DNA
gctgctggcggcggacaggattgcgatgattaatcctgcgaatggcaacacaaagccgatgtttgttggtcaggg

SEQ ID NO: 531317 - DNA, 75 bp, synthetic construct
  source 1..75: mol_type = other DNA
cggctgacggcgaaaaatgccgatatcagcggtaacgtgaatgcgaactccgggacgctcaacaatgtcacgatt

SEQ ID NO: 531318 - DNA, 75 bp, synthetic construct
  source 1..75: mol_type = other DNA
attgaaggtgatattgtcaaaacggtgggaaaagcctttccgagaaatggcagttatgccagcggtacaataacg

SEQ ID NO: 531319 - DNA, 75 bp, synthetic construct
  source 1..75: mol_type = other DNA
cggcgtgaaggtgaaagtgagccgtgttcctgacggcgttgctgaatacagcgtgtgggggctgaagctgccgac

SEQ ID NO: 531320 - DNA, 75 bp, synthetic construct
  source 1..75: mol_type = other DNA
tcagggaccattaccgtcagggtttatgacgatcagccgtttgaccggcaaattgttattccggcggtggcattc

SEQ ID NO: 531321 - DNA, 75 bp, synthetic construct
  source 1..75: mol_type = other DNA
tgaaaccggcatacagcaataacccggcctggtgcctgtgggacatgctgacccacccgcgctacggcatgggaa

SEQ ID NO: 531322 - DNA, 75 bp, synthetic construct
  source 1..75: mol_type = other DNA
gccagactggtgaccaccgccatcaccgcagacacggagcaccgtttcagcggcctgccgctcggggaatacacc

SEQ ID NO: 531323 - DNA, 75 bp, synthetic construct
  source 1..75: mol_type = other DNA
aggctttccgattacattttatgtacataacagtcgtgaacagtttacggactcactgcataaggtttcaggaaa

SEQ ID NO: 531324 - DNA, 75 bp, synthetic construct
  source 1..75: mol_type = other DNA
cagtgaaatcacacagacagtcagccagagcacggaggaaaacgccaggcagatagcgcaggtccgccagtacgt

SEQ ID NO: 531325 - DNA, 75 bp, synthetic construct
  source 1..75: mol_type = other DNA
ccagcagggcgaacctgccaccaccacattccggattaatgcaccggcggcaccggccagcattgaactgacgcc

SEQ ID NO: 531326 - DNA, 75 bp, synthetic construct
  source 1..75: mol_type = other DNA
ggacatcgacggtgaacctgattaacggcagcggtaagccggtgcgcgtggacatcactgcacaccccgcccctg

SEQ ID NO: 531327 - DNA, 75 bp, synthetic construct
  source 1..75: mol_type = other DNA
aaatcagagcgcggcaatccagcagatacagaaagttcaggttgatacaaataataacctgaacagcatgtgggc

SEQ ID NO: 531328 - DNA, 75 bp, synthetic construct
  source 1..75: mol_type = other DNA
gggagacagaaaacagcctcacacagctggttgcgaaaaaaaatgatgagctgtcactgggtatatcacaggtga

SEQ ID NO: 531329 - DNA, 75 bp, synthetic construct
  source 1..75: mol_type = other DNA
ggtgctggcgcgctgggacacgccgaaggtggtgaagggcgtgagcttcctgcttcgcctgaccgtggcagcgga

SEQ ID NO: 531330 - DNA, 75 bp, synthetic construct
  source 1..75: mol_type = other DNA
gcggatatcaggcaggttgaaaccgcagcccgctatcttggctcggcgctgtactggatagctgccagtatcaat

SEQ ID NO: 531331 - DNA, 75 bp, synthetic construct
  source 1..75: mol_type = other DNA
ggtgacattattgaaatctgtgataatgactatgccgggaccctgaccggcggacgtgtcctgtccattgatgct

SEQ ID NO: 531332 - DNA, 75 bp, synthetic construct
  source 1..75: mol_type = other DNA
gccgcgggtggtgaagggtgtgcgcttcagtctgcgcctgaccagtggaagcggtgaaaacagccgcctggtgac

SEQ ID NO: 531333 - DNA, 75 bp, synthetic construct
  source 1..75: mol_type = other DNA
aagtgacccggaaaatcgggaaggcggaaaacagcctcacgcagctggttgcgaaaaagaatgaggaccagacac

SEQ ID NO: 531334 - DNA, 75 bp, synthetic construct
  source 1..75: mol_type = other DNA
aatgggcgctgtatgccattgcgcagtactgcgaccagacggtcccggatggtttcgggggcacagagccgcgga

SEQ ID NO: 531335 - DNA, 75 bp, synthetic construct
  source 1..75: mol_type = other DNA
acgcctccagggcggctcgtacttccgtttccgttcaggcgagaagaccggccttaacccgtttgcgctcgctcc

SEQ ID NO: 531336 - DNA, 75 bp, synthetic construct
  source 1..75: mol_type = other DNA
ttatatcagtgactgtatttttctgatacgagcctctggtggagataagaaaaaactatttgattttctttgttc

SEQ ID NO: 531337 - DNA, 75 bp, synthetic construct
  source 1..75: mol_type = other DNA
tcaagatgggcaagaggaattatctcgagcgagtagtggtgtagccgcacaacatattacaatggatgcattaaa

SEQ ID NO: 531338 - DNA, 75 bp, synthetic construct
  source 1..75: mol_type = other DNA
tgaaatttataaccgaacggctctggataatactctgatttacacgggtgttattgatatgcctgcaggcagtgg

SEQ ID NO: 531339 - DNA, 75 bp, synthetic construct
  source 1..75: mol_type = other DNA
tctcatcggtgatagatatgccggcagggcggggtcatgtcaccctgacgtttaatgtgtcgtcggccggtgcga

SEQ ID NO: 531340 - DNA, 75 bp, synthetic construct
  source 1..75: mol_type = other DNA
cctgacggtgcgggcgataaacagctatggccagcagggtgaacctgccaccaccaccttccggattgccgcacc

SEQ ID NO: 531341 - DNA, 75 bp, synthetic construct
  source 1..75: mol_type = other DNA
gtgacttcgttaaaactgtatccaaatcattcccgaaaaaggctggtacgtggggtaacacggaaacaccaaacg

SEQ ID NO: 531342 - DNA, 75 bp, synthetic construct
  source 1..75: mol_type = other DNA
gccagtatctggcgcaggtgaaatgggacacgccgcgggtggtgaagggcgtgcgcttcagtctgcgcctgacca

SEQ ID NO: 531343 - DNA, 75 bp, synthetic construct
  source 1..75: mol_type = other DNA
gttatctggggaccggcagtcagtggactgtccaggggagccggattaagcctgggaaggatttctggttttacg

SEQ ID NO: 531344 - DNA, 75 bp, synthetic construct
  source 1..75: mol_type = other DNA
gccttagtatggaggatacggaggaaggcaaactgagccagttcctggttgccgctaaccgtatcgcgtttattg

SEQ ID NO: 531345 - DNA, 75 bp, synthetic construct
  source 1..75: mol_type = other DNA
cgctggggaactacaggctgactgtccgggctgtaaatgcgtggggacagcagggcgagccggcatcggtatcgt

SEQ ID NO: 531346 - DNA, 75 bp, synthetic construct
  source 1..75: mol_type = other DNA
agagcggcacggtgaatggtgtcacgccgcccgcggtacagcacctgactgccgaagtctccgcaggcagcgggg

SEQ ID NO: 531347 - DNA, 75 bp, synthetic construct
  source 1..75: mol_type = other DNA
catgagcgggagaataacgatatttattcgtcatgccgcctgatagtgaagaaaaacggtgctgaaatttataac

SEQ ID NO: 531348 - DNA, 75 bp, synthetic construct
  source 1..75: mol_type = other DNA
gaaggtgaaagtgagccgggttcctgacggcgttgcagaatacagcgtgtgggggctgaagctgccgacgctgcg

SEQ ID NO: 531349 - DNA, 75 bp, synthetic construct
  source 1..75: mol_type = other DNA
ggaggtgacgaaggcgaagccggtgacgcgcaccatcacgtcagcgaacattgaccgtctgcgggtcaccttcgg

SEQ ID NO: 531350 - DNA, 75 bp, synthetic construct
  source 1..75: mol_type = other DNA
attaccgtcaggatttatgacgatcagccttttgacaggcaaattgttattccagcggtggcattctgcggcgct

SEQ ID NO: 531351 - DNA, 75 bp, synthetic construct
  source 1..75: mol_type = other DNA
gcttgcgcctgacctggctgaaatcaggacgtccattacggatgtcagcaatgaaatcacgcagaccgtcaataa

SEQ ID NO: 531352 - DNA, 75 bp, synthetic construct
  source 1..75: mol_type = other DNA
acagtttgaattctggttctcagaaaaacgcatcacgaacacggcacaggtggaaaaatctgcccgttatctggg

SEQ ID NO: 531353 - DNA, 75 bp, synthetic construct
  source 1..75: mol_type = other DNA
aataactggtatcccacagcaagtatcagcgatttgctggttgtggtgatgaagaaagccaccgcaggcatcagt

SEQ ID NO: 531354 - DNA, 75 bp, synthetic construct
  source 1..75: mol_type = other DNA
tcagggggcaggcaatatcaccgattgtacggtgattgtgaccaaaaaagctgcttccggcatcagtattcgttg

SEQ ID NO: 531355 - DNA, 75 bp, synthetic construct
  source 1..75: mol_type = other DNA
gttacagtcaccatcagcgatgatcataactttgaccgccagattattattccgcccattatttttaacggtata

SEQ ID NO: 531356 - DNA, 75 bp, synthetic construct
  source 1..75: mol_type = other DNA
ccagattgaaggcgatctcgttaaaacagtgggcaaagctttcccccgggactcccgtgcaccggagcggtggcc

SEQ ID NO: 531357 - DNA, 75 bp, synthetic construct
  source 1..75: mol_type = other DNA
atgccgtctgatagtgcggaaaaacggtgctgaaatttataaccgtaccgcgctggataatacgctgatttacag

SEQ ID NO: 531358 - DNA, 75 bp, synthetic construct
  source 1..75: mol_type = other DNA
gtttatcgaacgcgccgatgccttacccgcttttgaaaaagcctacgactttaaactcgatcaggatcagttgct

SEQ ID NO: 531359 - DNA, 75 bp, synthetic construct
  source 1..75: mol_type = other DNA
acgctaacgataaatggaatgccatgtggggcgtcaaaattgagcagaccaaagacggcaaacattatgtcgcgg

SEQ ID NO: 531360 - DNA, 75 bp, synthetic construct
  source 1..75: mol_type = other DNA
tccagttgggaaccacgccggtggtgcgcggggcgatcacttctggcgagctggatatctacccggaatataccg

SEQ ID NO: 531361 - DNA, 75 bp, synthetic construct
  source 1..75: mol_type = other DNA
ctggcgcgccggggagcaggagcagaccccgccggaaggttttgagtcctccggggctgaaactgcactgggcgt

SEQ ID NO: 531362 - DNA, 75 bp, synthetic construct
  source 1..75: mol_type = other DNA
caaatggcaacacaaagccgatgtttgttggtcagggcgatcagatattcatgaacgaagtgttcctgaaacgcc

SEQ ID NO: 531363 - DNA, 75 bp, synthetic construct
  source 1..75: mol_type = other DNA
gaaaaacggtgctgaaatttataaccgtaccgcgctggataatacgctgttttacagtggtgttattgatatgcc

SEQ ID NO: 531364 - DNA, 75 bp, synthetic construct
  source 1..75: mol_type = other DNA
cctggattttttcaaaggcctgataactgaatcccatcttggtaaagagctgctggaaaaagtcgacctgacgga

SEQ ID NO: 531365 - DNA, 75 bp, synthetic construct
  source 1..75: mol_type = other DNA
ggggctgcaggtggatgcggagcagtttggcggtcagcagatgacggtgaactaccatatccgcggtcgcatcat

SEQ ID NO: 531366 - DNA, 75 bp, synthetic construct
  source 1..75: mol_type = other DNA
ggcagcggtaagccggtgaatgtggacatcaccgcacaccccgcgccggaccggatacaggtcagtaccctgccg

SEQ ID NO: 531367 - DNA, 75 bp, synthetic construct
  source 1..75: mol_type = other DNA
ggttttcggaggcaaaaattgcagacgccgcacaggtggaaacctctgcccgttatctggggaccggcagtcagt

SEQ ID NO: 531368 - DNA, 75 bp, synthetic construct
  source 1..75: mol_type = other DNA
ggccctgataaaggttcttaccgcccccaccattaccagcggcggcaatcccccggcattctccctgacgccgga

SEQ ID NO: 531369 - DNA, 75 bp, synthetic construct
  source 1..75: mol_type = other DNA
cagaaggttcaggttgatacaaataataacctgaacagcatgtgggccgtgaaactgcagcagatgcaggacgga

SEQ ID NO: 531370 - DNA, 75 bp, synthetic construct
  source 1..75: mol_type = other DNA
ctgattaaaacggaactgctggaaacgcagaccgtggacttcagcgtgggtgctgaagggcttcgccatgtaccg

SEQ ID NO: 531371 - DNA, 75 bp, synthetic construct
  source 1..75: mol_type = other DNA
ccggtgctggacagtgaggggaataccaacatctccggtgtcacggtggtgttccgggccggtgagcaggagcag

SEQ ID NO: 531372 - DNA, 75 bp, synthetic construct
  source 1..75: mol_type = other DNA
ctgtatgtcatcggccagcattgcgaccagtcggtgcctgacggctttggtggcacggagccaaggatgacctgt

SEQ ID NO: 531373 - DNA, 75 bp, synthetic construct
  source 1..75: mol_type = other DNA
gccggagaaagaagccatcgtggataacggggcctgctttgagccgcagtcaggcaccctgaacagcgtcatccc

SEQ ID NO: 531374 - DNA, 75 bp, synthetic construct
  source 1..75: mol_type = other DNA
atccgggaaaacacggacggtacctttgccatcacggcagtgcagcatgtgccggaaaaagaagccattgtggat

SEQ ID NO: 531375 - DNA, 75 bp, synthetic construct
  source 1..75: mol_type = other DNA
agaacggcaacagcacgccgttatttgtggcgcaggggaatcagttgttcatgaacgatgtgttcctgaagcggc

SEQ ID NO: 531376 - DNA, 75 bp, synthetic construct
  source 1..75: mol_type = other DNA
accggaaaaagaagccatcgtggataacggggcgcactttgacagcgaccagagcggcaccctgaacagcgtcat

SEQ ID NO: 531377 - DNA, 75 bp, synthetic construct
  source 1..75: mol_type = other DNA
ggtgctgaaatttataaccgtaccgcgctggataatacgctggtttacagtggtgttattgatatgcctgctggt

SEQ ID NO: 531378 - DNA, 75 bp, synthetic construct
  source 1..75: mol_type = other DNA
gcgaaaaatgcggatatcagtggcagtgtgaatgcgaactcaggaacgctcaacaatgtcacgattaaccagaac

SEQ ID NO: 531379 - DNA, 75 bp, synthetic construct
  source 1..75: mol_type = other DNA
attattacttttatatccgcagcgtgaacaccgttggtaaatcggcatttgtggaggccgtcggtcgggcgagcg

SEQ ID NO: 531380 - DNA, 75 bp, synthetic construct
  source 1..75: mol_type = other DNA
ggagaaaatccgctcgctttaccgcgagagcgacatcataccgggagagcagacagccaccagcatactgaaaca

SEQ ID NO: 531381 - DNA, 75 bp, synthetic construct
  source 1..75: mol_type = other DNA
cggaatctttcatgaaacgacctaaacgtcgccgctgggttaacgagaaatacacacgctgggtgaagacacagc

SEQ ID NO: 531382 - DNA, 75 bp, synthetic construct
  source 1..75: mol_type = other DNA
agagcagaccgccaccagcatactgaagcagcgcacaaaaaatcttgcgccgctgcctcacgcccaccagcaaaa

SEQ ID NO: 531383 - DNA, 75 bp, synthetic construct
  source 1..75: mol_type = other DNA
gtggccatcagggaccattaccgtcaggatttatgacgatcagccttttgaccggcaaattgttattccggcggt

SEQ ID NO: 531384 - DNA, 75 bp, synthetic construct
  source 1..75: mol_type = other DNA
ttcgctggcggatgagcctctgctgctgggcgatatcattctggttgtgggtaactggaaactgatcggtatgct

SEQ ID NO: 531385 - DNA, 75 bp, synthetic construct
  source 1..75: mol_type = other DNA
aacaaaggcccacgatattttcacgctaccgttgtgccgggagcaccacaacgaacttcatgcagacccgctgga

SEQ ID NO: 531386 - DNA, 75 bp, synthetic construct
  source 1..75: mol_type = other DNA
ccattaccgtcagggtttatgacgatcagccttttgaccggcaaattgtcattccggcggtggcattcagcggtg

SEQ ID NO: 531387 - DNA, 75 bp, synthetic construct
  source 1..75: mol_type = other DNA
tgggtaaagacacagccgtgtgcgtgttgtggtaagcctgctgacgatccgcatcacctgattggtcatggtcag

SEQ ID NO: 531388 - DNA, 75 bp, synthetic construct
  source 1..75: mol_type = other DNA
taatgaaaagtacacacgctgggttaagacgcagccgtgcgcatgttgtggaaagccagctgatgatccgcatca

SEQ ID NO: 531389 - DNA, 75 bp, synthetic construct
  source 1..75: mol_type = other DNA
tagtgacaatgccggaactgtgctggtggctggttcgtaatgacctggcggatgccttaccggaaagtgcagccc

SEQ ID NO: 531390 - DNA, 75 bp, synthetic construct
  source 1..75: mol_type = other DNA
ctgccagtggccacacggcgattatcatcacagtgaaaccgtcatatatcgttacggcaccggcgcgatggtatt

SEQ ID NO: 531391 - DNA, 75 bp, synthetic construct
  source 1..75: mol_type = other DNA
gatcagttcacggaacggctggaatcaatggcaacggataactgtgcccgctgggtgttgtctgttgtgcgccgt

SEQ ID NO: 531392 - DNA, 75 bp, synthetic construct
  source 1..75: mol_type = other DNA
gtggaaaacctgctgatgatccccaccacctgataggccacggtcaggggggaatgggtacaaaagcgcatgacc

SEQ ID NO: 531393 - DNA, 75 bp, synthetic construct
  source 1..75: mol_type = other DNA
gaaattgcaggacagcttttatataaacgtttcctgggatgcgctgaacacggcatacaatgaacacccggagtg

SEQ ID NO: 531394 - DNA, 75 bp, synthetic construct
  source 1..75: mol_type = other DNA
caccacaggaaaagacggtggtcagcattgccgttgatcccgagtctccggaatctttcatgaaacgacctaaac

SEQ ID NO: 531395 - DNA, 75 bp, synthetic construct
  source 1..75: mol_type = other DNA
caccacaggaaaagacggtggtcagcattgccgttgatcctgagcctccggaatctttcatgaaacgacctaaac

SEQ ID NO: 531396 - DNA, 75 bp, synthetic construct
  source 1..75: mol_type = other DNA
cggataaatactgctttacagaactgaatgagtctccacctcttcgtcggcagtggcaggatgttctggaggtgt

SEQ ID NO: 531397 - DNA, 75 bp, synthetic construct
  source 1..75: mol_type = other DNA
gtgcggatattacttcgacctgttctggtaccggaactcgggctggtggtccttaggccgggtcgtgaatccatg

SEQ ID NO: 531398 - DNA, 75 bp, synthetic construct
  source 1..75: mol_type = other DNA
gtaaggccctgagattaccgaagcctgttttgccgtctgtcacccgggagagtgaccttgtaccttcggttactg

SEQ ID NO: 531399 - DNA, 75 bp, synthetic construct
  source 1..75: mol_type = other DNA
tcatgctgacccgctggcgtttgagaaaaagtacggctcccaggttgagttaatttttcgttttcttgatcacgc

SEQ ID NO: 531400 - DNA, 75 bp, synthetic construct
  source 1..75: mol_type = other DNA
gcctgttgtgccatctgtcacccgggaaagtgaccttgtgccttcggttcctgccaccagcatcatccaggataa

SEQ ID NO: 531401 - DNA, 75 bp, synthetic construct
  source 1..75: mol_type = other DNA
tactgccatttttcagcgacgaacgagtgattcgtgctgctggtggcgctggcgcattgtctgactggttactgc

SEQ ID NO: 531402 - DNA, 75 bp, synthetic construct
  source 1..75: mol_type = other DNA
cctgccgttcgccagccgctagtggaagacaaaacattgctgccgtttttcagtaacgcacgggtgattcgtgct

SEQ ID NO: 531403 - DNA, 75 bp, synthetic construct
  source 1..75: mol_type = other DNA
aaagtggatccggagtcgccggagtcttttatgttacgcccaaaacgtcgccgctgggttaatgaaaagtacacg

SEQ ID NO: 531404 - DNA, 75 bp, synthetic construct
  source 1..75: mol_type = other DNA
gatccggagtcgccggagtcttttatgttacgcccaaaacgtcgccgctgggttaatgaaaagtacacacgctgg

SEQ ID NO: 531405 - DNA, 75 bp, synthetic construct
  source 1..75: mol_type = other DNA
accgtggcatttgaagaaaagtatggctctcagctggagctgatatttcgttttatcgatcgcgcgctggcgatt

SEQ ID NO: 531406 - DNA, 75 bp, synthetic construct
  source 1..75: mol_type = other DNA
ggcggttatgggccacatatgatgctgggttgtttgtttgtttgtcttgtcggcggttattgggctatttatttc

SEQ ID NO: 531407 - DNA, 75 bp, synthetic construct
  source 1..75: mol_type = other DNA
aacgtttcctgggatgcgctgaacacggcatacagtgaacaccctgagtggttttcagggcttgtctccggggat

SEQ ID NO: 531408 - DNA, 75 bp, synthetic construct
  source 1..75: mol_type = other DNA
gatcagttcacggaacggctggaatcaatggcaacggataactgtgcccgctgggtgttgtctgtagtccgtctg

SEQ ID NO: 531409 - DNA, 75 bp, synthetic construct
  source 1..75: mol_type = other DNA
ggcttttccgatcctaacgttgtgctgatcgccgccctgtttattattggcgatggtttagtccgtaccggcgtt

SEQ ID NO: 531410 - DNA, 75 bp, synthetic construct
  source 1..75: mol_type = other DNA
accgaatcctgttgtgccgtctgtcacccgggaaagtgaccttgtgccttcggttcctgccaccagcatcatcca

SEQ ID NO: 531411 - DNA, 75 bp, synthetic construct
  source 1..75: mol_type = other DNA
gtaactggaaactgatcggtatgctggcaaaacagggccgcgactttgtggcgctgaacttaccagaagaagtga

SEQ ID NO: 531412 - DNA, 75 bp, synthetic construct
  source 1..75: mol_type = other DNA
atggtcagggtggaatgggtacaaaagcgcatgacctttttgtgctgcctttgtgcagaaaacaccacgacgaac

SEQ ID NO: 531413 - DNA, 75 bp, synthetic construct
  source 1..75: mol_type = other DNA
taatctgccgtccggggtcgttcctgccgttcgccagccgctgggggatgacaaaacatttctgccgtttttcag

SEQ ID NO: 531414 - DNA, 75 bp, synthetic construct
  source 1..75: mol_type = other DNA
taatctgccgtccggggtcgttcctgccgttcgccagccgctgggggatgaaaaaccatttctgccgtttttcag

SEQ ID NO: 531415 - DNA, 75 bp, synthetic construct
  source 1..75: mol_type = other DNA
tcggtgtaccgcgaaagcgacatcgtaccgggagagcagaccgccaccagcatattgaaacaacgcacaaaaaat

SEQ ID NO: 531416 - DNA, 75 bp, synthetic construct
  source 1..75: mol_type = other DNA
ggtgaaagggctgatggacattggcggcggttacgggccacatatgatgctgggttgtttgtttgtcttgtcggc

SEQ ID NO: 531417 - DNA, 75 bp, synthetic construct
  source 1..75: mol_type = other DNA
cgatggtttggtccgtaccggtgttgccaccgtaatggggacatggctggtcaaagtggcgggcaacagtgaaat

SEQ ID NO: 531418 - DNA, 75 bp, synthetic construct
  source 1..75: mol_type = other DNA
taatctgccgtccggggtcgttcctgccgttcgccagccgctgggggatgagaaagcatttctgccatttttcag

SEQ ID NO: 531419 - DNA, 75 bp, synthetic construct
  source 1..75: mol_type = other DNA
agccaaccagattgaaggcgatattgtcaaaacagtgggtaaggcttttccgcgggactcccgggcaccggagcg

SEQ ID NO: 531420 - DNA, 75 bp, synthetic construct
  source 1..75: mol_type = other DNA
caatcctccggcattttccctgacaccggacgggcggctgacggcgaaaaacgctgatatcagcggtaacgtgaa

SEQ ID NO: 531421 - DNA, 75 bp, synthetic construct
  source 1..75: mol_type = other DNA
ggtccgggaaattacagcttcagtgactttgttaagttgggggtaccgttcaccattatcgtgatggcggtttgt

SEQ ID NO: 531422 - DNA, 75 bp, synthetic construct
  source 1..75: mol_type = other DNA
agcggtaacgtgaatgcgaactccgggacgctcaataatgtcacggtaaatgaaaactgtacgattaagggcatg

SEQ ID NO: 531423 - DNA, 75 bp, synthetic construct
  source 1..75: mol_type = other DNA
gcagaagtcaccgcagacagcggggaataccaggtgctggcgcgctgggacacgccgaaggtggtgaaggggggg

SEQ ID NO: 531424 - DNA, 75 bp, synthetic construct
  source 1..75: mol_type = other DNA
aaccgcggtgatctcccggtgattaagctggggatcaggatgccggggcgtcgtccggacagcatactcaaagcc

SEQ ID NO: 531425 - DNA, 75 bp, synthetic construct
  source 1..75: mol_type = other DNA
tctcacgcccgccagcaacagaacccaccacaggaaaagacggtggtatgcatcaccgttgatccggagtctccg

SEQ ID NO: 531426 - DNA, 75 bp, synthetic construct
  source 1..75: mol_type = other DNA
gataccgtggcatttgaagagaagtatggctcccaactggagctgatttttcgatttatcgatcgcgcgctggca

SEQ ID NO: 531427 - DNA, 75 bp, synthetic construct
  source 1..75: mol_type = other DNA
tgttgtgccgtctgtcacccgggaaagtgaccttgtgccttcggttcctgccccagcatcatccaggataaagcg

SEQ ID NO: 531428 - DNA, 75 bp, synthetic construct
  source 1..75: mol_type = other DNA
tcacctgattggtcatggtcagggcggaatgggaacaaaggcccacgatatttttacactaccgctgtgccggga

SEQ ID NO: 531429 - DNA, 75 bp, synthetic construct
  source 1..75: mol_type = other DNA
ctgccagtggcctaatggagattaccatcacactgaaacagtcattcaccgttatggtaccggcgcaatggtgtt

SEQ ID NO: 531430 - DNA, 75 bp, synthetic construct
  source 1..75: mol_type = other DNA
catcgccgttgatccggagtctccggaatctttcatgaaacggcctaaacgtcgtcgctgggttaatgaaaagta

SEQ ID NO: 531431 - DNA, 75 bp, synthetic construct
  source 1..75: mol_type = other DNA
gttacggtaccggcgcgatggtattgtgctggcactgtgacaaccagctgcgcgaccagacatcagaatcactcg

SEQ ID NO: 531432 - DNA, 75 bp, synthetic construct
  source 1..75: mol_type = other DNA
cattgccgttgatccggagtctccggaatctttcatgaggcgacctaaacgtcgccgttgggtaaatgagaaata

SEQ ID NO: 531433 - DNA, 75 bp, synthetic construct
  source 1..75: mol_type = other DNA
ccagtattatcaacggctcggaagtgtctagattatccgtggcgattcaggtggatgcactacctgaggctgtat

SEQ ID NO: 531434 - DNA, 75 bp, synthetic construct
  source 1..75: mol_type = other DNA
atgatccgcatcacatcattggtcatggactggggggaacgggaacaaaggctgacgatttgtttgttattccgt

SEQ ID NO: 531435 - DNA, 75 bp, synthetic construct
  source 1..75: mol_type = other DNA
cacaggaaaagacggtggtcagcattgccgttgatcctgagtctccggaatctttcatgaaacgacctaaacgtc

SEQ ID NO: 531436 - DNA, 75 bp, synthetic construct
  source 1..75: mol_type = other DNA
aactgtgctggtggctgattcgtaatgacctggcggatgccttaccggaaagtgcagcccgtaaggcactgagat

SEQ ID NO: 531437 - DNA, 75 bp, synthetic construct
  source 1..75: mol_type = other DNA
cgtgaccagacatccgaatcactcgagcaacttgctcatcaaaacctgtcagcatggatgattgacgtcatccgt

SEQ ID NO: 531438 - DNA, 75 bp, synthetic construct
  source 1..75: mol_type = other DNA
tgtacgtgttgtggtaagccagcagacgatccccatcacctgattggtcacggtcagggcggaatggggacaaaa

SEQ ID NO: 531439 - DNA, 75 bp, synthetic construct
  source 1..75: mol_type = other DNA
gtgcgggtattacttcgacctgttctggtgccagaactcgggatggtgctcctaaagccgggccgtgaatcaatg

SEQ ID NO: 531440 - DNA, 75 bp, synthetic construct
  source 1..75: mol_type = other DNA
gtgcgggtattacttcgacctgttctggtaccggaactcggggtggttatcgttaagccaagccgtgaatccatg

SEQ ID NO: 531441 - DNA, 75 bp, synthetic construct
  source 1..75: mol_type = other DNA
tcatgctgacccgctggagtttgagaaaaagtacgggtcccaggttgagttaatttttcattttcttgatcacgc

SEQ ID NO: 531442 - DNA, 75 bp, synthetic construct
  source 1..75: mol_type = other DNA
ccggtattttacaatacccgggtgttggtggagccggaaccgaaaaacatgcgggcgctgccatcaggagaggtt

SEQ ID NO: 531443 - DNA, 75 bp, synthetic construct
  source 1..75: mol_type = other DNA
ctggtgggcggtctgcaatcaggtggcggacgcgctaccggaggccgtattacgtcgttctctggggttacgtgt

SEQ ID NO: 531444 - DNA, 75 bp, synthetic construct
  source 1..75: mol_type = other DNA
tgccgttgatccggagtcaccggaatcattcatgaagcggcctaaacgtcgccgctgggtgaatgagaaatacac

SEQ ID NO: 531445 - DNA, 75 bp, synthetic construct
  source 1..75: mol_type = other DNA
gaaagtgaccttgtgccttcggttcctgccaccagcatcatccaggataaagcgaaaaaggtgctggcgctgaaa

SEQ ID NO: 531446 - DNA, 75 bp, synthetic construct
  source 1..75: mol_type = other DNA
tatcgccgttgatccggagtctcctgaatcgttcatgaggcggcctaaacgttgccgttgggttaatgagaaata

SEQ ID NO: 531447 - DNA, 75 bp, synthetic construct
  source 1..75: mol_type = other DNA
acaggaaaagacggtggtcagcattgccgttgatcctgagtctccggaatctttcatgaaacgacctaaacgtcg

SEQ ID NO: 531448 - DNA, 75 bp, synthetic construct
  source 1..75: mol_type = other DNA
tggtggagccggaaccaaaaagcatgcgaggtctgccatccggagtcgttcctgccgttcgccagccgctggcgg

SEQ ID NO: 531449 - DNA, 75 bp, synthetic construct
  source 1..75: mol_type = other DNA
gcatgcggataccgtggcatttgaagagaagtatggctcccagctggagctgatatttcgttttattgatcgtgc

SEQ ID NO: 531450 - DNA, 75 bp, synthetic construct
  source 1..75: mol_type = other DNA
taatctgccgtccggggtcgttcctgccgttcgccagccgctggaggacgataaagcattactgccttttttcag

SEQ ID NO: 531451 - DNA, 75 bp, synthetic construct
  source 1..75: mol_type = other DNA
taatctgccgtccggggtcgttcctgccgttcgccagccgctggaggatgataaagcattgctgccctttttcag

SEQ ID NO: 531452 - DNA, 75 bp, synthetic construct
  source 1..75: mol_type = other DNA
taatctgccgtccggggtcgttcctgccgttcgccagccgctggaggaagataaagcattcctgccttttttcag

SEQ ID NO: 531453 - DNA, 75 bp, synthetic construct
  source 1..75: mol_type = other DNA
tccgctccgtataccgtgaaagcgacatcataccgggagaacagaccgccaccagcatactgaagcagcgcacaa

SEQ ID NO: 531454 - DNA, 75 bp, synthetic construct
  source 1..75: mol_type = other DNA
caccacagaaaaaaacggttgtcagtatcgctgttgatccggagtctcctgaatcgttcatgaggcggcctaaac

SEQ ID NO: 531455 - DNA, 75 bp, synthetic construct
  source 1..75: mol_type = other DNA
taatctgccgtccggggtcgttcctgccgttcgccagccgctggaggaggataaagcatttctgccctttttcag

SEQ ID NO: 531456 - DNA, 75 bp, synthetic construct
  source 1..75: mol_type = other DNA
cgtgaccagacatcggaatcactggagctgcttgctcaacaaaatctgacagcatgggtgattgacgtcatccgt

SEQ ID NO: 531457 - DNA, 75 bp, synthetic construct
  source 1..75: mol_type = other DNA
aagacaaaacattgctgccgtttttcagtaacgcacgggtgattcgtgctgctggtggtgctggtgcattgtctg

SEQ ID NO: 531458 - DNA, 75 bp, synthetic construct
  source 1..75: mol_type = other DNA
cctgacgttcgccagccgctggcggaggataaatcattactgccatttttcagcgacgaacgggtgattcgtgct

SEQ ID NO: 531459 - DNA, 75 bp, synthetic construct
  source 1..75: mol_type = other DNA
gagaagtatggctcccaactggagctgatatttcgttttatcgatcgcgcgctggcaattggcgtactggcgtaa

SEQ ID NO: 531460 - DNA, 75 bp, synthetic construct
  source 1..75: mol_type = other DNA
cctgagacaactcaggagcttcagaatgatccgttaatgcgtgatgtcttcgaaaatcagaaggtcatacatcgt

SEQ ID NO: 531461 - DNA, 75 bp, synthetic construct
  source 1..75: mol_type = other DNA
atggtaccggcgcaatggtgttgtgctggcactgcgacaaccagctgcgcgaccagacctccgaatcactcgggc

SEQ ID NO: 531462 - DNA, 75 bp, synthetic construct
  source 1..75: mol_type = other DNA
tggaatgggtacaaaagcgcatgacctttttgtgctgcctttgtgcagaaaacaccacgacgaactgcatgcgga

SEQ ID NO: 531463 - DNA, 75 bp, synthetic construct
  source 1..75: mol_type = other DNA
taccgtgaaagcgacatcataccgggagaacagaccgccaccagcatactgaagcagcgcacaaaaaatattgcg

SEQ ID NO: 531464 - DNA, 75 bp, synthetic construct
  source 1..75: mol_type = other DNA
gttatggtaccggcgcaatggtgttgtgctggtactgcgacaaccagttgcgtgaccagacctccgaatcacttg

SEQ ID NO: 531465 - DNA, 75 bp, synthetic construct
  source 1..75: mol_type = other DNA
gcgcggtctgccgtccggggtcgttcctgccgttcgccagccgctggcggaagacaaatctctgctgccattttt

SEQ ID NO: 531466 - DNA, 75 bp, synthetic construct
  source 1..75: mol_type = other DNA
aagagaagtatggctctcagctggagctgatatttcgttttatcgatcgtgcgctggcaattggcgtactggcgt

SEQ ID NO: 531467 - DNA, 75 bp, synthetic construct
  source 1..75: mol_type = other DNA
gagaacagaccgccaccagcatactgaagcagcgcacaaaaaatattgcgctaccgcctcacacccaccagcaac

SEQ ID NO: 531468 - DNA, 75 bp, synthetic construct
  source 1..75: mol_type = other DNA
ggaaaaaatccgctccgtataccgtgagagcgacatcataccgggagagcaggccgccaccagcatactgaagca

SEQ ID NO: 531469 - DNA, 75 bp, synthetic construct
  source 1..75: mol_type = other DNA
ggaaaaaattcgctcagtataccgcgagagcgacatcgtgccgggagagcagaccgccaccagcatgctgaagca

SEQ ID NO: 531470 - DNA, 75 bp, synthetic construct
  source 1..75: mol_type = other DNA
ggaatgggaacaaaagcgcatgacctctttgtgttgcctttgtgcagaaagcatcacgacgagctgcatgcggat

SEQ ID NO: 531471 - DNA, 75 bp, synthetic construct
  source 1..75: mol_type = other DNA
cagtatctccagcgccagaaatcacaacgggaagagatgcctgtatacacgcgctgggtaaaaacgcagaaatgc

SEQ ID NO: 531472 - DNA, 75 bp, synthetic construct
  source 1..75: mol_type = other DNA
aggataaatcattactgccatttttcagcgatgagcgggtgatccgtgctgctggcggtgctggtgcactgcctg

SEQ ID NO: 531473 - DNA, 75 bp, synthetic construct
  source 1..75: mol_type = other DNA
cgccacaggaaaagacggtggtcagcattgccgttgatccggagtcaccggctcagtatctccagcgccagaaat

SEQ ID NO: 531474 - DNA, 75 bp, synthetic construct
  source 1..75: mol_type = other DNA
agtatctggcacaggcgaaatgggacacgccgaaggtggtgaagggcgtgagctttatgcttcgcctgaccgtgg

SEQ ID NO: 531475 - DNA, 75 bp, synthetic construct
  source 1..75: mol_type = other DNA
gttattccgcggtggtaagcatgagaatttcaacagtaataaccaacagtcatactggtattcaacctgccggtt

SEQ ID NO: 531476 - DNA, 75 bp, synthetic construct
  source 1..75: mol_type = other DNA
agccggggacggatttctggttttacgtgcgcagcgtcaacctggtggggaaatctgcgtttgtggaagtcagcg

SEQ ID NO: 531477 - DNA, 75 bp, synthetic construct
  source 1..75: mol_type = other DNA
gaaactaaaggggccattcccggtagttacagtgcagttattgatatgccgagtggcaggggaagcgtcactctg

SEQ ID NO: 531478 - DNA, 75 bp, synthetic construct
  source 1..75: mol_type = other DNA
gtaacgaaaaacgggacagaaatttttaatcagtcaacaacggatgctccggcggttttttcttccgttattgat

SEQ ID NO: 531479 - DNA, 75 bp, synthetic construct
  source 1..75: mol_type = other DNA
tattccggcggtggcattcagtggcgctaagcatgagagagagcatactgatatttactcctcatgccgtctgat

SEQ ID NO: 531480 - DNA, 75 bp, synthetic construct
  source 1..75: mol_type = other DNA
ggccatcagggaccattaccgtcagggtttatgacgatcagccgtttgaccggcagattgttattcccgcggtgg

SEQ ID NO: 531481 - DNA, 75 bp, synthetic construct
  source 1..75: mol_type = other DNA
ctggttctcagaaaaacgcatcacgaacacagcacaggtggaaaaatctgcccgttatctgggggccggcagtca

SEQ ID NO: 531482 - DNA, 75 bp, synthetic construct
  source 1..75: mol_type = other DNA
gcaggcgaaatgggacacgccgcgggtggtgaagggcgtgcgcttcagtctgcgcctgaccagtggaagcggtca

SEQ ID NO: 531483 - DNA, 75 bp, synthetic construct
  source 1..75: mol_type = other DNA
ggctcaggagctgtggacgcagattgataacggtcagcttgcgcctgacctgactgaaatcaggacgtccataac

SEQ ID NO: 531484 - DNA, 75 bp, synthetic construct
  source 1..75: mol_type = other DNA
cacagcccgctatcttggcacggcgctgtactggatagccgccagtatcaatatcaaaccgggccatgattatta

SEQ ID NO: 531485 - DNA, 75 bp, synthetic construct
  source 1..75: mol_type = other DNA
gtttcgtgggacgaaacaccagaatttcaacagcccgaatcagcagtcgtactggtactccacctgcaagctgca

SEQ ID NO: 531486 - DNA, 75 bp, synthetic construct
  source 1..75: mol_type = other DNA
cgactttctgcgagaaatgcggatatcagcggtaacgtgaatgcgaactccgggacgctcaataatgtcacgatt

SEQ ID NO: 531487 - DNA, 75 bp, synthetic construct
  source 1..75: mol_type = other DNA
gagcgaataactggacaccaacaaccagtatcagcgatctgctggttgtggtgatgaaaaatccacagcaggtat

SEQ ID NO: 531488 - DNA, 75 bp, synthetic construct
  source 1..75: mol_type = other DNA
ttcaggcacgctcaacaatgtgacgataaaccaggactgtgtgattaagggaaatttatctgcagcacagataac

SEQ ID NO: 531489 - DNA, 75 bp, synthetic construct
  source 1..75: mol_type = other DNA
gttttcattacagcttcagtgcccttaaggacagacacacggctgttgaggtgaattacaccgatccgcagaatg

SEQ ID NO: 531490 - DNA, 75 bp, synthetic construct
  source 1..75: mol_type = other DNA
tctgggatggcacattaaaaccggcatacagcaataatccggcctggtgtctgtgggacatgctcactcatccgc

SEQ ID NO: 531491 - DNA, 75 bp, synthetic construct
  source 1..75: mol_type = other DNA
tgtttaaaaacggggctgagattttccatgaaccggcaacggatgtcagccgggtgttctcaacggtgatagata

SEQ ID NO: 531492 - DNA, 75 bp, synthetic construct
  source 1..75: mol_type = other DNA
tttgtggcgcaggggaatcagctgttcatgaacgacgtgttcctgaagcgactgtttgcggtgagtatcacgtca

SEQ ID NO: 531493 - DNA, 75 bp, synthetic construct
  source 1..75: mol_type = other DNA
agcttcagtctgcgcctgaccagcggaaggggggatgacagccgcctggtgaccaccgccatcaccgcagacacg

SEQ ID NO: 531494 - DNA, 75 bp, synthetic construct
  source 1..75: mol_type = other DNA
ccagccgagtgatgatgcatccggctatctggattttttcaaaggcgagatagggaaaagccatctggctcagga

SEQ ID NO: 531495 - DNA, 75 bp, synthetic construct
  source 1..75: mol_type = other DNA
ctggcgaaatgggacacgccgcgggtggtgaagggcgtgcgcttcagtctgcgcctgaccagtggcagtggtgaa

SEQ ID NO: 531496 - DNA, 75 bp, synthetic construct
  source 1..75: mol_type = other DNA
atgaacgacgtgttcctgaagcgactgtttgcggtgagtatcacgtcatccggcaaccccccgacgttttccctg

SEQ ID NO: 531497 - DNA, 75 bp, synthetic construct
  source 1..75: mol_type = other DNA
aaacaccagaatttcaacagcccgaatcagcagtcgtactggtattccacctgtaagctgcaggtgctgaagaac

SEQ ID NO: 531498 - DNA, 75 bp, synthetic construct
  source 1..75: mol_type = other DNA
atgaacgacgtgttcctgaagcgtctgtttgcggcgagtatcacgtcatccggcaacccccggacgttttccctg

SEQ ID NO: 531499 - DNA, 75 bp, synthetic construct
  source 1..75: mol_type = other DNA
acttcaacagcaacaaccaacagtcatactggtattcaacctgtaagctgcaggtactgaagaacggacaggaaa

SEQ ID NO: 531500 - DNA, 75 bp, synthetic construct
  source 1..75: mol_type = other DNA
gggacgctcaataatgtcacgattaaccagaactgtcggattctgggaaaactgtcagctaaccagattgaaggt

SEQ ID NO: 531501 - DNA, 75 bp, synthetic construct
  source 1..75: mol_type = other DNA
ttttgaccggcaaattgtgatcccggcagtggctttcagcggcgctaaacatgagagagagcataacgatattta

SEQ ID NO: 531502 - DNA, 75 bp, synthetic construct
  source 1..75: mol_type = other DNA
gcacaggggatgtgggagctgattgataacagccagcttgatgatgagatggcggagatgaagaccaccatcaca

SEQ ID NO: 531503 - DNA, 75 bp, synthetic construct
  source 1..75: mol_type = other DNA
tacgggcgcaacctgctgaagatggatgcgttcggctgcaccagtcgcggtcaggcccaccgtgccgggctgtgg

SEQ ID NO: 531504 - DNA, 75 bp, synthetic construct
  source 1..75: mol_type = other DNA
ttatgatgatcagggattcgaccggcagattatcattccgccggtattatttcgtggtacgaaacaccagaattt

SEQ ID NO: 531505 - DNA, 75 bp, synthetic construct
  source 1..75: mol_type = other DNA
ggacgggaggctgacggcgaaaaatgccgatatcagtggcagtgtgaatgcgaactccgggacgctcaacaacgt

SEQ ID NO: 531506 - DNA, 75 bp, synthetic construct
  source 1..75: mol_type = other DNA
ctggataatacgctgatttacagtggcgttattgatatgcctgccggtcacggtcacatgacgctggagttttcg

SEQ ID NO: 531507 - DNA, 75 bp, synthetic construct
  source 1..75: mol_type = other DNA
tcgggcgagcgatgatgccgaaggttacctggattttttcaaaggccagataaccgaatcccatctcggtaaagc

SEQ ID NO: 531508 - DNA, 75 bp, synthetic construct
  source 1..75: mol_type = other DNA
gcggggtcatgtcaccctgacgtttaatgtgtcgtcggccggtgcgaacaactggacgccgacaacgtacatcag

SEQ ID NO: 531509 - DNA, 75 bp, synthetic construct
  source 1..75: mol_type = other DNA
aaacccgcaatgaaatcacgcagacggtcagtaaaaccctggaagaccagagcgccaccatacagcagatacagc

SEQ ID NO: 531510 - DNA, 75 bp, synthetic construct
  source 1..75: mol_type = other DNA
tggtgaagggcgtgcgcttcagtctgcgcctgaccagtggaagcggtcaggacagccgtctggtgaccaccgcca

SEQ ID NO: 531511 - DNA, 75 bp, synthetic construct
  source 1..75: mol_type = other DNA
ttcaaaggagagatagggaaaacccatctggctcaggagttgtggactcagattgataacggtcagcttgcgcct

SEQ ID NO: 531512 - DNA, 75 bp, synthetic construct
  source 1..75: mol_type = other DNA
cagggcgatcagatattcatgaacgaagtgttcctgaaatatctgacggctcccaccattaccagcggcggtaat

SEQ ID NO: 531513 - DNA, 75 bp, synthetic construct
  source 1..75: mol_type = other DNA
gcgacccaggtcagaggggatttcgttaaagctgtatcaaaagccttcccgaaaaaagtcggtacgtggggtaac

SEQ ID NO: 531514 - DNA, 75 bp, synthetic construct
  source 1..75: mol_type = other DNA
gccatgtggggcgtcaaaattgagcagaccgaagacggtaagcattatgtcgcgggtcttggcctcagcatggag

SEQ ID NO: 531515 - DNA, 75 bp, synthetic construct
  source 1..75: mol_type = other DNA
cgatgatcataactttgaccgtcagattattatcccgcccattatctttaacggtatagcgtataccgatccggg

SEQ ID NO: 531516 - DNA, 75 bp, synthetic construct
  source 1..75: mol_type = other DNA
tttaagattttccagaaaggcaatcagggcgcaggtaacatcacagactgtacggtgattgtgaccaaaaaagct

SEQ ID NO: 531517 - DNA, 75 bp, synthetic construct
  source 1..75: mol_type = other DNA
gatcagccgtttgaccggcagattgttattccggcggtgcattcagcggcgctaaacatgagagaaagcatactg

SEQ ID NO: 531518 - DNA, 75 bp, synthetic construct
  source 1..75: mol_type = other DNA
gccggttaagagtgacccgcaatggtcaggagatttttaagcagtccacgacggatgctcagggcgtattttcct

SEQ ID NO: 531519 - DNA, 75 bp, synthetic construct
  source 1..75: mol_type = other DNA
gaaaaatgccgatatcagcggtaacgtgaatgcgaacgccgggacgctcaacaacgtcacgattaacgagaactg

SEQ ID NO: 531520 - DNA, 75 bp, synthetic construct
  source 1..75: mol_type = other DNA
tggtacgtggggtaacacggaaacaccagacgggacggttacagtcaccatcagtgatgatcataactttgaccg

SEQ ID NO: 531521 - DNA, 75 bp, synthetic construct
  source 1..75: mol_type = other DNA
cggtgtatgacccgacggtacagtttgaattctggttctccgaaaaacgcatcacgaacacggcacaggtggaaa

SEQ ID NO: 531522 - DNA, 75 bp, synthetic construct
  source 1..75: mol_type = other DNA
tcaaaaaacgaaagacggcattccctatgtggccgggattggtgcagggattgaggatactgatggccagccact

SEQ ID NO: 531523 - DNA, 75 bp, synthetic construct
  source 1..75: mol_type = other DNA
tgacggtgcgacctcaatctgtacgctgacggtgagtgtgaatgatcgggtggtgttcagcaaaacctcatccat

SEQ ID NO: 531524 - DNA, 75 bp, synthetic construct
  source 1..75: mol_type = other DNA
gaatcagttgttcatgaacgatgtgttcctgaagcgactgtttgcggtgagtatcacctcgtccggcaatccccc

SEQ ID NO: 531525 - DNA, 75 bp, synthetic construct
  source 1..75: mol_type = other DNA
aacagcacgccgttatttgtggcgcaggggaatcagttgttcatgaacgatgtgttcctgaagcgactgtttgcg

SEQ ID NO: 531526 - DNA, 75 bp, synthetic construct
  source 1..75: mol_type = other DNA
ccatacagcagatacagcgcgtgcagaaggacacaaataatgacctggctgcgctgtacatgctgaaggttcaaa

SEQ ID NO: 531527 - DNA, 75 bp, synthetic construct
  source 1..75: mol_type = other DNA
cgagctgcatgcggataccgtggcatttgaagagaagtatggctcccaactggagctgatatttcgttttatcga

SEQ ID NO: 531528 - DNA, 75 bp, synthetic construct
  source 1..75: mol_type = other DNA
gctggttacttcgtgaaaagggctgtcagtggcctcattccggatggcacagcgagaacatgaccacaatgcgac

SEQ ID NO: 531529 - DNA, 75 bp, synthetic construct
  source 1..75: mol_type = other DNA
atactggtattcaacctgccggttaagagtgacccgcaatggtcaggagatttttaatcagtccacgacggatgc

SEQ ID NO: 531530 - DNA, 75 bp, synthetic construct
  source 1..75: mol_type = other DNA
gaatagcgtatagctatccgggaagtggtaataacccgggaggtacaagatacacgggttatggttttgaagttc

SEQ ID NO: 531531 - DNA, 75 bp, synthetic construct
  source 1..75: mol_type = other DNA
tgaccattaaccagaactgccggatacttggaaaactgtctgccaaccagattgaaggcgatattgttaaaaccg

SEQ ID NO: 531532 - DNA, 75 bp, synthetic construct
  source 1..75: mol_type = other DNA
gaggatactgatggccagcccctgagcaacatactgctgctggctgaccgtattgcgatgattaacccggaggac

SEQ ID NO: 531533 - DNA, 75 bp, synthetic construct
  source 1..75: mol_type = other DNA
agtggaccgggtgagcagtgaaatctcacagactgtcagccaggggcagtcagaaaacgcccggcagatagcaca

SEQ ID NO: 531534 - DNA, 75 bp, synthetic construct
  source 1..75: mol_type = other DNA
ggcagcggtaagccggtaagtgtggacatcaccgcacaaccggcccctgaccggatacaggtcagcaccctgccc

SEQ ID NO: 531535 - DNA, 75 bp, synthetic construct
  source 1..75: mol_type = other DNA
cagcacctgacggtggaggtgagtgcagctgacggtcagtatctggcacaggcgaaatgggacacgccgcgggtg

SEQ ID NO: 531536 - DNA, 75 bp, synthetic construct
  source 1..75: mol_type = other DNA
tgggacacgccgaaggtggtgaagggcgtgagcttcctgcttcgcctgaccgtggcagcggatgacggccgtgag

SEQ ID NO: 531537 - DNA, 75 bp, synthetic construct
  source 1..75: mol_type = other DNA
tcacacagaccgtcaataagaaactggaagatcagagtgcagcgatccagcagatacagaaggttcaggttgata

SEQ ID NO: 531538 - DNA, 75 bp, synthetic construct
  source 1..75: mol_type = other DNA
ttctgggaaaactgtccgcgaaccagattgaaggcgatctcgttaaaacagtgggcaaagctttcccccgggatt

SEQ ID NO: 531539 - DNA, 75 bp, synthetic construct
  source 1..75: mol_type = other DNA
cggcaatcccccgacgttttccctgacgccggagggcaggctgaccgcaagaaatgctgatatcagcggtaacgt

SEQ ID NO: 531540 - DNA, 75 bp, synthetic construct
  source 1..75: mol_type = other DNA
gccagccgcaccctgacactggaccgtgaggtgacactgccggagacaggtgcatcgacggtgaacctgattaac

SEQ ID NO: 531541 - DNA, 75 bp, synthetic construct
  source 1..75: mol_type = other DNA
ccgctgacggacacggacggtaatcctgtgatacacggtgtgaccgccgtctggcgtgccggggagcaggagcag

SEQ ID NO: 531542 - DNA, 75 bp, synthetic construct
  source 1..75: mol_type = other DNA
caatccgccggtattttccctgacaccggacgggcggctgacggcgaaaaatgccgatatcagcggtaacgtgaa

SEQ ID NO: 531543 - DNA, 75 bp, synthetic construct
  source 1..75: mol_type = other DNA
tcagcggcgctaaacatgagagagagcatactgatatttactcctcatgccgtctgatagtgcggaaaaacggtg

SEQ ID NO: 531544 - DNA, 75 bp, synthetic construct
  source 1..75: mol_type = other DNA
gttatctggggaccggcagtcagtggactgtccaggggagccggattaagccggggacggatttctggttttatg

SEQ ID NO: 531545 - DNA, 75 bp, synthetic construct
  source 1..75: mol_type = other DNA
caacctgtaagctgcaggtactgaagaacggacaggaaatctttcagcaacccgcgacggatgtcagcagggtat

SEQ ID NO: 531546 - DNA, 75 bp, synthetic construct
  source 1..75: mol_type = other DNA
aactggacgccgacaacgtacatcagtgatttactggttgtggtcatgaaaaaatccacggcagggatcagtatc

SEQ ID NO: 531547 - DNA, 75 bp, synthetic construct
  source 1..75: mol_type = other DNA
cagcatggtgggtaaatggctggtatcccacagcaagtatcagcgatttgctggttgttgtgatgaagaaagcca

SEQ ID NO: 531548 - DNA, 75 bp, synthetic construct
  source 1..75: mol_type = other DNA
gaccgtatcgcgatgattaacccggagaacggcaacaccacgccgctgtttgtggcgcaggggaatcagttgttc

SEQ ID NO: 531549 - DNA, 75 bp, synthetic construct
  source 1..75: mol_type = other DNA
gattaattgtgcgcaaaaatggcaatgtaatctatgacaaatccactagtggttcgaaaaggacaacagtcgtgt

SEQ ID NO: 531550 - DNA, 75 bp, synthetic construct
  source 1..75: mol_type = other DNA
cgcacgagcacttatgccagtggcaccatcacggtaagaatcagtgatgatcagaaatttgaccggcaggtcatg

SEQ ID NO: 531551 - DNA, 75 bp, synthetic construct
  source 1..75: mol_type = other DNA
tcagcaatgaaatcacgcagaccgtcaataagaaactggaagaccagagtgcagcgatccagcagatacagaggg

SEQ ID NO: 531552 - DNA, 75 bp, synthetic construct
  source 1..75: mol_type = other DNA
atagtgaagaaaaacggggctgaaatttataaccgaacggctctggataatactctgatttacacgggtgttatt

SEQ ID NO: 531553 - DNA, 75 bp, synthetic construct
  source 1..75: mol_type = other DNA
aacaacgtcacgattaacgagaactgccgggttctgggaaaactgtccgcgaaccagattgagggcgatctcgtt

SEQ ID NO: 531554 - DNA, 75 bp, synthetic construct
  source 1..75: mol_type = other DNA
gtgatgtgacaaaactgggtaccgggatcctgactcttaacaacgattccgcggcgtatcagggtacgacggata

SEQ ID NO: 531555 - DNA, 75 bp, synthetic construct
  source 1..75: mol_type = other DNA
attggctccactccttctggagccaactccgatctaagtaattttatcgaatactacaaggtcgttccatggtat

SEQ ID NO: 531556 - DNA, 75 bp, synthetic construct
  source 1..75: mol_type = other DNA
gcgggtatggctggcggcattgccagtggcgatgtggctggcgcggctgcaggggctggtgttgggaagaacatt

SEQ ID NO: 531557 - DNA, 75 bp, synthetic construct
  source 1..75: mol_type = other DNA
agcactcaacatacagagaatgtaaataagtttaagccaatagcagggagcgcaggcggtcctgacggaacaatg

SEQ ID NO: 531558 - DNA, 75 bp, synthetic construct
  source 1..75: mol_type = other DNA
ggttacagtaacgataaaggctatctggccggtgtggcactcctgatgattgttggtgtggggctaatgctaaat

SEQ ID NO: 531559 - DNA, 75 bp, synthetic construct
  source 1..75: mol_type = other DNA
atgtaattttatttacaaagatggtcagcaaatgcttacctttactgccattgttctcgaaaacagtgatatgca

SEQ ID NO: 531560 - DNA, 75 bp, synthetic construct
  source 1..75: mol_type = other DNA
atgggaagtggagtaatcctaaaaatataaacgtccctgctatgtctttaaaagaaaggatacatattgaatctt

SEQ ID NO: 531561 - DNA, 75 bp, synthetic construct
  source 1..75: mol_type = other DNA
aatgttcaccttttgatcccacctgagggtcttttatatcgttccctcacgctgcccaacgccaaatacaaactc

SEQ ID NO: 531562 - DNA, 75 bp, synthetic construct
  source 1..75: mol_type = other DNA
ccgcaaacctacggtcacactggctggaccggaacggtgaccgttatcgatccggtgaatcatatgacgattgtg

SEQ ID NO: 531563 - DNA, 75 bp, synthetic construct
  source 1..75: mol_type = other DNA
cgtaaaacgtggggcgatacctacatcaacgcccccaatggaatcaccccggcccagctggctgaatggcaggag

SEQ ID NO: 531564 - DNA, 75 bp, synthetic construct
  source 1..75: mol_type = other DNA
acgggcaaggtgaaattgttgtcagggacataaataattcagggaacagcaagttctttaattttaaccttgatg

SEQ ID NO: 531565 - DNA, 75 bp, synthetic construct
  source 1..75: mol_type = other DNA
ctatgacaaaaatgagctagggatactttgccttaaagtatcgcagaaagactatccgcaatatgtagcgttcta

SEQ ID NO: 531566 - DNA, 75 bp, synthetic construct
  source 1..75: mol_type = other DNA
ggtgcagtggatggcaaatactaccctgtcataatagacacatccgcaatggaaggttacggcaacctgacatgt

SEQ ID NO: 531567 - DNA, 75 bp, synthetic construct
  source 1..75: mol_type = other DNA
acgaaatatgtctgcaaaaattctggataacgattgtgcattatctgacaaacaaaactcagtgaatccacaaac

SEQ ID NO: 531568 - DNA, 75 bp, synthetic construct
  source 1..75: mol_type = other DNA
cctgttggtcacactggcgcggggaatggtgtatcagccggttttaacgctgcgttaggtactggtaccacgtcg

SEQ ID NO: 531569 - DNA, 75 bp, synthetic construct
  source 1..75: mol_type = other DNA
aagctcaggtcaaaatacctggggtgtacaaggctcagtaggtatgtctacggggtggttagctaataccagtac

SEQ ID NO: 531570 - DNA, 75 bp, synthetic construct
  source 1..75: mol_type = other DNA
cagccgcttatccgtcaggcgtgatccctgatatgcgtggctggacgattaagggcaagcccgccagtggtcgtg

SEQ ID NO: 531571 - DNA, 75 bp, synthetic construct
  source 1..75: mol_type = other DNA
ctgggggcaaccattgtggtgaacggacagcctgtatgcgatgagccgcaaatcataaacgtaagagaaggacag

SEQ ID NO: 531572 - DNA, 75 bp, synthetic construct
  source 1..75: mol_type = other DNA
ggctgatttctggggatacccgcgcgatgcccgctgtgaggttattgccggacgccttgcccgtcgtatcagttg

SEQ ID NO: 531573 - DNA, 75 bp, synthetic construct
  source 1..75: mol_type = other DNA
gcaaaatgcgtttaacgatcgcgatagtgtgaggaaaattgcaaaaaatagtcataacgtgcttgcatttcaatg

SEQ ID NO: 531574 - DNA, 75 bp, synthetic construct
  source 1..75: mol_type = other DNA
acagggggctggagaatcagtgttaccgggccagtggtctgacgttactgactgcggcaatcgcgttatggaaca

SEQ ID NO: 531575 - DNA, 75 bp, synthetic construct
  source 1..75: mol_type = other DNA
atgttaactgtaaaagtcatgtctcaaaatggtggggaagagctccattgcgggcgtagcattggctatcatcca

SEQ ID NO: 531576 - DNA, 75 bp, synthetic construct
  source 1..75: mol_type = other DNA
acttcatttttacagcaaaggtatagtttttagacgactgtatggtgttataggattattctatatattgtattt

SEQ ID NO: 531577 - DNA, 75 bp, synthetic construct
  source 1..75: mol_type = other DNA
cacacgcgcatactgtcggtattggtgctcatacgcactccgttgcgattggttcacatggacacaccatcaccg

SEQ ID NO: 531578 - DNA, 75 bp, synthetic construct
  source 1..75: mol_type = other DNA
gtgatagataaaattaaatcaaatgcgcgtgatttaagacgcaatctcactttgcaggaacgaaagctctggcga

SEQ ID NO: 531579 - DNA, 75 bp, synthetic construct
  source 1..75: mol_type = other DNA
ggggagctacattctcgattttgcttgctgctcggcgcgtgtagtcgttgagctggatggtgggcagcatgattt

SEQ ID NO: 531580 - DNA, 75 bp, synthetic construct
  source 1..75: mol_type = other DNA
cgtcttttacaaaaatcgggatcggtgcggcggctgtctggggcgtggcacagtccatcgcgggcgtggtggggc

SEQ ID NO: 531581 - DNA, 75 bp, synthetic construct
  source 1..75: mol_type = other DNA
ccaccatggtgggcgggcgtggcgaaatcaaaaaagatgtggatttcccggaagccggtgaggacacggcgctct

SEQ ID NO: 531582 - DNA, 75 bp, synthetic construct
  source 1..75: mol_type = other DNA
ttaagggcaaggatagagcagttagagcaagagcgcccgatacacttatataaatactgggataaagacccatta

SEQ ID NO: 531583 - DNA, 75 bp, synthetic construct
  source 1..75: mol_type = other DNA
caccgatcgttgccgatagtgatcatgctgaggcaaatgcagtgagctatgaatcactgactccgacagaactcg

SEQ ID NO: 531584 - DNA, 75 bp, synthetic construct
  source 1..75: mol_type = other DNA
gtctggcgaccgggacagaccagcctgtgggggctggcactcagcctgcccgcagacaccggctacccggacccg

SEQ ID NO: 531585 - DNA, 75 bp, synthetic construct
  source 1..75: mol_type = other DNA
ggtcacggaggatcaaaatttggcgataaaatgattataccagaaggcgtatcgataacgatgccgagagatggt

SEQ ID NO: 531586 - DNA, 75 bp, synthetic construct
  source 1..75: mol_type = other DNA
aaagctcggcgcgttgctgggaaaaacaggtaagtcgttaaaaagtattgccaataaagtcatcagatgggtaac

SEQ ID NO: 531587 - DNA, 75 bp, synthetic construct
  source 1..75: mol_type = other DNA
tcacgacctgccggtgaagatgcgcggccccggcggtcagtcagtgcggttacggtggcagcagcaccataaact

SEQ ID NO: 531588 - DNA, 75 bp, synthetic construct
  source 1..75: mol_type = other DNA
cgaagctgtaagtttggctagtgctcaaggtataaagtatgaagaaatgatgaatgttggcggctgggaactagt

SEQ ID NO: 531589 - DNA, 75 bp, synthetic construct
  source 1..75: mol_type = other DNA
ggtgacagcctcaggcaccgggctgggctatggcgaaggcgatgagtcctatggctatgacagctgcggctacct

SEQ ID NO: 531590 - DNA, 75 bp, synthetic construct
  source 1..75: mol_type = other DNA
agcagtggggggcaagtaatgctcttgcaacgctcatagagaggactgcctgccctattaaccgagacaacagcc

SEQ ID NO: 531591 - DNA, 75 bp, synthetic construct
  source 1..75: mol_type = other DNA
atggacaaattcgacgctaatcgccgcaaattgctggcgcttggtggcgttgcactcggtgccgccatcctgccg

SEQ ID NO: 531592 - DNA, 75 bp, synthetic construct
  source 1..75: mol_type = other DNA
gtggccccgcagtgggtgacgcggacgaatcatgcggtgagcgacctgacgggccgtccgctgatgctctttaac

SEQ ID NO: 531593 - DNA, 75 bp, synthetic construct
  source 1..75: mol_type = other DNA
atctatgattttatcaagtgcgtattccgctctattcgatcacggattggcatcgaagtccgatcagcgattcgc

SEQ ID NO: 531594 - DNA, 75 bp, synthetic construct
  source 1..75: mol_type = other DNA
gaggataatttccatattactgaaatgccaatgagtcaggagcccttcttcatcattgccttcggttatgtgaaa

SEQ ID NO: 531595 - DNA, 75 bp, synthetic construct
  source 1..75: mol_type = other DNA
atgctcacacacatgttcaagatttccatgccttatccgttcataggcattcacatgaacttctcgatcgaattg

SEQ ID NO: 531596 - DNA, 75 bp, synthetic construct
  source 1..75: mol_type = other DNA
gaggaaaccacatggggcgggctgctcccccagggaaagatcatcaaaagttcactttttgcactaaataattcg

SEQ ID NO: 531597 - DNA, 75 bp, synthetic construct
  source 1..75: mol_type = other DNA
gccggactggcgcttctggctgtgggggtctggtatgtcgtcacccactgggaagaactggcggcagcgatcatg

SEQ ID NO: 531598 - DNA, 75 bp, synthetic construct
  source 1..75: mol_type = other DNA
ccggcgaagccatgcgattcagtatgcgctacggcaaaggggccgttgatgtggtccggtcaagctacgcgatga

SEQ ID NO: 531599 - DNA, 75 bp, synthetic construct
  source 1..75: mol_type = other DNA
agcgcggatctgggaagtgacggacagaaaggtcaggacctggattggggaagcggttgctgccgctgatggtgt

SEQ ID NO: 531600 - DNA, 75 bp, synthetic construct
  source 1..75: mol_type = other DNA
ggaaaaagcagtaccactggcgaaggcctgggggaacgctgttatcaccctgacggacagcaatgccggttttat

SEQ ID NO: 531601 - DNA, 75 bp, synthetic construct
  source 1..75: mol_type = other DNA
ggatgaaattgtgtaagagcatgaaggatgagcgcagttgcttaatggaacttgcccttaaaggtaacgtgacca

SEQ ID NO: 531602 - DNA, 75 bp, synthetic construct
  source 1..75: mol_type = other DNA
tctctggcccgcttttcattatcggctcgatctggtgcaatttcagcgtcctgcctgggacggctatctacgcgt

SEQ ID NO: 531603 - DNA, 75 bp, synthetic construct
  source 1..75: mol_type = other DNA
aaccggggttttgcctgtgagcagggctggaatgcagccagccagcttgtcacccagcgcgccggatttttcccg

SEQ ID NO: 531604 - DNA, 75 bp, synthetic construct
  source 1..75: mol_type = other DNA
gcggagggctattacaacgccacgctggactatggtgacggctgcaccaccgtgacggacggcaagggcactcac

SEQ ID NO: 531605 - DNA, 75 bp, synthetic construct
  source 1..75: mol_type = other DNA
ctgacagaagtcattaacccgcagggtgaatcatatctttatgttctggataactgcggccgggtgacggaagag

SEQ ID NO: 531606 - DNA, 75 bp, synthetic construct
  source 1..75: mol_type = other DNA
attaagactatcacttatttaagtgatattggttgtctggagattcagggggccagtctagaagatgcccgatta

SEQ ID NO: 531607 - DNA, 75 bp, synthetic construct
  source 1..75: mol_type = other DNA
tagaactataaaagaacaaagtcagcaaaatggtgctgctaaaataacttgctgcggtgttgagttaagtaaaga

SEQ ID NO: 531608 - DNA, 75 bp, synthetic construct
  source 1..75: mol_type = other DNA
gacattgagaataatatatataatttattaaagctgcaaattcaaaaagatgaagggtatttacctgttcatgaa

SEQ ID NO: 531609 - DNA, 75 bp, synthetic construct
  source 1..75: mol_type = other DNA
acggggctggcgaccaccggtaagggtattcaggtggttgaggccattaacggtgccaccacggaggaaggggct

SEQ ID NO: 531610 - DNA, 75 bp, synthetic construct
  source 1..75: mol_type = other DNA
aaatgattttgccaccaggggaaatcaagaagcgataaccagggagcttaagcagtggggggcaagtaatgcact

SEQ ID NO: 531611 - DNA, 75 bp, synthetic construct
  source 1..75: mol_type = other DNA
ccagggcggcaccatcaatatgcgtgttcgccttgatggcagcaatgcctctgaccagctggtgattaatggtgg

SEQ ID NO: 531612 - DNA, 75 bp, synthetic construct
  source 1..75: mol_type = other DNA
cacagcagatgctgttcgttatgaattggccacaggtgaaaaagttggtggtagaggacatgtattgaaagcaca

SEQ ID NO: 531613 - DNA, 75 bp, synthetic construct
  source 1..75: mol_type = other DNA
ctgtcgcgtaaaccggaggtgacatggtacgggtgggacggtgacaggctgacgacgatacagaccggcaccacg

SEQ ID NO: 531614 - DNA, 75 bp, synthetic construct
  source 1..75: mol_type = other DNA
attaaatgccacctctctgatacgttcggaaggctgggactttttagagagtgcattagttagttgggataattt

SEQ ID NO: 531615 - DNA, 75 bp, synthetic construct
  source 1..75: mol_type = other DNA
tcatcaagtcgctttctgaaaagactgccgcgctagagactcactccgctgatacacttttgaggaaaagtattg

SEQ ID NO: 531616 - DNA, 75 bp, synthetic construct
  source 1..75: mol_type = other DNA
aggctggagcgggaactgcgcgcgggagcggtgagtgcggagagtgaggcatggcttgcgcagtgcgggctgacg

SEQ ID NO: 531617 - DNA, 75 bp, synthetic construct
  source 1..75: mol_type = other DNA
gaaagccgccagtggcttgcgcagtgcgggctgacggtggagcggctggcggcacagatagagccggtttatttg

SEQ ID NO: 531618 - DNA, 75 bp, synthetic construct
  source 1..75: mol_type = other DNA
tgacgttctctccctcacagaatggcacatcactggacctgcaggccggactggaagcccgtgtccgggaaaata

SEQ ID NO: 531619 - DNA, 75 bp, synthetic construct
  source 1..75: mol_type = other DNA
gacctggtggtgatcgttgaagatgaaagcggaaacaaaaccgaacaggtctatccggtcaccacactaccgacg

SEQ ID NO: 531620 - DNA, 75 bp, synthetic construct
  source 1..75: mol_type = other DNA
ttgattctgtctcggtatttctgaacgggtcgtactctaagtatgcctggtcggataaggcagattacgccgttt

SEQ ID NO: 531621 - DNA, 75 bp, synthetic construct
  source 1..75: mol_type = other DNA
gtcacaaccagggcaggctgtcggggcaaacctgaataccggtttcacgctatttgattatgtgtcgttcacggt

SEQ ID NO: 531622 - DNA, 75 bp, synthetic construct
  source 1..75: mol_type = other DNA
gcgtattctgttgacgtgactgttaatggtgaacgcgccgggcggacaaatatctttatcagtaatgaagaggaa

SEQ ID NO: 531623 - DNA, 75 bp, synthetic construct
  source 1..75: mol_type = other DNA
gatgatgaaaaaagacgcttatgatgatgtctttgacaagaaaaaacagtgctatgtcctgacccgtaatcccca

SEQ ID NO: 531624 - DNA, 75 bp, synthetic construct
  source 1..75: mol_type = other DNA
acatctcgggtatcgcttccactccttcgcgtattactgtgaaacagaacggatatacagtttattcaaaaatgg

SEQ ID NO: 531625 - DNA, 75 bp, synthetic construct
  source 1..75: mol_type = other DNA
agaactttggagacattgttgtatatggtaaccctgattatcaagggtgttgcctttatcaactttatgatattg

SEQ ID NO: 531626 - DNA, 75 bp, synthetic construct
  source 1..75: mol_type = other DNA
atgagcaatttaacttcttgggactggtggttggtcacctatttcttagcggctggagtagcattcgccttttac

SEQ ID NO: 531627 - DNA, 75 bp, synthetic construct
  source 1..75: mol_type = other DNA
ggccggagtcgcattcgccttttacgtaggtcagttagtcgtaaaactgttgctgattaaatttgctagtcataa

SEQ ID NO: 531628 - DNA, 75 bp, synthetic construct
  source 1..75: mol_type = other DNA
ttatgaagcaagattttcgcatagatttgacagtgcttatttgagtgggtcttactggcatcaggactattggaa

SEQ ID NO: 531629 - DNA, 75 bp, synthetic construct
  source 1..75: mol_type = other DNA
gggcggttgctggcaaagatgggggctgaggtgaaaatatttaacccatccggtctgccgttacccgatgatgcg

SEQ ID NO: 531630 - DNA, 75 bp, synthetic construct
  source 1..75: mol_type = other DNA
atgtttccgcaatcgctgatgaggcagccggacggggtggggggagttttcaggacgaacccgaccccgcccaga

SEQ ID NO: 531631 - DNA, 75 bp, synthetic construct
  source 1..75: mol_type = other DNA
aatttgaagaatacttcggcgggtataattttggtactggcaatgcgtggctggactttaaaaatatgaagttcg

SEQ ID NO: 531632 - DNA, 75 bp, synthetic construct
  source 1..75: mol_type = other DNA
tgtttatcgtgttcagattgtttggtcgtgaatggtcgtttgacctcaaggacaggactcgaacagacaaccacg

SEQ ID NO: 531633 - DNA, 75 bp, synthetic construct
  source 1..75: mol_type = other DNA
gtaatttactcggtaaactattacgtaccgagatttcgattattcgtagttaccgtgccttcttaatgttattgc

SEQ ID NO: 531634 - DNA, 75 bp, synthetic construct
  source 1..75: mol_type = other DNA
acaaaaacgcccgcgccggtggggagcctcggccccggctggaaaatgcctgcggatatccgcttacagctgcgc

SEQ ID NO: 531635 - DNA, 75 bp, synthetic construct
  source 1..75: mol_type = other DNA
ccggctggtatatcgttttatgttatgcgctacccaatgcgttgatcccctcgattaccgtattggggctggcgc

SEQ ID NO: 531636 - DNA, 75 bp, synthetic construct
  source 1..75: mol_type = other DNA
gcaggcggttgcccgccgggtccgtggcatacgggatatcaatgcccaggttacatataataataagagcaatta

SEQ ID NO: 531637 - DNA, 75 bp, synthetic construct
  source 1..75: mol_type = other DNA
tgcgctcatcatccgtgcggataaccccttccgggatgaggtcggttttctccgtcagcctgccgtgacggtcat

SEQ ID NO: 531638 - DNA, 75 bp, synthetic construct
  source 1..75: mol_type = other DNA
ctgttattggcgcacctggtaatgactccaacttattgatagtgttttatgttcagataatgcccgatgactttg

SEQ ID NO: 531639 - DNA, 75 bp, synthetic construct
  source 1..75: mol_type = other DNA
acttagggcaggcttatggcaaagaactgtatgaacgatatcatccggtaagagcggctttaaggagtcttgatt

SEQ ID NO: 531640 - DNA, 75 bp, synthetic construct
  source 1..75: mol_type = other DNA
cttagggcaggcttatggcaaagaactgtatgaacgatatcatccggtaagagcggctttaaggagtcttgatta

SEQ ID NO: 531641 - DNA, 75 bp, synthetic construct
  source 1..75: mol_type = other DNA
atcttccgctcaaaatgcaggtagcgaaggtggtaaaaaatgcgccgggagaagcagaagattgtcccgcgatgt

SEQ ID NO: 531642 - DNA, 75 bp, synthetic construct
  source 1..75: mol_type = other DNA
ttcagataaggcatctattgacgaagccgtcgccattgcgttgaaaactggggcatcgtccgtacgtttttatcc

SEQ ID NO: 531643 - DNA, 75 bp, synthetic construct
  source 1..75: mol_type = other DNA
aaaatggtgtcgttacaaatcttgttgtatggggtggtaagtcagagtttaagccagaaaaagcggatatagtta

SEQ ID NO: 531644 - DNA, 75 bp, synthetic construct
  source 1..75: mol_type = other DNA
ggttacccctgaatgtttcgccattttggcctcagccgtggactgactttgtcggtccgataagcgcacagcttg

SEQ ID NO: 531645 - DNA, 75 bp, synthetic construct
  source 1..75: mol_type = other DNA
cacagggcacggtttcagacacaccatgagtacaattctgcatgaacaaggctttaattccgcctggattgaaat

SEQ ID NO: 531646 - DNA, 75 bp, synthetic construct
  source 1..75: mol_type = other DNA
ctacccggtgcctgttcggcgctcaacgacgacagcgccgccagtatgagagaaaaagttatcgacgctcacgcc

SEQ ID NO: 531647 - DNA, 75 bp, synthetic construct
  source 1..75: mol_type = other DNA
agcgtcacgcgcagcgggtatgacgcggcaggaaggctcacggcgcagacggacgcggcgggacggcggacagag

SEQ ID NO: 531648 - DNA, 75 bp, synthetic construct
  source 1..75: mol_type = other DNA
accctactattgccagaggactatcggatttatggaccagaggttgtcgcgttatctttctttgcagttgcgcca

SEQ ID NO: 531649 - DNA, 75 bp, synthetic construct
  source 1..75: mol_type = other DNA
atcaccttggcggttccatggcacccgttcagttcattccagatgatatatcaccttattatattgaatttgagg

SEQ ID NO: 531650 - DNA, 75 bp, synthetic construct
  source 1..75: mol_type = other DNA
ttaagtgcattaattcaacgtgctgaagagtacattgaagataattacccgaatgcctatccggcaagatttttt

SEQ ID NO: 531651 - DNA, 75 bp, synthetic construct
  source 1..75: mol_type = other DNA
gatttacaccccggacgcggctatccgattggcgcagcgttcttctccgttggtcgtttttacccggcactggtc

SEQ ID NO: 531652 - DNA, 75 bp, synthetic construct
  source 1..75: mol_type = other DNA
ctggtgaatcgtggctattcaggcgtgggagattatgaacgcattgaggccgactggcagcgcctgcacaccctc

SEQ ID NO: 531653 - DNA, 75 bp, synthetic construct
  source 1..75: mol_type = other DNA
agtctgtatggctacattctggatttaaatccggggattattggctacaaaatcgtgtttggcattatggcctgc

SEQ ID NO: 531654 - DNA, 75 bp, synthetic construct
  source 1..75: mol_type = other DNA
ccgatgtctttttaccccggctgaaggtacagcgactggacagcatcagtgtgaaaacgccccttgtgttggcgc

SEQ ID NO: 531655 - DNA, 75 bp, synthetic construct
  source 1..75: mol_type = other DNA
gacgcgctatgttatatcgcggagcatgacgatgcgttggcgtttgcgcgtatgaatcgccagatgattgctttg

SEQ ID NO: 531656 - DNA, 75 bp, synthetic construct
  source 1..75: mol_type = other DNA
tactcatggcttgtacagcctgtcagtagcgaagaaacattgcactcgctggctcatggggcagggcgcaaatgg

SEQ ID NO: 531657 - DNA, 75 bp, synthetic construct
  source 1..75: mol_type = other DNA
agaactagccgatatcattagattggctgattctgttgaaaatcaattgaatggaggcaattcatttcttgatgt

SEQ ID NO: 531658 - DNA, 75 bp, synthetic construct
  source 1..75: mol_type = other DNA
cagttttagagagcgcattgtctggcgcttttagaactactggcactatcgcagggttctctggaggaggcgtta

SEQ ID NO: 531659 - DNA, 75 bp, synthetic construct
  source 1..75: mol_type = other DNA
actggcaaaaagctaatgatctgtcaaaggcaagatttacagcacaagaacaggctgaagcagcgtttggtagag

SEQ ID NO: 531660 - DNA, 75 bp, synthetic construct
  source 1..75: mol_type = other DNA
atcatagaacattctccctctgtgccttgtggagatgaatttaacgccttgcaagaaatcttatcttcaacacct

SEQ ID NO: 531661 - DNA, 75 bp, synthetic construct
  source 1..75: mol_type = other DNA
tctgtccgggaatgacttcatgcgagcagaagaagaatctcaaagagtggttgagtcattcagagatagccttag

SEQ ID NO: 531662 - DNA, 75 bp, synthetic construct
  source 1..75: mol_type = other DNA
ttaacactagcacatttataaatagtggaaattgtaatgaaagaaaatcttctaaatccatggagttactagctt

SEQ ID NO: 531663 - DNA, 75 bp, synthetic construct
  source 1..75: mol_type = other DNA
ataaaattgtaggcctgtcctggttagtcctgctcggcattgcatgctggggcggtttagttcgctacctgatcg

SEQ ID NO: 531664 - DNA, 75 bp, synthetic construct
  source 1..75: mol_type = other DNA
gggcggggaacggcaaccccgcagcagtatactaattatcgtcttaacgttcctgccgggacaacacagatcggt

SEQ ID NO: 531665 - DNA, 75 bp, synthetic construct
  source 1..75: mol_type = other DNA
atggccgaacttaacccgcctttgggaacgacgacgcctgaaatattcctggataacgtcaagcgcgctgacgaa

SEQ ID NO: 531666 - DNA, 75 bp, synthetic construct
  source 1..75: mol_type = other DNA
ggcaggcgatacagaaggagcacgtcgcattgctcagatgctgtcttctggtgatcaatccactcaaaaccaatc

SEQ ID NO: 531667 - DNA, 75 bp, synthetic construct
  source 1..75: mol_type = other DNA
tgacagcattaaggaacgctgatgcggcaggcgatacagaaggagcacgtcgcattgctcagatgctgtcttctg

SEQ ID NO: 531668 - DNA, 75 bp, synthetic construct
  source 1..75: mol_type = other DNA
aagtggtcagtttctttaaagccggtagtcatatatctttttctaaggatgatatatattttattgttaaaatag

SEQ ID NO: 531669 - DNA, 75 bp, synthetic construct
  source 1..75: mol_type = other DNA
gaaaagagtatatcgttgatagctctgatttacgcaaataccagattttaggatttgaagattataatcactacg

SEQ ID NO: 531670 - DNA, 75 bp, synthetic construct
  source 1..75: mol_type = other DNA
gcaacacctggcaaccacggatggaaaaatttcgcctcggacaaacgcccgcgctgacctttgcgccacgagaaa

SEQ ID NO: 531671 - DNA, 75 bp, synthetic construct
  source 1..75: mol_type = other DNA
cttctgccgccgttatgagcagcttatggcatttgctgatacccatccggaaagcgccactatctggcgtgccct

SEQ ID NO: 531672 - DNA, 75 bp, synthetic construct
  source 1..75: mol_type = other DNA
atgccgttcgtcttgagggggcgcaacgcctgactttcctgcctgatttgtttggcggcgattttatgacgtccg

SEQ ID NO: 531673 - DNA, 75 bp, synthetic construct
  source 1..75: mol_type = other DNA
gcccggatgtgatgggagcgagaatgtgggggcacatggacgacacgataaccgttgactccacgacctttaatc

SEQ ID NO: 531674 - DNA, 75 bp, synthetic construct
  source 1..75: mol_type = other DNA
tatatgtccgtggatattagcaaaggcaccagtaaaagccttgcatcggcagacctgggatatttaacctgccag

SEQ ID NO: 531675 - DNA, 75 bp, synthetic construct
  source 1..75: mol_type = other DNA
cggtagtggctaaaacctcggcgaaaaatactaccgttgatgctggcggtaagctgattgtccagaaggaggcta

SEQ ID NO: 531676 - DNA, 75 bp, synthetic construct
  source 1..75: mol_type = other DNA
tgctgaaatgtatgtttttaccagaggaccaagaggagctgataaagggtatgaaaggaaaatatttaatgatgc

SEQ ID NO: 531677 - DNA, 75 bp, synthetic construct
  source 1..75: mol_type = other DNA
ttatggaaacgattgttctacgctcctggacagaggcgacgctactttgaacaaggagagcgttcatttagtatt

SEQ ID NO: 531678 - DNA, 75 bp, synthetic construct
  source 1..75: mol_type = other DNA
aaccatttatctgtctattacactgaaccccaataacaaaaatcatatttttttataccataaaaagaattatat

SEQ ID NO: 531679 - DNA, 75 bp, synthetic construct
  source 1..75: mol_type = other DNA
gaagatctaaaaggatttgaacgtttaatcataaactcctccagcgatgtaatcaaaagactagaatatagaaag

SEQ ID NO: 531680 - DNA, 75 bp, synthetic construct
  source 1..75: mol_type = other DNA
aaaaatgctcctaaatcaggctctaatacccgtaatggctactcgtcaaaacggtattgtgcgatgatggcgaga

SEQ ID NO: 531681 - DNA, 75 bp, synthetic construct
  source 1..75: mol_type = other DNA
agtggcggcgagccgcgtcagttagaaaacccatacattcgtactgaagacgtcagtgccgtgattgattacctg

SEQ ID NO: 531682 - DNA, 75 bp, synthetic construct
  source 1..75: mol_type = other DNA
taggctccctaaattttaaaatgcgtgcaatggctgtactgcggcactcttttgctggcagggaaaactacatta

SEQ ID NO: 531683 - DNA, 75 bp, synthetic construct
  source 1..75: mol_type = other DNA
cgaaaaaaaattaattcatgaaaagctctcatacattataaaaagtttcaatgtgaaaaaagcaatttttattta

SEQ ID NO: 531684 - DNA, 75 bp, synthetic construct
  source 1..75: mol_type = other DNA
attggtgatgagtattatcttacctggattgagaataaaattccggctctggaccatttaacgcctttggattgc

SEQ ID NO: 531685 - DNA, 75 bp, synthetic construct
  source 1..75: mol_type = other DNA
cgggttatcaacaaatcggtgttcctggcactgggcatcaatatcgaaggtcagaaagaactgctgggtatgtgg

SEQ ID NO: 531686 - DNA, 75 bp, synthetic construct
  source 1..75: mol_type = other DNA
cgtatcgctgccggttgcggtatgcaggtgcaggacgttaaccgtcttctgaagcagttcgacgacatgcagcgc

SEQ ID NO: 531687 - DNA, 75 bp, synthetic construct
  source 1..75: mol_type = other DNA
aacgacagtgatattttgatatccgaccatctcattgagcgcattaactgtaccaacggcaaaatcaactggggc

SEQ ID NO: 531688 - DNA, 75 bp, synthetic construct
  source 1..75: mol_type = other DNA
attaacgacaagaatatcctcatctccgatcatgtgattgaccatatcgattgcaccaatggcaagaccaactgg

SEQ ID NO: 531689 - DNA, 75 bp, synthetic construct
  source 1..75: mol_type = other DNA
atctggtttaccagtgaaggagtgatgttgaaacggataatctggattctgttcttactgggattaacgtggggc

SEQ ID NO: 531690 - DNA, 75 bp, synthetic construct
  source 1..75: mol_type = other DNA
atttggtggttcacaaaccgggaaaaatgaacgcagcacgcttgtaatcatcattaccccgactttcccgtcagg

SEQ ID NO: 531691 - DNA, 75 bp, synthetic construct
  source 1..75: mol_type = other DNA
ccctgctgcctttaattcagaaaacgggcaatctccagttgcagatgaattttaatctgtcagatcccccaacaa

SEQ ID NO: 531692 - DNA, 75 bp, synthetic construct
  source 1..75: mol_type = other DNA
cacttattggtttcagagaatatgtcttcagtctgggtgaaatggcctgttaaaagcctacaaccgaggaaagaa

SEQ ID NO: 531693 - DNA, 75 bp, synthetic construct
  source 1..75: mol_type = other DNA
gaatgcccctgttctgcttattggtgcagccatcgcagtagttatcgcgcttatttacaaattctgggaacccat

SEQ ID NO: 531694 - DNA, 75 bp, synthetic construct
  source 1..75: mol_type = other DNA
tgaaatcggcagtcgtttattacctgtactctatccctttattaacagcagcaatgaagccggtaaaaactttgt

SEQ ID NO: 531695 - DNA, 75 bp, synthetic construct
  source 1..75: mol_type = other DNA
aatcggctatggggtaattaaaggcaaatatctctcgataccgcagaatttccgggtgaatgatattcaactgga

SEQ ID NO: 531696 - DNA, 75 bp, synthetic construct
  source 1..75: mol_type = other DNA
cattgaggctgcggatgctcagctatcccagggggcgcaggccgtatatgacacgctgttcgccagcgcccatcc

SEQ ID NO: 531697 - DNA, 75 bp, synthetic construct
  source 1..75: mol_type = other DNA
tcttacaaatgtgactctgttagctctttcatacccatggtttcatctaatggatttacgctcgcatgtaataaa

SEQ ID NO: 531698 - DNA, 75 bp, synthetic construct
  source 1..75: mol_type = other DNA
atgatagtcattgaggatttaaaggtttcgaacatgtcaaaatcagcagcgggtacggtagaccagccggggcgc

SEQ ID NO: 531699 - DNA, 75 bp, synthetic construct
  source 1..75: mol_type = other DNA
ctgtacacagtaaatgaatttaaagagatagaattttattgtgacccatttcagaatgaatatgattttgacgtt

SEQ ID NO: 531700 - DNA, 75 bp, synthetic construct
  source 1..75: mol_type = other DNA
aagagctgggtatcgtgatgctggctaacaaaaactatcccaatccagcgagagtcgccgccgcctggcagattc

SEQ ID NO: 531701 - DNA, 75 bp, synthetic construct
  source 1..75: mol_type = other DNA
tgaaacgcccacccaccttatcgatgtgaacggcctcgggctcgataagattgaagtgaccgacgcgggtgggct

SEQ ID NO: 531702 - DNA, 75 bp, synthetic construct
  source 1..75: mol_type = other DNA
caccaaaggcgggttacgccgtcgcgatcttcccgccgatccattaaccctttttgaacgttggctctctcaggc

SEQ ID NO: 531703 - DNA, 75 bp, synthetic construct
  source 1..75: mol_type = other DNA
aattccttgaactgaagcaaaagtttcaacaaggggaagttccgctgccgagtttctggggcggttttcgcgtta

SEQ ID NO: 531704 - DNA, 75 bp, synthetic construct
  source 1..75: mol_type = other DNA
cgcgcgatagccagattggcgcgtgggtatctaagcagtccagccgtatctctgcgcgagggatccttgagagca

SEQ ID NO: 531705 - DNA, 75 bp, synthetic construct
  source 1..75: mol_type = other DNA
tagaccagccggggcgcaacgtcgcggcaaaatcaggtcttaaccgggcgatactggatcagggctgggcagaaa

SEQ ID NO: 531706 - DNA, 75 bp, synthetic construct
  source 1..75: mol_type = other DNA
ccgttagccacgctaattacgccatcttacgccagggatttcataaccagattatcggtgccaacatcaccaact

SEQ ID NO: 531707 - DNA, 75 bp, synthetic construct
  source 1..75: mol_type = other DNA
taatattgagatgaagcgtgcctcgctggagttacacaacaagccgcaacatctttttatgcgtaatatcaatgt

SEQ ID NO: 531708 - DNA, 75 bp, synthetic construct
  source 1..75: mol_type = other DNA
aggggctgtacacggaaggcggggggggcctgaagcgtgtggtgaagaaggagcatgccgacgggagcatcaccc

SEQ ID NO: 531709 - DNA, 75 bp, synthetic construct
  source 1..75: mol_type = other DNA
agtgatactgccggacggtacggtatggttacaacaaccagttgcaactgacgtcagtgacgtacccggacgggc

SEQ ID NO: 531710 - DNA, 75 bp, synthetic construct
  source 1..75: mol_type = other DNA
cgcgcaggtggtgtaggatattatccacgtagtaactttgtgcatattgataccgggccagcacggcactggtag

SEQ ID NO: 531711 - DNA, 75 bp, synthetic construct
  source 1..75: mol_type = other DNA
gtgattatgaactcctttccgcagcgactgagcctcactggcgtcacttccatcaaggtttccgtcgtaagcttc

SEQ ID NO: 531712 - DNA, 75 bp, synthetic construct
  source 1..75: mol_type = other DNA
tggttcatctaatgacatgcaaaaattaaatgagctaatattttcagagccagatagcacattaacagtgacgga

SEQ ID NO: 531713 - DNA, 75 bp, synthetic construct
  source 1..75: mol_type = other DNA
tgcgaccatcgcggcctgccgctggtgcttatcagcacggaaggggcaacagaatggtgcgcagaatacgatgag

SEQ ID NO: 531714 - DNA, 75 bp, synthetic construct
  source 1..75: mol_type = other DNA
cccggtcgtctaaaaaacatacattatctgttcaggagtatacagacggttgacggaagttgttcaatcagtgaa

SEQ ID NO: 531715 - DNA, 75 bp, synthetic construct
  source 1..75: mol_type = other DNA
atttgcgcgtctttatgctggtggctcgccgggctggttttgccgccgtggcggaagaactgggcgtttctccag

SEQ ID NO: 531716 - DNA, 75 bp, synthetic construct
  source 1..75: mol_type = other DNA
actcgcaagccggtacagttaatttctggttaccgttctatcgacaccaataatgaattacgcgcacacagccgt

SEQ ID NO: 531717 - DNA, 75 bp, synthetic construct
  source 1..75: mol_type = other DNA
acttttacgctcggatgcaaaaaattgaccctacacaagcggtaaccagcggcgtggtaaaagcgagcgtatttg

SEQ ID NO: 531718 - DNA, 75 bp, synthetic construct
  source 1..75: mol_type = other DNA
atgtgctcgacacgcgtggtcaaccgcaaagtatctaccccgtgacgcccgaaacgatcgctaacgcgacatacc

SEQ ID NO: 531719 - DNA, 75 bp, synthetic construct
  source 1..75: mol_type = other DNA
attgctaccatttaaccctaactctaataatgtttttaacatcccatccttacaaccagaaactaaaaaaacgtc

SEQ ID NO: 531720 - DNA, 75 bp, synthetic construct
  source 1..75: mol_type = other DNA
ttataaagagctttttattgttacttgtgtgtttcccgcatttgcggttctctccatgttggtatatgcattctt

SEQ ID NO: 531721 - DNA, 75 bp, synthetic construct
  source 1..75: mol_type = other DNA
tgcgacaagctttaattgtaaataatcaagctgaaaaagcggaagaaatatatgacttccctttatcacttgaat

SEQ ID NO: 531722 - DNA, 75 bp, synthetic construct
  source 1..75: mol_type = other DNA
atatgttttcctcgcgcctggtgctgaaggttttgatgatttagcagatattattggaatcgatgcaatccatat

SEQ ID NO: 531723 - DNA, 75 bp, synthetic construct
  source 1..75: mol_type = other DNA
agtaaaacgtcaggtactgccggtggttgaattcagggtcccgtttaaattaactcgtcaggcaattgatgatgt

SEQ ID NO: 531724 - DNA, 75 bp, synthetic construct
  source 1..75: mol_type = other DNA
tactcatcataatgcacttgatcaggacatgtttttaagaatatctccggaactgtatttgaaaagactggttgt

SEQ ID NO: 531725 - DNA, 75 bp, synthetic construct
  source 1..75: mol_type = other DNA
gtgaatgtcaccggggcggagggctattacaacgccacgctggactatggtgacggctgcaccaccgtgacggac

SEQ ID NO: 531726 - DNA, 75 bp, synthetic construct
  source 1..75: mol_type = other DNA
ttcttaaaaagatctttcatagaaaatgaaaataaaataaagatctccaacaaagaaataacattaacaaacttt

SEQ ID NO: 531727 - DNA, 75 bp, synthetic construct
  source 1..75: mol_type = other DNA
taggtcgtgatccggttgctcctgatgccaaattgatggccgaaaacattactggcaaagccgttatggtcactg

SEQ ID NO: 531728 - DNA, 75 bp, synthetic construct
  source 1..75: mol_type = other DNA
gggagcgtttcgaacggcaacgaataactattgaatttagtgaagagtttaagcaaatcgcaataacagatatac

SEQ ID NO: 531729 - DNA, 75 bp, synthetic construct
  source 1..75: mol_type = other DNA
atggtgtttcaggtgtacgggaaatggatgtcagaaaataataatgcgcaggtaacgctgttaaatacacagtta

SEQ ID NO: 531730 - DNA, 75 bp, synthetic construct
  source 1..75: mol_type = other DNA
ggtctttccccgcttcaacgcgcccgcactatcattgataattgtgcacatcctatgtatcgggattatctgcat

SEQ ID NO: 531731 - DNA, 75 bp, synthetic construct
  source 1..75: mol_type = other DNA
aaggtaacgcgcggcaagaaacgtaaggacgggcaaggcaactcaccgaaccgcatcaagctgagctttaagccg

SEQ ID NO: 531732 - DNA, 75 bp, synthetic construct
  source 1..75: mol_type = other DNA
ggcgtagtacctggtttccatatggcccgatcaacgttcgatatcaagattaacgagcttgaacagtggggatta

SEQ ID NO: 531733 - DNA, 75 bp, synthetic construct
  source 1..75: mol_type = other DNA
acatatgcagtatatataaaaacactaacaactacaggacttttcagtaatgctttgcttgttttaatgttgttg

SEQ ID NO: 531734 - DNA, 75 bp, synthetic construct
  source 1..75: mol_type = other DNA
cccccaggttagcagaagaaatttgcttgctgatactggagggtagatcgctactagcaataagtaagatgcctg

SEQ ID NO: 531735 - DNA, 75 bp, synthetic construct
  source 1..75: mol_type = other DNA
cccccagattagccgaagatatttgtttgctgatcctggagggtagatcgctactagcaataagtaagatgcctg

SEQ ID NO: 531736 - DNA, 75 bp, synthetic construct
  source 1..75: mol_type = other DNA
gctaaggaaccagctgctgtgaagttgaccaaagcggctcaaaaaaaacttgagtttattgcgcatgtagagaag

SEQ ID NO: 531737 - DNA, 75 bp, synthetic construct
  source 1..75: mol_type = other DNA
taccagtatatatgatgatgtagggggaaacggtctgcctgataagtctcatattatgaactcagggcagatacc

SEQ ID NO: 531738 - DNA, 75 bp, synthetic construct
  source 1..75: mol_type = other DNA
attattgctgacaccggtgaattacatctgcaggaagataaaacagaacgctggaatgtgtctttaccagtgagt

SEQ ID NO: 531739 - DNA, 75 bp, synthetic construct
  source 1..75: mol_type = other DNA
tgcagaagatgttcagtggcgaaggccccggctggctgcagacaatgaccatcagtggttattcgggagtgagtc

SEQ ID NO: 531740 - DNA, 75 bp, synthetic construct
  source 1..75: mol_type = other DNA
cagagtagaatcgatgaagctattgaaacactaaaaataatgtgtaacccaaaatatcctttttcagcgttttgg

SEQ ID NO: 531741 - DNA, 75 bp, synthetic construct
  source 1..75: mol_type = other DNA
ttggcaccattacccaaaattgcccgtcgtctggggcgcaatatcgacagcattcctgccgagacgctgcgcatc

SEQ ID NO: 531742 - DNA, 75 bp, synthetic construct
  source 1..75: mol_type = other DNA
tgagggaatgaccgacgtcaatggtcaggcaactctgctgctgacgcagcctgacggcgcaggcgttaaaacgca

SEQ ID NO: 531743 - DNA, 75 bp, synthetic construct
  source 1..75: mol_type = other DNA
acaatccagtactattgatgctaaaaataaaacttcttcctccgcattctcgtccccggagaaaataaaccttag

SEQ ID NO: 531744 - DNA, 75 bp, synthetic construct
  source 1..75: mol_type = other DNA
caaacttgaaattatctgtagatggcagtcacttcgctggaggacaatactggaaaatggtatctgactcaggtg

SEQ ID NO: 531745 - DNA, 75 bp, synthetic construct
  source 1..75: mol_type = other DNA
ctcgcgcgcagtatccaacagcaccgggttacgctactttgcgcagccttaagttacgctactttgcgcagcctt

SEQ ID NO: 531746 - DNA, 75 bp, synthetic construct
  source 1..75: mol_type = other DNA
agcagtacggggtcggaccggtatgcagtgaacagcatattgccccgccaacgtattaccattgtcagcagcagc

SEQ ID NO: 531747 - DNA, 75 bp, synthetic construct
  source 1..75: mol_type = other DNA
gtacagaaagacggacggcgagtggagtttacgaccacttccgtgtctgacctgaaaaatacattgctgagctgg

SEQ ID NO: 531748 - DNA, 75 bp, synthetic construct
  source 1..75: mol_type = other DNA
gcgtatctggacaagcggaaaggcttaccgccagtcaaacaacagaagcacaaagctgatgacttgctggaatgg

SEQ ID NO: 531749 - DNA, 75 bp, synthetic construct
  source 1..75: mol_type = other DNA
acaccttctaataccactagaagtgtttgcaaaaagcgtgaaatcatttatcgataacacgatacctgacgaaaa

SEQ ID NO: 531750 - DNA, 75 bp, synthetic construct
  source 1..75: mol_type = other DNA
atatcaaagttcagattgattgatatatttttgattattacatcattaataatttatttagcattcggtaacggc

SEQ ID NO: 531751 - DNA, 75 bp, synthetic construct
  source 1..75: mol_type = other DNA
tctgcgattgaacaaagcctccaggcgaaaacgtcagtattaccggcgaatcgattacgccatctgcaatcctcg

SEQ ID NO: 531752 - DNA, 75 bp, synthetic construct
  source 1..75: mol_type = other DNA
aacgctggagcagttcgattttaccttccagccgggcatcgaccgtaaggttgtccgggaactggctggtctggc

SEQ ID NO: 531753 - DNA, 75 bp, synthetic construct
  source 1..75: mol_type = other DNA
ttaacgatgtaataatgaaactcctagaaaaagtgcttaatgaaggagttcgtatttcgacaaggaatggggatg

SEQ ID NO: 531754 - DNA, 75 bp, synthetic construct
  source 1..75: mol_type = other DNA
ctggcgtcgttacgatccacccgtggtgggaaagtcaccagtaacgtgattggcagcgccattctcgtcaggcgc

SEQ ID NO: 531755 - DNA, 75 bp, synthetic construct
  source 1..75: mol_type = other DNA
actgcccgccaaatgagcgtgctgggggagatgacctccggttttgcccatgaactcaatcagccgttgtctgct

SEQ ID NO: 531756 - DNA, 75 bp, synthetic construct
  source 1..75: mol_type = other DNA
gtcgccagaacaacaaaaatcttttaaatttcttgcatcattactggaagaacagtatggcggtaacattgctat

SEQ ID NO: 531757 - DNA, 75 bp, synthetic construct
  source 1..75: mol_type = other DNA
aatcgttcggcgctgcaacaagcgatagtcgctgttctggctgacggaggagcctggtttgcacaacaaatcagc

SEQ ID NO: 531758 - DNA, 75 bp, synthetic construct
  source 1..75: mol_type = other DNA
cgataccgaaaggatgctggcgctggcggaaaatatgctcgaccgctacggcatcatcagtcgtcaggcggtgat

SEQ ID NO: 531759 - DNA, 75 bp, synthetic construct
  source 1..75: mol_type = other DNA
tgtatctgtttttctgaacggtagttacagtaagcgtccatatctggacaaggcagattatagtacatcgctttc

SEQ ID NO: 531760 - DNA, 75 bp, synthetic construct
  source 1..75: mol_type = other DNA
gcctctattacaaccgccaccgctattatgacccgctgcaggggcggtatatcactcaggatccgattgggctta

SEQ ID NO: 531761 - DNA, 75 bp, synthetic construct
  source 1..75: mol_type = other DNA
gaactttcacatatagaaacccagatcgtcagcacactgaaggagatgcttaacacacatagtggagatatagat

SEQ ID NO: 531762 - DNA, 75 bp, synthetic construct
  source 1..75: mol_type = other DNA
agcctgtctggaagaaccgcccacaataaccattaactttgaagaagaagccaccactgtaacgctatatattgc

SEQ ID NO: 531763 - DNA, 75 bp, synthetic construct
  source 1..75: mol_type = other DNA
ccgaatgatgccggaggttatttcatcgttaagcaattccctattgtcaaaccgaccggaagagtcacatcactt

SEQ ID NO: 531764 - DNA, 75 bp, synthetic construct
  source 1..75: mol_type = other DNA
aggtctgggatgagaagggggagcctgataaaaaatctggcaatgatcacccgaatgatgccggaggttatttca

SEQ ID NO: 531765 - DNA, 75 bp, synthetic construct
  source 1..75: mol_type = other DNA
cgcccgtgacgcgcactatctttaccggtatgaccgtcacggcaggctgacagagaaaaccgacctcatcccgga

SEQ ID NO: 531766 - DNA, 75 bp, synthetic construct
  source 1..75: mol_type = other DNA
atcgcgaactgaaacacaacgcaccagcggggatgatggtcaccagcggtgagcaccacggcacactgcaatctt

SEQ ID NO: 531767 - DNA, 75 bp, synthetic construct
  source 1..75: mol_type = other DNA
gcaaaagagatgggctttatcggtggcaaaatgccgacgcactgggggccacatgatggcgatgcggggatccgc

SEQ ID NO: 531768 - DNA, 75 bp, synthetic construct
  source 1..75: mol_type = other DNA
atttctttcggctgccatggcatgggccgatactgaagcgaaatttctgatcgttcgcactctgcttggtgctgc

SEQ ID NO: 531769 - DNA, 75 bp, synthetic construct
  source 1..75: mol_type = other DNA
tgcaggtactggtcgtcaacacacactgcgaacgcagactgttttcaacgacagcgcaggcagaccccgacgcgc

SEQ ID NO: 531770 - DNA, 75 bp, synthetic construct
  source 1..75: mol_type = other DNA
acggcagacggtggagaacccggagacgggggaactgctgtggcagcatgagacaacacacgcctacaacgaaca

SEQ ID NO: 531771 - DNA, 75 bp, synthetic construct
  source 1..75: mol_type = other DNA
gtttcggcgtcgaactcaatcgtgactgcaatttgaaacgccccctacagccactaatcactccgggcgttgctg

SEQ ID NO: 531772 - DNA, 75 bp, synthetic construct
  source 1..75: mol_type = other DNA
tctccagtccttcatcatttttttcaatatactcatctgagagatgcatatttttatagatgtaaactcatagaa

SEQ ID NO: 531773 - DNA, 75 bp, synthetic construct
  source 1..75: mol_type = other DNA
atcaatgcagtgtgagtctgacctgtcccttggacgtaggtactccatcgtcacagaggaaaaggtcaacaaaac

SEQ ID NO: 531774 - DNA, 75 bp, synthetic construct
  source 1..75: mol_type = other DNA
ttacatgtgctgaaaggttccgcgctggcgctcgatatatacgcgtggcttgctcaccgtctccaccgcatcgag

SEQ ID NO: 531775 - DNA, 75 bp, synthetic construct
  source 1..75: mol_type = other DNA
ggcattgcgccggatatgcgctatgaactgaaccccaaaacctggacagtttcagttaaccggctttttgatact

SEQ ID NO: 531776 - DNA, 75 bp, synthetic construct
  source 1..75: mol_type = other DNA
atttaggtggtacagaaaccaaagcgggaatttatacggcagaaggacgtgaaataggtgtctcttcgcaagtgt

SEQ ID NO: 531777 - DNA, 75 bp, synthetic construct
  source 1..75: mol_type = other DNA
atggcgcagataacgacgaccgatgccaatgaatttagcagcagtgctgaattcacccctatgcgcggctttagc

SEQ ID NO: 531778 - DNA, 75 bp, synthetic construct
  source 1..75: mol_type = other DNA
gacaggaactcatcgatgacctcaacaaacgcacagacaattttttaacagactcaggtataagcgtttcagatt

SEQ ID NO: 531779 - DNA, 75 bp, synthetic construct
  source 1..75: mol_type = other DNA
gcaatgtcaccacgccatcagaaacggagacggcaggacagggttttgtaccgcctgtcccggccggggcgcagc

SEQ ID NO: 531780 - DNA, 75 bp, synthetic construct
  source 1..75: mol_type = other DNA
cacgatgttttccatggcgttgtggatgacgcttattgtcgcgccggtgcaggcgttaatcggcgatatgcatgg

SEQ ID NO: 531781 - DNA, 75 bp, synthetic construct
  source 1..75: mol_type = other DNA
cgctcgttgtaccacttctggtcaaaaatattcgccgtaaatttcggcatgggcgtggtttccggtctggtgatg

SEQ ID NO: 531782 - DNA, 75 bp, synthetic construct
  source 1..75: mol_type = other DNA
gtgctcgcggtctacccgcaagccaaggttaagaccgttacaggcggcttgcagctcatcgcttcacctccaccg

SEQ ID NO: 531783 - DNA, 75 bp, synthetic construct
  source 1..75: mol_type = other DNA
atttgaaactaacaccaatttactggataaaaatggtaagcctgtggaaataatggtgtgtgatgatcaggaact

SEQ ID NO: 531784 - DNA, 75 bp, synthetic construct
  source 1..75: mol_type = other DNA
ggggccgctgaacagctggctgcgtgcgctgccaatgtgctttgatccggatatggacaggaagcagtggcacac

SEQ ID NO: 531785 - DNA, 75 bp, synthetic construct
  source 1..75: mol_type = other DNA
tggcttggaatggattttgtcgcccgaaacggcaagcctatcctcaacgtcgaagtgatccgcaagaacatggac

SEQ ID NO: 531786 - DNA, 75 bp, synthetic construct
  source 1..75: mol_type = other DNA
tccattgttggcagggaaaataaggactggctggattcacatggttttttctgggcttcagacgggactttcttt

SEQ ID NO: 531787 - DNA, 75 bp, synthetic construct
  source 1..75: mol_type = other DNA
tgactggatgcagcaacatccggaggaagtgaacaggtttatcaccacatttctgaatgacgttgagtcagtggc

SEQ ID NO: 531788 - DNA, 75 bp, synthetic construct
  source 1..75: mol_type = other DNA
taagaccaaacattatacgtttgaaaatttaagaggtgtaatttctctacctgttgtatatttcaaactggaaca

SEQ ID NO: 531789 - DNA, 75 bp, synthetic construct
  source 1..75: mol_type = other DNA
aagtataaggccatgctcatgcaaatatgtcatgaagatggcctgactcaggctgaagttctgaccgcactgata

SEQ ID NO: 531790 - DNA, 75 bp, synthetic construct
  source 1..75: mol_type = other DNA
ctggcttgcgcccggcgcgcagcttgacgcggtggtgggtgaaaccggcaagcattacccgatgaccgtcaccca

SEQ ID NO: 531791 - DNA, 75 bp, synthetic construct
  source 1..75: mol_type = other DNA
gacggccgcgtggcgcgtatttacgtcaaagagggccagggcgtcggcgcaggcgcgcaggttatcgatcttgta

SEQ ID NO: 531792 - DNA, 75 bp, synthetic construct
  source 1..75: mol_type = other DNA
aaagggcgctcaaactacctctgccttgaacgtctcgaacagcaggcgctggcgggggcgatctgccggtacaaa

SEQ ID NO: 531793 - DNA, 75 bp, synthetic construct
  source 1..75: mol_type = other DNA
aaaaggtatggcaacttcgctacaagattgacggcaaggagaaaatactgactgtcggaaaatatccgcttatga

SEQ ID NO: 531794 - DNA, 75 bp, synthetic construct
  source 1..75: mol_type = other DNA
tacatttatgtccctgtatccgggaaaaaggtatggcagattcgctacaagattgacggcaaggagaaaatcctg

SEQ ID NO: 531795 - DNA, 75 bp, synthetic construct
  source 1..75: mol_type = other DNA
ttgtggtaagcatgccttcgcaactcttcactatggctcgttcttttaaagccgtagctaatggaaaaatttata

SEQ ID NO: 531796 - DNA, 75 bp, synthetic construct
  source 1..75: mol_type = other DNA
gctttaataatgtgagcattaatgctgacaccgtattgttattcgatttgcagctgtgcagaaatttccattgtg

SEQ ID NO: 531797 - DNA, 75 bp, synthetic construct
  source 1..75: mol_type = other DNA
tattacaaccgccaccgctattatgacccgctgcaggggcgatatatcactcaggatccgattgggctgaagggg

SEQ ID NO: 531798 - DNA, 75 bp, synthetic construct
  source 1..75: mol_type = other DNA
ataccggaaaggtaaccctgttccggccagagagaggcaaagggcttctctagctcgcagaagcaacactcataa

SEQ ID NO: 531799 - DNA, 75 bp, synthetic construct
  source 1..75: mol_type = other DNA
tcactcactcaggcttttgaattcttgccgggaaaacatcattataaaattaatgccggaagttttatcatcaga

SEQ ID NO: 531800 - DNA, 75 bp, synthetic construct
  source 1..75: mol_type = other DNA
ttatagtttcgatcagtcaatgcgtgaatgtatttgctcaagataatgtcattcgctatccctggcgatatggac

SEQ ID NO: 531801 - DNA, 75 bp, synthetic construct
  source 1..75: mol_type = other DNA
tgggctggaaattggcgctgacgactatgtggctaaaccgttttcacccgcgaagtgtgcgccagggtgcgcacc

SEQ ID NO: 531802 - DNA, 75 bp, synthetic construct
  source 1..75: mol_type = other DNA
tggtgtggtgcaaggaaataatatagtagattttgatttactacgtaattttaatggggtgccagggttaaatcg

SEQ ID NO: 531803 - DNA, 75 bp, synthetic construct
  source 1..75: mol_type = other DNA
ggcatccacggtgcagacatgaatgtattttcacacacataacgcgtaaagagatatatgcaagaggtgcagaaa

SEQ ID NO: 531804 - DNA, 75 bp, synthetic construct
  source 1..75: mol_type = other DNA
gtcacacttcagattggtttacataactttagcgcaaatcactgtttgccaataatcacttcttcaaaagcggct

SEQ ID NO: 531805 - DNA, 75 bp, synthetic construct
  source 1..75: mol_type = other DNA
ggataacgtctcgcccgcctttgcccgcttcctcacccttttcgccttcgccacctgggtttaccggctactgct

SEQ ID NO: 531806 - DNA, 75 bp, synthetic construct
  source 1..75: mol_type = other DNA
acgcctggtttgcaaaccacgatcccgatgtgatcatcggctggaacgtggtgcagttcgatctgcgaatgctgc

SEQ ID NO: 531807 - DNA, 75 bp, synthetic construct
  source 1..75: mol_type = other DNA
gtgaacaaggctttcgcctgacaccgctggcgttaaaggattttcaccgccagccggtgtatggcctttactgtc

SEQ ID NO: 531808 - DNA, 75 bp, synthetic construct
  source 1..75: mol_type = other DNA
cggccatatgggggtggcgctgctggtgatgtggccgatggcctacaccgataccggagagagctggaagctgtc

SEQ ID NO: 531809 - DNA, 75 bp, synthetic construct
  source 1..75: mol_type = other DNA
gaggccgcgctgcacggcgccctgagctggaacggggcgctggccttcgcggtggcgctgatcctctccaaatgc

SEQ ID NO: 531810 - DNA, 75 bp, synthetic construct
  source 1..75: mol_type = other DNA
cgcagagtcacggcggcccggtggcgctgaacccggttgcgcccgccaacgaactccgtcccgccgccgtctggt

SEQ ID NO: 531811 - DNA, 75 bp, synthetic construct
  source 1..75: mol_type = other DNA
agtaacgagttagttttttttctatttggtaaaaattgggataatgctgctcttcttttaaaatggttggcgcct

SEQ ID NO: 531812 - DNA, 75 bp, synthetic construct
  source 1..75: mol_type = other DNA
gcgcttctacggcctcacaacttctcgacgaacaagaagccattaccgttttcgattttaaaaccaagctggagc

SEQ ID NO: 531813 - DNA, 75 bp, synthetic construct
  source 1..75: mol_type = other DNA
tatttagttcatctttcatagaaaaacgtgaactacctttagtaaaaccgaccccagcacagattaacaataacg

SEQ ID NO: 531814 - DNA, 75 bp, synthetic construct
  source 1..75: mol_type = other DNA
acaaaaagtagaggagatgctattaaagatgctcataatgaatggatcggtgagtttagacaaaaactggagttg

SEQ ID NO: 531815 - DNA, 75 bp, synthetic construct
  source 1..75: mol_type = other DNA
aaattggttaatcgtgtccacagcaaaattgtgattgaggatgaagaactgctgtgtgtcggatcttttaactgg

SEQ ID NO: 531816 - DNA, 75 bp, synthetic construct
  source 1..75: mol_type = other DNA
ttatcagacgctgacgacccgccatccctctgcggaatctcgccgttatctttataaagtgaataccgcgcaaaa

SEQ ID NO: 531817 - DNA, 75 bp, synthetic construct
  source 1..75: mol_type = other DNA
gaagttttatattaaaaactatgtccgtaaattatatatatctcaacaatatataaagatattagctagagggat

SEQ ID NO: 531818 - DNA, 75 bp, synthetic construct
  source 1..75: mol_type = other DNA
cctcggcaagcctgagttttacgacgtggtgaccaccgcaacgggcattccggcctggcgcatccatcacagtcg

SEQ ID NO: 531819 - DNA, 75 bp, synthetic construct
  source 1..75: mol_type = other DNA
gtaataagttcaagaaggtactaaagagtaaacagattaatatcgagcattttatgaatgtttgctatgagaaaa

SEQ ID NO: 531820 - DNA, 75 bp, synthetic construct
  source 1..75: mol_type = other DNA
gactttaaccctacgcaggaagatcgtgaccgtgccgaaatgatgtgcagggaacaggagaaaagaatcatggac

SEQ ID NO: 531821 - DNA, 75 bp, synthetic construct
  source 1..75: mol_type = other DNA
gaatttaatccgacacaggaagatcgggaccgcgccgaaatgatgtgccgggaacgggagaaaagaatcatggac

SEQ ID NO: 531822 - DNA, 75 bp, synthetic construct
  source 1..75: mol_type = other DNA
tgaagaatccagagaaagatattcttcctttaaaaaaacggacatttctttaagaagtattattcgtgcagaaaa

SEQ ID NO: 531823 - DNA, 75 bp, synthetic construct
  source 1..75: mol_type = other DNA
acacaatccagtctcaacaagctgggcatcaatgtgaagctggaaaagttgtttgtgccggaacatgtcccggaa

SEQ ID NO: 531824 - DNA, 75 bp, synthetic construct
  source 1..75: mol_type = other DNA
agatgcgcggcccgattccggaaggcatgtggggctacgatgcgacggcaatgcaatacaaccatgacgaaacga

SEQ ID NO: 531825 - DNA, 75 bp, synthetic construct
  source 1..75: mol_type = other DNA
tgcgcgaaatcaaattgaattactcttgaatattgaagatggaaatgaaatcaattccgacaagaccaatgttga

SEQ ID NO: 531826 - DNA, 75 bp, synthetic construct
  source 1..75: mol_type = other DNA
ccagataaaccgcgacgttgttcgcgtattggtattgaggctttaggtatagttaaacattgcatgccagatgtt

SEQ ID NO: 531827 - DNA, 75 bp, synthetic construct
  source 1..75: mol_type = other DNA
agtatccgtcactgcgcgtcacctatctgtatctgaataacagcaaagcgccacttaatcaggcggatctgcgtc

SEQ ID NO: 531828 - DNA, 75 bp, synthetic construct
  source 1..75: mol_type = other DNA
cacgtggtttcctcgcgcaaaataccgctggctccggaccgtttatgctgaaaagctggcaaaaaggtcagcaat

SEQ ID NO: 531829 - DNA, 75 bp, synthetic construct
  source 1..75: mol_type = other DNA
ctccgctgtataagctgaagaaaagctacaaaattcttgttcgcgtgcagtccatcacctttctggatgaaaaca

SEQ ID NO: 531830 - DNA, 75 bp, synthetic construct
  source 1..75: mol_type = other DNA
tgcctgtaatgaataaaaatactgcagacataaccccatccatgtcattgcaagaaaaatcaatagttgaaaatg

SEQ ID NO: 531831 - DNA, 75 bp, synthetic construct
  source 1..75: mol_type = other DNA
ataaccactcttgagcgactggatgatatgtattctgcgggacgtagttttatcaaccagtatcataaagactgg

SEQ ID NO: 531832 - DNA, 75 bp, synthetic construct
  source 1..75: mol_type = other DNA
ttggatgaagtaacctatggtacgatgattagcgtgctaccacgatttgctgcgcgaaatcaaattgaattactc

SEQ ID NO: 531833 - DNA, 75 bp, synthetic construct
  source 1..75: mol_type = other DNA
ttgaaaagattgcagagggtgctcgagttcgctggggattaacagatgatgcccctatagataatatggttaacg

SEQ ID NO: 531834 - DNA, 75 bp, synthetic construct
  source 1..75: mol_type = other DNA
atgagcgcacccaccagtaccattacgacagtcagcaccggctggtgcactacacgcggacacaatatgcagagc

SEQ ID NO: 531835 - DNA, 75 bp, synthetic construct
  source 1..75: mol_type = other DNA
gtaaccggcatcggggcatccattaccgatgaggacatcgagaatgccgaagatgaagcgccgcccggcatcggc

SEQ ID NO: 531836 - DNA, 75 bp, synthetic construct
  source 1..75: mol_type = other DNA
tttctttcaacatcgacattacagagtaaaattatagttcttgctcatggtacacctgactatatagattgctct

SEQ ID NO: 531837 - DNA, 75 bp, synthetic construct
  source 1..75: mol_type = other DNA
taatatttctggttgtcaggctcccacggcaggcgatcaaataattaatcttgttctagcaggtaataacgttac

SEQ ID NO: 531838 - DNA, 75 bp, synthetic construct
  source 1..75: mol_type = other DNA
tggtgaatggcgtgatgtcctgaccaatgatatccgggatgaactggttcgtcgtgggataatgaaaattcaggg

SEQ ID NO: 531839 - DNA, 75 bp, synthetic construct
  source 1..75: mol_type = other DNA
atcagagtaaagacggaaatatctggctgcgcagttatgggggaagtctggactccttcgccagtggcaaactga

SEQ ID NO: 531840 - DNA, 75 bp, synthetic construct
  source 1..75: mol_type = other DNA
tcgctggctgagcagggcgtaaccaaagaagttatcccgccgtactactcggtgaaagaagtggtgctgccgttc

SEQ ID NO: 531841 - DNA, 75 bp, synthetic construct
  source 1..75: mol_type = other DNA
gttaaaataattagagggaatcatgatgtatcaccctgtgatattcgtggagcgcgatggcgacgtttaatcaat

SEQ ID NO: 531842 - DNA, 75 bp, synthetic construct
  source 1..75: mol_type = other DNA
aaaatataaattacatgagtgctgatgttgctatcataacggcgttagaagatacagagttagaggaattattaa

SEQ ID NO: 531843 - DNA, 75 bp, synthetic construct
  source 1..75: mol_type = other DNA
ccccggtgtgcatcgtttttgattattcccgcacactcacgcagaaggaattccccgtcgggctacggtcatggt

SEQ ID NO: 531844 - DNA, 75 bp, synthetic construct
  source 1..75: mol_type = other DNA
tgcatcaggaccgtcttattgagattgataagtcattgcaaacgattcgtttctctggcgggccaacgcattcca

SEQ ID NO: 531845 - DNA, 75 bp, synthetic construct
  source 1..75: mol_type = other DNA
ataattatttaaagtcacacatgcgtgacgaatggaacaaaacccgggcagtggcgataaggaatgaactggttc

SEQ ID NO: 531846 - DNA, 75 bp, synthetic construct
  source 1..75: mol_type = other DNA
ccgcggtttgttgacccagatacatccggctctggagctcgttttcggccccgctagggaaaaaatctcgcagct

SEQ ID NO: 531847 - DNA, 75 bp, synthetic construct
  source 1..75: mol_type = other DNA
gtaccattaagtgcaacaaccttgttttttatacttgcattcttatttttctttagtatgacttatattttaatt

SEQ ID NO: 531848 - DNA, 75 bp, synthetic construct
  source 1..75: mol_type = other DNA
tgtcgatgttaacccggatctctgcgtcggttgccagtattgcatcgctgcatgcccataccgcgtacgctttat

SEQ ID NO: 531849 - DNA, 75 bp, synthetic construct
  source 1..75: mol_type = other DNA
ttacatcgaaatgttttataacagtaaacgtcggcatggttctagcgatcagatgtcaccgacagaatatgaaaa

SEQ ID NO: 531850 - DNA, 75 bp, synthetic construct
  source 1..75: mol_type = other DNA
aattactactcttttcagcatccccatgaaggaagtaatcagattcctctatttattcgcccgcgtacatatgga

SEQ ID NO: 531851 - DNA, 75 bp, synthetic construct
  source 1..75: mol_type = other DNA
tcacctgactctttttatatcaccactggcatttggtattataatacataagatggtgatgaatagttcgaatgt

SEQ ID NO: 531852 - DNA, 75 bp, synthetic construct
  source 1..75: mol_type = other DNA
atgcaaaagatcgcggcattctcgaatcacaacttgatgagttgcagatctgggatgcgctgaatgacgtgctga

SEQ ID NO: 531853 - DNA, 75 bp, synthetic construct
  source 1..75: mol_type = other DNA
aatggtcgcgcctctacggcggcgcggtcggcttcatcatgatcgaggggcaggcaccaatgaccccgctgcggc

SEQ ID NO: 531854 - DNA, 75 bp, synthetic construct
  source 1..75: mol_type = other DNA
ttcctgaaatcacacggcctggagggtagcatgagccgtcgcggtaactgccatgataatgcggttgcagaaagt

SEQ ID NO: 531855 - DNA, 75 bp, synthetic construct
  source 1..75: mol_type = other DNA
gcgaaatccttgcgcgctacaaaatatcgcgcagcacgctctatttctggagcactcccgcacgtatgccatcca

SEQ ID NO: 531856 - DNA, 75 bp, synthetic construct
  source 1..75: mol_type = other DNA
cttgctcttttatgggcgcgttgagcgactgaaagccatactggcttctgaatgtgcaatatgtggctcaaccca

SEQ ID NO: 531857 - DNA, 75 bp, synthetic construct
  source 1..75: mol_type = other DNA
ctgtggttgcctctgctgcagtatccggttctgctacagcggcgacgtggaataaaggcgagagtaatacttcta

SEQ ID NO: 531858 - DNA, 75 bp, synthetic construct
  source 1..75: mol_type = other DNA
gtgcgttcggaaggaacggtctacaccggttttaccttctttcgcaaagtgtctcaggcgctggctggtttcttc

SEQ ID NO: 531859 - DNA, 75 bp, synthetic construct
  source 1..75: mol_type = other DNA
tactcaacagaccatgaacttgttgattttcaagagggagtattacgatttcaacaaattagaacaaaatacaga

SEQ ID NO: 531860 - DNA, 75 bp, synthetic construct
  source 1..75: mol_type = other DNA
attgaagctgtgtatcacgatatcactgaaaattcagagtatactccgtttgaaggtatttgtctgacagacact

SEQ ID NO: 531861 - DNA, 75 bp, synthetic construct
  source 1..75: mol_type = other DNA
aagtggcaaaagcagcgggcacgccgtggcttacggtgctcgcgtttgtcattggcgggttaattgtgatcccgc

SEQ ID NO: 531862 - DNA, 75 bp, synthetic construct
  source 1..75: mol_type = other DNA
ttgtctgggcaccgattcccggccttatctgcgccgtcatcgttattgctactggtctgcctgcttacgccttct

SEQ ID NO: 531863 - DNA, 75 bp, synthetic construct
  source 1..75: mol_type = other DNA
attgccttgtctggacaatatcgaaaaaggccaatgcttccccctttacctctacgatgaagaagcgcagataca

SEQ ID NO: 531864 - DNA, 75 bp, synthetic construct
  source 1..75: mol_type = other DNA
tggcgtttatcctgaggcaatgaaacgagcggttgcgttttgccaagtgatagaaaaagactttcgcggaaagac

SEQ ID NO: 531865 - DNA, 75 bp, synthetic construct
  source 1..75: mol_type = other DNA
cagtgaacgccgtaagcgtcaaaaaaagctggacattcgcgtcattgtgggtaacccgccgtattctatcgggca

SEQ ID NO: 531866 - DNA, 75 bp, synthetic construct
  source 1..75: mol_type = other DNA
tttgcattggcaatgtgtaatggagaatcaattaacgagaataaagaatatggtggactaatatgtaagaagcaa

SEQ ID NO: 531867 - DNA, 75 bp, synthetic construct
  source 1..75: mol_type = other DNA
ggtgagcatacattacgctcaggcgatgagcttttcatcaagagcattgaccgcctagcccgtaacacgaaagat

SEQ ID NO: 531868 - DNA, 75 bp, synthetic construct
  source 1..75: mol_type = other DNA
cgacgagtgcatgacgtacctgatgcttttctctatggatcactttgaaaaaatcacgggtgagttaccaatcgt

SEQ ID NO: 531869 - DNA, 75 bp, synthetic construct
  source 1..75: mol_type = other DNA
caaatgttacgccctggcgttggacgttgggatattagcggcggtcaggtcttaaaagatgatattcaggatgag

SEQ ID NO: 531870 - DNA, 75 bp, synthetic construct
  source 1..75: mol_type = other DNA
ataccaacgaagagatttataagttagttggatgtgggcgagctacattttttcgaatcaagaaggaattaagta

SEQ ID NO: 531871 - DNA, 75 bp, synthetic construct
  source 1..75: mol_type = other DNA
agatgatgaaatccgcaagaaggtcgctgaatatttggctaaaggaacatataccaacgaagagatttataagtt

SEQ ID NO: 531872 - DNA, 75 bp, synthetic construct
  source 1..75: mol_type = other DNA
gacgccaatgactgggctatcgaaacaatgggcaaccctcgatatccgttagagctgttcctacgagttatcact

SEQ ID NO: 531873 - DNA, 75 bp, synthetic construct
  source 1..75: mol_type = other DNA
caaatggtagtgttcaagataacataaacctgcaaacattagagcgaatattatttccgattcctgacttagatg

SEQ ID NO: 531874 - DNA, 75 bp, synthetic construct
  source 1..75: mol_type = other DNA
catccgcgcggccctgatcaagttgaagtgtgggcgttctgtattactgacaaagccgcctccgatgaagttaaa

SEQ ID NO: 531875 - DNA, 75 bp, synthetic construct
  source 1..75: mol_type = other DNA
gagccagtacgagggactgttcatcagccgcctgctgccgctgtttgccgcgctggccttcctggcgaacgcgct

SEQ ID NO: 531876 - DNA, 75 bp, synthetic construct
  source 1..75: mol_type = other DNA
atgttcgttgaactggtttatgacaagcgaaatgtagagggacttgaaggggccagagagattatcctggctgag

SEQ ID NO: 531877 - DNA, 75 bp, synthetic construct
  source 1..75: mol_type = other DNA
taaaggcttatatatcggtaacggtttaaatgtaaatctgtcttatatagaagagtgctatggtctcggatatgg

SEQ ID NO: 531878 - DNA, 75 bp, synthetic construct
  source 1..75: mol_type = other DNA
gcgttgctggtgacgaccccgatagcacgctggcagaaatgtcagaaaccagcgtcctgcaaccgcgcctgccgt

SEQ ID NO: 531879 - DNA, 75 bp, synthetic construct
  source 1..75: mol_type = other DNA
tgagaatgccctgcagtacctgagggacgactttaacccgaaaacccttaagttcatcgaacaggcacccttata

SEQ ID NO: 531880 - DNA, 75 bp, synthetic construct
  source 1..75: mol_type = other DNA
atattgtagccattcttaatggtatcataagtgctcctatttctcctgcgttgatacgctatacagcacagtatt

SEQ ID NO: 531881 - DNA, 75 bp, synthetic construct
  source 1..75: mol_type = other DNA
tgtttgccatcaacaaaatggcggaaggtccgttcccggaacactacgagccaattgaaacgccgctgggaacta

SEQ ID NO: 531882 - DNA, 75 bp, synthetic construct
  source 1..75: mol_type = other DNA
gcaactcagcctggctcgttgatcgctacagcgaacgtaaggagtcggcagaagagctgtcccggcgggtgaatc

SEQ ID NO: 531883 - DNA, 75 bp, synthetic construct
  source 1..75: mol_type = other DNA
aaggctatttaccgtaaaaaatttacccggtcaaagttgatcgaatttttggcgacatgtcctgctacaaccatc

SEQ ID NO: 531884 - DNA, 75 bp, synthetic construct
  source 1..75: mol_type = other DNA
aggtgtctggcatcatgcaggcttttaaccggcatatcctggcagaagaacagttgtgtcactatggtgaagtcc

SEQ ID NO: 531885 - DNA, 75 bp, synthetic construct
  source 1..75: mol_type = other DNA
gcgtgccgatggaatatgacgaagtgatggcctacatcatgttgaatgcggcggatcagtttgagcgtatcaccg

SEQ ID NO: 531886 - DNA, 75 bp, synthetic construct
  source 1..75: mol_type = other DNA
tcgattctatgcgggcagatgctcatagatgtgtaaaagatcaagagcaaaaaaaaatctggcacaaaaataaat

SEQ ID NO: 531887 - DNA, 75 bp, synthetic construct
  source 1..75: mol_type = other DNA
accggtagggtcgacgaacaaaactccaaaatcgataaagtcacttttacatttttcggtgccgcaacaactgct

SEQ ID NO: 531888 - DNA, 75 bp, synthetic construct
  source 1..75: mol_type = other DNA
attactaccggtagtgtcgacgagaaaaactccaccagcgataaaatcgcttttacattttccggtgccgcaaca

SEQ ID NO: 531889 - DNA, 75 bp, synthetic construct
  source 1..75: mol_type = other DNA
ctcaagatgttcgcgagttactctcaaagagttttgatagtttcatttcatttacaacggatttaaaaaaatcag

SEQ ID NO: 531890 - DNA, 75 bp, synthetic construct
  source 1..75: mol_type = other DNA
gtctgaaaaaactgctgcgttagaaacacattccgctgacacggttttgaggaaaaaattagttaatagtattgt

SEQ ID NO: 531891 - DNA, 75 bp, synthetic construct
  source 1..75: mol_type = other DNA
cacacttgaagaaatggttaaacagctttgctttgatgttaatgattgtgctgaggtaagagaattattacggca

SEQ ID NO: 531892 - DNA, 75 bp, synthetic construct
  source 1..75: mol_type = other DNA
ctggatgatattcatcctgtggggaacggtgatcttgaagtaacggtggaggatgccagtgggcgtaaaacggtc

SEQ ID NO: 531893 - DNA, 75 bp, synthetic construct
  source 1..75: mol_type = other DNA
tgactccctgggagtcgcgcgggtatgccccgctgattaacggggtggctgccactacatcgcgtatcaccatca

SEQ ID NO: 531894 - DNA, 75 bp, synthetic construct
  source 1..75: mol_type = other DNA
tgaaccaggtcagtgtaaatatggagaatgtaccagacaacctggagctacaaactacatcctataatgtagttc

SEQ ID NO: 531895 - DNA, 75 bp, synthetic construct
  source 1..75: mol_type = other DNA
cattgcggatgataagattgatgaaataatcgcttgcttatccagtcatcaggggattacatgtttttattattc

SEQ ID NO: 531896 - DNA, 75 bp, synthetic construct
  source 1..75: mol_type = other DNA
cacctttttggataaaaatagaattattgctgctgagcttaatatcacaaataacgagaaaaaatattcacctgg

SEQ ID NO: 531897 - DNA, 75 bp, synthetic construct
  source 1..75: mol_type = other DNA
cggcctgggatttccgcggatatgcgccggttatcagcggggtagcgacctcttcttcccgtatcactattaccc

SEQ ID NO: 531898 - DNA, 75 bp, synthetic construct
  source 1..75: mol_type = other DNA
cctgttcagaaagatcctgaatttcctgatgattgcttcgattctatgcgggcagatgctcatagatgtgtaaaa

SEQ ID NO: 531899 - DNA, 75 bp, synthetic construct
  source 1..75: mol_type = other DNA
tatcgtagctcagtgggtgaattcggtctgggatatagctatgataaaaatagtcgtcagtggaattacagtgcg

SEQ ID NO: 531900 - DNA, 75 bp, synthetic construct
  source 1..75: mol_type = other DNA
tggcactgccaacgtgcgggaaatcaacaaagcctttaactggcatctaccggaagatgatgcccgcacggttaa

SEQ ID NO: 531901 - DNA, 75 bp, synthetic construct
  source 1..75: mol_type = other DNA
gtaattcagcctatctcgttgatcgctacagcgaacgaaaagagtcagcagaagaactttctcgccgagtaaatc

SEQ ID NO: 531902 - DNA, 75 bp, synthetic construct
  source 1..75: mol_type = other DNA
gcttatctatcaagtggagggcgatacgctctcggtacttcgtgttttgcataccgccctgcaatggccgccagc

SEQ ID NO: 531903 - DNA, 75 bp, synthetic construct
  source 1..75: mol_type = other DNA
tcaccatactggcaacatactagagtttcatcgtgtaagtacatcggtcaatgtataccctcctaatgatgctgc

SEQ ID NO: 531904 - DNA, 75 bp, synthetic construct
  source 1..75: mol_type = other DNA
atggaagaattgatgaaatttacattgttgacccgggcaaatgcagcctatcttgtcgatcgctacagcgaacga

SEQ ID NO: 531905 - DNA, 75 bp, synthetic construct
  source 1..75: mol_type = other DNA
agtacctttgcaatcaggaagacgctgccacacatgtaacactggcaggcaggctaaaagtgcgggcttcgagtc

SEQ ID NO: 531906 - DNA, 75 bp, synthetic construct
  source 1..75: mol_type = other DNA
gccgtagtacctcacaccacggcgctgatagtgattattctgattctttggccttgcgacgctggcggcgtttga

SEQ ID NO: 531907 - DNA, 75 bp, synthetic construct
  source 1..75: mol_type = other DNA
aggcgatcgcttttccaatggtgttgacatggtaattacccttaattactatagttacatggtaattaccattgt

SEQ ID NO: 531908 - DNA, 75 bp, synthetic construct
  source 1..75: mol_type = other DNA
cgctgggccagggcgctgtttatgagcgccagcacatttcgccgcctttttttacgggaaatcggcatgtcattt

SEQ ID NO: 531909 - DNA, 75 bp, synthetic construct
  source 1..75: mol_type = other DNA
agaatgttgttcggtcgcagcagcgagaaaagtcgcgagaagatagaaaagaagatcgcgcgggcagaaacgcgt

SEQ ID NO: 531910 - DNA, 75 bp, synthetic construct
  source 1..75: mol_type = other DNA
atcagcaacaggcaccgggagttgaaggagatttcgcttcggctaaccctaaagcaagtcttcttgcaggtgagg

SEQ ID NO: 531911 - DNA, 75 bp, synthetic construct
  source 1..75: mol_type = other DNA
tgttcaggatattaagcaacttgttgagcaattaaagttacgcgacagaagtgaatattatattcatcgcgagac

SEQ ID NO: 531912 - DNA, 75 bp, synthetic construct
  source 1..75: mol_type = other DNA
tctgtggtgggagtggtacaagattgtggcctctctctagagagttatatcctaaacaatttttgagcataactt

SEQ ID NO: 531913 - DNA, 75 bp, synthetic construct
  source 1..75: mol_type = other DNA
ggaaagggcatcatcaccggctatgtattctcagatgatgacaatcctcccgctgaaggtgatgatcacggtctt

SEQ ID NO: 531914 - DNA, 75 bp, synthetic construct
  source 1..75: mol_type = other DNA
ctgcagattatctagtaacatttggtgttatcccaacaagtcctgaaactggatatggatatattgagaaaggaa

SEQ ID NO: 531915 - DNA, 75 bp, synthetic construct
  source 1..75: mol_type = other DNA
tctagcggcgcttcatgctattcaaaatggcgatgatccttatcttttaattctcgctgcagatcattcgatcgg

SEQ ID NO: 531916 - DNA, 75 bp, synthetic construct
  source 1..75: mol_type = other DNA
gaattaatcgagatacgttcaggaagttatcttgctgaagatgacataattcgattttttgataaatatggtagg

SEQ ID NO: 531917 - DNA, 75 bp, synthetic construct
  source 1..75: mol_type = other DNA
gttatcacgacaaccatgctgaaaaataccggctttttatccagcggctttactgagacaaacagcgaggggcag

SEQ ID NO: 531918 - DNA, 75 bp, synthetic construct
  source 1..75: mol_type = other DNA
atggtgcagcacctgaaaagacggccattaagccgctatcttaaagattttaaacacagccagactcattgcgcg

SEQ ID NO: 531919 - DNA, 75 bp, synthetic construct
  source 1..75: mol_type = other DNA
tatctgggggcggccatgcttttattgggttatacctgaacttgaaactatagtatccattaaattcgaccattc

SEQ ID NO: 531920 - DNA, 75 bp, synthetic construct
  source 1..75: mol_type = other DNA
agtggtatcaatcatctgtagcaatgaatcacctcattggcgggaaaagtggaggatctatctactacaaaccca

SEQ ID NO: 531921 - DNA, 75 bp, synthetic construct
  source 1..75: mol_type = other DNA
agcgatgccagcaaaagtgatcgtgaaaagctgaaccgcatgctggaggaaatgtttgatgaatccgacatgtgg

SEQ ID NO: 531922 - DNA, 75 bp, synthetic construct
  source 1..75: mol_type = other DNA
aatacaggggcaatactttcgtgccaatccggtacctggagaaaggtaggatctggtgagcttcaaattgctaca

SEQ ID NO: 531923 - DNA, 75 bp, synthetic construct
  source 1..75: mol_type = other DNA
taaatcagaatcgattgattatgctattatggaaaaaactgataaagcagttgttgttcctatggatgcgcaatg

SEQ ID NO: 531924 - DNA, 75 bp, synthetic construct
  source 1..75: mol_type = other DNA
tcgtgctgttgcttttgtcgagagtgaagttgacgagtggattcaatcagttatcgaaacaagcagaataaaagt

SEQ ID NO: 531925 - DNA, 75 bp, synthetic construct
  source 1..75: mol_type = other DNA
tcgtgcagttgctttcattgaaagtgaagtggaagagtggattcaattaactatcgaaaattcaagaaagcatgt

SEQ ID NO: 531926 - DNA, 75 bp, synthetic construct
  source 1..75: mol_type = other DNA
tttcagcggagcgtgaccgcttgtttaaaaattatcaacgttacctgaaaggcagccaggcggcggtaaatccgt

SEQ ID NO: 531927 - DNA, 75 bp, synthetic construct
  source 1..75: mol_type = other DNA
agaatttattcagttacttagccgagcaagcgcaacgccgacaagggcaaaacacccaagcgagtaattgccaag

SEQ ID NO: 531928 - DNA, 75 bp, synthetic construct
  source 1..75: mol_type = other DNA
gaagcggtaaaaaaaacattgcagagaagtaagctagctcttggttcggagcggcttgaggctgtaagagtaatc

SEQ ID NO: 531929 - DNA, 75 bp, synthetic construct
  source 1..75: mol_type = other DNA
actaatggcgtggaagaaaggcgaaatgaaaccggcattacgcgatttcatcgccattgtgcaggaacgtttggc

SEQ ID NO: 531930 - DNA, 75 bp, synthetic construct
  source 1..75: mol_type = other DNA
aagtttttacgcatcttgaagtttatcgtccttggggtaaatatgagtctatcgataatggtgaacgctatgaag

SEQ ID NO: 531931 - DNA, 75 bp, synthetic construct
  source 1..75: mol_type = other DNA
agaaaaacttaaagttaataaccgtacggaatatctgcagcatcgtgaaatatttaggccatggggcagtcatga

SEQ ID NO: 531932 - DNA, 75 bp, synthetic construct
  source 1..75: mol_type = other DNA
cctgatctctccactgcgatgttttatttgagtgatggacactatttatggaatagtggtatgtttatgttcaaa

SEQ ID NO: 531933 - DNA, 75 bp, synthetic construct
  source 1..75: mol_type = other DNA
gttgaaagggggggatgaagctatcgcccgcgcggaactaaagatgaagatttctctgaggaagacatccgcgat

SEQ ID NO: 531934 - DNA, 75 bp, synthetic construct
  source 1..75: mol_type = other DNA
ccttgcagcgcttcaggcaacggcaagtggagaggatcctatacttttagttcttgcggctgaccatgaaattca

SEQ ID NO: 531935 - DNA, 75 bp, synthetic construct
  source 1..75: mol_type = other DNA
cctgctttgatcatttgtaatgaatcacatcgtttcatcgttgctgaacaattacgtaaagttggtttaaagcat

SEQ ID NO: 531936 - DNA, 75 bp, synthetic construct
  source 1..75: mol_type = other DNA
gaacaaatatcacacaaaagaaaagaatttatttcccctatattaaaagaattaaaagcattacaatctcaacca

SEQ ID NO: 531937 - DNA, 75 bp, synthetic construct
  source 1..75: mol_type = other DNA
gccatttacattaactgatgaacagatcgaaaatatttcttttttaaacgcatatcacaaagaaaagaaaggaaa

SEQ ID NO: 531938 - DNA, 75 bp, synthetic construct
  source 1..75: mol_type = other DNA
agaacaaaagcgcaactaattaagacaccgagagaatggtctgataatattttgaagtattggttctcaagctct

SEQ ID NO: 531939 - DNA, 75 bp, synthetic construct
  source 1..75: mol_type = other DNA
attcgatatttcaaaatgttaatcttgatatgtgtgagatacgtaattgcaattttgacaagtcagaaatgaatt

SEQ ID NO: 531940 - DNA, 75 bp, synthetic construct
  source 1..75: mol_type = other DNA
taaaggacaactacagaagatacaacagagattaagttctcttatgcataaaaacatgtttcattgttttcatgt

SEQ ID NO: 531941 - DNA, 75 bp, synthetic construct
  source 1..75: mol_type = other DNA
aacaaccataatgcacaggttatactcgctgaaaacttccatttatattccaatgaattaccaaaatcatcacag

SEQ ID NO: 531942 - DNA, 75 bp, synthetic construct
  source 1..75: mol_type = other DNA
catgcgtcgggacaaattttagcggttctacatttaataatgtaaaaacaacaacagcgcaactaattaagacac

SEQ ID NO: 531943 - DNA, 75 bp, synthetic construct
  source 1..75: mol_type = other DNA
cgctggtcattgtaacatataatagatgtaaccttttgatggaaatgctttcctctatcgaaaacatgagtgtta

SEQ ID NO: 531944 - DNA, 75 bp, synthetic construct
  source 1..75: mol_type = other DNA
ggagcttcacgccactcatcagggttgaaaccgccaccggtgagcaggcgaaaacgcagcgccgcagcctggcgg

SEQ ID NO: 531945 - DNA, 75 bp, synthetic construct
  source 1..75: mol_type = other DNA
agtgatgccagcaaaagcgatcgggaaaagttgaatcgaatgctggaggaaatgtttgaagaggccgatatgtgg

SEQ ID NO: 531946 - DNA, 75 bp, synthetic construct
  source 1..75: mol_type = other DNA
gccgtcatgacgccgcgccgcggcttcgaatccatcacgtttaacgtgaacgtaacgaactttgtaggggcgtaa

SEQ ID NO: 531947 - DNA, 75 bp, synthetic construct
  source 1..75: mol_type = other DNA
ctcgcaccggcgaaatccatctcaacgctcgcctgggctactggcgtggtaaccgtcacgctggctgccgctcac

SEQ ID NO: 531948 - DNA, 75 bp, synthetic construct
  source 1..75: mol_type = other DNA
tcggttgtcacagagtgtgattcaagaaaaaatattaatataaaatatcacaacactggatataacgctggaggt

SEQ ID NO: 531949 - DNA, 75 bp, synthetic construct
  source 1..75: mol_type = other DNA
atgagctatgatcaccatcataattttagcacaaccatagctttaacaaatgatagcttccatatatcttcaata

SEQ ID NO: 531950 - DNA, 75 bp, synthetic construct
  source 1..75: mol_type = other DNA
ttgagctgtcggcttgttttgcgaaagctgacagaagcagaaccgggtaatgactccaacttactgatagtgttt

SEQ ID NO: 531951 - DNA, 75 bp, synthetic construct
  source 1..75: mol_type = other DNA
gggcggcggcgattggccgccccctgcgcgctccctgcgccagtgactttatatggcatagcacattaaaggagc

SEQ ID NO: 531952 - DNA, 75 bp, synthetic construct
  source 1..75: mol_type = other DNA
atggtggcgtcaaaatcgccgaagcgttccctggaggccggggcgacgcgcatggatgcgcggcgagggcgcatc

SEQ ID NO: 531953 - DNA, 75 bp, synthetic construct
  source 1..75: mol_type = other DNA
cagcaatattaatattcacctgcaatgggtcgatacctggcttaaaaatattgtatttcttcccttcatccaata

SEQ ID NO: 531954 - DNA, 75 bp, synthetic construct
  source 1..75: mol_type = other DNA
tttccacgatctttacagcgtctggggcggcagcgacaccattgtccccattgatgtttggatccccggctgccc

SEQ ID NO: 531955 - DNA, 75 bp, synthetic construct
  source 1..75: mol_type = other DNA
cgccatcacagcgtatcgccattgagcgagaagcgaggcggctggcgggctatcgtcaggggcgagaaatttgcg

SEQ ID NO: 531956 - DNA, 75 bp, synthetic construct
  source 1..75: mol_type = other DNA
atgagtgcacgcctggtcgtggaaaaaaataaaaccgtaaacaatgtcactgcgggtaagttttctgcaccagcc

SEQ ID NO: 531957 - DNA, 75 bp, synthetic construct
  source 1..75: mol_type = other DNA
atgtgtatccaccttaacttaatgatttttaccaaaatcattaggggattcatcagtgcggggttcgcaaatgga

SEQ ID NO: 531958 - DNA, 75 bp, synthetic construct
  source 1..75: mol_type = other DNA
atgtccacaccgaatccactggagaaaacgaaaggcgcagggacaacattctggatgtataccgggatgggagat

SEQ ID NO: 531959 - DNA, 75 bp, synthetic construct
  source 1..75: mol_type = other DNA
aagttggtgtgtcaggaagacaattattaatagacaagttttcagttaaagcggcagcgttacaaattattaagg

SEQ ID NO: 531960 - DNA, 75 bp, synthetic construct
  source 1..75: mol_type = other DNA
ggctttttcaaacggtaacacagttgcaagaacagacgttgccatttggcgtcaaattattgtgcgtaagtattt

SEQ ID NO: 531961 - DNA, 75 bp, synthetic construct
  source 1..75: mol_type = other DNA
atgaccacaccaaatccactggcaaagacgaaaggtgcggggacgacgttctggatgtataccggcaacggcgac

SEQ ID NO: 531962 - DNA, 75 bp, synthetic construct
  source 1..75: mol_type = other DNA
ttaaatataaaatatctgccggttttaaaccaggtctgatgatgagtggtttttttgttcactgcataattacta

SEQ ID NO: 531963 - DNA, 75 bp, synthetic construct
  source 1..75: mol_type = other DNA
gtcaccggttataaccgctatcgcgcgggagaggttgatctcacctgggttccggcgcagcaaattcctgcaatc

SEQ ID NO: 531964 - DNA, 75 bp, synthetic construct
  source 1..75: mol_type = other DNA
cactgaagaagaacccgaaaaatgtgctgtttgccgtggtgtggatgcagggggaatttgattttggcgggacgc

SEQ ID NO: 531965 - DNA, 75 bp, synthetic construct
  source 1..75: mol_type = other DNA
taatagagttactatcattgaccattatgaattatttctttagggacggtgtggttttaaaaatgcacttggggg

SEQ ID NO: 531966 - DNA, 75 bp, synthetic construct
  source 1..75: mol_type = other DNA
gtcaactgcaactgaacgtaaccgatcgtaaaacgggtcaaacctccacgattcaggtttcgggattacaaaata

SEQ ID NO: 531967 - DNA, 75 bp, synthetic construct
  source 1..75: mol_type = other DNA
atggttacgttttggggaaattatgaggggatctctcagccctcagcgttagataactttactcaggccatccag

SEQ ID NO: 531968 - DNA, 75 bp, synthetic construct
  source 1..75: mol_type = other DNA
cggcatttgcctcaatattcattgcctatatttatgcccgatttatcgattatcctctctatcgggcattaaagc

SEQ ID NO: 531969 - DNA, 75 bp, synthetic construct
  source 1..75: mol_type = other DNA
atgaatggtaacagtaatctaaaaataaatggcgatttagttcatgtcggagacttcgacgatattcataatttc

SEQ ID NO: 531970 - DNA, 75 bp, synthetic construct
  source 1..75: mol_type = other DNA
ggcccacgcccgccgaaaaatccatgacgaggatgtgcgccgtccgacagaaataactcaggaagcgctcagacg

SEQ ID NO: 531971 - DNA, 75 bp, synthetic construct
  source 1..75: mol_type = other DNA
ttatcccaggccagtcgtctgattcgtgatgcgggattacaggtgagcggattgtgccgtggcggaatgtttcct

SEQ ID NO: 531972 - DNA, 75 bp, synthetic construct
  source 1..75: mol_type = other DNA
gatattttctttattggggtagataaagggcggcttgaacttttaaatacctttgcaaagttattagacgatgct

SEQ ID NO: 531973 - DNA, 75 bp, synthetic construct
  source 1..75: mol_type = other DNA
tcaaaaatgattattttttaacggagattattttttcaaagttatcttcggaaaaaatatatttttataatttaa

SEQ ID NO: 531974 - DNA, 75 bp, synthetic construct
  source 1..75: mol_type = other DNA
tatgaattatttctttagggacggtgtggttttaaaaatgcacttgggggcctttaatttacgaaacataaaaaa

SEQ ID NO: 531975 - DNA, 75 bp, synthetic construct
  source 1..75: mol_type = other DNA
agaccggaagtaataaatttaaaatcactgatctgtatcgtgagttcaatggcgaaacaaagtgttatgataaaa

SEQ ID NO: 531976 - DNA, 75 bp, synthetic construct
  source 1..75: mol_type = other DNA
gcccgtgaaaaaaacacagtggagtggatgaaacaacagatatccagcataaagaaatgggaggccagtacgcca

SEQ ID NO: 531977 - DNA, 75 bp, synthetic construct
  source 1..75: mol_type = other DNA
tgattcttcttagcttcggagggccagcctacgcctcccctgaatccacccagctcgccctcgcgctgaagcaac

SEQ ID NO: 531978 - DNA, 75 bp, synthetic construct
  source 1..75: mol_type = other DNA
ctgctggagcataaagcggagcttgagtctaaagcaatgcagcaaactgaacaggaatcccagcaacaaacccag

SEQ ID NO: 531979 - DNA, 75 bp, synthetic construct
  source 1..75: mol_type = other DNA
agtatgttagcccccgtgagcgcaggctgcttatcggatgtgttgccttactggttgttgtttttgtctattacg

SEQ ID NO: 531980 - DNA, 75 bp, synthetic construct
  source 1..75: mol_type = other DNA
ggtaagtggtacatcagtattcagacagaaagtgaagtatccactccggttcacccttcagcatcaatggtcggg

SEQ ID NO: 531981 - DNA, 75 bp, synthetic construct
  source 1..75: mol_type = other DNA
gggcgtgaaatccgttatgagtacagcgccgcaggcgacctgacagcaacggtatcaccggacggtaaacgcagc

SEQ ID NO: 531982 - DNA, 75 bp, synthetic construct
  source 1..75: mol_type = other DNA
cagcgcggttttgacggccggacgcaacgttaccactatgacctgaccagaaaactcacacagagtgaggatgag

SEQ ID NO: 531983 - DNA, 75 bp, synthetic construct
  source 1..75: mol_type = other DNA
tgccgagcctgcgcgtgaaaccttaagtgcttcgctggcggacgcaagagctcgcggcagctatatggggtttag

SEQ ID NO: 531984 - DNA, 75 bp, synthetic construct
  source 1..75: mol_type = other DNA
cgcatatggtgtatcagtcacccgattgcagcctcagggggagcgtctgaccgttaccttagcaccagttgaatt

SEQ ID NO: 531985 - DNA, 75 bp, synthetic construct
  source 1..75: mol_type = other DNA
gttaataaagtaagtgagactttggaaaagatgcaatctacgcaagccttgattgatgctcttgcaaatgaaatt

SEQ ID NO: 531986 - DNA, 75 bp, synthetic construct
  source 1..75: mol_type = other DNA
aacttaacccgcattggtgttacaaatttgggtttcggccgatgggataatggagagagcaaaatcaataaccac

SEQ ID NO: 531987 - DNA, 75 bp, synthetic construct
  source 1..75: mol_type = other DNA
tttatatcgccagtcagaaatatacgcgcgacagggcgtggagctgagccgcaataccctggtgcgctgggtatc

SEQ ID NO: 531988 - DNA, 75 bp, synthetic construct
  source 1..75: mol_type = other DNA
aatataattacgactgaactgtcactggggaatctgggcgtttctcgctgggtaagaccaatggttgtcgatact

SEQ ID NO: 531989 - DNA, 75 bp, synthetic construct
  source 1..75: mol_type = other DNA
cagaatgtggatacagttgctattaatgatgcaaatgtgacattgcgttataacgcgcagtactacgcaacgggt

SEQ ID NO: 531990 - DNA, 75 bp, synthetic construct
  source 1..75: mol_type = other DNA
gcagctgggagtattttcttctccgtgcagcccgaaaaatttcgttatcagcagctcagtacagcgtcattgatg

SEQ ID NO: 531991 - DNA, 75 bp, synthetic construct
  source 1..75: mol_type = other DNA
cctgtggccgttaaggatttactgacggttgatgccgttatcctgactcacacccataccgatcactgggatgag

SEQ ID NO: 531992 - DNA, 75 bp, synthetic construct
  source 1..75: mol_type = other DNA
cacgcttgaacaacctgcgccgtggtttaccgccatgctggcctggccaacgctgtttccggttccgcatcatgt

SEQ ID NO: 531993 - DNA, 75 bp, synthetic construct
  source 1..75: mol_type = other DNA
aatatgaccataccttcctgatggggcagaatgcatctaatattgatctcagccggtacagtgaaggtaaccccg

SEQ ID NO: 531994 - DNA, 75 bp, synthetic construct
  source 1..75: mol_type = other DNA
ggctgaatgaacatggcccgcgcggtggtgatgaaattaatatcccgcaaaaaggcaaaaactacggctggccgc

SEQ ID NO: 531995 - DNA, 75 bp, synthetic construct
  source 1..75: mol_type = other DNA
ttgtgagagccgagagatttattttttttagagggaactgttggctccgggaaaagtactttgctgaaacagcta

SEQ ID NO: 531996 - DNA, 75 bp, synthetic construct
  source 1..75: mol_type = other DNA
tctttcgttacaacaatcatagcgacccaggtacgctcgacccgcaaaaggttgaggagaatactgctgcgcaga

SEQ ID NO: 531997 - DNA, 75 bp, synthetic construct
  source 1..75: mol_type = other DNA
aaagcggttggcagactgcttgctgctggcggcatatacaatgggaatatcgaaggattcagggaaacagcagac

SEQ ID NO: 531998 - DNA, 75 bp, synthetic construct
  source 1..75: mol_type = other DNA
ggcaacaaagatcctctgtctggtgcaatttcaaatggtatcggttctgctgccgggtatggtatcggtaaaggt

SEQ ID NO: 531999 - DNA, 75 bp, synthetic construct
  source 1..75: mol_type = other DNA
aggaagccattgatatgataaaaacatcactgctgataaacacgccgctcattgtacaacaaaaacaaaatacac

SEQ ID NO: 532000 - DNA, 75 bp, synthetic construct
  source 1..75: mol_type = other DNA
aaaagatgcggcacttctccgctctcagggctttctcaacattcgcgttctgaaagaggaaaatcatttcgtaga

SEQ ID NO: 532001 - DNA, 75 bp, synthetic construct
  source 1..75: mol_type = other DNA
agggattgttatgtttaatataaaatatattgtatctgggattatttcttttatatctccagttttgatgattaa

SEQ ID NO: 532002 - DNA, 75 bp, synthetic construct
  source 1..75: mol_type = other DNA
ccggatatgaaggaaccagagcaaaacttggcgataattattctattaatggattcaatattggcgtgggttatc

SEQ ID NO: 532003 - DNA, 75 bp, synthetic construct
  source 1..75: mol_type = other DNA
tatggcgattcaattaaaaaccaggttgatgcaaaatattattccttactgactggccccgtatggcgcattaac

SEQ ID NO: 532004 - DNA, 75 bp, synthetic construct
  source 1..75: mol_type = other DNA
atgctgacacagggggccaaactgcgatcgattcagatgccattttgcaatatagcgctgaatggctatgttctg

SEQ ID NO: 532005 - DNA, 75 bp, synthetic construct
  source 1..75: mol_type = other DNA
agaaaagatatctattggcaaagatggaaaactttcaagctggccgaaaggattctttgaccagcaatcaattga

SEQ ID NO: 532006 - DNA, 75 bp, synthetic construct
  source 1..75: mol_type = other DNA
tcagtggtggtctttattttaatgatgcagacatacgtaagctgcatgacatattttatgcagcaatatacgata

SEQ ID NO: 532007 - DNA, 75 bp, synthetic construct
  source 1..75: mol_type = other DNA
tgcttaaaccctacgttggcggttttccgctgcataatccccaggattatgtctacagcaaagagttgtatatca

SEQ ID NO: 532008 - DNA, 75 bp, synthetic construct
  source 1..75: mol_type = other DNA
tctcttggagaaaatatcaagaagacagtatctctgaatgttctaacgatgaaataaagtatgtacttacatgcg

SEQ ID NO: 532009 - DNA, 75 bp, synthetic construct
  source 1..75: mol_type = other DNA
cgtggcgtctcatatggaatcgattaatcattgccttcttacccgtgcggaacttcgcgagttcacgcttgaaca

SEQ ID NO: 532010 - DNA, 75 bp, synthetic construct
  source 1..75: mol_type = other DNA
ggtgaaggtactttcctgacacaagatgaacaggccgctgtgatccgtgctttcgtaaaatccgtagatggcaag

SEQ ID NO: 532011 - DNA, 75 bp, synthetic construct
  source 1..75: mol_type = other DNA
tagcgatactgatgggaatattattatcaccatcagtatttgcaacggatattaatgtagagtttacagccactg

SEQ ID NO: 532012 - DNA, 75 bp, synthetic construct
  source 1..75: mol_type = other DNA
agcgccttccggttgaccgggttgctgcgagagttgttggtaagggcgtggattggacaccaaacaaagttatcc

SEQ ID NO: 532013 - DNA, 75 bp, synthetic construct
  source 1..75: mol_type = other DNA
ggagccaaaaaagcagacatcggttccagcgccaagcgtctcaaatcattacaggaagataactacctggattat

SEQ ID NO: 532014 - DNA, 75 bp, synthetic construct
  source 1..75: mol_type = other DNA
tctggtggcactaagcgcggcgctggtggtggtatttttgttctggttagttcttcctcaagtctggcgcaggct

SEQ ID NO: 532015 - DNA, 75 bp, synthetic construct
  source 1..75: mol_type = other DNA
taacacctcgatttaaattggtgttcaacaccttatttaggcaaggtgttgaaacgacgaaaccccgcactgtag

SEQ ID NO: 532016 - DNA, 75 bp, synthetic construct
  source 1..75: mol_type = other DNA
tagtgcattcaaaccgaataaaaggtataggcgtcacattagttgctcatggggcgaataatttttatgaaagct

SEQ ID NO: 532017 - DNA, 75 bp, synthetic construct
  source 1..75: mol_type = other DNA
tctgtgcgcgtgaatgaatggttcagcgcgtatgcgatggcgggtgtggcttacagccgtgtgtcgactttctcc

SEQ ID NO: 532018 - DNA, 75 bp, synthetic construct
  source 1..75: mol_type = other DNA
agctgcctcgcagacgtgatgcagcattagcggttccctacaaaaaagatgagttcataagctcttctgatgaca

SEQ ID NO: 532019 - DNA, 75 bp, synthetic construct
  source 1..75: mol_type = other DNA
gtttttgacaggcagtactcaccattcattttcaaatttaatgaacaaataattgttccagcagaaagtgtctat

SEQ ID NO: 532020 - DNA, 75 bp, synthetic construct
  source 1..75: mol_type = other DNA
gctgtcgcgtaaaccggaggagacatggtacggctgggacggcgacaggctgacgacggtacagaccgacaccac

SEQ ID NO: 532021 - DNA, 75 bp, synthetic construct
  source 1..75: mol_type = other DNA
cctttaacggaactgttgttgatgctccatgcagcatttctcagaaatcagctgatcagtctattgattttggac

SEQ ID NO: 532022 - DNA, 75 bp, synthetic construct
  source 1..75: mol_type = other DNA
ttgcactgttgatagcgcaaggcgctgacaacgatgcccgcgattttttcaatatgatgatgcgaccgttaatca

SEQ ID NO: 532023 - DNA, 75 bp, synthetic construct
  source 1..75: mol_type = other DNA
aatatcgagccgttccaatacaatagaacgggttcgccttcagttgcaaaataactctgtgtcaatacttttcac

SEQ ID NO: 532024 - DNA, 75 bp, synthetic construct
  source 1..75: mol_type = other DNA
tataaacacggcaatgtttaatattttaaaccaaagtcatcctaagaaaaaaattgatgatttattatataatct

SEQ ID NO: 532025 - DNA, 75 bp, synthetic construct
  source 1..75: mol_type = other DNA
aagcatacacagtacagcacagttagttcgtacaagtgttggaccattagaatatcaagaagaaatgaaagatca

SEQ ID NO: 532026 - DNA, 75 bp, synthetic construct
  source 1..75: mol_type = other DNA
tcaaacatgggcagaaatgtctgaatatcaattcgaagtatttcaatacgagacgcttaaccccaaaaaatgtca

SEQ ID NO: 532027 - DNA, 75 bp, synthetic construct
  source 1..75: mol_type = other DNA
ggtttattttcaacattattaaccattaatgacaactttttacgagcaaaagcggaaattgcttcgacaataatt

SEQ ID NO: 532028 - DNA, 75 bp, synthetic construct
  source 1..75: mol_type = other DNA
tgttataagcaagttaaagcctttacgacactctctcgatacaataaaattcaaacatgggcagaaatgtctgaa

SEQ ID NO: 532029 - DNA, 75 bp, synthetic construct
  source 1..75: mol_type = other DNA
atcccgaatatgatattgaagaagccagagaagcgttaacttaccagcttcgggggcagcagtcagaacacttcg

SEQ ID NO: 532030 - DNA, 75 bp, synthetic construct
  source 1..75: mol_type = other DNA
gtatcgatattcttttaccgagaaatgatatacattctcttataagagaaaaagcatttccttttaaaagtatat

SEQ ID NO: 532031 - DNA, 75 bp, synthetic construct
  source 1..75: mol_type = other DNA
tacggaaagcgaaaaaatcatccggtgaacctgacgtcgtcctgtgggcaagcgacgattttgaatcgaccagca

SEQ ID NO: 532032 - DNA, 75 bp, synthetic construct
  source 1..75: mol_type = other DNA
atgttatgtcaattgacttttaccccaggtataataaatacatatcacggcgatatttataactgcacaacaaat

SEQ ID NO: 532033 - DNA, 75 bp, synthetic construct
  source 1..75: mol_type = other DNA
agtattttttgcatacatagttaattatttattttattttctatttatactgatgaactttaaaagaatatttaa

SEQ ID NO: 532034 - DNA, 75 bp, synthetic construct
  source 1..75: mol_type = other DNA
agttatgaaggtgatactttttatgttcgtcagaccacgttaggttttattctgtcgcaaagtgaaaaaaatgaa

SEQ ID NO: 532035 - DNA, 75 bp, synthetic construct
  source 1..75: mol_type = other DNA
tctggagaaggatatacctctgatcaatatgatttagcgcaacaccaacttcaacaaattaatgcgtgccacacg

SEQ ID NO: 532036 - DNA, 75 bp, synthetic construct
  source 1..75: mol_type = other DNA
ttataaccgcacaacagataccgacaatgttaaaacaccagacacaccgatgtggccttgtgataatcaggaaga

SEQ ID NO: 532037 - DNA, 75 bp, synthetic construct
  source 1..75: mol_type = other DNA
tgataaatacatatcacggcgatatttataaccgcacaacagataccgacaatgttaaaacaccagacacaccga

SEQ ID NO: 532038 - DNA, 75 bp, synthetic construct
  source 1..75: mol_type = other DNA
aaatggtacattgatgagaagtcgcaagatcagctttatgttatgggtaaggcactgattcatgagtcgattaaa

SEQ ID NO: 532039 - DNA, 75 bp, synthetic construct
  source 1..75: mol_type = other DNA
atgattgacgaaactccaaaatcaactttacttaagcaaaaacgaggcatgcaattgaaaaagattaggaaaatc

SEQ ID NO: 532040 - DNA, 75 bp, synthetic construct
  source 1..75: mol_type = other DNA
agagcagaagaatttaactctattcttgagcaaatgcctgagttggcaaggcagatggcggcagggcttggaatt

SEQ ID NO: 532041 - DNA, 75 bp, synthetic construct
  source 1..75: mol_type = other DNA
ttaacgaaaagctggaagagcttagacagaaggcgcaactttccgcaggaagcttgggtgagttgtctcgtgcgc

SEQ ID NO: 532042 - DNA, 75 bp, synthetic construct
  source 1..75: mol_type = other DNA
ttgataataagtgaatgggatgctaaaagaatcaaagcatttaatttagatggttaccatgatttttttgaacaa

SEQ ID NO: 532043 - DNA, 75 bp, synthetic construct
  source 1..75: mol_type = other DNA
gtattggttcgcaactggaacgcctctctcaccgcgttccattacgggcaatgaaaaatggtgttacaggcaaca

SEQ ID NO: 532044 - DNA, 75 bp, synthetic construct
  source 1..75: mol_type = other DNA
gcagctgtcttaacgcacgatgttgtcgaacgtgaaccgcaagatcccggcgttgtacgattaaaacgtgcggtt

SEQ ID NO: 532045 - DNA, 75 bp, synthetic construct
  source 1..75: mol_type = other DNA
ctaaatggacaacaagaagaaactaacgaggttattgaagaaagtactaccgacattacaaccaccgaagataca

SEQ ID NO: 532046 - DNA, 75 bp, synthetic construct
  source 1..75: mol_type = other DNA
gtaatagaggatggaaacaaacaagaagaaattaacgaggatactgaagaaagtactaccgacgatacaaccgcc

SEQ ID NO: 532047 - DNA, 75 bp, synthetic construct
  source 1..75: mol_type = other DNA
gcgcatcaaattcgccaccgtcaaagggaacccgcatcttggcatcaccttcgatacgccgctttatcaacgcta

SEQ ID NO: 532048 - DNA, 75 bp, synthetic construct
  source 1..75: mol_type = other DNA
aggcgacaggcgcaagcacaggactggttgcggttatcgactcgatgacggccgctctcgacaggctggtgggga

SEQ ID NO: 532049 - DNA, 75 bp, synthetic construct
  source 1..75: mol_type = other DNA
aggcaacaggtgcgagtaacggcctggtggcagttatcgattcaatgacagctgcgctcgacagactggttggta

SEQ ID NO: 532050 - DNA, 75 bp, synthetic construct
  source 1..75: mol_type = other DNA
gaggagttcaactccatccttgagcaaatgccagaactggcgcggcagatcgccgccgggatgggtgtaagcatt

SEQ ID NO: 532051 - DNA, 75 bp, synthetic construct
  source 1..75: mol_type = other DNA
ctttatgagcctgttaataatactgtggggtccgaaaacaataaaccaataataggtatgtttaaaggttgtttt

SEQ ID NO: 532052 - DNA, 75 bp, synthetic construct
  source 1..75: mol_type = other DNA
gtgcggcagacattattccctacgatgtggtggcagatattcaaattccctacgggctggatggtgaactggtga

SEQ ID NO: 532053 - DNA, 75 bp, synthetic construct
  source 1..75: mol_type = other DNA
gtatgtgctggatgaaatgctgcgtgaaattcgccaccagcttgctcagtcgcagcaactgcggcctgaacaagc

SEQ ID NO: 532054 - DNA, 75 bp, synthetic construct
  source 1..75: mol_type = other DNA
aaagtgtataaaaacacattgtctgcaggacagtatggaacagaagcatttcatataggaaaccatgcggatgag

SEQ ID NO: 532055 - DNA, 75 bp, synthetic construct
  source 1..75: mol_type = other DNA
tggtatatacgcttttacatactctggaacatcgcacatcaaaaggcttcaaaaaatcaaagacaccctaacagt

SEQ ID NO: 532056 - DNA, 75 bp, synthetic construct
  source 1..75: mol_type = other DNA
attggttctgtggcgtcctgctccggtatggacggagccctgcatcagacgggggtgattacggtggcactgaaa

SEQ ID NO: 532057 - DNA, 75 bp, synthetic construct
  source 1..75: mol_type = other DNA
tacggactggatggtgaactggttatggcaaatgcccgcaaggcgctgcagtcatacactgacagcgtccaccgg

SEQ ID NO: 532058 - DNA, 75 bp, synthetic construct
  source 1..75: mol_type = other DNA
agcacaccgagtgcaccacgcagcaggccgacgagctcatggcggaataccggcgccgcggcgtgaaggtagagc

SEQ ID NO: 532059 - DNA, 75 bp, synthetic construct
  source 1..75: mol_type = other DNA
ccgctaccgttttaacgataactgcatgtgctggaaaggttgaaaaagacccgcaatatgtagccgcagagaaat

SEQ ID NO: 532060 - DNA, 75 bp, synthetic construct
  source 1..75: mol_type = other DNA
acagttcgttatcttacacaaactgtgcatccacgtaatgccggcaatattgataatctgaataggtccgcagag

SEQ ID NO: 532061 - DNA, 75 bp, synthetic construct
  source 1..75: mol_type = other DNA
gggcacggatgtttgaacgcctgcgacggtacgtaaaaatacttcaggccgacaatgagagcatccgggtgggtt

SEQ ID NO: 532062 - DNA, 75 bp, synthetic construct
  source 1..75: mol_type = other DNA
ttgatggtaaaggtagggtttttataagtcgttgcttttttgaaatcaatgatacagtaaatttatcagagtgta

SEQ ID NO: 532063 - DNA, 75 bp, synthetic construct
  source 1..75: mol_type = other DNA
ttttttatctataaaaaattcactaaaaagatgtttatttatacagtattttctgtaatcacaatagttctactt

SEQ ID NO: 532064 - DNA, 75 bp, synthetic construct
  source 1..75: mol_type = other DNA
acatacaggactgcatcgagcgcctttggaaggtatccatcatcgcccagaatggccgcaagcggcaggggtttc

SEQ ID NO: 532065 - DNA, 75 bp, synthetic construct
  source 1..75: mol_type = other DNA
ttgagaaagaaaaaatagctgaaacagttcgtcgtgaagccggagaacatgtggattcgcttactgttatgggag

SEQ ID NO: 532066 - DNA, 75 bp, synthetic construct
  source 1..75: mol_type = other DNA
aactattctgatcttattgaaagaaatgaaacatatgatattcaacaagtggaacctgactattttttgataggt

SEQ ID NO: 532067 - DNA, 75 bp, synthetic construct
  source 1..75: mol_type = other DNA
gaagactattttgatagagtagtcaattcagtcatagtcaatgaggcaggcattaaaatggtagattctattatc

SEQ ID NO: 532068 - DNA, 75 bp, synthetic construct
  source 1..75: mol_type = other DNA
gaatgataataatgaggcaaaaattaatctgtcagaaagtaatggtgagtcagatcacacagaagtttctttggc

SEQ ID NO: 532069 - DNA, 75 bp, synthetic construct
  source 1..75: mol_type = other DNA
actttccggatcacgaatgaaatccagtatgcaactactgggagtcatttatgctgtttttcctcttctttaggt

SEQ ID NO: 532070 - DNA, 75 bp, synthetic construct
  source 1..75: mol_type = other DNA
gtggcgtggctggaatccaacgaaacctcctgcattctctacacctccggcacgaccggcaaacctaaaggcgtg

SEQ ID NO: 532071 - DNA, 75 bp, synthetic construct
  source 1..75: mol_type = other DNA
ggtcccaagtttgctctggctggaagctgcatcgtccacattacgtgggcagggtggtttcgctatgctacttga

SEQ ID NO: 532072 - DNA, 75 bp, synthetic construct
  source 1..75: mol_type = other DNA
attgatgacgctaaaccggtgctgattgtctcggctgatgccggagcgcgcggcggcaaaatcattccctataaa

SEQ ID NO: 532073 - DNA, 75 bp, synthetic construct
  source 1..75: mol_type = other DNA
gagattacagctattcctgaacttattaacatgttggatattaaagggcaaattctcacaacagatatgataggc

SEQ ID NO: 532074 - DNA, 75 bp, synthetic construct
  source 1..75: mol_type = other DNA
ttcacagacattcccggtggttaaccttgatacgtcaatcagcgcatcctgtatggatgtcactgatgaaacgct

SEQ ID NO: 532075 - DNA, 75 bp, synthetic construct
  source 1..75: mol_type = other DNA
gaggtgggcgtgattcctgaggattgggattgcgtaccatttggtaatctgtttaaaacaaacacaaagaaaaaa

SEQ ID NO: 532076 - DNA, 75 bp, synthetic construct
  source 1..75: mol_type = other DNA
actaagtataattccaactggtctggaaaatatagacaaagggattaactttttccttagaaatacgttatatca

SEQ ID NO: 532077 - DNA, 75 bp, synthetic construct
  source 1..75: mol_type = other DNA
tttacagtcgagcgtatcagaggagggataggctctctcttgagaagaggagattcagcacgagctcagcatttg

SEQ ID NO: 532078 - DNA, 75 bp, synthetic construct
  source 1..75: mol_type = other DNA
taccctccaatccattagtacgagatatatcccagcttcagtccgcagccaggcaagctggtacaattatgacta

SEQ ID NO: 532079 - DNA, 75 bp, synthetic construct
  source 1..75: mol_type = other DNA
cggacggcgtaccggaagccgcactggatgaagtcatggccacgctgaccacgccggcccgcagcagtgttatca

SEQ ID NO: 532080 - DNA, 75 bp, synthetic construct
  source 1..75: mol_type = other DNA
ttaaagatgcctttgaggcagctaaaacaatgcctcctgaaaattcagaacttattaaagagctggcaacaatgc

SEQ ID NO: 532081 - DNA, 75 bp, synthetic construct
  source 1..75: mol_type = other DNA
ctggcgggaatggacaggttttaggctcagcggagaatgttgccaaaggcgcaaaaggccctggtggcggtggtg

SEQ ID NO: 532082 - DNA, 75 bp, synthetic construct
  source 1..75: mol_type = other DNA
aaatccgctaacgttagtctggtaggctatgaattgacgaaaggcggcgggatggtgaccgtgaagctggaaggg

SEQ ID NO: 532083 - DNA, 75 bp, synthetic construct
  source 1..75: mol_type = other DNA
ttggcataacaccggatacaccggccacgcgtaaagctgtccagtcccgcctgttgacgcttcagaagacgctgc

SEQ ID NO: 532084 - DNA, 75 bp, synthetic construct
  source 1..75: mol_type = other DNA
gcaccagtaaagaaaataacaatagattctttcgcagctctttactccgtaatacctaaagatacaatcgagaaa

SEQ ID NO: 532085 - DNA, 75 bp, synthetic construct
  source 1..75: mol_type = other DNA
acattttatgtcttacttataaaaatttattccttggaaatggtacatttctaaataaatcctatgctaacatcg

SEQ ID NO: 532086 - DNA, 75 bp, synthetic construct
  source 1..75: mol_type = other DNA
aaggtgatcgcccgcaccgcgcagcatatcgagcagattattcactctaaagtgaccgccggcgtcgcagaacct

SEQ ID NO: 532087 - DNA, 75 bp, synthetic construct
  source 1..75: mol_type = other DNA
ctgaaaaaagcgccttccgttgaggtatgtcgtgaactggctgtggcggcgccagaactccgcaaagtcacgcca

SEQ ID NO: 532088 - DNA, 75 bp, synthetic construct
  source 1..75: mol_type = other DNA
acgcggtcaggcttcagatgtgcgcgggccgcgtattgagcagcgtccgctgacccatgtggaggcggcgaaagc

SEQ ID NO: 532089 - DNA, 75 bp, synthetic construct
  source 1..75: mol_type = other DNA
atgaagaccaaaaggagtctggtcgtaagagtaacattcattgccgccacactactgctgactgcatgtgcccaa

SEQ ID NO: 532090 - DNA, 75 bp, synthetic construct
  source 1..75: mol_type = other DNA
ggaggtgtttttgttgaggggggaggtgataaattttttgtattcataatgttttttatactttacacatcatta

SEQ ID NO: 532091 - DNA, 75 bp, synthetic construct
  source 1..75: mol_type = other DNA
aaacatattgatgctaaagatgcgcctcgtaatgctgaagaacgagagtttatcaagcgcctgcggatgattgaa

SEQ ID NO: 532092 - DNA, 75 bp, synthetic construct
  source 1..75: mol_type = other DNA
tatcaaacgtctgcgcatgattgaacgcgatctgcacacacagttatccagtgtcgggtgtgacgtaggcgagta

SEQ ID NO: 532093 - DNA, 75 bp, synthetic construct
  source 1..75: mol_type = other DNA
acgggaagaacacaaacgttcagatcgggctggtaagccttcaccactagggtatatctgggccagagagcgtgt

SEQ ID NO: 532094 - DNA, 75 bp, synthetic construct
  source 1..75: mol_type = other DNA
atgaagtcaccttatgatttaactgagagagagtttaaattcttgcagcaggaagctgaagataaatatgattcc

SEQ ID NO: 532095 - DNA, 75 bp, synthetic construct
  source 1..75: mol_type = other DNA
ttcagtatctggtggcttgcattgactcctccggggggctggtttttcctgttttgcctgcgacactggcagtgg

SEQ ID NO: 532096 - DNA, 75 bp, synthetic construct
  source 1..75: mol_type = other DNA
attcatattactgatgcaacgatcccctggtgtgccctcagtacagacagtgagcccgaaaaagagtactgccgc

SEQ ID NO: 532097 - DNA, 75 bp, synthetic construct
  source 1..75: mol_type = other DNA
ttagcctgtgggggaatgtcggtgtgcaactaggtgataaaggctatagcgatactcagggcatgctgggagtga

SEQ ID NO: 532098 - DNA, 75 bp, synthetic construct
  source 1..75: mol_type = other DNA
aaacgtgctggccgtcagtggtgttactgacgcatacgtgactcagaataacaccagcctgactgttgcgaaggg

SEQ ID NO: 532099 - DNA, 75 bp, synthetic construct
  source 1..75: mol_type = other DNA
cggaaaagctattctcaatgcccagtggctgcaagccagcatgaatgcgccgcgtcagtatgcaacatacgactg

SEQ ID NO: 532100 - DNA, 75 bp, synthetic construct
  source 1..75: mol_type = other DNA
gccgggcatcggctggggacgcgcgagattgaagagagtatctccagtcatccgggcgttgccgaagtggcagtg

SEQ ID NO: 532101 - DNA, 75 bp, synthetic construct
  source 1..75: mol_type = other DNA
gttgtggtgagaatatcacctttcatcaggtggccaaatttagtgtgccactacaacatttatgctattggactt

SEQ ID NO: 532102 - DNA, 75 bp, synthetic construct
  source 1..75: mol_type = other DNA
gctgcgcctcgttctggaaaacgaaaacaaagtaaaacagttattgcagattcggatggatgaactggcgaaact

SEQ ID NO: 532103 - DNA, 75 bp, synthetic construct
  source 1..75: mol_type = other DNA
acagaaggacgatggaatgaactcatcgccagcgaaatggaatatgtcaatgcggtgcaaaagatcgcacaccta

SEQ ID NO: 532104 - DNA, 75 bp, synthetic construct
  source 1..75: mol_type = other DNA
tccgggcgttgccgaagtggcggtggttggggtgaaagatgcgctgaaagggcaggtggcggtggcgtttgtcat

SEQ ID NO: 532105 - DNA, 75 bp, synthetic construct
  source 1..75: mol_type = other DNA
cttacctgataatacccgccgctggcagttgtcaggcgggaacgaaaaagaacttacttatctggtgatgctgcc

SEQ ID NO: 532106 - DNA, 75 bp, synthetic construct
  source 1..75: mol_type = other DNA
atgaagaccaaaaggagtctggtcgtcagagtggcattaattaccgccacactactgctgacagcatgcgcccaa

SEQ ID NO: 532107 - DNA, 75 bp, synthetic construct
  source 1..75: mol_type = other DNA
cgcgctggatgccggtgccagcgggtatttaaccaaacgctgtgggccggaagagttagtgcaggcggtgcgctc

SEQ ID NO: 532108 - DNA, 75 bp, synthetic construct
  source 1..75: mol_type = other DNA
tggcccgaatgaatggcgatgaattcaccttcaaacgattcattcgtgagagcggtaaagcgtacctggagccac

SEQ ID NO: 532109 - DNA, 75 bp, synthetic construct
  source 1..75: mol_type = other DNA
ttattgaacgcaaaaattgcgttaaatactgaaaatacccttaagtttgcggctttattacaggttcctgcggaa

SEQ ID NO: 532110 - DNA, 75 bp, synthetic construct
  source 1..75: mol_type = other DNA
gcaccagcggtgcgccgcatacctcatccattctgcctgcgcgcttggtgatacgccattccagcggcgcccgaa

SEQ ID NO: 532111 - DNA, 75 bp, synthetic construct
  source 1..75: mol_type = other DNA
acagcggacgataaattagtgccgtggctggctagtcagactgatgttctagcagaagactggcaaatcatttaa

SEQ ID NO: 532112 - DNA, 75 bp, synthetic construct
  source 1..75: mol_type = other DNA
ccacaaaagccagtaacaagtcgttctggctggaagttaaggggcattcaatgaccgcgccacagggaggtaaac

SEQ ID NO: 532113 - DNA, 75 bp, synthetic construct
  source 1..75: mol_type = other DNA
ctgacggctatcactttattctcgggcgtaccgacgatgtgattaacgttgccgggcatcggctgggcacgcgtg

SEQ ID NO: 532114 - DNA, 75 bp, synthetic construct
  source 1..75: mol_type = other DNA
aaaggcgcggtacttaaagcgcaggtacatgctggtgggcgcggtaaagctggcggcgtaaaagtgcttaagtag

SEQ ID NO: 532115 - DNA, 75 bp, synthetic construct
  source 1..75: mol_type = other DNA
actactccgcgcgaagcagaagaagccgcttcaaaaatcggtgccggtccgtgggtagtgaaatgtcaggttcac

SEQ ID NO: 532116 - DNA, 75 bp, synthetic construct
  source 1..75: mol_type = other DNA
tttcggtaaaagatgcgggcaacacggttggcctgatcaataagaataaaaaatctattgcgctgactttctcag

SEQ ID NO: 532117 - DNA, 75 bp, synthetic construct
  source 1..75: mol_type = other DNA
atcgagagtttagcgatccaacaattacacaccacggcaaatttacccaacatgcagcgcgtagtagggatgcca

SEQ ID NO: 532118 - DNA, 75 bp, synthetic construct
  source 1..75: mol_type = other DNA
ggtgctgaaagcgctggcagatgataaaagtttagcggctgagcaaaatgatagtaatgcatcgtccgatcagaa

SEQ ID NO: 532119 - DNA, 75 bp, synthetic construct
  source 1..75: mol_type = other DNA
ggaaccatgtcagcctggtggagggaaagcacagcctggtggtgaagggggacctggcgaggaaggtgagtggcg

SEQ ID NO: 532120 - DNA, 75 bp, synthetic construct
  source 1..75: mol_type = other DNA
tacatcaagaactgctgtttactaccgccggaacacgcaaactacaggctgaattactttatattgggggggttc

SEQ ID NO: 532121 - DNA, 75 bp, synthetic construct
  source 1..75: mol_type = other DNA
gcatcagagatctactgtgctaacatacatagatttaagcctgtgtatagagttaacacggcaatccctactatt

SEQ ID NO: 532122 - DNA, 75 bp, synthetic construct
  source 1..75: mol_type = other DNA
aaccttatctgctcccgataagtgaaatgcctacaaattctgcacaatacatccgcagtcaacgttacgccaatg

SEQ ID NO: 532123 - DNA, 75 bp, synthetic construct
  source 1..75: mol_type = other DNA
tgcagatggcgctgtggcggcgtcagaggaacactttccgtttctttatcgcatgtctgatgacgctattcagcg

SEQ ID NO: 532124 - DNA, 75 bp, synthetic construct
  source 1..75: mol_type = other DNA
ggaattaaaggattactgctaaatcttgatatgtcgggtgaaaaacctgaagataaatttaacattagatccaat

SEQ ID NO: 532125 - DNA, 75 bp, synthetic construct
  source 1..75: mol_type = other DNA
ttgatatgtcgggtgaaaaacctgaagataaatttaacattagatccaatcaggtttatattgatactaacaagt

SEQ ID NO: 532126 - DNA, 75 bp, synthetic construct
  source 1..75: mol_type = other DNA
aggccgtttttacccggcactggtcggcaatgatatcggctgcggcatggcgctatggcaaacagatattctcgc

SEQ ID NO: 532127 - DNA, 75 bp, synthetic construct
  source 1..75: mol_type = other DNA
ttgatcgtaacggcattcaggatctggttatctggttatctggttaccaagtaccggtaatggtctggctcctta

SEQ ID NO: 532128 - DNA, 75 bp, synthetic construct
  source 1..75: mol_type = other DNA
cttgaagttacgcttgagcagccggttccttggttcacgacgatgctcgcctggccgacgctgttcccggttcct

SEQ ID NO: 532129 - DNA, 75 bp, synthetic construct
  source 1..75: mol_type = other DNA
ataacaccgaaagccatcgccagccgcgccgcgagaaatcgaaaggcggaacgggcgacgagctgctgaccaact

SEQ ID NO: 532130 - DNA, 75 bp, synthetic construct
  source 1..75: mol_type = other DNA
aaagccgacctgccgcgcccgtttcgcctggcgattatccagctgggaacctatgacggcactgtctacaacgcc

SEQ ID NO: 532131 - DNA, 75 bp, synthetic construct
  source 1..75: mol_type = other DNA
ttaaaccctacgttggcggttttccgctgcataatccccaggattatgtcggtgatgctgccaacttactgattt

SEQ ID NO: 532132 - DNA, 75 bp, synthetic construct
  source 1..75: mol_type = other DNA
cttgattgctcaaaacgtaccggaatttactcgccaactggttgaccgttggaattatctggaagagaaactgaa

SEQ ID NO: 532133 - DNA, 75 bp, synthetic construct
  source 1..75: mol_type = other DNA
agatatagttaacagtaattaccagtgttatggctatcgtcgcctgcatgcgatgctcaggcatgagggggtcag

SEQ ID NO: 532134 - DNA, 75 bp, synthetic construct
  source 1..75: mol_type = other DNA
cgggaagtccggttctggatgtggcgcataacttcattaccgcgagtaaaattggcgatcaacaaggctggttac

SEQ ID NO: 532135 - DNA, 75 bp, synthetic construct
  source 1..75: mol_type = other DNA
acgttgctgaagaaagctggctggaggaaaacctgccgtcagcatttgcacagcattcgtggcgcagctcgcttg

SEQ ID NO: 532136 - DNA, 75 bp, synthetic construct
  source 1..75: mol_type = other DNA
ccgtattaacctcgaacacatcaaaagcctctggcctgacagtccgtttaaacgctacggcgatgtgaccgaagt

SEQ ID NO: 532137 - DNA, 75 bp, synthetic construct
  source 1..75: mol_type = other DNA
gctttgacccgcgcgtctacggctgtcgcattaacctcgagcatatccgcagcgttattcccgacagcccgtttt

SEQ ID NO: 532138 - DNA, 75 bp, synthetic construct
  source 1..75: mol_type = other DNA
acgtccatttgttaattaactatcctcccaaactggcgatatccagtctggtaaacagcctcaaaggcgtatcgg

SEQ ID NO: 532139 - DNA, 75 bp, synthetic construct
  source 1..75: mol_type = other DNA
caccaaattaacttatcgaattcgacctcattttccaaagatggctattcctccaacaatactggaattactggc

SEQ ID NO: 532140 - DNA, 75 bp, synthetic construct
  source 1..75: mol_type = other DNA
ttaccgttgtggttgctcaatcagcttgggcgaccgcgtgatgtaccggtaactaacgtggtggcactgctggtt

SEQ ID NO: 532141 - DNA, 75 bp, synthetic construct
  source 1..75: mol_type = other DNA
ccacggcagagcgaggtggttatatagtgaccactgcaagttcagagaaaagctcctgtcccgctccgatgggta

SEQ ID NO: 532142 - DNA, 75 bp, synthetic construct
  source 1..75: mol_type = other DNA
gaggaagaaatccgggcagaccgcgtgagcagtgaaagccgggcgtggcttgcgcattgcgggctgacggtggag

SEQ ID NO: 532143 - DNA, 75 bp, synthetic construct
  source 1..75: mol_type = other DNA
agcagcggtggagccgccaatggcagttaccacagcaacgggctgggcggtcacattgaaaccgggatgcgattt

SEQ ID NO: 532144 - DNA, 75 bp, synthetic construct
  source 1..75: mol_type = other DNA
gaggcattggtttggaattcaattttagaaaatggctactttaaatatttcaatgagatcatctattatagtgaa

SEQ ID NO: 532145 - DNA, 75 bp, synthetic construct
  source 1..75: mol_type = other DNA
ctcaacatggcggcaggttttaagacggtagcggaggactggctggctaccagggtcagcgggtggtcagagtcc

SEQ ID NO: 532146 - DNA, 75 bp, synthetic construct
  source 1..75: mol_type = other DNA
tgagagatggcctaatgaaataggaagtcgtgtgtatataatcatggagaaaatacgtcagtcaattaataatca

SEQ ID NO: 532147 - DNA, 75 bp, synthetic construct
  source 1..75: mol_type = other DNA
tttatcgggtagtcgccgattccgtacggaaaaatcagatcagcagcaagtttgctgaattgacgttcaccatca

SEQ ID NO: 532148 - DNA, 75 bp, synthetic construct
  source 1..75: mol_type = other DNA
aactatgccaccagcacaggcagcaatcatcagggaactggctaccgtcctcgatgtttcgaatgtagctctgcg

SEQ ID NO: 532149 - DNA, 75 bp, synthetic construct
  source 1..75: mol_type = other DNA
ttagccctgcgctggtggtgctggccgtactatcgcaatacgtacgccagccagcattgaaagaaaaggccgacg

SEQ ID NO: 532150 - DNA, 75 bp, synthetic construct
  source 1..75: mol_type = other DNA
gaactgctggcaagcggggatgacagaaactgggaaacagcaaggataatcaatgacaaatatcttcaccttaat

SEQ ID NO: 532151 - DNA, 75 bp, synthetic construct
  source 1..75: mol_type = other DNA
tgcacctccaacaggtacaagaagaagcgaataaaggtacgctcgaagcaatgattactttgtcgcgcctgtatg

SEQ ID NO: 532152 - DNA, 75 bp, synthetic construct
  source 1..75: mol_type = other DNA
ctacaaagtaatttccactctagataatgacaaactgactagaggaaagtatgtttactattttgttagcgagtg

SEQ ID NO: 532153 - DNA, 75 bp, synthetic construct
  source 1..75: mol_type = other DNA
gaagatgattttaatgattttatacgggatatgttattagctaagaattatgaggtaaaagatcaaactagagag

SEQ ID NO: 532154 - DNA, 75 bp, synthetic construct
  source 1..75: mol_type = other DNA
ttaatagtataagcttaatatcaaaggatggtcgagtgcagcgtcctttgaattttataaagtttgatagtgatt

SEQ ID NO: 532155 - DNA, 75 bp, synthetic construct
  source 1..75: mol_type = other DNA
ctgaatttgttgctgctaatatttctgatgttaaagtttttagcggtttttttattgaaaccattgttaatggtg

SEQ ID NO: 532156 - DNA, 75 bp, synthetic construct
  source 1..75: mol_type = other DNA
agtcagcaccggctggtgcactacacgcggacacaatatgaagagccgctggtcgaaagtcgctatctttacgac

SEQ ID NO: 532157 - DNA, 75 bp, synthetic construct
  source 1..75: mol_type = other DNA
attacccggtacgtgagctgttgggcatcagtcaggcagatgagcgcctgatttataactctgtgctgggccgga

SEQ ID NO: 532158 - DNA, 75 bp, synthetic construct
  source 1..75: mol_type = other DNA
ttcatctatgaccggattaagtccggagacctgccaaaagccaaagttatccacgggcgagcaagatggttatat

SEQ ID NO: 532159 - DNA, 75 bp, synthetic construct
  source 1..75: mol_type = other DNA
aaacgaaaaattcaggctggcgtactggctggacaggatattactgatctgcgaaagcagtatgaaaagctgggt

SEQ ID NO: 532160 - DNA, 75 bp, synthetic construct
  source 1..75: mol_type = other DNA
tatcaggatcttatgcggtagttcctcagatattgggggccgctgtaggtatgggttccgcaacaatatatacag

SEQ ID NO: 532161 - DNA, 75 bp, synthetic construct
  source 1..75: mol_type = other DNA
ttacaatcacggtaatccaatgattgcagtcaataccagcgtttacgatagtgtgaatccaccagccgccgcatc

SEQ ID NO: 532162 - DNA, 75 bp, synthetic construct
  source 1..75: mol_type = other DNA
gaggagtaccgtaacaaggtttttgatgatgataatggcgcatcggataaaggtgccatacagcaggtcttcggg

SEQ ID NO: 532163 - DNA, 75 bp, synthetic construct
  source 1..75: mol_type = other DNA
gcgaaagcagtatgaaaagctgggtaaaaaaatccatgatgccaccgctgagcaggacagatttaaccgcgaact

SEQ ID NO: 532164 - DNA, 75 bp, synthetic construct
  source 1..75: mol_type = other DNA
agggatgggaagaggcaatccgcaatggtctgtcagagtatggcgtactccctgctgcagggcaggagcaggaaa

SEQ ID NO: 532165 - DNA, 75 bp, synthetic construct
  source 1..75: mol_type = other DNA
aggatatgtgagtgtgcaaaaggtagccgattttcttgctgttagcaaaagcacattacagcgatggaagatgag

SEQ ID NO: 532166 - DNA, 75 bp, synthetic construct
  source 1..75: mol_type = other DNA
gttttggggataatggtttaaagaaaaatatcataccttcactttcccctgattttggcgattgttcgtattgtg

SEQ ID NO: 532167 - DNA, 75 bp, synthetic construct
  source 1..75: mol_type = other DNA
taggcgcaagaaaaattctggaaaaatatggtatacacattgattccgcagaaaatggaatatttttgaaacatg

SEQ ID NO: 532168 - DNA, 75 bp, synthetic construct
  source 1..75: mol_type = other DNA
ataggattggtagaagccaaagtggaacaaatcctgcgacgaatcaaggctatggttgggagtatggttctcctg

SEQ ID NO: 532169 - DNA, 75 bp, synthetic construct
  source 1..75: mol_type = other DNA
tgggccggacggatgcgttttgtggggctgagtcataaggagcgacgggagtatgccgatcgctataagcgcgat

SEQ ID NO: 532170 - DNA, 75 bp, synthetic construct
  source 1..75: mol_type = other DNA
atcatccggatggtaagagtttagttgcacatttgaaagaggattggaagctattttcacatcctcttttagatg

SEQ ID NO: 532171 - DNA, 75 bp, synthetic construct
  source 1..75: mol_type = other DNA
gttaaatgcgactggaggcaatgtaagtatttatgatatagataaagtcgaagttagcgtaagcaaacaagatta

SEQ ID NO: 532172 - DNA, 75 bp, synthetic construct
  source 1..75: mol_type = other DNA
caactaaagtcagatcctgactggcgtaatcgctccggttctatattgaagaaacaatatgcccgacgagatatc

SEQ ID NO: 532173 - DNA, 75 bp, synthetic construct
  source 1..75: mol_type = other DNA
aacaattccctggaaaagctaaatcgtgagttctcctaccccagcatcaaacaaagcccggacggtacgctacat

SEQ ID NO: 532174 - DNA, 75 bp, synthetic construct
  source 1..75: mol_type = other DNA
tcctcaaaaccgccttatgtgggcgttattgcaggacgtatcacgtcaggtgctttggcatggacagagacttgc

SEQ ID NO: 532175 - DNA, 75 bp, synthetic construct
  source 1..75: mol_type = other DNA
tgggtgacgcgaacgaatcacgcggtgagcgacccgacgggccgcccgctgatgctctttaacagtgaaggtaaa

SEQ ID NO: 532176 - DNA, 75 bp, synthetic construct
  source 1..75: mol_type = other DNA
gttgccattttgcattaaaatcaaattctggttaaaacaatgtatgccaatgttatatttctttgatgcatgtca

SEQ ID NO: 532177 - DNA, 75 bp, synthetic construct
  source 1..75: mol_type = other DNA
cccagatcatcgccatcctcaaacaagctgaggctggagctcccgtcccggagctctgccgcgagcatggcatca

SEQ ID NO: 532178 - DNA, 75 bp, synthetic construct
  source 1..75: mol_type = other DNA
agattcaattgaataccaagaggaatttaacgaatcctgtccggaatatgcaaagccaattagtaacatgatgag

SEQ ID NO: 532179 - DNA, 75 bp, synthetic construct
  source 1..75: mol_type = other DNA
gttcatcttcctgatggtcgatacagaatcaaaagaggtgaccatgactcgttggtggatatggtagaaagaatc

SEQ ID NO: 532180 - DNA, 75 bp, synthetic construct
  source 1..75: mol_type = other DNA
gaccttctgaacaggattcgacactataaaaaatgctctaggtttcatgttgtaacaggtgataaaaaaagaggt

SEQ ID NO: 532181 - DNA, 75 bp, synthetic construct
  source 1..75: mol_type = other DNA
gtactatggaacgcgttattgattcagtatggcatagtgctaataatgaaaccatagtcgatctttttggcggca

SEQ ID NO: 532182 - DNA, 75 bp, synthetic construct
  source 1..75: mol_type = other DNA
gtcaggtatgaagatgaaaataaaacgccagtgacgcctgaacaaataattactccccgccgttgggaggataaa

SEQ ID NO: 532183 - DNA, 75 bp, synthetic construct
  source 1..75: mol_type = other DNA
gtagttctggtgcaccccaaaggatatctggcaggggaaatgattcatcgccaggccctaacgtcgtcttgtcaa

SEQ ID NO: 532184 - DNA, 75 bp, synthetic construct
  source 1..75: mol_type = other DNA
caaaatatgaaggatggcgagggacgtttcagttatatagatataaaacggtagttctggtgcaccccaaaggat

SEQ ID NO: 532185 - DNA, 75 bp, synthetic construct
  source 1..75: mol_type = other DNA
atgggcaaactgccgggcatggggcagatcccggataacgtcaagtcacagatggacgataaagtgctggtgcgt

SEQ ID NO: 532186 - DNA, 75 bp, synthetic construct
  source 1..75: mol_type = other DNA
gagaagcacaagaagaaagtgctggtggtttctgccgacgtttatcgtccggcggcaatcaaacagcttgagacg

SEQ ID NO: 532187 - DNA, 75 bp, synthetic construct
  source 1..75: mol_type = other DNA
tggttatgcgaatataaaagatattcaggtaaatgctcgcagacgtgacaagttcctgattgccaccgagggaag

SEQ ID NO: 532188 - DNA, 75 bp, synthetic construct
  source 1..75: mol_type = other DNA
gtatgaacaagaatataagccagtagaagtggtgaaaaactcatctgtggtggacggtaaactcgttgaaacaga

SEQ ID NO: 532189 - DNA, 75 bp, synthetic construct
  source 1..75: mol_type = other DNA
atcataacttacctaccgcctttaccgttgatgaagaagacggcgagattgttcgtagcctgaaaatccgccaga

SEQ ID NO: 532190 - DNA, 75 bp, synthetic construct
  source 1..75: mol_type = other DNA
aaaattcctggatattcatttccattcacaaaagatttcttgtataaaaataatggtatgatattggatacaaaa

SEQ ID NO: 532191 - DNA, 75 bp, synthetic construct
  source 1..75: mol_type = other DNA
actggagcaacgaagtgtgcctggtatcgacggtggcgttgtcatgcttggcgtgcgtaccagcaaaatgcggaa

SEQ ID NO: 532192 - DNA, 75 bp, synthetic construct
  source 1..75: mol_type = other DNA
gtgacctctggactggaacgtttgtcgaacttactctcgaagaaagactctgtttttgtctctgatttactacgc

SEQ ID NO: 532193 - DNA, 75 bp, synthetic construct
  source 1..75: mol_type = other DNA
accaagaatgacaaagttgatgcctggatgctggcttgttatggctcccttaaagagcctgaggcatggactcca

SEQ ID NO: 532194 - DNA, 75 bp, synthetic construct
  source 1..75: mol_type = other DNA
tccactaaacccaagtgtgaaaatccgtcctggtatcgccctgagcgctataaggcgctgcctggtcagataggc

SEQ ID NO: 532195 - DNA, 75 bp, synthetic construct
  source 1..75: mol_type = other DNA
tacactggagtgaactggctcccgaagagcaaatccttttctgggaggattacgaatcgggcagggccacgtcat

SEQ ID NO: 532196 - DNA, 75 bp, synthetic construct
  source 1..75: mol_type = other DNA
cgccggggagagcaccagagtctggatgcttttctgtcccggcacggcggcgtcagggcatttctgtggacgccg

SEQ ID NO: 532197 - DNA, 75 bp, synthetic construct
  source 1..75: mol_type = other DNA
gcatcatttagcgatattcctgggaggagaaaccttatttctcaggccatagatgaaaccctgtatcgctctgaa

SEQ ID NO: 532198 - DNA, 75 bp, synthetic construct
  source 1..75: mol_type = other DNA
acaatgctcctgattattgtaggcagaaaatctgagtgggtaggaataaaaaacggaaatgatataaaaagtata

SEQ ID NO: 532199 - DNA, 75 bp, synthetic construct
  source 1..75: mol_type = other DNA
ccgccattcaggacgcacaacatgccgccaactgggcttcaatgaaagctgatgacgcgcagcacgccattatgg

SEQ ID NO: 532200 - DNA, 75 bp, synthetic construct
  source 1..75: mol_type = other DNA
cttaccctcgcggaagctgggccagttgaagccaatatcagccatgaaattatcggaaatggctattggcggtta

SEQ ID NO: 532201 - DNA, 75 bp, synthetic construct
  source 1..75: mol_type = other DNA
acacaacctgatgcgccaaacaggacagctctgatacgtgctgcattggctgatgaattgatggccgagcagatt

SEQ ID NO: 532202 - DNA, 75 bp, synthetic construct
  source 1..75: mol_type = other DNA
gaagtcgaaaaaaataatcaaatagttggtggtctcattgttctagaaagggatataaggaacttaaaaattgga

SEQ ID NO: 532203 - DNA, 75 bp, synthetic construct
  source 1..75: mol_type = other DNA
cgttaatctggaaaaactgcatgaccagcagaaaaagcggttgcatgaaagcgaaattcgccagcaactgattca

SEQ ID NO: 532204 - DNA, 75 bp, synthetic construct
  source 1..75: mol_type = other DNA
gagcttttttgcgtgagactgcgcgcaaacatgaatttgattatgtccttattgacatgagccccagcgttggtg

SEQ ID NO: 532205 - DNA, 75 bp, synthetic construct
  source 1..75: mol_type = other DNA
ttcgccctctcagatgcacaaatagagcaaaatggagtaatactggatacgatgaaagaaaacagaaaagaattc

SEQ ID NO: 532206 - DNA, 75 bp, synthetic construct
  source 1..75: mol_type = other DNA
cagaaagatctttccggaaccaaatcaggccattgatctggccatcgtcggcatcgtcgataccatcgatcggtt

SEQ ID NO: 532207 - DNA, 75 bp, synthetic construct
  source 1..75: mol_type = other DNA
ctttgcatcagagcttgtaatgcctgacatgttgtacttctgtcaacgacggatgaaaagtggctcttccgcaac

SEQ ID NO: 532208 - DNA, 75 bp, synthetic construct
  source 1..75: mol_type = other DNA
cggctatgtggacaatcccaggtgagcgtgagcaactggaaggagtcaagcattctcagcgtggctcgaagatgc

SEQ ID NO: 532209 - DNA, 75 bp, synthetic construct
  source 1..75: mol_type = other DNA
gtgccggatgcggcgcgagcgccttatccggcctacagttgggcatcgtttgagtcactgtcggtcggataagat

SEQ ID NO: 532210 - DNA, 75 bp, synthetic construct
  source 1..75: mol_type = other DNA
cattattcgcagcggagagtcattgtctgtcaccttcagagataagccagaaacttcagtttaccagaactaata

SEQ ID NO: 532211 - DNA, 75 bp, synthetic construct
  source 1..75: mol_type = other DNA
atgcaaaaaagtactcaagtgaaaatcctgtcgataatgagccaatcagagttagggcgtcgtcttggtaaaact

SEQ ID NO: 532212 - DNA, 75 bp, synthetic construct
  source 1..75: mol_type = other DNA
catggcgagccactggtcgagagccgctacctctacgacccgctgggacggcgaatggcaaaacgggtctggcgg

SEQ ID NO: 532213 - DNA, 75 bp, synthetic construct
  source 1..75: mol_type = other DNA
atgcatctggctcgagtcaccggcgcggtggtatccacgcaaaaatcaccttctctgatcgggaaaaaactgctg

SEQ ID NO: 532214 - DNA, 75 bp, synthetic construct
  source 1..75: mol_type = other DNA
accaacggtcaggatgtaaatatgcgtggctatgatcatcgcggcgtgctggttcttgtcgatggtgttcgctag

SEQ ID NO: 532215 - DNA, 75 bp, synthetic construct
  source 1..75: mol_type = other DNA
gcgtggggagctggcgtgcagtttaacccgaccgaatccgtggccattgatgtcgcttatgaaggttccggcagt

SEQ ID NO: 532216 - DNA, 75 bp, synthetic construct
  source 1..75: mol_type = other DNA
cagcaacccgtcgcgctccggcgtcagctatctgcgctggcgcaatctggacaacaaccgttcggggagcgtggc

SEQ ID NO: 532217 - DNA, 75 bp, synthetic construct
  source 1..75: mol_type = other DNA
aaacaggtggtgtatgaactgccggggcgtaacgtaccgctgatcctgtgcagcaacccgtcgcgctccggcgtc

SEQ ID NO: 532218 - DNA, 75 bp, synthetic construct
  source 1..75: mol_type = other DNA
caggctaaaaccgcgttcttcaccaccggtgcggaagcggtggaaaacgcggtgaaaatcgcccgcgcccatacc

SEQ ID NO: 532219 - DNA, 75 bp, synthetic construct
  source 1..75: mol_type = other DNA
ggagagcgcattattgcaaatgctctcaatttagaacccgccagtatctggccaagccgttacaacaaggacctg

SEQ ID NO: 532220 - DNA, 75 bp, synthetic construct
  source 1..75: mol_type = other DNA
atatagacggttttccacgcatcatctcaggtattagccatggcgaaatcagccaggttttaaataacgctacgc

SEQ ID NO: 532221 - DNA, 75 bp, synthetic construct
  source 1..75: mol_type = other DNA
gcatgtgctgaatacgcagctttcagtggtgatgtttatgctgcggcggatacaaccgttaaccaccctggttta

SEQ ID NO: 532222 - DNA, 75 bp, synthetic construct
  source 1..75: mol_type = other DNA
ggcgcatacggcaacgtgattcgcttcctgtatccgctgaccatcccggatgcgcaattcgatgcggcaatgaaa

SEQ ID NO: 532223 - DNA, 75 bp, synthetic construct
  source 1..75: mol_type = other DNA
gatgattgctgatgaagtgcaaagcggctttgcgcgtaccggtaagctgtttgccatggatcattacgccgataa

SEQ ID NO: 532224 - DNA, 75 bp, synthetic construct
  source 1..75: mol_type = other DNA
gcccgttccctggttcggtgtatcacgtgccgtatccgtcatattcacaggacatttcgacgcaagattctctcg

SEQ ID NO: 532225 - DNA, 75 bp, synthetic construct
  source 1..75: mol_type = other DNA
ttatggacgcgcccgcgccgggcgggcttggcggcacctacgccgggaatccgctggcggtggctgccgcgcacg

SEQ ID NO: 532226 - DNA, 75 bp, synthetic construct
  source 1..75: mol_type = other DNA
ccggtgcggaagcggtggaaaacgcggtgaaaatcgcccgcgcccataccggacgccctggcgtgattgcgttta

SEQ ID NO: 532227 - DNA, 75 bp, synthetic construct
  source 1..75: mol_type = other DNA
gcccgttccccggttcggtttatcacgtgccgtatccgtcagatttacagggcatttcgacgcaagattctctcg

SEQ ID NO: 532228 - DNA, 75 bp, synthetic construct
  source 1..75: mol_type = other DNA
ggccgaatccgctgtcatggatagatccccttggattaagtggtagcggtcttgtaaatggcgtgcctcaaaatc

SEQ ID NO: 532229 - DNA, 75 bp, synthetic construct
  source 1..75: mol_type = other DNA
tcgggcttgacctccccgcccgttatcgggccttccggccacaaggacaatttatcgcgatgggcggcgccaccg

SEQ ID NO: 532230 - DNA, 75 bp, synthetic construct
  source 1..75: mol_type = other DNA
gcgccatcaggtcacgctctggaacagcgtcccggcgctgttcgatatgctgctgacctggtgtgaaggtttcgc

SEQ ID NO: 532231 - DNA, 75 bp, synthetic construct
  source 1..75: mol_type = other DNA
ggcgtggacgtgggcgggtgtattaacactctcaccagtcatctgccgtcgccgttggcgaaagggaacccgcag

SEQ ID NO: 532232 - DNA, 75 bp, synthetic construct
  source 1..75: mol_type = other DNA
atttttataggtatgaaatttttgcatgtttatagaaaaatacatgttaaagatataattaagaaattaaatttt

SEQ ID NO: 532233 - DNA, 75 bp, synthetic construct
  source 1..75: mol_type = other DNA
ccataataggtaattttttaccaaaggagtcagctgatcaacttatagcagcgcttaagaaaaataaacaattgc

SEQ ID NO: 532234 - DNA, 75 bp, synthetic construct
  source 1..75: mol_type = other DNA
ttatcatccactcacggtaaaaaacaaccgtacaaatgaagaccttttaattaataatgatttttgtattcaaaa

SEQ ID NO: 532235 - DNA, 75 bp, synthetic construct
  source 1..75: mol_type = other DNA
aattcaagcgtattagctgggaagaagccaccgcgtttattgcggcggaacttcaacgcgtaaccgaaaaatatg

SEQ ID NO: 532236 - DNA, 75 bp, synthetic construct
  source 1..75: mol_type = other DNA
actataaacaatggtgaaaccgtgcgccatagtgcctgcctggttaactgcggcagtcgctgcgcgctgaaggtg

SEQ ID NO: 532237 - DNA, 75 bp, synthetic construct
  source 1..75: mol_type = other DNA
agtatggatcaacccgatcgatgccagtgcgcggcaactgtcgtctggtgatctggtacacgtgtttaatgatcg

SEQ ID NO: 532238 - DNA, 75 bp, synthetic construct
  source 1..75: mol_type = other DNA
cagagtggatggcgaagcattacggacaagttaaagagaagcgatcatatctacctgaatgggaagtagcaatga

SEQ ID NO: 532239 - DNA, 75 bp, synthetic construct
  source 1..75: mol_type = other DNA
ccatttctcgcaaatcgcccattccgatctggtggtgtttttcgggatgaatctgtcggaaacgcgcatgtcggg

SEQ ID NO: 532240 - DNA, 75 bp, synthetic construct
  source 1..75: mol_type = other DNA
ctggaagcggaagatctggtggacagctcctatgcggcgggttcccacaactatatgatcgccctgcaaaaaacc

SEQ ID NO: 532241 - DNA, 75 bp, synthetic construct
  source 1..75: mol_type = other DNA
tttaaatcagacatcgaagcgaaacaggtcgcggccattattttcgaaccggtgcagggcgagggcggtttcaac

SEQ ID NO: 532242 - DNA, 75 bp, synthetic construct
  source 1..75: mol_type = other DNA
caagcctatcaagttcctcggtgttggcgagaaaacagaggcgctggagccgttccacccggaccgtatcgcttc

SEQ ID NO: 532243 - DNA, 75 bp, synthetic construct
  source 1..75: mol_type = other DNA
aaatacagctccgatagttttaatgaactgaaactaatacatgatgaaataaaaaaaggaaacagaaatgcactg

SEQ ID NO: 532244 - DNA, 75 bp, synthetic construct
  source 1..75: mol_type = other DNA
catctgaaagctcgtatggttgatggaagtcaatttcagatgcaggatagcgatctggctaggctcatatctttt

SEQ ID NO: 532245 - DNA, 75 bp, synthetic construct
  source 1..75: mol_type = other DNA
gctataagccgcaactggttgaaggcagcgggcgtacccagaccgtgcgtatggtgttgattaccagcagcacgg

SEQ ID NO: 532246 - DNA, 75 bp, synthetic construct
  source 1..75: mol_type = other DNA
aaaagtttgtattttgttgttcttgctatgattctcattttcatatttagcattggttatctttataggtttttt

SEQ ID NO: 532247 - DNA, 75 bp, synthetic construct
  source 1..75: mol_type = other DNA
aatggtgcagctgtaaaaactgatgtttctgattcgccgtctcatgattctaatttgcgttcttttaatttagtt

SEQ ID NO: 532248 - DNA, 75 bp, synthetic construct
  source 1..75: mol_type = other DNA
gctgcgcaggatccagatccatctgctggataaatatcgcaaagtaccgcccgagcctgttcatgctgatattcc

SEQ ID NO: 532249 - DNA, 75 bp, synthetic construct
  source 1..75: mol_type = other DNA
gtgaaaaggtggtttccggcggcctgttcctgattgattccgaagccaatatttctggcgcactggagcggatgc

SEQ ID NO: 532250 - DNA, 75 bp, synthetic construct
  source 1..75: mol_type = other DNA
gcagcgcctttaaggttatcgaaacacaacgtccgaaactggcctgttaccggtgtgaccatatcgtgcaggcac

SEQ ID NO: 532251 - DNA, 75 bp, synthetic construct
  source 1..75: mol_type = other DNA
ccaaaacttctccgtacttggtatcagcactgggaaagccaaaagcaggggcgaaatttactcgtcgaactggat

SEQ ID NO: 532252 - DNA, 75 bp, synthetic construct
  source 1..75: mol_type = other DNA
gtgggatcattaacggatgtcgcctcccgcgtcatgctgtcgtttggtgagtttgaattcagtattgatactgct

SEQ ID NO: 532253 - DNA, 75 bp, synthetic construct
  source 1..75: mol_type = other DNA
tgcacaacgtagcacctggcatgattttttgccttcaggcaccgcatctgtttcggagaaacacagtgaacgtta

SEQ ID NO: 532254 - DNA, 75 bp, synthetic construct
  source 1..75: mol_type = other DNA
cagtgagtcagaaaatgttgcggcgacattgaaagcagtaaaggaagtatatgaccttgccaatggaaaacaacc

SEQ ID NO: 532255 - DNA, 75 bp, synthetic construct
  source 1..75: mol_type = other DNA
cgctgtacaaagtggcgaccgaaggcaagagcggcgagacctacaatatcggcggtcataacgagcgtaaaaata

SEQ ID NO: 532256 - DNA, 75 bp, synthetic construct
  source 1..75: mol_type = other DNA
gaccgcatagagggagatttacctaagaaatatgatagtgatgtttcgagttggttggggagaaatcgtgataaa

SEQ ID NO: 532257 - DNA, 75 bp, synthetic construct
  source 1..75: mol_type = other DNA
gggggggcggtggacgcgcaggcgctggcggtggtgttagcggcaaggcatatggttcaggtggcggtggtgcat

SEQ ID NO: 532258 - DNA, 75 bp, synthetic construct
  source 1..75: mol_type = other DNA
acaccccaacacctggtacgacattttcaattgtcgagatggttggtggcggcggggccggtggtggatgccagg

SEQ ID NO: 532259 - DNA, 75 bp, synthetic construct
  source 1..75: mol_type = other DNA
cactggctgacaaggtaacagcccagtcggtaatggaccggaaaaatgttaccgacaggtcgagccagcttagca

SEQ ID NO: 532260 - DNA, 75 bp, synthetic construct
  source 1..75: mol_type = other DNA
gtatcactttccggagaaactaatcccgctgattatcatcaacgccctggcgggtaaaccgctgccggtgtatgg

SEQ ID NO: 532261 - DNA, 75 bp, synthetic construct
  source 1..75: mol_type = other DNA
ttcttgagcagctgcgccagatgaaaaatatgggcggcatggctagcctgatgggcaagttgccgggcatggggc

SEQ ID NO: 532262 - DNA, 75 bp, synthetic construct
  source 1..75: mol_type = other DNA
cgttccatccggaccgcatcgcgtcacgtattctcggcatgggcgacgtactgtcgctgatcgaagatatcgaaa

SEQ ID NO: 532263 - DNA, 75 bp, synthetic construct
  source 1..75: mol_type = other DNA
ggatacgttggacgctggctgaatacccgggttttcacctcatcaggtacgtacaccccgacgccaggaacaaaa

SEQ ID NO: 532264 - DNA, 75 bp, synthetic construct
  source 1..75: mol_type = other DNA
ctgattaaccagaaacgcattgcaccgctgaatcttctgagtgttgaccctaacaatcagagccagattattgtg

SEQ ID NO: 532265 - DNA, 75 bp, synthetic construct
  source 1..75: mol_type = other DNA
cattatcttggtttgggagctacaaacggatacgtgggacgcttggtgaatacccgggttttcacgtcatcaggt

SEQ ID NO: 532266 - DNA, 75 bp, synthetic construct
  source 1..75: mol_type = other DNA
gtggcggtggtgcatacgatgccggttatagcggaactaatatgacgggcgggaaaggtgctgctggaatttgta

SEQ ID NO: 532267 - DNA, 75 bp, synthetic construct
  source 1..75: mol_type = other DNA
ccatttcactcatcgtttttatcggctctggatatgggctgctgacccggcttatgccgcaaaaaacacgccccc

SEQ ID NO: 532268 - DNA, 75 bp, synthetic construct
  source 1..75: mol_type = other DNA
gctttggttgggcttttctgcgcatgtactgcccgaaaaatatgctgatttaaatgaccagattgtgtctgtttt

SEQ ID NO: 532269 - DNA, 75 bp, synthetic construct
  source 1..75: mol_type = other DNA
caaccacaattgcgcgatcgcctctggtggcctggcgctctgctgactgattctgcggcaaaagccaaagccgat

SEQ ID NO: 532270 - DNA, 75 bp, synthetic construct
  source 1..75: mol_type = other DNA
ggcttttccgggcgtccccctggcggggcgggctgtcgtgaacggagccagcgaagctgtctccgccctggcggg

SEQ ID NO: 532271 - DNA, 75 bp, synthetic construct
  source 1..75: mol_type = other DNA
atctcaatatcactggtcgcttaccggtcaaactggaccctgattttgtacgagtggatgagaacagcaatcccc

SEQ ID NO: 532272 - DNA, 75 bp, synthetic construct
  source 1..75: mol_type = other DNA
actctgctgggtgcggtttctggggctgggcaattgccctggcaggcaggccgtagcgttaccgattatctgcaa

SEQ ID NO: 532273 - DNA, 75 bp, synthetic construct
  source 1..75: mol_type = other DNA
ttattggagacacgtttcagaagatattagagagctgatggtgtctactatgtattcttattacgaagggaatat

SEQ ID NO: 532274 - DNA, 75 bp, synthetic construct
  source 1..75: mol_type = other DNA
cggcgcgtcaggatttggaattatggtactgggcctgaccgcgacacctatcgcgatgaagcactacgattttga

SEQ ID NO: 532275 - DNA, 75 bp, synthetic construct
  source 1..75: mol_type = other DNA
aagtttgatgatgcgacagggagagaacaggtctacatccacgcgcagaagaacatggataccgaagtgctcaac

SEQ ID NO: 532276 - DNA, 75 bp, synthetic construct
  source 1..75: mol_type = other DNA
gcacaactccatgccctgaatgcccggctgtggggtgccagaatgcgcctcgcggcgcagtatggccaggacgcc

SEQ ID NO: 532277 - DNA, 75 bp, synthetic construct
  source 1..75: mol_type = other DNA
tacgcatccttttttcattgcattgcccgcttacggttccgcgctcaccagtgataatcgcgttgagagcgaagc

SEQ ID NO: 532278 - DNA, 75 bp, synthetic construct
  source 1..75: mol_type = other DNA
gttttccattgagtacacggacattagaagactggaatagtattgtctctgttggtggagttagcacacctcgat

SEQ ID NO: 532279 - DNA, 75 bp, synthetic construct
  source 1..75: mol_type = other DNA
ttacgccacgggtgcaggggattgctcagagtaacgcgctggtaactattgaacagaatggttttgtggtttatc

SEQ ID NO: 532280 - DNA, 75 bp, synthetic construct
  source 1..75: mol_type = other DNA
gcctgaggtggaagttattaagccagcgtccatccgcaatcagattattgacgacatgcgcagtgcgctcacccg

SEQ ID NO: 532281 - DNA, 75 bp, synthetic construct
  source 1..75: mol_type = other DNA
agggcttatcaaagacctacgcaagcagattgttgagctacaacgaactatcctggctcagcgccgcgacctcca

SEQ ID NO: 532282 - DNA, 75 bp, synthetic construct
  source 1..75: mol_type = other DNA
aagaacgcctggaattttctcgtaacgcgttggcaccgcatgagcctggcggtcagttttttgaagctcgagcag

SEQ ID NO: 532283 - DNA, 75 bp, synthetic construct
  source 1..75: mol_type = other DNA
ttaatcgactttgggtttaatttactatcgtcagccagaatagcaaagaataaagagaatacatttatcgtaagt

SEQ ID NO: 532284 - DNA, 75 bp, synthetic construct
  source 1..75: mol_type = other DNA
atcgccttggattgatactgactcgccttaacaacggtgaatcagtcacggtgagtgggctcgctgaagagttta

SEQ ID NO: 532285 - DNA, 75 bp, synthetic construct
  source 1..75: mol_type = other DNA
gaaatactggataccggatgtcgaagtaatacaaccggcctcaatccgtcaacaacttgctgaagatatgcaatc

SEQ ID NO: 532286 - DNA, 75 bp, synthetic construct
  source 1..75: mol_type = other DNA
caagggcatttttgcccgaggtggtaatgtcactggtgattatggtgaacatctcgtaaagcaactttatggcgg

SEQ ID NO: 532287 - DNA, 75 bp, synthetic construct
  source 1..75: mol_type = other DNA
caaatttgtgatccatcttaatggcgtgcttcttaaaacgcctggcgtagaaaacgtcactgaagagtttcagtc

SEQ ID NO: 532288 - DNA, 75 bp, synthetic construct
  source 1..75: mol_type = other DNA
tttgcgactgaccaactggcgcagcgcacctgagctggacaacgattatgaagcccgcccggccaatggctggga

SEQ ID NO: 532289 - DNA, 75 bp, synthetic construct
  source 1..75: mol_type = other DNA
gacctggtgacgccgtatctgtccacgttcctgggctttatcggcattaccgatgtgaaatttgtcttcgccgaa

SEQ ID NO: 532290 - DNA, 75 bp, synthetic construct
  source 1..75: mol_type = other DNA
aaccgcgcttcacgtcgttgcggcgggtccctgcccgttgttgtgtccggtgccattcacctgtttaagcccctg

SEQ ID NO: 532291 - DNA, 75 bp, synthetic construct
  source 1..75: mol_type = other DNA
cggccccggctggaaagcgccttctgatatccgcttacagatacgcgatgatgcactggtactcaacgacaacgg

SEQ ID NO: 532292 - DNA, 75 bp, synthetic construct
  source 1..75: mol_type = other DNA
accagccgatcattatggggcgcacctaccaccaggaaaaccgcacccccggcagcctgccgggaacaaagacgc

SEQ ID NO: 532293 - DNA, 75 bp, synthetic construct
  source 1..75: mol_type = other DNA
cgctttgattttgccaaggacaaagaggcgcatcgggaatatttccagacgatcccggtcagtcgtatgatcgtc

SEQ ID NO: 532294 - DNA, 75 bp, synthetic construct
  source 1..75: mol_type = other DNA
atcgccgccgattatgcggaatatgtggcagaggcgcgttacagaagaaaatttcctgaggatgtaagccatgcg

SEQ ID NO: 532295 - DNA, 75 bp, synthetic construct
  source 1..75: mol_type = other DNA
acgcagcacatgcaaaccagacgctgtcccccatctttgacagggaaaaagagcaacagcgactgcagcaggcgc

SEQ ID NO: 532296 - DNA, 75 bp, synthetic construct
  source 1..75: mol_type = other DNA
atggctcgtctaaaatacttaataatgtagctgaagtgaacaaacttagcgataccaatggctcatcaatcaagg

SEQ ID NO: 532297 - DNA, 75 bp, synthetic construct
  source 1..75: mol_type = other DNA
gccggggcagcagtatgatgaggagtccggcctgtattataaccgccaccgctattatgacccgctgcaggggcg

SEQ ID NO: 532298 - DNA, 75 bp, synthetic construct
  source 1..75: mol_type = other DNA
atttctttacggtgattatgaaatagaaaaactccatgactctatcagaagaatagaaaccattccgtactttat

SEQ ID NO: 532299 - DNA, 75 bp, synthetic construct
  source 1..75: mol_type = other DNA
gtgtacaggtgcacggtggttctggtggcgggggaattgttaccctagactctaccttgggtaacgaattcagtc

SEQ ID NO: 532300 - DNA, 75 bp, synthetic construct
  source 1..75: mol_type = other DNA
tcgcggaagcggcactatggtccctgcaagatgcagaatccttcaaatcaaactacacggatagtgttcaagctg

SEQ ID NO: 532301 - DNA, 75 bp, synthetic construct
  source 1..75: mol_type = other DNA
tttgcacagagccagattttatctgcccatcctaaagaaggggaaagtcaacaacatctgaccagcctgcggaaa

SEQ ID NO: 532302 - DNA, 75 bp, synthetic construct
  source 1..75: mol_type = other DNA
gttaccccaaatcaagaacgtactataattaaaggtatagtcgagagatcaaatggggttattgctccaacatct

SEQ ID NO: 532303 - DNA, 75 bp, synthetic construct
  source 1..75: mol_type = other DNA
taccggggaaagcgatcttgttgaccagacgaagttcgcgaatacacttggggatgccaccgggatggcgctgca

SEQ ID NO: 532304 - DNA, 75 bp, synthetic construct
  source 1..75: mol_type = other DNA
cagggcagttaacatgttaactggctgtccgggcatttttgcggtttttatctttattattcagtttgttgtgcg

SEQ ID NO: 532305 - DNA, 75 bp, synthetic construct
  source 1..75: mol_type = other DNA
tttatgacctcgggaaaaaagcagcagcggactttatgcaacagcagtcccgtgatggtggtctgttctccggag

SEQ ID NO: 532306 - DNA, 75 bp, synthetic construct
  source 1..75: mol_type = other DNA
agagaagcattagataaagcactaaacgcagctagtgttaaattaagagtggtttgggatatgctacttaaagct

SEQ ID NO: 532307 - DNA, 75 bp, synthetic construct
  source 1..75: mol_type = other DNA
agacaaataagcttgattttgaccctaaaaacccacgtttctttcgtctcaatgatgccagtaacgctgcaacag

SEQ ID NO: 532308 - DNA, 75 bp, synthetic construct
  source 1..75: mol_type = other DNA
catgggctaccggtacttgaagaaagcctagaggattatgcgaaacgcacaaatcaaagcattctcgctgtaaga

SEQ ID NO: 532309 - DNA, 75 bp, synthetic construct
  source 1..75: mol_type = other DNA
gcaaagcgcaatttatagttactgccgttaaaggcgaaatcaaacgccgccagcgccgcaagaccaaagaagcgg

SEQ ID NO: 532310 - DNA, 75 bp, synthetic construct
  source 1..75: mol_type = other DNA
gaaccatcatcggtgagtctcgaagaataaaagatattgcagcagtggttgagaaacccgaagcaattgaaattc

SEQ ID NO: 532311 - DNA, 75 bp, synthetic construct
  source 1..75: mol_type = other DNA
atcggtcagcaaggttactttcctggagaacctttattggcagtaaaaagcaatggaaactacatcgtggttgag

SEQ ID NO: 532312 - DNA, 75 bp, synthetic construct
  source 1..75: mol_type = other DNA
gtagaaatattgactttgtatttggtaatttatcagaagagctttatcaaagacttaaaaataataatacgctgg

SEQ ID NO: 532313 - DNA, 75 bp, synthetic construct
  source 1..75: mol_type = other DNA
tagaaatattgactttgtatttggtaatttatcagaagagctttatcaaagacttaaaaataataatacgctgga

SEQ ID NO: 532314 - DNA, 75 bp, synthetic construct
  source 1..75: mol_type = other DNA
ttgtccagaaaactttctgcgaaaatgcaattcgttccgttgtcatgattgatgacgattttctgacgtattctg

SEQ ID NO: 532315 - DNA, 75 bp, synthetic construct
  source 1..75: mol_type = other DNA
ttttattccatttaatgagaatcagcgtttttcagaggactacatgtcatggcttgttatcgtttataataaaaa

SEQ ID NO: 532316 - DNA, 75 bp, synthetic construct
  source 1..75: mol_type = other DNA
atgagggctattcttttacgaccagaggtaaaggccttgctacgcattaaatctgattcgaccctaacggagatg

SEQ ID NO: 532317 - DNA, 75 bp, synthetic construct
  source 1..75: mol_type = other DNA
acaggctcattaaagttctggagctttttaacgccagtcagagtaaagcattgccatttgctgaacattcgaaat

SEQ ID NO: 532318 - DNA, 75 bp, synthetic construct
  source 1..75: mol_type = other DNA
cgacggctctaaatttatggatgcctatcaaatggatgcggtgaagttgccatcagcctatggtcaactcagcta

SEQ ID NO: 532319 - DNA, 75 bp, synthetic construct
  source 1..75: mol_type = other DNA
ccgccgacctgaagatgatgtacgcaccaaaattcgccgctggcgaggtatttgggcttcaggaagcctccggca

SEQ ID NO: 532320 - DNA, 75 bp, synthetic construct
  source 1..75: mol_type = other DNA
gtgactcattataaaaaaagcctgatacttattttatgttttattagtggatttgtgttttttattacctataat

SEQ ID NO: 532321 - DNA, 75 bp, synthetic construct
  source 1..75: mol_type = other DNA
gccaccatgaagaagccaaccgggcggcgattgtggagtcgctccgtgtcctgctggacgccttctcccccagga

SEQ ID NO: 532322 - DNA, 75 bp, synthetic construct
  source 1..75: mol_type = other DNA
ctcatgatcaacctgcatacaaacagacagcgttaccaagccctgatgaatttcgggcagatttagaacttattt

SEQ ID NO: 532323 - DNA, 75 bp, synthetic construct
  source 1..75: mol_type = other DNA
agttacgtgaagcaaggttatataagcaagcatccaaaaaaagaaagattgacgctctaataaaggaaagtaaag

SEQ ID NO: 532324 - DNA, 75 bp, synthetic construct
  source 1..75: mol_type = other DNA
caaccgtctgctggggctgggtaatgaactgcttcagcagcggcagggactggtgaatgtgccgttacggctgcc

SEQ ID NO: 532325 - DNA, 75 bp, synthetic construct
  source 1..75: mol_type = other DNA
gcggccacacaggaacgcctgaacagaaatattgctgccagaagcgccgcccagaatgcgctgaacagtacaacg

SEQ ID NO: 532326 - DNA, 75 bp, synthetic construct
  source 1..75: mol_type = other DNA
tcagcggacaggtaccgctttttcggataatgcggccctgtttgcccgttcggcagcctcgatgcgtgaatatgg

SEQ ID NO: 532327 - DNA, 75 bp, synthetic construct
  source 1..75: mol_type = other DNA
gagcaactgcgaaattacgaagccaaccttgccgacagtaacgccagcgcccgcgcagccaatgaagcgcaactg

SEQ ID NO: 532328 - DNA, 75 bp, synthetic construct
  source 1..75: mol_type = other DNA
gcagctcaagccaggctgaccactgctcttgcaagtggctccgccacagaaaaagtcagggccagaactgcgctt

SEQ ID NO: 532329 - DNA, 75 bp, synthetic construct
  source 1..75: mol_type = other DNA
tggcagcttaaggatgccatcactggcgtcattaacgaacaggccagcatgcctggatcgcctctgtggcgttta

SEQ ID NO: 532330 - DNA, 75 bp, synthetic construct
  source 1..75: mol_type = other DNA
gtgaccgatgccgcaggcagcgtgaagccgacaatgcaaaagttgattccggccgattcgctccgtttgcagttc

SEQ ID NO: 532331 - DNA, 75 bp, synthetic construct
  source 1..75: mol_type = other DNA
aaggagaataatgccatagtttatatcaataaatggcctggtaatcatgcagctcaatttcaatgggctttaaaa

SEQ ID NO: 532332 - DNA, 75 bp, synthetic construct
  source 1..75: mol_type = other DNA
ctcagagaattatccatccatattatcgagatggttatagaagaaactgatgtaggtattagctggattgtcagg

SEQ ID NO: 532333 - DNA, 75 bp, synthetic construct
  source 1..75: mol_type = other DNA
ttgttgtgccggtgtcagaagcaaaacgtataacgggtctgccggatgagcagcctgtgaaatcgtttttccgca

SEQ ID NO: 532334 - DNA, 75 bp, synthetic construct
  source 1..75: mol_type = other DNA
tacacatcagcagttatcaaccacgcaaaaacgagtagcggataacagccaacaaattaatacgctcaataacca

SEQ ID NO: 532335 - DNA, 75 bp, synthetic construct
  source 1..75: mol_type = other DNA
atggtaaacgcccgtcaggaggctgcggatatcgcacagcagcaacaagccgaaacccaacaaacgcagattacc

SEQ ID NO: 532336 - DNA, 75 bp, synthetic construct
  source 1..75: mol_type = other DNA
tcttactccagaattaaaaaaagaaattaatgaatctttgagtgaattaccgccagaaattactggtatttattt

SEQ ID NO: 532337 - DNA, 75 bp, synthetic construct
  source 1..75: mol_type = other DNA
gaagttagccaacggcgcgcacactacccgaagacgaaaccgtaacgcatccgataatggcatgggaaaagctta

SEQ ID NO: 532338 - DNA, 75 bp, synthetic construct
  source 1..75: mol_type = other DNA
aaaaaaatggggacagagacgggtaagctgctgattggactattgaataataatcatgatgaatcagaagagtcg

SEQ ID NO: 532339 - DNA, 75 bp, synthetic construct
  source 1..75: mol_type = other DNA
aacggcacaaaatgtcgggctaagaatttctcaatctttatgctcaaagtatgcgctattactggatcaagattc

SEQ ID NO: 532340 - DNA, 75 bp, synthetic construct
  source 1..75: mol_type = other DNA
aacgggtgtggcgacgtgaacgggaccgtgacgggctggatgtcgctgtcacggaaaccgcaagtgacctggtac

SEQ ID NO: 532341 - DNA, 75 bp, synthetic construct
  source 1..75: mol_type = other DNA
atgtcgctgtcacggaaaccgcaagtgacctggtacggctgggacggcgaccgcctgaccacaatacagaacgac

SEQ ID NO: 532342 - DNA, 75 bp, synthetic construct
  source 1..75: mol_type = other DNA
agcaattgcaatggctgcgttacatgtcaataaaatatttggttctgaacaacatttgttaatacttgctgctga

SEQ ID NO: 532343 - DNA, 75 bp, synthetic construct
  source 1..75: mol_type = other DNA
atgggcagtgaatattaccggaccctgcagaatggcgggcgtcaggccgctgcggcagcccgggagcagcgacgt

SEQ ID NO: 532344 - DNA, 75 bp, synthetic construct
  source 1..75: mol_type = other DNA
tcctcatccttatgagtcctggtttccatgggtagaggccgttacaggacatcatggttttatattacattccca

SEQ ID NO: 532345 - DNA, 75 bp, synthetic construct
  source 1..75: mol_type = other DNA
agacaatcacccagccctgcagcgcgttcccgcatgcttaaacagcgtgacatggttaaagggggtgagaaggga

SEQ ID NO: 532346 - DNA, 75 bp, synthetic construct
  source 1..75: mol_type = other DNA
gattatatgccgcaatggaaaataatcaccctttgtgtgtcacacagttcctctctaaagtttatggaatcgctg

SEQ ID NO: 532347 - DNA, 75 bp, synthetic construct
  source 1..75: mol_type = other DNA
ctgatggccaattacccgtaggtaaatactcattaaacgctcttattaataataaaaggacgccaatccatctgg

SEQ ID NO: 532348 - DNA, 75 bp, synthetic construct
  source 1..75: mol_type = other DNA
atgaaagtttcaatcaatatccccggcgctggtcaagtctatgtatctggcgcggcggaggtaattaaccgaaag

SEQ ID NO: 532349 - DNA, 75 bp, synthetic construct
  source 1..75: mol_type = other DNA
atgaaagtttcaatcaatatccccggcgctggtcaagtctatgtatcaggcgcggcggaagtaattaatcgaaag

SEQ ID NO: 532350 - DNA, 75 bp, synthetic construct
  source 1..75: mol_type = other DNA
agataaacaggccagacttcgcgatattgaccaacgaatccggcaggcacaagaacgcctggaattttcccgtaa

SEQ ID NO: 532351 - DNA, 75 bp, synthetic construct
  source 1..75: mol_type = other DNA
agacaggtttaccagtctgaaatcgctaatagccaacgaattattgaaaatctcactgaacagcgcgcacaaatt

SEQ ID NO: 532352 - DNA, 75 bp, synthetic construct
  source 1..75: mol_type = other DNA
aaggataaatttctggtaaggaggacacgtatggaagtaggcaagttggggaaaccgtatccgttgctgaatctg

SEQ ID NO: 532353 - DNA, 75 bp, synthetic construct
  source 1..75: mol_type = other DNA
atgatgaacggacatactgacaacgtgaaaatatttatgcaagaaattcagtcactggtagataatcacatcatt

SEQ ID NO: 532354 - DNA, 75 bp, synthetic construct
  source 1..75: mol_type = other DNA
acctgtgctgttaattttattaataaccctaataccgcatggcgattagatgcaatgctgccgggaaatattttt

SEQ ID NO: 532355 - DNA, 75 bp, synthetic construct
  source 1..75: mol_type = other DNA
gttttttttggcgggtattacaattacctgtgctgttaattttattaataaccctaataccgcatggcgattaga

SEQ ID NO: 532356 - DNA, 75 bp, synthetic construct
  source 1..75: mol_type = other DNA
tccgatcgaaataattcctggagcgtttctgcttcaggcgacaatgatgaattcaaagatatgaaagcgtcacta

SEQ ID NO: 532357 - DNA, 75 bp, synthetic construct
  source 1..75: mol_type = other DNA
atacatcagtagctctgggtatgaagctgtttgtaactcatgttacagtaacagtcattactatctcgaaggtgc

SEQ ID NO: 532358 - DNA, 75 bp, synthetic construct
  source 1..75: mol_type = other DNA
ttaagaaagctctaaagcagctggaagaaattggttatctggaatatcaggaaatgaggagtggcagggacatcg

SEQ ID NO: 532359 - DNA, 75 bp, synthetic construct
  source 1..75: mol_type = other DNA
agcgtcggagattacaatcaacagtggttaccaggtcatctcaagcggtggcagtgtaaccaccacgaccattta

SEQ ID NO: 532360 - DNA, 75 bp, synthetic construct
  source 1..75: mol_type = other DNA
ctcttggggtcagggccattggaaatgtgaatggtggcggtggatttgtttattctcccgtgtatcacatcagca

SEQ ID NO: 532361 - DNA, 75 bp, synthetic construct
  source 1..75: mol_type = other DNA
ggaaatatagatctgggtgtggttggcgtgggctattttgctggtaatatttctcccgagagttatcagactggt

SEQ ID NO: 532362 - DNA, 75 bp, synthetic construct
  source 1..75: mol_type = other DNA
ggtacggtgagcctgggttatttcgccagcggcattacggcggagcaatatttttcagggggtcaggaattcttt

SEQ ID NO: 532363 - DNA, 75 bp, synthetic construct
  source 1..75: mol_type = other DNA
tccgatcgaaataattcctggagcgtttctgcttcaggcgacaatgacgaatttaaagatatggaggcgtcactg

SEQ ID NO: 532364 - DNA, 75 bp, synthetic construct
  source 1..75: mol_type = other DNA
aaactcggttatcaccaccaccttaaccgaaggtgctattggctacgccaaacttgatacccgcaagggctatca

SEQ ID NO: 532365 - DNA, 75 bp, synthetic construct
  source 1..75: mol_type = other DNA
tggttgctgatggcggctttgtatacctcaacggcattcaggatgacagcaaacttactttacgctggggtgata

SEQ ID NO: 532366 - DNA, 75 bp, synthetic construct
  source 1..75: mol_type = other DNA
ggagagacgaatggggaaacgacaaagatgacattctttggtccttctggtgaggttctcaagtttttggttaat

SEQ ID NO: 532367 - DNA, 75 bp, synthetic construct
  source 1..75: mol_type = other DNA
gttttctggagtgcattggggagcggagtcagcgtcagctcgctgacagtctggagaaacagctcaatggaggga

SEQ ID NO: 532368 - DNA, 75 bp, synthetic construct
  source 1..75: mol_type = other DNA
tttagtgtggagcccattccgggcggtgttctggcgcgtattggggagcggaggcatcgtcaactcgctgacagc

SEQ ID NO: 532369 - DNA, 75 bp, synthetic construct
  source 1..75: mol_type = other DNA
cgtgaatttgaagccgaactgtcacaaccggaaaaaaacgagtcacaacaggaatccggcacttcacctgaaata

SEQ ID NO: 532370 - DNA, 75 bp, synthetic construct
  source 1..75: mol_type = other DNA
aggtttctaacttgattgttgattgtccggagattcagaggctggatattcatcctttgctggcttccggcaatg

SEQ ID NO: 532371 - DNA, 75 bp, synthetic construct
  source 1..75: mol_type = other DNA
tggaaagcggtgttgggtgtgttggcctggccggatatatccagtttaccttttacgcccgaccttgcggtactg

SEQ ID NO: 532372 - DNA, 75 bp, synthetic construct
  source 1..75: mol_type = other DNA
gctggcgctcgacggcccggcctataccctttcaaccgcctgctcttccagcgccagagcgatgatcagcgggcg

SEQ ID NO: 532373 - DNA, 75 bp, synthetic construct
  source 1..75: mol_type = other DNA
atggatccggcgtgggatgcggcgattcagcgtgccggtttgttgcgggtgcaggatacccacgagctgttttcg

SEQ ID NO: 532374 - DNA, 75 bp, synthetic construct
  source 1..75: mol_type = other DNA
gttaccaccgctgaacatgaacctggcccgctatctggttattcaggggatcaaaagtaaaaagattcgtgcgcg

SEQ ID NO: 532375 - DNA, 75 bp, synthetic construct
  source 1..75: mol_type = other DNA
ctgcgcgatgcactgccagaacatgtggcaatctctaacccgctcgatctacgcgatgacgccagcagtgagcac

SEQ ID NO: 532376 - DNA, 75 bp, synthetic construct
  source 1..75: mol_type = other DNA
accgggctatcccgcatgtggtgcgcgaatccgtcgatgccatccgccgctgggagcctcgctgccagctgatgt

SEQ ID NO: 532377 - DNA, 75 bp, synthetic construct
  source 1..75: mol_type = other DNA
ggctctgcaacgggaagcgcaggaacaaaaacgcggtttgtgggccgacgcaaatccagttccaccgtgggagtg

SEQ ID NO: 532378 - DNA, 75 bp, synthetic construct
  source 1..75: mol_type = other DNA
cgatgcaccggagaaaaaacaggctttcgggcgctggtcagcaaatcagcttaaagctctgcttgcagcacagcc

SEQ ID NO: 532379 - DNA, 75 bp, synthetic construct
  source 1..75: mol_type = other DNA
cgttgctgggcgtcggtgaatcgagcgacgcttaccatatttcggccccgcatccgcagggcgaaggcgcaattc

SEQ ID NO: 532380 - DNA, 75 bp, synthetic construct
  source 1..75: mol_type = other DNA
gggcatcaccctgcgcgatctggtacacgcgatcccgctgtatgcgatcaaacaaggtctgctgaccgttgagaa

SEQ ID NO: 532381 - DNA, 75 bp, synthetic construct
  source 1..75: mol_type = other DNA
aaccggctctgcaggcccctggcgaaatcgtccgggggctggatgatatctggcaggccattcaaatcatcctgc

SEQ ID NO: 532382 - DNA, 75 bp, synthetic construct
  source 1..75: mol_type = other DNA
aggctgtaaaacctgcattattctttcttcaccgacatcacaacacgaagacctacgcgcctgcgctctgcgcca

SEQ ID NO: 532383 - DNA, 75 bp, synthetic construct
  source 1..75: mol_type = other DNA
tgatgaagaacaacgccaggcttgtgtggcgtactatcgtcaccttttacaaaaaataaataaaatcaatgcgct

SEQ ID NO: 532384 - DNA, 75 bp, synthetic construct
  source 1..75: mol_type = other DNA
taaagtcctcgcactggagatccaggccgcaccgttagcaacgaatcccaatgttatgcaagcgacggacgcttt

SEQ ID NO: 532385 - DNA, 75 bp, synthetic construct
  source 1..75: mol_type = other DNA
tcattatgaaccgtggcggtgtgtcgctgcgtccgggtgacggcgtaatccactcctggctgaaccgtatgctgc

SEQ ID NO: 532386 - DNA, 75 bp, synthetic construct
  source 1..75: mol_type = other DNA
ttcgccatacgcccgggcaaaaagaaccggtactgcatttttcacatgtcgcgccaatcgaccatttaattcaat

SEQ ID NO: 532387 - DNA, 75 bp, synthetic construct
  source 1..75: mol_type = other DNA
ggcgcgtgaaaaagaccttctttccgaagttcagaatagggtgatcgatttcgttaaatgccacccactacaatg

SEQ ID NO: 532388 - DNA, 75 bp, synthetic construct
  source 1..75: mol_type = other DNA
attatgaacacagccccgaacatggtggatcccgttaccgtctgcagtagcgataaaaacaatatcaagctggaa

SEQ ID NO: 532389 - DNA, 75 bp, synthetic construct
  source 1..75: mol_type = other DNA
taacatgcgcctgcttggaccaaacagtctgggtttactggctccctggcaaggcctgaatgccagcttttcgcc

SEQ ID NO: 532390 - DNA, 75 bp, synthetic construct
  source 1..75: mol_type = other DNA
gcaagctcgggtttaatgttgatatccagctcgaagaggggatcgttgggcttacgctaaatcttgcccagcgcg

SEQ ID NO: 532391 - DNA, 75 bp, synthetic construct
  source 1..75: mol_type = other DNA
gcaagctcgggtttaacgtcgatatccagctcgaagaggggatcgttgggctgatgctaaatcttgcccagcgcg

SEQ ID NO: 532392 - DNA, 75 bp, synthetic construct
  source 1..75: mol_type = other DNA
cgtccggtgatcctgtccaattccttcgcctttggcggcaataacgccagcattctgctcgggagggtttcgtga

SEQ ID NO: 532393 - DNA, 75 bp, synthetic construct
  source 1..75: mol_type = other DNA
gacggggaacttcagtacgaccccaaagtttatgacgaatatcgtaaggcaaagcgggcggggcggttgaacaat

SEQ ID NO: 532394 - DNA, 75 bp, synthetic construct
  source 1..75: mol_type = other DNA
accagcacctccggcctgcatgagggcgacacgcacgttaacctgcgcacccacgggcagccgagcaccacatgg

SEQ ID NO: 532395 - DNA, 75 bp, synthetic construct
  source 1..75: mol_type = other DNA
atgaaattgacaaaatacgttttcttttttgtcaccattttttccggttcgttgtgtgcggctgaaatccagggg

SEQ ID NO: 532396 - DNA, 75 bp, synthetic construct
  source 1..75: mol_type = other DNA
ttcgcagtcgtcatctaattatctgacgcactccccttctctactgttttccaggaaagggagtgaagaaaagca

SEQ ID NO: 532397 - DNA, 75 bp, synthetic construct
  source 1..75: mol_type = other DNA
taaagttgcgataggatttggtgttatttgcattattgcatctttctttataaatcatttgtttggatcggagga

SEQ ID NO: 532398 - DNA, 75 bp, synthetic construct
  source 1..75: mol_type = other DNA
acgacggatcccgaatgcttttattacccggctggaaaatggccggtggcatgtgatgcagcgtatgccgtgggc

SEQ ID NO: 532399 - DNA, 75 bp, synthetic construct
  source 1..75: mol_type = other DNA
tccttcaatggaagcgccagcagcagcggaaatcagtggtcacatcgtacgttccccgatggttggtactttcta

SEQ ID NO: 532400 - DNA, 75 bp, synthetic construct
  source 1..75: mol_type = other DNA
gaaagagactaagttcccggaattaggctggaaggtagacgacaaaaaaggctctgcggagctaatggaagatgt

SEQ ID NO: 532401 - DNA, 75 bp, synthetic construct
  source 1..75: mol_type = other DNA
gggcaacctgacggcggagcaactcaccgttgcaccgggtcatgtggtggttaacgatctccagaccctgaaaga

SEQ ID NO: 532402 - DNA, 75 bp, synthetic construct
  source 1..75: mol_type = other DNA
tgcattcttcccttcagaatattcgcttagccaatatacgagtcccgtctctgatcttgatggcgtggactatcc

SEQ ID NO: 532403 - DNA, 75 bp, synthetic construct
  source 1..75: mol_type = other DNA
aatatacggcagcttctctggatgagcttaaccgggcgatcaatgatgcggagtcggtactggggacaacccgcc

SEQ ID NO: 532404 - DNA, 75 bp, synthetic construct
  source 1..75: mol_type = other DNA
tgttaagaggtgagatgcctgtgcgtctagtgtctattatattcccaacattattggcgctattcttgctgtcgt

SEQ ID NO: 532405 - DNA, 75 bp, synthetic construct
  source 1..75: mol_type = other DNA
atcatcgtccaccggcgctgacagcaaagggaggccgaaacgccaccgtctgccgatcgaagtggtgaagattcc

SEQ ID NO: 532406 - DNA, 75 bp, synthetic construct
  source 1..75: mol_type = other DNA
cggaggttgtcgccagcctcaacgctgatagcgaatatgcagcaatctttgttcctggtgggcatggcgcactta

SEQ ID NO: 532407 - DNA, 75 bp, synthetic construct
  source 1..75: mol_type = other DNA
ctgatcttgatggcgtggactatccaaaaccgtatcgcggtaaacataaaattctggtgatcgccgcggacgaac

SEQ ID NO: 532408 - DNA, 75 bp, synthetic construct
  source 1..75: mol_type = other DNA
actgtgaaatattgcaggggaacgctcgctttgttgacgagcacacgctggcgctggattgcccggacggcagcg

SEQ ID NO: 532409 - DNA, 75 bp, synthetic construct
  source 1..75: mol_type = other DNA
atgttcaaaaaaatcctcttcccgttagttgctctgtttatgcttgcaggatgtgcaaaaccgccaacaaccatt

SEQ ID NO: 532410 - DNA, 75 bp, synthetic construct
  source 1..75: mol_type = other DNA
gaaaacacgcgtgccggatatgtcagcttaccgtaagttgttgggggaaaccctgctgcgtctgcctggcgtcaa

SEQ ID NO: 532411 - DNA, 75 bp, synthetic construct
  source 1..75: mol_type = other DNA
ctctgcaacgggaagcgcaggaacaaaaacttggtttgtgggctgatacaaatccggttccaccgtgggaatggc

SEQ ID NO: 532412 - DNA, 75 bp, synthetic construct
  source 1..75: mol_type = other DNA
aacaaccctttggacgctggtcaactaatcaacttaaagccattcttgcaggacaatccgttaccgtctcttata

SEQ ID NO: 532413 - DNA, 75 bp, synthetic construct
  source 1..75: mol_type = other DNA
gtggcgcaggtagataaaacagccgttgatacttaccgttatctgaacttcaaccagctttctcagtacaccgag

SEQ ID NO: 532414 - DNA, 75 bp, synthetic construct
  source 1..75: mol_type = other DNA
cgcgcccagtttaaacatctggcacgcgcacaaatcgtcggcatgaacgtgggcacgctgaaaattttgttccat

SEQ ID NO: 532415 - DNA, 75 bp, synthetic construct
  source 1..75: mol_type = other DNA
cggcggctgtacccactggggcaccatcccatcaaaagccctccgccacgccgtcagccgtatcattgaattcaa

SEQ ID NO: 532416 - DNA, 75 bp, synthetic construct
  source 1..75: mol_type = other DNA
atcgcctgctggcatttctcgatcaagagatgtcagattctctctcctatcacttctggaacagtggcgtagtga

SEQ ID NO: 532417 - DNA, 75 bp, synthetic construct
  source 1..75: mol_type = other DNA
tttctaaacgtgtgggactttccccaacgccgtgccttgagcgtgtgcgtcggctggaaagacaagggtttattc

SEQ ID NO: 532418 - DNA, 75 bp, synthetic construct
  source 1..75: mol_type = other DNA
cgtgcgatcaatgatgcggagtcggtactggggacaacccgccgtcgccgtcgtccgctgggagtgaggttatga

SEQ ID NO: 532419 - DNA, 75 bp, synthetic construct
  source 1..75: mol_type = other DNA
caccagctttaactacccgacgatggcggaagcctatcgggtagctgcattaaacggtttaaaccgcctgtttta

SEQ ID NO: 532420 - DNA, 75 bp, synthetic construct
  source 1..75: mol_type = other DNA
gcatcgcgcaattctgcgtagcgtggcgcaacagcgggcgcgagaggcgcgtttacgtgctgcacaacagcagga

SEQ ID NO: 532421 - DNA, 75 bp, synthetic construct
  source 1..75: mol_type = other DNA
gcaacattcagccagtacaagcagaaccacagccgcaattcacagccgaggaaatcatcctcctttgctacatgc

SEQ ID NO: 532422 - DNA, 75 bp, synthetic construct
  source 1..75: mol_type = other DNA
catattatctggcaggcgtgggtggcaaaaaaagcggggcagatagtcgggcgcattaccgcgcaaatcgatacc

SEQ ID NO: 532423 - DNA, 75 bp, synthetic construct
  source 1..75: mol_type = other DNA
ctgctcagggaggcgacacgacttgaccaggcaagcgccgttttcgaacgggcaagaccaatgttgaaaagcctt

SEQ ID NO: 532424 - DNA, 75 bp, synthetic construct
  source 1..75: mol_type = other DNA
gtctcgacatgtcaagttccgttatccagcgggccatgccaatgctgaaaagcctgcgggcaagacaatttgaat

SEQ ID NO: 532425 - DNA, 75 bp, synthetic construct
  source 1..75: mol_type = other DNA
gatgcgttactgagggaagtaacacgtctcgacatgtcaagttccgttatccaacgagccatgccaatgctgaaa

SEQ ID NO: 532426 - DNA, 75 bp, synthetic construct
  source 1..75: mol_type = other DNA
ccgagattgattctgcaccctgcgcgtttattgtcggcttgccgaacatcaacgaggcgattgccgatctgaacg

SEQ ID NO: 532427 - DNA, 75 bp, synthetic construct
  source 1..75: mol_type = other DNA
tgccgatctgaacggatcgctctttcccttcggctgggcaaaattgctgtggcgtttaaaagtcagcggtgtgcg

SEQ ID NO: 532428 - DNA, 75 bp, synthetic construct
  source 1..75: mol_type = other DNA
cgatggtagagcgtaacgaaaaaggccgacagatacgcagatacttcatcgagtgcgaaaagaaacttcgcaaca

SEQ ID NO: 532429 - DNA, 75 bp, synthetic construct
  source 1..75: mol_type = other DNA
tatgggcgatcagcttaagtacctggtgccggacgatatgatctacatcgccgagaatgattctgcaccctgtgc

SEQ ID NO: 532430 - DNA, 75 bp, synthetic construct
  source 1..75: mol_type = other DNA
ataaacatgaccttaaggcatttatcgcttttccgtcatcactttatcccgatgatccaaactggatccctcctt

SEQ ID NO: 532431 - DNA, 75 bp, synthetic construct
  source 1..75: mol_type = other DNA
tgaacgcaacgagcatttgtctgcgaagaatccggggacggaccatatcatctggcaggcgtgggtggcaaaaaa

SEQ ID NO: 532432 - DNA, 75 bp, synthetic construct
  source 1..75: mol_type = other DNA
aggacgtaacattggtctgctgaataaaattcgcgcttacgcgttgcaggatcaaggctacgataccgtagaggc

SEQ ID NO: 532433 - DNA, 75 bp, synthetic construct
  source 1..75: mol_type = other DNA
atggtgacggtactggctggagttctgaacgtggtgatggtccggctccgggcggtggtatgcagggaaacggtg

SEQ ID NO: 532434 - DNA, 75 bp, synthetic construct
  source 1..75: mol_type = other DNA
agcccctgagaaatttaatggggatgaaaatggcggagctcagggccgtgggaaaagccgttgaagaaaatgtgg

SEQ ID NO: 532435 - DNA, 75 bp, synthetic construct
  source 1..75: mol_type = other DNA
atgcgattttcaaagccgacagggaaagcagcgacggggattccgaagctaaaaaccccttacagcaggccgtaa

SEQ ID NO: 532436 - DNA, 75 bp, synthetic construct
  source 1..75: mol_type = other DNA
atgtctgtagcccgtaatctctggcgcgctgctgatgcgccacatattgttccggcagactccgttgagcgccag

SEQ ID NO: 532437 - DNA, 75 bp, synthetic construct
  source 1..75: mol_type = other DNA
aaaaagccagaaaggaagcagaggaaaaagcaaatgacgagaaggctgttctgacaaaagccagtgaaattatca

SEQ ID NO: 532438 - DNA, 75 bp, synthetic construct
  source 1..75: mol_type = other DNA
cagtcgtagggattatcggtattattatagccagttttattggagcattgattgatgacaaatttatagacaggt

SEQ ID NO: 532439 - DNA, 75 bp, synthetic construct
  source 1..75: mol_type = other DNA
gacgataggccgttctgtggtgacacccttgatatagttgtgaaggtgatattgccccgcatggctggcaagcgc

SEQ ID NO: 532440 - DNA, 75 bp, synthetic construct
  source 1..75: mol_type = other DNA
tttccggtttgatggctgaaaccaatgcggaatttttcgatgcttattatgacgatgtgcaaatcgaggatcgtg

SEQ ID NO: 532441 - DNA, 75 bp, synthetic construct
  source 1..75: mol_type = other DNA
tggcggggctggcggcattaaccagcctgggggcgctcctttttctggcgtggagctgcgtgacattcgcgcgac

SEQ ID NO: 532442 - DNA, 75 bp, synthetic construct
  source 1..75: mol_type = other DNA
tgtgaatttgatgacctgcccgattttatcatgatcgacgacagggtgcagaccacgctcgcctcagaacatctg

SEQ ID NO: 532443 - DNA, 75 bp, synthetic construct
  source 1..75: mol_type = other DNA
atgcggctcagaaaattaaaactgaaaaacttcagaggctacagaaactctactgaaatcattattgatgaaagc

SEQ ID NO: 532444 - DNA, 75 bp, synthetic construct
  source 1..75: mol_type = other DNA
gcgcaggcaaaacttgaaaaacacacgcagcgttataacgccaggatgaaagagacagaggatgctcgccgcaat

SEQ ID NO: 532445 - DNA, 75 bp, synthetic construct
  source 1..75: mol_type = other DNA
atgaccagtcaactcatccccgtattcaacggcactatatccaacgaaaccactcttctagttaacgctcgtgat

SEQ ID NO: 532446 - DNA, 75 bp, synthetic construct
  source 1..75: mol_type = other DNA
ctgaaggactgtacccattttcatattatgggctcatccctgttttcatttcatatggtagacgcagtaaaaaaa

SEQ ID NO: 532447 - DNA, 75 bp, synthetic construct
  source 1..75: mol_type = other DNA
ccatgcggtatcattagctgtgtggggaatgatggttttggcgatattaatattcatcgcctggcggctgatggt

SEQ ID NO: 532448 - DNA, 75 bp, synthetic construct
  source 1..75: mol_type = other DNA
gttatgatatagagttgagtattgttggtgcgggtccacaatatgattcgctatcaattctcattcgacaatatg

SEQ ID NO: 532449 - DNA, 75 bp, synthetic construct
  source 1..75: mol_type = other DNA
ggccccacctggagatgcacagcctgttgccattccgcttcctgtttcactgggagatgcaggccatcggagtag

SEQ ID NO: 532450 - DNA, 75 bp, synthetic construct
  source 1..75: mol_type = other DNA
aaagtaatgccattctttgagcagcataaatcgttgttccgcaatccgaagaaactcgcggatgttgtcgccagc

SEQ ID NO: 532451 - DNA, 75 bp, synthetic construct
  source 1..75: mol_type = other DNA
gtggactatccaaaaccgtatcgcggtaaacataaaattctggtgatcgccgcggacgaacgttatttgccgacc

SEQ ID NO: 532452 - DNA, 72 bp, synthetic construct
  source 1..72: mol_type = other DNA
atgcctgatgcgacgcttgtcgcgtcttatcatgcctacaggtttgtgccgaaccgtaggccggataaggcg

SEQ ID NO: 532453 - DNA, 75 bp, synthetic construct
  source 1..75: mol_type = other DNA
atgattgatgcctcaggaccggagaaactcagacggcgtactgcacaggaaaagatcgctaatgttcagaagagc

SEQ ID NO: 532454 - DNA, 75 bp, synthetic construct
  source 1..75: mol_type = other DNA
tgatgattatatgatgtttgatagattaaccacgcagatatcttttttgaatcagaatcaacaatattatgcttg

SEQ ID NO: 532455 - DNA, 75 bp, synthetic construct
  source 1..75: mol_type = other DNA
tgaattatgctcgtcaagaatatggattcgaacgtttcttggaattatttaatgatctggttttgaaaaaatatg

SEQ ID NO: 532456 - DNA, 75 bp, synthetic construct
  source 1..75: mol_type = other DNA
gctggcggaatcgcgcaatatgagccgtagcgaactgatcgaagagatgttaatgcagcaactggcggcgctgcg

SEQ ID NO: 532457 - DNA, 75 bp, synthetic construct
  source 1..75: mol_type = other DNA
cttatcaggcctaccgctcgtaccatttgtccagggcggatgaggcgtttatgccacatccgccagtgtacgtcg

SEQ ID NO: 532458 - DNA, 75 bp, synthetic construct
  source 1..75: mol_type = other DNA
ttttgagtttcagacctggggcgaaaacagacgtattccggtggatttggatgggttacgtttggtttcttttct

SEQ ID NO: 532459 - DNA, 75 bp, synthetic construct
  source 1..75: mol_type = other DNA
aatatccggcagtgtttctgcctttcctgtcatggccggttgattctgcagacagatgctcaggggggcgtggtt

SEQ ID NO: 532460 - DNA, 75 bp, synthetic construct
  source 1..75: mol_type = other DNA
cagtgccgactctgcgctcagcagaaatatccggcagtgtttctgcctttcctgtcgtggccggttgattttgca

SEQ ID NO: 532461 - DNA, 75 bp, synthetic construct
  source 1..75: mol_type = other DNA
tcatcgcaggtgtctttttccaaaagttaatgacgtcttccacgggacgtaagcgagacacggcgtcagttattc

SEQ ID NO: 532462 - DNA, 75 bp, synthetic construct
  source 1..75: mol_type = other DNA
taccacctaactctcgacacagccaaagaactggcgatggttgaacgtaacgaaaaaggccgtcagatacgccga

SEQ ID NO: 532463 - DNA, 75 bp, synthetic construct
  source 1..75: mol_type = other DNA
attcacagcagaagacatcatcctgctctgctacgttcaactctggatggaaaaagcacaacaactcagtaagca

SEQ ID NO: 532464 - DNA, 75 bp, synthetic construct
  source 1..75: mol_type = other DNA
ggcaaaattgcgccaatcttctttaacacgatggaagacgccggtgcgctgcccattgaagtggacgtctctaac

SEQ ID NO: 532465 - DNA, 75 bp, synthetic construct
  source 1..75: mol_type = other DNA
ctggtggtgtttttcaaatttctaatcggtacgccttacggctgggtatgcttctttttgtttattctttttagt

SEQ ID NO: 532466 - DNA, 75 bp, synthetic construct
  source 1..75: mol_type = other DNA
gcccggcgctggctgaaaaactgaccgttaccgtcttcaaagtcactggcgaaaccaacaccgatgacctttctc

SEQ ID NO: 532467 - DNA, 75 bp, synthetic construct
  source 1..75: mol_type = other DNA
caaggttgaagaaaccagccaggcattttccgccctgaaaaccaccctcgacaaaaccgaaagtttcagccagcc

SEQ ID NO: 532468 - DNA, 75 bp, synthetic construct
  source 1..75: mol_type = other DNA
gttaataagcggttctttgtgaagcacataacgaatcacgcagagtatgacaaactgacacgttactacagagag

SEQ ID NO: 532469 - DNA, 75 bp, synthetic construct
  source 1..75: mol_type = other DNA
tccattgcctctcacgaaaggaactggacacactgatcgagcacgaattacaactgatgctggctgaaggctttg

SEQ ID NO: 532470 - DNA, 75 bp, synthetic construct
  source 1..75: mol_type = other DNA
tgtataacagaagaagaaatcaagttgcttcgagacgaaaagaataagctcgatgattttgtcgtgccaccagaa

SEQ ID NO: 532471 - DNA, 75 bp, synthetic construct
  source 1..75: mol_type = other DNA
gtgctgaaaagtgactatcacgctcccgaagtgggctatcccatcagttgggtccagagtgatatggacggaaat

SEQ ID NO: 532472 - DNA, 75 bp, synthetic construct
  source 1..75: mol_type = other DNA
caacgctgccaaaaggaagcctgcctaaggtcaatgcgaatattcctgccagcatactgatgcgccggcctgaca

SEQ ID NO: 532473 - DNA, 75 bp, synthetic construct
  source 1..75: mol_type = other DNA
aacaggtgctgtttggtgaaacaggcgttgcacaacatctgaaacccggtacggcagtaatggtttcttccacta

SEQ ID NO: 532474 - DNA, 75 bp, synthetic construct
  source 1..75: mol_type = other DNA
ctggcagtgtgggggcggcggttgctgccggtggcctagttctgaccgcgctgacaagtatgatgaaagcaaatt

SEQ ID NO: 532475 - DNA, 75 bp, synthetic construct
  source 1..75: mol_type = other DNA
aaggcttgattacggagcgtggcgacatggtggtttatgttgcaggcttcccggccatttatggtaaacagcctc

SEQ ID NO: 532476 - DNA, 75 bp, synthetic construct
  source 1..75: mol_type = other DNA
ttttccaagatgagattttctcgcttcgtgcttctgtacctgcaccaaaagttaccgatcggattcgagctgtag

SEQ ID NO: 532477 - DNA, 75 bp, synthetic construct
  source 1..75: mol_type = other DNA
gtcaggcgctggtgctggggatggatctgaaagagagttccggtaaagcgcgccagcatctcggctatatggcgc

SEQ ID NO: 532478 - DNA, 75 bp, synthetic construct
  source 1..75: mol_type = other DNA
attgatttgctgggcggtgccggaacctcggaatcgccgctgggcgcaatattacatacggtagaaggcacaccc

SEQ ID NO: 532479 - DNA, 75 bp, synthetic construct
  source 1..75: mol_type = other DNA
aaactgccgcaggtcagcgacggcatgattcaggggaaatcggtacgtctgatcctcaaaaaagaggccacacca

SEQ ID NO: 532480 - DNA, 75 bp, synthetic construct
  source 1..75: mol_type = other DNA
gccaacattattatactgaccgatgtcaggttacctggaatatcaggactagagctcctcagttacatcaacgaa

SEQ ID NO: 532481 - DNA, 75 bp, synthetic construct
  source 1..75: mol_type = other DNA
cttgttcccttgaatactgattaccctatttgtcgctcctgggaaaaaccaattaagatcatagggacaatggta

SEQ ID NO: 532482 - DNA, 75 bp, synthetic construct
  source 1..75: mol_type = other DNA
acggcctggaaaaacgctttccgggtatggacaagcccgccgtcgcaccgctcaactgtaccattcatgccggtt

SEQ ID NO: 532483 - DNA, 75 bp, synthetic construct
  source 1..75: mol_type = other DNA
tacggcaaattgataagtatgaattgctgcagcaggtgatttcagtacatgaagtggaactgctcaggaaaatga

SEQ ID NO: 532484 - DNA, 75 bp, synthetic construct
  source 1..75: mol_type = other DNA
tataaatgttaatttagattattcgattgaggcttgtggaggagttgaaattcagtctgttagcagtgataaaag

SEQ ID NO: 532485 - DNA, 75 bp, synthetic construct
  source 1..75: mol_type = other DNA
ggttgatgttgatctcgataagcccatagctgatacaggtattttgaatatcgtcaaagttacagactttaaagt

SEQ ID NO: 532486 - DNA, 75 bp, synthetic construct
  source 1..75: mol_type = other DNA
aaatggattgacgatcgggcacaggagcttatcagcatgttccccgataaaccattgcttatgagcagccttttt

SEQ ID NO: 532487 - DNA, 75 bp, synthetic construct
  source 1..75: mol_type = other DNA
cgaaagaaacgtcgtgctatctctataccatgacgcaaacagacgatttactgcgcaagctgtacgatcagttac

SEQ ID NO: 532488 - DNA, 75 bp, synthetic construct
  source 1..75: mol_type = other DNA
cggctaattccttgatgcggatggggtctgtaatgcagaccctatctattaacgtcatgattgcatctcaaattt

SEQ ID NO: 532489 - DNA, 75 bp, synthetic construct
  source 1..75: mol_type = other DNA
ctgcgtgttcagtggcgggtatgcgctttaaccctgcattcctgtcgggtgatacagaagctgttgctgatttat

SEQ ID NO: 532490 - DNA, 75 bp, synthetic construct
  source 1..75: mol_type = other DNA
gctggtggtgatgatggcgggcgtggtgctgtttattgtcatcgccatcctcgagccgatgctgcaactgaataa

SEQ ID NO: 532491 - DNA, 75 bp, synthetic construct
  source 1..75: mol_type = other DNA
gaacacacgcaagcggtttgagccgcagcccagaaaccgtactgatacggcggcacagaccatggtcagaacgct

SEQ ID NO: 532492 - DNA, 75 bp, synthetic construct
  source 1..75: mol_type = other DNA
caactgggcagtaggcaccctgaatttttggcgaagactggcaagtttcattgtgcgtcaggaatcaggtttatc

SEQ ID NO: 532493 - DNA, 75 bp, synthetic construct
  source 1..75: mol_type = other DNA
aggcagagttacttaacctcttcgagattctacctgcgtcagaaaaagccaaactccttaaccagctacgtggac

SEQ ID NO: 532494 - DNA, 75 bp, synthetic construct
  source 1..75: mol_type = other DNA
gtttaaacaccggatttatctgtccacccagtcaatggtgtcgcaggcatttcaggggatggccagcgatggtca

SEQ ID NO: 532495 - DNA, 75 bp, synthetic construct
  source 1..75: mol_type = other DNA
tgttgaaacgacatttaaccctgacggagaaaacgaaaacccgacggtcatttcgttttctcccgttttcgctga

SEQ ID NO: 532496 - DNA, 75 bp, synthetic construct
  source 1..75: mol_type = other DNA
gacttttgctcgcctgctggagtttacgtctcttggcccgtttaccggacgcctggcgggcaagctctccggtgg

SEQ ID NO: 532497 - DNA, 75 bp, synthetic construct
  source 1..75: mol_type = other DNA
ttaagcaagatgaccttgatagtctgaaatctttaaatgcttttggactggatttagcaaggttgctaagcatca

SEQ ID NO: 532498 - DNA, 75 bp, synthetic construct
  source 1..75: mol_type = other DNA
tctgaaatctttaaatgcttttggactggatttagcaaggttactaagtatcaagattcacaagttagcgatgga

SEQ ID NO: 532499 - DNA, 75 bp, synthetic construct
  source 1..75: mol_type = other DNA
atgaataaacacacattaacccgtatttcagaggaagcttttaacgagcttaccagaattaaacagacaactaac

SEQ ID NO: 532500 - DNA, 75 bp, synthetic construct
  source 1..75: mol_type = other DNA
tggcattcgatccagcgcagagaattgcgttgtggtgcgggttaccgtttgttgcgttgtgctatggtgcttatt

SEQ ID NO: 532501 - DNA, 75 bp, synthetic construct
  source 1..75: mol_type = other DNA
tcgggtaccgagcttatcggcattgccgccggtgaaacggaaaacccgcgcaaagttatcccggtagcgattcgt

SEQ ID NO: 532502 - DNA, 75 bp, synthetic construct
  source 1..75: mol_type = other DNA
cctatctgattggtgcgctggtggtctggctggttatgcagtgtctgggcgagctgtcggtcgcgatgccggaga

SEQ ID NO: 532503 - DNA, 75 bp, synthetic construct
  source 1..75: mol_type = other DNA
ttttaacgtccactcataccattgcgctggtaggggcaagtgataaacccgaccgtccaagttatcgcgtgatga

SEQ ID NO: 532504 - DNA, 75 bp, synthetic construct
  source 1..75: mol_type = other DNA
ggggcgtggcgcaggaggcgatcgctattggtgcgaaaaccttatggatgcaactgggtgtgataaatgaacagg

SEQ ID NO: 532505 - DNA, 75 bp, synthetic construct
  source 1..75: mol_type = other DNA
ctgcggtactggcgcgggaagctgggttaaatgtggtaatggatcgttgcccggccattgagatccctcgtctgg

SEQ ID NO: 532506 - DNA, 75 bp, synthetic construct
  source 1..75: mol_type = other DNA
aagaaatgccggacggtgctgatgatcttattacttttagcggtggtttgtatgaattcgaaacgtctgcgggtt

SEQ ID NO: 532507 - DNA, 75 bp, synthetic construct
  source 1..75: mol_type = other DNA
ccgtccggcgccgactgctacctgtttgaaaacctggcgaagctcggcttcaaccagcagctgatgctcggccat

SEQ ID NO: 532508 - DNA, 75 bp, synthetic construct
  source 1..75: mol_type = other DNA
gccggtaaaacgctgctgggtcagcagggctacggcacgctggcagaggttccggaaaaagtcgatatggtcgat

SEQ ID NO: 532509 - DNA, 75 bp, synthetic construct
  source 1..75: mol_type = other DNA
cttccgggcgcatgctgtggtcgctatcgaatgagaaaacgctgccgcgctgctttgcccgcgtgaacaaaaacg

SEQ ID NO: 532510 - DNA, 75 bp, synthetic construct
  source 1..75: mol_type = other DNA
ctttcagttgggtggtgattgaaaacaccagccagcgcggcgaggcgcgttcggcaactttgccgttgcctgcgg

SEQ ID NO: 532511 - DNA, 75 bp, synthetic construct
  source 1..75: mol_type = other DNA
aatcagcaaaataccgcatttcttttgtgattctaagcgttatttttatttttctgatattaggaactttatcca

SEQ ID NO: 532512 - DNA, 75 bp, synthetic construct
  source 1..75: mol_type = other DNA
gcgatattctgaaggcgtcggatttctttaagtcgcttatccagcgcaaagcggcagacgtaacacaaaccgata

SEQ ID NO: 532513 - DNA, 75 bp, synthetic construct
  source 1..75: mol_type = other DNA
cggtgcgggcaaaaccacgctgatgcggatgctggcgggattactgaaacccgacagcggcagtgccacggtgat

SEQ ID NO: 532514 - DNA, 75 bp, synthetic construct
  source 1..75: mol_type = other DNA
ggcgcgctgcacgccgtgctcggctatatgccgcagaaatttggtctgtatgaagatctcacggtgatggagaac

SEQ ID NO: 532515 - DNA, 75 bp, synthetic construct
  source 1..75: mol_type = other DNA
gaagcgggtattgatggtgacagcaccttcagttgggtggtgattgaaaacgcgagccagcgcggtgaagcgcgt

SEQ ID NO: 532516 - DNA, 75 bp, synthetic construct
  source 1..75: mol_type = other DNA
aaccaatatcactgcgtcagcggttgatattgaccatcggggctattctgctggtatttgagctgatcagcgtct

SEQ ID NO: 532517 - DNA, 75 bp, synthetic construct
  source 1..75: mol_type = other DNA
tgaagatgaaggaccgggtattgatgagagtaaatgcggggagttgagtaaagcgtttgtacgtatggacagccg

SEQ ID NO: 532518 - DNA, 75 bp, synthetic construct
  source 1..75: mol_type = other DNA
tctggaactgctggcgaaaacgcatcacattgatgtagcaccgttagtggcacgacttgatcagatgatggagag

SEQ ID NO: 532519 - DNA, 75 bp, synthetic construct
  source 1..75: mol_type = other DNA
cgtttcgacccgaccatctatatcgcgattggtatggcgaacttgctggcgattggcggcggtagttggatggtg

SEQ ID NO: 532520 - DNA, 75 bp, synthetic construct
  source 1..75: mol_type = other DNA
tgcatcacgggcagtttttcctgcaaaaccggcaagagacttccggcacgcgcgcctggatacggctgaagaaag

SEQ ID NO: 532521 - DNA, 75 bp, synthetic construct
  source 1..75: mol_type = other DNA
gctggataatgaacgcctgtttaccgctgacgtcgctcatgaactgcgaacaccgctggcaggggtgcgtttgca

SEQ ID NO: 532522 - DNA, 75 bp, synthetic construct
  source 1..75: mol_type = other DNA
tgctgattgttcccacgcctgctgagttgtttgactacacctccgcactgcagtttttcgatatgcttcgtgatc

SEQ ID NO: 532523 - DNA, 75 bp, synthetic construct
  source 1..75: mol_type = other DNA
caccgatccacacctgatgctccgactggccattgaaactgttgctcatgactatgatgtcatagttattgacag

SEQ ID NO: 532524 - DNA, 75 bp, synthetic construct
  source 1..75: mol_type = other DNA
tgtgtttggtacgcgattgcgacgtgctgaagacgtatttccaccggtgatcggggttgctgcccataaaggtgg

SEQ ID NO: 532525 - DNA, 75 bp, synthetic construct
  source 1..75: mol_type = other DNA
gcagcaacagcgagctgctgctcggcaatgcgggaacggtaagcgatctcggggaagatttcggtcatgagttct

SEQ ID NO: 532526 - DNA, 75 bp, synthetic construct
  source 1..75: mol_type = other DNA
tggctgaatgcggaacaacaatctcgtgtgagccagtggttgatggagtatacgcagcagaggttatcgctggcg

SEQ ID NO: 532527 - DNA, 75 bp, synthetic construct
  source 1..75: mol_type = other DNA
tggaagcggaagatatcgataccggcaaaaaatatagctggcaagcgcgcggcctggttaacgccaccggcccgt

SEQ ID NO: 532528 - DNA, 75 bp, synthetic construct
  source 1..75: mol_type = other DNA
ctctcttaccgttactgtttacccctgtgacaaaagcccggacacctgatgtacccattctggaaaaacgagctg

SEQ ID NO: 532529 - DNA, 75 bp, synthetic construct
  source 1..75: mol_type = other DNA
cgcctaatccgcaacgtaatgacagtgtaccgaccctggcacagatgaccgacaaagccattgaattgttgagta

SEQ ID NO: 532530 - DNA, 75 bp, synthetic construct
  source 1..75: mol_type = other DNA
gcacaggcgcgtggttatcagttggtgagcgatgctgcctcactgaattcggtgacggaagcgaatcagcaaaaa

SEQ ID NO: 532531 - DNA, 75 bp, synthetic construct
  source 1..75: mol_type = other DNA
caagcggcaaaccagcgttcaacacttaatgcatggagaaatgccgtctctatatgggaccctgtttgtcgagaa

SEQ ID NO: 532532 - DNA, 75 bp, synthetic construct
  source 1..75: mol_type = other DNA
atgggctatttgatcctaaaaaactacaaacctcaggtggtgctggctgccgcaggtatcttcctgatgatgtgc

SEQ ID NO: 532533 - DNA, 75 bp, synthetic construct
  source 1..75: mol_type = other DNA
gtgatgttactgagtttgacggtgacgatgtttgttgagttcttccgcaagcataacttgcgcgaaacaatggac

SEQ ID NO: 532534 - DNA, 75 bp, synthetic construct
  source 1..75: mol_type = other DNA
taggtggcggcatcaatggtgctggtatcgcggcagacgccgccgggcgcggtttatctgtgctgatgctggagg

SEQ ID NO: 532535 - DNA, 75 bp, synthetic construct
  source 1..75: mol_type = other DNA
tgattgtggtgattgatgaccagttcgagcaggcactgccgcaacaaacggcgagcgcactggctgcagccgccc

SEQ ID NO: 532536 - DNA, 75 bp, synthetic construct
  source 1..75: mol_type = other DNA
tcaattccccacaaattccttcgatgaaagccattctcggcgcggcgaaaaagccagtccaggtatggtcggcgg

SEQ ID NO: 532537 - DNA, 75 bp, synthetic construct
  source 1..75: mol_type = other DNA
caggcagcagaggcgcaggtgacggccttaagtgtgggcggtaaagccctgaccaacgccaaagggcgtaaagat

SEQ ID NO: 532538 - DNA, 75 bp, synthetic construct
  source 1..75: mol_type = other DNA
aatttgattttaaaaataaatgatagatttcccagaataattataaaggaataccgggtgatgctgccaacttac

SEQ ID NO: 532539 - DNA, 75 bp, synthetic construct
  source 1..75: mol_type = other DNA
aggttgccgcgccgaaacagcgcgaacgtcagcgcatcgtgattgaaggcgacggcgaagaacagatcgccgcat

SEQ ID NO: 532540 - DNA, 75 bp, synthetic construct
  source 1..75: mol_type = other DNA
ccttaagtgtgggcggtaaagccctgaccaacgccaaagggcgtaaagatgtgttatcgcgcggcccggatgaac

SEQ ID NO: 532541 - DNA, 75 bp, synthetic construct
  source 1..75: mol_type = other DNA
cggcgggttctggtctggtggcgtttgctgccgcaactggcgtaatgccgcttgatatgccggaatccgttctgg

SEQ ID NO: 532542 - DNA, 75 bp, synthetic construct
  source 1..75: mol_type = other DNA
agttgccgcgtgaatacataaacggttggcctcttgcgtatagtgattatgctgaaggctggaacgactgccgcg

SEQ ID NO: 532543 - DNA, 75 bp, synthetic construct
  source 1..75: mol_type = other DNA
atgatccgcaaagcctttgtcatgcaggtaaaccccgacgcccacgaagagtatcagcgtcggcataaccccatc

SEQ ID NO: 532544 - DNA, 75 bp, synthetic construct
  source 1..75: mol_type = other DNA
tctgcaacagaaaggtttcccgctggcgtacgtcggtgacgttgtgggtacggggtcatcgcgtaaatccgccac

SEQ ID NO: 532545 - DNA, 75 bp, synthetic construct
  source 1..75: mol_type = other DNA
tgcgggcatgaaatgtacccaagcaaaaccgaatgggcgatgctgtgcagccactgccgtgagcgttactaccca

SEQ ID NO: 532546 - DNA, 75 bp, synthetic construct
  source 1..75: mol_type = other DNA
accgtggccgtttcctcagtctttaatgaccgcgtttatggcggaatatgacagcggcgagatcgtgatcgaccc

SEQ ID NO: 532547 - DNA, 75 bp, synthetic construct
  source 1..75: mol_type = other DNA
tccaaaggcgtcttatcacggcaatatcgataagcctgcggtaacttgtactccgaatccgcagcgtaatgacag

SEQ ID NO: 532548 - DNA, 75 bp, synthetic construct
  source 1..75: mol_type = other DNA
cattgcggccatgaactacatagcgaacagcggcatccctttgcgtactgacagtgattttcctatccagcatga

SEQ ID NO: 532549 - DNA, 75 bp, synthetic construct
  source 1..75: mol_type = other DNA
atgaacctcgtcacgtcgcaaggggttgggcagtcaatcggtagtgtaacaattactgaaaccgataaaggtctg

SEQ ID NO: 532550 - DNA, 75 bp, synthetic construct
  source 1..75: mol_type = other DNA
aatcactggatgaaatcaaagacaaagcgctgatggtccacgttggcggcgataatatgtccgatcaacctaaac

SEQ ID NO: 532551 - DNA, 75 bp, synthetic construct
  source 1..75: mol_type = other DNA
aaaggatgataaagaagcgatgggttcactgctgccagcctctgaagtgaaagtgctcaaacgtgacggcgattg

SEQ ID NO: 532552 - DNA, 75 bp, synthetic construct
  source 1..75: mol_type = other DNA
ggcattgcccaccagctgccggatatgagcagcggttcgcgtaaacagttcgaagaactacgcgccagcgccaga

SEQ ID NO: 532553 - DNA, 75 bp, synthetic construct
  source 1..75: mol_type = other DNA
attcagcgacctgccgttcctgccataactacgacgcgatggatcatgcgaagcagcatccggaagccgcgcgtc

SEQ ID NO: 532554 - DNA, 75 bp, synthetic construct
  source 1..75: mol_type = other DNA
cctttggcggtcactgggataataccccgtttgccagcagcgttaacggtttgctttttgctgactacattgctg

SEQ ID NO: 532555 - DNA, 75 bp, synthetic construct
  source 1..75: mol_type = other DNA
tccggaatgaaagatacctggacggtcactgccgttaagccgaagtatcagacctatgtggtggtgatcggtgaa

SEQ ID NO: 532556 - DNA, 75 bp, synthetic construct
  source 1..75: mol_type = other DNA
ccagtggctcaacgcaaaaatcgctcggcttaacgcttaaccgcgtggtcgacggtaaaccacagtttcaggata

SEQ ID NO: 532557 - DNA, 75 bp, synthetic construct
  source 1..75: mol_type = other DNA
gatggcaaaccacaatttcaggataactttgtcacccttgccaaccgcgcaggttttcagacctggtggttttcc

SEQ ID NO: 532558 - DNA, 75 bp, synthetic construct
  source 1..75: mol_type = other DNA
atttatttttgcgctcggcgtaatagcaatccggcgaaaaaaagagagtgaaaaagcgcgctggaataccttcga

SEQ ID NO: 532559 - DNA, 75 bp, synthetic construct
  source 1..75: mol_type = other DNA
gcaacagcggcagcagcttctcgctggtttacttttctgaccacggtctggcctttaaagagcgcggcaaagacg

SEQ ID NO: 532560 - DNA, 75 bp, synthetic construct
  source 1..75: mol_type = other DNA
gcataatgcacgctttatccgccagttaaccgaacgcgtcgccaactacggcatgctggataacctgtacattgg

SEQ ID NO: 532561 - DNA, 75 bp, synthetic construct
  source 1..75: mol_type = other DNA
aacaatgactatggtgttttcattttttttgcgctgcccgcgtcatttattttaacgttgatttttgccataccg

SEQ ID NO: 532562 - DNA, 75 bp, synthetic construct
  source 1..75: mol_type = other DNA
atttgagacaacgggaacgcctgactgaataccgggctgctcatatccaacatatgcagaaggcgttgatgcaga

SEQ ID NO: 532563 - DNA, 75 bp, synthetic construct
  source 1..75: mol_type = other DNA
atctgaggcaacgagaacgcctgactgaataccgggctgcgcatattcagcatatgcagaaagcgctgatgcaga

SEQ ID NO: 532564 - DNA, 75 bp, synthetic construct
  source 1..75: mol_type = other DNA
gcacaggcgcgtggttatcagttagtgactgatacagcctcgttagaagcggtgacggaggcaaatcaggataaa

SEQ ID NO: 532565 - DNA, 75 bp, synthetic construct
  source 1..75: mol_type = other DNA
atgtgacctcgcgcaaatgctacggtcccagcgcgaccagtgaaaaatgtccgggtaacgcgctagaaaaaggcg

SEQ ID NO: 532566 - DNA, 75 bp, synthetic construct
  source 1..75: mol_type = other DNA
gtattgcggcgtatggcccacatgccgccaatgtcgttggactgaccgaccagaccgatctcttctacaccatga

SEQ ID NO: 532567 - DNA, 75 bp, synthetic construct
  source 1..75: mol_type = other DNA
atgcttcaaagtaatgagtacttttccggcaaagtgaaatcgatcggcttttccagcagcactggtcgcgccagc

SEQ ID NO: 532568 - DNA, 75 bp, synthetic construct
  source 1..75: mol_type = other DNA
gcgctgaatgtgttactgcctgacgcgaccgactggcaggtgtatgaagccggttcggtgtttaatgttcccggt

SEQ ID NO: 532569 - DNA, 75 bp, synthetic construct
  source 1..75: mol_type = other DNA
ggcgtgaaggtatcgaccggaccgatagttgatttccgactgaaagctcatttgcgcagcatgccagaagaagga

SEQ ID NO: 532570 - DNA, 75 bp, synthetic construct
  source 1..75: mol_type = other DNA
cgcgatgaaagtgccatatgaagtgggccgtgcccagtttaaacatctggcacgtgcacaaatcgtcggcatgaa

SEQ ID NO: 532571 - DNA, 75 bp, synthetic construct
  source 1..75: mol_type = other DNA
tgtcattgcctgcggttctcgcccttatcatccggcagacgtcgattttacccatccgcgcatttacgacagcga

SEQ ID NO: 532572 - DNA, 75 bp, synthetic construct
  source 1..75: mol_type = other DNA
gataagatcgcgtttgttgttaattaccagtacccgcaggaacgccggaaggaacaggccgaaatcgagaagaaa

SEQ ID NO: 532573 - DNA, 75 bp, synthetic construct
  source 1..75: mol_type = other DNA
cctgccgtttgttatgcgatgaaaaaacactacaacagtggcgctatccgccttctggattcggcatcacctacc

SEQ ID NO: 532574 - DNA, 75 bp, synthetic construct
  source 1..75: mol_type = other DNA
tgctgcgcgaagaaatcgaaggttctggtatcctgagcaaagacgacatcattgatgttatgaaaaagctcattg

SEQ ID NO: 532575 - DNA, 75 bp, synthetic construct
  source 1..75: mol_type = other DNA
ggtacgggtatggagcgtgctgttgccgttgactccggtgtaactgcggtagctaaacgtggtggtgtcgttcag

SEQ ID NO: 532576 - DNA, 75 bp, synthetic construct
  source 1..75: mol_type = other DNA
cgccggtattcgacggtgcgaaagaagcagaaattaaagagctgctgaaacttggcgacctgccgacttctggtc

SEQ ID NO: 532577 - DNA, 75 bp, synthetic construct
  source 1..75: mol_type = other DNA
acatgcaacgtcaggccgttccgactctgtgcgctgataagccgctggttggtacgggtatggaacgtgctgttg

SEQ ID NO: 532578 - DNA, 75 bp, synthetic construct
  source 1..75: mol_type = other DNA
ccgacaaaggtaaaacccactcttcgggtaaggtgctgtataacgcgcgcatcatcccttaccgtggttcctggc

SEQ ID NO: 532579 - DNA, 75 bp, synthetic construct
  source 1..75: mol_type = other DNA
agcgtgcggtgaaagagcgtctgtctctgggcgatcaggatatgatcaacgccaagccgatttccgcagcagtga

SEQ ID NO: 532580 - DNA, 75 bp, synthetic construct
  source 1..75: mol_type = other DNA
atccggtatcgtttacattggtgcggaagtgaccggtggcgacattctggttggtaaggttacgccgaaaggcga

SEQ ID NO: 532581 - DNA, 75 bp, synthetic construct
  source 1..75: mol_type = other DNA
catttgctctccgatgacgaaaaagttgaactaacaaaagccgtagttgaagaagttggcaatgaagtgactatt

SEQ ID NO: 532582 - DNA, 75 bp, synthetic construct
  source 1..75: mol_type = other DNA
aaacggtggtaggtattggtagtgccgaaaaaagccaggtgcagcatatggtccgcaccttgctgaaactgcccg

SEQ ID NO: 532583 - DNA, 75 bp, synthetic construct
  source 1..75: mol_type = other DNA
cgccgtaaactgcctgcgacaatcattctgcgtgccctgaactacaccactgaacagatcctcgacctgttcttt

SEQ ID NO: 532584 - DNA, 75 bp, synthetic construct
  source 1..75: mol_type = other DNA
gtctgagcgcactggtagaaatctaccgcatgatgcgtcctggcgagccgccgactcgtgaagcagctgaaagcc

SEQ ID NO: 532585 - DNA, 75 bp, synthetic construct
  source 1..75: mol_type = other DNA
ctgaaacacgagttcgagaagaaactcgaagcgaaacgccgcaaaatcacccagggcgacgatctggcaccgggc

SEQ ID NO: 532586 - DNA, 75 bp, synthetic construct
  source 1..75: mol_type = other DNA
aagagatcaaccagaccggtggctacaacgacgaaatcgaaggcaagctgaaaagcatcctcgattccttcaaag

SEQ ID NO: 532587 - DNA, 75 bp, synthetic construct
  source 1..75: mol_type = other DNA
tccacaacgccgaacgcgttcgccagttggcccacgacggtcatgagctggtgtatgtgccatgtcaccgtagcc

SEQ ID NO: 532588 - DNA, 75 bp, synthetic construct
  source 1..75: mol_type = other DNA
tgccttactccacggactctaccgttccttcagccagcgccggtgagctgattgatcacgcgctgcaaatgaaca

SEQ ID NO: 532589 - DNA, 75 bp, synthetic construct
  source 1..75: mol_type = other DNA
ttaacaccgacggtcaataacattgctgccgatctgatggtgcgcattaacaacgcaggcgcggctaacgccatg

SEQ ID NO: 532590 - DNA, 75 bp, synthetic construct
  source 1..75: mol_type = other DNA
ctactctttgagcgattcgatgagatcgccttcaacgcgggtatgctggataaatccgttattctgaacaccgca

SEQ ID NO: 532591 - DNA, 75 bp, synthetic construct
  source 1..75: mol_type = other DNA
cggcgacattatcatcctgccgcgtgaacaagcggtgttgatgacctactatcgcaacaacattgcacatatgtt

SEQ ID NO: 532592 - DNA, 75 bp, synthetic construct
  source 1..75: mol_type = other DNA
gaaccggcagaaacgatgaaggtttatcagttgctggcggagttgattacgtccgatgtacgcttaacgattgag

SEQ ID NO: 532593 - DNA, 75 bp, synthetic construct
  source 1..75: mol_type = other DNA
tgcttgataattattatcgacaatctcacgtgaataaagagttattacttatattaaataatgatagctttgata

SEQ ID NO: 532594 - DNA, 75 bp, synthetic construct
  source 1..75: mol_type = other DNA
actccacggtcggcgtcatacaaacccgcaaagcgttgcaggcagcgggcatgacttttcgcgtcagcgatattc

SEQ ID NO: 532595 - DNA, 75 bp, synthetic construct
  source 1..75: mol_type = other DNA
cccgtgatttacgcggcggctgcgggttatgcatttggctgacctgtccccccggcgaggaaatacaatgggtga

SEQ ID NO: 532596 - DNA, 75 bp, synthetic construct
  source 1..75: mol_type = other DNA
cagaaatttttcgccgtactgtggcttggtcgcgatagctttgtgcgtttctcgccgtcagtttcgctacgccgc

SEQ ID NO: 532597 - DNA, 75 bp, synthetic construct
  source 1..75: mol_type = other DNA
caccaggggctggtgccgccgcatatcgccgccgggatcaacctgaacttctggccggccgggccgattttccgc

SEQ ID NO: 532598 - DNA, 75 bp, synthetic construct
  source 1..75: mol_type = other DNA
cacctattacacgccgaaagaagagtctattaagctgttccacgactatctcgatttgcaccgtagcaacccaaa

SEQ ID NO: 532599 - DNA, 75 bp, synthetic construct
  source 1..75: mol_type = other DNA
gcaaccgcgtctgaatccgctgcactgcaatacctggcaccgtacgctggttgtgcaatgggcgaatacttccgt

SEQ ID NO: 532600 - DNA, 75 bp, synthetic construct
  source 1..75: mol_type = other DNA
gcaaaatctcccgtaatcgtatgtacaccatggcagcaacggcgatgtccaccgtgtcgatgtccatcgttggcg

SEQ ID NO: 532601 - DNA, 75 bp, synthetic construct
  source 1..75: mol_type = other DNA
ttgaaggcgcgtatggaacagcatcagcggcatcaggaaggtgtgctcgcctactcaattgttaatttactttcg

SEQ ID NO: 532602 - DNA, 75 bp, synthetic construct
  source 1..75: mol_type = other DNA
gctgccattcgcttcttatctgattgccgaacatattggcgtttccggcatcctcgctgcggttgccgccgggat

SEQ ID NO: 532603 - DNA, 75 bp, synthetic construct
  source 1..75: mol_type = other DNA
gcttcttcgaaatgttgggtgaatacattctggcgggcttcaaagtggcaattatcgttgccgcaatgctgatcg

SEQ ID NO: 532604 - DNA, 75 bp, synthetic construct
  source 1..75: mol_type = other DNA
atacgtcgttgcagcgctggtactgaacatgttcagcacctttatcgtgctgtcgctgatcaacccttaccgtgt

SEQ ID NO: 532605 - DNA, 75 bp, synthetic construct
  source 1..75: mol_type = other DNA
cgctctctccgcgtgctgaaggcatcatctctgtgttcctggtttccttcgctaacttctcttcaatcgggatta

SEQ ID NO: 532606 - DNA, 75 bp, synthetic construct
  source 1..75: mol_type = other DNA
ggtggtggtcaccgtggtcggcattggcttccttatttactgggtggtgccgggcattccgctgatccccgcctt

SEQ ID NO: 532607 - DNA, 75 bp, synthetic construct
  source 1..75: mol_type = other DNA
agggcatctcagcggggaatttactcgtgagcaggccacccaggaagtgttaatggctgccgctgtgggcaagct

SEQ ID NO: 532608 - DNA, 75 bp, synthetic construct
  source 1..75: mol_type = other DNA
cagtcttttagacgcatataataaaattatcgaggatggcgttgatttaggaaggttcattgaagggaaatctag

SEQ ID NO: 532609 - DNA, 75 bp, synthetic construct
  source 1..75: mol_type = other DNA
ggcgcgttatgagctggtgttcctggcggctggtgtcattctcttttcgctgtttgtcggcgtagtgatgctgcc

SEQ ID NO: 532610 - DNA, 75 bp, synthetic construct
  source 1..75: mol_type = other DNA
gagtttgatcctgaactctttttagtcttgtttatcccgccgttgctgtttgctgatggctggaaaacaccaacc

SEQ ID NO: 532611 - DNA, 75 bp, synthetic construct
  source 1..75: mol_type = other DNA
cagaaaatggaagaacgactggcggcagacaccgaagagaatatcgacaaccagttgctcactgaagtcagctct

SEQ ID NO: 532612 - DNA, 75 bp, synthetic construct
  source 1..75: mol_type = other DNA
cgtagcgatgatggatctgcagaaaattgcctctacgctctctccgcgcgctgaaggcatcatctctgtattcct

SEQ ID NO: 532613 - DNA, 75 bp, synthetic construct
  source 1..75: mol_type = other DNA
cggatatggtctgagctataccacgttcaccgtctctgatgtgaaactctctgccccgactatgaagcgtgacgg

SEQ ID NO: 532614 - DNA, 75 bp, synthetic construct
  source 1..75: mol_type = other DNA
cgcctgaaaattcctctcttctttgcctatgatgtgctgcacggtcagcgcactgtcttcccgattagcctcggc

SEQ ID NO: 532615 - DNA, 75 bp, synthetic construct
  source 1..75: mol_type = other DNA
tgccgaaagccgcctgcaccgcaaagaagcgcgtgaagtggcgcgcgaaagcctggtgttgctgaaaaaccgtct

SEQ ID NO: 532616 - DNA, 75 bp, synthetic construct
  source 1..75: mol_type = other DNA
atgacttttcgcgtcagcgatattccccgtgatttacgcggcggctgcgggttatgcatttggctgacctgtccc

SEQ ID NO: 532617 - DNA, 75 bp, synthetic construct
  source 1..75: mol_type = other DNA
agaaagagtatctggtgacggttgataaaccgattaccgatgaatttattcgtggtatgggggcgggagtaccga

SEQ ID NO: 532618 - DNA, 75 bp, synthetic construct
  source 1..75: mol_type = other DNA
ccggtgaaacagctaaaaggttttgagaaaatcaccctgaagccaggtgaaactcagactgtcagcttcccgatc

SEQ ID NO: 532619 - DNA, 75 bp, synthetic construct
  source 1..75: mol_type = other DNA
caagctaatcatgccggggcgtgatggtggtggatttttcctgacctgtattctcgggatagtcggtgcggtggt

SEQ ID NO: 532620 - DNA, 75 bp, synthetic construct
  source 1..75: mol_type = other DNA
atggaccgcgtccttcattttgtactggcactagccgttgttgcgattctcgcattgctggcaagcagcgaccgc

SEQ ID NO: 532621 - DNA, 75 bp, synthetic construct
  source 1..75: mol_type = other DNA
ttcaactgcttgttatcgaagtgttactggcgtggttcttcctgaactccgacgttggtttgggcttctccgaaa

SEQ ID NO: 532622 - DNA, 75 bp, synthetic construct
  source 1..75: mol_type = other DNA
cgtcaggatatccgcgccatgcaggatcaggtgatggaattaagccgcctgaaaattcctcttttctttgcttat

SEQ ID NO: 532623 - DNA, 75 bp, synthetic construct
  source 1..75: mol_type = other DNA
gtggggctttaaaggcatcaccgtttccgatcacggtgcaatcaaagagctgattaaacatggcacggcggcaga

SEQ ID NO: 532624 - DNA, 75 bp, synthetic construct
  source 1..75: mol_type = other DNA
aaaacggtcgggcgtgtctctgcttatgaagcggcagatgatggcctgaatatgacctgggcaccgatggtcgat

SEQ ID NO: 532625 - DNA, 75 bp, synthetic construct
  source 1..75: mol_type = other DNA
ttcgttgaatatggaagcgttatgcaaggatcaggcggcaaaacgttataacaccggcgagcaaaaaatcgacgt

SEQ ID NO: 532626 - DNA, 75 bp, synthetic construct
  source 1..75: mol_type = other DNA
tataccttccggaaagagcagtttgtctgttcttttgacgcagatggccattttttgcatctttccatgcgttaa

SEQ ID NO: 532627 - DNA, 75 bp, synthetic construct
  source 1..75: mol_type = other DNA
ccagggaagctatgaaatgcgcggttataccttccgtaaagagcagtttgtctgttcttttgacgcagatggcca

SEQ ID NO: 532628 - DNA, 75 bp, synthetic construct
  source 1..75: mol_type = other DNA
ttaaaaaagggttcctctttgggatcagaaccggagagcagaataaaacttacacgctaagcgtggatgccagtt

SEQ ID NO: 532629 - DNA, 75 bp, synthetic construct
  source 1..75: mol_type = other DNA
aaaaccgcacctaatcctgcgattcagttatccttcgaccaacgaatactggaagcggaatcagcagttcccaga

SEQ ID NO: 532630 - DNA, 75 bp, synthetic construct
  source 1..75: mol_type = other DNA
atgatgatgaactctttctttccggcaatggcgcttgtagtgttagtgggatgctcgacaccgccacccgtgcag

SEQ ID NO: 532631 - DNA, 75 bp, synthetic construct
  source 1..75: mol_type = other DNA
ttcccgattggtcgcctggataaagactcccaggggctgattttcctcaccaatcacggcgatctggtgaataag

SEQ ID NO: 532632 - DNA, 75 bp, synthetic construct
  source 1..75: mol_type = other DNA
tcctcgggacggtgacgaaaaagtgcaaagtcaaaaaagaagcgccgtttgtcttccgcattaccctggtgcagg

SEQ ID NO: 532633 - DNA, 75 bp, synthetic construct
  source 1..75: mol_type = other DNA
atggcgagcgcgataacattgtcgatttcgttaaccacagcaaacgcgtgttcccgattggccgcctggataaag

SEQ ID NO: 532634 - DNA, 75 bp, synthetic construct
  source 1..75: mol_type = other DNA
gacggaactggttcgcgccttcaccggttttgaatactgctgggaaattgagctacagcttaaaccacacgccgc

SEQ ID NO: 532635 - DNA, 75 bp, synthetic construct
  source 1..75: mol_type = other DNA
aggaaactccctggcgttacggttttctgaacctgatgcgtcgcgttgatgtgcagttgtgcaccgtcccggctg

SEQ ID NO: 532636 - DNA, 75 bp, synthetic construct
  source 1..75: mol_type = other DNA
cgcgatctggggcaggaaccaaagcatattgttatcgcaggcgtattacgtacagcattagccaataaacgcatt

SEQ ID NO: 532637 - DNA, 75 bp, synthetic construct
  source 1..75: mol_type = other DNA
acgcgaagcagccatttcgccagcggagaaaacaacgtcatgatgattggcaatgtggcggcgacatcacgatat

SEQ ID NO: 532638 - DNA, 75 bp, synthetic construct
  source 1..75: mol_type = other DNA
atggtagccaccagtaagactgagtggggacgggcgttccgcgaccgtctggcggctaatggcaagaaaggaaag

SEQ ID NO: 532639 - DNA, 75 bp, synthetic construct
  source 1..75: mol_type = other DNA
atgcgcaagctggcacaggtggcgtatggagtgctgaagtcaggcgtgccgttcgatgcgtcacggcataatccg

SEQ ID NO: 532640 - DNA, 75 bp, synthetic construct
  source 1..75: mol_type = other DNA
aagagatcaaccagaccggtggctacaacgacgaaatcgaaggcaaactgaaaggcatcctcgattccttcaaag

SEQ ID NO: 532641 - DNA, 75 bp, synthetic construct
  source 1..75: mol_type = other DNA
gccgatcgccgcagtgttgatcatagggtttgcctttactggcgcaatggctttttggcgcagcactacactggg

SEQ ID NO: 532642 - DNA, 75 bp, synthetic construct
  source 1..75: mol_type = other DNA
aatggcaagaaaggaaaggtgattctcggcgcgatgatgcgcaagctggcacaggtggcgtatggagtgctgaag

SEQ ID NO: 532643 - DNA, 75 bp, synthetic construct
  source 1..75: mol_type = other DNA
tgctgattgatgaagtgcgtgctggtggccgtattccgctgattatcgggcgtggcctgaccaccaaagcgcgtg

SEQ ID NO: 532644 - DNA, 75 bp, synthetic construct
  source 1..75: mol_type = other DNA
ggacatgtgtcgcttcgcagggcgttgtatatgcccgcaatggtagccaccagtaagactgagtggggacgggcg

SEQ ID NO: 532645 - DNA, 75 bp, synthetic construct
  source 1..75: mol_type = other DNA
gttttattgatttattaataaaggacatagattattttgttaaaggatattatccagtaatatattctagagacg

SEQ ID NO: 532646 - DNA, 75 bp, synthetic construct
  source 1..75: mol_type = other DNA
aaagacaattttggtgaaatccgcatcaatctgaactggcatcgtggctcgggttcaggcgggttactgggcggt

SEQ ID NO: 532647 - DNA, 75 bp, synthetic construct
  source 1..75: mol_type = other DNA
atgggtccgtacgctgaccttgccgaaggcatgaaagttaagtgtactggccgtatcctggaagttccggttggc

SEQ ID NO: 532648 - DNA, 75 bp, synthetic construct
  source 1..75: mol_type = other DNA
tgttgagcttcaggacgggtataaatcggtcattcaggcgctcggtaatgcattcggtgattatcgcgatgaacc

SEQ ID NO: 532649 - DNA, 75 bp, synthetic construct
  source 1..75: mol_type = other DNA
ctgaaacctgatgtccagaaaattgcgttcaccgtgacctgtgacggtgggcagacggtgtccggtcttcgtaat

SEQ ID NO: 532650 - DNA, 75 bp, synthetic construct
  source 1..75: mol_type = other DNA
ggtcgaataaatattcgccgactgaagaacggattttctaccgttcacccgttacgttttgatgagcgtgaagcc

SEQ ID NO: 532651 - DNA, 75 bp, synthetic construct
  source 1..75: mol_type = other DNA
atcaatgacagcctgctggaaggtgcaattgacgcactgaaacgtatcggtcaggtaaaagatgaaaacattacc

SEQ ID NO: 532652 - DNA, 75 bp, synthetic construct
  source 1..75: mol_type = other DNA
aagcaaccgcgcagactaccgaatctgtaccactggcgaaaataacgaagctaccgtatgacccaaatttgttta

SEQ ID NO: 532653 - DNA, 75 bp, synthetic construct
  source 1..75: mol_type = other DNA
tgccggtgtttctgtttattatatcccgtccattatccgttctgtgtcgtcaggggatgagaaacccgcaagtca

SEQ ID NO: 532654 - DNA, 75 bp, synthetic construct
  source 1..75: mol_type = other DNA
tcaaatttgaatctgttaaccctatccgttccatcattatcgatggccaaccatggtttgtagcccaagacgttt

SEQ ID NO: 532655 - DNA, 75 bp, synthetic construct
  source 1..75: mol_type = other DNA
ctgaccaccatgttctgctacatcgtcggtgtgagcaaatgcctgcgtgatatccagacgcacgcggagtacatc

SEQ ID NO: 532656 - DNA, 75 bp, synthetic construct
  source 1..75: mol_type = other DNA
gccattatggaggcgatcaagctggaagacaaaaaagaatacagcgccccgctgaagcccggctaccgcagtttg

SEQ ID NO: 532657 - DNA, 75 bp, synthetic construct
  source 1..75: mol_type = other DNA
cgatttatctctgatctggctggcaagctggtctgtacgattaacgaggatgtttacagcgcaaacaggaatgta

SEQ ID NO: 532658 - DNA, 75 bp, synthetic construct
  source 1..75: mol_type = other DNA
aatcagggtgaaatcattactctgattgtcggtcaggatttggatttctcttctgtttataaactgaaaatgaaa

SEQ ID NO: 532659 - DNA, 75 bp, synthetic construct
  source 1..75: mol_type = other DNA
tcgtggcaccgctttgggtcagggtgctaaggcactggtgtgtaaagtcaaaggtaatggcgtaaatcagcatgt

SEQ ID NO: 532660 - DNA, 75 bp, synthetic construct
  source 1..75: mol_type = other DNA
ctcacaggcggctggcgcgttaggcgaagccggtgcttctggctggattgacactcatttcagtgaacgttttct

SEQ ID NO: 532661 - DNA, 75 bp, synthetic construct
  source 1..75: mol_type = other DNA
acgctctataaaaatcagggcgaaatcatcacgcttatcgtcggtcaggatttggatttttcaaaaatctacaaa

SEQ ID NO: 532662 - DNA, 75 bp, synthetic construct
  source 1..75: mol_type = other DNA
agatgcacaggcagcgggggcgctgggtgaggccggagcttcaggctggattgacacacattttgatgagcgctt

SEQ ID NO: 532663 - DNA, 75 bp, synthetic construct
  source 1..75: mol_type = other DNA
aggacgacgggcatgacgtatcgggcgcggcggcggagctgaccaccatgttctgctacatcgtcggtgtgagca

SEQ ID NO: 532664 - DNA, 75 bp, synthetic construct
  source 1..75: mol_type = other DNA
gtacgggcaaaaccagcggcgaccgtcacccaaaaattcgtgaaggcgtgatgattggcgcgggcgcgaaaattc

SEQ ID NO: 532665 - DNA, 75 bp, synthetic construct
  source 1..75: mol_type = other DNA
ctgtttttatatcgctgtacctttccaccacatccgggccgtcgcttgcctgtggtaaagaaagcgaccacttct

SEQ ID NO: 532666 - DNA, 75 bp, synthetic construct
  source 1..75: mol_type = other DNA
ctgacgttaatggctgaacgtttcccttacgctaaaggtaaagctacagggatctattacagtgcgggcagtatt

SEQ ID NO: 532667 - DNA, 75 bp, synthetic construct
  source 1..75: mol_type = other DNA
tcacccgaaaattcgtgaaggcgtgatgattggcgcaggcgcgaaaattctcggtaatattgaagttgggcgcgg

SEQ ID NO: 532668 - DNA, 75 bp, synthetic construct
  source 1..75: mol_type = other DNA
cgacgggcatcgtcgtcggtgaaacggcggtgattgaaaacgacgtatcgattctgcaatctgtgacgcttggcg

SEQ ID NO: 532669 - DNA, 75 bp, synthetic construct
  source 1..75: mol_type = other DNA
cgatattcacccggcagcaaaaattggccgtggcattatgctcgaccacgccacgggcatcgttgtgggtgaaac

SEQ ID NO: 532670 - DNA, 75 bp, synthetic construct
  source 1..75: mol_type = other DNA
tgataggtgcagttattgctatagtttctacttacataagtgcaaggcaaggatacaaaaacagcataaaattag

SEQ ID NO: 532671 - DNA, 75 bp, synthetic construct
  source 1..75: mol_type = other DNA
tgataggtgcagttattgctatagtttccacttatataaatgcaagacaaggatacaaaaacagcataagattag

SEQ ID NO: 532672 - DNA, 75 bp, synthetic construct
  source 1..75: mol_type = other DNA
ggctttatactggcactgtttattggcttacgcagtcgcaaagaaacgcggcatcacacgctaggtgatgctgcc

SEQ ID NO: 532673 - DNA, 75 bp, synthetic construct
  source 1..75: mol_type = other DNA
ttgagttattagaaaaagcgttaagagaaacgcaaagcgaactcaaaaagtataaagatgaagagaagaaaaata

SEQ ID NO: 532674 - DNA, 75 bp, synthetic construct
  source 1..75: mol_type = other DNA
ctgccatcttattaatggcaccgttagccttttctgcacaatcattggctgaatcattaacggtggaacatcgcc

SEQ ID NO: 532675 - DNA, 75 bp, synthetic construct
  source 1..75: mol_type = other DNA
atggcagaaggcaaaatcctgccgtatctggacattccgttgcagcacgccagcccgcgcattctcaaactgatg

SEQ ID NO: 532676 - DNA, 75 bp, synthetic construct
  source 1..75: mol_type = other DNA
aacacctgcggctttattgacagcgcggtacaagaatcactggaagccattggtgaagcgttgaatgaaaacggc

SEQ ID NO: 532677 - DNA, 75 bp, synthetic construct
  source 1..75: mol_type = other DNA
tggcgaagcgttgaatgaaaacggcaaggtaatagtgaccggttgtctgggggcgaaagaagatcagatccgcga

SEQ ID NO: 532678 - DNA, 75 bp, synthetic construct
  source 1..75: mol_type = other DNA
cgttaagccaggtgatatcctgcgtgtgaaagtcgagcacgccgatgagtacgatttgtggggtagccgggttta

SEQ ID NO: 532679 - DNA, 75 bp, synthetic construct
  source 1..75: mol_type = other DNA
agaaggcgcgattggtcgcagcatggcagatgcaccggaaatcgacggcgcggtttatctcaatggtgaaaccaa

SEQ ID NO: 532680 - DNA, 75 bp, synthetic construct
  source 1..75: mol_type = other DNA
ttctggagcacgttcatcactacgtgccaaaaccgaaacacaacccattcctgagcctggtgccggagcaaggcg

SEQ ID NO: 532681 - DNA, 75 bp, synthetic construct
  source 1..75: mol_type = other DNA
atttcgctgttagaaaacgcctcggaagatctggagaacgactctgccgtcgatgcccagatgttgcttggtttg

SEQ ID NO: 532682 - DNA, 75 bp, synthetic construct
  source 1..75: mol_type = other DNA
tgtttttgacattctttgcccacgcgaacgactccgagcctggcagccagtatttaaaggcagcagaggccgggg

SEQ ID NO: 532683 - DNA, 75 bp, synthetic construct
  source 1..75: mol_type = other DNA
gaattttcgtcatcacagaaagtgctgatggatatcagccagcggacaggcacggcattttcggataatgcggcc

SEQ ID NO: 532684 - DNA, 75 bp, synthetic construct
  source 1..75: mol_type = other DNA
atttcgctgttagaaaacgcctcggaagatctggagaacgactccgccgtcgatgcccaaatgctgcttggtttg

SEQ ID NO: 532685 - DNA, 75 bp, synthetic construct
  source 1..75: mol_type = other DNA
atcgagaagaacaagcaaaaggcgctgcactggttgaacctgagctgtatggaagggtttgataccgggtgtgaa

SEQ ID NO: 532686 - DNA, 75 bp, synthetic construct
  source 1..75: mol_type = other DNA
aaaggcgctgcactggttgaacctgagctgtatggaagggtttgataccgggtgtgaagagtttgaaaaattaac

SEQ ID NO: 532687 - DNA, 75 bp, synthetic construct
  source 1..75: mol_type = other DNA
atacagcccggttgaaggtgcagacgccaatgccctgcctgaccaggttccggaagaagtgaaagaagaacgctg

SEQ ID NO: 532688 - DNA, 75 bp, synthetic construct
  source 1..75: mol_type = other DNA
cgtttgccgtgtcgccggtggttgccggtctggtgtatctgctgttctacggctctaacggcccgctcggtggct

SEQ ID NO: 532689 - DNA, 75 bp, synthetic construct
  source 1..75: mol_type = other DNA
gcattctgctggcctggctggtgacgcgctttaacttccctggacgccagttgctgctgacgctgctggacattc

SEQ ID NO: 532690 - DNA, 75 bp, synthetic construct
  source 1..75: mol_type = other DNA
gccgtaccggtaaacctggtgtttggcattctgctggcctggctggtgacgcgctttaacttccccggacgccag

SEQ ID NO: 532691 - DNA, 75 bp, synthetic construct
  source 1..75: mol_type = other DNA
ccgttgtggcggaacttcctatcctggcttatatgcagcaaaccaccggcaccataacggtaaaagcgaaattct

SEQ ID NO: 532692 - DNA, 75 bp, synthetic construct
  source 1..75: mol_type = other DNA
aaacgatggatgcacgcaacgcgctacggatggctggcatggcggttggttctttactgtgcatttgggtggggg

SEQ ID NO: 532693 - DNA, 75 bp, synthetic construct
  source 1..75: mol_type = other DNA
tgggcgctgctttacggcgtggtgctgaccaacgcccgcgcaattggcgagtttggcgcggtatcggtggtttcc

SEQ ID NO: 532694 - DNA, 75 bp, synthetic construct
  source 1..75: mol_type = other DNA
tcctctggtcttccagcatggcggggcacaaaccaaaagaacatgggaaagtacaccagatggacgcgatggatt

SEQ ID NO: 532695 - DNA, 75 bp, synthetic construct
  source 1..75: mol_type = other DNA
catttatcttcccggaaaatgagatgcctgcaccggtgaagacgacatttgcccccttgagtgcttccgcaatgg

SEQ ID NO: 532696 - DNA, 75 bp, synthetic construct
  source 1..75: mol_type = other DNA
atggctaagattggatttatatcattaggctgtccgaaaaaccttgtcgattcagagcgtattctcaccgaacta

SEQ ID NO: 532697 - DNA, 75 bp, synthetic construct
  source 1..75: mol_type = other DNA
atccggacatgctgcacgccatctggctgacggtgatgattgcgctgattgccgtaccggtaaacctggtgttcg

SEQ ID NO: 532698 - DNA, 75 bp, synthetic construct
  source 1..75: mol_type = other DNA
cgtttgccgtgtcgccggtggttgccggtctggtgtatttgctgttctacggctctaacggcccgctcggcggct

SEQ ID NO: 532699 - DNA, 75 bp, synthetic construct
  source 1..75: mol_type = other DNA
gctgacggtgatgattgcgctgattgccgtaccggtaaacctggtgttcggcattctgctggcctggctggtgac

SEQ ID NO: 532700 - DNA, 75 bp, synthetic construct
  source 1..75: mol_type = other DNA
ccctgcattgttaaaccggtgatgagttcctccggcaaggggcagacgtttattcgttctgcagagcaacttgct

SEQ ID NO: 532701 - DNA, 75 bp, synthetic construct
  source 1..75: mol_type = other DNA
acaccaacgtccgtcagatggccgatcccacttcggcggtaaacatcaatatggggacgttagtcggttcttacg

SEQ ID NO: 532702 - DNA, 75 bp, synthetic construct
  source 1..75: mol_type = other DNA
gcctccggccatcgtcgcccgaatggccgctaccatagactccatctctggcgggcgttttggcgtcaacctggt

SEQ ID NO: 532703 - DNA, 75 bp, synthetic construct
  source 1..75: mol_type = other DNA
atgaaaattggcgtattcgtacctattggcaacaacggctggctcatttcgacccacgcgccgcagtacatgccg

SEQ ID NO: 532704 - DNA, 75 bp, synthetic construct
  source 1..75: mol_type = other DNA
attttcagaattacttcaaaaataaagtggggaaaacacccggtcaatatcgcaaggactatcgtaaagctaatt

SEQ ID NO: 532705 - DNA, 75 bp, synthetic construct
  source 1..75: mol_type = other DNA
acgcggatttttggggttcagttacgcagatctggaaaaagaaattggtatcagaaaagccagtattcatcacca

SEQ ID NO: 532706 - DNA, 75 bp, synthetic construct
  source 1..75: mol_type = other DNA
aaaaaagcggcgagcttaaatccgttgtaccacctgatgagctggccatcattgtctgttccacactgaagggcg

SEQ ID NO: 532707 - DNA, 75 bp, synthetic construct
  source 1..75: mol_type = other DNA
atggctgaagagaaaaaaggcggtgtttcggtgtacataagccccgaaatcgtggaggtgctcaagcagcgccac

SEQ ID NO: 532708 - DNA, 75 bp, synthetic construct
  source 1..75: mol_type = other DNA
ttccgcattatcgactttgcgctgtctaactgcatcaactccgggatccgtcgtatgggcgtgatcacccagtac

SEQ ID NO: 532709 - DNA, 75 bp, synthetic construct
  source 1..75: mol_type = other DNA
cggtggtttccacctctacccgtaacttcccgaaccgtctgggtactggcgcgaatgtcttcctggcttctgcgg

SEQ ID NO: 532710 - DNA, 75 bp, synthetic construct
  source 1..75: mol_type = other DNA
atgattgccattctaaacaaagctaaagggagggttggtgtgagggggcaggcagttataattattttgttgggt

SEQ ID NO: 532711 - DNA, 75 bp, synthetic construct
  source 1..75: mol_type = other DNA
gtttctttaaaaaatcatgtagataatatcaacaatgtgattttaattcagccaaatgaaaatcttggtattgcg

SEQ ID NO: 532712 - DNA, 75 bp, synthetic construct
  source 1..75: mol_type = other DNA
tcaacttccgttaggaaggctttttaatataggtgctcctttccggcactactatgtatacagaaattggatatt

SEQ ID NO: 532713 - DNA, 75 bp, synthetic construct
  source 1..75: mol_type = other DNA
ccagttataccatggtcatatatgccatcaacatctccgaaaatggttttgttaattcttgatgttgtaaactcg

SEQ ID NO: 532714 - DNA, 75 bp, synthetic construct
  source 1..75: mol_type = other DNA
gccgctgttcgatcgtgaagtcgaaggcttcggtgaagtattccgtatgttgtcattcgaagagattggcaccgc

SEQ ID NO: 532715 - DNA, 75 bp, synthetic construct
  source 1..75: mol_type = other DNA
aaagaaaaccgctacgccatccgtgcccaggtttctgcgtggatcgccagtgacgatgtgcaagtggtgctgatt

SEQ ID NO: 532716 - DNA, 75 bp, synthetic construct
  source 1..75: mol_type = other DNA
acaatcgatgtgttatcaaccgttaaagctctacaggctaaaggtgtgcgggttgtttcgttgcgtgaagggttc

SEQ ID NO: 532717 - DNA, 75 bp, synthetic construct
  source 1..75: mol_type = other DNA
gctggcgaccgctgagagtgttgttgacgccattaaacgcgcgaagcacgccgccggacaggtaaaagtacaggg

SEQ ID NO: 532718 - DNA, 75 bp, synthetic construct
  source 1..75: mol_type = other DNA
gattgttgaaggcgtggttaagtttgacttcgaaattacactactgaccgccagcgccgtggatggtgtccattt

SEQ ID NO: 532719 - DNA, 75 bp, synthetic construct
  source 1..75: mol_type = other DNA
atgacgttattaggcactgcgctgcgtccggcagcaactcgcgtgatgttattaggctccggtgaactgggtaaa

SEQ ID NO: 532720 - DNA, 75 bp, synthetic construct
  source 1..75: mol_type = other DNA
gacgcaattcctgattattatattgcgcatcttttgacaaaaataaaagaatattatgcgcagcacctgagtatc

SEQ ID NO: 532721 - DNA, 75 bp, synthetic construct
  source 1..75: mol_type = other DNA
aattgatttagtgcaggataatattgatctggatattcgtattaatgacgaaattcctgattattatattgcgca

SEQ ID NO: 532722 - DNA, 75 bp, synthetic construct
  source 1..75: mol_type = other DNA
tctggcaagcgaagtgcggtgatatctcgggcgctgatgccaaagagaaaatttctgcgggctatttccgcgtta

SEQ ID NO: 532723 - DNA, 75 bp, synthetic construct
  source 1..75: mol_type = other DNA
tcaaaggctgtacagacgcttatttcacaaggtaagacacggttacagattcaggaagagttaggaatttctaaa

SEQ ID NO: 532724 - DNA, 75 bp, synthetic construct
  source 1..75: mol_type = other DNA
gcgcccggaggggatgattcgtattggctgtagttttggttttggtcgcagccatattgcgccagcaattactga

SEQ ID NO: 532725 - DNA, 75 bp, synthetic construct
  source 1..75: mol_type = other DNA
ggaacggtcaggagaaaaaatcggtgaaggtaagcgggcatctttcctccaatagcggcgagatagtgttgcaat

SEQ ID NO: 532726 - DNA, 75 bp, synthetic construct
  source 1..75: mol_type = other DNA
caaccgagcagcttcctggctatctccgatctggtggttcgcgttcttgatggcaagattttcaccgaagacaat

SEQ ID NO: 532727 - DNA, 75 bp, synthetic construct
  source 1..75: mol_type = other DNA
ttttcaccgaagacaatgttgactggaaaaaactcaccagtggattgccacaaacagcaccggtctccgagaact

SEQ ID NO: 532728 - DNA, 75 bp, synthetic construct
  source 1..75: mol_type = other DNA
acccaaaaatgactcaatttaccccaaataccgccatgccttcttccctgtggcaatactggcgcggactttctg

SEQ ID NO: 532729 - DNA, 75 bp, synthetic construct
  source 1..75: mol_type = other DNA
gctcctcaaagatccgtgggtattaaccatcacctgcgtggtggtgctgtggatcttcgttctgcttaatatcgt

SEQ ID NO: 532730 - DNA, 75 bp, synthetic construct
  source 1..75: mol_type = other DNA
gatggtgatcaccgctatgtacacgctgaactacaaccggctgcataaaaacccgtatcctttagatccacccat

SEQ ID NO: 532731 - DNA, 75 bp, synthetic construct
  source 1..75: mol_type = other DNA
gaaaaacccgaaacgcaacgtccctattgccaccattggtggggtactgattgctgccgtctgctatgtgctctc

SEQ ID NO: 532732 - DNA, 75 bp, synthetic construct
  source 1..75: mol_type = other DNA
cgttatctgaacttcaaccagctttctcagtacaccgaaaaagcggacggggtgattttccagactgcggtgtaa

SEQ ID NO: 532733 - DNA, 75 bp, synthetic construct
  source 1..75: mol_type = other DNA
acccgcaccatcgttgaccggtttggtgttcacgataaacctgaagaagtcgaaaaactgatgggcggtcattaa

SEQ ID NO: 532734 - DNA, 75 bp, synthetic construct
  source 1..75: mol_type = other DNA
cggggatatggggaaacttcccgacagtctgccggtcttcctgctcccggacgtgcctttaaatcttcagacgct

SEQ ID NO: 532735 - DNA, 75 bp, synthetic construct
  source 1..75: mol_type = other DNA
ccaacaacggcgaaccttaacgcctggctgaataatttctataacgcggaggcgaaacgtaaatcgatcttcccg

SEQ ID NO: 532736 - DNA, 75 bp, synthetic construct
  source 1..75: mol_type = other DNA
gtctgctgcgcgccagttgtgggcagacttcgcacaccaatctgtatcaaccagccaataatgactgctatctgt

SEQ ID NO: 532737 - DNA, 75 bp, synthetic construct
  source 1..75: mol_type = other DNA
ctatatcactgacacgacaaaagagcgttatcaccagtgtcagaacgtgaattgcagcgccacgttcatcactta

SEQ ID NO: 532738 - DNA, 75 bp, synthetic construct
  source 1..75: mol_type = other DNA
gatggtgatcaccgccatgtatgcgttgaattacaaccggttgcataaaaacccgtatccattagatgcgccaat

SEQ ID NO: 532739 - DNA, 75 bp, synthetic construct
  source 1..75: mol_type = other DNA
tccggtatcaagtccgtggggacactgattgatgaactgtggctgtttggcaagcagtacaaggcggaagacatg

SEQ ID NO: 532740 - DNA, 75 bp, synthetic construct
  source 1..75: mol_type = other DNA
ctacgtgaagccataggcggccttgcctcccgcccggaagggtttgtggtgtatacgaccacccagtcgaatgag

SEQ ID NO: 532741 - DNA, 75 bp, synthetic construct
  source 1..75: mol_type = other DNA
accttcattattgcttggatctgtacccggctctctttctgaatgtctccgaacaaactttgcaatcagacgtca

SEQ ID NO: 532742 - DNA, 75 bp, synthetic construct
  source 1..75: mol_type = other DNA
caataaatcgcaaagcaatcttggtattaccttcaacgatctttacgagtacgtagcgggccttaaacaggcaat

SEQ ID NO: 532743 - DNA, 75 bp, synthetic construct
  source 1..75: mol_type = other DNA
gatgcaaaccatttccggcgtgcactacaatttctctttgccaatggcattctggcaagcgaagtgcggtgatat

SEQ ID NO: 532744 - DNA, 75 bp, synthetic construct
  source 1..75: mol_type = other DNA
ctcgggcgctgatgccaaagagaaaatatctgcgggttatttccgtgttatccgtaactactatcgcttcggttg

SEQ ID NO: 532745 - DNA, 75 bp, synthetic construct
  source 1..75: mol_type = other DNA
ggcactggacagaaccacgccggcggaaataaaagaaatcatcaatatcgcaatgggcatgattcgcggtacaaa

SEQ ID NO: 532746 - DNA, 75 bp, synthetic construct
  source 1..75: mol_type = other DNA
tgtgcaaagatgtatttaccagaaggtataaacatcaatattaaagagcttggcgcggtacttgacagaactaca

SEQ ID NO: 532747 - DNA, 75 bp, synthetic construct
  source 1..75: mol_type = other DNA
cacctgtgcggcgttactgctgctcggccacggccactttggtaaagcacgccctgcatatctggctgttactac

SEQ ID NO: 532748 - DNA, 75 bp, synthetic construct
  source 1..75: mol_type = other DNA
atgacatatgaagtcatcattactcctgaggccgaacagcagataatcaacctgcacagatatataacggagaaa

SEQ ID NO: 532749 - DNA, 75 bp, synthetic construct
  source 1..75: mol_type = other DNA
ttaaattgtggagtacaacatttatttgtactccacagaatgaaaacaaatatcccatataaaactaatgatgat

SEQ ID NO: 532750 - DNA, 75 bp, synthetic construct
  source 1..75: mol_type = other DNA
ttgatgaactttatcgggctgatgccggaacgttaagttttcttgatggcgctgatacaccgcgaaatgttgccg

SEQ ID NO: 532751 - DNA, 75 bp, synthetic construct
  source 1..75: mol_type = other DNA
ttggtgggctgatgcgttttgtttcacgctcagtggtcacgggatttgttaatgcactggcaatactgattttta

SEQ ID NO: 532752 - DNA, 75 bp, synthetic construct
  source 1..75: mol_type = other DNA
atgtcgatagcaccggcgatccgaaagcgctgttctggaaggcacggaagtttgtcgagctgctgccggttgagt

SEQ ID NO: 532753 - DNA, 75 bp, synthetic construct
  source 1..75: mol_type = other DNA
tattgccagcactaaaacagttttaccgaaccaacccggctcagttcatcatcgactggggcatgacaacggacc

SEQ ID NO: 532754 - DNA, 75 bp, synthetic construct
  source 1..75: mol_type = other DNA
gttaacggcatggcgaacccgttcgctcagaagcgtcatggcgggaagataccggtattcacattccactggcgg

SEQ ID NO: 532755 - DNA, 75 bp, synthetic construct
  source 1..75: mol_type = other DNA
gtgcgcctgcgccggaaggttgtgcgcgagtacggtattaaatcgctggtggaagcaccagtcatctttttcgga

SEQ ID NO: 532756 - DNA, 75 bp, synthetic construct
  source 1..75: mol_type = other DNA
agcgccatggcgagcaaagacaaactcatcattgagctgtcgcagccgacctactccattaatggcgtggggaaa

SEQ ID NO: 532757 - DNA, 75 bp, synthetic construct
  source 1..75: mol_type = other DNA
atgcctattccgtttaaattcgacttcaggaaccctgattaccagatggtttttgaatggcggatggaacgccta

SEQ ID NO: 532758 - DNA, 75 bp, synthetic construct
  source 1..75: mol_type = other DNA
gaacccgatcgccaaaccttgccgactcggtgatgatcaactatgccccaatgaattcagccctgaacatctggg

SEQ ID NO: 532759 - DNA, 75 bp, synthetic construct
  source 1..75: mol_type = other DNA
tttgccactattgatggcattgattcggcgctcgcacaggctttaaacgaagcgttcgactcacaagttgtcagc

SEQ ID NO: 532760 - DNA, 75 bp, synthetic construct
  source 1..75: mol_type = other DNA
tgaagccctggtatcgactatccctttctcactggaatattcgctatggatagccagtgacgagaaggaatctct

SEQ ID NO: 532761 - DNA, 75 bp, synthetic construct
  source 1..75: mol_type = other DNA
gcgttcgtggtgatgcgcgcgctatcaacgaactgcgtgaagcggagggcatctgtcaaatcaccgccactccat

SEQ ID NO: 532762 - DNA, 75 bp, synthetic construct
  source 1..75: mol_type = other DNA
gactcggtgatgatcaactatgccccaatgaattcagccctgaacatctgggagctgctagggagacaggcctga

SEQ ID NO: 532763 - DNA, 75 bp, synthetic construct
  source 1..75: mol_type = other DNA
gtggtggtggcacaggaacttgatctgaactacagcgcatcagcggaaggcgttctgattccatccgaatgggta

SEQ ID NO: 532764 - DNA, 75 bp, synthetic construct
  source 1..75: mol_type = other DNA
agcgccatggcgagcaaagacaaactcatcatcgagctgtcgcaaccgacctattccattaacggtgtggggaaa

SEQ ID NO: 532765 - DNA, 75 bp, synthetic construct
  source 1..75: mol_type = other DNA
cagcaacccgatgatttacgccacggtcggcgggcatgaagcgatggtgtcgatggtagcgctcggctgtggcgt

SEQ ID NO: 532766 - DNA, 75 bp, synthetic construct
  source 1..75: mol_type = other DNA
cgatgctggagaatctggcagtggtgttgattgcacccgcattgccctgcccggtgcgtaatcaggtttctgtcg

SEQ ID NO: 532767 - DNA, 75 bp, synthetic construct
  source 1..75: mol_type = other DNA
gtcacattgcaatttctgcaacgtcaacattaagggctgcgccattggatttacgcgatctgaaaaccttcctgc

SEQ ID NO: 532768 - DNA, 75 bp, synthetic construct
  source 1..75: mol_type = other DNA
ggcctcggcgctgaccggcgtactgcagctggcggccggctacctgaagctgggcagcctgatgcgctacgtctc

SEQ ID NO: 532769 - DNA, 75 bp, synthetic construct
  source 1..75: mol_type = other DNA
tggtggcaactgataacctagcgtttggtgtactcaccggcgtgctgatagcctcgctgaacttcgccactaaag

SEQ ID NO: 532770 - DNA, 75 bp, synthetic construct
  source 1..75: mol_type = other DNA
ttttggccgcagcgcgcgggcaatgcacgttagcccgtccacgctctcacggcagattcagcgcctggaagaaga

SEQ ID NO: 532771 - DNA, 75 bp, synthetic construct
  source 1..75: mol_type = other DNA
ccggtgcgtaatcaggtctcggtagagaagccggactggtcaacggtaccgtttatcatggccgatcaggggcca

SEQ ID NO: 532772 - DNA, 75 bp, synthetic construct
  source 1..75: mol_type = other DNA
actggtgatgcggcggatgcaatggaaaaggtggtcactggcgaagcagatttggcgattgccggaaaaccggaa

SEQ ID NO: 532773 - DNA, 75 bp, synthetic construct
  source 1..75: mol_type = other DNA
cccggcgcagtggcgttttcgatgctggagaatctggcagtagtgctgattgcccccgcgctaccctgcccggtg

SEQ ID NO: 532774 - DNA, 75 bp, synthetic construct
  source 1..75: mol_type = other DNA
cagcaattgcgccacaccatcgaccagcaagggccgtccctctctggcgaattacatattttctgttcggtgact

SEQ ID NO: 532775 - DNA, 75 bp, synthetic construct
  source 1..75: mol_type = other DNA
ggcagattcagcgcctggaagaagatctcggccaaccgctgtttgtgcgcgataaccgcacggtaacgctgacgg

SEQ ID NO: 532776 - DNA, 75 bp, synthetic construct
  source 1..75: mol_type = other DNA
tggcgttttcgatgctggagaatctggcagtagtgctgattgcccccgcgctgccctgcccggtgcgtaatcagg

SEQ ID NO: 532777 - DNA, 75 bp, synthetic construct
  source 1..75: mol_type = other DNA
taggccagctggtggagaaaacggggttgtcaggcaccgatcgggtgctgggcgtctgtttcggtgcgttgcgcg

SEQ ID NO: 532778 - DNA, 75 bp, synthetic construct
  source 1..75: mol_type = other DNA
agttggtgagaacggaccatagcaatatccgtgtgttaagcatgtatgcgtttaatgcctttgagcagcagcgat

SEQ ID NO: 532779 - DNA, 75 bp, synthetic construct
  source 1..75: mol_type = other DNA
tggtggctattggcattggcggctgggtgatttactcccgctcgcggcggcgggtacgcgtggcgccggaagaat

SEQ ID NO: 532780 - DNA, 75 bp, synthetic construct
  source 1..75: mol_type = other DNA
atgcaacgtcgtgatttcttaaaatattccgtcgcgctgggcgtggcttcggctttgccgctgtggagccgcgca

SEQ ID NO: 532781 - DNA, 75 bp, synthetic construct
  source 1..75: mol_type = other DNA
attttcaggcgtcagcaaaggtgctgaaattcccggaagtgcaaattcaggaaatcatcagtaactgtgcgagag

SEQ ID NO: 532782 - DNA, 75 bp, synthetic construct
  source 1..75: mol_type = other DNA
ggcgtctgtttcggtgcgttgcgcggtgtgttgattgttgccgccattctcttctttctcgactcctttaccggg

SEQ ID NO: 532783 - DNA, 75 bp, synthetic construct
  source 1..75: mol_type = other DNA
ggaatgcccgttctgcggggtggtgggaagggtaatgaggtgctttatgattctgccgccgtcataaaatggtat

SEQ ID NO: 532784 - DNA, 75 bp, synthetic construct
  source 1..75: mol_type = other DNA
gcgaagagtacccggatgaagtaatggatagagatgaatttcatgaaaccgtaaggattattggcagagtattct

SEQ ID NO: 532785 - DNA, 75 bp, synthetic construct
  source 1..75: mol_type = other DNA
cactgggttatgctgaagcgttgacacgttcatctgatcccaacgacaaccgcctcggcggcgaactgctgcgcc

SEQ ID NO: 532786 - DNA, 75 bp, synthetic construct
  source 1..75: mol_type = other DNA
ctccggcgttgctggacagggcgctggatccgaaagccgatccgctcaacgaagaagagatgtcgcgcctggcgc

SEQ ID NO: 532787 - DNA, 75 bp, synthetic construct
  source 1..75: mol_type = other DNA
atgccgcactgggttatgctgaagcgttgacacgttcatctgatcccaacgacaaccgcctcggcggcgagttgt

SEQ ID NO: 532788 - DNA, 75 bp, synthetic construct
  source 1..75: mol_type = other DNA
atccggtaatgcggattcagccgattgctattagtgcctccggtgctttgccagacacattaagtagcctgcctg

SEQ ID NO: 532789 - DNA, 75 bp, synthetic construct
  source 1..75: mol_type = other DNA
aactgcttttctgcaacattatacagataatgccgctccatggttcattatgaactcagatggagaatatttgct

SEQ ID NO: 532790 - DNA, 75 bp, synthetic construct
  source 1..75: mol_type = other DNA
tgatggggcatatggggcatggcaatatgaatcatatgaaccacggcgggaagttcgatttccaccatgccaata

SEQ ID NO: 532791 - DNA, 75 bp, synthetic construct
  source 1..75: mol_type = other DNA
ccacggcgggaagttcgatttccaccatgccaataaaatcaacggtcaggcgtttgatatgaacaagccgatgtt

SEQ ID NO: 532792 - DNA, 75 bp, synthetic construct
  source 1..75: mol_type = other DNA
tgaagtttaatcacgatgcaccgaaagaacatgcttatatggcgcactgccatctgctggagcatgaagatacgg

SEQ ID NO: 532793 - DNA, 75 bp, synthetic construct
  source 1..75: mol_type = other DNA
tgccattagtgcctctggtgctttgccagacacattaagtagcctgcctgcgttaccttcgctggaagggctgac

SEQ ID NO: 532794 - DNA, 75 bp, synthetic construct
  source 1..75: mol_type = other DNA
tggtggtaattgaagatgacgagatcctgaaattaatgctgccaaaacagtggggtattgatgatgttccggtga

SEQ ID NO: 532795 - DNA, 75 bp, synthetic construct
  source 1..75: mol_type = other DNA
ggtttggcgatacgctgctgaccaacggtgcaatctacccgcaacacgctgccccgcgtggttggctgcgcctgc

SEQ ID NO: 532796 - DNA, 75 bp, synthetic construct
  source 1..75: mol_type = other DNA
gacgaatttgttgcgctcccccttctaaatatttcactttcagctggcggaggaagttgtgcattggaggagtcc

SEQ ID NO: 532797 - DNA, 75 bp, synthetic construct
  source 1..75: mol_type = other DNA
agaactgcagcagcgaagctggccagcgagcgtctttacattagtacagagctggtttttttactggcactgttg

SEQ ID NO: 532798 - DNA, 75 bp, synthetic construct
  source 1..75: mol_type = other DNA
atgcctgaaatccagtgtttatctatctttcccgctatattaactctctcaaggtcaaccgatatcaacgtacat

SEQ ID NO: 532799 - DNA, 75 bp, synthetic construct
  source 1..75: mol_type = other DNA
ggaagtcaaaaaagaggatgagcataatccgctgaattgcattgaagttaagcaacatctcggcaaagaggcgca

SEQ ID NO: 532800 - DNA, 75 bp, synthetic construct
  source 1..75: mol_type = other DNA
aaagcacaaagttttgaagtagtggcacaatatcaattcgacttcggcttgcgcctggatttgcccctatatttc

SEQ ID NO: 532801 - DNA, 75 bp, synthetic construct
  source 1..75: mol_type = other DNA
cgggaataaaacgcgcctggcctatgcaggcttaaatattgaacagtttggttcgctggactatggccgtaacta

SEQ ID NO: 532802 - DNA, 75 bp, synthetic construct
  source 1..75: mol_type = other DNA
acgctgaaacattaaacatgaccacctatggcgatggttatatctctaacaaagcacaaagttttgaagtggtgg

SEQ ID NO: 532803 - DNA, 75 bp, synthetic construct
  source 1..75: mol_type = other DNA
cctgtatatgttcgtgtctggtcaatggagggtagagaaggtgtgacttataatatttcatcagatggtgggatc

SEQ ID NO: 532804 - DNA, 75 bp, synthetic construct
  source 1..75: mol_type = other DNA
tttcaggcgccagcaaaggtgctgaaattaccggaagtgcacattcatgatatcgttagtcactctgcgagaatg

SEQ ID NO: 532805 - DNA, 75 bp, synthetic construct
  source 1..75: mol_type = other DNA
atggaggttaacaaaaaacgcttatccgaaattttcggggtaagcgtccgaacgattcagaactggcaggagcaa

SEQ ID NO: 532806 - DNA, 75 bp, synthetic construct
  source 1..75: mol_type = other DNA
tggttgcccgcgtgttctctttgccggaggtaaaaaaagaggatgagcataatccgcttaatcgtattgaggtaa

SEQ ID NO: 532807 - DNA, 75 bp, synthetic construct
  source 1..75: mol_type = other DNA
acgttatcagggctgggaaatgaccgacattcagactgatcgtgtgacattacgttatcaggggcgcacagtgac

SEQ ID NO: 532808 - DNA, 75 bp, synthetic construct
  source 1..75: mol_type = other DNA
gcctgtgctctggtggccggtctcccgctgtttatccacagtaatgttatcagttcacactcagaggctctgtca

SEQ ID NO: 532809 - DNA, 75 bp, synthetic construct
  source 1..75: mol_type = other DNA
tcgaaaggcagagatctgggccgctacggcgaccaggacatgattgagtatatcgacgttggtgatgctgccaac

SEQ ID NO: 532810 - DNA, 75 bp, synthetic construct
  source 1..75: mol_type = other DNA
tttcaggcgccagcaaaggtgctgaaattaccggaagtgcaaattcatgatatcgttagtcactatgcgagaatg

SEQ ID NO: 532811 - DNA, 75 bp, synthetic construct
  source 1..75: mol_type = other DNA
gagcgatgcggcgagtctttcgacaccgtaatcagtgccaacccgcaatcgtatccaggcagtgcagaggcgctg

SEQ ID NO: 532812 - DNA, 75 bp, synthetic construct
  source 1..75: mol_type = other DNA
tggctacatttttaaaaagaaaccttccggcaatacgatgaagtacgcgatgacgattcagaacgtcatcgatct

SEQ ID NO: 532813 - DNA, 75 bp, synthetic construct
  source 1..75: mol_type = other DNA
cattccttctgaatggccttgctgcgagtgatttacttttgactcctaccccgccggcacaagttgatttccact

SEQ ID NO: 532814 - DNA, 75 bp, synthetic construct
  source 1..75: mol_type = other DNA
attttcaggcgtcagcaaaggtgctgaaattcccggaagtgcaaattcaggaaatcatgagtaactgtgcgagac

SEQ ID NO: 532815 - DNA, 75 bp, synthetic construct
  source 1..75: mol_type = other DNA
gtgaaaggatcgattaaagggatgatcgaagggaaggtgagccgtcgctgggcgaagaaacaccatccgcgctgg

SEQ ID NO: 532816 - DNA, 75 bp, synthetic construct
  source 1..75: mol_type = other DNA
tttcaggcgccagcaaaggtgctgaaattaccggaagtgcatattcatgatatcgttagtcactttgcgagaatg

SEQ ID NO: 532817 - DNA, 75 bp, synthetic construct
  source 1..75: mol_type = other DNA
agagcagcggctaatcctctcaatgcctccggtaagaatgcagaactgtgggcaacaggtataaaatatgatgcc

SEQ ID NO: 532818 - DNA, 75 bp, synthetic construct
  source 1..75: mol_type = other DNA
tacgctaacgtcgcgtcatcattttttggtgccaagttccagcgtaatattgaagagctgctggtagcgccggtt

SEQ ID NO: 532819 - DNA, 75 bp, synthetic construct
  source 1..75: mol_type = other DNA
taaaaagcatctgggcgaaagagatccatcgctttatgcgtatctgggtgcagacgctggtgccgccagtcatca

SEQ ID NO: 532820 - DNA, 75 bp, synthetic construct
  source 1..75: mol_type = other DNA
acggaggccggaagaagcgcaactgcgtgcgttcctgctccagtttctgcgaaaggaagtcacaagacaggccga

SEQ ID NO: 532821 - DNA, 75 bp, synthetic construct
  source 1..75: mol_type = other DNA
gctatcagaatcattgcaatgatacacaaaatatcaatattgagaacacattattccatttcaagatcacttatc

SEQ ID NO: 532822 - DNA, 75 bp, synthetic construct
  source 1..75: mol_type = other DNA
cgccgctggcgttcatgcggtgattgtaccgaaagatcgttccgctcaactcaatgcaacggcgaaaaaagtggc

SEQ ID NO: 532823 - DNA, 75 bp, synthetic construct
  source 1..75: mol_type = other DNA
gaacccgttatacgtcggacattggggattattcgccgcaaagatgccgtgctttctccggcagcagaacgcttt

SEQ ID NO: 532824 - DNA, 75 bp, synthetic construct
  source 1..75: mol_type = other DNA
cggtgatttacctcatgaccgcccggcttgaaggtgtggtcgaacgctgcaatcagcgctggctggccggggagc

SEQ ID NO: 532825 - DNA, 75 bp, synthetic construct
  source 1..75: mol_type = other DNA
atgcctgttaacagtacggaacggccacagaatataaaccagcccaccatcagccgggcagaccttgaatgtctc

SEQ ID NO: 532826 - DNA, 75 bp, synthetic construct
  source 1..75: mol_type = other DNA
ctcatgaccgcccagctcgacggtgtggtcgaacgctgcaatcagcagtggctgaccggggagggtaacgtatga

SEQ ID NO: 532827 - DNA, 75 bp, synthetic construct
  source 1..75: mol_type = other DNA
tggcgcaacagatggccatgcaaaaaacttctccgtatttattcaggctggcggcagttatcggctcacaccatt

SEQ ID NO: 532828 - DNA, 75 bp, synthetic construct
  source 1..75: mol_type = other DNA
ctggacatcgtgggatggttggttctgctatttgtcgtcaattattagcacgtaatgatgttgagttaattgtca

SEQ ID NO: 532829 - DNA, 75 bp, synthetic construct
  source 1..75: mol_type = other DNA
tttgcccccaccgcagcagggattgatgcgcgtaaagtgaccgatcgcggcattttaccggtcatcaatacgggt

SEQ ID NO: 532830 - DNA, 75 bp, synthetic construct
  source 1..75: mol_type = other DNA
gctgtatcccaatattaaagtgcggattctggaacaaggcacgaataattgcatggaatcggtgctatgtaacga

SEQ ID NO: 532831 - DNA, 75 bp, synthetic construct
  source 1..75: mol_type = other DNA
gccgggcctggcaatgcctcatgcgccctattcttctattattggtatcccactggtagaaccggttattcgtcg

SEQ ID NO: 532832 - DNA, 75 bp, synthetic construct
  source 1..75: mol_type = other DNA
agctagccgacaagccctggaagctggactggttttacgaagtgcgtcatctttcgacgtcattaggactggtgg

SEQ ID NO: 532833 - DNA, 75 bp, synthetic construct
  source 1..75: mol_type = other DNA
caaacgcgagtatgcggcgcttgggatgaaggcgaacttttcgctgtttgacgataccgatcagcttgctttgct

SEQ ID NO: 532834 - DNA, 75 bp, synthetic construct
  source 1..75: mol_type = other DNA
atgagtattacagaaatacagatgaataatttcgtattggcagtgaaggcgggtctctcagtcctgaaaagaccg

SEQ ID NO: 532835 - DNA, 75 bp, synthetic construct
  source 1..75: mol_type = other DNA
tacgcatgcgtcgttctgcgtgatgccgcgagtattcatggaggctatgcctccagaatggcaagagaagatggc

SEQ ID NO: 532836 - DNA, 75 bp, synthetic construct
  source 1..75: mol_type = other DNA
gatgcttatatcagatgtggtaaacccgtcggcgtaacgctttatcagttaactcggcaacaatataaggaattc

SEQ ID NO: 532837 - DNA, 75 bp, synthetic construct
  source 1..75: mol_type = other DNA
gtatgccatccgttttcctgatgatccggagattttttcgcagacagaggcgcagcaactggtggcggaagagct

SEQ ID NO: 532838 - DNA, 75 bp, synthetic construct
  source 1..75: mol_type = other DNA
aaaatccgggcatctcgacgtggtgctcaatcgcctggcggattacaccgaacagcggcagcgtctgaaatcacg

SEQ ID NO: 532839 - DNA, 75 bp, synthetic construct
  source 1..75: mol_type = other DNA
caaattatcatggggcgaccggaggacgaggacacccttaaacgtgttgatgcggtgatccggaaaaaataccgc

SEQ ID NO: 532840 - DNA, 75 bp, synthetic construct
  source 1..75: mol_type = other DNA
ggtcgtctcgacagagatagcgaagggttactggtgctgactaataatggcgcgttacaggcgcgtttaacccag

SEQ ID NO: 532841 - DNA, 75 bp, synthetic construct
  source 1..75: mol_type = other DNA
gccgcatgaccgcccatgttggtttccccacgctgcgactgattcgctatgcgatgggagattactctttggata

SEQ ID NO: 532842 - DNA, 75 bp, synthetic construct
  source 1..75: mol_type = other DNA
agagcgcaaagtggtcagcgccgaagaacggatgcagaaagggcaaaaccatctggcgaatctgaaagcgatgat

SEQ ID NO: 532843 - DNA, 75 bp, synthetic construct
  source 1..75: mol_type = other DNA
cacacaagacgcacttgaagccttgcgcaatggcgtaaccttaaatgatggccctaccctgcccgcaggcgtgga

SEQ ID NO: 532844 - DNA, 75 bp, synthetic construct
  source 1..75: mol_type = other DNA
cgctacccgtgttggtcacctggccgatgcatatatcagatgtggtaagccagtcggcgtaacgctttatcagtt

SEQ ID NO: 532845 - DNA, 75 bp, synthetic construct
  source 1..75: mol_type = other DNA
ggtcgccttgaccgcgatagcgaagggttactggtgctgaccaataacggcgcgttgcaggcgcgtttaacccag

SEQ ID NO: 532846 - DNA, 75 bp, synthetic construct
  source 1..75: mol_type = other DNA
taaaaagcatctgggcgaaagagatccatcgctttatgcgtatctggatacagacgctggtgccaccggtcatca

SEQ ID NO: 532847 - DNA, 75 bp, synthetic construct
  source 1..75: mol_type = other DNA
atgcttatgaaggccattaaatctgtattcaatttttacatgctctatttgcagccttttattggagtggttctt

SEQ ID NO: 532848 - DNA, 75 bp, synthetic construct
  source 1..75: mol_type = other DNA
ttcgggatatctggttaagggcaggtttctgtacgggaatattacggttcccggagacagcccgcttattgtttt

SEQ ID NO: 532849 - DNA, 75 bp, synthetic construct
  source 1..75: mol_type = other DNA
cctcgtccacagcaggtgctgcggtagcaaacccagttttaattgcacagattaatccaatatttgagcctgttg

SEQ ID NO: 532850 - DNA, 75 bp, synthetic construct
  source 1..75: mol_type = other DNA
atgttatctattaacaccaataacgcctcaatggccgccgttaatgcaatcagcaaaagcagctcttctctgtct

SEQ ID NO: 532851 - DNA, 75 bp, synthetic construct
  source 1..75: mol_type = other DNA
gccaattgccaccgcgacttgccttcaggaaagaaagttacaggaggtggtggaatgtgcagcttttcaaatgcc

SEQ ID NO: 532852 - DNA, 75 bp, synthetic construct
  source 1..75: mol_type = other DNA
gaatcacttcattggcgggaaaagtggaggatctatctactacaaacccattcaatgcccgaccggatttatcat

SEQ ID NO: 532853 - DNA, 75 bp, synthetic construct
  source 1..75: mol_type = other DNA
attttcaggcgacagcaaaggtgctgaaattcccggaagtgcaaattcaggaaatcatcagtaactgtgcgagat

SEQ ID NO: 532854 - DNA, 75 bp, synthetic construct
  source 1..75: mol_type = other DNA
gtatcactgctgcgtttactctgctgtccgctttcctgctgacttcaaccccacgccagaaaacggcggatgccc

SEQ ID NO: 532855 - DNA, 75 bp, synthetic construct
  source 1..75: mol_type = other DNA
gcattactgccgcgttcactctgctgtccgctttcctgctgacttcaaccccacgccaaaaaacggcggacgcct

SEQ ID NO: 532856 - DNA, 75 bp, synthetic construct
  source 1..75: mol_type = other DNA
tatgcaccacagtccatgcttgctgaggacggcaggcgcatcattatggcatggatgaatatgtgggattcccct

SEQ ID NO: 532857 - DNA, 75 bp, synthetic construct
  source 1..75: mol_type = other DNA
cctccggaaggtatcatgcatttccgtgatcctaaagtctggcatgaagacggcttctggtggatggttattggt

SEQ ID NO: 532858 - DNA, 75 bp, synthetic construct
  source 1..75: mol_type = other DNA
ttgcactggcaacacgaacctgtcgcgctggcacccggagataaatatgatcgtgatggctgtttttcagggagt

SEQ ID NO: 532859 - DNA, 75 bp, synthetic construct
  source 1..75: mol_type = other DNA
ggcgtgtctggcggtactgaactgactgcgtctggctcagctaaccagatgattaccagcatttctaccgcgatg

SEQ ID NO: 532860 - DNA, 75 bp, synthetic construct
  source 1..75: mol_type = other DNA
atttgcgcggtgtttttatccgtggctgggacaacggacgtgggctggatggagatcggaacagacatctcctga

SEQ ID NO: 532861 - DNA, 75 bp, synthetic construct
  source 1..75: mol_type = other DNA
acgcacggaggcggtttcaccatgactgacagccagtggatacgcgccgtcaataacaaagggatcaccaccgat

SEQ ID NO: 532862 - DNA, 75 bp, synthetic construct
  source 1..75: mol_type = other DNA
attttcaggcgacagcaaaggtgctgaaattcccggaagtgcaaattcaggaaatcattagtaactgtgcgagac

SEQ ID NO: 532863 - DNA, 75 bp, synthetic construct
  source 1..75: mol_type = other DNA
tcgctcagcaggtgggcggcaagggtggtggacgtcctgacatggcgcaagccggtggtacggatgctgcggcct

SEQ ID NO: 532864 - DNA, 75 bp, synthetic construct
  source 1..75: mol_type = other DNA
tatttcagattacaaagtaacccgggctgaggtgttggaaccggaaaaacatctggtcacgttaccggacattat

SEQ ID NO: 532865 - DNA, 75 bp, synthetic construct
  source 1..75: mol_type = other DNA
atggcgtatggctgtgtacccgacgactgcaccggggaagcttccactggccccggaaaggtgatgccacatggc

SEQ ID NO: 532866 - DNA, 75 bp, synthetic construct
  source 1..75: mol_type = other DNA
gtgaaaaaattcagacacgatgacgataaaggttttattctgcttgaggttctggcgggactgatagtgattggt

SEQ ID NO: 532867 - DNA, 75 bp, synthetic construct
  source 1..75: mol_type = other DNA
gtaaccggattaactcttctgccgatgacgccgcgggcaaacaaattgctaaccgtctgactgcacagtccagcg

SEQ ID NO: 532868 - DNA, 75 bp, synthetic construct
  source 1..75: mol_type = other DNA
ggcgtgtctggcggtactgagctgactgcgtctggctcggctaaccagatgattaccagcatttctaccgcgatg

SEQ ID NO: 532869 - DNA, 75 bp, synthetic construct
  source 1..75: mol_type = other DNA
ccgaaggagagatcaaaggtggaactgtccgtggccagacagtcactggaggaacggtccgctctgatggtcgtc

SEQ ID NO: 532870 - DNA, 75 bp, synthetic construct
  source 1..75: mol_type = other DNA
atttacagctggataaaacagctactgcagacactttctgctcaccagacggacttgtaggccgcgacagcaaag

SEQ ID NO: 532871 - DNA, 75 bp, synthetic construct
  source 1..75: mol_type = other DNA
gaagtaattatcagattacctgcaacaaggggcatatcgccatgcgaatggcaggaaaagatctggaggaaagcg

SEQ ID NO: 532872 - DNA, 75 bp, synthetic construct
  source 1..75: mol_type = other DNA
tcgtggtgttcgttgtgctgctgtttgcattggcccaaacccgccacaaacagtggagtctggcgaaaaaagtgc

SEQ ID NO: 532873 - DNA, 75 bp, synthetic construct
  source 1..75: mol_type = other DNA
aagtggttgcaggttctaacctgcaagacatcatcaaactgggaagtttcgttgtcgcgtcctacctcggtctgc

SEQ ID NO: 532874 - DNA, 75 bp, synthetic construct
  source 1..75: mol_type = other DNA
tatggttctgacagccaggtacttaaagattctgtacagtggtttaacattgtcggtaacggctatgttcagcta

SEQ ID NO: 532875 - DNA, 75 bp, synthetic construct
  source 1..75: mol_type = other DNA
ctggcgttgcgggtgttggcggcggtgcgactttcgctgcactgattgttctcccagcaatgggattgccggtaa

SEQ ID NO: 532876 - DNA, 75 bp, synthetic construct
  source 1..75: mol_type = other DNA
tcaaaatggctgtgccgggttatatccggcaatgctggcagtgatggttgcgccaacagttggcattaacccact

SEQ ID NO: 532877 - DNA, 75 bp, synthetic construct
  source 1..75: mol_type = other DNA
tgctcgtctgcataacgcctctcagttaggtaaaatcagttttctgactattggtacattactgtttaccacact

SEQ ID NO: 532878 - DNA, 75 bp, synthetic construct
  source 1..75: mol_type = other DNA
cgggtacaggcagtggtacgggtacaggcagcggtacgggtacaggcagcggtacgggtacaggcagcggtacgg

SEQ ID NO: 532879 - DNA, 75 bp, synthetic construct
  source 1..75: mol_type = other DNA
atgaaaaaagtcactcttccccggctttccggttggctggtcgcttccgtcgcgctgtttgtcgtgatcggctgg

SEQ ID NO: 532880 - DNA, 75 bp, synthetic construct
  source 1..75: mol_type = other DNA
ctgatgaagctgctgcgcgaaaacttccagttcaatgccgatgcggagatctcgatcgaagtcgatccgcgggaa

SEQ ID NO: 532881 - DNA, 75 bp, synthetic construct
  source 1..75: mol_type = other DNA
atttaagtttgcattaaaaaatcacccaaacaaaaatcaagccattaatataatcgaagctgctttgataagata

SEQ ID NO: 532882 - DNA, 75 bp, synthetic construct
  source 1..75: mol_type = other DNA
gtgtcaaggcctggcatggcgggtttgataattgctacgttaccagtacttcgccgttttctgctgctgcgcggg

SEQ ID NO: 532883 - DNA, 75 bp, synthetic construct
  source 1..75: mol_type = other DNA
gcctcatctatttcggcaacgttatcaggatattcacgtgcggcagcgtcttttgcatcaaattatgctgcatct

SEQ ID NO: 532884 - DNA, 75 bp, synthetic construct
  source 1..75: mol_type = other DNA
tgcgactttcgctgcactgattgttctcccagcaatgggattgccggtaactctggttgcgctgttaatatccgt

SEQ ID NO: 532885 - DNA, 75 bp, synthetic construct
  source 1..75: mol_type = other DNA
agaagccatcacgctggacaaccggcgggcagactatccgctggttcccagccgccattacccacaacattacga

SEQ ID NO: 532886 - DNA, 75 bp, synthetic construct
  source 1..75: mol_type = other DNA
ccggtattaatcccccgcaatgagcagtttataaccaacgcaggggaaatcagagtcgatgaagttttgccttct

SEQ ID NO: 532887 - DNA, 75 bp, synthetic construct
  source 1..75: mol_type = other DNA
aggatgccatgctcccctggccaaaaaatgttcacagcggctaccggatccttcaggagtatttctgttatccag

SEQ ID NO: 532888 - DNA, 75 bp, synthetic construct
  source 1..75: mol_type = other DNA
ttttacggggaaagctgctatgacctttaaggaagcgtacattcaggctttcaactggatggctgagcttattca

SEQ ID NO: 532889 - DNA, 75 bp, synthetic construct
  source 1..75: mol_type = other DNA
gctgaccgttgtaaacatggaaagccaggagacatggaaatggacggaaagaaccgggcagcatcccctcatcta

SEQ ID NO: 532890 - DNA, 75 bp, synthetic construct
  source 1..75: mol_type = other DNA
acgtctctgttccatcgaggctttgatcatactctcgcctttattcatgccgatggcagttatccatcagatgaa

SEQ ID NO: 532891 - DNA, 75 bp, synthetic construct
  source 1..75: mol_type = other DNA
tgtggtaactgtatgacgcgcctgcgtctgggtgtacatgacagttcactggttgatcccgatatcaaaacgctg

SEQ ID NO: 532892 - DNA, 75 bp, synthetic construct
  source 1..75: mol_type = other DNA
tcgccgtggtgtttggcgtgcatcagggctttattcctgtttacctcgcgttaatggacagccagggattcaaca

SEQ ID NO: 532893 - DNA, 75 bp, synthetic construct
  source 1..75: mol_type = other DNA
gcctgatagcctggtggggtctgccgatgggcttaaacagcgccttcgggccgtctggtctggtggcgctgccgc

SEQ ID NO: 532894 - DNA, 75 bp, synthetic construct
  source 1..75: mol_type = other DNA
cctctgccgggatatctggctgctgcccgttcgcctggagcagattgaaaaccgcagtacgacccgtaatggtgt

SEQ ID NO: 532895 - DNA, 75 bp, synthetic construct
  source 1..75: mol_type = other DNA
gaccaaaacatccctgttccatcgcggctttgatcatacccttgcctttatacatgctgatggcagttatccgtc

SEQ ID NO: 532896 - DNA, 75 bp, synthetic construct
  source 1..75: mol_type = other DNA
tgatgacttccgcacaaggcatccttccggcaatggcggtttatgctggcgggattctggtggcatgggtttgcg

SEQ ID NO: 532897 - DNA, 75 bp, synthetic construct
  source 1..75: mol_type = other DNA
ggacgcgctggagcaagaaatcgtccatcgtgcaccgctgttcgccgggcgtcacgtcagccaattgcactgggg

SEQ ID NO: 532898 - DNA, 75 bp, synthetic construct
  source 1..75: mol_type = other DNA
agcgtctgtgtggttgcggaaagcatgatggccgtgaacacgggcagtcgcttacagtacaactgcgactggggc

SEQ ID NO: 532899 - DNA, 75 bp, synthetic construct
  source 1..75: mol_type = other DNA
caacgtaacacgcaatggccgaatttatctggcgttgatttatcctaaaaatgaacaggatgatttaacagaaga

SEQ ID NO: 532900 - DNA, 75 bp, synthetic construct
  source 1..75: mol_type = other DNA
gggccattacggggctgaatgtatcagggctgaagaaaaacgcgcgggatatcagtctgctgaggtatatgccgg

SEQ ID NO: 532901 - DNA, 75 bp, synthetic construct
  source 1..75: mol_type = other DNA
ggatggtataccgccgggccattgcggggctgaatgtggaggggctgaagaaaaacgcgcgggatatcagtctgc

SEQ ID NO: 532902 - DNA, 75 bp, synthetic construct
  source 1..75: mol_type = other DNA
cgcttatgagtcagggtttaatgggcagagagctgtgactacatggatgagtcggatgaagaaactgcgtgagtt

SEQ ID NO: 532903 - DNA, 75 bp, synthetic construct
  source 1..75: mol_type = other DNA
ggggtggcattcggataatttattacaacgtaacacgcaatggccgaatttatctggcgttgatttatcctaaaa

SEQ ID NO: 532904 - DNA, 75 bp, synthetic construct
  source 1..75: mol_type = other DNA
ggtggcgaaggtgtgctatgcgcagatggtgaagcagttcctgagtcgtgacccgttcgaatgcgtgctgtgtgg

SEQ ID NO: 532905 - DNA, 75 bp, synthetic construct
  source 1..75: mol_type = other DNA
gagcttccgttacctggaccacaaaacgggagaaacggcgacggaaacgctgacacagcgtgagctggtcgcgag

SEQ ID NO: 532906 - DNA, 75 bp, synthetic construct
  source 1..75: mol_type = other DNA
acctatcacctcagcgttaaatttggtggcaaggggcaggctgcaaaccacgccgattacatcgagcgcaaagag

SEQ ID NO: 532907 - DNA, 75 bp, synthetic construct
  source 1..75: mol_type = other DNA
gagcggggaggtgcgaaaaaggattccggaagcctgactctcactcagcaaaaagagcagttgcgggaattgcga

SEQ ID NO: 532908 - DNA, 75 bp, synthetic construct
  source 1..75: mol_type = other DNA
tcttgaacaggcgcgaatggtcgggcatgacatcagggaatggctggatacaccggttaagcaacatgaactggt

SEQ ID NO: 532909 - DNA, 75 bp, synthetic construct
  source 1..75: mol_type = other DNA
acctgccgagtccgcagcagaaactcgatatcctgcaggaaaccatcgccttcctgacgcaatcgggttatcagt

SEQ ID NO: 532910 - DNA, 75 bp, synthetic construct
  source 1..75: mol_type = other DNA
acggcgaaaggtcgtctgctgatccgcaacatttgcatgtgctttgatacttacttgcgccagaaagcgcgaatg

SEQ ID NO: 532911 - DNA, 75 bp, synthetic construct
  source 1..75: mol_type = other DNA
agtatctggacgcgctggagcaagaaatcgttcatcgtgcaccgctgtttgccgggcgtcacgttagtcagttgc

SEQ ID NO: 532912 - DNA, 75 bp, synthetic construct
  source 1..75: mol_type = other DNA
aatccctgtcattactaccgagttactagcacagctttacggcactgagccggtgcgtattcgccagaatcatca

SEQ ID NO: 532913 - DNA, 75 bp, synthetic construct
  source 1..75: mol_type = other DNA
atggcgctgacaaagaagcagcgggaaaaactgcgtatgaaattcggtggccgttgtgcgtactgcggctgtgaa

SEQ ID NO: 532914 - DNA, 75 bp, synthetic construct
  source 1..75: mol_type = other DNA
cctgcaccgcgtctggtcgaaaaccagcgataaaccggtgtggatggatcaggccgaaaaggcaaccggtgattt

SEQ ID NO: 532915 - DNA, 75 bp, synthetic construct
  source 1..75: mol_type = other DNA
atgtgcaaccatctttaagagggttacaaatttccccgaaagcccgctccctcattctctggacagaacgcgggg

SEQ ID NO: 532916 - DNA, 75 bp, synthetic construct
  source 1..75: mol_type = other DNA
gcgaaataacaatctatcgcatgacaaaagacggatttaccttgctcatggagagcatcgacggtccaggcgtga

SEQ ID NO: 532917 - DNA, 75 bp, synthetic construct
  source 1..75: mol_type = other DNA
caaacctaccagccaggacactacaggaactgataaagatatctgcggataaactggccgcaggtgcaaaaccat

SEQ ID NO: 532918 - DNA, 75 bp, synthetic construct
  source 1..75: mol_type = other DNA
gccgcctgccagaagcgatggatggcgaaggcggctggctgctgccgggcctgattgagctgcataccgataatc

SEQ ID NO: 532919 - DNA, 75 bp, synthetic construct
  source 1..75: mol_type = other DNA
gactactaccccgccagcctgctggatgcggcgttccgcgtcgccgatgacgagagcaaccgctttacgctgccg

SEQ ID NO: 532920 - DNA, 75 bp, synthetic construct
  source 1..75: mol_type = other DNA
gggccagcgccagttcgctaaccgcgagaagtatcgcgaatattatcagggcaaatactccctcaccgatgcgca

SEQ ID NO: 532921 - DNA, 75 bp, synthetic construct
  source 1..75: mol_type = other DNA
gcttggcagcgtgatcgccgaatttcccaccacgttcgaagcggcggaagcctcgcgcaagcatggcatgaacgt

SEQ ID NO: 532922 - DNA, 75 bp, synthetic construct
  source 1..75: mol_type = other DNA
tggtgtcgctgatggatcactcgccgggccagcgccagttcgccaaccgcgagaagtatcgcgaatattatcagg

SEQ ID NO: 532923 - DNA, 75 bp, synthetic construct
  source 1..75: mol_type = other DNA
ccagttcgccaaccgcgagaagtatcgcgaatattatcagggcaaatactcgctcaccgatgcgcagatgcagca

SEQ ID NO: 532924 - DNA, 75 bp, synthetic construct
  source 1..75: mol_type = other DNA
gcagcgctggccgggtttgaaagtgaatacaatgttcgtttttccaatgaagaaagtggcctggtagcggtgatt

SEQ ID NO: 532925 - DNA, 75 bp, synthetic construct
  source 1..75: mol_type = other DNA
gctacggacccctgatccattgagggatactcatcaacgcgatcggcaattacgtcaggctatcgttcgtctggt

SEQ ID NO: 532926 - DNA, 75 bp, synthetic construct
  source 1..75: mol_type = other DNA
agagaagcaagtattgagcaacaattgcgcgaaattacgctactgccgctcaatattaaacatatatcggtgaag

SEQ ID NO: 532927 - DNA, 75 bp, synthetic construct
  source 1..75: mol_type = other DNA
atgaaaaccgtattcgcggcgcatcaacgatttctcagcaaacagccaaaaatctctttttatgggatggacgta

SEQ ID NO: 532928 - DNA, 75 bp, synthetic construct
  source 1..75: mol_type = other DNA
aatgcctggttgcacggtaattttcgttatgtggcgcattctgagtgggccagtatggaacaaatttcgccgtgg

SEQ ID NO: 532929 - DNA, 75 bp, synthetic construct
  source 1..75: mol_type = other DNA
atctctgctcccgacggctgcaaaaacgctttgaatcgcgcgatattcatttcctgtgtctgtatctgcaatatt

SEQ ID NO: 532930 - DNA, 75 bp, synthetic construct
  source 1..75: mol_type = other DNA
gtataaagagctggaaaataccatcccaggctttacccgcccgacgcatggttacctggaaagctgggcgcgcca

SEQ ID NO: 532931 - DNA, 75 bp, synthetic construct
  source 1..75: mol_type = other DNA
atctctatgggctgtgactgctgttacaccaaccacgctgacgttgaccagaacctcaacgaaaacctgatgatc

SEQ ID NO: 532932 - DNA, 75 bp, synthetic construct
  source 1..75: mol_type = other DNA
atattttgaccgcattggctttacgcgtcgtcgtggaaatgatcatttattgcgcgacgcattattatttccgga

SEQ ID NO: 532933 - DNA, 75 bp, synthetic construct
  source 1..75: mol_type = other DNA
attctggaatattttgaccgcattggctttacgcgtcgtcgtggaaatgatcatttattgcgcgacgcattatta

SEQ ID NO: 532934 - DNA, 75 bp, synthetic construct
  source 1..75: mol_type = other DNA
tgcacaggaaacctatgcaaatgtcagccctctgaatgcctccggaaaaacggctgaagtatgggcaactggctt

SEQ ID NO: 532935 - DNA, 75 bp, synthetic construct
  source 1..75: mol_type = other DNA
taccagggtaaaaatgatgatcgcgatgctaccgaagctaatggcgatggttatggtatgtctgcctcttacgat

SEQ ID NO: 532936 - DNA, 75 bp, synthetic construct
  source 1..75: mol_type = other DNA
ctgagtttggaggcgatgccctgacccagaccgacgtattcatgcttggtcgtgctaccggtgttgctacttacc

SEQ ID NO: 532937 - DNA, 75 bp, synthetic construct
  source 1..75: mol_type = other DNA
tcactggacggtggtaataagcttcttcctggtgtcactttccggtattgcgcttttcttcccaacattgcaatg

SEQ ID NO: 532938 - DNA, 75 bp, synthetic construct
  source 1..75: mol_type = other DNA
accgagttgggtgacgttaaagtggtgattctcggccaggatccttatcacggaccgggacaggcgcatggtctg

SEQ ID NO: 532939 - DNA, 75 bp, synthetic construct
  source 1..75: mol_type = other DNA
aaccattttgtgctggcaaatcagtggctggaacaacgtggcgagaaaccgattgactggatgccagtattaccg

SEQ ID NO: 532940 - DNA, 75 bp, synthetic construct
  source 1..75: mol_type = other DNA
gtgtgttgattgttgctgccattctcttctttctcgactcctttaccggggtgtcgaaaagcgaagactggagca

SEQ ID NO: 532941 - DNA, 75 bp, synthetic construct
  source 1..75: mol_type = other DNA
tttcaggcgccagcaaaggtgctgaaattaccggaagtgcagattcatgatatcgttagtcactgtgcgagaatg

SEQ ID NO: 532942 - DNA, 75 bp, synthetic construct
  source 1..75: mol_type = other DNA
caggcgctgggcgctgatctcggtaaatcggtaatggcgatcgcctacggcgagcaatggatgaacatggcacaa

SEQ ID NO: 532943 - DNA, 75 bp, synthetic construct
  source 1..75: mol_type = other DNA
cgtgaagcgcagattgagcagcagttacgtgaactgacgttactgccgctcaacattaagcatatgtcggtaaaa

SEQ ID NO: 532944 - DNA, 75 bp, synthetic construct
  source 1..75: mol_type = other DNA
cttcggaagacagcgagcgtgaagatgttccgtttggtaatgccgggatcggctatgtcaacgaatacggctcac

SEQ ID NO: 532945 - DNA, 75 bp, synthetic construct
  source 1..75: mol_type = other DNA
cttcggaagacagcgggcgggatgatgtttcgtttggtaatgcgggcattggttacctcaacgaatacggctcac

SEQ ID NO: 532946 - DNA, 75 bp, synthetic construct
  source 1..75: mol_type = other DNA
catgaccattaccggctttacgccgcttgctgacagtactgttgaagcccgggctcgtcgggggcgcaagggggc

SEQ ID NO: 532947 - DNA, 75 bp, synthetic construct
  source 1..75: mol_type = other DNA
cagaggttgccgctgcttttgatgaggatttagcagacgccgtgagtgatttttctggttcttacgttacgcacc

SEQ ID NO: 532948 - DNA, 75 bp, synthetic construct
  source 1..75: mol_type = other DNA
catgactattaccggctttacgccgcttgctgacagcactgttgaagcccggactcgtcgggggcgcaagggggc

SEQ ID NO: 532949 - DNA, 75 bp, synthetic construct
  source 1..75: mol_type = other DNA
tgttccgtttggtaatgcgggcatcggttacctcaacgaatacggctcaccagagcagaacatcccgccacgacc

SEQ ID NO: 532950 - DNA, 75 bp, synthetic construct
  source 1..75: mol_type = other DNA
taattattggtatattaggaactctttcttatattaaggggagtgatattattttgaaaataataaaacagacta

SEQ ID NO: 532951 - DNA, 75 bp, synthetic construct
  source 1..75: mol_type = other DNA
gtaactaatatttattcaaaaaaaattaaacctttctcactaaagctgagcattgaagatgaaaaatatgcaaaa

SEQ ID NO: 532952 - DNA, 75 bp, synthetic construct
  source 1..75: mol_type = other DNA
accgagagctatcactacgactcgcccgacgtctgtccgccgctgcgcacgcctgcgctgttattgtgcggcagc

SEQ ID NO: 532953 - DNA, 75 bp, synthetic construct
  source 1..75: mol_type = other DNA
cagggaagctgagaacagtggcatcagaaggaaatgttgcacggttcacccaacgttttggtcgttttgttagca

SEQ ID NO: 532954 - DNA, 75 bp, synthetic construct
  source 1..75: mol_type = other DNA
agtgcgcgaccgtctaaatcagatccacactctgaagccaaaccgccttgaagcggaaaccctgagtgggattgc

SEQ ID NO: 532955 - DNA, 75 bp, synthetic construct
  source 1..75: mol_type = other DNA
ttgccaaacatatcaaacgtagccgagtatagctattactataatgttgatgatatgcaaacaagagtgattgtt

SEQ ID NO: 532956 - DNA, 75 bp, synthetic construct
  source 1..75: mol_type = other DNA
tattattgagacttatgaccctgtatcaaggcagttacaacgatacgagataattacagtacatgtagatccttc

SEQ ID NO: 532957 - DNA, 75 bp, synthetic construct
  source 1..75: mol_type = other DNA
acgaaggaaacgcggtacagatggtgattgagcaggaagtgtcgaaggtggaaggacagaccagtctcgacgtcg

SEQ ID NO: 532958 - DNA, 75 bp, synthetic construct
  source 1..75: mol_type = other DNA
ttaagtggagttgctgcgataaaaagctctaccaacgcagtaattttaatttctatagtttccacaactctaact

SEQ ID NO: 532959 - DNA, 75 bp, synthetic construct
  source 1..75: mol_type = other DNA
cagttatatcgtcagtccgggcgtctggaagcaaaatcatactggcactatgaacttggaggaattacccgtaat

SEQ ID NO: 532960 - DNA, 75 bp, synthetic construct
  source 1..75: mol_type = other DNA
ctttgatgacttcagcggtgggcttaaaatgaccgctcgcgaagtgatggatattgacgaagcccgggaaaaata

SEQ ID NO: 532961 - DNA, 75 bp, synthetic construct
  source 1..75: mol_type = other DNA
cgtgtctctccgagcgatcgtttattaaacgatctccgtggcctcattggttcggagcaggtggaactggagttt

SEQ ID NO: 532962 - DNA, 75 bp, synthetic construct
  source 1..75: mol_type = other DNA
atggacaacaccgagaaggtggtgggcctggtggatgagtgctggcggatggggctgaaaatcctaccaccagat

SEQ ID NO: 532963 - DNA, 75 bp, synthetic construct
  source 1..75: mol_type = other DNA
tcaacaataccggcggtattcttctgccccgtcgcaggctgttcaccattgaatccccgccagagggccgtatac

SEQ ID NO: 532964 - DNA, 75 bp, synthetic construct
  source 1..75: mol_type = other DNA
tatcagccatgcggcccccctcagcgcctcagatcttcacatcacgccggggcgtgacagtacggatttcacgta

SEQ ID NO: 532965 - DNA, 75 bp, synthetic construct
  source 1..75: mol_type = other DNA
aggatgaggttaccgctgcttttgatggtgatttagctgatgcggtgaataatttttctggttcttacgttacgc

SEQ ID NO: 532966 - DNA, 75 bp, synthetic construct
  source 1..75: mol_type = other DNA
ggcatctgatgctgaccaccatccatgcgaacgacccgattaacatcctcgaacgtcttgagatggagggggtac

SEQ ID NO: 532967 - DNA, 75 bp, synthetic construct
  source 1..75: mol_type = other DNA
cgtgcaccgggcgttttatccgacggagggatcaacacagtacaaagaaaagttcttgattacatcagaaaagcc

SEQ ID NO: 532968 - DNA, 75 bp, synthetic construct
  source 1..75: mol_type = other DNA
gacaacacggacttcacctatgtggaagcccgggttcacggcgaactggaagtgctcgatatcctccggaaagaa

SEQ ID NO: 532969 - DNA, 75 bp, synthetic construct
  source 1..75: mol_type = other DNA
cgaaactcaacgaaatagaagagaatatctggattgcgcgtaatattcgccatgcaatggaaattggcgaactat

SEQ ID NO: 532970 - DNA, 75 bp, synthetic construct
  source 1..75: mol_type = other DNA
gctggtggaccgcagcggaaacgaatcagggtatacagactttgtgcgcgggcaggccagcatcgatgtatccga

SEQ ID NO: 532971 - DNA, 75 bp, synthetic construct
  source 1..75: mol_type = other DNA
agcgtcactgataacgatgatggcactttcaccattaccggtgcatggcacgatccggataaatatgcccgaatc

SEQ ID NO: 532972 - DNA, 75 bp, synthetic construct
  source 1..75: mol_type = other DNA
tattaaagtgtccgctcaaaataacaggggcgcgtccatttattcgcctactgtcatagtatcacacggatctgg

SEQ ID NO: 532973 - DNA, 75 bp, synthetic construct
  source 1..75: mol_type = other DNA
ttgaccgctgcgaatattgataaatggacgctttatcaggttgcccagtattgtgatcagatggtaccagacggc

SEQ ID NO: 532974 - DNA, 75 bp, synthetic construct
  source 1..75: mol_type = other DNA
aaacttcagcggggtaacgtgggagtttcgcgcgggaacgcaggcgcaaaaatatattcagggtattcccggtac

SEQ ID NO: 532975 - DNA, 75 bp, synthetic construct
  source 1..75: mol_type = other DNA
cgtgtctgtggacggtatgacgggtggtgtaaagaactcggctatcgctataatccagaacgggctggcacaggt

SEQ ID NO: 532976 - DNA, 75 bp, synthetic construct
  source 1..75: mol_type = other DNA
tcggtatcgagctgaactggggattccaggcgaataccgacgacacgctgaagacggaaattcagtacagcctga

SEQ ID NO: 532977 - DNA, 75 bp, synthetic construct
  source 1..75: mol_type = other DNA
atcccgccgttattcaggccatgcattacatccgcaatcatgcctgcaaaggaattaaagtggatcaggttctgg

SEQ ID NO: 532978 - DNA, 75 bp, synthetic construct
  source 1..75: mol_type = other DNA
gggctatcaggcagcaaaactgttgcatcgtttattggataaagaagaaatgccgctacagcggattttggtccc

SEQ ID NO: 532979 - DNA, 75 bp, synthetic construct
  source 1..75: mol_type = other DNA
tctgcatctgtagcagggaacagcgctcagctggaccgtctcgacgaggtgatcgtcagtgagaaggaagccaca

SEQ ID NO: 532980 - DNA, 75 bp, synthetic construct
  source 1..75: mol_type = other DNA
cgtaaatatcagcagatgggattaaaggcggggcagatattctggtaccgcgcgcagctggttgaccgaaccggt

SEQ ID NO: 532981 - DNA, 75 bp, synthetic construct
  source 1..75: mol_type = other DNA
cgcaaatatcagcagatgggccttaaagcggggcagattttctggtaccgcgcgcagctggttgaccgcagcggt

SEQ ID NO: 532982 - DNA, 75 bp, synthetic construct
  source 1..75: mol_type = other DNA
aaaaacatttttcttggtgactcatcttcgtacacgcctcttcagaacgccgacggaagttataacttcaataat

SEQ ID NO: 532983 - DNA, 75 bp, synthetic construct
  source 1..75: mol_type = other DNA
ctaacggcagccaatatcgacaaatggacgctttatcaggtcgctcagtactgtgatcaatcggtaccggacggt

SEQ ID NO: 532984 - DNA, 75 bp, synthetic construct
  source 1..75: mol_type = other DNA
atgacccggaaacacgaacgtacagcggcacctggacgggcgcatttaagtgggcatggacggataaccctgcgt

SEQ ID NO: 532985 - DNA, 75 bp, synthetic construct
  source 1..75: mol_type = other DNA
gcgacacggcctatacagagattcagcgcgccacaactgccgactacgccaatcctgaactgctggtcctggtgc

SEQ ID NO: 532986 - DNA, 75 bp, synthetic construct
  source 1..75: mol_type = other DNA
tggcgaagacccagacacactggtacgcaaagagggtaaagaggcgtttgaagcgcgaatggagcaggcaatgcc

SEQ ID NO: 532987 - DNA, 75 bp, synthetic construct
  source 1..75: mol_type = other DNA
gcgataaacgcggtcgggtgattggttttggcgggcgcgtgctgggcaacgatacccccaaatacctgaactcgc

SEQ ID NO: 532988 - DNA, 75 bp, synthetic construct
  source 1..75: mol_type = other DNA
tcacattcagttgttgttccgcgcgaccaacaatgtcatttgctgttatgacggcgaccgtgcaggtcgcgatgc

SEQ ID NO: 532989 - DNA, 75 bp, synthetic construct
  source 1..75: mol_type = other DNA
gggcagtattacgctgcggggatggggatcggcgttgagaatacgccgtccgggatgcagtcgcaggttatcttc

SEQ ID NO: 532990 - DNA, 75 bp, synthetic construct
  source 1..75: mol_type = other DNA
gtcgcaggttatcttcctggctgaccgcttcgccgtcaccacggcagccggaaatagcgtagctttgccgttcgt

SEQ ID NO: 532991 - DNA, 75 bp, synthetic construct
  source 1..75: mol_type = other DNA
tacctgatacctacgatcctgaaacccgcacttactctggtacatgggaaggtgtgtttaaatgggcatggacgg

SEQ ID NO: 532992 - DNA, 75 bp, synthetic construct
  source 1..75: mol_type = other DNA
ggtgagatccaagcaacaagcggtaaattcaaagggactgtggaagcccaaagttttatcggggacattgcaaat

SEQ ID NO: 532993 - DNA, 75 bp, synthetic construct
  source 1..75: mol_type = other DNA
tcgttcagcagaatatcagcgttgagaccatgcgcgtcagctgggaccaggcgaaaaatgctatcgcgtatgagg

SEQ ID NO: 532994 - DNA, 75 bp, synthetic construct
  source 1..75: mol_type = other DNA
cgaccgctttgggctgggcaatcgcctgacggcggccaatattgataaatggacgctttatcaggtcgcgcaata

SEQ ID NO: 532995 - DNA, 75 bp, synthetic construct
  source 1..75: mol_type = other DNA
accgataactatgcgctggttgaaagcgcatttttgcatttaaaagagaaaggcgttaaccgctttgctttttat

SEQ ID NO: 532996 - DNA, 75 bp, synthetic construct
  source 1..75: mol_type = other DNA
ctgaatcaagtggccaaaaatccgtggctggaaatatttatcgggcactgggagatgcgccatcgtctgactaac

SEQ ID NO: 532997 - DNA, 75 bp, synthetic construct
  source 1..75: mol_type = other DNA
gacgatattcgccatgccgacgggatgccggaaatcaacattaacgaaactacgccgcgttttgaagatgcgttt

SEQ ID NO: 532998 - DNA, 75 bp, synthetic construct
  source 1..75: mol_type = other DNA
gccttccgtgaggcgctacgtgaacgaaactggtactactggagcaacagtaacgaggactatacgttaacggat

SEQ ID NO: 532999 - DNA, 75 bp, synthetic construct
  source 1..75: mol_type = other DNA
gaaaaatgggggctactgaacatccgtttccgggaaaacttcgaataccgctattactatgcccagcggattgga

SEQ ID NO: 533000 - DNA, 75 bp, synthetic construct
  source 1..75: mol_type = other DNA
gaacgtatggcggtatgtgaagaaaccatcgcgcgcattgatccgacctggagctgctttatgtgtttatcctgc

SEQ ID NO: 533001 - DNA, 75 bp, synthetic construct
  source 1..75: mol_type = other DNA
cgccaatgagctggcctgaggccttctcaaatgttggtattgcaatggcggtggcgctggtggtgtattcgattt

SEQ ID NO: 533002 - DNA, 75 bp, synthetic construct
  source 1..75: mol_type = other DNA
gaagtgaagatccgcgtgcgtttcggcgcgccgaaacacgggacggaagtggtcgatttccgcgccgccagcccg

SEQ ID NO: 533003 - DNA, 75 bp, synthetic construct
  source 1..75: mol_type = other DNA
cgacccggtggtgacctttgccaatagcccggaaagctacatgcagtatgtcgaccagcatccggaacagagcat

SEQ ID NO: 533004 - DNA, 75 bp, synthetic construct
  source 1..75: mol_type = other DNA
aaggcgtcacggtgatggttaccacccactttatggatgaagcggaatattgcgaccgcatcggcctggtgtacc

SEQ ID NO: 533005 - DNA, 75 bp, synthetic construct
  source 1..75: mol_type = other DNA
gatgaaacaaaaacttggcctggcctgtaccctggtgggcgaaccgaaagtgttgctgctcgatgaacccggcgt

SEQ ID NO: 533006 - DNA, 75 bp, synthetic construct
  source 1..75: mol_type = other DNA
taccagacctacgtggcgcaggtagataaaactgccgttgatacttaccgttatctgaacttcaaccagctttct

SEQ ID NO: 533007 - DNA, 75 bp, synthetic construct
  source 1..75: mol_type = other DNA
cggacaggagtatattccgcagcttattgatgattattcggaaagcgttatgcacctgcaaatggaaaaatgcga

SEQ ID NO: 533008 - DNA, 75 bp, synthetic construct
  source 1..75: mol_type = other DNA
atggctggaacacagcataccccacgccttgcgcacacacaaaccgcctttgtgtggcgttttctggcactgagt

SEQ ID NO: 533009 - DNA, 75 bp, synthetic construct
  source 1..75: mol_type = other DNA
gatatttctgaactggagtactacagtggcggggcactcttgaaggctgcaagagattttgaagctcaacaaatg

SEQ ID NO: 533010 - DNA, 75 bp, synthetic construct
  source 1..75: mol_type = other DNA
ttgaagaatacttttggaaaatggctaaatattgactatacctccgagtccaatgaaaaacattatagtaggatt

SEQ ID NO: 533011 - DNA, 75 bp, synthetic construct
  source 1..75: mol_type = other DNA
ctgctgaagtggatgatcgcggaaggttatggcgatcgtcgtaccctggaacgtcgtattcagggcatggaaaaa

SEQ ID NO: 533012 - DNA, 75 bp, synthetic construct
  source 1..75: mol_type = other DNA
gtataaagaatttgcatatacactgatgtttgccaccattgcagctgtactttttgctggagcactgtgcagtgg

SEQ ID NO: 533013 - DNA, 75 bp, synthetic construct
  source 1..75: mol_type = other DNA
taaccgcctggacggaacgcgaagcgcgtagccgttgcccgtccggttgtgttgctgtattcgctgcaaaaatcg

SEQ ID NO: 533014 - DNA, 75 bp, synthetic construct
  source 1..75: mol_type = other DNA
ccggtaacagcaaggatcattgagccaacttaccgcaccgattatccgcaacatgttgatgaggttgtggtattc

SEQ ID NO: 533015 - DNA, 75 bp, synthetic construct
  source 1..75: mol_type = other DNA
cgattgggcaacagttgctgcaacacgaaaaagggcgtgagtgggttggcgtttatcgcatgtgctcctgggcag

SEQ ID NO: 533016 - DNA, 75 bp, synthetic construct
  source 1..75: mol_type = other DNA
tggcgctggagcgtgaatccgtctgggttgccaaaatagcgatgaaactggcccagcgacacattccaaaattac

SEQ ID NO: 533017 - DNA, 75 bp, synthetic construct
  source 1..75: mol_type = other DNA
ccgtggcgatcagcaggcgatcgagcatctggcgaagctgtatgaacaggcgggtctgctacatatggcgctgtg

SEQ ID NO: 533018 - DNA, 75 bp, synthetic construct
  source 1..75: mol_type = other DNA
gccgccaaagaagcagagttgcttgctcgtccggttgtagaagtacctgaaaatagcgatgaagaaacgcagcca

SEQ ID NO: 533019 - DNA, 75 bp, synthetic construct
  source 1..75: mol_type = other DNA
catggctgaaaatcattactgtgttacttccccgtcatccacaaagaaacaactggcaactggcgcgcatcatcc

SEQ ID NO: 533020 - DNA, 75 bp, synthetic construct
  source 1..75: mol_type = other DNA
gattggcgcaggcactgtgcgggcaccgctggcgtgctttgaacaggcgctggaagcactggctgaaagcatggg

SEQ ID NO: 533021 - DNA, 75 bp, synthetic construct
  source 1..75: mol_type = other DNA
tcgtcgcgtggtagaaaccggcattacgccactcatcaataccggtatcgcccataaagaggcggggatcgggca

SEQ ID NO: 533022 - DNA, 75 bp, synthetic construct
  source 1..75: mol_type = other DNA
tgcctggggctggatattcgtcgcgtggtagaaaccggcattacgccactcatcaataccggtatcgcccataaa

SEQ ID NO: 533023 - DNA, 75 bp, synthetic construct
  source 1..75: mol_type = other DNA
tcaggcaaacggcgcatatgagcgccaggaaggacgctatcccggtaaaaccggtatttcttcgtaacaaaggcg

SEQ ID NO: 533024 - DNA, 75 bp, synthetic construct
  source 1..75: mol_type = other DNA
ggaaactgccctgggacaaaccttttctgtcgtggccacgcccgtaaaaggtgaggggcgtgtctatcgactgat

SEQ ID NO: 533025 - DNA, 75 bp, synthetic construct
  source 1..75: mol_type = other DNA
gaccgatcagttcttcctcaatctcgcgatggcctactgcaaggcggcgatggatgcaggcgcgatgatccgcgc

SEQ ID NO: 533026 - DNA, 75 bp, synthetic construct
  source 1..75: mol_type = other DNA
tcaaaaaacccgcaagactggcacacagcccggctaatcatggagcgctgggggcatggtggtcttgtaacgctg

SEQ ID NO: 533027 - DNA, 75 bp, synthetic construct
  source 1..75: mol_type = other DNA
tttgctctggtgatctccagtttcaggctggtatgaccttggctcgtgttgttgggatttttgtttttccagtcg

SEQ ID NO: 533028 - DNA, 75 bp, synthetic construct
  source 1..75: mol_type = other DNA
cagttgcagctaccgccacggggcgcgcgcctgacggttctcattggctggaaaggagaaccgctgacagaaaaa

SEQ ID NO: 533029 - DNA, 75 bp, synthetic construct
  source 1..75: mol_type = other DNA
aaagccagagaccaggcatctgttgttggtgatattatttctgataaacaggccacaatcagcttcggaactgaa

SEQ ID NO: 533030 - DNA, 75 bp, synthetic construct
  source 1..75: mol_type = other DNA
ttgatattggtgacgctttccttctgcttaccggtacaccagtgaattcagatgatgctgcttttttaccgacca

SEQ ID NO: 533031 - DNA, 75 bp, synthetic construct
  source 1..75: mol_type = other DNA
ccgtgttcttcattgtcgaatcactttttcaaaaacgaagaacagtaaaaaccgcactgtcccgatctccgaaaa

SEQ ID NO: 533032 - DNA, 75 bp, synthetic construct
  source 1..75: mol_type = other DNA
tacaacggcacagacgctgatggttattgttccggagcacgatcatctcgacgccagaataaaaataagcaataa

SEQ ID NO: 533033 - DNA, 75 bp, synthetic construct
  source 1..75: mol_type = other DNA
gcgatcgccgggcggtgcggtgaaatataacaccgtcacgccgtcggtgaccgggcgctggttctccggcaatca

SEQ ID NO: 533034 - DNA, 75 bp, synthetic construct
  source 1..75: mol_type = other DNA
gaaaccaacaccatcgcataccaccagaacgggcgtcctctgaacatccgtccggtgaaatgggcgaaaggtcgt

SEQ ID NO: 533035 - DNA, 75 bp, synthetic construct
  source 1..75: mol_type = other DNA
tagacgctgctggcgtattcctggtcggcgaacttgagcgccttgaccagacgcttaacctgccgctggttagct

SEQ ID NO: 533036 - DNA, 75 bp, synthetic construct
  source 1..75: mol_type = other DNA
taccgatggtgtagatgccagcgcgcagggtaaagatagcgtcgcgattggttccggctccattgctgccgctga

SEQ ID NO: 533037 - DNA, 75 bp, synthetic construct
  source 1..75: mol_type = other DNA
tgaacaatcaggtcactaatctggatactcgcgttactaatatcgaaaacggtattggcgatatcgtcaccaccg

SEQ ID NO: 533038 - DNA, 75 bp, synthetic construct
  source 1..75: mol_type = other DNA
atctgctgacctccggcgaatcggaatatcaggtgcataaatccctgccggtgcagactgaaatcaacggcaatc

SEQ ID NO: 533039 - DNA, 75 bp, synthetic construct
  source 1..75: mol_type = other DNA
ttattttggcgaaaataaacgatattcttgtcgattttaatgagttaaacaatcaaataaataactttcctgaaa

SEQ ID NO: 533040 - DNA, 75 bp, synthetic construct
  source 1..75: mol_type = other DNA
taaacatcagttactagaccaggaaaatcagtatgtggaaataataaatgaacttgaggtgttaaagagtcaaat

SEQ ID NO: 533041 - DNA, 75 bp, synthetic construct
  source 1..75: mol_type = other DNA
attcgccagaagacggctgaacaggctgctataaaatcccggatagctaaactggagcaacagaaacgtataatc

SEQ ID NO: 533042 - DNA, 75 bp, synthetic construct
  source 1..75: mol_type = other DNA
taagtatgttgtgcgaagaactcccaaaagtaatgaatgctattcaagagcgttttgaaatatttgttgccatta

SEQ ID NO: 533043 - DNA, 75 bp, synthetic construct
  source 1..75: mol_type = other DNA
atggcaaatacaatatctgtcgcagtaaatatgttttgtgaagaaactccaaaagtaatgaatgctattcaagag

SEQ ID NO: 533044 - DNA, 75 bp, synthetic construct
  source 1..75: mol_type = other DNA
taatgaatactattcaagaacgttttgcaatatttgttgccattacgggatattcagtagaagaaatcatggatg

SEQ ID NO: 533045 - DNA, 75 bp, synthetic construct
  source 1..75: mol_type = other DNA
gaccgacaaccggggatttgaggcggaccagctcaccatcacgctggatgatgcagatggtcagttgcagctacc

SEQ ID NO: 533046 - DNA, 75 bp, synthetic construct
  source 1..75: mol_type = other DNA
ttccttgattcctggcaaaaagtcggcccggaggaagcacataagcgtgcaaaacgttatctgacggcaatgcca

SEQ ID NO: 533047 - DNA, 75 bp, synthetic construct
  source 1..75: mol_type = other DNA
agaccgttaatcgaggtgcggtcatgccaggaatgctggtcaaacgcaaagatggtacctggactgcatcagcta

SEQ ID NO: 533048 - DNA, 75 bp, synthetic construct
  source 1..75: mol_type = other DNA
atgtctgaaaaattgaaggtggttacgttactggggagcctgcgcaaaggctcatttaatggcatggttgcacgt

SEQ ID NO: 533049 - DNA, 75 bp, synthetic construct
  source 1..75: mol_type = other DNA
ggacgtttagaaattatggcgcactataccgctgtcgcaggtgctgttccggttaccgtaggtgacgttattact

SEQ ID NO: 533050 - DNA, 75 bp, synthetic construct
  source 1..75: mol_type = other DNA
aaagcagataccgccgggcctgtgacagtgggagaaatgctgacagaggaatttttaaaaccgctgaacatgtct

SEQ ID NO: 533051 - DNA, 75 bp, synthetic construct
  source 1..75: mol_type = other DNA
gcccggaagaagcaacaaaacgggcaaaacgttatctgacggcgatgcccgcctgggcccataaagcagatgaat

SEQ ID NO: 533052 - DNA, 75 bp, synthetic construct
  source 1..75: mol_type = other DNA
acggtaatcccgtgatacacggtgtgaccgccgtctggcgtgccgggggagcaggagcagacaccgccggaaggc

SEQ ID NO: 533053 - DNA, 75 bp, synthetic construct
  source 1..75: mol_type = other DNA
tggcggtgtgtcgctgcgcccaggtgatggcgtaatccactcctggttgaaccgtatgctgctgccggataccgt

SEQ ID NO: 533054 - DNA, 75 bp, synthetic construct
  source 1..75: mol_type = other DNA
ttgaccgcctgcgggtcaccttcgggtgcagtcactgttggagaccacctcaaagggcgaccgtaatccctcttc

SEQ ID NO: 533055 - DNA, 75 bp, synthetic construct
  source 1..75: mol_type = other DNA
atggttcatcaacattacggaacacagaccgttaatcgcggtgcggtcatgccaggaatgctggtcaaacacaaa

SEQ ID NO: 533056 - DNA, 75 bp, synthetic construct
  source 1..75: mol_type = other DNA
atggttcatcaacattacggaacgcagaccgttaatcgcggtgcggtcatgccaggaatgctggtcaaacgcaaa

SEQ ID NO: 533057 - DNA, 75 bp, synthetic construct
  source 1..75: mol_type = other DNA
ccgggcgatacgtacagcgatttttcgtgggggtcccgcctgtggctacttgagcgtgaaaagctgacggaagat

SEQ ID NO: 533058 - DNA, 75 bp, synthetic construct
  source 1..75: mol_type = other DNA
ggggacggcgatcatggcgaaagtccgcccttatattggcaccaccaccacctggttcgttgggcaggcggcgca

SEQ ID NO: 533059 - DNA, 75 bp, synthetic construct
  source 1..75: mol_type = other DNA
tctgaacggcacgcgcctgaccgtagaacttccgtaccagactgtacacgaaatcattagcgaagctgaaaaagc

SEQ ID NO: 533060 - DNA, 75 bp, synthetic construct
  source 1..75: mol_type = other DNA
gagcttccgtaccagaccgttcgcgaagccattaacgaagctgaaaaagcgcgccaggctaatggcgatgaaccc

SEQ ID NO: 533061 - DNA, 75 bp, synthetic construct
  source 1..75: mol_type = other DNA
tgttccttgcccacgtcgggctgatgcagtcagaactgcatctggtggtggtgatgttactgagtttgacggtga

SEQ ID NO: 533062 - DNA, 75 bp, synthetic construct
  source 1..75: mol_type = other DNA
attggtggcgacgactcctggagcccgtcagtatcggcggaattccagctgagcgccggtcgctaccattaccag

SEQ ID NO: 533063 - DNA, 75 bp, synthetic construct
  source 1..75: mol_type = other DNA
actaccgcagccggagagcgccgggcaactctggctcacagtacgcgtagtgcaaccgaacgcgaccgcatggtc

SEQ ID NO: 533064 - DNA, 75 bp, synthetic construct
  source 1..75: mol_type = other DNA
cgactcctggagcccgtcagtatcggcggaattccagctgagcgccggtcgctaccattaccagttggtctggtg

SEQ ID NO: 533065 - DNA, 75 bp, synthetic construct
  source 1..75: mol_type = other DNA
cactgtgtcacactttctcgccaggggcgggaaaatactttggttcattcacaaatggaatgattaccggcacgg

SEQ ID NO: 533066 - DNA, 75 bp, synthetic construct
  source 1..75: mol_type = other DNA
ctccggcagcaacttcgctggtagcgacgggtcattgtgacttcgattctggtgccaattcttacctctatctgg

SEQ ID NO: 533067 - DNA, 75 bp, synthetic construct
  source 1..75: mol_type = other DNA
tatcgccgataaattgattggcggtggcgatggcactgcggaattgccgcttccagttccgcaggggccgcggta

SEQ ID NO: 533068 - DNA, 75 bp, synthetic construct
  source 1..75: mol_type = other DNA
cataggggcaagtcgcgcgatggtgagcttgttaagccgcccgttaaaactcattcgctcgccgtatattattct

SEQ ID NO: 533069 - DNA, 75 bp, synthetic construct
  source 1..75: mol_type = other DNA
aatccgggccgcttatgacgatgattattctggggactgccgggattgcatcgtttgaaccgcatgttttcgtcg

SEQ ID NO: 533070 - DNA, 75 bp, synthetic construct
  source 1..75: mol_type = other DNA
tgccggactttcaacgctggcgctggtggcggcgatggatatgaccaacggcggactttacgcttcgatcatgca

SEQ ID NO: 533071 - DNA, 75 bp, synthetic construct
  source 1..75: mol_type = other DNA
gccaaccctgctgggggataaacgtattgagggctctgtatggcccaaatccattcgcggctcgactcctaaaat

SEQ ID NO: 533072 - DNA, 75 bp, synthetic construct
  source 1..75: mol_type = other DNA
attgagggctcggtatggccaaaatccattcgcggctcgacgcctaaaataaaaggcacctgccagatcgaaaaa

SEQ ID NO: 533073 - DNA, 75 bp, synthetic construct
  source 1..75: mol_type = other DNA
atgctctacccgatagtactgctggttgtcgctattagtgtggtttctattttgctgacggcagtggttcccaaa

SEQ ID NO: 533074 - DNA, 75 bp, synthetic construct
  source 1..75: mol_type = other DNA
taaatgggagaagaataagcctgaaagcgttttttacctctgtgaacatcatggctgtgtgatccatcagtcgga

SEQ ID NO: 533075 - DNA, 75 bp, synthetic construct
  source 1..75: mol_type = other DNA
tgctatgacgaactctcctcgtttgaaccggatgtggaaaaagaaggttcgccgacgctgcttggtgataaacgt

SEQ ID NO: 533076 - DNA, 75 bp, synthetic construct
  source 1..75: mol_type = other DNA
aacgaggcctccctttctggcaagcggaaaacggggtctggctgacatcaacggttgcggttgagtttcttgagt

SEQ ID NO: 533077 - DNA, 75 bp, synthetic construct
  source 1..75: mol_type = other DNA
tctattgcaggccatgctctatccgctggttctgctggtggtggcaacgggcgtggtcactattttgctgacggc

SEQ ID NO: 533078 - DNA, 75 bp, synthetic construct
  source 1..75: mol_type = other DNA
accaggaacgagaatttgatacccaggtggggctggcgttagggctgtttgagccggcgctggtggtgatgatgg

SEQ ID NO: 533079 - DNA, 75 bp, synthetic construct
  source 1..75: mol_type = other DNA
agcttcctcgcgggctgggcgttaatgttagttggtgctatccgtttaaagcgcaagggcgtaagtcatgaataa

SEQ ID NO: 533080 - DNA, 75 bp, synthetic construct
  source 1..75: mol_type = other DNA
tcatgtggagtcgacattacgggatgttccctgtctgaaaatcctttccccctggctgggacgtaagcacaggga

SEQ ID NO: 533081 - DNA, 75 bp, synthetic construct
  source 1..75: mol_type = other DNA
tgtgaccacgaccacgccgtttggtgttgagttgcaacaggcggcagacaaagtgacggccaccatcaccgataa

SEQ ID NO: 533082 - DNA, 75 bp, synthetic construct
  source 1..75: mol_type = other DNA
gtacgaaatccgttacgaacttaatggccagactatttatgtattgcgcctgtggcacactcgatcgataggaat

SEQ ID NO: 533083 - DNA, 75 bp, synthetic construct
  source 1..75: mol_type = other DNA
gctggtgatgggcgcggaaggtgaaggtatgcgtcgcctgactcgtgaacattgcgatgagttgatcagcatccc

SEQ ID NO: 533084 - DNA, 75 bp, synthetic construct
  source 1..75: mol_type = other DNA
ttgctgctgatggaacattgcagcgccgggccttgcgcgagcggatcttcgccaacccggaagagaaaaactggc

SEQ ID NO: 533085 - DNA, 75 bp, synthetic construct
  source 1..75: mol_type = other DNA
ggcaacaacgggaatacgctggatcttggtacttacggcaccaccacgctcgacgaagtacggcagataatctaa

SEQ ID NO: 533086 - DNA, 75 bp, synthetic construct
  source 1..75: mol_type = other DNA
aagtgaccgccaccatcaccgataaaaacggcgcggttgtccgtactatcgatatcggtgaactgaccgccggag

SEQ ID NO: 533087 - DNA, 75 bp, synthetic construct
  source 1..75: mol_type = other DNA
tttcccgtgtctgctgggacaccggggggatcgatggcgaaattgtctatcagaggtcaaaaaaacacggtgttt

SEQ ID NO: 533088 - DNA, 75 bp, synthetic construct
  source 1..75: mol_type = other DNA
aagcggttaacccgtgcattgctggataccgtggtcgccaccagtgataaaaagcgttttagttattccagtgat

SEQ ID NO: 533089 - DNA, 75 bp, synthetic construct
  source 1..75: mol_type = other DNA
aatggcaggaagcgtttcttccctgaacgtttcggttgcgaccggaatttgcttatttgaagcggtgcgccagcg

SEQ ID NO: 533090 - DNA, 75 bp, synthetic construct
  source 1..75: mol_type = other DNA
ggcgaggcggatcatacactctatcagagcaaaatgaccggacgcctggcgctggtgatgggcgcggaaggtgaa

SEQ ID NO: 533091 - DNA, 75 bp, synthetic construct
  source 1..75: mol_type = other DNA
ctgattcgggtgactaacctggcgcgcaccatgcgtatgttgcaggaagagaatatctggatcgtcggtacggca

SEQ ID NO: 533092 - DNA, 75 bp, synthetic construct
  source 1..75: mol_type = other DNA
cgcgattacgttgccatcttactggagatgtatctcctgtgccccacgcttcgtaatcctgccactaacgaataa

SEQ ID NO: 533093 - DNA, 75 bp, synthetic construct
  source 1..75: mol_type = other DNA
tgaatctgactccaggatttttcctggacattttcgtcgttgctattctggttcactgcgtcgtgatattcttgc

SEQ ID NO: 533094 - DNA, 75 bp, synthetic construct
  source 1..75: mol_type = other DNA
cgaatttgtcggagaaatgtctgttgttcaacaggcgcagcgtaatctttgccttgaaagttatgaccgtataga

SEQ ID NO: 533095 - DNA, 75 bp, synthetic construct
  source 1..75: mol_type = other DNA
atgccaaatccagacaaccgtttgatttattgtcagaaatagggcgagacagcgttggtgccgtgacgttaatac

SEQ ID NO: 533096 - DNA, 75 bp, synthetic construct
  source 1..75: mol_type = other DNA
cttttgatcttaaaaaaagaagcccgcgattacgttgccatcttactggagatgtatctcctgtgccccacgctt

SEQ ID NO: 533097 - DNA, 75 bp, synthetic construct
  source 1..75: mol_type = other DNA
cttttgacctcaaaaaagaagcccgcgattacgttgccatattgttggaaatgtatcttctttgccctacgcttc

SEQ ID NO: 533098 - DNA, 75 bp, synthetic construct
  source 1..75: mol_type = other DNA
caaaaagcggcgtaacgaagcgctggactgcctggtgtatgcctacgcggcattacgtgtgtccgtgcaacgctg

SEQ ID NO: 533099 - DNA, 75 bp, synthetic construct
  source 1..75: mol_type = other DNA
cctgaaagacctttccccatggctgggtcgtaaacatcgtgacaatactctcacgctgaaacgcttttcatcggg

SEQ ID NO: 533100 - DNA, 75 bp, synthetic construct
  source 1..75: mol_type = other DNA
atggaaattggcgaactattcctcgtctatcaaccgatcgttgatattaacacccgcgccattctgggcgcggag

SEQ ID NO: 533101 - DNA, 75 bp, synthetic construct
  source 1..75: mol_type = other DNA
cattaccgacagattttccggagaacgtggtgacggcagttgaaaccaatgtgttgaggttgcaccgtcggttaa

SEQ ID NO: 533102 - DNA, 75 bp, synthetic construct
  source 1..75: mol_type = other DNA
gcatgaaatcctgagtgactttgccagaatgattccggcagcactggataacgtgaagacttcattaccgacaga

SEQ ID NO: 533103 - DNA, 75 bp, synthetic construct
  source 1..75: mol_type = other DNA
ccggcgatattttcggtactgcgggaaaaattgtgcgcattattttcgatctggcacgctataaccggatcccgg

SEQ ID NO: 533104 - DNA, 75 bp, synthetic construct
  source 1..75: mol_type = other DNA
tggccagatgccattgcctgtactcagtctgcacagactgagctctccggggcgtcgggtgattctggtgcctga

SEQ ID NO: 533105 - DNA, 75 bp, synthetic construct
  source 1..75: mol_type = other DNA
catggctgggacgtaaacatcgtgacaatactctcacgctgaaacgcttttcatctggcgtcggtttctggtgcc

SEQ ID NO: 533106 - DNA, 75 bp, synthetic construct
  source 1..75: mol_type = other DNA
acgcggtgattaccgcagaagcccacacagaactgggacagctttgcgaaacctttccgggcattgcggtttgcg

SEQ ID NO: 533107 - DNA, 75 bp, synthetic construct
  source 1..75: mol_type = other DNA
gagaactattccgcctggcgctacaaacgagaagagggggccgccacggtgtggcgctgcccgctgtacgtgcca

SEQ ID NO: 533108 - DNA, 75 bp, synthetic construct
  source 1..75: mol_type = other DNA
gtcccctgccttaaagcgttatcgccatggctgggaagaaagcaccgcgataatacactcaccctgaagcgtttt

SEQ ID NO: 533109 - DNA, 75 bp, synthetic construct
  source 1..75: mol_type = other DNA
atctggacggcatacagcccgttcaccacctgggtacagattgtttatgactggcttgatgcactgaaggatccg

SEQ ID NO: 533110 - DNA, 75 bp, synthetic construct
  source 1..75: mol_type = other DNA
cgttcacatgaaggaaaaagcctttcgctttatcgctccggaataggtaaatgcctgcttgcctggcaacctgca

SEQ ID NO: 533111 - DNA, 75 bp, synthetic construct
  source 1..75: mol_type = other DNA
gactatttcccgtgtctgctgggacaccggggggatcgatggtgaaattgtttatcagagatcaaaaaacacggt

SEQ ID NO: 533112 - DNA, 75 bp, synthetic construct
  source 1..75: mol_type = other DNA
catgcagacggaaccgaaatgaccatttcccgtgtctgctgggacatcggggggatcgatggcgaaatcgtttat

SEQ ID NO: 533113 - DNA, 75 bp, synthetic construct
  source 1..75: mol_type = other DNA
aaactaccgtgaaaaatccgtggacgtggtctgctatgacgaactttcctcgttcgagccggatgtcgaaaaaga

SEQ ID NO: 533114 - DNA, 75 bp, synthetic construct
  source 1..75: mol_type = other DNA
tgttgcatctcggcagttttgccgccagcagttttttcccgttgatggcgcaacgtcgctggaagccggatcgca

SEQ ID NO: 533115 - DNA, 75 bp, synthetic construct
  source 1..75: mol_type = other DNA
ctggatttgtgacaatacaggaatgtggacacgtgacggcctggcattttacagcgcgggtgatgaggagatgcc

SEQ ID NO: 533116 - DNA, 75 bp, synthetic construct
  source 1..75: mol_type = other DNA
ccgtgaaaaatctgtggatgtggtctgttatgacgaactctcctcgtttgaaccggatgtggaaaaagaaggttc

SEQ ID NO: 533117 - DNA, 75 bp, synthetic construct
  source 1..75: mol_type = other DNA
ttatgcttatttgtagcggggtgcttatcattacgtttgtatggaatggttatattagcaagaggctaaataatg

SEQ ID NO: 533118 - DNA, 75 bp, synthetic construct
  source 1..75: mol_type = other DNA
agagaggaagaacctttctagcgctcaaaatgagatatatgactggaatgaagttataaaagatatattcaataa

SEQ ID NO: 533119 - DNA, 75 bp, synthetic construct
  source 1..75: mol_type = other DNA
cccgtatgttggctttgaaatgggttatgactggttaggtcgtatgccatacaaaggcagcgttgaaaacggtgc

SEQ ID NO: 533120 - DNA, 75 bp, synthetic construct
  source 1..75: mol_type = other DNA
ctgacagcgttaacgtacaggcactgaacatggggcgaatcgtcgttgacgtcgatggtattgagctcgctgaac

SEQ ID NO: 533121 - DNA, 75 bp, synthetic construct
  source 1..75: mol_type = other DNA
ccgcgtctggctggtcggtgaacttttactcttttcaggcggcagccagcgatcgtgggcgggtggtcgacgata

SEQ ID NO: 533122 - DNA, 75 bp, synthetic construct
  source 1..75: mol_type = other DNA
tcttatttgggttggtgttgggttgtattccatctggttagggtttagtaaattatttaaagataactcaatctc

SEQ ID NO: 533123 - DNA, 75 bp, synthetic construct
  source 1..75: mol_type = other DNA
cgtagcgcaggccactccgaaagataacacctggtacactggtgctaaactgggctggtcccagtaccatgacac

SEQ ID NO: 533124 - DNA, 75 bp, synthetic construct
  source 1..75: mol_type = other DNA
aaactgtccgctttgactcagaaaatgattttctggtgtgggtaaaacaggtcacgccaggagaatattttgttg

SEQ ID NO: 533125 - DNA, 75 bp, synthetic construct
  source 1..75: mol_type = other DNA
ggccaaaaacgtggctggagatgctgcagaagtctcatccataaccaagcctggtgcagaaattcatgagtatca

SEQ ID NO: 533126 - DNA, 75 bp, synthetic construct
  source 1..75: mol_type = other DNA
cggcgtttctccggtcttcgctggcggtgttgagtatgcgatcactcctgaaatcgctacccgtctggaatacca

SEQ ID NO: 533127 - DNA, 75 bp, synthetic construct
  source 1..75: mol_type = other DNA
tctgggtggtatggtttggcgtgcagacaccaaagctcacaacaatgtgacaggtgaatctgagaaaaaccacga

SEQ ID NO: 533128 - DNA, 75 bp, synthetic construct
  source 1..75: mol_type = other DNA
acagcgtgctgcactgatcgactgcttggctccggatcgtcgcgtagagatcgaagttaaaggtatcaaagacgt

SEQ ID NO: 533129 - DNA, 75 bp, synthetic construct
  source 1..75: mol_type = other DNA
ccgacagcattaacgtacaggctctgaacatggggcgaatcgtcgttgacgtcgatggtattgagctcgctgaac

SEQ ID NO: 533130 - DNA, 75 bp, synthetic construct
  source 1..75: mol_type = other DNA
ggtcagatctcgggatacctcaatgacggtgttgtgctgggcggattaattcttgcggcagttgccatgctggcc

SEQ ID NO: 533131 - DNA, 75 bp, synthetic construct
  source 1..75: mol_type = other DNA
ccggaatgagaaggccacctggacgaagtttggctccatcatcgtggtgggtgtggtgttactggttgccgttat

SEQ ID NO: 533132 - DNA, 75 bp, synthetic construct
  source 1..75: mol_type = other DNA
caagacgggctgggggcagttcggggccattattgtggtgggggtggtactgctggtcgcggtcatctggctgct

SEQ ID NO: 533133 - DNA, 75 bp, synthetic construct
  source 1..75: mol_type = other DNA
cgtttgccgaaggttttaacctcggacgcgaagcccatttcaataacgccaaaattgtcttctcccgcgcgtgca

SEQ ID NO: 533134 - DNA, 75 bp, synthetic construct
  source 1..75: mol_type = other DNA
atgccgcaaggcagctcctggaaaaacgccgtctgttacgacccggcgcagtttgccatgagcggcgtgcgcgat

SEQ ID NO: 533135 - DNA, 75 bp, synthetic construct
  source 1..75: mol_type = other DNA
gtgttctcactgtgtctgttgctctggatgagtatgcaaccggcgctggctgatctgcccaccatggaacctccg

SEQ ID NO: 533136 - DNA, 75 bp, synthetic construct
  source 1..75: mol_type = other DNA
gaatatggggcgaattgtcgttgacattgatggtgttaatctcgctgaactgattaataaggccgctgaaaacgg

SEQ ID NO: 533137 - DNA, 75 bp, synthetic construct
  source 1..75: mol_type = other DNA
cgggagctgcatggcgagtcctgtttccggttgcatgaatcccctcctgtcagacaacaaattatcgtctcgcgg

SEQ ID NO: 533138 - DNA, 75 bp, synthetic construct
  source 1..75: mol_type = other DNA
ggggcattggccgcaaaatcagtgagcggctggctgcgtacgggatcatcacggcctgcgacttttatgacagcg

SEQ ID NO: 533139 - DNA, 75 bp, synthetic construct
  source 1..75: mol_type = other DNA
tagccaccgcagccgaattggttcgggaaggggtcagcctgcatcaggcgctggagcagacctcgctatttccgt

SEQ ID NO: 533140 - DNA, 75 bp, synthetic construct
  source 1..75: mol_type = other DNA
actgccggtgatttttataatagcgacgttcgctttttacgtaaaagctttggcgttgaaatcgagcgtacctgg

SEQ ID NO: 533141 - DNA, 75 bp, synthetic construct
  source 1..75: mol_type = other DNA
cggttcaataaagaaaagcgcggagctctgtttttactgggggaaggcattcaacaggattttcgtatgaagcag

SEQ ID NO: 533142 - DNA, 75 bp, synthetic construct
  source 1..75: mol_type = other DNA
gcacgcggcctggcaatggggacggcctcgcacgcccttggtacagcgcgctgtgcagaactggattaccaggag

SEQ ID NO: 533143 - DNA, 75 bp, synthetic construct
  source 1..75: mol_type = other DNA
catgctgacggtactgaaatttccatttcccgtgtctgctgggataccggtggtatcgaccaggacattgtgtat

SEQ ID NO: 533144 - DNA, 75 bp, synthetic construct
  source 1..75: mol_type = other DNA
aaatcagcgcgcgtgggttataccaaaatgctgttgggcgtgatcgggtattttattgagcataaatcccgtaac

SEQ ID NO: 533145 - DNA, 75 bp, synthetic construct
  source 1..75: mol_type = other DNA
cggaacttgaccagaccgacgggcggtggatttgtgacaataccgggatgtggacgcgtgacggtctgacatttt

SEQ ID NO: 533146 - DNA, 75 bp, synthetic construct
  source 1..75: mol_type = other DNA
aaacagatcgaagaaggggttgaatcgcaggctattctggtggccggaaggcgaagcggcatgcatttacgttga

SEQ ID NO: 533147 - DNA, 75 bp, synthetic construct
  source 1..75: mol_type = other DNA
cggcggtgccagcgtcgggctgctggcggaactcagcggcctgcatcgcaccactgtgcggcgactgctggagac

SEQ ID NO: 533148 - DNA, 75 bp, synthetic construct
  source 1..75: mol_type = other DNA
tgtgggttgtgccattgctggtagaaaactcactgtataaaaaagcgaatcgtgtgctggtggtggatgtcagcc

SEQ ID NO: 533149 - DNA, 75 bp, synthetic construct
  source 1..75: mol_type = other DNA
gtgaaaaagcaatggattgttggcacggcgctgcttatgttgatgactggtaatgtctgggcagatggcgaaccg

SEQ ID NO: 533150 - DNA, 75 bp, synthetic construct
  source 1..75: mol_type = other DNA
agaaagcagcggatgcatattggggaaaagatgcaaacggtaagcaaatggatttgcccctatatttccagacac

SEQ ID NO: 533151 - DNA, 75 bp, synthetic construct
  source 1..75: mol_type = other DNA
aaatctgcccgtgttggttatacaaaaatgctgttgggagtggaggcttattttattgagcataaatcccgcaac

SEQ ID NO: 533152 - DNA, 75 bp, synthetic construct
  source 1..75: mol_type = other DNA
tgctcttggggttcctcgccctcacctgctcgatcgcatttcaggcgagtgcaactgaaaaattcaaggtcatta

SEQ ID NO: 533153 - DNA, 75 bp, synthetic construct
  source 1..75: mol_type = other DNA
gatgaaatatttggtttgaatgaaagagggcaaataacgtccacccaaattactgaacatttaagcatcgatgag

SEQ ID NO: 533154 - DNA, 75 bp, synthetic construct
  source 1..75: mol_type = other DNA
tactggcaaaatcccgggaagaagagacgacccggccaaccctgaaagaactggcagcgaagctgtccggaggag

SEQ ID NO: 533155 - DNA, 75 bp, synthetic construct
  source 1..75: mol_type = other DNA
ggcgcatttagttcgctggcactggtgctgtgcgggattattacctcgctgatcgcaccgttccttttcccgatt

SEQ ID NO: 533156 - DNA, 75 bp, synthetic construct
  source 1..75: mol_type = other DNA
gcaacaactgaataatatgatggctgccgtttcggttgcgctgcagcctctggtcagggttgtaccgatgacggc

SEQ ID NO: 533157 - DNA, 75 bp, synthetic construct
  source 1..75: mol_type = other DNA
gttccagcgcttttaccagcatctcaatggtgttccagaagtgattgtctcttcgggtgtgacgccagtagggat

SEQ ID NO: 533158 - DNA, 75 bp, synthetic construct
  source 1..75: mol_type = other DNA
ctgatcaaaattattatctgccgaaagaatcttcatatggtgagggcgaatggaaaacgctgccattccagatcg

SEQ ID NO: 533159 - DNA, 75 bp, synthetic construct
  source 1..75: mol_type = other DNA
tgcgtttttatgtgccctgcccacactgtggggaggagcagtatctgaaatttggcgatgaatccacgccttttg

SEQ ID NO: 533160 - DNA, 75 bp, synthetic construct
  source 1..75: mol_type = other DNA
agaggaagcctttctggtggataaaatcatcattatggggcgtcctgatgaggaagagacgctgttacgtgtgga

SEQ ID NO: 533161 - DNA, 75 bp, synthetic construct
  source 1..75: mol_type = other DNA
agagtcgtcttataccccggggcggtgggaaacactgccgtttcaggttggcatcatgaactgtatgggcaacga

SEQ ID NO: 533162 - DNA, 75 bp, synthetic construct
  source 1..75: mol_type = other DNA
tcagatccgcactgttaatctgattaaatctgcccgtgttggctatacaaagatgttgctggggggggggcgggt

SEQ ID NO: 533163 - DNA, 75 bp, synthetic construct
  source 1..75: mol_type = other DNA
ttgatcattggtttgcctttactggcgcaatggctttttggcgcagcactacactgggatgtcccagccctacga

SEQ ID NO: 533164 - DNA, 75 bp, synthetic construct
  source 1..75: mol_type = other DNA
ctgaaaggttcgctgggtgagttgaagcaactttctggcttaagtggcgtggtaatgggctatacgccgaattaa

SEQ ID NO: 533165 - DNA, 75 bp, synthetic construct
  source 1..75: mol_type = other DNA
ctgaaaaatgccgataaagtgaatgagattgtcggtaagctgcgcggtgccggttatcgggtttatacgtcgcca

SEQ ID NO: 533166 - DNA, 75 bp, synthetic construct
  source 1..75: mol_type = other DNA
gcatcagcggcggcagtgttgaggaagatatgctcatcgcccgccaggcgatggcgcagtttagcgttctgcgtt

SEQ ID NO: 533167 - DNA, 75 bp, synthetic construct
  source 1..75: mol_type = other DNA
gccattagcaattttagaggcgttgatctgtggtctaccatgtatagtcaccaatattccaggtaataatagctt

SEQ ID NO: 533168 - DNA, 75 bp, synthetic construct
  source 1..75: mol_type = other DNA
gtggagacggtcgaaggggtggcgcaaaggttgaacgccaaaataatggggtctgtgcagccgatggccgagaaa

SEQ ID NO: 533169 - DNA, 75 bp, synthetic construct
  source 1..75: mol_type = other DNA
aaaaagctgcaccgacgggtaaagcgtatgttgtgcaactgggtgcgctgaaaaatgccgacaaagtgaatgaga

SEQ ID NO: 533170 - DNA, 75 bp, synthetic construct
  source 1..75: mol_type = other DNA
gctgtcacccctgcaggacaggttcagggaggtaaacgactggctcggcatggaggtcatcaagtttaaagagta

SEQ ID NO: 533171 - DNA, 75 bp, synthetic construct
  source 1..75: mol_type = other DNA
gtcgaatcgctacgcgaggcgatgcgcaactcgaaagggctaggcaactttaagaacctgtttttctacgctccg

SEQ ID NO: 533172 - DNA, 75 bp, synthetic construct
  source 1..75: mol_type = other DNA
ttttatttttatttttatttttatttttatttcttatgcacaagaataaattatatgcatatgataatttctcat

SEQ ID NO: 533173 - DNA, 75 bp, synthetic construct
  source 1..75: mol_type = other DNA
acttgcactggacaaattaacacaagcaataaatctacttttgaagccaccatcttcatttataactcgtacaga

SEQ ID NO: 533174 - DNA, 75 bp, synthetic construct
  source 1..75: mol_type = other DNA
aagtacaaatacaccgttactgaaccgtttaccggggcagtgcgcacctacctgcaggaagagattctgcacctg

SEQ ID NO: 533175 - DNA, 75 bp, synthetic construct
  source 1..75: mol_type = other DNA
tcatcatgtacatgaccgatgccgcgcagaaccaggaagatgtgaacaacctccgcaatgcgatgaaaagcgcca

SEQ ID NO: 533176 - DNA, 75 bp, synthetic construct
  source 1..75: mol_type = other DNA
ccaaaaattacagaaatactggatgaagttgagagatggacagccttctcgcgacattttaccccatctgaagaa

SEQ ID NO: 533177 - DNA, 75 bp, synthetic construct
  source 1..75: mol_type = other DNA
agatcgtaccattcaccagaaccggttgctgaaactggcgcgggaaggccgaaagatgagtagccgggatttgac

SEQ ID NO: 533178 - DNA, 75 bp, synthetic construct
  source 1..75: mol_type = other DNA
tcagataatcagtcttccaggctgacatggcttctgcaaccgccgggtaaaatcaatggtaagaacgtgctgcaa

SEQ ID NO: 533179 - DNA, 75 bp, synthetic construct
  source 1..75: mol_type = other DNA
tgtcggaaagagaatcattactggcattaccggacgatgagttaacgctgacacgaatggcgtattttagtgagc

SEQ ID NO: 533180 - DNA, 75 bp, synthetic construct
  source 1..75: mol_type = other DNA
ttgaaacccactggaatggggtgctgcgtctggcgagttctataaaacaggggacagtaaccgcattactgatga

SEQ ID NO: 533181 - DNA, 75 bp, synthetic construct
  source 1..75: mol_type = other DNA
gcgatcctggtgtgcgtgctggaagaagccagagccacactgacagacgaagtaattgagctgcatgagcgaatg

SEQ ID NO: 533182 - DNA, 75 bp, synthetic construct
  source 1..75: mol_type = other DNA
aatttgtcgccagtctggaggaaacacgccatcttgccagaaaaaataattttgacccgttacatattattaccg

SEQ ID NO: 533183 - DNA, 75 bp, synthetic construct
  source 1..75: mol_type = other DNA
agtcggaaagagaatctctactggcattgccggatgatgaattgaccctgacccgaatggcatatttcagcgaac

SEQ ID NO: 533184 - DNA, 75 bp, synthetic construct
  source 1..75: mol_type = other DNA
tatctggagaaacaataaaaaactggcagaagggaagtatcgacctttgcggccggttgatatcagccagtacaa

SEQ ID NO: 533185 - DNA, 75 bp, synthetic construct
  source 1..75: mol_type = other DNA
aagtgaccttgatataacggaacattacaccgatacagcaggtttcacggagcatgtttttgcactaatgcatct

SEQ ID NO: 533186 - DNA, 75 bp, synthetic construct
  source 1..75: mol_type = other DNA
tttttcacatataaaaaatgatataactcgtcccgatacacgcctgcttcttaccacaattcttgctgatggcat

SEQ ID NO: 533187 - DNA, 75 bp, synthetic construct
  source 1..75: mol_type = other DNA
ttatatcaacggcagggagactactcgacgcgagcatttaaccgagttgtaccgttatcttggtgtaaaagcatt

SEQ ID NO: 533188 - DNA, 75 bp, synthetic construct
  source 1..75: mol_type = other DNA
aacttgccgatgggctatggtcctcttatatcaacggcagggagactactcgacgcgagcatttaaccgagttgt

SEQ ID NO: 533189 - DNA, 75 bp, synthetic construct
  source 1..75: mol_type = other DNA
caggcgttgcagcggcaagctcgcaggagcgcgtggcggcaaagcaggtgttgtcggaaatgacggtggcggata

SEQ ID NO: 533190 - DNA, 75 bp, synthetic construct
  source 1..75: mol_type = other DNA
gggaatatatcagacagcagacccgtttatcggtgagccatgatgataattatacgttacggcaggagaaaacat

SEQ ID NO: 533191 - DNA, 75 bp, synthetic construct
  source 1..75: mol_type = other DNA
tgaaactgccgctgcagatatggagtacattgcacagcaggcacactatgcgaaagataatactgatcctgtttt

SEQ ID NO: 533192 - DNA, 75 bp, synthetic construct
  source 1..75: mol_type = other DNA
cggacttcattgccgctgatgttcgcccggaaaaaatcgctgaaacagaaagtctgcagcagtatgcctgtcgtc

SEQ ID NO: 533193 - DNA, 75 bp, synthetic construct
  source 1..75: mol_type = other DNA
ataaagcgcgaactgttttccgataaggaaagtctgtgggggtacacgactgttcagtgtgagtcgttgattgaa

SEQ ID NO: 533194 - DNA, 75 bp, synthetic construct
  source 1..75: mol_type = other DNA
tatacccggagaacgattccggggacgtaatcttggtactcaggctgtcagtgattacgaatggtatcgtattcg

SEQ ID NO: 533195 - DNA, 75 bp, synthetic construct
  source 1..75: mol_type = other DNA
tacggattacggagatcgggttgtgttctaccatcacacggaccgaaatgaactggcagagaagcttaatttaat

SEQ ID NO: 533196 - DNA, 75 bp, synthetic construct
  source 1..75: mol_type = other DNA
gacggttatgatcataaccagactcccgttcgtgctgacagcgtatggtcactgctgacgctcgacaatgtgaat

SEQ ID NO: 533197 - DNA, 75 bp, synthetic construct
  source 1..75: mol_type = other DNA
ggcaggatatcccgccacgccgtctgccgcgtctggtgtttgatgtgcagcaggaagccgacattaagggcgtgg

SEQ ID NO: 533198 - DNA, 75 bp, synthetic construct
  source 1..75: mol_type = other DNA
acctcaaaagtgattctgggcagtacgctgaccagccaggctgacggtaaaacctccaccaacgcgctgggtaat

SEQ ID NO: 533199 - DNA, 75 bp, synthetic construct
  source 1..75: mol_type = other DNA
ataattgcatccaatgtcgaaggtattccagaagttgttatacatgggaaaatgggatttttaactgctcctgat

SEQ ID NO: 533200 - DNA, 75 bp, synthetic construct
  source 1..75: mol_type = other DNA
cctgaaatccctcgggctgggtgaacatcagtatgtttctgccgtacataccgatactgataacctgcatgttca

SEQ ID NO: 533201 - DNA, 75 bp, synthetic construct
  source 1..75: mol_type = other DNA
tacgccaacagaacgcttccgtggtcgtcgtatggagagctgtcctgcgaccgataaagaatggcaccgtatgcg

SEQ ID NO: 533202 - DNA, 75 bp, synthetic construct
  source 1..75: mol_type = other DNA
ccatattgcagaagtgcagcgtatgcaggcgctgatcaggctgaaggagagtgtgaaggaagagcggttgtcact

SEQ ID NO: 533203 - DNA, 75 bp, synthetic construct
  source 1..75: mol_type = other DNA
tgccggaaaaacgccaatccttgaagggggcatggattacaagcaactgggaatgagtaaccaggatgctgaatg

SEQ ID NO: 533204 - DNA, 75 bp, synthetic construct
  source 1..75: mol_type = other DNA
gtttgaaaaacgcgatctggcacaggcggtgattaacgccgcatacctggtggcctgtgcagatggtgaatgtga

SEQ ID NO: 533205 - DNA, 75 bp, synthetic construct
  source 1..75: mol_type = other DNA
gcaacgagttaacaccgttgcaggagcgattcaaagaaattaatgactggctgggggtgaaggtaataagcttta

SEQ ID NO: 533206 - DNA, 75 bp, synthetic construct
  source 1..75: mol_type = other DNA
taaagaggtgctggctaaagccaacgaactgcgttcgggggatgtgctggcaggcgttgcagcggcaagctcgca

SEQ ID NO: 533207 - DNA, 75 bp, synthetic construct
  source 1..75: mol_type = other DNA
gtggaaaacttaagccgcgtgctggacaccatctatggcgtgatcgacaaattcaacatcccaactcagggctgc

SEQ ID NO: 533208 - DNA, 75 bp, synthetic construct
  source 1..75: mol_type = other DNA
ctgcctggctgaatgagtcagccacgctgttccgccgcaagtattacgaaaacggcgctcatgccggatacatca

SEQ ID NO: 533209 - DNA, 75 bp, synthetic construct
  source 1..75: mol_type = other DNA
agcggtcatatcgccagacgctgcagtgagcagaagcgggtacgtatccccgccatgaaagtcagcgaatggggc

SEQ ID NO: 533210 - DNA, 75 bp, synthetic construct
  source 1..75: mol_type = other DNA
gtcaggcgaatggctggacggcgtgaaaggtaaacaggcattagacgccctggaacgctacaagggggcgaaaaa

SEQ ID NO: 533211 - DNA, 75 bp, synthetic construct
  source 1..75: mol_type = other DNA
agtctgaaacagtacgcctgccgtcattttgccgaacgcttaccggcaatggcgcgcaatggtgaactgaaaagc

SEQ ID NO: 533212 - DNA, 75 bp, synthetic construct
  source 1..75: mol_type = other DNA
cacaaagcgtgacgcatatcgccgtgaagcgcggtcaacggccggcaaagccattgctgttaatgcatatcaccc

SEQ ID NO: 533213 - DNA, 75 bp, synthetic construct
  source 1..75: mol_type = other DNA
cgcaggagcatgtggtgaagtgcctggtctttttccacccggaagatgctcacggcctgcgcctggagcaggagc

SEQ ID NO: 533214 - DNA, 75 bp, synthetic construct
  source 1..75: mol_type = other DNA
agctacattgcctccgcacggtgtattgccatcaccgggactcacctttctcacccgcagacccgcgaggcggtg

SEQ ID NO: 533215 - DNA, 75 bp, synthetic construct
  source 1..75: mol_type = other DNA
tggcgcggggaacacacacggacggcgacgtaagcgccgaaggtgatcggtttatccccgctggcgcggggaaca

SEQ ID NO: 533216 - DNA, 75 bp, synthetic construct
  source 1..75: mol_type = other DNA
tccccgcacagctcagcagcggcagacacgcggtttatccccgctggcgcggggaacacaatttttttaccccgt

SEQ ID NO: 533217 - DNA, 75 bp, synthetic construct
  source 1..75: mol_type = other DNA
ctgtcattctggcggtaaaatcgatctgccacggtttatccccgctggcgcggggaacacactaagcatacataa

SEQ ID NO: 533218 - DNA, 75 bp, synthetic construct
  source 1..75: mol_type = other DNA
ctggcgcggggaacaccgattcctcgtagctgccactcgactgaaagccggtttatccccgctggcgcggggaac

SEQ ID NO: 533219 - DNA, 75 bp, synthetic construct
  source 1..75: mol_type = other DNA
gggaacaccctctgcctgtaattcagcttcactgtcagtgcggtttatccccgctggcgcggggaacacggtgtt

SEQ ID NO: 533220 - DNA, 75 bp, synthetic construct
  source 1..75: mol_type = other DNA
gctggcgcggggaactctgcgtgagcgtatcgccgcgcgtctgcgaaagcggtttatccccgctggcgcggggaa

SEQ ID NO: 533221 - DNA, 75 bp, synthetic construct
  source 1..75: mol_type = other DNA
ggaacaccgatctccgtctcgcgtcgtatatgtgattgtcggtttatccccgctggcgcggggaacaccccatta

SEQ ID NO: 533222 - DNA, 75 bp, synthetic construct
  source 1..75: mol_type = other DNA
tatccccgctggcgcggggaacacgtataaaacacggactcacccgccgcgcggcgcggtttatccccgctggcg

SEQ ID NO: 533223 - DNA, 75 bp, synthetic construct
  source 1..75: mol_type = other DNA
gtttatccccgctggcgcggggaacacatatatcagagcaaaaaacaaagccacagccacggtttatccccgctg

SEQ ID NO: 533224 - DNA, 75 bp, synthetic construct
  source 1..75: mol_type = other DNA
atgagtcagtttgaacagatccccgacaacggtttatccccgctggcgcggggaacacgaacgcaatatcacggc

SEQ ID NO: 533225 - DNA, 75 bp, synthetic construct
  source 1..75: mol_type = other DNA
ccggtttatccccgctggcgcggggaacacagcgcgggctaatgtctgctctgaatcatcaccggtttatccccg

SEQ ID NO: 533226 - DNA, 75 bp, synthetic construct
  source 1..75: mol_type = other DNA
tcggtttatccccgctggcgcggggaacacgagtctatcagcgacactaccggcaatagcgacggtttatccccg

SEQ ID NO: 533227 - DNA, 75 bp, synthetic construct
  source 1..75: mol_type = other DNA
ggaacacgcggaaacagcttcctggatgctgcgttattgcggtttatccccgctggcgcggggaacaccctcccc

SEQ ID NO: 533228 - DNA, 75 bp, synthetic construct
  source 1..75: mol_type = other DNA
ggcaaacctaaactgtacgacaaagaatcacagaggtttgttgactttagcctcgatggttatcatccctttttc

SEQ ID NO: 533229 - DNA, 75 bp, synthetic construct
  source 1..75: mol_type = other DNA
ggctcaccagagtattacgataaggtaaaaaacgagttcgtagatttgagccatgaaggctaccgcgggtttctt

SEQ ID NO: 533230 - DNA, 75 bp, synthetic construct
  source 1..75: mol_type = other DNA
gaaagggtatctgtagccgattgcctgcaattggctgtagaaggccacattacaatttcagcgatattggacgaa

SEQ ID NO: 533231 - DNA, 75 bp, synthetic construct
  source 1..75: mol_type = other DNA
cgcctgctgacggagacccttgaactgaccgccacggctgacatgcctgatgaagtgcgcgcaaagctgcacaaa

SEQ ID NO: 533232 - DNA, 75 bp, synthetic construct
  source 1..75: mol_type = other DNA
gttatgccctgaagtacggtctgaccatgccgggtaaacaccgccgcaccccgccgtacatgttcaccgaggagg

SEQ ID NO: 533233 - DNA, 75 bp, synthetic construct
  source 1..75: mol_type = other DNA
ctggagattgcccgttatgccctgaaatacggtctgaccatgccggggaaacaccgccgcaccccgccgtacatg

SEQ ID NO: 533234 - DNA, 75 bp, synthetic construct
  source 1..75: mol_type = other DNA
gataagttgaactttatttgtatctttgatggtgaagatatattaaaaagcgttcgtgatgatttaggtttataa

SEQ ID NO: 533235 - DNA, 75 bp, synthetic construct
  source 1..75: mol_type = other DNA
cacctgctgctcgagctggtggagtgctgctatagcggtttatccccgctggcgcggggaacacaacgtcaggtt

SEQ ID NO: 533236 - DNA, 75 bp, synthetic construct
  source 1..75: mol_type = other DNA
attattaattattgattttttaagtcagtcacaatctaccaacttaacagaaacacacaaacaacacatccatta

SEQ ID NO: 533237 - DNA, 75 bp, synthetic construct
  source 1..75: mol_type = other DNA
ggataccggcgatattggcggtgcgctggagattgcccgttatgccctgaagtacggtctgaccatgccgggtaa

SEQ ID NO: 533238 - DNA, 75 bp, synthetic construct
  source 1..75: mol_type = other DNA
cgcgatgccggtcagagcgccgaagcactggcacagtttcagcgcgcgatgcagctcgaccgcaatgccggtgtg

SEQ ID NO: 533239 - DNA, 75 bp, synthetic construct
  source 1..75: mol_type = other DNA
tgggaaagaagtcttagaaattgataagttgaactttatttgtatctttgatggcgaagatatattaaaaactgt

SEQ ID NO: 533240 - DNA, 75 bp, synthetic construct
  source 1..75: mol_type = other DNA
acggtttatccccgctggcgcggggaactccgcatcaggccagaccaaatggtccggcaaaacggtttatccccg

SEQ ID NO: 533241 - DNA, 75 bp, synthetic construct
  source 1..75: mol_type = other DNA
aaatctgacaggagactatatctggagaaacaataagaagctggcaaaagggaagtatcgtcctttgcgagcagt

SEQ ID NO: 533242 - DNA, 75 bp, synthetic construct
  source 1..75: mol_type = other DNA
ccgcgccagtgggcttacgctgcttactgccgcgatcactttgtggaataccgtatatatagaaaacgccattaa

SEQ ID NO: 533243 - DNA, 75 bp, synthetic construct
  source 1..75: mol_type = other DNA
tccgctggcggcattatggggagacggttcaacctcatcttctgacggccagaattttcgggttggcagccatgg

SEQ ID NO: 533244 - DNA, 75 bp, synthetic construct
  source 1..75: mol_type = other DNA
taacggtaaaaacgtgctgcaacatattgatcggttgaatgccattgaggggttggcactgccggaaggtattac

SEQ ID NO: 533245 - DNA, 75 bp, synthetic construct
  source 1..75: mol_type = other DNA
aataataaccagttaaatttacctgttgaaaccaaatgcggggcttatcttaaggcgaggctgacgctgctggcc

SEQ ID NO: 533246 - DNA, 75 bp, synthetic construct
  source 1..75: mol_type = other DNA
ttaaactttcagcagaactctggctggaatatatttccggccgtgatgccacccgacgtgagcacctgggggaac

SEQ ID NO: 533247 - DNA, 75 bp, synthetic construct
  source 1..75: mol_type = other DNA
agacatttcagttggtggacttgcccgaaggcctgggccggcacatccaccagaaccgcctgctcaagctggccc

SEQ ID NO: 533248 - DNA, 75 bp, synthetic construct
  source 1..75: mol_type = other DNA
gctttccgttcaccagaaccggctcctgaaactcgcacgcgaaggcaggaaaatgagtagccgggacctggcaaa

SEQ ID NO: 533249 - DNA, 75 bp, synthetic construct
  source 1..75: mol_type = other DNA
ttgatgtcatcgagcgaactctggccgaagcaacaacgcttgcagacagggcggtattttctgcgctgacctcgc

SEQ ID NO: 533250 - DNA, 75 bp, synthetic construct
  source 1..75: mol_type = other DNA
accggaaatactatgaaatttgcgcaatgaatgagctgaagggggcactgcgagcgggtgatatctggatcaggg

SEQ ID NO: 533251 - DNA, 75 bp, synthetic construct
  source 1..75: mol_type = other DNA
tcgtttgcattttgtcgttacgcctgcattatttctggcgtcgaatagctattccttaagcaggagcttgtcatg

SEQ ID NO: 533252 - DNA, 75 bp, synthetic construct
  source 1..75: mol_type = other DNA
ccacgcctttgccgcccactggggcgacggcacgacctcatcctccgatggccagcgcttccgcgcgggtggccg

SEQ ID NO: 533253 - DNA, 75 bp, synthetic construct
  source 1..75: mol_type = other DNA
gcacaactgggaaagcagcatagatctgcactcgacagcctgctcatatcagaaggggaacaaccttcccgactt

SEQ ID NO: 533254 - DNA, 75 bp, synthetic construct
  source 1..75: mol_type = other DNA
gcggtttattcccgctggcgcggggaacacctgacgctggctgagaacggtttttctgttcgcggtttatccccg

SEQ ID NO: 533255 - DNA, 75 bp, synthetic construct
  source 1..75: mol_type = other DNA
gtttatccccgctggcgcggggaacacgcgcgccgttgcggtagtatttgcggcgaaacaggtttatccccgctg

SEQ ID NO: 533256 - DNA, 75 bp, synthetic construct
  source 1..75: mol_type = other DNA
gcgcggggaacacttaaaaaacgttgggtatccggtctatattcgcggtttatccccgctggcgcggggaacact

SEQ ID NO: 533257 - DNA, 75 bp, synthetic construct
  source 1..75: mol_type = other DNA
tgattttttaagccagtcacaatctaccaactttatagtatcacacaaacaacacatccattatgttaaagagta

SEQ ID NO: 533258 - DNA, 75 bp, synthetic construct
  source 1..75: mol_type = other DNA
acacttaccgaagtaatggtcgaaacacagaattttcggtttatccccgctggcgcggggaacacagcaccactg

SEQ ID NO: 533259 - DNA, 75 bp, synthetic construct
  source 1..75: mol_type = other DNA
tgctggaccatttcaaattcacaatagattcggtttatccccgctggcgcggggaacacggaatgatatttcaat

SEQ ID NO: 533260 - DNA, 75 bp, synthetic construct
  source 1..75: mol_type = other DNA
ttcatggcgacacctgcggcgcaggcgctcagcgatgcgctggacaccataacggaaatgtaccgtaaacaactt

SEQ ID NO: 533261 - DNA, 75 bp, synthetic construct
  source 1..75: mol_type = other DNA
ggctgctacagcctccgggtaaaataaacggtaaaaatgtgctgcaacatatcgaccggcttaattccatcgctg

SEQ ID NO: 533262 - DNA, 75 bp, synthetic construct
  source 1..75: mol_type = other DNA
gtgacttccgtcccagccttgccagatgttgtctcagattcaggttcccgactgaaacttcagcctgatttatgg

SEQ ID NO: 533263 - DNA, 75 bp, synthetic construct
  source 1..75: mol_type = other DNA
ctgaaactgggggcacgcgcgcataaggtgctggatgtcaccctgctcaacgagctggcggtcagtagcctgacg

SEQ ID NO: 533264 - DNA, 75 bp, synthetic construct
  source 1..75: mol_type = other DNA
ggctacttcaacctcccggtaaaataaacggtaaaaatgtgctgcaacatatcgatcggcttaattccatcgctg

SEQ ID NO: 533265 - DNA, 75 bp, synthetic construct
  source 1..75: mol_type = other DNA
gtctgcgccgacgcgtacaggcggggctgaataagggtgaggcccgtaatgcccttgcgcgagcggtctttatgc

SEQ ID NO: 533266 - DNA, 75 bp, synthetic construct
  source 1..75: mol_type = other DNA
ggtgaatcggatcgtaaagtaaaagagatcagacaaaaacataagactcatgtcttactccgcctgcctgcgcaa

SEQ ID NO: 533267 - DNA, 75 bp, synthetic construct
  source 1..75: mol_type = other DNA
ttcggtcagatttctaaagcacatctgacaggtgatggtacttcggttaagaaagatctggatattaaacttgtt

SEQ ID NO: 533268 - DNA, 75 bp, synthetic construct
  source 1..75: mol_type = other DNA
tatctttggtttctgaagtcaatacctacatcaatactcatcagtggcctggcaaagcggcgattggtcgtctga

SEQ ID NO: 533269 - DNA, 75 bp, synthetic construct
  source 1..75: mol_type = other DNA
aggcgtatccaaaccaatgaatttagatattgaattggttaattgtgatatcacttcatttaagggggggggagg

SEQ ID NO: 533270 - DNA, 75 bp, synthetic construct
  source 1..75: mol_type = other DNA
gccatcaactatgagcacaaatctgccgggattatgcagcagctggggatgccggaaatggccgtggatatccgt

SEQ ID NO: 533271 - DNA, 75 bp, synthetic construct
  source 1..75: mol_type = other DNA
aaatccagtgctgacaatgcagcgattaaagaaggtgagtttactgcggttactaacttcaatctgacctacgaa

SEQ ID NO: 533272 - DNA, 75 bp, synthetic construct
  source 1..75: mol_type = other DNA
tcatgaacttccgtgctgaccgcgcgcgtgaaatcacgcgtgcgtttgtaaatgctgatttcaacggtttcgcgc

SEQ ID NO: 533273 - DNA, 75 bp, synthetic construct
  source 1..75: mol_type = other DNA
cttctttaacggtggtgtagaagagtcgttcaaaggcgaagaccgcattctgatcaactcgccgaaagtggcaac

SEQ ID NO: 533274 - DNA, 75 bp, synthetic construct
  source 1..75: mol_type = other DNA
tactggtgattctggatggctatggctatcgcgaagaacagcaggataacgccatttttagtgctaaaaccccgg

SEQ ID NO: 533275 - DNA, 75 bp, synthetic construct
  source 1..75: mol_type = other DNA
gtgcggctgctggcttatgcactccagactgaatatcaggaaagtggcatgtggcctgagaatggtattgatgtt

SEQ ID NO: 533276 - DNA, 75 bp, synthetic construct
  source 1..75: mol_type = other DNA
gcagacagcaggtctgagccctttcttaaagtatccattgatacctccgtcagggtttttgccggtctcttggag

SEQ ID NO: 533277 - DNA, 75 bp, synthetic construct
  source 1..75: mol_type = other DNA
gaagaggccgtgagacgcgagcgggaaaaaggatgtgcgatgatcgagtctgttttgtcacggatccgggaggac

SEQ ID NO: 533278 - DNA, 75 bp, synthetic construct
  source 1..75: mol_type = other DNA
cggtacgggcacagctattatgattcaggctgcgggtaaaaacgttcccttcgatggtacggagggtgacgctaa

SEQ ID NO: 533279 - DNA, 75 bp, synthetic construct
  source 1..75: mol_type = other DNA
ggacggcagaaggggctttcgcccctccggggagtaaccggtcggcccggcgacctgattcagcagaaggagacg

SEQ ID NO: 533280 - DNA, 75 bp, synthetic construct
  source 1..75: mol_type = other DNA
aacagctcagacagaagaacttcggaagctccagaatcagatgatatccatggaagcgacactcaatgcggaaaa

SEQ ID NO: 533281 - DNA, 75 bp, synthetic construct
  source 1..75: mol_type = other DNA
gtatcagaagcagcttaatgatgaaaataaagcgcagcaggtagagctgaccgccctcaacagccagaatgaaaa

SEQ ID NO: 533282 - DNA, 75 bp, synthetic construct
  source 1..75: mol_type = other DNA
gaaaggcctgatcgaagagatggcttctgcgtatgaagatccgaaagaagttatcgagttctacagcaaaaacaa

SEQ ID NO: 533283 - DNA, 75 bp, synthetic construct
  source 1..75: mol_type = other DNA
gtgaactgtttgaagaacaggctaaacgtcgtgttgtagttggcctgctgctgggcgaagttatccgcaccaacg

SEQ ID NO: 533284 - DNA, 75 bp, synthetic construct
  source 1..75: mol_type = other DNA
tggaaagaaaaagacggcgctgttgaagcagaagaccgcgtaaccatcgacttcactggttctgtagacggcgaa

SEQ ID NO: 533285 - DNA, 75 bp, synthetic construct
  source 1..75: mol_type = other DNA
cgctattccggtattgatggggccgcatacttttaactttaaagacatttgcgcgcggctggagcaggcaagcgg

SEQ ID NO: 533286 - DNA, 75 bp, synthetic construct
  source 1..75: mol_type = other DNA
tcgatatctctgtaacgccacaactggctgctaaagcagtaacgctgcgccgccagtgggcaccgcatcgcccgg

SEQ ID NO: 533287 - DNA, 75 bp, synthetic construct
  source 1..75: mol_type = other DNA
acctttaactttaaagatatctgcgcacggctggaacaagcaaacggactgattaccgtcactgatgccacgtca

SEQ ID NO: 533288 - DNA, 75 bp, synthetic construct
  source 1..75: mol_type = other DNA
cggccgcaggttatgccaaactgggtaaattcgtccgccgcttgctgcgtcgtattacgctgattgctgcgcaaa

SEQ ID NO: 533289 - DNA, 75 bp, synthetic construct
  source 1..75: mol_type = other DNA
ctggactaagctatatcacacgctcttccggagaaatcccttccgccagtacacaagtggtagttggcgatacga

SEQ ID NO: 533290 - DNA, 75 bp, synthetic construct
  source 1..75: mol_type = other DNA
ctgtatcaaaaccagggcgcgctacagcgtctgcttcaactgctggaaccttacctgccaccgaaaacgcattga

SEQ ID NO: 533291 - DNA, 75 bp, synthetic construct
  source 1..75: mol_type = other DNA
aaaaacagaagcgggaactgatcgtgttattcatcttgttcaaccagctgttgatgtcctgaaaagccaggctga

SEQ ID NO: 533292 - DNA, 75 bp, synthetic construct
  source 1..75: mol_type = other DNA
catttattagacggcagcctgcaagcgatggttgcggataccttaggccaacttccggcgctgaacgcacgactt

SEQ ID NO: 533293 - DNA, 75 bp, synthetic construct
  source 1..75: mol_type = other DNA
ccgctttcaaacatcgcggtggcaatgcggatgcagcctgcaattctgccgaaaatccgtgaaatagtgctgatg

SEQ ID NO: 533294 - DNA, 75 bp, synthetic construct
  source 1..75: mol_type = other DNA
aaccggactggatggcccggtattcgagccgctgacccgccaggcagaaagtactcatgcggtgaaatacatcat

SEQ ID NO: 533295 - DNA, 75 bp, synthetic construct
  source 1..75: mol_type = other DNA
accgatttgctggtcctgctgcgcgtttatctcggctaccgcagtgacgtccggctgcgtctcactgtacccgtg

SEQ ID NO: 533296 - DNA, 75 bp, synthetic construct
  source 1..75: mol_type = other DNA
gggtaaaacgacaggggaagcatgcagccggctcctgatgacactggaaacagcagatccggacgaggcggaagg

SEQ ID NO: 533297 - DNA, 75 bp, synthetic construct
  source 1..75: mol_type = other DNA
cagcggataaccagcagttcagtatcgccctgagcggtgtcacctggcggattagcatcatatggcgagatcctt

SEQ ID NO: 533298 - DNA, 75 bp, synthetic construct
  source 1..75: mol_type = other DNA
atctggcctgcggtgcgtgacggtaaaatatcaattacccgctcgcaactggcaatgctcctcgataagctggac

SEQ ID NO: 533299 - DNA, 75 bp, synthetic construct
  source 1..75: mol_type = other DNA
actggtaatgctcctcgataagctggactggcgtcagccaaaaacatccctccttaactcactgacaatgttgta

SEQ ID NO: 533300 - DNA, 75 bp, synthetic construct
  source 1..75: mol_type = other DNA
tccattacccgctcgcagctggcaatgctcctcgataagctggactggcgtcagcccaaaaacatcccgccttaa

SEQ ID NO: 533301 - DNA, 75 bp, synthetic construct
  source 1..75: mol_type = other DNA
ggcggcgcttacggtactggcaacttcaccccatctgccgagttcaacatctttgctgacccggaagcggcgcga

SEQ ID NO: 533302 - DNA, 75 bp, synthetic construct
  source 1..75: mol_type = other DNA
cgatatgcgtaaatccttcaacggtctgggagagcagatacagcatgtgctggatgagaaccccttctccggtca

SEQ ID NO: 533303 - DNA, 75 bp, synthetic construct
  source 1..75: mol_type = other DNA
atgatatctctccctgccagttcgcgtatctggctggttgccggtatcaccgacatgcgtaaatccttcaacgga

SEQ ID NO: 533304 - DNA, 75 bp, synthetic construct
  source 1..75: mol_type = other DNA
atgacgatcagcgaaatccctctttccccggaaaaccagcgattctccatatctgtggcaggtcaaagtctgcaa

SEQ ID NO: 533305 - DNA, 75 bp, synthetic construct
  source 1..75: mol_type = other DNA
ggaccttaagaaaattgagatttgtgcgaatgcacttaatcgttaccagtcagtaattaaaaacatgttgcctat

SEQ ID NO: 533306 - DNA, 75 bp, synthetic construct
  source 1..75: mol_type = other DNA
tcgacgcctgcagaaatcagcaggccaaaaatttatggtgtgtttctgtttatacaggcattcgccctggtgaac

SEQ ID NO: 533307 - DNA, 75 bp, synthetic construct
  source 1..75: mol_type = other DNA
cttgcttcgtcggtaacaaaggaagatttactgtttatcaggaaagatttattgaccgggtatcataatctttct

SEQ ID NO: 533308 - DNA, 75 bp, synthetic construct
  source 1..75: mol_type = other DNA
ggtctgggaaaaagagagataaccgttaaggcactttcggaaaaatggttggaccttaagaaaattgagatttgt

SEQ ID NO: 533309 - DNA, 75 bp, synthetic construct
  source 1..75: mol_type = other DNA
cagcgtatggggctgtttgccgggtccggcgttggtaaaagtgtgctgttggggatgatggcacgttacacccgc

SEQ ID NO: 533310 - DNA, 75 bp, synthetic construct
  source 1..75: mol_type = other DNA
gattaccccgccatttaacccgttgcaacgtacaccgattgaacatgtgctggacaccggcgtgcgcccaatcaa

SEQ ID NO: 533311 - DNA, 75 bp, synthetic construct
  source 1..75: mol_type = other DNA
aatcatgtcagttccggcgccggtgatggtagcccgcgaaacattgcatttaactacattgtgagggctgcataa

SEQ ID NO: 533312 - DNA, 75 bp, synthetic construct
  source 1..75: mol_type = other DNA
aggttactccgctgccttccgttgcgcggatttaggtctggaaaccgtaatcgtagaacgctacaacacccttgg

SEQ ID NO: 533313 - DNA, 75 bp, synthetic construct
  source 1..75: mol_type = other DNA
atgaacgcagttgaatttacgaaatgggtggcagagcatgatatcaccggcgctgatgaaaaggctgtgtactac

SEQ ID NO: 533314 - DNA, 75 bp, synthetic construct
  source 1..75: mol_type = other DNA
ccgcgtggcaaggctggctgaccttggggagaacaacagtctgatgaatgcacagcttgcacgggtgggaggcct

SEQ ID NO: 533315 - DNA, 75 bp, synthetic construct
  source 1..75: mol_type = other DNA
tgaagcagagcaggatcgccagatgaacatactgacgggggcttctgcacctgcaagacaacaactgagtgttgg

SEQ ID NO: 533316 - DNA, 75 bp, synthetic construct
  source 1..75: mol_type = other DNA
agcccgccctcagggggactggcagacatccgcagcgctgacccgccagcaatacgacgactggcgcaccagata

SEQ ID NO: 533317 - DNA, 75 bp, synthetic construct
  source 1..75: mol_type = other DNA
cgtgagcgccgtaatgcctggcgacgcgggaaaaagcagacgttcagggaatatattgctcagatgtcgattgcc

SEQ ID NO: 533318 - DNA, 75 bp, synthetic construct
  source 1..75: mol_type = other DNA
gaaaccggctatatcaattgccttccgtggagccaggaaaaactcagccgtgcatgtcgtgaacttgaacttaag

SEQ ID NO: 533319 - DNA, 75 bp, synthetic construct
  source 1..75: mol_type = other DNA
cttactcaggtgatctaccgaagactcgacggcaaaacccgagccacttcaattggtgcatttaatgcagaattt

SEQ ID NO: 533320 - DNA, 75 bp, synthetic construct
  source 1..75: mol_type = other DNA
aggggtctcctccgggctacgttggctacggtcagggcggcgtactcaccgaagccgttcgcaaacgcccgtaca

SEQ ID NO: 533321 - DNA, 75 bp, synthetic construct
  source 1..75: mol_type = other DNA
gtgtgaaggaagagcggttgtcactgattgcggagggtaagtggtatcctttgtcctaccggcagtgggtggaac

SEQ ID NO: 533322 - DNA, 75 bp, synthetic construct
  source 1..75: mol_type = other DNA
gctggcagaactgccatgaactgtttgcccgcagtggactgatgttacagaaactgcatcatggtcttgtgattg

SEQ ID NO: 533323 - DNA, 75 bp, synthetic construct
  source 1..75: mol_type = other DNA
aaataaaaagtgtttatgctgatataaaagatggagagctagatcttagacccgattttcagcgcggtgaagtct

SEQ ID NO: 533324 - DNA, 75 bp, synthetic construct
  source 1..75: mol_type = other DNA
catcaagcacaaatcatcacatatgcaataatgatttagatgactattattatcgtgctaaagattactatgggg

SEQ ID NO: 533325 - DNA, 75 bp, synthetic construct
  source 1..75: mol_type = other DNA
gcgcctgtttatcagtgcgagttttgccaccatgacgcaaccgggcaacttcagtggcactgggaagatgtgaac

SEQ ID NO: 533326 - DNA, 75 bp, synthetic construct
  source 1..75: mol_type = other DNA
ccgcagttccccagcctggacaagctcctccgcgacctggaaaaccaggtctgtgatgccgtcgtggatcggggg

SEQ ID NO: 533327 - DNA, 75 bp, synthetic construct
  source 1..75: mol_type = other DNA
tcctccgcgacctggaaaaccaggtctgtgatgccgtcgtggatcgggtgaatgaccatcttccggggaatatcg

SEQ ID NO: 533328 - DNA, 75 bp, synthetic construct
  source 1..75: mol_type = other DNA
gccgaaagatgatgacattgttgagttacatggcaaaaaatttaaagatttaaatccagacattcaaagaaaaat

SEQ ID NO: 533329 - DNA, 75 bp, synthetic construct
  source 1..75: mol_type = other DNA
tgacaccctgccggagccgttgacgcagcttcatgcgcgactggcggcgctggatatcgagcgggaggcgattga

SEQ ID NO: 533330 - DNA, 75 bp, synthetic construct
  source 1..75: mol_type = other DNA
cagatgatggccagcctcaacggctggcaggatatcccgtcacgccgtcttccgcgcctggtgtttgatgtgcag

SEQ ID NO: 533331 - DNA, 75 bp, synthetic construct
  source 1..75: mol_type = other DNA
cagaaaactgccgcgcattctggaagctgccgaacgcggttatcttccggcgcaggcgatgctgtttgcggatat

SEQ ID NO: 533332 - DNA, 75 bp, synthetic construct
  source 1..75: mol_type = other DNA
agtcgtcattttgccgaacgcttaccggcaatggcgcgcaatggtgaactgaaaagctgcctggctgtacaccgt

SEQ ID NO: 533333 - DNA, 75 bp, synthetic construct
  source 1..75: mol_type = other DNA
gtatccccaccccgaaagacggcgaagaggtactggtgccggtggcacagcgtctccctgtgcaggcgggcctca

SEQ ID NO: 533334 - DNA, 75 bp, synthetic construct
  source 1..75: mol_type = other DNA
gagattgaattcaaggaggccgcctccggcgggccggaggcgttcatgtcgatggtggaatgggcggagcgtacc

SEQ ID NO: 533335 - DNA, 75 bp, synthetic construct
  source 1..75: mol_type = other DNA
ggatatggaggacatcatcctcaacgggatgagcagtgtcggttacggtttcagctgtcaggaaatcagctgggc

SEQ ID NO: 533336 - DNA, 75 bp, synthetic construct
  source 1..75: mol_type = other DNA
atgacaggaaatcaccccgccgcgctgctgcgtcgccttaacccatactgtgcacgggcgctggacgccgccgcc

SEQ ID NO: 533337 - DNA, 75 bp, synthetic construct
  source 1..75: mol_type = other DNA
tgagcagcggctgaaaaacgtgattgatgcggtacagaaatcaccggagccggtactgctgtttattgatgaagc

SEQ ID NO: 533338 - DNA, 75 bp, synthetic construct
  source 1..75: mol_type = other DNA
gcttaccgccgcctgcctgctgcctgacaccggagcgcgtaatatcgacagcctgctgaaccagcagattttacc

SEQ ID NO: 533339 - DNA, 75 bp, synthetic construct
  source 1..75: mol_type = other DNA
gacgtgacggaaagtcttcctttgaagacctgattgcgtacacctcagtgcgggatgatgtgccggaagatgaac

SEQ ID NO: 533340 - DNA, 75 bp, synthetic construct
  source 1..75: mol_type = other DNA
ctcctgtattgtttgatcgtgagccaggaatgggttttgaaccggaaggctcatatcaacagtttaatgatgtat

SEQ ID NO: 533341 - DNA, 75 bp, synthetic construct
  source 1..75: mol_type = other DNA
gtcgcccgcttaataaagaggtgcttaaagccccccagacctcccgcacgttcgagcttcagcgcgactggccaa

SEQ ID NO: 533342 - DNA, 75 bp, synthetic construct
  source 1..75: mol_type = other DNA
ctggtacccgttatctggttgagtttgattcagccgatttactgcgcgccacacctaccgaacgttacgccacgt

SEQ ID NO: 533343 - DNA, 75 bp, synthetic construct
  source 1..75: mol_type = other DNA
cgcgctacttccgtccggcagaagttgaaaccctgctcggcgacccgaccaaagcgcatgaaaaactcggctgga

SEQ ID NO: 533344 - DNA, 75 bp, synthetic construct
  source 1..75: mol_type = other DNA
cttcacggtcgccatccaaaatttcatctgcattacggcgacctgacggacacctccaatctgacccgtattctg

SEQ ID NO: 533345 - DNA, 75 bp, synthetic construct
  source 1..75: mol_type = other DNA
cgtgaagtacagccggatgaagtgtacaacctgggcgcaatgagccacgttgcggtttcttttgagtcaccggaa

SEQ ID NO: 533346 - DNA, 75 bp, synthetic construct
  source 1..75: mol_type = other DNA
ctggtccgatgggcattggcgctatcgattatgctattaacggcggcatacaaccgtcgcgggtggtggtggtcg

SEQ ID NO: 533347 - DNA, 75 bp, synthetic construct
  source 1..75: mol_type = other DNA
atgaaaaccaaagttgctgctatttatggcaagcgggatgtccgtctgcgcgaatttgagctgccagaaattacc

SEQ ID NO: 533348 - DNA, 75 bp, synthetic construct
  source 1..75: mol_type = other DNA
aaagcgcacgagaaactgggctggaaaccagaaaccactctgcaggagatggtctctgagatggtagccaaagat

SEQ ID NO: 533349 - DNA, 75 bp, synthetic construct
  source 1..75: mol_type = other DNA
aatgacgcggtagcgcgtgagcgcgcggcggggctggcgatggtggaatcggtattaacgcgcatcggggagggg

SEQ ID NO: 533350 - DNA, 75 bp, synthetic construct
  source 1..75: mol_type = other DNA
attaattgtccgtacaactccagtgtcagagacctttgcgaagaaatacttctaaagttagatgatgctagcggc

SEQ ID NO: 533351 - DNA, 75 bp, synthetic construct
  source 1..75: mol_type = other DNA
cgttatcgacgaaaccggattaacggtggatgcatcaatgcgagctgatgcttcagccattttcaccccggcaaa

SEQ ID NO: 533352 - DNA, 75 bp, synthetic construct
  source 1..75: mol_type = other DNA
ttgggtatccttgttattgatgaaatgcagaggcttaaattttcaagaaccgggggtgagagtaagttgattgat

SEQ ID NO: 533353 - DNA, 75 bp, synthetic construct
  source 1..75: mol_type = other DNA
tacctggagctgtgggtgagtatgatgataaatattgctctgtatctcatgcaggcgaagcctcaacggatttta

SEQ ID NO: 533354 - DNA, 75 bp, synthetic construct
  source 1..75: mol_type = other DNA
tgcgtcgtctttacctgaagttaagaaagtaatatgtatcgaagcgaacaacatcatgaaggagtcttttgaaga

SEQ ID NO: 533355 - DNA, 75 bp, synthetic construct
  source 1..75: mol_type = other DNA
ttccacggacgacatgaaagaggcgattgcccttagcgccacgggacagttacagccgtcgtttatggtgaccca

SEQ ID NO: 533356 - DNA, 75 bp, synthetic construct
  source 1..75: mol_type = other DNA
cgggcatcagcctgttggccgtgtggttactgctgttgacgatggacgcgctggatttgacgcacttctctttcc

SEQ ID NO: 533357 - DNA, 75 bp, synthetic construct
  source 1..75: mol_type = other DNA
actgattttcggtattttacagggcgcgtccaacgctggttactggctgctttccatcactgataagcatctcta

SEQ ID NO: 533358 - DNA, 75 bp, synthetic construct
  source 1..75: mol_type = other DNA
catcggcgtttgtagcgctgttaatgactttgtgtaataagtcattttccgccacccagtttgctctactctcgg

SEQ ID NO: 533359 - DNA, 75 bp, synthetic construct
  source 1..75: mol_type = other DNA
tttgcaatcgcaaggtcaattgctgttcagtgaaattagctggcgtcctggtcattcgccggagtccgttcagta

SEQ ID NO: 533360 - DNA, 75 bp, synthetic construct
  source 1..75: mol_type = other DNA
atggaatactttgatatacgtaaaatgtcggtgaatctgtggcgaaacgctgccggtgaaacccgcgaaatctgt

SEQ ID NO: 533361 - DNA, 75 bp, synthetic construct
  source 1..75: mol_type = other DNA
tgtcggccccgtggcgggctggtttgttgaatcacacggctggccgacgttttatctgttctctgttgcggccgc

SEQ ID NO: 533362 - DNA, 75 bp, synthetic construct
  source 1..75: mol_type = other DNA
gatgcccagacaggatttacacatgagtttgcgcatgtcagtgaatctggtgctcgagcgcaagatttgcacatc

SEQ ID NO: 533363 - DNA, 75 bp, synthetic construct
  source 1..75: mol_type = other DNA
gggcatatcaatatgttgggccattatacattcacgttgccagaggatattttaaaaggggaactgagagctcta

SEQ ID NO: 533364 - DNA, 75 bp, synthetic construct
  source 1..75: mol_type = other DNA
cgcatgtcgtcggtacgtccggcggttcaacggacgacatgaaagaggcgattgcgcttagcgccacagggcagt

SEQ ID NO: 533365 - DNA, 75 bp, synthetic construct
  source 1..75: mol_type = other DNA
ggttaccgtttagggatgctggtttccggcggtttagccttatggctggcggataaatggttgggctggcaaggt

SEQ ID NO: 533366 - DNA, 75 bp, synthetic construct
  source 1..75: mol_type = other DNA
atgctggccgttatcatccgtgacgccagaaagattgggcagaaaaaacggctccgctcgctgaaggatctggat

SEQ ID NO: 533367 - DNA, 75 bp, synthetic construct
  source 1..75: mol_type = other DNA
gccaaaaacgccggaaaaacgcccatccttgaagggggcatgagttaccagcagctgggcatgagtaaccaggac

SEQ ID NO: 533368 - DNA, 75 bp, synthetic construct
  source 1..75: mol_type = other DNA
atcaagctggaaaaagagactgacgccgggattatcgtcagcggtgcgaaagtggttgccaccaactcggcgctg

SEQ ID NO: 533369 - DNA, 75 bp, synthetic construct
  source 1..75: mol_type = other DNA
gcttactataaaggctctcaggagcaggacgaatttaataaatctcttattcttaccggaaatcagttggggaca

SEQ ID NO: 533370 - DNA, 75 bp, synthetic construct
  source 1..75: mol_type = other DNA
cggtttcaatggcgaagaaaacctcgttcgtggtcgtggtggtaattgcgctactgacgatttacggggcgttgg

SEQ ID NO: 533371 - DNA, 75 bp, synthetic construct
  source 1..75: mol_type = other DNA
ttagatgcacagtttatagagttgggtaatgactacaacgtagatagcgtctcaaaacctaatagaaaacgtatt

SEQ ID NO: 533372 - DNA, 75 bp, synthetic construct
  source 1..75: mol_type = other DNA
gatgaccgatgcgctgggtgattttgtcacgacaggcaaggcaaattttcgttctttcgctacttccgtgatttc

SEQ ID NO: 533373 - DNA, 75 bp, synthetic construct
  source 1..75: mol_type = other DNA
gttctttcgctacttccgtgatttcggatcttagtcgaattgcattaaaggcttcaattactgggattttcgaca

SEQ ID NO: 533374 - DNA, 75 bp, synthetic construct
  source 1..75: mol_type = other DNA
attaaagaaaatcttggttatcttgagactgcatggaaagctgtcgcagactccgcaaaatgggcatgggattcc

SEQ ID NO: 533375 - DNA, 75 bp, synthetic construct
  source 1..75: mol_type = other DNA
cgtaactcattatggtaatgttgagggactcgatttttatggttacgacgagcttattatcagtgataaaacagg

SEQ ID NO: 533376 - DNA, 75 bp, synthetic construct
  source 1..75: mol_type = other DNA
gagtatgctaatagtgagcctgtcataacagattatgattgcgttgactcaaaaataaatgagcttattaagtca

SEQ ID NO: 533377 - DNA, 75 bp, synthetic construct
  source 1..75: mol_type = other DNA
gagaacattaataccgaccccaggctggcgctggatgcggcttataagctggcgcagttcacgcaccataaaaaa

SEQ ID NO: 533378 - DNA, 75 bp, synthetic construct
  source 1..75: mol_type = other DNA
gcgttagcgatggatacgttaaaccaaatggatgtaagtgacagggggaatatgctaacttatataaatgattat

SEQ ID NO: 533379 - DNA, 75 bp, synthetic construct
  source 1..75: mol_type = other DNA
aaaggctctggttcaccttattctgatgaagcatcactggatgccaaaacagattaatgagatgaaatttgatga

SEQ ID NO: 533380 - DNA, 75 bp, synthetic construct
  source 1..75: mol_type = other DNA
atgcatcccactgtgaaaatgttggaaagtgtcgtggtattaatactagtggaatagttcaaacagtcgataaag

SEQ ID NO: 533381 - DNA, 75 bp, synthetic construct
  source 1..75: mol_type = other DNA
ttgatgaaatagaaaaaaatccccgacccggagttttcgggttaggtggcattggagatggcggagctcaaaata

SEQ ID NO: 533382 - DNA, 75 bp, synthetic construct
  source 1..75: mol_type = other DNA
attcgttccgatgttcaccgctatcgctacatgttggcgaatgatgtttattacagtttcgttcgccgtatctgt

SEQ ID NO: 533383 - DNA, 75 bp, synthetic construct
  source 1..75: mol_type = other DNA
ttcctgagagaatgagacaaaagcctgtggtcacgatgattaatgggttaaccctgttaaggtcgcttggcgttc

SEQ ID NO: 533384 - DNA, 75 bp, synthetic construct
  source 1..75: mol_type = other DNA
tagacgttggtacctgtatgacaagtttcccaggatttaaagggggagtacaactttctacagcaccttgcaagt

SEQ ID NO: 533385 - DNA, 75 bp, synthetic construct
  source 1..75: mol_type = other DNA
tatggggcattatggcgtaatgatggcgctaaaacttacctgctgcttaccaatcaaggtgatgtttatggtggc

SEQ ID NO: 533386 - DNA, 75 bp, synthetic construct
  source 1..75: mol_type = other DNA
gcaggaacattccttatctttcggtttcggggccactgcaagagcgagtggagcaaattcttcgccaacttcccg

SEQ ID NO: 533387 - DNA, 75 bp, synthetic construct
  source 1..75: mol_type = other DNA
tgacacatcgccactcacgaccttgttctatacccttgatcaatatggtcatgccccgaaggaacttcaccagct

SEQ ID NO: 533388 - DNA, 75 bp, synthetic construct
  source 1..75: mol_type = other DNA
aaagttttgaacgtgaatttatcgagcagaccggcgtgaaactggtggtcggcaaaggcggaatggggccgctga

SEQ ID NO: 533389 - DNA, 75 bp, synthetic construct
  source 1..75: mol_type = other DNA
atcttcctctgtaaactgtttgccgtgctggcgagtagtggttctggcgcgcccggtggtgtctttacaccgacg

SEQ ID NO: 533390 - DNA, 75 bp, synthetic construct
  source 1..75: mol_type = other DNA
gcaggggtatgacattcagatcgctggttatggacttggcgataaaaatcagcaacgtcagcaggaattactgcg

SEQ ID NO: 533391 - DNA, 75 bp, synthetic construct
  source 1..75: mol_type = other DNA
taaatcagccatagataatatatataacttctataacaaccctcctactggtttaaacttatacaagtggttact

SEQ ID NO: 533392 - DNA, 75 bp, synthetic construct
  source 1..75: mol_type = other DNA
gtttcaacatccaaaaatctatttttgaatgatactctcgcaagacagaaagatatctctttagctaaagaaata

SEQ ID NO: 533393 - DNA, 75 bp, synthetic construct
  source 1..75: mol_type = other DNA
acttaaacgtccgatcccttacgatctcaacggcaaggcgattttccacgctggccctatcgtgcgtaaaaacgg

SEQ ID NO: 533394 - DNA, 75 bp, synthetic construct
  source 1..75: mol_type = other DNA
gtgatgtctcctggtattgaatatatggaggatggtcttcccgatccggtgaaagcgatggggcgtcttctggtg

SEQ ID NO: 533395 - DNA, 75 bp, synthetic construct
  source 1..75: mol_type = other DNA
atcgatttgccgaaaacaggcgatccctttatgaaaatcacccatgacgttgggtattcacctttcaggcgttaa

SEQ ID NO: 533396 - DNA, 75 bp, synthetic construct
  source 1..75: mol_type = other DNA
cgcacgtttgtcagagaaaatcctgaggtcgtaaaaaccatcgcgaaaactggtgcggcattactgacgatgggc

SEQ ID NO: 533397 - DNA, 75 bp, synthetic construct
  source 1..75: mol_type = other DNA
atatgggatgctggcttctatgatgtgggagcccgtcgaaaatgcacttgaatcaattctgcctgagggcgatgt

SEQ ID NO: 533398 - DNA, 75 bp, synthetic construct
  source 1..75: mol_type = other DNA
caaagcggctggccgggtagactacaaaaggctgttggcagataaggcgtcgggcgtgaagcctgaggatattga

SEQ ID NO: 533399 - DNA, 75 bp, synthetic construct
  source 1..75: mol_type = other DNA
caggcgtgaagcctgaggatgttgaccagtacagagagaagtcatcagagcggtgccgtgtaacggttactggct

SEQ ID NO: 533400 - DNA, 75 bp, synthetic construct
  source 1..75: mol_type = other DNA
gagaggaagattggcttgattggcggcgtcaaggtgtaacagccactgacgccgctatcctgctcaatcggtctc

SEQ ID NO: 533401 - DNA, 75 bp, synthetic construct
  source 1..75: mol_type = other DNA
atccggcccgcttaaaggtatgcagcgtcagcttaagggatttcagaaagaagtctccagccttgctctgggcgc

SEQ ID NO: 533402 - DNA, 75 bp, synthetic construct
  source 1..75: mol_type = other DNA
atgactcaagtaataattaaaaaatgggggaatagtctatctgttcgccttccttctgcgattgtgaaagccgct

SEQ ID NO: 533403 - DNA, 75 bp, synthetic construct
  source 1..75: mol_type = other DNA
tccttctgcgattgtgaaagccgcttcgttaaacgttgatgatgtagtggagctgtcagtaaaggacggcgcaat

SEQ ID NO: 533404 - DNA, 75 bp, synthetic construct
  source 1..75: mol_type = other DNA
ctctggaaagtgttgttcctgaagatacggttaactggctggataataaagggctgtttctggcttcagactgga

SEQ ID NO: 533405 - DNA, 75 bp, synthetic construct
  source 1..75: mol_type = other DNA
acctcattattgataactgggaaaccgtaggtcctgtcataaaaaaagtctggcacgtggtggatgaaacggcgc

SEQ ID NO: 533406 - DNA, 75 bp, synthetic construct
  source 1..75: mol_type = other DNA
cagccatcacccttgaatcgaagatggctgatgtccgcaaagtggtggacggtctggatacgccggatgcattta

SEQ ID NO: 533407 - DNA, 75 bp, synthetic construct
  source 1..75: mol_type = other DNA
tcatcatggcgaagctccctgaatacatcagccagttgcgcggcccggcagcacagtcggataccaccgggcaga

SEQ ID NO: 533408 - DNA, 75 bp, synthetic construct
  source 1..75: mol_type = other DNA
aaagtcactgggcatggctttaggcatactctatcaacagtacttcatgaaaaaggttatgatagcgtgtggata

SEQ ID NO: 533409 - DNA, 75 bp, synthetic construct
  source 1..75: mol_type = other DNA
catcgaattacgtgcggcattgtggcaagaatttgatctggataacgctatctgggaaattcctgctgaaaggat

SEQ ID NO: 533410 - DNA, 75 bp, synthetic construct
  source 1..75: mol_type = other DNA
aagcttgtccagatagcaacgaaattactgatgattacgggcgtgagaaccatcgaattacgcgcggcattatgg

SEQ ID NO: 533411 - DNA, 75 bp, synthetic construct
  source 1..75: mol_type = other DNA
tttggtccggcggtggctgacacagagtttccgttttggtccggcggtggctcgtatggcaaatctgcttctgca

SEQ ID NO: 533412 - DNA, 75 bp, synthetic construct
  source 1..75: mol_type = other DNA
atctcgcttggtgtgtatccgacgattacacttgcagatgcccgttcccgtcgtgatgatgcccgaaaactggtc

SEQ ID NO: 533413 - DNA, 75 bp, synthetic construct
  source 1..75: mol_type = other DNA
gtcgcgctaagcctgaagagaaaccctatacgcttggggatggtcaaggcttgtcattacttatagaacctaatg

SEQ ID NO: 533414 - DNA, 75 bp, synthetic construct
  source 1..75: mol_type = other DNA
gttctacgtcatcggcgacatgctcaatggccgtgaggtcagccgtcccgggctttatcagattgtggcccgcct

SEQ ID NO: 533415 - DNA, 75 bp, synthetic construct
  source 1..75: mol_type = other DNA
gtgatgtatgcgctttatttctcctgcgaggaaatgatcgcaccgctgaccgatatcagctcgctggacgacttc

SEQ ID NO: 533416 - DNA, 75 bp, synthetic construct
  source 1..75: mol_type = other DNA
ccagcagtatggcagttcgatgcagaaggaatatgcttcgagggcagcgacgacggaaaaccgtaagcggctcgc

SEQ ID NO: 533417 - DNA, 75 bp, synthetic construct
  source 1..75: mol_type = other DNA
ttgaaaaggcggttaacggttacaccgaaacgcaggccgacagcggagccgtgatgtacgccctttatttctcat

SEQ ID NO: 533418 - DNA, 75 bp, synthetic construct
  source 1..75: mol_type = other DNA
atgattacggaaaccgaacaggcatatatcgcccgcatccgtgagtatttcgggaatgaactggtgtctgttgac

SEQ ID NO: 533419 - DNA, 75 bp, synthetic construct
  source 1..75: mol_type = other DNA
gtgatgtacgccctgtatttctcatgcgaggaaatgatcgacccgctgacggatatcagctcgctggatgatttc

SEQ ID NO: 533420 - DNA, 75 bp, synthetic construct
  source 1..75: mol_type = other DNA
aatgcagcactacaaagtcttcaggctccaggtgtatcaataattacaaaagaagacattgataagaaacttcca

SEQ ID NO: 533421 - DNA, 75 bp, synthetic construct
  source 1..75: mol_type = other DNA
acttctcgatctatcgtcagggaggaacatcgacagatgcctcagaacgcattgattatcgggtaaaaatgtata

SEQ ID NO: 533422 - DNA, 75 bp, synthetic construct
  source 1..75: mol_type = other DNA
accaacatcaaccttaaacgtgtccgcccggtggtgcttccaggcatccgttacgctgtgatgtgtgttcccaca

SEQ ID NO: 533423 - DNA, 75 bp, synthetic construct
  source 1..75: mol_type = other DNA
ggcattgtcacttcgctgttggtctggctgctcgcctggcgtaacggcatcgacacctttcggttgattattatc

SEQ ID NO: 533424 - DNA, 75 bp, synthetic construct
  source 1..75: mol_type = other DNA
atgatcaccgtctctcgccgattatttatcacctgtctgctgttgataactgcctgtattgtggtgggcatctgg

SEQ ID NO: 533425 - DNA, 75 bp, synthetic construct
  source 1..75: mol_type = other DNA
accgctcgctgggggctgacccaggcggcgctgtgcggggcgctgttactgctggcggccgatctctgcgcccaa

SEQ ID NO: 533426 - DNA, 75 bp, synthetic construct
  source 1..75: mol_type = other DNA
ttttatgcctgtttgacatggccgcgagtgttcaggcggcacctaatgtgacggctgaagttacttatgatttgg

SEQ ID NO: 533427 - DNA, 75 bp, synthetic construct
  source 1..75: mol_type = other DNA
ctggtcagtcccgttctcggtcattctggtgatccctctggggcttcttggcgcggcgctggcggcctggatgcg

SEQ ID NO: 533428 - DNA, 75 bp, synthetic construct
  source 1..75: mol_type = other DNA
ggctattccctgagtcgtgcggcattacgcgcggcgcagacccgtttacgtccaatcatcatgacctcgctggcg

SEQ ID NO: 533429 - DNA, 75 bp, synthetic construct
  source 1..75: mol_type = other DNA
tgcatccaacagggagcgttaatggcagcaactacgcgcaagatctgaccatgttggacatgtgcttgtacgatg

SEQ ID NO: 533430 - DNA, 75 bp, synthetic construct
  source 1..75: mol_type = other DNA
tattactgcatgggggatgatcatgtccaatatcttgctcaggcaaagccagtgacactttatcttgaacaagca

SEQ ID NO: 533431 - DNA, 75 bp, synthetic construct
  source 1..75: mol_type = other DNA
tgtgcgcaataatgaaaatatggtctggaacagcattaacctgaaacgtgtgcgtccggtggtactgcccggtat

SEQ ID NO: 533432 - DNA, 75 bp, synthetic construct
  source 1..75: mol_type = other DNA
cgctcaacggcctgacatggacaaaaaccttgccttccgcgccaatcattatattgatgttaattgccgccgcct

SEQ ID NO: 533433 - DNA, 75 bp, synthetic construct
  source 1..75: mol_type = other DNA
ggagtatctggcggcgtggggggcactgaagggcatcatccgcagggcagcagtggcggccacctgtgaggcggt

SEQ ID NO: 533434 - DNA, 75 bp, synthetic construct
  source 1..75: mol_type = other DNA
atgccgtttgaacgccccggattaagtgagctgcgggagaaaagccggtcgtatgtgaccggtcagctggatgag

SEQ ID NO: 533435 - DNA, 75 bp, synthetic construct
  source 1..75: mol_type = other DNA
ctgacggtggcggaccatatccggcagtaccagccggtcacagcggtggtgtacgtgatgtcgccggtggccaga

SEQ ID NO: 533436 - DNA, 75 bp, synthetic construct
  source 1..75: mol_type = other DNA
gatctgaatctgtcagctctgcgagtggtccgtgtacttgacaggatcgcggcaaaccgcggttatccggtcatg

SEQ ID NO: 533437 - DNA, 75 bp, synthetic construct
  source 1..75: mol_type = other DNA
agatatgaaattagttgagccaacagccaggtacgaaattaaaggagctacagatagctcagccgatcatgaagt

SEQ ID NO: 533438 - DNA, 75 bp, synthetic construct
  source 1..75: mol_type = other DNA
ccagcgcgtgctgtatgcgtaccagaacccgcctcagggcggggcggcggcggactatgtgcagtgggcgctgga

SEQ ID NO: 533439 - DNA, 75 bp, synthetic construct
  source 1..75: mol_type = other DNA
atgccatatcaacttccggttggcgttgtcactgtcagcctcggcggtatttaccttatcgtcttgttaattcag

SEQ ID NO: 533440 - DNA, 75 bp, synthetic construct
  source 1..75: mol_type = other DNA
agatctctgcgctcagcaactgtttatgccatatcaacttccggttggcgttgtcactgtcagcctcggcggtat

SEQ ID NO: 533441 - DNA, 75 bp, synthetic construct
  source 1..75: mol_type = other DNA
gcgctgggtgtcagcgtcgaacgctcgcgtctgttaatgatgctggtcgccgtagtacttaccgctgcggcaact

SEQ ID NO: 533442 - DNA, 75 bp, synthetic construct
  source 1..75: mol_type = other DNA
gaccgttaccggaacgccggggaaaacactgtcaaaaggggcggtgttaaaccgtgatgatggttaccagtacac

SEQ ID NO: 533443 - DNA, 75 bp, synthetic construct
  source 1..75: mol_type = other DNA
gttgccggtacttcaggttatatccttgtgtcgccttctgcgaatattgagccgggagttggggagctggctgtt

SEQ ID NO: 533444 - DNA, 75 bp, synthetic construct
  source 1..75: mol_type = other DNA
gctgatggatgatgctccccgcagtatgacaatggtcgtcaccgaatggcgcttaccgcgcgtgctgatggcgct

SEQ ID NO: 533445 - DNA, 75 bp, synthetic construct
  source 1..75: mol_type = other DNA
tgatggtctggggcatagcaatggctttacgtttgaattaatggcaagtggtgctactgaccgtgaaaccttact

SEQ ID NO: 533446 - DNA, 75 bp, synthetic construct
  source 1..75: mol_type = other DNA
gaggtctgcttccgcagcgaagacatccgaaacgaacgcgaaagcgtcggaaacccgtgcagaatcctcaaaaac

SEQ ID NO: 533447 - DNA, 75 bp, synthetic construct
  source 1..75: mol_type = other DNA
ataagcgatacgaatattgttctctcagaaccttataccggcgaaactcagtctgaggttccgtgccgaatcatt

SEQ ID NO: 533448 - DNA, 75 bp, synthetic construct
  source 1..75: mol_type = other DNA
gcgaaaacgtctgaaacgaatgctgcagcgtcacaaaaatctgcagccacttctgcatccaccgcgaccacgaag

SEQ ID NO: 533449 - DNA, 75 bp, synthetic construct
  source 1..75: mol_type = other DNA
ctggcgtcgttcttataatactagaaacaaaccaacagcttctgatgtaggagcattatcgctttctggaggagc

SEQ ID NO: 533450 - DNA, 75 bp, synthetic construct
  source 1..75: mol_type = other DNA
tatattcttgccaacttttatactggtgtaggtagttgccgtacgcttcaaattaaggctaactataaaaatggt

SEQ ID NO: 533451 - DNA, 75 bp, synthetic construct
  source 1..75: mol_type = other DNA
gaactcttcagctgtttcgacgtcatccgcttcggcgatagtccgtcaagaacacgccgatcgccatttcattct

SEQ ID NO: 533452 - DNA, 75 bp, synthetic construct
  source 1..75: mol_type = other DNA
agccaaagcatcagagactaacgcttcatcgagtgcaaacgcggcggcatcatcggcaacagaagctgcaaattc

SEQ ID NO: 533453 - DNA, 75 bp, synthetic construct
  source 1..75: mol_type = other DNA
atgttgccgctttcgcaagaagagcaacagggtcatatgctgatgctgatggtggcgtgccgtggaatgctgaat

SEQ ID NO: 533454 - DNA, 75 bp, synthetic construct
  source 1..75: mol_type = other DNA
gctatagtggcaacctggatattgttgctgaaacactggttgtcaaatcaggcggtagtggagggtttgctatat

SEQ ID NO: 533455 - DNA, 75 bp, synthetic construct
  source 1..75: mol_type = other DNA
gattacaattaataataccagcggtgttgtgtctattggtaatggactaaatgttactggtggcgtaaatggtag

SEQ ID NO: 533456 - DNA, 75 bp, synthetic construct
  source 1..75: mol_type = other DNA
accacttaattctccaaaaggggttaaggggaattctgatacagctacgaaacttcagactgcaagaaaaatatc

SEQ ID NO: 533457 - DNA, 75 bp, synthetic construct
  source 1..75: mol_type = other DNA
caatgcggcttcctctaaggcggcagctgctgaatctgcaagttctgcgtctgcatcagccacctcagcatccgc

SEQ ID NO: 533458 - DNA, 75 bp, synthetic construct
  source 1..75: mol_type = other DNA
ccggaagcgcaactgaaagttgtggaagatgagatcgacagaataattgataatcctctgttgggaacgcaaaag

SEQ ID NO: 533459 - DNA, 75 bp, synthetic construct
  source 1..75: mol_type = other DNA
aaagcaactttctgctgattgctgccgtttatgacaccactgacaaagcgaccagttcagatattgccgactggc

SEQ ID NO: 533460 - DNA, 75 bp, synthetic construct
  source 1..75: mol_type = other DNA
tcctgcaaaacctgcgtgccacactgattccggcgttagctgtccccgtcgttttgctgggcacattcggcgttc

SEQ ID NO: 533461 - DNA, 75 bp, synthetic construct
  source 1..75: mol_type = other DNA
atcgtgaaaagccagtcagacagcgcagttgttcgtataaaagatgtggctcgcgttgagatgggcagtgaagat

SEQ ID NO: 533462 - DNA, 75 bp, synthetic construct
  source 1..75: mol_type = other DNA
atgccattgtggtggtggagaacgtcgaacgtattatgcgtgacgaaggactgcctgcgcgtgaagcaacggaaa

SEQ ID NO: 533463 - DNA, 75 bp, synthetic construct
  source 1..75: mol_type = other DNA
atgttttcgcgtttttttgttcgcagacccgtctttgcctgggttatcgccattttgattatgttggcggggatt

SEQ ID NO: 533464 - DNA, 75 bp, synthetic construct
  source 1..75: mol_type = other DNA
ctgggcacaatccgtgatgccacggtatttgcgatgacgccgccagccgttgatggactggggcaaagcaacggc

SEQ ID NO: 533465 - DNA, 75 bp, synthetic construct
  source 1..75: mol_type = other DNA
ttgcccgcctgcagcgcaaagccgaacttaacccacagcgtgctgaaggtttctatggcggcggcgcggaaggct

SEQ ID NO: 533466 - DNA, 75 bp, synthetic construct
  source 1..75: mol_type = other DNA
gactggattgcgaacccggatctggtcgcccgcttgcagcgcagagctgagcttaacccacagcgtgccgaaagt

SEQ ID NO: 533467 - DNA, 75 bp, synthetic construct
  source 1..75: mol_type = other DNA
tgacgcagaagatttgctcggtgttgttcacgttatcgacctgctacaacagtctctgcgcggcgaaccgctcaa

SEQ ID NO: 533468 - DNA, 75 bp, synthetic construct
  source 1..75: mol_type = other DNA
ccagatactgcacaggttcaggtgcagaataaaattcagcaggcggagtcgcgcctacccagcgaagtgcagcaa

SEQ ID NO: 533469 - DNA, 75 bp, synthetic construct
  source 1..75: mol_type = other DNA
tcaggcaccggtagcgccttctgcacttagcgcgggaacgcgtacttctctgcgcgatgaaaaaggtcaggcgat

SEQ ID NO: 533470 - DNA, 75 bp, synthetic construct
  source 1..75: mol_type = other DNA
aggttgaaatggcactgaatctgttgattaatcgttatcagatgaaacatgcaggcaaaccggagagacagccat

SEQ ID NO: 533471 - DNA, 75 bp, synthetic construct
  source 1..75: mol_type = other DNA
cttacagcagctggctgagcgcctgaaccgtctggatgaacagcggggaaaatacatgacggtcagtgaactgaa

SEQ ID NO: 533472 - DNA, 75 bp, synthetic construct
  source 1..75: mol_type = other DNA
tgtatgttgtttctgaaacaaaagcagagagcggaacagaaaacacacattcccttcagaaatccccgcccacgt

SEQ ID NO: 533473 - DNA, 75 bp, synthetic construct
  source 1..75: mol_type = other DNA
cagcagcaaaaacaggctgaaatggcactgaatcagctgattaatcgttatcaggtgaaacacgctggcaaaccg

SEQ ID NO: 533474 - DNA, 75 bp, synthetic construct
  source 1..75: mol_type = other DNA
aacagcggggaaaatacatgacggtcagtgaactgaaaacggaggtgtttggcatcatgcaggcttttaaccggc

SEQ ID NO: 533475 - DNA, 75 bp, synthetic construct
  source 1..75: mol_type = other DNA
agtgatgtggccgctgaatacccacgcccggctggaaattattaccggtctgttcaaccatctgcaaaaaacgct

SEQ ID NO: 533476 - DNA, 75 bp, synthetic construct
  source 1..75: mol_type = other DNA
tctcagcagaaactggcgcaggatgctctgatggaacagttgaaccgctactggcttctgagacatggagatgct

SEQ ID NO: 533477 - DNA, 75 bp, synthetic construct
  source 1..75: mol_type = other DNA
aacggaggtgtttggcatcatgcaggcttttaaccggcacataccggcagaagagcagttacgtcgctatgatga

SEQ ID NO: 533478 - DNA, 75 bp, synthetic construct
  source 1..75: mol_type = other DNA
tgatgctccggatgtgcaggaacatcagcccctgccgcactcccgtctggtgtatgttgtttctgaaacaaaaac

SEQ ID NO: 533479 - DNA, 75 bp, synthetic construct
  source 1..75: mol_type = other DNA
ggaaacgctctgcctgcgtctgtatgaacacaatggcgtggaattacagacggcatcctggtacaccatcgcccg

SEQ ID NO: 533480 - DNA, 75 bp, synthetic construct
  source 1..75: mol_type = other DNA
cggaaaccatggtgaagggatatatcacccgtctggaaaatcagccggtgcagggcgaagcgtcgtctccggtaa

SEQ ID NO: 533481 - DNA, 75 bp, synthetic construct
  source 1..75: mol_type = other DNA
cggaagccatggtgaagggatatatcacccgcctggagaaccagcctgtgcagggggaagtatcgtctccggtaa

SEQ ID NO: 533482 - DNA, 75 bp, synthetic construct
  source 1..75: mol_type = other DNA
gtcagcgtggccattccgggatggcagtttctgacacagccatcaccggcggagcagcaactcagggcgctgctg

SEQ ID NO: 533483 - DNA, 75 bp, synthetic construct
  source 1..75: mol_type = other DNA
tggtttgaaagaaaaactactggcagcgcatcgcggcgggattaaaacagtgttaattccgttcgaaaataaacg

SEQ ID NO: 533484 - DNA, 75 bp, synthetic construct
  source 1..75: mol_type = other DNA
tggtctggagcgtgaaatctccaaactgtgtcgcaaagcggttaagcagttactgctcgataagtcattaaaaca

SEQ ID NO: 533485 - DNA, 75 bp, synthetic construct
  source 1..75: mol_type = other DNA
tgctgctggtggctcaattgctaaggttgccgcacaattcaacgttgctaagtcaactgtgcagcgtattaagac

SEQ ID NO: 533486 - DNA, 75 bp, synthetic construct
  source 1..75: mol_type = other DNA
cggttcaaagccgtgtcaacaaaatcaagggaccgatcctctgcctggtagggccgccgggggtaggtaaaacct

SEQ ID NO: 533487 - DNA, 75 bp, synthetic construct
  source 1..75: mol_type = other DNA
ttgaaatccccgtattgccgctgcgcgatgtggtagtttatccgcacatggtcatccccttatttgtcgggcggg

SEQ ID NO: 533488 - DNA, 75 bp, synthetic construct
  source 1..75: mol_type = other DNA
tgttaattccgttcgaaaataaacgcgatctggaagagattcctgacaacgtaattgccgatctggacattcatc

SEQ ID NO: 533489 - DNA, 75 bp, synthetic construct
  source 1..75: mol_type = other DNA
aagaaccctcgcctgaagaactggctatgcagcgtcgcctgggcggcgagttggcacagactaatgaggcggcca

SEQ ID NO: 533490 - DNA, 75 bp, synthetic construct
  source 1..75: mol_type = other DNA
ggatggcagtttctgacacagccatcactggcagagcagcaactcagggcgcttctgacaccaccaccggatgtg

SEQ ID NO: 533491 - DNA, 75 bp, synthetic construct
  source 1..75: mol_type = other DNA
caaaaacgctccgggccatgcctccggataaccgtgacaacctgcccctgctgtatcagaccgaaacattcctga

SEQ ID NO: 533492 - DNA, 75 bp, synthetic construct
  source 1..75: mol_type = other DNA
atgtttgttgctgaaggggtaatggaagataaggacaacaaaggatgtgttaaaggttgggctgtggtaagaaac

SEQ ID NO: 533493 - DNA, 75 bp, synthetic construct
  source 1..75: mol_type = other DNA
atgtttgtttctgaagtgttaatggaagataaggacaacaaaggatgggttaaaggttgggctgtggtaagaagc

SEQ ID NO: 533494 - DNA, 75 bp, synthetic construct
  source 1..75: mol_type = other DNA
ctcttgatcgccattcgtttttgggaaatgggctgagtactgaaggtactatggggaaaatggtgattcagatac

SEQ ID NO: 533495 - DNA, 75 bp, synthetic construct
  source 1..75: mol_type = other DNA
aaacagagcagtaaagtggctttaccggaagccatggtgaagggatatatcacccgtctggagaatcagcctgtg

SEQ ID NO: 533496 - DNA, 75 bp, synthetic construct
  source 1..75: mol_type = other DNA
cgccactaaaggttatcccccgtcggtgtttgccaaattaccggcactggtcgagcgtgccggaaatggcattag

SEQ ID NO: 533497 - DNA, 75 bp, synthetic construct
  source 1..75: mol_type = other DNA
gcaatcctcgacggtcacattgtgctgtctcgccgactggcggaagccgggcactatccggctatcgatattgaa

SEQ ID NO: 533498 - DNA, 75 bp, synthetic construct
  source 1..75: mol_type = other DNA
tgccctgcttaccgttgggcgtgggcagcgtatggggctgtttgccgggtccggcgttggtaaaagtgtgctgct

SEQ ID NO: 533499 - DNA, 75 bp, synthetic construct
  source 1..75: mol_type = other DNA
gtctgccacgaaattacaaacggcaagaaccattggtggcgtttcatttaatggtaccgcaaacatcgacctgcc

SEQ ID NO: 533500 - DNA, 75 bp, synthetic construct
  source 1..75: mol_type = other DNA
aaggatacggtagcgcagactgatttaacgtcagtcggtcgcgatattctggctaaaacaagcacactagccgtt

SEQ ID NO: 533501 - DNA, 75 bp, synthetic construct
  source 1..75: mol_type = other DNA
tcgagcgtgccggtaacggtatcagcggcggcggctcaattacggcgttttataccgtgctcaccgaaggtgatg

SEQ ID NO: 533502 - DNA, 75 bp, synthetic construct
  source 1..75: mol_type = other DNA
tggggcgtgggggcaaagaggtcgtggtttttgttgatcctcgctgcaccgtctgccacaagctcatggacgaat

SEQ ID NO: 533503 - DNA, 75 bp, synthetic construct
  source 1..75: mol_type = other DNA
caccgaggaggtggcgcttgcggccatgcgcgctcacgctgccggtgagtctgtggatacccgcctgctgacgga

SEQ ID NO: 533504 - DNA, 75 bp, synthetic construct
  source 1..75: mol_type = other DNA
tttatgcgggtatcgaatggaaagctgactctgccgacgctgagaaagtgattaaattcctgcgtgaagagatgg

SEQ ID NO: 533505 - DNA, 75 bp, synthetic construct
  source 1..75: mol_type = other DNA
aagccctggacgatgtgacatccggacaggttatcgaccatcaggctgtacaggcctgggcggacagcctcagta

SEQ ID NO: 533506 - DNA, 75 bp, synthetic construct
  source 1..75: mol_type = other DNA
gtaaacccaggctctattattctctccgctgagatgatgttacgccatatgggttgggtagaagcagctgacctg

SEQ ID NO: 533507 - DNA, 75 bp, synthetic construct
  source 1..75: mol_type = other DNA
cgcccgctatcggaaggatggtgttgtccaccggctttctgaccgtaaccgacaccccacaggttctggatactg

SEQ ID NO: 533508 - DNA, 75 bp, synthetic construct
  source 1..75: mol_type = other DNA
caggatgcggcattattccactggctggcgcagttattgaggtatttaataacggcagtagctcaaacaattata

SEQ ID NO: 533509 - DNA, 75 bp, synthetic construct
  source 1..75: mol_type = other DNA
atcattcagggagccaccctgacgtttcagcttatgaagtacgctgtgcacaagaaatgtcgctttcaccggtcc

SEQ ID NO: 533510 - DNA, 75 bp, synthetic construct
  source 1..75: mol_type = other DNA
catttgatggctcggccaatatcaaccttccaggtgtaaatacaacaggtaaccagaacaccaccgggaatgctg

SEQ ID NO: 533511 - DNA, 75 bp, synthetic construct
  source 1..75: mol_type = other DNA
ctgcaacacgagatgttggagcagataatgcctcgaagttactggatttagacagcttcaggtcaatgatgtcag

SEQ ID NO: 533512 - DNA, 75 bp, synthetic construct
  source 1..75: mol_type = other DNA
aaacaaaaacagagcccacactcttccttcaaaaatccccgctcacgtttctgaaaacgtttgttacaggtgtct

SEQ ID NO: 533513 - DNA, 75 bp, synthetic construct
  source 1..75: mol_type = other DNA
taaactgtgtaataaatattcattaaatgatgcttcttattacaatccggaatcaattaaaaacattgatgttgc

SEQ ID NO: 533514 - DNA, 75 bp, synthetic construct
  source 1..75: mol_type = other DNA
ttcccgcccggagacagtgatgaccgtcagtaaccgggaacggatgtgtgaatggttcagtcaggtctggcttcc

SEQ ID NO: 533515 - DNA, 75 bp, synthetic construct
  source 1..75: mol_type = other DNA
taaagggaatcaggacacctctggtaatgcggctacagcgaccaaattgcagatagcacgtaccattaacggtgt

SEQ ID NO: 533516 - DNA, 75 bp, synthetic construct
  source 1..75: mol_type = other DNA
ttaaggaagctataactgcacttatcaacggtgcgcctggcacactggatacgctgaaagaaatagcggctgcga

SEQ ID NO: 533517 - DNA, 75 bp, synthetic construct
  source 1..75: mol_type = other DNA
acagccagaaacattaatggcgtcaggttcgatggttctggtgacattaatatcaatactctggtatcgcgcggt

SEQ ID NO: 533518 - DNA, 75 bp, synthetic construct
  source 1..75: mol_type = other DNA
tggtctgttctaccgttcttcaagagacggttatggttttgaagaagactgggcagaagtttatacctcgaaaaa

SEQ ID NO: 533519 - DNA, 75 bp, synthetic construct
  source 1..75: mol_type = other DNA
agtagatggcgatgatgaagccatcttcagaccaatacaaaaatacatcaatggcacatggtataacgtagcaca

SEQ ID NO: 533520 - DNA, 75 bp, synthetic construct
  source 1..75: mol_type = other DNA
agtgcacgccagacttttaacggcgggatcaccggggcgctgacagggaacgccgacaccgcgacgaaattaaaa

SEQ ID NO: 533521 - DNA, 75 bp, synthetic construct
  source 1..75: mol_type = other DNA
tgttctgaagaaggcaccaaacgtctggtccgtgccgcgattgaatacgcaattgccaacgaccgtgactctgtg

SEQ ID NO: 533522 - DNA, 75 bp, synthetic construct
  source 1..75: mol_type = other DNA
tcaatgccaagactgtaacctatgacttcgaacgtctgatggaaggcgctaatctgctgaaatgttcagagtttg

SEQ ID NO: 533523 - DNA, 75 bp, synthetic construct
  source 1..75: mol_type = other DNA
cgtactggctgcgccgtgaaaaagaaggcgatgtgaatatcactgagccaccgaagtcccgcacacctaaaaccg

SEQ ID NO: 533524 - DNA, 75 bp, synthetic construct
  source 1..75: mol_type = other DNA
ccgctgagatgatgctgcgccacatgggttggacggaagcggctgacataattgttaaaggtatggaaggcgcaa

SEQ ID NO: 533525 - DNA, 75 bp, synthetic construct
  source 1..75: mol_type = other DNA
ccgctgagatgatgctgcgccatatgggttggacggaagcggctgacttcattgttaaaggtatggaaggcgcaa

SEQ ID NO: 533526 - DNA, 75 bp, synthetic construct
  source 1..75: mol_type = other DNA
ccgctgagatgatgctgcgccaaatgggttggacggaagcggctgacatcattgttaaaggtatggaaggcgcaa

SEQ ID NO: 533527 - DNA, 75 bp, synthetic construct
  source 1..75: mol_type = other DNA
atgataaagaaaaaaggatttaccttactggaagtgactattgttttaggtattggaacacttatcgcttttatg

SEQ ID NO: 533528 - DNA, 75 bp, synthetic construct
  source 1..75: mol_type = other DNA
ttaaagcttacatgaacaatgcgggtaatatctatgcgtcaggtaatctaactgctggaacaataaaatccaacg

SEQ ID NO: 533529 - DNA, 75 bp, synthetic construct
  source 1..75: mol_type = other DNA
tatttttataacaataaccgatcaagtatctggatataagtgtgtaataccaaatagtgatacagggacatgtgc

SEQ ID NO: 533530 - DNA, 75 bp, synthetic construct
  source 1..75: mol_type = other DNA
tgtaaatatcaacaacaacctgaaggtaaaatccgatacctatctgaacacgctatcaacaacaggtctggcgaa

SEQ ID NO: 533531 - DNA, 75 bp, synthetic construct
  source 1..75: mol_type = other DNA
aggtatggttttttatctggaactttaatcgctgaatatgatgaacaacgttgtagtggtagtaagaacgagcat

SEQ ID NO: 533532 - DNA, 75 bp, synthetic construct
  source 1..75: mol_type = other DNA
gtttggtagccgtattgcgacgaacggacttaatccaaacgatttgcctgctggctgggctggtggtgttcgcac

SEQ ID NO: 533533 - DNA, 75 bp, synthetic construct
  source 1..75: mol_type = other DNA
ccgctgagatgatgctgcgccacatgggttggacggaagcggctgacctcattgttaaaggtatggaaggcgcaa

SEQ ID NO: 533534 - DNA, 75 bp, synthetic construct
  source 1..75: mol_type = other DNA
cttcgaacgtctgatggaaggcgctaaactgctgaaatgttcagagtttggtgaagcgatcatcgaaaacatgta

SEQ ID NO: 533535 - DNA, 75 bp, synthetic construct
  source 1..75: mol_type = other DNA
ccgctgagatgatgttacgccatatgggttggactgaagccgcagacctgattgttaaaggtatggaaggcgcaa

SEQ ID NO: 533536 - DNA, 75 bp, synthetic construct
  source 1..75: mol_type = other DNA
aacctatgacttcgaacgtctgatggagggcgctaaactgctgaaatgttcagagtttggtgaagcgatcatcga

SEQ ID NO: 533537 - DNA, 75 bp, synthetic construct
  source 1..75: mol_type = other DNA
gcagcacaggaaaaatatcctcatctgcaaatagacttcacatttcatgatctgaaagcaaaaggtatctctgat

SEQ ID NO: 533538 - DNA, 75 bp, synthetic construct
  source 1..75: mol_type = other DNA
attgttaaaggtatggaaggcgcgatcaacgccaagaccgtaacttacgattttgaacgtctgatggaaggtgct

SEQ ID NO: 533539 - DNA, 75 bp, synthetic construct
  source 1..75: mol_type = other DNA
ccgctgagatgatgctgcgccacatgggttggactgaagcggctgacttaattgttaaaggtatggaaggcgcga

SEQ ID NO: 533540 - DNA, 75 bp, synthetic construct
  source 1..75: mol_type = other DNA
aacctatgacttcgaacgtctgatggaaggcgctaaactgctgaaatgttcagagtttggtgaggcgatcatcga

SEQ ID NO: 533541 - DNA, 75 bp, synthetic construct
  source 1..75: mol_type = other DNA
ccgctgagatgatgctgcgccagatgggttggacggaagcggctgacgtcattgttaaaggtatggaaggcgcaa

SEQ ID NO: 533542 - DNA, 75 bp, synthetic construct
  source 1..75: mol_type = other DNA
ccgctgagatgatgctgcgccacatgggttggacggaagcggctgacgtgattgttaaaggtatggaaggcgcaa

SEQ ID NO: 533543 - DNA, 75 bp, synthetic construct
  source 1..75: mol_type = other DNA
aacctatgacttcgaacgtctgatggacggcgctaacctgctgaaatgttcagagtttggtgacgcgatcatcga

SEQ ID NO: 533544 - DNA, 75 bp, synthetic construct
  source 1..75: mol_type = other DNA
aacctatgacttcgaacgtctgatggatggcgctaaactgctgaaatgttcagagtttggtgatgcgatcatcga

SEQ ID NO: 533545 - DNA, 75 bp, synthetic construct
  source 1..75: mol_type = other DNA
aacctatgacttcgaacgtctgatggaaggcgctaagctgctgaaatgttcagagtttggtgaagcgatcatcga

SEQ ID NO: 533546 - DNA, 75 bp, synthetic construct
  source 1..75: mol_type = other DNA
atgataaagaaaaaaggattcaccttactggaagtcagtattgtgttgggtattggaacacttatcgcttttatg

SEQ ID NO: 533547 - DNA, 75 bp, synthetic construct
  source 1..75: mol_type = other DNA
ttcaacggacgacatgaaagaggcgattgcgcttagcgccacagggcagttgcagccgtcgtttatggtgaccca

SEQ ID NO: 533548 - DNA, 75 bp, synthetic construct
  source 1..75: mol_type = other DNA
atgaaaaccaaagttgctgctatttatggcaagcgggatgtccgtctgcgcgaatttgaactaccagaaattacc

SEQ ID NO: 533549 - DNA, 75 bp, synthetic construct
  source 1..75: mol_type = other DNA
taaaaacttcaaagtgccgtttaatttctacaacgtccattacaacagtacgcacgttgtcggcacgtccggcgg

SEQ ID NO: 533550 - DNA, 75 bp, synthetic construct
  source 1..75: mol_type = other DNA
gtttctgaccatgacgatgcgcccgtggctggcgaactttgagcagcagataaaaaatgctttgctggtggcctc

SEQ ID NO: 533551 - DNA, 75 bp, synthetic construct
  source 1..75: mol_type = other DNA
tcccgtgagtgggattatccctccagatcagtttattccgctggcagagtccaccggattaattgctccgataac

SEQ ID NO: 533552 - DNA, 75 bp, synthetic construct
  source 1..75: mol_type = other DNA
taaaaacttcaaagtgccgtttaatttctacaacgtccattacaacagcacgcacgtcgtcggtacatccggtgg

SEQ ID NO: 533553 - DNA, 75 bp, synthetic construct
  source 1..75: mol_type = other DNA
gtggagttcgactctgccgatcttcttcgagccactccaaccgaacgctacgcaacttatgagcgcggtatcaag

SEQ ID NO: 533554 - DNA, 75 bp, synthetic construct
  source 1..75: mol_type = other DNA
tatcgaaattaacggcgataacctgcatgactacctcggtgttcagcgtttcgactatggtcgcgcggataacga

SEQ ID NO: 533555 - DNA, 75 bp, synthetic construct
  source 1..75: mol_type = other DNA
gtatggaagtgattcgcctttctggttataccgaagatgaaaaactgaacatcgctaaacgtcacctgctgccga

SEQ ID NO: 533556 - DNA, 75 bp, synthetic construct
  source 1..75: mol_type = other DNA
tttattgatcatgtaaatgggaacagacttgacaataggatttcaaatctaagactggcaacagaagagcagaat

SEQ ID NO: 533557 - DNA, 75 bp, synthetic construct
  source 1..75: mol_type = other DNA
atggtcaagcattcgggtgagcattcagtggcgtctaatttttcgctggcgcgatggccatgcttacgacattta

SEQ ID NO: 533558 - DNA, 75 bp, synthetic construct
  source 1..75: mol_type = other DNA
ttcgacggaaattatcgatcattgctgctgcgagcagcgaaaaatccctgttcgcgccgccaggaaataactatg

SEQ ID NO: 533559 - DNA, 75 bp, synthetic construct
  source 1..75: mol_type = other DNA
ctttctgctgtcccgccgtcgtccatccaccccgatcgatatgctgaaaaatgcgcttgctcacggagagttcag

SEQ ID NO: 533560 - DNA, 75 bp, synthetic construct
  source 1..75: mol_type = other DNA
cctacttcaagtagaggaggtgatattatatttgatatagatggtaatacaagagtacagaccagattaggtaca

SEQ ID NO: 533561 - DNA, 75 bp, synthetic construct
  source 1..75: mol_type = other DNA
aaaaactaatgctgctgctacagttggaacaacattaaatgtagcaggcgtaactactttaagatctgatttaaa

SEQ ID NO: 533562 - DNA, 75 bp, synthetic construct
  source 1..75: mol_type = other DNA
ttaactctaattatattcattcaaatggtaatatagatgctaatggtcgaataaacgctggtgaatttgtttata

SEQ ID NO: 533563 - DNA, 75 bp, synthetic construct
  source 1..75: mol_type = other DNA
ttattgcagaatatgatgaacaacgttgtagtggtagtaagaatacacattgttatagtaattacagaaggttat

SEQ ID NO: 533564 - DNA, 75 bp, synthetic construct
  source 1..75: mol_type = other DNA
agcatcaaaaacatcaaagacattacggcatcagggacaacaacaaccggagcacttaagacaacgggtaatgcg

SEQ ID NO: 533565 - DNA, 75 bp, synthetic construct
  source 1..75: mol_type = other DNA
ctcgtataaaatcatattaaaacgagatggaacttcacctaactatgttattaatggtcttataacgacatcgac

SEQ ID NO: 533566 - DNA, 75 bp, synthetic construct
  source 1..75: mol_type = other DNA
ctttctgaaggggaaatcacgctgttgtggtgagcgtattcccgtttactacccgctggtcgaaataacgaactc

SEQ ID NO: 533567 - DNA, 75 bp, synthetic construct
  source 1..75: mol_type = other DNA
atgatccctgttgccatcttcggtagaatactcacagcctttctgctgtcccgccgtcgtccatcttccccgctc

SEQ ID NO: 533568 - DNA, 75 bp, synthetic construct
  source 1..75: mol_type = other DNA
ccgccgtcgtccatcttccccgctcgatatgctgaaaaatgcacttgctcacggagagttcagaccttattttca

SEQ ID NO: 533569 - DNA, 75 bp, synthetic construct
  source 1..75: mol_type = other DNA
aatgaggggctattaccttctacatttataggtgtcaatgcaaacaaatcttcctataagatcttgttaaggcgt

SEQ ID NO: 533570 - DNA, 75 bp, synthetic construct
  source 1..75: mol_type = other DNA
tcagtatttcacatatggaagaaggtgatatcagagttcttcaggtgctttcatcaacaaccaattatctaactt

SEQ ID NO: 533571 - DNA, 75 bp, synthetic construct
  source 1..75: mol_type = other DNA
agctgcggcattgggagcatggatgggatggcaggcattaccctccgtgcttctgttcgcctcagtcagcgggtt

SEQ ID NO: 533572 - DNA, 75 bp, synthetic construct
  source 1..75: mol_type = other DNA
aaaaaacaggcatgaaagctctgttatctgcccagtcacagctcggcgttaaaccgcgcattctcggcgtgccag

SEQ ID NO: 533573 - DNA, 75 bp, synthetic construct
  source 1..75: mol_type = other DNA
ggcctgatttcatcaactttgacaccgtgctaaaagccgatgcgacggcttacgcctctgcacgtgcgctcggtt

SEQ ID NO: 533574 - DNA, 75 bp, synthetic construct
  source 1..75: mol_type = other DNA
ttcgtgttcgtaactcacgaccaggaagaagcacttaccatgtcggacaggatcgtggtgatgcgcgatggtcgc

SEQ ID NO: 533575 - DNA, 75 bp, synthetic construct
  source 1..75: mol_type = other DNA
accatttctaacatcatcggcggcacggatgagaacggtaaatacaccggtatcaaggcgctgttgactgccgaa

SEQ ID NO: 533576 - DNA, 75 bp, synthetic construct
  source 1..75: mol_type = other DNA
ggcaccgatgctgacctgttgaacgagtcaggtgtcacaacgctgattcgccgtgacggtttccgcttctggggt

SEQ ID NO: 533577 - DNA, 75 bp, synthetic construct
  source 1..75: mol_type = other DNA
atggctgaggcgcacatgtgggcggtggataagcccatcaccgcaacgctgattcgcgacatcgttgacgcatta

SEQ ID NO: 533578 - DNA, 75 bp, synthetic construct
  source 1..75: mol_type = other DNA
agacgcggaagcgcagaccatttcaaatatcatcggcggcacggatgagaacggtaaatacaccggtatcaaggc

SEQ ID NO: 533579 - DNA, 75 bp, synthetic construct
  source 1..75: mol_type = other DNA
ctgggtgatgaacctgacctactcgcacacactggtgcccagcgggctggagaatggcgtgttaaagctgttgat

SEQ ID NO: 533580 - DNA, 75 bp, synthetic construct
  source 1..75: mol_type = other DNA
gcaggacccggcaactgatgcaggtctgctgaaccagaacgacgtcaccacgcttgtgcgtaaagacggtttccg

SEQ ID NO: 533581 - DNA, 75 bp, synthetic construct
  source 1..75: mol_type = other DNA
atgtggcctttgggttgcgcatgcaaaaaacccccgctgctgaaattacgccccgcgtgatggaagccctgcgga

SEQ ID NO: 533582 - DNA, 75 bp, synthetic construct
  source 1..75: mol_type = other DNA
tgctttgatggtaaagaggtcattccccagctggatctgactatcaacaatggcgagttcctcacgctgcttggc

SEQ ID NO: 533583 - DNA, 75 bp, synthetic construct
  source 1..75: mol_type = other DNA
ggtgctgaatgccgaagcaacggcttatgccaccgcccgtgcgcttggtctgcgcgccaaaattgacgagcagac

SEQ ID NO: 533584 - DNA, 75 bp, synthetic construct
  source 1..75: mol_type = other DNA
tcatctggcctgacttcctcgcatgggacaccaccactaacgccaccgcaacagcctacgccaccgctcgcgcgc

SEQ ID NO: 533585 - DNA, 75 bp, synthetic construct
  source 1..75: mol_type = other DNA
aggccggtaaaaaaggcacgctggcggcgtcgttacaggccatcgctgaccagtcaaaaccggtcaccgttgttg

SEQ ID NO: 533586 - DNA, 75 bp, synthetic construct
  source 1..75: mol_type = other DNA
ttctcggcgtgccgggactggacaccaaagaggtggctgttgcactggcatcagtctgtcagaagctgcgcgctt

SEQ ID NO: 533587 - DNA, 75 bp, synthetic construct
  source 1..75: mol_type = other DNA
gtacaccggactgaaagccctgctggcggcggagtcggtaaccggtgttaaaccgcgtattctcggtgtgccggg

SEQ ID NO: 533588 - DNA, 75 bp, synthetic construct
  source 1..75: mol_type = other DNA
gtgcaataagagataggtttgatctattgatgattttacgaaaaatcatcaataagcgtgatgctggtattatag

SEQ ID NO: 533589 - DNA, 75 bp, synthetic construct
  source 1..75: mol_type = other DNA
ctcctccgtggggatctgtctggctggatcgcgaatcggtgctgtttggcgattctactttggcgcttcgtcaat

SEQ ID NO: 533590 - DNA, 75 bp, synthetic construct
  source 1..75: mol_type = other DNA
tgatgaatcggctaatgatgcggcgaacctcaaagccgggaaactgtatatcgattacgactatacgccggttcc

SEQ ID NO: 533591 - DNA, 75 bp, synthetic construct
  source 1..75: mol_type = other DNA
aggccggtaaaaaaggcacgctggcggcgtcgttgcaggccatcgctgaccagtcaaaaccagtcaccgttgttg

SEQ ID NO: 533592 - DNA, 75 bp, synthetic construct
  source 1..75: mol_type = other DNA
ctacacccccgtcccgccgctggagaacctgaccctgcgccagcgcatcaccgatacctatctggcgaatctgtc

SEQ ID NO: 533593 - DNA, 75 bp, synthetic construct
  source 1..75: mol_type = other DNA
atcggcgcagtgactgctgaaggtaaaaaaacaggcatgaaaaccctgttatctgcccagtcacagctcggcgtt

SEQ ID NO: 533594 - DNA, 75 bp, synthetic construct
  source 1..75: mol_type = other DNA
tgcaggcgcgatgtacctgaagtctgaggatggtcaggactggtatgagtgtcaggcgttgttttcgccggagac

SEQ ID NO: 533595 - DNA, 75 bp, synthetic construct
  source 1..75: mol_type = other DNA
agtcgttattttcagcagagacgctgaaggtggtttataacagtgccggagtcattaccggcatcagcagggtgg

SEQ ID NO: 533596 - DNA, 75 bp, synthetic construct
  source 1..75: mol_type = other DNA
catggtgcgaatctctcctgttcttgttcgcttaccgcatttttgcgttgttttttcctagatgaggataatttc

SEQ ID NO: 533597 - DNA, 75 bp, synthetic construct
  source 1..75: mol_type = other DNA
aatcgaccaggagcagggctggcataaaacgctgtccaacgtcggggtgaacggtgttaccggcatcagtgcatc

SEQ ID NO: 533598 - DNA, 75 bp, synthetic construct
  source 1..75: mol_type = other DNA
gatcattttggttcactgctgttgatggctgcgtggttggcggagaatggtcgccagacagaatgcgaagaattg

SEQ ID NO: 533599 - DNA, 75 bp, synthetic construct
  source 1..75: mol_type = other DNA
atgaaaatcatcagtaaacgtcaggcaatggctttgtaccgacagcatccaggctctcggctgtttcgcttctgt

SEQ ID NO: 533600 - DNA, 75 bp, synthetic construct
  source 1..75: mol_type = other DNA
agttcctgacattcccggcgtgctggcggtatacgccgaacgccgccaggaccgctgcggaccgtatgccagcct

SEQ ID NO: 533601 - DNA, 75 bp, synthetic construct
  source 1..75: mol_type = other DNA
tattccaatactgatgctcaggatggtattccgctaacagaaactttcttgcctgaattattccagaatcatggt

SEQ ID NO: 533602 - DNA, 75 bp, synthetic construct
  source 1..75: mol_type = other DNA
ctctttacctccgataatggtgcggttatcgatggtcctctgccgctgaacggggcgcaaaaaggctataagagt

SEQ ID NO: 533603 - DNA, 75 bp, synthetic construct
  source 1..75: mol_type = other DNA
ctccgcacctgccaaatgataatcctgctccggagcaatatcagaagcaatttaataccggtagtcaaacagcag

SEQ ID NO: 533604 - DNA, 75 bp, synthetic construct
  source 1..75: mol_type = other DNA
tttacgcaaaggcgaaattcttggcgtctctggtttgatgggcgcaggtcgtaccgaactgatgaaagtgctcta

SEQ ID NO: 533605 - DNA, 75 bp, synthetic construct
  source 1..75: mol_type = other DNA
tacccgttcgccgcaggatggcctggcgaatggcattgtgtatatctctgaagaccgtaaacgcgacggtttagt

SEQ ID NO: 533606 - DNA, 75 bp, synthetic construct
  source 1..75: mol_type = other DNA
gaacatgtcgctgaccgcgctgcgctacttcagccgcgctggcggcagtttgaagcatgccgatgaacagcaggc

SEQ ID NO: 533607 - DNA, 75 bp, synthetic construct
  source 1..75: mol_type = other DNA
ctgaaagtcgataatctctgcggacctggcgttaacgatgtctcttttactttacgcaaaggcgaaattcttggc

SEQ ID NO: 533608 - DNA, 75 bp, synthetic construct
  source 1..75: mol_type = other DNA
accgaccgatgcgctaaccgataccgaaactgaatccctgttccgcgttatccgcgaactgaaatcgcaggggcg

SEQ ID NO: 533609 - DNA, 75 bp, synthetic construct
  source 1..75: mol_type = other DNA
tccaccaggaactgaatctgatcccgcaactgaccattgcggaaaatattttcctcggccgagagtttgtgaatc

SEQ ID NO: 533610 - DNA, 75 bp, synthetic construct
  source 1..75: mol_type = other DNA
ctggagcccggcgggcatgaccgcatggtgcagaccgtgcgcggtacaggatatcgtttttcaacccgcttttaa

SEQ ID NO: 533611 - DNA, 75 bp, synthetic construct
  source 1..75: mol_type = other DNA
tttctgcagatgtgttctgggatctgcaggaccaggcaaccgatgcaggtctgctgaaccagaatgacgtcacca

SEQ ID NO: 533612 - DNA, 75 bp, synthetic construct
  source 1..75: mol_type = other DNA
ccgcgtcatttccaccgtatccaccgccattgttggcatggtctgcacggccagcgatgcggatgcggaaacctt

SEQ ID NO: 533613 - DNA, 75 bp, synthetic construct
  source 1..75: mol_type = other DNA
ccgcgacggtttccgcttctggggtaaccgtacctgctctgatgatccgctgttcctctttgaaaactacacccg

SEQ ID NO: 533614 - DNA, 75 bp, synthetic construct
  source 1..75: mol_type = other DNA
cgtgaaaacttcagcgcccgtgagctcatgattatctggcctgatttcctcgggtgggacacgacggccaatgcg

SEQ ID NO: 533615 - DNA, 75 bp, synthetic construct
  source 1..75: mol_type = other DNA
atgcgcagacagaaagcgcggtgtcactgctgtggtgcacatgcagtcattgagaaaacagcctggaaaaccgat

SEQ ID NO: 533616 - DNA, 75 bp, synthetic construct
  source 1..75: mol_type = other DNA
cggatggcacaaaagcctgtccaacgttggcgttaacggtgtcaccggaatttctgctgatgtgttctgggatct

SEQ ID NO: 533617 - DNA, 75 bp, synthetic construct
  source 1..75: mol_type = other DNA
aattagcatggatgaaaataatcatattttagtcggaaaaccggctgtatcacggcggacttcgcatccggataa

SEQ ID NO: 533618 - DNA, 75 bp, synthetic construct
  source 1..75: mol_type = other DNA
atggaacaacgccacagttcaggcaaaagccactggtatcacgaaacgcaatccagcactgcagaacatgacgtt

SEQ ID NO: 533619 - DNA, 75 bp, synthetic construct
  source 1..75: mol_type = other DNA
gaatgaaccctggccggatttaattctcctcgactggatgttacccggcggctccggtatccagttcatcaaaca

SEQ ID NO: 533620 - DNA, 75 bp, synthetic construct
  source 1..75: mol_type = other DNA
tagcgaaagtatcgaggtagctatgagaaataataccacacacccgcaagggcgggactcgcacaacctgaataa

SEQ ID NO: 533621 - DNA, 75 bp, synthetic construct
  source 1..75: mol_type = other DNA
tcatcagctcaggttatcaatctgctggtatggagcggattttgtggttggataaatcgcttaaaaatcgcgttg

SEQ ID NO: 533622 - DNA, 75 bp, synthetic construct
  source 1..75: mol_type = other DNA
ctgcttaaccagaacgacgtcaccacccttatccgcaaggacggtttccgcttctggggttcccgctgtctgagt

SEQ ID NO: 533623 - DNA, 75 bp, synthetic construct
  source 1..75: mol_type = other DNA
agtttgattcctttaaagagtttgtactggccggtgcggtggattatctccagcccgatgccactcgctgcggtg

SEQ ID NO: 533624 - DNA, 75 bp, synthetic construct
  source 1..75: mol_type = other DNA
tgagaaatcataccacacacccgcaagggcggtactcgcacgacctgaataaatacatctggcgttttatcgccc

SEQ ID NO: 533625 - DNA, 75 bp, synthetic construct
  source 1..75: mol_type = other DNA
ttccccccgcgcccgtcttgccgctggcctgcgacccgccacgctacgtgaagtccgtaatacccgacgccgcat

SEQ ID NO: 533626 - DNA, 75 bp, synthetic construct
  source 1..75: mol_type = other DNA
gacgcagtctcttttttacttaatgaaataaaggccaatgctctggtgcctgaacaaatcatcgttgaatttact

SEQ ID NO: 533627 - DNA, 75 bp, synthetic construct
  source 1..75: mol_type = other DNA
gggaatgtcggcgtcggtattgctgacggcattggcctggtcgcccgggaagaaggttgtgctgatgactttatt

SEQ ID NO: 533628 - DNA, 75 bp, synthetic construct
  source 1..75: mol_type = other DNA
cgcagtattcacgctgaaagaagacggcctgcatttaatcgaaatcgcccctggcgtcgatttacaaaaagatat

SEQ ID NO: 533629 - DNA, 75 bp, synthetic construct
  source 1..75: mol_type = other DNA
aaaatttaaacatatctgatctaatcatccatagagtctacttacccggacagcaggctcattttgatgtggatc

SEQ ID NO: 533630 - DNA, 75 bp, synthetic construct
  source 1..75: mol_type = other DNA
gggcgatcagcgcatggttgtgtcgtttaccctggctcattattacgtgtgcagtaagccccggatatcaggtca

SEQ ID NO: 533631 - DNA, 75 bp, synthetic construct
  source 1..75: mol_type = other DNA
atcatcgaagaacagggtgcggaacttacgcttttcaaaactcaaccagtcaccggactggatttatctaacacc

SEQ ID NO: 533632 - DNA, 75 bp, synthetic construct
  source 1..75: mol_type = other DNA
agcgaacaggaagcgcgccagcaatccccggctggttgcgtgatggtattcgccgcccgtattcgccaggaggtg

SEQ ID NO: 533633 - DNA, 75 bp, synthetic construct
  source 1..75: mol_type = other DNA
taactttttattgttcataatggcctcctgcatagcaatgcgccgtagttcctcacaccacggcactgatagttt

SEQ ID NO: 533634 - DNA, 75 bp, synthetic construct
  source 1..75: mol_type = other DNA
cgattatctgttctaaataaaaacgcttatgatgtatatttatttgataataatttaacatcgaaagatgattca

SEQ ID NO: 533635 - DNA, 75 bp, synthetic construct
  source 1..75: mol_type = other DNA
gctttgcaccaatgactctatgtttaactgagggtcattatggtgaatatgctggcttgctggtgggctattcct

SEQ ID NO: 533636 - DNA, 75 bp, synthetic construct
  source 1..75: mol_type = other DNA
atgctcccgcaagtgatgttctccgaacgctgcatctttacgctggctggtttgttgattggccagcagtagatg

SEQ ID NO: 533637 - DNA, 75 bp, synthetic construct
  source 1..75: mol_type = other DNA
atggtgaatttacgtaaagcggcgcagggccagatgtgccaggtcagaatcccaggctactgcaatcacaatcct

SEQ ID NO: 533638 - DNA, 75 bp, synthetic construct
  source 1..75: mol_type = other DNA
gacaaaaccacacgatatgcaggcggcgattgcctgtagctcatgccacgatttaatcgacggacgggtaaaaac

SEQ ID NO: 533639 - DNA, 75 bp, synthetic construct
  source 1..75: mol_type = other DNA
acccacagggggcgttttacattttgcgcaacgcacaggggcaattcagcctgtggccgcaatcgtgcgtattac

SEQ ID NO: 533640 - DNA, 75 bp, synthetic construct
  source 1..75: mol_type = other DNA
gccgcagtcacaggcgtcctgccagcagtggctggaagcccactggcgtactctgacaccgacgaattttaccca

SEQ ID NO: 533641 - DNA, 75 bp, synthetic construct
  source 1..75: mol_type = other DNA
tgccagcagtggctggaagcccactggcgtactctgacaccggcgaatttcacccagttgcaggaggcacaatga

SEQ ID NO: 533642 - DNA, 75 bp, synthetic construct
  source 1..75: mol_type = other DNA
ggcattgagagcgcgactcagaagaaaatcgtcaagatgatcaaagacagcaaactgaaagtgcaggcgcaaatt

SEQ ID NO: 533643 - DNA, 75 bp, synthetic construct
  source 1..75: mol_type = other DNA
gcatgggcttgtagtgactgccacgcggagatcgaccgacgcacccataacctcgacaacaaagacgccagactt

SEQ ID NO: 533644 - DNA, 75 bp, synthetic construct
  source 1..75: mol_type = other DNA
cagcgattacaccaaagaagaattgcacctgatgcatgcagaaggtgtttttcgcacgcaagaaatctggagaaa

SEQ ID NO: 533645 - DNA, 75 bp, synthetic construct
  source 1..75: mol_type = other DNA
gacaaaaccacacgatatgcaggcagcgattgcctgtagctcatgccacgatttaatcgacgggcgggtaaaaac

SEQ ID NO: 533646 - DNA, 75 bp, synthetic construct
  source 1..75: mol_type = other DNA
gcaacgccccgcagtgctcgcaacacatgcagggcgtctaaccaaaccgttaaatgaggtaacgattatggctgg

SEQ ID NO: 533647 - DNA, 75 bp, synthetic construct
  source 1..75: mol_type = other DNA
cgcctgatgcatgcagaaggtgtttttcgcacacaagaaatctggataaagggggatatttatgatttatccaac

SEQ ID NO: 533648 - DNA, 75 bp, synthetic construct
  source 1..75: mol_type = other DNA
aaaagtcacggcagaagctgccaaaatcatcgaagaacagggtgtggaacttgcgcttctcaaaactaaaccagt

SEQ ID NO: 533649 - DNA, 75 bp, synthetic construct
  source 1..75: mol_type = other DNA
gcgcagtatggcgacgtggtgccgctgtcactgttacgtgatgaactggcacaacgtctggatcaagaacgtatc

SEQ ID NO: 533650 - DNA, 75 bp, synthetic construct
  source 1..75: mol_type = other DNA
ctttatcgaaacgctggagtctgcaacgacctgcccgccagggctaccttcgcgcgtatttatctgcggtatttc

SEQ ID NO: 533651 - DNA, 75 bp, synthetic construct
  source 1..75: mol_type = other DNA
cagctttcctcaaaagcggcggacctgtttgaccagtatctggtctatcgcccggactggctggcacagtgggaa

SEQ ID NO: 533652 - DNA, 75 bp, synthetic construct
  source 1..75: mol_type = other DNA
tcgggcgatatgcatcattaaatcccgtcgtatgcctgagcagttcgtcacctttggcgatgtgaaaaaggccgc

SEQ ID NO: 533653 - DNA, 75 bp, synthetic construct
  source 1..75: mol_type = other DNA
gaccagaacacttaacgatatggggatcgacctgagaaaagaagaccctttgcgcggtattcccgcaggtatatc

SEQ ID NO: 533654 - DNA, 75 bp, synthetic construct
  source 1..75: mol_type = other DNA
tttatcagcctgttatcgttgccagacagccgctttgtgtcggaagacgtgctggcattactggatgtgccggtg

SEQ ID NO: 533655 - DNA, 75 bp, synthetic construct
  source 1..75: mol_type = other DNA
gctctggcggcaattaacgccagagacaatgaaagccatcgttgatcagtcgcagcgtttcctgttaccgctgtt

SEQ ID NO: 533656 - DNA, 75 bp, synthetic construct
  source 1..75: mol_type = other DNA
cgatatgctcaacgccttcttcctgccggatgcggaaaccgaagcggcgatgacgctgatcgaacaacaatggca

SEQ ID NO: 533657 - DNA, 75 bp, synthetic construct
  source 1..75: mol_type = other DNA
gttgtggaaggcgttggtggaatatacccatcaactcgggcaaccgcgctggcaccgcgccaatctctatcagcg

SEQ ID NO: 533658 - DNA, 75 bp, synthetic construct
  source 1..75: mol_type = other DNA
gcgtccctctttattaagtgtggcgcagggaatgcaactttggctggaacaccttgtctactgtgccagcggtgg

SEQ ID NO: 533659 - DNA, 75 bp, synthetic construct
  source 1..75: mol_type = other DNA
ccgacactgactccgcgcgacatcatcgtgatggtggctgatatcgacagctacagtccgtttattcaggctgtg

SEQ ID NO: 533660 - DNA, 75 bp, synthetic construct
  source 1..75: mol_type = other DNA
tgatgccgaacgcttgttccgccgcttccgggcggcaggggatttaccgtatggcgcttttggtgaaattttctg

SEQ ID NO: 533661 - DNA, 75 bp, synthetic construct
  source 1..75: mol_type = other DNA
atggggattaatccacaggatgaatggcgaaattacagcttcagtgatgcaggcgacgatttagcgctaccgtga

SEQ ID NO: 533662 - DNA, 75 bp, synthetic construct
  source 1..75: mol_type = other DNA
ggtcggccagaccaacgaagaccgctgcatcgagctggctctcgacattgagcagttttgccacaaagcggccat

SEQ ID NO: 533663 - DNA, 75 bp, synthetic construct
  source 1..75: mol_type = other DNA
ttctgaatctttgtatgtgagagtattaaatgctcttgttgacattagggaattattaatggcaggaataaaaaa

SEQ ID NO: 533664 - DNA, 75 bp, synthetic construct
  source 1..75: mol_type = other DNA
ccaatattcgcgcatccgtcgatgatactcagtttgaattgatgatggctatcgcgctggtagtcatgattatct

SEQ ID NO: 533665 - DNA, 75 bp, synthetic construct
  source 1..75: mol_type = other DNA
cagcacttcacgcactgaccattgcaaaaatcaccgctgacgcagccaaaattattgaggaacagagcaaagaaa

SEQ ID NO: 533666 - DNA, 75 bp, synthetic construct
  source 1..75: mol_type = other DNA
ctgaaatacaaaacgcccgatgacgttcatcaggcgttttacagacagaaaagtgtcaacttatatcaggactag

SEQ ID NO: 533667 - DNA, 75 bp, synthetic construct
  source 1..75: mol_type = other DNA
cgtgacaatttataactgtgagcggccacatctgaccctgaaatacaaaacgcccgatgacgttcatcaggcgtt

SEQ ID NO: 533668 - DNA, 75 bp, synthetic construct
  source 1..75: mol_type = other DNA
ggaagccattaaacaactcgtcatgagtcgcggtcagtctctgccaaaagaaaaacaggctaaggcgatgatcac

SEQ ID NO: 533669 - DNA, 75 bp, synthetic construct
  source 1..75: mol_type = other DNA
ccaccatgttctgctacatcgttggtgtgagcaaatgcctgcgtgatatccagactcacgcagagtacatcaatg

SEQ ID NO: 533670 - DNA, 75 bp, synthetic construct
  source 1..75: mol_type = other DNA
ttgatggagagatttaagacctgcatcatcgaaatgatgattcagctccccggcgatactcagcgtcgtctggtt

SEQ ID NO: 533671 - DNA, 75 bp, synthetic construct
  source 1..75: mol_type = other DNA
cttcccgatttcatggttttctgaaaatgcaccttacgccattatcaggcagcaatgcggtgatactgttgctct

SEQ ID NO: 533672 - DNA, 75 bp, synthetic construct
  source 1..75: mol_type = other DNA
agtgtgctggcttgctggtgggctattcctgctctttaacattgccatgccgcgatgttttccaggtatgcgacc

SEQ ID NO: 533673 - DNA, 75 bp, synthetic construct
  source 1..75: mol_type = other DNA
agtcaagatgttagatgcgcttcgtgaggcaattaaaacacagacaaaatgttatggttatccattgaagcccgg

SEQ ID NO: 533674 - DNA, 75 bp, synthetic construct
  source 1..75: mol_type = other DNA
ccacagggttgattggtatggctgccgatgcaatggtggaggatatcaactacaccatgatcacggatgtgcaga

SEQ ID NO: 533675 - DNA, 75 bp, synthetic construct
  source 1..75: mol_type = other DNA
gcagcattaggcgcaggtgtgacggcctataactccaactccgcgggggccaccttaggtgtgggccttgctgcc

SEQ ID NO: 533676 - DNA, 75 bp, synthetic construct
  source 1..75: mol_type = other DNA
cgatggttgaagatattaactacaccatggtcacagatattcagatttctgaaaaaacgaatgccactgtccaga

SEQ ID NO: 533677 - DNA, 75 bp, synthetic construct
  source 1..75: mol_type = other DNA
cggttatgaacttgcggaacgtggtgcggatacccgtttaattcaggattacctggggcatcgaaatattcgtca

SEQ ID NO: 533678 - DNA, 75 bp, synthetic construct
  source 1..75: mol_type = other DNA
ctccagctctgccggtgcggcgctgggtgtagggattgccacagggttgattggtatggctgccgatgcaatggt

SEQ ID NO: 533679 - DNA, 75 bp, synthetic construct
  source 1..75: mol_type = other DNA
acaggtaaccagcataaataccagacccgtgtggtttcaaatgcgaacaaggttaacctgaaatttgaagaggcg

SEQ ID NO: 533680 - DNA, 75 bp, synthetic construct
  source 1..75: mol_type = other DNA
ctggggagtgggatcaccggttataactccggttcggccggtgccaccctcggtgtgggccttgctgctggtctg

SEQ ID NO: 533681 - DNA, 75 bp, synthetic construct
  source 1..75: mol_type = other DNA
ctggatccaggccaatgtcctgaaggcagacaaaatggatttgcgggagtctcagagctggctgaacagcggtta

SEQ ID NO: 533682 - DNA, 75 bp, synthetic construct
  source 1..75: mol_type = other DNA
cacggatgtacagattgcagagcgtactaaggcaacggtgacaacggataatgttgccgccctgcgtcagggcac

SEQ ID NO: 533683 - DNA, 75 bp, synthetic construct
  source 1..75: mol_type = other DNA
ctctgccaataaggttaacctgaaattcgaagaggcaaaacccgtcctcgaagatcagctggcgaaatcagttgc

SEQ ID NO: 533684 - DNA, 75 bp, synthetic construct
  source 1..75: mol_type = other DNA
ggctggttaagccggggttatgaaggcgcagtgactggcgccgcgcttggggcagggattaccgcttacaactcc

SEQ ID NO: 533685 - DNA, 75 bp, synthetic construct
  source 1..75: mol_type = other DNA
caccgatgtgcagatcgccgaacggacaaaggccagcgtcagaacggataacattgccgccctgcgtcagggcac

SEQ ID NO: 533686 - DNA, 75 bp, synthetic construct
  source 1..75: mol_type = other DNA
ctggaaaggcgctgaccggaccgacgctatatttatttctcgccgcgggagtcgactttctcgccagcaggccta

SEQ ID NO: 533687 - DNA, 75 bp, synthetic construct
  source 1..75: mol_type = other DNA
gaccttgctgttcatctcttagatggattggggcgtgaggcgatggtggcaagcgatgcggcgctactggcgtcg

SEQ ID NO: 533688 - DNA, 75 bp, synthetic construct
  source 1..75: mol_type = other DNA
aaagcgttttacgacaaatacaacgtgccgtgccgttttatcggccacacaatggctgatgccatgccgttagat

SEQ ID NO: 533689 - DNA, 75 bp, synthetic construct
  source 1..75: mol_type = other DNA
atgacaggcaataagaaaactgtagtttgtaaaaaaggtaatttgatgaaaacaaaaaaattgatgatggttgca

SEQ ID NO: 533690 - DNA, 75 bp, synthetic construct
  source 1..75: mol_type = other DNA
aaacttttgcatcactgccttcgccgctaccacaatttctggcctccttctacaacttccgacattcagtcatac

SEQ ID NO: 533691 - DNA, 75 bp, synthetic construct
  source 1..75: mol_type = other DNA
aaacttttgcattaccgcatttgccgccaccacgatttccggcctccttttacaacttccgacattcagtcatac

SEQ ID NO: 533692 - DNA, 75 bp, synthetic construct
  source 1..75: mol_type = other DNA
cctcagtatcagctgtgaggtaacgttcctgcacgggacgctccgcttcaatggcaatgtcagcgaaaagctcct

SEQ ID NO: 533693 - DNA, 75 bp, synthetic construct
  source 1..75: mol_type = other DNA
atggatttgcgggagtctcagagctggctgaacagcggttatgaaggtgccattgccggtgcagcattgggcacc

SEQ ID NO: 533694 - DNA, 75 bp, synthetic construct
  source 1..75: mol_type = other DNA
atattactggatacaggccaatgtcctcaaagccgataaaatggatctgcgtacggctcagggattcctgagcca

SEQ ID NO: 533695 - DNA, 75 bp, synthetic construct
  source 1..75: mol_type = other DNA
gtaaagaagttcaggcaatgatgcaagcggtttgctatggggcaacgggagccagagattattgtcttattctat

SEQ ID NO: 533696 - DNA, 75 bp, synthetic construct
  source 1..75: mol_type = other DNA
aacaaaaaaattaatgatggttgcactggtcagttccactctggccctttcagggtgtggtgcgatgagcacagc

SEQ ID NO: 533697 - DNA, 75 bp, synthetic construct
  source 1..75: mol_type = other DNA
aatcaagaagcgtaatcttgaagtcaaaactcagatgagtgaaaccatctggctggagccttccagtgaacgcac

SEQ ID NO: 533698 - DNA, 75 bp, synthetic construct
  source 1..75: mol_type = other DNA
caacaaggttaacctgaaatttgaagaggcgaagcctgttctcgaagaccagctggccaaatcaattgctaatat

SEQ ID NO: 533699 - DNA, 75 bp, synthetic construct
  source 1..75: mol_type = other DNA
atgaagaaaaacatgaagctaatggcaatgactgccgtactatcctctgtgttagtcctctctggttgtggagcg

SEQ ID NO: 533700 - DNA, 75 bp, synthetic construct
  source 1..75: mol_type = other DNA
ttgaacgtttcgcccgaaaacatcggatttccgataaatcgctgcgcaaaatcgtggagcaggccgataagggga

SEQ ID NO: 533701 - DNA, 75 bp, synthetic construct
  source 1..75: mol_type = other DNA
ttgagcgatttgcacacaaaaacaaaatatccgaccagtcactgcgcgaaattgttaaacaggctgataacgggc

SEQ ID NO: 533702 - DNA, 75 bp, synthetic construct
  source 1..75: mol_type = other DNA
gccgtcagtgccagaagaaatgtattggcaggatgcgcctgttggaggcagtagcaaagcagctgcatacgcgac

SEQ ID NO: 533703 - DNA, 75 bp, synthetic construct
  source 1..75: mol_type = other DNA
tcagcatatagggggcctcgggttgtactgaccccaaaaagttggacagttaaacacgaggcatataggtctgat

SEQ ID NO: 533704 - DNA, 75 bp, synthetic construct
  source 1..75: mol_type = other DNA
ttgagcggtttgcacgtaaaaacagaatatccgaccagtcactgcgcgagattattaaacaggctgatagcggtc

SEQ ID NO: 533705 - DNA, 75 bp, synthetic construct
  source 1..75: mol_type = other DNA
agtggtggcggaaaatcaggcggttaccggacaataattttttaccgcgttgcagaaaaagcctttttcatctac

SEQ ID NO: 533706 - DNA, 75 bp, synthetic construct
  source 1..75: mol_type = other DNA
caatcgcgggctttacattccctcaccgcaactgggagatggatttcttgcgtttatcgtgaccgttgtgatggc

SEQ ID NO: 533707 - DNA, 75 bp, synthetic construct
  source 1..75: mol_type = other DNA
agaccggacagctgcgccgcacctggcccatcgccagtacgaaatcagacgctttaccgccttcgaactcttcgc

SEQ ID NO: 533708 - DNA, 75 bp, synthetic construct
  source 1..75: mol_type = other DNA
ggcattacatcagggtttgcctttcttgatcgtggcgctggcttcggtatcgtccagcatttgatcgattaccag

SEQ ID NO: 533709 - DNA, 75 bp, synthetic construct
  source 1..75: mol_type = other DNA
gcactgatcctgatggaggccaccggtgggcttgaagctgctgtagcttgccagcttcaggctgaaggctttgat

SEQ ID NO: 533710 - DNA, 75 bp, synthetic construct
  source 1..75: mol_type = other DNA
gccaaatcccctctgctgactccggaaaaagccatcgaactgctgggcaccatgcagggtggttacaacattcat

SEQ ID NO: 533711 - DNA, 75 bp, synthetic construct
  source 1..75: mol_type = other DNA
tacgggttttgtcagtaatggtggaaaagccgctctgcgtctgggaggagaatacgacgttttacttactaaccg

SEQ ID NO: 533712 - DNA, 75 bp, synthetic construct
  source 1..75: mol_type = other DNA
agaatctcgaccagtatcttcaggacaaaaacacacttcttctcaatattggcaacgaaatttcacttttagcca

SEQ ID NO: 533713 - DNA, 75 bp, synthetic construct
  source 1..75: mol_type = other DNA
ccatgctgcggcctgcggtggagctgaacaccgccgttgttgccgcctgcgccagctatatctgcgtgacggccc

SEQ ID NO: 533714 - DNA, 75 bp, synthetic construct
  source 1..75: mol_type = other DNA
cgctctgctggaaggcggccagctctggaaattacgtattccgttaccggacgcagcacacgatccgctgatgcc

SEQ ID NO: 533715 - DNA, 75 bp, synthetic construct
  source 1..75: mol_type = other DNA
taccggctggcccggcagtttgaactccgttttgaatcccgtttcccggcggtttgccggcttttgcagaaagac

SEQ ID NO: 533716 - DNA, 75 bp, synthetic construct
  source 1..75: mol_type = other DNA
tgatgacagagcatcgtctgccctggctgagcaagctgctgagtgccgatacgccgctgaacccggtgcggccac

SEQ ID NO: 533717 - DNA, 75 bp, synthetic construct
  source 1..75: mol_type = other DNA
gtcaatgtctcgatgagtctgggagagcgcgtcgggcatatgttggttctcggcacgacgcgcgtcggaaaaact

SEQ ID NO: 533718 - DNA, 75 bp, synthetic construct
  source 1..75: mol_type = other DNA
tcgccgaactacaccgatatgtccgatccccgtcctatctttgactggcagcaggtgatccgtaaaaagggcgtg

SEQ ID NO: 533719 - DNA, 75 bp, synthetic construct
  source 1..75: mol_type = other DNA
tttggtggggacagaacatcggataataattatttatataactttgccgatttactgattgtcgatgaagcaggg

SEQ ID NO: 533720 - DNA, 75 bp, synthetic construct
  source 1..75: mol_type = other DNA
tttggtggcgatagaacatcggataataattatttatataactttgctgatttactgattgtcgatgaagccggg

SEQ ID NO: 533721 - DNA, 75 bp, synthetic construct
  source 1..75: mol_type = other DNA
atgctttgggttacagaggtgacgatgaattgaatctttcaggagcggatgaacttgccgatactcagattcgtt

SEQ ID NO: 533722 - DNA, 75 bp, synthetic construct
  source 1..75: mol_type = other DNA
tatcactccggtgaaggatggtggaatgctccacctttagtacaggcgatagcgacggaggagggaggtgaccat

SEQ ID NO: 533723 - DNA, 75 bp, synthetic construct
  source 1..75: mol_type = other DNA
agatttacaccaaaaccctggtgtcggggcatcaggataccgccgatgtgacgtccggccaggatttcacctcca

SEQ ID NO: 533724 - DNA, 75 bp, synthetic construct
  source 1..75: mol_type = other DNA
aataatatgggcattgctacaaaattggtgaatcgcgttcacagcaaaattgtgattagagatgaggagttgctg

SEQ ID NO: 533725 - DNA, 75 bp, synthetic construct
  source 1..75: mol_type = other DNA
accttcttcagagagcccccagctacttcctgtgactctcgatgcagctgccgaacagccagaatcgctcgcaga

SEQ ID NO: 533726 - DNA, 75 bp, synthetic construct
  source 1..75: mol_type = other DNA
ctccggcacgggacgctccgtctcaacggcactgtcagtgaaaagctcctgaccctgctgatacaggaactgaag

SEQ ID NO: 533727 - DNA, 75 bp, synthetic construct
  source 1..75: mol_type = other DNA
aaatggcaacaacaatggcgcgagggaaagctgctattactttctccagagagccctcagctacttcctgtgact

SEQ ID NO: 533728 - DNA, 75 bp, synthetic construct
  source 1..75: mol_type = other DNA
cctcagtatcagcagtgaggtaacgttccggcacgggacgctccgcttcaatggcaatgtcagcgaaaagctcct

SEQ ID NO: 533729 - DNA, 75 bp, synthetic construct
  source 1..75: mol_type = other DNA
aaatggcgccagcagtggcgcgagggaaagctgctattaccttcctctgagagtcctcagttacttcctgtgact

SEQ ID NO: 533730 - DNA, 75 bp, synthetic construct
  source 1..75: mol_type = other DNA
gttttactccggtatcacatgtaaccacagcgtgccgccttccatgccgctgacgcggcatatcctggtgacgat

SEQ ID NO: 533731 - DNA, 75 bp, synthetic construct
  source 1..75: mol_type = other DNA
aaagcctgatgagcaaacgcgtaaatcggatagccgtgatccagaagaaatgctgatggcctttaccagcgcagc

SEQ ID NO: 533732 - DNA, 75 bp, synthetic construct
  source 1..75: mol_type = other DNA
aagagcaggttaatgttttgattgagcatttgcaggttttaaggaaaaaaatgccactacctcctaattggatga

SEQ ID NO: 533733 - DNA, 75 bp, synthetic construct
  source 1..75: mol_type = other DNA
ccctgcgtcagggcacatcaggtgcgaaaattcagaccagtactgaaacgggtaaccagcataaataccagaccc

SEQ ID NO: 533734 - DNA, 75 bp, synthetic construct
  source 1..75: mol_type = other DNA
ctctcagcaggcgaaaaggctgccctaattttcctcccgaatttaaacagcagctcgttgctgcctcctgtgaac

SEQ ID NO: 533735 - DNA, 75 bp, synthetic construct
  source 1..75: mol_type = other DNA
taaacaagaattaatggctacatttggccctgaagtgcttaaagcagaacaggagtttttagagtggctgaaaaa

SEQ ID NO: 533736 - DNA, 75 bp, synthetic construct
  source 1..75: mol_type = other DNA
ggagacaacaccgcgtgttgagcgcgacatcacgccacctgcggcaacggctcagggcatgaacagcctgatcaa

SEQ ID NO: 533737 - DNA, 75 bp, synthetic construct
  source 1..75: mol_type = other DNA
gctgtgtaaggatcgagacaatcttaaattggttattgttggtgatccttttgccagtaaaaaaggtgaaaaagc

SEQ ID NO: 533738 - DNA, 75 bp, synthetic construct
  source 1..75: mol_type = other DNA
ggcggtgtgcgtacgcggtggggcgatgatgtattacgtcacatggattttgggtacgccggaagtgtttgtcgc

SEQ ID NO: 533739 - DNA, 75 bp, synthetic construct
  source 1..75: mol_type = other DNA
tgtttggcgcactgccattcgggatcgtctgtgtactggcctatagcacgccagatctcagtatgaacggaaaaa

SEQ ID NO: 533740 - DNA, 75 bp, synthetic construct
  source 1..75: mol_type = other DNA
tggtgacacctatccagtgggtaatgatgtccgataccgtcgactacggcgagtggtgcaatggtaaacgcctga

SEQ ID NO: 533741 - DNA, 75 bp, synthetic construct
  source 1..75: mol_type = other DNA
ttcttcaccactaaagaacgcgttgaagcaccacctacaacgacgtctatgcgggatgatttacgtgatatctgg

SEQ ID NO: 533742 - DNA, 75 bp, synthetic construct
  source 1..75: mol_type = other DNA
atgaaaatcatcagtaagcgccaggcgatgcatatttatcgtcagcatcccgaatccaagttatctgccttctgt

SEQ ID NO: 533743 - DNA, 75 bp, synthetic construct
  source 1..75: mol_type = other DNA
aagctgcctggcttgctgagaacggacggcagacagagtgcgaagaactgctggcctggcacctgctgccgtggt

SEQ ID NO: 533744 - DNA, 75 bp, synthetic construct
  source 1..75: mol_type = other DNA
aattcgtcagaaaactgcgaaaaataaatgacggcaacctgctggaaaaggttgtcgggcatatggaagaaaagc

SEQ ID NO: 533745 - DNA, 75 bp, synthetic construct
  source 1..75: mol_type = other DNA
tatttttttatactgtcaatccagcaaaagttcctgattttcaacttcataatattgatagcaatcaatcatcag

SEQ ID NO: 533746 - DNA, 75 bp, synthetic construct
  source 1..75: mol_type = other DNA
gtattatggcgggtgggcagccaccggagcagatgcataaatattaccgcttagcagatttagttgttgttcctt

SEQ ID NO: 533747 - DNA, 75 bp, synthetic construct
  source 1..75: mol_type = other DNA
cctgtttcacctctctcatacattcaacatttgaatataaagaagcaatatccattctgcgtcagggcgaaaacg

SEQ ID NO: 533748 - DNA, 75 bp, synthetic construct
  source 1..75: mol_type = other DNA
agtatcagtaagaaagcgcctgagttcagaaaaaacatctttcagtcagttattacttcaggccagaatggatag

SEQ ID NO: 533749 - DNA, 75 bp, synthetic construct
  source 1..75: mol_type = other DNA
tttctctttctagaaaaaaatatgacattttcatgtgagatcgtcaaagttaacgaaaaactaccgccatttagt

SEQ ID NO: 533750 - DNA, 75 bp, synthetic construct
  source 1..75: mol_type = other DNA
tctggataattatcatactgaatatgacagtgccaccgcctgcggcggcagtggccgaggtgccgttacctgccc

SEQ ID NO: 533751 - DNA, 75 bp, synthetic construct
  source 1..75: mol_type = other DNA
accagaccacacgcagacccacggagcgcccatcatggcgacacatgacaaagcggcagcgaaaaaaccgcagac

SEQ ID NO: 533752 - DNA, 75 bp, synthetic construct
  source 1..75: mol_type = other DNA
ttctctgtttgaagggattaaaatagcagactcacactccctttggttaaaagaaagactatgtatatccttact

SEQ ID NO: 533753 - DNA, 75 bp, synthetic construct
  source 1..75: mol_type = other DNA
acagtgcatttcaggcagacagtgtggaggctttccgtaaaagctacgttgctgcggtgaacgcactgactgacc

SEQ ID NO: 533754 - DNA, 75 bp, synthetic construct
  source 1..75: mol_type = other DNA
atgacccctgaacagttccggcaatggttcgccacgctgccggagaaatatcaacgtgtagtccgcttcatgtac

SEQ ID NO: 533755 - DNA, 75 bp, synthetic construct
  source 1..75: mol_type = other DNA
attgggaattaagcgacatggatcgcgaacacatgcaaacattgcttgataacggactgatatacagaactgcgt

SEQ ID NO: 533756 - DNA, 75 bp, synthetic construct
  source 1..75: mol_type = other DNA
gctgggaatcaagtatgatggatcgttggcacatgcaaatgctacttgataatggcctgatatacagaaagcagt

SEQ ID NO: 533757 - DNA, 75 bp, synthetic construct
  source 1..75: mol_type = other DNA
tggcattaacgccaatctgttgttcaaatggcgacaacaatggcgcgagggaaagctgctattaccttcttcaga

SEQ ID NO: 533758 - DNA, 75 bp, synthetic construct
  source 1..75: mol_type = other DNA
gcaatcgccagtctgctgacactggctacctgtgtcggcgtagtaatggcactgacgatttgggggctacgcgga

SEQ ID NO: 533759 - DNA, 75 bp, synthetic construct
  source 1..75: mol_type = other DNA
atggtgctgggtgtggaagataaggtggagccgctgttatttgatgccgtgcagaaaacgcggagactgaaatca

SEQ ID NO: 533760 - DNA, 75 bp, synthetic construct
  source 1..75: mol_type = other DNA
gtgatgaacaagggacacatcatgcagatcggctcaccgcaggatctttaccgccagcccgcctcccgctttatg

SEQ ID NO: 533761 - DNA, 75 bp, synthetic construct
  source 1..75: mol_type = other DNA
aacagatgcagaacgagttaaaagcgttacagcgaaaacttggcattactttcgtcttcgttacccacgaccagg

SEQ ID NO: 533762 - DNA, 75 bp, synthetic construct
  source 1..75: mol_type = other DNA
gaattcgtcaaccaacaattttcgggaaatctcggaaacgtcaaccagatctccgataactctggatggttggat

SEQ ID NO: 533763 - DNA, 75 bp, synthetic construct
  source 1..75: mol_type = other DNA
gccccatctgcgggaacagcggccctgaatcattccggaaaagttgatactcataacttttacggcacggattcc

SEQ ID NO: 533764 - DNA, 75 bp, synthetic construct
  source 1..75: mol_type = other DNA
taaagggccttccggcaccgactacgggcgcagcgcgccgacgggctcgatcaatatgatcagcaagcagccgcg

SEQ ID NO: 533765 - DNA, 75 bp, synthetic construct
  source 1..75: mol_type = other DNA
tcaccgccgcgctgttccgtactgatatcgaaaatgaagttgagcaaaatgatgacggaacttactcgcaatacg

SEQ ID NO: 533766 - DNA, 75 bp, synthetic construct
  source 1..75: mol_type = other DNA
taactgccgcgctgttccgtaccgatatcgaaaatgaagttgagcaaaacgacgacgggacttactcgcagtacg

SEQ ID NO: 533767 - DNA, 75 bp, synthetic construct
  source 1..75: mol_type = other DNA
tacaacctgtttgataccgattacgtcgcctcaatcaacaagagcggctaccgttatcacccgggcgagccaaga

SEQ ID NO: 533768 - DNA, 75 bp, synthetic construct
  source 1..75: mol_type = other DNA
ggttcctcatcgctgccgtataccccggagcacgcctttaccttatggagccagtatcaggcaaccgatgatatt

SEQ ID NO: 533769 - DNA, 75 bp, synthetic construct
  source 1..75: mol_type = other DNA
cggcaggccgaaccccatccgtggccgcaactgccgctggtgcagaccttcctggatacctgtattccggcactt

SEQ ID NO: 533770 - DNA, 75 bp, synthetic construct
  source 1..75: mol_type = other DNA
tggaaggcaaccttcacgcaaattgacaatgaatataatacgttcactgctctgtattctgacaaagcagaagtc

SEQ ID NO: 533771 - DNA, 75 bp, synthetic construct
  source 1..75: mol_type = other DNA
tgtcgtccgcaatggtgaggaattcttcgaaacgcagagccgcaatgtaacccactggatgctgctaccggagcc

SEQ ID NO: 533772 - DNA, 75 bp, synthetic construct
  source 1..75: mol_type = other DNA
tcgcctcaatcaacaagagcggctaccgttatcatccgggtgagccaagaactttcctgctcaccgccaacatgc

SEQ ID NO: 533773 - DNA, 75 bp, synthetic construct
  source 1..75: mol_type = other DNA
acgcctccgccagtattggcagcgcctggttccgccgcggcacgctggacgtcaatcaggtcattggtgatacca

SEQ ID NO: 533774 - DNA, 75 bp, synthetic construct
  source 1..75: mol_type = other DNA
atgagcacatcagagattatccctgtcactctgcccggacgacgcccgggacgtcccggccgtcgcatcgccgtc

SEQ ID NO: 533775 - DNA, 75 bp, synthetic construct
  source 1..75: mol_type = other DNA
cgtgtgcagcttcagacatggacgaacggcggcatgttaaatgcgccgcttagcctgcgactgacaatggtggaa

SEQ ID NO: 533776 - DNA, 75 bp, synthetic construct
  source 1..75: mol_type = other DNA
cacaattacgcttgaaggaaatacagattcagagcctcaaaggcatttcaaactgtacaatcacatttcctgctg

SEQ ID NO: 533777 - DNA, 75 bp, synthetic construct
  source 1..75: mol_type = other DNA
gagatgtttcgccagcaaaggtgtgagcttacaggcctgaccggacgggttatcagccgggggctgttgtatacg

SEQ ID NO: 533778 - DNA, 75 bp, synthetic construct
  source 1..75: mol_type = other DNA
atgcgtaagagagatttcttttttggagaggtgtatgaggggggtgcaggagccactctacgactgagtgatatg

SEQ ID NO: 533779 - DNA, 75 bp, synthetic construct
  source 1..75: mol_type = other DNA
agtgacgattgttacccctccaaacatgaatgaagagatcacggttgttggtaacaaagcatcggaatcttataa

SEQ ID NO: 533780 - DNA, 75 bp, synthetic construct
  source 1..75: mol_type = other DNA
tcccttttttcaaaaaatctaaaaaggatgaaaacggtgatcttgaacagtcatacgtaaagaaagatgaaagtg

SEQ ID NO: 533781 - DNA, 75 bp, synthetic construct
  source 1..75: mol_type = other DNA
gcgagaagctctgaccgataaggtgaatgttgaactgttcggtgcagctgaaaactcggcggttgttctggctgg

SEQ ID NO: 533782 - DNA, 75 bp, synthetic construct
  source 1..75: mol_type = other DNA
attctggtcggcaagccggcagtctcccggcgaacgtcgcatcctgataaaaccgcagcattatttaaacgcgcg

SEQ ID NO: 533783 - DNA, 75 bp, synthetic construct
  source 1..75: mol_type = other DNA
cgatggcgtatggcctgcatacccaacaaaatacccgttcgctggtgtttgatctcggtggcggcacgtttgacg

SEQ ID NO: 533784 - DNA, 75 bp, synthetic construct
  source 1..75: mol_type = other DNA
ctcggtggcgaagattttacccatatgctggtcgatgaggttttaaaacgcgcggatgtcgccaggaccacgctt

SEQ ID NO: 533785 - DNA, 75 bp, synthetic construct
  source 1..75: mol_type = other DNA
ccatcttgatattcatgtcggcgctgttatccgtcaggcaggtaaactgcgtggaactcacattattcaaacaaa

SEQ ID NO: 533786 - DNA, 75 bp, synthetic construct
  source 1..75: mol_type = other DNA
agttaaccgccagggcgtttccggcattttctcgccgattattgaacgaaacaccacagtaccggtgtcgcgtgt

SEQ ID NO: 533787 - DNA, 75 bp, synthetic construct
  source 1..75: mol_type = other DNA
tcgcgctgggcgcagcaatccaggccgcctgccgcttacgcagtgaagatattgaagaggtgatcctctatttgc

SEQ ID NO: 533788 - DNA, 75 bp, synthetic construct
  source 1..75: mol_type = other DNA
ggttctgaaattggaattacatatagtgcattgattaaacgcgacgaaaaactcctacgtgtgaatacagttgca

SEQ ID NO: 533789 - DNA, 75 bp, synthetic construct
  source 1..75: mol_type = other DNA
aacaaacaagactacaggcgcggatgtatgagttacgggcagagattgcatttgctaagaatggcgaaaagtcat

SEQ ID NO: 533790 - DNA, 75 bp, synthetic construct
  source 1..75: mol_type = other DNA
tggtcgtggctgtcgatggatggttgtataaccaaatcaccgctggcaggctcaaaaaaacaggcaggaacccta

SEQ ID NO: 533791 - DNA, 75 bp, synthetic construct
  source 1..75: mol_type = other DNA
tgaatatgtagtccgcaaccgcccctcaaccttctttgtcagggcggcgggcctcagtatgatcaatgccggtat

SEQ ID NO: 533792 - DNA, 75 bp, synthetic construct
  source 1..75: mol_type = other DNA
gaaaaatacctggcgccacaattcagagcgtaccgaggatgaagttctcgctcatttcgcctcactggacctgct

SEQ ID NO: 533793 - DNA, 75 bp, synthetic construct
  source 1..75: mol_type = other DNA
gaaaaatacctggcgtcacaattctgaacgcactgaagatgaagttattgaccattttgtatcgctggacctgct

SEQ ID NO: 533794 - DNA, 75 bp, synthetic construct
  source 1..75: mol_type = other DNA
ctgtttatgattggtcacagcgtcggcccgttccaggatgagcaatttaaccaactggcgaactacgtttttggt

SEQ ID NO: 533795 - DNA, 75 bp, synthetic construct
  source 1..75: mol_type = other DNA
ttaattataaaaatataacatggaagcaccatatcgcgagtacggaatcatatagttgttgggaagaaagggttt

SEQ ID NO: 533796 - DNA, 75 bp, synthetic construct
  source 1..75: mol_type = other DNA
cgaggccttaatggagatgaagaacgttatcatcggagcggcaatcattatcggtattgctgagtttgtcgccct

SEQ ID NO: 533797 - DNA, 75 bp, synthetic construct
  source 1..75: mol_type = other DNA
atgaaatatatcagtaaaaatctggctcacttttacacatccctgtgtttgttctttgttctttctgcaactgct

SEQ ID NO: 533798 - DNA, 75 bp, synthetic construct
  source 1..75: mol_type = other DNA
ctgagtatcgtcgccagattgggcttgtcgatcaggatgtagcactgtttagtagtgatattgcagaaaacattc

SEQ ID NO: 533799 - DNA, 75 bp, synthetic construct
  source 1..75: mol_type = other DNA
actggcgacagaaggcactgagaacctcgggtcctcttcggtcctccctgtcaccggtgcactgcatcttgatga

SEQ ID NO: 533800 - DNA, 75 bp, synthetic construct
  source 1..75: mol_type = other DNA
ttctctgtctatactgaattgacaggaaactgtaatattgtgttggataaaaatcaattacctaaatctatgact

SEQ ID NO: 533801 - DNA, 75 bp, synthetic construct
  source 1..75: mol_type = other DNA
caaacgatatggcccgcgtcgatgaggtcaggcggcgttgcagtcaaacgatatggcccgcgtcgatgaggtcag

SEQ ID NO: 533802 - DNA, 75 bp, synthetic construct
  source 1..75: mol_type = other DNA
gatgtctttacccctccgaccttcgatgatgaagaagttgcagaacataccaacctcgaaacccactttatcgat

SEQ ID NO: 533803 - DNA, 75 bp, synthetic construct
  source 1..75: mol_type = other DNA
aacctgtatgtttctaatggtatgtccgcaggtaatacccgcaacgaagcgcgtgttcaggggttatccgaagtt

SEQ ID NO: 533804 - DNA, 75 bp, synthetic construct
  source 1..75: mol_type = other DNA
ggaaatcccggcagacgtgctggcgcgttacccagcggtggttgaagcgatcgaaacactggaagcagaaggttt

SEQ ID NO: 533805 - DNA, 75 bp, synthetic construct
  source 1..75: mol_type = other DNA
attgcctctaacattcaattcacccagcagtatctgaatgaaaatattccagaattgatcgtaaggccagctgat

SEQ ID NO: 533806 - DNA, 75 bp, synthetic construct
  source 1..75: mol_type = other DNA
agagatcccggcagacgtgctggcgcgttacccagcggtggttgaagcgatcgaaacactggaagcagaaggttt

SEQ ID NO: 533807 - DNA, 75 bp, synthetic construct
  source 1..75: mol_type = other DNA
atctgcacgcgtttgctgcacatcagtcgttgttgaaggcctacgaaaagctgcagcgcgccaaagcagcattct

SEQ ID NO: 533808 - DNA, 75 bp, synthetic construct
  source 1..75: mol_type = other DNA
aatgggttaaacaaaccggttgggtgattgtagtactggtggtcgcgttgaatatctggctgctggtgggaacgg

SEQ ID NO: 533809 - DNA, 75 bp, synthetic construct
  source 1..75: mol_type = other DNA
ttcacctggcacccggtatcgcgcgcggtgggtaatgtcaaaaaccagggcgcagcgttaattcaccctgtttga

SEQ ID NO: 533810 - DNA, 75 bp, synthetic construct
  source 1..75: mol_type = other DNA
ctgtgttccagcaaaccagttctcctggcacccggtatcgcgcgcggtgggtaatgttaaaaaccagggcgcgga

SEQ ID NO: 533811 - DNA, 75 bp, synthetic construct
  source 1..75: mol_type = other DNA
tcgagcttccggcgctgctgcgcggtgagagtagcgcggaaagtcgtaacggagcgaaagcgttgctcgaacagt

SEQ ID NO: 533812 - DNA, 75 bp, synthetic construct
  source 1..75: mol_type = other DNA
tcctcaacggttgtggggacgttagcagggcaagtcgtcatgcagggctttatacgcttccatattccactgtgg

SEQ ID NO: 533813 - DNA, 75 bp, synthetic construct
  source 1..75: mol_type = other DNA
ttcattgcggcgattggttatatcgatcccggtaactttgcgaccaatattcaggcgggtgccagcttcggctat

SEQ ID NO: 533814 - DNA, 75 bp, synthetic construct
  source 1..75: mol_type = other DNA
tataaagttgctgatgacagaatctgggcgcgcaagctgttcggcttctctatcatcgccatcactgccctctcg

SEQ ID NO: 533815 - DNA, 75 bp, synthetic construct
  source 1..75: mol_type = other DNA
gcttctggcaaaatgggttgcttgcgaacagttggactctattgactggtcgtggctgtcgatggatggttgtat

SEQ ID NO: 533816 - DNA, 75 bp, synthetic construct
  source 1..75: mol_type = other DNA
gcctaaagtatcaaaaattttgggaggtgttacttgggattgtatttgtggtaaggaagttggatttcctgtgag

SEQ ID NO: 533817 - DNA, 75 bp, synthetic construct
  source 1..75: mol_type = other DNA
cacgagccagctctgaacaaacttaccctgacgatccctgagggaatggttgtcgcggtcgtcggtcgcagcggt

SEQ ID NO: 533818 - DNA, 75 bp, synthetic construct
  source 1..75: mol_type = other DNA
tcacaaatgccgctggtgcagcgaatcgccgtgcgtctgtttggcaaattaccgtatcaaagttacgacccgagc

SEQ ID NO: 533819 - DNA, 75 bp, synthetic construct
  source 1..75: mol_type = other DNA
tgaagaactcgatcagtacattacctgcacgatgacggatgaagtcaaaagtgtggctatagccaatgcccggaa

SEQ ID NO: 533820 - DNA, 75 bp, synthetic construct
  source 1..75: mol_type = other DNA
ggtgaaaatcaacctgtttccgttataaagtcagacctcaagcgcgcaattcttgaagcaagttgtcgagttatc

SEQ ID NO: 533821 - DNA, 75 bp, synthetic construct
  source 1..75: mol_type = other DNA
gggttacttgcggaatacggaacccacgaacagctgttatctgcgggcggcctctatacccgcttatggcatgac

SEQ ID NO: 533822 - DNA, 75 bp, synthetic construct
  source 1..75: mol_type = other DNA
accggtgaataacggcggagccgatctgcccgcaggtcagcgccagttgattgcgctggcccgcgcgcaactggc

SEQ ID NO: 533823 - DNA, 75 bp, synthetic construct
  source 1..75: mol_type = other DNA
cggcgctgcgccgccggtgatcggctactgtgcggtaaccggcgagttcgatagcggcgcagcgatcctgctggc

SEQ ID NO: 533824 - DNA, 75 bp, synthetic construct
  source 1..75: mol_type = other DNA
ggaagcggagattaataccgcgctgggtcgctatgctgaagaagggcatatgctgctggtgattgcccgacggcg

SEQ ID NO: 533825 - DNA, 75 bp, synthetic construct
  source 1..75: mol_type = other DNA
tgccaaaaaatatttccatgcagcgacggttgcccagcgttatgctgtgccgaccatttacgatttcattagcga

SEQ ID NO: 533826 - DNA, 75 bp, synthetic construct
  source 1..75: mol_type = other DNA
tgattgccgggttgtatttccccacgcacggcaacatcagaatcggtgtgcaaatgctcgatgatgcctcgctca

SEQ ID NO: 533827 - DNA, 75 bp, synthetic construct
  source 1..75: mol_type = other DNA
tacccggatacaggcctccgattatggtgccatcattactaacaataatgataagaaatcaatagccaacctgaa

SEQ ID NO: 533828 - DNA, 75 bp, synthetic construct
  source 1..75: mol_type = other DNA
ttacgacgccattattcaggtcggcggatcgttttttgtcgatctctatggcgtgccgcagtttgaacatgcact

SEQ ID NO: 533829 - DNA, 75 bp, synthetic construct
  source 1..75: mol_type = other DNA
aacagcagcacagacaagtcattattgacgttaaatctgtcaccattgaaaaaagatgaaatagctgtaagcgtg

SEQ ID NO: 533830 - DNA, 75 bp, synthetic construct
  source 1..75: mol_type = other DNA
ccagtggattatcgacactcccttccagcctgagctggaaaacgccatccgcgaagcctatgcacagctttccgc

SEQ ID NO: 533831 - DNA, 75 bp, synthetic construct
  source 1..75: mol_type = other DNA
catgttggtagctttgttaatagtagtctgcttctcgaaaaaggagcaaaactgacagcacagagtggtattttc

SEQ ID NO: 533832 - DNA, 75 bp, synthetic construct
  source 1..75: mol_type = other DNA
tattacagcagacaactcaaacattatcataaacaataaattcgaaggtggtgtttccgctgtaaataaaagcgc

SEQ ID NO: 533833 - DNA, 75 bp, synthetic construct
  source 1..75: mol_type = other DNA
aaggttaggctacctgaacacgcaaatatgcacttcatcgagtgttccgaccttacctactgttgtcaacagacc

SEQ ID NO: 533834 - DNA, 75 bp, synthetic construct
  source 1..75: mol_type = other DNA
gctcattgcgtaatcttggctatgctgagcatgtaaataaaaaggttgttagttacggaaataggcttgtctgtg

SEQ ID NO: 533835 - DNA, 75 bp, synthetic construct
  source 1..75: mol_type = other DNA
gtggactactaataaagatgatagaaaactaagacctttagctaatatatctattaaggatcagtcttttgcaac

SEQ ID NO: 533836 - DNA, 75 bp, synthetic construct
  source 1..75: mol_type = other DNA
ttatctcaatagcattatccggagtgggcgtttatacccactatcactttaagaaatatcaggcttccaaggatc

SEQ ID NO: 533837 - DNA, 75 bp, synthetic construct
  source 1..75: mol_type = other DNA
gcagtggttgctgcggatgggatgtggagctattcagatgaacagattgagcgtgcaaagcaaaacgggtggctt

SEQ ID NO: 533838 - DNA, 75 bp, synthetic construct
  source 1..75: mol_type = other DNA
acgacgcattctggaagatataaagggtattaaagtcgtcggtgaggcatcctgcggtgaagacgccgttaagtg

SEQ ID NO: 533839 - DNA, 75 bp, synthetic construct
  source 1..75: mol_type = other DNA
agagggaatcgacagcctgtctctgaacccagacactgtagtgcaaacctggttaagtctggctgaactgaagaa

SEQ ID NO: 533840 - DNA, 75 bp, synthetic construct
  source 1..75: mol_type = other DNA
ggtacagtgcggatattttagtgatgggcgatgactgggcagggaagtttgatagcttcgcgtatatttgtgagg

SEQ ID NO: 533841 - DNA, 75 bp, synthetic construct
  source 1..75: mol_type = other DNA
ttctacccgcgatctccgtatgcggttgccaaactgtacgcctactggatcaccgttaactaccgcgaatcctac

SEQ ID NO: 533842 - DNA, 75 bp, synthetic construct
  source 1..75: mol_type = other DNA
ccgcttcctcggtctggaaaagaaaacccgtttctatcaggcttccacctctgaactgtacggtctggtgcagga

SEQ ID NO: 533843 - DNA, 75 bp, synthetic construct
  source 1..75: mol_type = other DNA
gttgaacatggcgtcgataccgcgtggctggtcgatcaccacacagaagatttcaccgccagctatgccgtccga

SEQ ID NO: 533844 - DNA, 75 bp, synthetic construct
  source 1..75: mol_type = other DNA
aaaaagcctttgccggggtggtcaatcgcattctcgatgaagggtatcaggtgattgcgctctccacctgtacgg

SEQ ID NO: 533845 - DNA, 75 bp, synthetic construct
  source 1..75: mol_type = other DNA
gaggtggtctattttccccgtacgccgtcggtatcgacgacggggatcattgaggtgattagggggcatttctga

SEQ ID NO: 533846 - DNA, 75 bp, synthetic construct
  source 1..75: mol_type = other DNA
gtgggggaaactcgcgtgttaaactctcaggagataatcagattatacctgataatgtttcctggggattccggg

SEQ ID NO: 533847 - DNA, 75 bp, synthetic construct
  source 1..75: mol_type = other DNA
gcggtaccggctctgccagtggtggtttcagtgacaactacacgcacgttcaggtcggggtcgacaaaaaacatg

SEQ ID NO: 533848 - DNA, 75 bp, synthetic construct
  source 1..75: mol_type = other DNA
atcgagttgcgccagaaacaatacgagtactatcgtgatttactgttcagtttcccgaaacctgaaactgtcagt

SEQ ID NO: 533849 - DNA, 75 bp, synthetic construct
  source 1..75: mol_type = other DNA
aaccggaaatcaccctcagagagatggtgtctgaaatggtggctaatgacctcgaagcggcgaaaaaacactctc

SEQ ID NO: 533850 - DNA, 75 bp, synthetic construct
  source 1..75: mol_type = other DNA
accagagcactgttattatcggcggagatacagtctttactgataaaaatgacggaacaggtaatgatgtcatca

SEQ ID NO: 533851 - DNA, 75 bp, synthetic construct
  source 1..75: mol_type = other DNA
aacgccggtcattacaacccgggaaaccgatgacaaaataacatggtcactgacaggctataacacggtagcaaa

SEQ ID NO: 533852 - DNA, 75 bp, synthetic construct
  source 1..75: mol_type = other DNA
atcatgaatgagacgttatatataaaagggtgcgtttttaatgaactgaacggggacatgattcatattcctctt

SEQ ID NO: 533853 - DNA, 75 bp, synthetic construct
  source 1..75: mol_type = other DNA
ctgaattgtatggattagttcaggaagttccacaaaaagagacaacgccgttctatcctcgttcaccttatgccg

SEQ ID NO: 533854 - DNA, 75 bp, synthetic construct
  source 1..75: mol_type = other DNA
cggaaatggttgccagtgatctggcgaaagcaaaacagcatgcactactgaaaagccatggttacgatgttgcag

SEQ ID NO: 533855 - DNA, 75 bp, synthetic construct
  source 1..75: mol_type = other DNA
gttattttcgaccagcagaagttgaaactcttcttggtgatccaacaaaagcaaaaaatgtcttgggttgggagc

SEQ ID NO: 533856 - DNA, 75 bp, synthetic construct
  source 1..75: mol_type = other DNA
ccaactggcgaactacgtttttggtcactgtgacgcgctgatcctgcgcgaatcggtcagccttgatttgatgaa

SEQ ID NO: 533857 - DNA, 75 bp, synthetic construct
  source 1..75: mol_type = other DNA
atatatcaatcacgattcgttgatgagcctaattttattttacactatggggatttaacagatacatcgaatctg

SEQ ID NO: 533858 - DNA, 75 bp, synthetic construct
  source 1..75: mol_type = other DNA
gacgtaatcgttcgcgttgatcctcgttatttccgtcctgctgaagttgaaactcttcttggtgatccagaaaaa

SEQ ID NO: 533859 - DNA, 75 bp, synthetic construct
  source 1..75: mol_type = other DNA
tgattttgtcctcatcgtcaaaggcaccaaagcacaggcggaagccatcagggaggagtgtcggggtgtgctcga

SEQ ID NO: 533860 - DNA, 75 bp, synthetic construct
  source 1..75: mol_type = other DNA
ctacctgagcgggaaagccagaaaagatcggtggtactggaatacagtatccaacggggccgaagtacggcggtc

SEQ ID NO: 533861 - DNA, 75 bp, synthetic construct
  source 1..75: mol_type = other DNA
gcagcatttattgaggaactttgggaaatgcaatggacttgtatatataacgagctaacggatgagttgaataac

SEQ ID NO: 533862 - DNA, 75 bp, synthetic construct
  source 1..75: mol_type = other DNA
cacgcgaaaatcggcgaactgacactggagaacgattttttatccggtgcgctcggcaaggcgggattgctgggc

SEQ ID NO: 533863 - DNA, 75 bp, synthetic construct
  source 1..75: mol_type = other DNA
cgtcaccgacactggcaagctgcgcaatatcgccatcgcccagggattcaccgacttcgtgcgactgctttcaga

SEQ ID NO: 533864 - DNA, 75 bp, synthetic construct
  source 1..75: mol_type = other DNA
cgcagatcatcgtcgcgcagaactggtgatgaataaactgtatgataaggttccttccggcgtctggaagtacgt

SEQ ID NO: 533865 - DNA, 75 bp, synthetic construct
  source 1..75: mol_type = other DNA
tataccgctgacgtcgacgcgatgggtacgctgcgcctgctcgaggcgatccgcttcctcggtctggaaaagaaa

SEQ ID NO: 533866 - DNA, 75 bp, synthetic construct
  source 1..75: mol_type = other DNA
cggtacgccagcaccgaacggcctggtagatttgtggggacaatcgtggtttgtggaccaggggcaacgtctcgg

SEQ ID NO: 533867 - DNA, 75 bp, synthetic construct
  source 1..75: mol_type = other DNA
tgcagccgattgtcggtaatgccaaagcgcgcgcggcggcgctggcgaacagtaacgccagcgtgtttaccatca

SEQ ID NO: 533868 - DNA, 75 bp, synthetic construct
  source 1..75: mol_type = other DNA
tttccggggcagagctggaccaaactggagccgtttgctcactcacaggctgaaatacagcgagcgttagccgat

SEQ ID NO: 533869 - DNA, 75 bp, synthetic construct
  source 1..75: mol_type = other DNA
cttctatgaagaagcagaaaagggagtaactacaattgttagcggcatgaaaggacactttaaactgaagaaggg

SEQ ID NO: 533870 - DNA, 75 bp, synthetic construct
  source 1..75: mol_type = other DNA
tgtttcgtttgaatcacctgaatataccgccgattgtgatgcaataggaactcttcgtcttttagaggctattcg

SEQ ID NO: 533871 - DNA, 75 bp, synthetic construct
  source 1..75: mol_type = other DNA
gggcatctgcgcaatatcgaggtgcagccgattgtcggtaatgccaaagcacgcgccgcggcgctggcgaacagc

SEQ ID NO: 533872 - DNA, 75 bp, synthetic construct
  source 1..75: mol_type = other DNA
atgcccccaaaatatatacctcgcccctaccaagttctcattatcaaccacgaaaccgaaaccctgcgcggcaac

SEQ ID NO: 533873 - DNA, 75 bp, synthetic construct
  source 1..75: mol_type = other DNA
cagagctttatggtttggttcaagaaattccacaaaaagagactacgccattttatccacgttcgccttatgctg

SEQ ID NO: 533874 - DNA, 75 bp, synthetic construct
  source 1..75: mol_type = other DNA
ctgaactgtacggtctggtgcaggaaattccgcagaaagaaaccacgccgttctacccacgctctccgtatgcgg

SEQ ID NO: 533875 - DNA, 75 bp, synthetic construct
  source 1..75: mol_type = other DNA
cgccgctacgcgttgcagcaagcacctggcctgatgaagctgttaaatgggggcatctgcgtaatattgaggtac

SEQ ID NO: 533876 - DNA, 75 bp, synthetic construct
  source 1..75: mol_type = other DNA
gggcatctgcgcaatatcgaggtgcagccgattgttggtaacgccaaagcacgctctgcagcgctggcgaacagc

SEQ ID NO: 533877 - DNA, 75 bp, synthetic construct
  source 1..75: mol_type = other DNA
cgatatcaaagagcccatccataacgttatccgcgtggacatgccgccgaaggcctgccagcagtatcgcgaaat

SEQ ID NO: 533878 - DNA, 75 bp, synthetic construct
  source 1..75: mol_type = other DNA
ggttctggcaaaacatcacttttacgcttgctcgccaggtatattgatacgatggagcgtgttatcaccgccgaa

SEQ ID NO: 533879 - DNA, 75 bp, synthetic construct
  source 1..75: mol_type = other DNA
caggatttaattatgtcagaggttgacgtgattattcagtgccggagaacatcaaagcatggaagaagaattaca

SEQ ID NO: 533880 - DNA, 75 bp, synthetic construct
  source 1..75: mol_type = other DNA
cgcgagcaaaagctgaaggcaagaaattgggaagaccgccgaaaattgcgctagaagaccatagaacaatcatag

SEQ ID NO: 533881 - DNA, 75 bp, synthetic construct
  source 1..75: mol_type = other DNA
cccaggacgattgattgacactcatatccagatgatgatgagtaatcagacaaacggaataccattgggtagtac

SEQ ID NO: 533882 - DNA, 75 bp, synthetic construct
  source 1..75: mol_type = other DNA
tgcgttatgtcacctgtagaggaagtttgcaaaaagtacattacattcattgacatattaagtaatggtacggaa

SEQ ID NO: 533883 - DNA, 75 bp, synthetic construct
  source 1..75: mol_type = other DNA
gacggccagtatggattaattccccaccgccttcaaaagaggatgaggtgttgatggctgaaatgaaaaaaatat

SEQ ID NO: 533884 - DNA, 75 bp, synthetic construct
  source 1..75: mol_type = other DNA
ggcgacggtaggcgctgtgcagccgctgatggtcgtgttcatctctgccgctctgctaggtagcccgatacgatt

SEQ ID NO: 533885 - DNA, 75 bp, synthetic construct
  source 1..75: mol_type = other DNA
aagcgcgaagccacgccggaaggcgaccgctgggtcgaagctcgggagagcgatcagcaggcggcaaaacgctgg

SEQ ID NO: 533886 - DNA, 75 bp, synthetic construct
  source 1..75: mol_type = other DNA
ctggggcgcgtcacggtgattcaccgcatcggggaattatggccgggcgatgaaatcgtttttgtcggtgtcacc

SEQ ID NO: 533887 - DNA, 75 bp, synthetic construct
  source 1..75: mol_type = other DNA
tcagagttgctgggcaaaattagggacgatgaaacgctggttgtagccaaacttgaccgtttggggcgtgatgct

SEQ ID NO: 533888 - DNA, 75 bp, synthetic construct
  source 1..75: mol_type = other DNA
gaaccagcgactagagcttgagcaagctgggtggcaaattgactattggtttgccgatattgtcagtgggaaggt

SEQ ID NO: 533889 - DNA, 75 bp, synthetic construct
  source 1..75: mol_type = other DNA
agcagattggcggcggcctgtgtactgccatggttcgtggtgatgttgcagcctgtaaagccgcgaccgatgcag

SEQ ID NO: 533890 - DNA, 75 bp, synthetic construct
  source 1..75: mol_type = other DNA
gaacaagtatcatttccgtcatattgtaaattctgtgtgtctcttgatgcttatctgcattcactgatgtatatc

SEQ ID NO: 533891 - DNA, 75 bp, synthetic construct
  source 1..75: mol_type = other DNA
gatattccgtcgatctgtaacatcgtgttcctgcgtaaagtaggtaatgactccaacttactgatagtgttttat

SEQ ID NO: 533892 - DNA, 75 bp, synthetic construct
  source 1..75: mol_type = other DNA
cgagcacagccatgaacaactggtggcgaagctccagcgcatcatcggcctggccacgtttaaccgtgaccgcag

SEQ ID NO: 533893 - DNA, 75 bp, synthetic construct
  source 1..75: mol_type = other DNA
aagagcagaccgaaggcgaactacagttccgcagtcagctggattatgtctctgcctaccgtcgcattctcgatc

SEQ ID NO: 533894 - DNA, 75 bp, synthetic construct
  source 1..75: mol_type = other DNA
cagtggacggggtgtgtgatcaccccgtggatgctgagtgcagttatcttccccggcccggatcaactctggcca

SEQ ID NO: 533895 - DNA, 75 bp, synthetic construct
  source 1..75: mol_type = other DNA
tgtcttcaggctttaactcaacttgaggattacatcaaaaaacatggggccagcaaccctctcacattgcagatc

SEQ ID NO: 533896 - DNA, 75 bp, synthetic construct
  source 1..75: mol_type = other DNA
ataatacattctcttaccctccgggccttcagctttaaatgggacaagaagtgttttttcatcttcaacatctgt

SEQ ID NO: 533897 - DNA, 75 bp, synthetic construct
  source 1..75: mol_type = other DNA
ggctgattggtcatattcgccgcgctgcggtgggcgatgcgctgaaaccgtttgaggaacgtgtcgatcacgcgc

SEQ ID NO: 533898 - DNA, 75 bp, synthetic construct
  source 1..75: mol_type = other DNA
gaagtgcatgaagcggtgccggagtatgaaaccagttggcaggacaccagcggccaacaacggtttaaaatcccc

SEQ ID NO: 533899 - DNA, 75 bp, synthetic construct
  source 1..75: mol_type = other DNA
accgttatacctaccgtaccgcggttatcgacggttttctgatcgaccaggatccgcctattcagatcaccaccc

SEQ ID NO: 533900 - DNA, 75 bp, synthetic construct
  source 1..75: mol_type = other DNA
agaagaacgcggagctggccaaacagaccgaacaggaacgtaaggcttaccacaaagaaattaccgatcaggcca

SEQ ID NO: 533901 - DNA, 75 bp, synthetic construct
  source 1..75: mol_type = other DNA
ttaccttgacccgaccgggtcgcaaaaaacgctggtcttctgcgtcaccaatgcccatgccgatatggtggtgga

SEQ ID NO: 533902 - DNA, 75 bp, synthetic construct
  source 1..75: mol_type = other DNA
aagagcagaccgaaggcgaactgcagttccgcagtcagttggattacgtttctgcctatcgtcgcattctcgatc

SEQ ID NO: 533903 - DNA, 75 bp, synthetic construct
  source 1..75: mol_type = other DNA
aaaccagtgagtaatgataaggtgattttttcaaagttcttgggagggggccatgaccgggctcatccagttatc

SEQ ID NO: 533904 - DNA, 75 bp, synthetic construct
  source 1..75: mol_type = other DNA
aatctggataatttacacacccgggttgttgatctgaataacctcacatttgatggacagtacgattttattctt

SEQ ID NO: 533905 - DNA, 75 bp, synthetic construct
  source 1..75: mol_type = other DNA
tagaaagcatggtttaaacccggagcaatatgctttttggtgttacgatgaatggcctgacgtatgggatgaaga

SEQ ID NO: 533906 - DNA, 75 bp, synthetic construct
  source 1..75: mol_type = other DNA
aggagattgtaatttacagagcaatactggaagtttaaatattagaagtgggataagagtaagaatcggtcacgc

SEQ ID NO: 533907 - DNA, 75 bp, synthetic construct
  source 1..75: mol_type = other DNA
cttagtgctgatatggcactgaatgaggccagcaaaattatcatggctgatatggaggtggtgagccatgaataa

SEQ ID NO: 533908 - DNA, 75 bp, synthetic construct
  source 1..75: mol_type = other DNA
cagccgccgaagctatcaaaacgctaatgcacgcgctgattgatatttctgttatcgcggacatggcacataagc

SEQ ID NO: 533909 - DNA, 75 bp, synthetic construct
  source 1..75: mol_type = other DNA
aatctggaaaatttacgtactcaggttgtcgatctgaatagcctcacgtttgatggacaatacgattttattctt

SEQ ID NO: 533910 - DNA, 75 bp, synthetic construct
  source 1..75: mol_type = other DNA
aattttgaatgcgggaattataacgacatagaaaactttattgaattaaaaagcgataaaaatgtaattgaagaa

SEQ ID NO: 533911 - DNA, 75 bp, synthetic construct
  source 1..75: mol_type = other DNA
agtttaccattgatttaaatattgaatattttatagttaaaacaaattatgggtatgaaagatatattagcgata

SEQ ID NO: 533912 - DNA, 75 bp, synthetic construct
  source 1..75: mol_type = other DNA
tacacctggtaaatatagacattatgaatataatgaaaaatgggttaagccagttattgaatcttgtggattagt

SEQ ID NO: 533913 - DNA, 75 bp, synthetic construct
  source 1..75: mol_type = other DNA
ttcatctacatgactgtggaaatatgaacttttacagtacatatttcgaaagccagccagcatatgtaactataa

SEQ ID NO: 533914 - DNA, 75 bp, synthetic construct
  source 1..75: mol_type = other DNA
tgccacatcgcaatacctgtctcagccattcagccggccatcagagtgtatggaggtttcaggggaaccagttcg

SEQ ID NO: 533915 - DNA, 75 bp, synthetic construct
  source 1..75: mol_type = other DNA
tctgtcgaaggcgttagctaacggttatcagatttctatatcacgagagctaccagttacgcaggaaactgatct

SEQ ID NO: 533916 - DNA, 75 bp, synthetic construct
  source 1..75: mol_type = other DNA
atgtgcaataaaaccacaccggacgcagcagccgccgagctcactacgctgatgcacgcgcttatcgatattgaa

SEQ ID NO: 533917 - DNA, 75 bp, synthetic construct
  source 1..75: mol_type = other DNA
gatgagcagttgcatcttgatccagttatctggggatacgcccccggttggtgggataaaccgccactcattaac

SEQ ID NO: 533918 - DNA, 75 bp, synthetic construct
  source 1..75: mol_type = other DNA
gacgagcagctgcacctcgatcctgttttctggggttacgctccaggttggtgggataaagcaccactgattaac

SEQ ID NO: 533919 - DNA, 75 bp, synthetic construct
  source 1..75: mol_type = other DNA
tgacgcgtgaagactatcttgccctcctatcagaagaagctgagcgtgacatcccatacgttccagaaccaattg

SEQ ID NO: 533920 - DNA, 75 bp, synthetic construct
  source 1..75: mol_type = other DNA
agactagcttatggtttcattcgtataccaaaccaaccacaagtattttttcattacgatagtgtgtatggtagt

SEQ ID NO: 533921 - DNA, 75 bp, synthetic construct
  source 1..75: mol_type = other DNA
aagttagcagatatacaatattgagggagattggtgaaggcggtatgcaaaaagtttatttggcaatggataata

SEQ ID NO: 533922 - DNA, 75 bp, synthetic construct
  source 1..75: mol_type = other DNA
gatggatggtttgagtggaagaaggaaggtgacaagaaacaaccctattttattcaccgggcagacggtcagccg

SEQ ID NO: 533923 - DNA, 75 bp, synthetic construct
  source 1..75: mol_type = other DNA
tgatctgcaatccggtaatgacgatcgcggtatatgtggcctgccgtttacgcgccagtctgacaatcagaccgt

SEQ ID NO: 533924 - DNA, 75 bp, synthetic construct
  source 1..75: mol_type = other DNA
atataaatcaacggggcttgatgtactgaatatcgccgccgattatgcggaatatgtggcagaggcgcgttatag

SEQ ID NO: 533925 - DNA, 75 bp, synthetic construct
  source 1..75: mol_type = other DNA
tttccggcgtatctgatgatgcggctgatgcgctttctgcaatatccgaactgataagagcggcctttttcttac

SEQ ID NO: 533926 - DNA, 75 bp, synthetic construct
  source 1..75: mol_type = other DNA
aaaagttctgcttctgagcgaacgtgatgagcagttgcatcttgatccagttatctggggatacgcccccggttg

SEQ ID NO: 533927 - DNA, 75 bp, synthetic construct
  source 1..75: mol_type = other DNA
ctgcgcgcattttacgacccggaaaatgaactgaccggcagtatgctgattgacctgcaatccggtaatgaagat

SEQ ID NO: 533928 - DNA, 75 bp, synthetic construct
  source 1..75: mol_type = other DNA
tgatggctatcttcaacaaagaggataaagaagtttatattgccgattacgagcatctgggcgtttatgcttgcc

SEQ ID NO: 533929 - DNA, 75 bp, synthetic construct
  source 1..75: mol_type = other DNA
gtcatcatggcgaccaataatcctcgggccgccaacgcgctctggcaaaaccgcagtgttaaaacttctgacctg

SEQ ID NO: 533930 - DNA, 75 bp, synthetic construct
  source 1..75: mol_type = other DNA
ggcaaagacggtttaccactggtatctccgaaaggtgcagtaggggtggcgcaggtgatggaggatacggggccg

SEQ ID NO: 533931 - DNA, 75 bp, synthetic construct
  source 1..75: mol_type = other DNA
tactgcttttagccttacggtataagaagttgctttcctttttcaaccggttacgcaagcaggttcacaacaaat

SEQ ID NO: 533932 - DNA, 75 bp, synthetic construct
  source 1..75: mol_type = other DNA
cgatatttccaagctattaaagactctcaagaagcaatgagaagtgtttacgagaaaattcagtccaagcttgaa

SEQ ID NO: 533933 - DNA, 75 bp, synthetic construct
  source 1..75: mol_type = other DNA
actggcaggtgcgccagcagctgcctgtcggagtcgggcctgacgaccggatgcctccaggcagccgggagccga

SEQ ID NO: 533934 - DNA, 75 bp, synthetic construct
  source 1..75: mol_type = other DNA
atgaaaacgtctccttctgctgaatcaggtcgccgggccgaccggttgctccccggaggggcgaaagccccttct

SEQ ID NO: 533935 - DNA, 75 bp, synthetic construct
  source 1..75: mol_type = other DNA
catggctgaaagtttgcctgcatcttgccggattgttgccgtttctctggctggtctgggcgattaatcacggtg

SEQ ID NO: 533936 - DNA, 75 bp, synthetic construct
  source 1..75: mol_type = other DNA
agctgttcctgatcagcttccacctacggaagataataaacagccttcttttgatgttcttgatgattgggatgc

SEQ ID NO: 533937 - DNA, 75 bp, synthetic construct
  source 1..75: mol_type = other DNA
tatggctgaaagtttgcctgcatcttgccggattgttgccgtttctctggctggtctgggcgatcaatcacggtg

SEQ ID NO: 533938 - DNA, 75 bp, synthetic construct
  source 1..75: mol_type = other DNA
tccagcagggtaccgccgccgtgcaggcaatggcaccgcaggaaaacgaccctgactttaaatacaaagcagagc

SEQ ID NO: 533939 - DNA, 75 bp, synthetic construct
  source 1..75: mol_type = other DNA
gccgcagctatcccatacgacgagacgcgcaattatgtggcaaaagtaactggcagtgctggagctattcctgga

SEQ ID NO: 533940 - DNA, 75 bp, synthetic construct
  source 1..75: mol_type = other DNA
tactgcttttagccttacggtataaaaagctactttcccttttcaaccgattacgcaagcaggttcacaacaaat

SEQ ID NO: 533941 - DNA, 75 bp, synthetic construct
  source 1..75: mol_type = other DNA
agtgaccatcaagcgttggctaaggagtaccgtcaagagttggcacagattatcagcttcaatgattttctgagt

SEQ ID NO: 533942 - DNA, 75 bp, synthetic construct
  source 1..75: mol_type = other DNA
atgcggcaagagattagcggtaaagaagcatcagaaattgctaccaacggctgtgtgccagcaaaccagttcacc

SEQ ID NO: 533943 - DNA, 75 bp, synthetic construct
  source 1..75: mol_type = other DNA
tttgggaggcccgcagcagtcacgggcgcaacccgaaattcgaatcgcctgaggtgctgtgggaagcatgctgcg

SEQ ID NO: 533944 - DNA, 75 bp, synthetic construct
  source 1..75: mol_type = other DNA
gaggcgctgtgggctgcttgttgtgaatacttcgagtgggtggaagctaacccgctatgggagatgaaggcgttc

SEQ ID NO: 533945 - DNA, 75 bp, synthetic construct
  source 1..75: mol_type = other DNA
ctgtgtgccagcaaaccagttcacctggcacccggtatcgcgcgcggtgggtaatgttaaaaaccagggcgcgga

SEQ ID NO: 533946 - DNA, 75 bp, synthetic construct
  source 1..75: mol_type = other DNA
atttttatggccgcgataggtagcacaccatttgagcgtggtgacgaagccgaaggatttttgattgtcactgct

SEQ ID NO: 533947 - DNA, 75 bp, synthetic construct
  source 1..75: mol_type = other DNA
ttcacctggcacccggtatcgtgcgcggtgggtaatgttaaaaaccagggcgcggagttaattcaacctgtttga

SEQ ID NO: 533948 - DNA, 75 bp, synthetic construct
  source 1..75: mol_type = other DNA
gcctcgcattgggaccgcgcctgattttgtctctggtgtccaaggcacagcgtatgccttcacatcaggccatga

SEQ ID NO: 533949 - DNA, 75 bp, synthetic construct
  source 1..75: mol_type = other DNA
tggaactggagagtggcgacaaagttgggttcccttaccttcttggtcagggaaaggctgagttatttgtttacc

SEQ ID NO: 533950 - DNA, 75 bp, synthetic construct
  source 1..75: mol_type = other DNA
gtgtatggctattacgagcatgggcttctgattatactacaaacggcacgaacacaccttttttcattactccac

SEQ ID NO: 533951 - DNA, 75 bp, synthetic construct
  source 1..75: mol_type = other DNA
tttgggaggcccgcagtagtcatgggcgaaaccctaaattcgaatcgcctgaggcgctgtgggctgcttgttgtg

SEQ ID NO: 533952 - DNA, 75 bp, synthetic construct
  source 1..75: mol_type = other DNA
gagtgttgttacaaaagtatttcaacctgattcaattattgcgggtattcctgcaaaggttatgagaaaaagagg

SEQ ID NO: 533953 - DNA, 75 bp, synthetic construct
  source 1..75: mol_type = other DNA
ttgagctggataatggcgaaaaagttgctttcccttaccttcttgatcagggaaaagcagagttatttgtttacc

SEQ ID NO: 533954 - DNA, 75 bp, synthetic construct
  source 1..75: mol_type = other DNA
ggcgtgaataatctggcgttattaggtaaggagttaattacccggccttatttaacgttaggtattatcagctgg

SEQ ID NO: 533955 - DNA, 75 bp, synthetic construct
  source 1..75: mol_type = other DNA
cgtaccgcacaacatggtaatattgtcctagcattacccaaaggaacctctattcctatcattcgaaaactggaa

SEQ ID NO: 533956 - DNA, 75 bp, synthetic construct
  source 1..75: mol_type = other DNA
aaagaaaaagcgccccgttgctggataacaggcaaaacaaaggcgaccgggataggtcgccagtgggaacaaagg

SEQ ID NO: 533957 - DNA, 75 bp, synthetic construct
  source 1..75: mol_type = other DNA
tgcatgtgcacggcgtgcaacgcgtggagataatcgaacccacacagaatatggccatcagcgacatacaggcgg

SEQ ID NO: 533958 - DNA, 75 bp, synthetic construct
  source 1..75: mol_type = other DNA
tctttgccgccctgcatgttgagggagtgcagcgtgtggagctggcttcgccgctggcggatgtggtcctgaaca

SEQ ID NO: 533959 - DNA, 75 bp, synthetic construct
  source 1..75: mol_type = other DNA
tttttgccgcgctgcatgttgagggtgttcagcgtgtggaactggcttcaccgctggctgatgtggtcctgaaca

SEQ ID NO: 533960 - DNA, 75 bp, synthetic construct
  source 1..75: mol_type = other DNA
gcgcaggcggtgatggtggcttatgcgatgggcggcgatctggaccagctcgctgccaactacaacgtgaaacgc

SEQ ID NO: 533961 - DNA, 75 bp, synthetic construct
  source 1..75: mol_type = other DNA
tgaacacatcgccaacaatgccagatttgcggctggtgggcaatgtgatcagtgtgctggcttgctggtgggcta

SEQ ID NO: 533962 - DNA, 75 bp, synthetic construct
  source 1..75: mol_type = other DNA
gcgcagaaatcatcccgtaccgcgtggaagccaccatttttctctatcctggaccggaagcagagccggtaatgg

SEQ ID NO: 533963 - DNA, 75 bp, synthetic construct
  source 1..75: mol_type = other DNA
tgcatccttcaatgccggtgtatgtttctgattttacgctgttcgaaggtcagtggacggggtgtgtgatcaccc

SEQ ID NO: 533964 - DNA, 75 bp, synthetic construct
  source 1..75: mol_type = other DNA
tttacccggaagatcagcaggaggcggtcgcccgtaccctgacactggaatctgagcctctcgtcaaactgctgg

SEQ ID NO: 533965 - DNA, 75 bp, synthetic construct
  source 1..75: mol_type = other DNA
atttgatgggcgcacacaatacagcaaaaaaagtgagaagttaagtattgacatgtgcgcacacatgattttaat

SEQ ID NO: 533966 - DNA, 75 bp, synthetic construct
  source 1..75: mol_type = other DNA
ttttgtcaggtcgccaggtgctgatcaatctgatgtctgatttcgttctggataaaacaaaggcgaccgcagagg

SEQ ID NO: 533967 - DNA, 75 bp, synthetic construct
  source 1..75: mol_type = other DNA
ggcctatcagtatcatggtcgaagtgccgacgggcgtgtcgcggatatctctgtcaccagtccttctccggcctg

SEQ ID NO: 533968 - DNA, 75 bp, synthetic construct
  source 1..75: mol_type = other DNA
acggcactggttgtacgctctctgcggcgttggctgcactacgcccgcgccatacaaactgggctgacaccgtac

SEQ ID NO: 533969 - DNA, 75 bp, synthetic construct
  source 1..75: mol_type = other DNA
acggttgcaacgttatcagatccaaaacgtggtactcgacaccgttatgctggcaaaaagcggcgacccgctgct

SEQ ID NO: 533970 - DNA, 75 bp, synthetic construct
  source 1..75: mol_type = other DNA
tttcgcgaggtccccactcgtaaccatacaagacgcagcccaaccggcggcgtggtcagcacggagccggtggtg

SEQ ID NO: 533971 - DNA, 75 bp, synthetic construct
  source 1..75: mol_type = other DNA
aaccagttatgccttactggaactgggcgtgaataatctgacgttattcggtcaggaattaatcacccgacctta

SEQ ID NO: 533972 - DNA, 75 bp, synthetic construct
  source 1..75: mol_type = other DNA
atgaaacggattaacgctctgaccattgctggtacagatccgagcggtggtgcggggattcaggccgatcttaaa

SEQ ID NO: 533973 - DNA, 75 bp, synthetic construct
  source 1..75: mol_type = other DNA
cattaataacgccaaacttgccagaagcagctgccttgcttgacacgccacacgcgcgcaacgaacaggaaatgc

SEQ ID NO: 533974 - DNA, 75 bp, synthetic construct
  source 1..75: mol_type = other DNA
acctgctggcggtggttgagcaggcgcttaacagtgaaaaagttcgcccggtggcagaccgcctgacggtgcgca

SEQ ID NO: 533975 - DNA, 75 bp, synthetic construct
  source 1..75: mol_type = other DNA
atgcctgctgttgacctttcccagttaccggaacccgccatcatcgcgaagcctgattttgaggcaattctggct

SEQ ID NO: 533976 - DNA, 75 bp, synthetic construct
  source 1..75: mol_type = other DNA
ccgggccaaccggtgcttacgagtacttcgcaaaaagcgcgtcgggaaaggttgctgatgttaaggcatcaagtc

SEQ ID NO: 533977 - DNA, 75 bp, synthetic construct
  source 1..75: mol_type = other DNA
gcgcagaaatcatcccgtaccgggtggatgccaccatttttctctatccggggccggaagccgagccggtaatgg

SEQ ID NO: 533978 - DNA, 75 bp, synthetic construct
  source 1..75: mol_type = other DNA
ctggcaatgctcctcgataaactggactggcgtcagcccaaaacatcccgccttaatgcactgacaatgttgtaa

SEQ ID NO: 533979 - DNA, 75 bp, synthetic construct
  source 1..75: mol_type = other DNA
tacccgcaccggatgtggtcgaggagctggattttgaaagcattctcgctgaacgcaaggcgacactgatttccc

SEQ ID NO: 533980 - DNA, 75 bp, synthetic construct
  source 1..75: mol_type = other DNA
ctgctgagctgtactatcccctttttcgtcgtgctcgcatcctcaagcgccacggcggatgcaatatcctctgcc

SEQ ID NO: 533981 - DNA, 75 bp, synthetic construct
  source 1..75: mol_type = other DNA
gctggcacgtaaaacaatctgtttttcacgttctgttgagcttcatgaaaaagtcatcggggcattcattgaaaa

SEQ ID NO: 533982 - DNA, 75 bp, synthetic construct
  source 1..75: mol_type = other DNA
tcgtcgtgctcgcatcctcaagcgccacggcggatgcaatatcctctgcccgttttgctgctgtctcggcgcgcg

SEQ ID NO: 533983 - DNA, 75 bp, synthetic construct
  source 1..75: mol_type = other DNA
tgcaaaatcgaccacatcactgatggggaacaatattacggaatactccagatttcatcttttcagatacaatta

SEQ ID NO: 533984 - DNA, 75 bp, synthetic construct
  source 1..75: mol_type = other DNA
ggttctacctatgatacttataacgatgttttcaaagaatatcttgtctaccaaaagcttcctgaatttagactg

SEQ ID NO: 533985 - DNA, 75 bp, synthetic construct
  source 1..75: mol_type = other DNA
ttttgccgctaggtcttctggaaaaaaaggtgcatggattatttctgtcattatcaccattaacaccggaggcgg

SEQ ID NO: 533986 - DNA, 75 bp, synthetic construct
  source 1..75: mol_type = other DNA
ttgcccgtgctgactttgaagcccgacaacgggcggcgcggacggatgaaaccacctatgtggtgcagggctggc

SEQ ID NO: 533987 - DNA, 75 bp, synthetic construct
  source 1..75: mol_type = other DNA
aatgaaggtggcacagtctttaccgtctcactgacacgtccggtgtgggtgcgcgcttatgttgatgaacgtaat

SEQ ID NO: 533988 - DNA, 75 bp, synthetic construct
  source 1..75: mol_type = other DNA
tgcaggcgaaagcgggcgtctcggtggcacaggcgcagtatgacctgatgcttgccgggtatcgcgatgaagaaa

SEQ ID NO: 533989 - DNA, 75 bp, synthetic construct
  source 1..75: mol_type = other DNA
tgacagtgtgtaccgggtgaaacgtcagcgtgatctgaacggagcgcggcgctttctgctgctggagtgtacgga

SEQ ID NO: 533990 - DNA, 75 bp, synthetic construct
  source 1..75: mol_type = other DNA
gtttactcaggaccagaacggcaccctgacggaaatccgtgtcggcccgcctgatgcttatctgcctgaacccga

SEQ ID NO: 533991 - DNA, 75 bp, synthetic construct
  source 1..75: mol_type = other DNA
gttcggtcagcaccggtattgccggacgtagtctgactgctgacctgattgactgtgcagccgaaccgacacagt

SEQ ID NO: 533992 - DNA, 75 bp, synthetic construct
  source 1..75: mol_type = other DNA
cagaaaacggatgctttagctctattggtagggcttatggattgtggcgcctttggagtgggctggaagagctac

SEQ ID NO: 533993 - DNA, 75 bp, synthetic construct
  source 1..75: mol_type = other DNA
gtgaagagagcagacaggcagcttcctgaacgtcaaccggataagaaaaaagagcagatatgtttaacagtttgt

SEQ ID NO: 533994 - DNA, 75 bp, synthetic construct
  source 1..75: mol_type = other DNA
tggcagcttctgacgctttcgtggtcgcggtggatgcagaagtggcggctgattgttctgacgctgcggcattcg

SEQ ID NO: 533995 - DNA, 75 bp, synthetic construct
  source 1..75: mol_type = other DNA
caaacgtgaactgtacgagattgagcgtgacggtaacactattgaatacgatggcatgacgatggaacgcgtgga

SEQ ID NO: 533996 - DNA, 75 bp, synthetic construct
  source 1..75: mol_type = other DNA
gagtggtggctttggccattattggtgtgaattgaacttcgaagaagtgcaatattatattgacatcacttccga

SEQ ID NO: 533997 - DNA, 75 bp, synthetic construct
  source 1..75: mol_type = other DNA
tgaccagaaacgtccgggagacttaaaactggacccgaatgaagcttattaccgggtactggttaccaccagtaa

SEQ ID NO: 533998 - DNA, 75 bp, synthetic construct
  source 1..75: mol_type = other DNA
tgatagccagcgtagatataaaaaccgggcgtaaaacagtattccagtatctgattaaaccgataactagaatga

SEQ ID NO: 533999 - DNA, 75 bp, synthetic construct
  source 1..75: mol_type = other DNA
ggggatcagtttcagggtttcaagggaagcactcacattgtcatcaatcttcgcaacaaggacctcggaaaaatg

SEQ ID NO: 534000 - DNA, 75 bp, synthetic construct
  source 1..75: mol_type = other DNA
aatgtgaaaactggcacgctcgcggagattgggcaactggctgatctcgcagtagtcgttggtggcgacggtaat

SEQ ID NO: 534001 - DNA, 75 bp, synthetic construct
  source 1..75: mol_type = other DNA
tatatgttctactaattggagtcatcaccgcttttttgttgttgtctttatgaaatcctcttataaaacaaatat

SEQ ID NO: 534002 - DNA, 75 bp, synthetic construct
  source 1..75: mol_type = other DNA
ctttaactgatgatcagattaggaaaatagataggatgctctatgattttgatatagtagggcggactaataaga

SEQ ID NO: 534003 - DNA, 75 bp, synthetic construct
  source 1..75: mol_type = other DNA
ttcgtcgctgtgattaccatctgaatctgattcatccgaaagattacagttatttcaacacattaagcaccaagc

SEQ ID NO: 534004 - DNA, 75 bp, synthetic construct
  source 1..75: mol_type = other DNA
ccatcactggatgcaattaccctggtgccaatgttcccgcatacactctcggcgcgcccgctggtcattaacagc

SEQ ID NO: 534005 - DNA, 75 bp, synthetic construct
  source 1..75: mol_type = other DNA
caccgtgaatcttagcttccgtgtcggtggtcgcgttgagtcgctggccgtggacgaaggtgatgcgattaaagc

SEQ ID NO: 534006 - DNA, 75 bp, synthetic construct
  source 1..75: mol_type = other DNA
tgaaacgttatatcgcacgcgaggtcttcacactgcttcgcaatcaaaatcggcagattaacagcactcaaataa

SEQ ID NO: 534007 - DNA, 75 bp, synthetic construct
  source 1..75: mol_type = other DNA
cggctccacctctgaatttacgccgggatatgtcaaacccaagcacttagcatggctttctgaggctttcgtgta

SEQ ID NO: 534008 - DNA, 75 bp, synthetic construct
  source 1..75: mol_type = other DNA
ggaagcagcatatgaaaaatatggctttaatgatttcaaactgaagggcggtgtactggccggagaagaagaagc

SEQ ID NO: 534009 - DNA, 75 bp, synthetic construct
  source 1..75: mol_type = other DNA
attggtgttgagtgtacaggcacctatggatcaggtctgcttcgctatttacagaatgccgggttagaagttctt

SEQ ID NO: 534010 - DNA, 75 bp, synthetic construct
  source 1..75: mol_type = other DNA
tcttgaggtgactgctccagaccggatggagcgacgcaaacggggtaaaagtgacacaattgatgctgaatgtgc

SEQ ID NO: 534011 - DNA, 75 bp, synthetic construct
  source 1..75: mol_type = other DNA
ggataaaatggaacgccgcaggcgtggaaaaagtgacacaattgatgctgaaagtgccgcccacgcagctttctc

SEQ ID NO: 534012 - DNA, 75 bp, synthetic construct
  source 1..75: mol_type = other DNA
ttatatttaggaaaggtgaaagatgattctaaagaatataaaaaatatcttagcactcaatatatcaatgctaca

SEQ ID NO: 534013 - DNA, 75 bp, synthetic construct
  source 1..75: mol_type = other DNA
ttttaagaaagaatgagtatgaagcatggatcagacgactcaactggaaatttatggatgaacgtatccagaatg

SEQ ID NO: 534014 - DNA, 75 bp, synthetic construct
  source 1..75: mol_type = other DNA
aaataactggtccaaccctaatagaaacaaaaatgagtggcgatatacacctaagctgcctaccccagtaaaaaa

SEQ ID NO: 534015 - DNA, 75 bp, synthetic construct
  source 1..75: mol_type = other DNA
ctattcatgtagttaccgggatagaagcggcaatgctggatctgctggggcagcatctgggggttaacgtggcat

SEQ ID NO: 534016 - DNA, 75 bp, synthetic construct
  source 1..75: mol_type = other DNA
aggtttctccgggcgtgaagtgatggcagagttccgtcgcgcgactggcctgccgaccgcaaccaatatgatcgc

SEQ ID NO: 534017 - DNA, 75 bp, synthetic construct
  source 1..75: mol_type = other DNA
attttataatgaagtgacaggaggagacagcggttccggattttatctttatgacaatcagagaaaaaaatgggt

SEQ ID NO: 534018 - DNA, 75 bp, synthetic construct
  source 1..75: mol_type = other DNA
attattggccgtttttcgccatttttaatgtccgctattggtcattaatgttgtccgctttccgccatttcatca

SEQ ID NO: 534019 - DNA, 75 bp, synthetic construct
  source 1..75: mol_type = other DNA
ctgatgcttatctgcctgaacccgaagatcccggtgcgcggaaaaagaaaaaagccagagtacaggaggacccgt

SEQ ID NO: 534020 - DNA, 75 bp, synthetic construct
  source 1..75: mol_type = other DNA
ctgatgcttatctgcctgagcccgaagcccccggcgcgcggaaaaagaaaaaagccagagtacaggaggacccgt

SEQ ID NO: 534021 - DNA, 75 bp, synthetic construct
  source 1..75: mol_type = other DNA
tgcgcaggaagagttaggttatcaaccagtcctcaccctggatgaaggtatcgagaaaactgccgcctggctacg

SEQ ID NO: 534022 - DNA, 75 bp, synthetic construct
  source 1..75: mol_type = other DNA
tgcaggcgaaagcgggtgtttcggtggcgcaggcgcagtatgacctgatgcttgccgggtatcgcgatgaagaaa

SEQ ID NO: 534023 - DNA, 75 bp, synthetic construct
  source 1..75: mol_type = other DNA
attggtttcgtttcgccgactgctgaatttaccccgaaaaccgtcgaaacaccggatctgcgtaccgacctcgtc

SEQ ID NO: 534024 - DNA, 75 bp, synthetic construct
  source 1..75: mol_type = other DNA
aagggttgtggaaaagtcgcaccatttcggcaaacgacctggaaaatgcccgctcctcgcgcgaccaggctctgg

SEQ ID NO: 534025 - DNA, 75 bp, synthetic construct
  source 1..75: mol_type = other DNA
ttagccgccctgccatctgccggatgctgggcggaattagcagggggacgttttatttatggcgtaaaaagtggg

SEQ ID NO: 534026 - DNA, 75 bp, synthetic construct
  source 1..75: mol_type = other DNA
tcattataactagcacattgattttatgttcttgtgataaaaacgataaagattgtttttcgccagataagagag

SEQ ID NO: 534027 - DNA, 75 bp, synthetic construct
  source 1..75: mol_type = other DNA
ttattctaatcagtttattgaccctatgttcttgcgacaaaaatgataaagattgtttatcgacgcaagataata

SEQ ID NO: 534028 - DNA, 75 bp, synthetic construct
  source 1..75: mol_type = other DNA
tctgcccgttttgccgctgtctcggcgcgcgttgccgcggattccgccgtacttttgctctgtgctgccgccgtc

SEQ ID NO: 534029 - DNA, 75 bp, synthetic construct
  source 1..75: mol_type = other DNA
caacggattctgggacatgccactattcagcaaacgatgacttatgcgcatttttctcccgactatctggcagat

SEQ ID NO: 534030 - DNA, 75 bp, synthetic construct
  source 1..75: mol_type = other DNA
cgatacccgccagcaggatgacctgaacagtctggatgaactgcgaacgctggcgattgatgttgattatctcga

SEQ ID NO: 534031 - DNA, 75 bp, synthetic construct
  source 1..75: mol_type = other DNA
gtcagccgctggagtttcggcgggaaggtttgcaacatggggtgctggataagctgcgcagtggtaaatatccgc

SEQ ID NO: 534032 - DNA, 75 bp, synthetic construct
  source 1..75: mol_type = other DNA
tttcactggatccgattgccggccacgagcagagtggaaaacgtccggtactcattgtttctccggcatcgttta

SEQ ID NO: 534033 - DNA, 75 bp, synthetic construct
  source 1..75: mol_type = other DNA
ttgcaccaactaaaccaacaagaaattggttacatattgccggaattgcctgtttggtagtctgcacgttcatgt

SEQ ID NO: 534034 - DNA, 75 bp, synthetic construct
  source 1..75: mol_type = other DNA
gcgcaggaaggtgtggcaccgaaagcgttcgctaaactttctaagcgcgcagtacccgcgaaagggctgaccttc

SEQ ID NO: 534035 - DNA, 75 bp, synthetic construct
  source 1..75: mol_type = other DNA
caattagcggaacagcaacgcctggctcagcagtcgcgtacgactgaacaaagctggcagcagcagacgcgtacg

SEQ ID NO: 534036 - DNA, 75 bp, synthetic construct
  source 1..75: mol_type = other DNA
agccgcggcagtctaaacctgcgtccactcagcaaccgtaccaggatctgctgcaaacgcctgcgcatactgctg

SEQ ID NO: 534037 - DNA, 75 bp, synthetic construct
  source 1..75: mol_type = other DNA
gcctgcctgaaagacgagaagaaagccttgatgcagcaactgctgaccgggaaacgtcgggtgaaagtggatgag

SEQ ID NO: 534038 - DNA, 75 bp, synthetic construct
  source 1..75: mol_type = other DNA
ataaaaagattaaatcgatatccagagggagtagtaacaactctgtatatatgttttgaacttactacacccaaa

SEQ ID NO: 534039 - DNA, 75 bp, synthetic construct
  source 1..75: mol_type = other DNA
cctgaaagaagagaaaaaagccctgatgcagcagttattgaccgggaaacgccgtgtcaaagtagaatcggaaga

SEQ ID NO: 534040 - DNA, 75 bp, synthetic construct
  source 1..75: mol_type = other DNA
taatgagcgtaatattaaaagaagctgaccccaaaaaatttcctgagaagttatcagaggacgccatcgtatctt

SEQ ID NO: 534041 - DNA, 75 bp, synthetic construct
  source 1..75: mol_type = other DNA
acgccaggcgatatcgctatccctgctttggtttcagaagatttaaatggtgtagtttgcggttaccacctcgca

SEQ ID NO: 534042 - DNA, 75 bp, synthetic construct
  source 1..75: mol_type = other DNA
atgaatatgatgatctcatatcaggaacttgttcgcaccttccctagcattggtgtgcacatagagaaaatgatt

SEQ ID NO: 534043 - DNA, 75 bp, synthetic construct
  source 1..75: mol_type = other DNA
aaaccgtgggagccgttaagcgtaacgctgtcggaagaggcgcgttcctccagctacagcaacagtgacggttca

SEQ ID NO: 534044 - DNA, 75 bp, synthetic construct
  source 1..75: mol_type = other DNA
gcggtagcggggcatgttacgtcgcgctgcgtaaaacggtgcaggcgaagctggaaaactgggaacgccacgcta

SEQ ID NO: 534045 - DNA, 75 bp, synthetic construct
  source 1..75: mol_type = other DNA
aatatccgcaacaggcgagcctgaatcttttgcgccagccggtggaagagtgccgcaaaatggtgttcagtttca

SEQ ID NO: 534046 - DNA, 75 bp, synthetic construct
  source 1..75: mol_type = other DNA
gaaaacaatccaatgtggatccagttgcacagccacctggatgacagcctgtatcgcaaagagtggttgggcgat

SEQ ID NO: 534047 - DNA, 75 bp, synthetic construct
  source 1..75: mol_type = other DNA
gaaaggcaaagagaacgcagacagcaccctcaatcggttgaagatggcgggtcatacaaactgcattcggctcgc

SEQ ID NO: 534048 - DNA, 75 bp, synthetic construct
  source 1..75: mol_type = other DNA
ggtgcagtgcggttcgttcagaggcgcggaacaggcagagacggtacgtgctcagctggcgttcgaaggctttga

SEQ ID NO: 534049 - DNA, 75 bp, synthetic construct
  source 1..75: mol_type = other DNA
aaaaaacaatacgaattcagaaaagaattatccactgaagaagcacttagtgatgatgcagaaagtaagtatgaa

SEQ ID NO: 534050 - DNA, 75 bp, synthetic construct
  source 1..75: mol_type = other DNA
attctcgaacgttgacgatatttattttgacggctatctgtttgattcatggccgctggataaagtcgacgtctg

SEQ ID NO: 534051 - DNA, 75 bp, synthetic construct
  source 1..75: mol_type = other DNA
cgccgtacaatcctggcgaacggctgccgccggagcgtgaaattgcagaaatgcttgatgtcacgcggacggtgg

SEQ ID NO: 534052 - DNA, 75 bp, synthetic construct
  source 1..75: mol_type = other DNA
gccgccagcagcgatctgggatacttgcaagtcagcggcagccagctaaaacaggattttctcggcctgccacac

SEQ ID NO: 534053 - DNA, 75 bp, synthetic construct
  source 1..75: mol_type = other DNA
cgcctcctcaatactcaaacagggatcgtttcgcagaggatactacagttttttgaaatcagcgacttgaaagtt

SEQ ID NO: 534054 - DNA, 75 bp, synthetic construct
  source 1..75: mol_type = other DNA
tcaaaaatcctgaaactggaaggctccgggcatgaattgcatcatgaagactggccgaagattatccaggcgatc

SEQ ID NO: 534055 - DNA, 75 bp, synthetic construct
  source 1..75: mol_type = other DNA
ctgtacttccatatgttcatggattggcgttgaaggatgcgattcgtggttcaaaaatcctgaaactggaaggct

SEQ ID NO: 534056 - DNA, 75 bp, synthetic construct
  source 1..75: mol_type = other DNA
cgggtttgctgggtaaaagtttttacccagaggtgatgcgtttagatccgcgcaccaccagaccgtggttgttag

SEQ ID NO: 534057 - DNA, 75 bp, synthetic construct
  source 1..75: mol_type = other DNA
ggagtggaagagagtaaaactgggtgcgatagccgatatgaacagtggaggtactccgaaatcaacggttgaaga

SEQ ID NO: 534058 - DNA, 75 bp, synthetic construct
  source 1..75: mol_type = other DNA
gataaggcgatttcggtgacggaaaagcttctcaccaacagtcagcagcagaaaaaagccctgatgcagcaatta

SEQ ID NO: 534059 - DNA, 75 bp, synthetic construct
  source 1..75: mol_type = other DNA
tgaatccgcagcagtttatgtccggagacaagaacccgcagggcggggatgccggcaaggagggcggaaatggcg

SEQ ID NO: 534060 - DNA, 75 bp, synthetic construct
  source 1..75: mol_type = other DNA
ggctcatggcttgctaaatgtaaaaccttcggacttcttttcattaaaagttgcggttcctggctttgaagagca

SEQ ID NO: 534061 - DNA, 75 bp, synthetic construct
  source 1..75: mol_type = other DNA
ggagtgggaaaaagggaaattttgtgatatggccaatattgatacaggctatgcttttaaaagcaaagatttcac

SEQ ID NO: 534062 - DNA, 75 bp, synthetic construct
  source 1..75: mol_type = other DNA
tgataaagctgctggtgcagcccaattaaatattagcataagcgatcttcgaagtatggttgtgtactatccgtg

SEQ ID NO: 534063 - DNA, 75 bp, synthetic construct
  source 1..75: mol_type = other DNA
gctttttgatgactctgcagcagcactttttgctgcttcacgggcctttgtcgatgccgttcctgcgctggaaga

SEQ ID NO: 534064 - DNA, 75 bp, synthetic construct
  source 1..75: mol_type = other DNA
ttcatgtcgggtagcagctgcacattactgtgcagccgccccctaagaaccgtacgtgccagtttcccggcatac

SEQ ID NO: 534065 - DNA, 75 bp, synthetic construct
  source 1..75: mol_type = other DNA
atgtccccggaattggtatcagacattgcaagagtggcgcatgaaaagctactttcaattttaacggagtgcggc

SEQ ID NO: 534066 - DNA, 75 bp, synthetic construct
  source 1..75: mol_type = other DNA
gtgccggatatgaccggtgttgtggatacgacctttgatgacaaggtgcgtcagcatgccactacggagatgcag

SEQ ID NO: 534067 - DNA, 75 bp, synthetic construct
  source 1..75: mol_type = other DNA
aaaaaactcgcctgcctgagagatgagaaaaaagccctgatgcaacagctactgactggcaaacgtcgtgttaag

SEQ ID NO: 534068 - DNA, 75 bp, synthetic construct
  source 1..75: mol_type = other DNA
cgcctcttttgaagccgacgcatcccgggctgaggtggctgcttctgacgctttcgtggtcgcggtggatgcaga

SEQ ID NO: 534069 - DNA, 75 bp, synthetic construct
  source 1..75: mol_type = other DNA
gcaggcgacgaaaccttttctgcgtgcggcaggtagcgtcattgcctggtattttaactttggctttgctggctt

SEQ ID NO: 534070 - DNA, 75 bp, synthetic construct
  source 1..75: mol_type = other DNA
atgctgggcttccctcaggagtcattgctattgatggcgggaaaacagcgcgcttttctcgtggcgcaaaccatc

SEQ ID NO: 534071 - DNA, 75 bp, synthetic construct
  source 1..75: mol_type = other DNA
ggtgtttggcgttaagtatctcgaagcgtatgacctgattcaggtgatgctgggcgcaattgtgatttcgatgct

SEQ ID NO: 534072 - DNA, 75 bp, synthetic construct
  source 1..75: mol_type = other DNA
tgggcgcgattgttatttcgatgctgggtttcccgcaggaatcattgctgctgatggcggggaaacaacgcgctt

SEQ ID NO: 534073 - DNA, 75 bp, synthetic construct
  source 1..75: mol_type = other DNA
cgtgatcgcctggtacgcctcgaatctggttggtggcacgatgtactggtggtttgctgcgcgtgaactgcgtcg

SEQ ID NO: 534074 - DNA, 75 bp, synthetic construct
  source 1..75: mol_type = other DNA
atttggtctgcgcgtaactcatgtagcacggtgctggtggggatcgtattagggccagctgcagccgggctattt

SEQ ID NO: 534075 - DNA, 75 bp, synthetic construct
  source 1..75: mol_type = other DNA
atggttacgctttggggaaattatgaggggatctctcaggactccgcgaccgatgcgctatttaccgggcatcga

SEQ ID NO: 534076 - DNA, 75 bp, synthetic construct
  source 1..75: mol_type = other DNA
agatgttacaggtcgtggaatattatcgcgatgaaactgaccgtgaatatttaaaaggctgcggagaaaccgttg

SEQ ID NO: 534077 - DNA, 75 bp, synthetic construct
  source 1..75: mol_type = other DNA
gcgattgaaaatatcgacaacattcagcctggcgtcgcccactccatcggtgactcattgacttaccgcgtggag

SEQ ID NO: 534078 - DNA, 75 bp, synthetic construct
  source 1..75: mol_type = other DNA
ttaggtctggatgaccaaagcttttggctggcggcgctgtattgcacgctcattccttcaatggcttcctccacg

SEQ ID NO: 534079 - DNA, 75 bp, synthetic construct
  source 1..75: mol_type = other DNA
acgggctcatggcttgctaaatgtaaaaccttcggacttcttttcattaaaagttgcggttcctggctttgaaga

SEQ ID NO: 534080 - DNA, 75 bp, synthetic construct
  source 1..75: mol_type = other DNA
aaccctgtgtatttacctgattcctttaaatttgactataaaagattcttggtatcgccaggtgatttggtcatg

SEQ ID NO: 534081 - DNA, 75 bp, synthetic construct
  source 1..75: mol_type = other DNA
aggaaggggcgatggtcagcggctacgatccgcagcgcggtgagcaggttatcgcctgggttcggcgtttcctcg

SEQ ID NO: 534082 - DNA, 75 bp, synthetic construct
  source 1..75: mol_type = other DNA
ctggtggttccggcaatgaacgcccgctacgcgctgaacgcggcgaacgctcgctggggctcactgtacgatgcg

SEQ ID NO: 534083 - DNA, 75 bp, synthetic construct
  source 1..75: mol_type = other DNA
tgcccagaccgagttcaatgctgaatttgaaccgctgctggacgatctgctgactattccggttgctgaaaacgc

SEQ ID NO: 534084 - DNA, 75 bp, synthetic construct
  source 1..75: mol_type = other DNA
cgatgccaacggacggattggcaaagacgatccggcgcatatcaacgatgttatcgtcgaagcggccatcagtac

SEQ ID NO: 534085 - DNA, 75 bp, synthetic construct
  source 1..75: mol_type = other DNA
ctgcacggacgctcgctgctgtttatccgcaacgtgggtcatttgatgaccattcctgtgatttgggacagcgaa

SEQ ID NO: 534086 - DNA, 75 bp, synthetic construct
  source 1..75: mol_type = other DNA
ccgacctgcattttgctgaaaaataacggcctgcatattgaactgcaaattgatgccaacgggcggattggcaaa

SEQ ID NO: 534087 - DNA, 75 bp, synthetic construct
  source 1..75: mol_type = other DNA
cttcgtcagatattgggggccaggagctgcaggcactggcccagatgactgctcttcaaaagcagggacattccg

SEQ ID NO: 534088 - DNA, 75 bp, synthetic construct
  source 1..75: mol_type = other DNA
agagcatctggatggaacagatattcatgttggcggccaaagtctcggtggaggaaatgctagagaggttgctaa

SEQ ID NO: 534089 - DNA, 75 bp, synthetic construct
  source 1..75: mol_type = other DNA
actggctcactcgaaagcgcgattttcgcgagagtggtcaaagagggttataccgggctgcgtattgagttatcg

SEQ ID NO: 534090 - DNA, 75 bp, synthetic construct
  source 1..75: mol_type = other DNA
ggtggtcgataaacaattacgcatccagttgaaaaatggtaaagaaaccacgttacgtaccccggcgcagtttgt

SEQ ID NO: 534091 - DNA, 75 bp, synthetic construct
  source 1..75: mol_type = other DNA
gcaggctattgcccagatgtgtgccatacggcggctggggcatcaggtgatgctggcctgccgcgaacacagcag

SEQ ID NO: 534092 - DNA, 75 bp, synthetic construct
  source 1..75: mol_type = other DNA
ctagctcagccatgatggcgcatctgatggcggaaggtgtcaggacaccggtaacggttattccaccgggtttcg

SEQ ID NO: 534093 - DNA, 75 bp, synthetic construct
  source 1..75: mol_type = other DNA
ggcccgatgctgcgtaaaaaccagatgaaatcgacgccttggatcaaagcctacgaacgtaataacgtgctttcc

SEQ ID NO: 534094 - DNA, 75 bp, synthetic construct
  source 1..75: mol_type = other DNA
accccgatcgtctgctggaacaagctgccgcgccgcatcgggggaagctgaaagttttcttcggtgcctgcgcag

SEQ ID NO: 534095 - DNA, 75 bp, synthetic construct
  source 1..75: mol_type = other DNA
cctatcaagggtggtacatcaaatactaacccactattcaaaggtagtacggctggtggtcactccctgattaac

SEQ ID NO: 534096 - DNA, 75 bp, synthetic construct
  source 1..75: mol_type = other DNA
caaaaagagaaagcaggactaaataaagaagtaaatacagaagaagcaccaactaagccaactccaaaacgagta

SEQ ID NO: 534097 - DNA, 75 bp, synthetic construct
  source 1..75: mol_type = other DNA
gcaattctcagcgccctgcgtctggcacaggagttaggcgctgagacggcaacgctttctgacccggcagaagaa

SEQ ID NO: 534098 - DNA, 75 bp, synthetic construct
  source 1..75: mol_type = other DNA
ggcggaagcccagcgactgcgggcgcaagggctggatattgtggttggcgtggtagaaacccacggtcggaaaga

SEQ ID NO: 534099 - DNA, 75 bp, synthetic construct
  source 1..75: mol_type = other DNA
ccgcgcggcggcgcggctggcgtcacggctgggtagcgtctggcacgcggtgtatgttgaaacccctgccctgca

SEQ ID NO: 534100 - DNA, 75 bp, synthetic construct
  source 1..75: mol_type = other DNA
tcgctttggtcgccgcccttttatcatgctcgggatgggtaatgactccaacttattgatagtgttttatgttca

SEQ ID NO: 534101 - DNA, 75 bp, synthetic construct
  source 1..75: mol_type = other DNA
tgctttttgcaggattattatccgatcgctttggtcgccgcccttttatcatgctcgggatgggtaatgactcca

SEQ ID NO: 534102 - DNA, 75 bp, synthetic construct
  source 1..75: mol_type = other DNA
gaataccctgaaaatgggcattatggatgaagaacgccggacctcgctgaacttgcgtagttgtatcgctcaggc

SEQ ID NO: 534103 - DNA, 75 bp, synthetic construct
  source 1..75: mol_type = other DNA
cagaagcagaacgtgtacgaatgatccgtaggggtgaatggatagtaacagcaccagaagtaaccgatataatgg

SEQ ID NO: 534104 - DNA, 75 bp, synthetic construct
  source 1..75: mol_type = other DNA
taaataaagaagtaaatacagaagaagcaccaactaagccaactcctaagcgagtaataaggccgcgtaagggtg

SEQ ID NO: 534105 - DNA, 75 bp, synthetic construct
  source 1..75: mol_type = other DNA
gtggccagcgcccctgcagctgctgaagcggtggaagccgcgccggtggccagcgcccctgcagctgatgaaccg

SEQ ID NO: 534106 - DNA, 75 bp, synthetic construct
  source 1..75: mol_type = other DNA
tgacttcaacggtgtcgttgaagaggttgattacgagaagtctcgtctgaaagtctctgtttctatctttggtcg

SEQ ID NO: 534107 - DNA, 75 bp, synthetic construct
  source 1..75: mol_type = other DNA
taggggtgcggatagaaaacgccgccgataatgccctgtttgcggtcggtgaaaatacctggacacctttcaact

SEQ ID NO: 534108 - DNA, 75 bp, synthetic construct
  source 1..75: mol_type = other DNA
tgttgatgccgttcctgcgctggaagtcgctgactgagccgacgacgcggcctgtccggctgacgtgctggctgc

SEQ ID NO: 534109 - DNA, 75 bp, synthetic construct
  source 1..75: mol_type = other DNA
ttagggttgattcaaaatgtctcatatggagcgtggccttacagtggtcaaaactgcacattcagtgcatgaaaa

SEQ ID NO: 534110 - DNA, 75 bp, synthetic construct
  source 1..75: mol_type = other DNA
tggcgctgctgaccaaaacggtctggttgccgtggatcaagctcgaaaagcccgacgcacgcctgattcgcctct

SEQ ID NO: 534111 - DNA, 75 bp, synthetic construct
  source 1..75: mol_type = other DNA
cgaagtcacaatggtgcatttgccacgcgtagaggcaacgctggccccgctggcgctgctgaccaaaacggtctg

SEQ ID NO: 534112 - DNA, 75 bp, synthetic construct
  source 1..75: mol_type = other DNA
aaggcattgatggcaccaactaccgtcagccggtgggctacaccatgaattgctcaaacagcgtcagcgacgact

SEQ ID NO: 534113 - DNA, 75 bp, synthetic construct
  source 1..75: mol_type = other DNA
ttgcacattcatggcatgaagaaatctttaagaatcctgtttggacaacgagtaaaagagttgcgtatcgctacc

SEQ ID NO: 534114 - DNA, 75 bp, synthetic construct
  source 1..75: mol_type = other DNA
aacgaagcctcgttacgtgatctccaacaacgttgtccggccagtgtaaaaatggagcaattccgccctaatctg

SEQ ID NO: 534115 - DNA, 75 bp, synthetic construct
  source 1..75: mol_type = other DNA
cattggtgatgtggtgtttgatgtggttaaaccttgtagccgctgtattttcaccaccgtcagcccagaaaaagg

SEQ ID NO: 534116 - DNA, 75 bp, synthetic construct
  source 1..75: mol_type = other DNA
tcgcattgagcgcggtggctctaatgcgtctttggatgcgattgaggtgctagctaatgctctgagtgttgagcc

SEQ ID NO: 534117 - DNA, 75 bp, synthetic construct
  source 1..75: mol_type = other DNA
tggctcgtgctttaatcctggacttgcgagcagtcgcgatggttcgtttggagtaggtgataaagcggctcagaa

SEQ ID NO: 534118 - DNA, 75 bp, synthetic construct
  source 1..75: mol_type = other DNA
gagacagcaaaatggcgtaggcccaatgccagtggcaactggggcattgtttcggcagtgcggtggggcaaactg

SEQ ID NO: 534119 - DNA, 75 bp, synthetic construct
  source 1..75: mol_type = other DNA
agaactgatgcccgatgtggaactgatgcagaagacgctgggggaaatgaacggtgacgcggaactacgcggtag

SEQ ID NO: 534120 - DNA, 75 bp, synthetic construct
  source 1..75: mol_type = other DNA
tgaagaaaattcttgtcaaagacgaatcaaaacgattcggtctgaacgccttcaaaatgctcggcggtgcgtacg

SEQ ID NO: 534121 - DNA, 75 bp, synthetic construct
  source 1..75: mol_type = other DNA
caccacaattaatggtgaaacggtgctgagtaccgggatcgatggctttggcattcgcattcagaatgccaccga

SEQ ID NO: 534122 - DNA, 75 bp, synthetic construct
  source 1..75: mol_type = other DNA
cgtgccggtgaaacagagtggtacaaccttagcggcagcggaatttaacgccagcgccacaattgtggtggatta

SEQ ID NO: 534123 - DNA, 75 bp, synthetic construct
  source 1..75: mol_type = other DNA
ctacgtcctcgttcagatggtgatgaacgacgcgagctggcacctggtgcgcagcgtaccgcgtgtgatgggctt

SEQ ID NO: 534124 - DNA, 75 bp, synthetic construct
  source 1..75: mol_type = other DNA
cacgttctgctgcaagccggtgtcggagcaatggccggtggtgtgctgggttatctggtcgacgtctatagcccg

SEQ ID NO: 534125 - DNA, 75 bp, synthetic construct
  source 1..75: mol_type = other DNA
tgtgtgaaaaatatcatcttgatatcgaaacgctgtcatttgagcacctgaaaaatgccatcggcgaaaaaatga

SEQ ID NO: 534126 - DNA, 75 bp, synthetic construct
  source 1..75: mol_type = other DNA
cgggcattgcgctgctggtctgcggggcgatgaattctgtcgctgtggcaggcgaatcgcaaacgaggtccttaa

SEQ ID NO: 534127 - DNA, 75 bp, synthetic construct
  source 1..75: mol_type = other DNA
ggcagtgatatcaaacaggtggatctgacgctgcgaatcctggtcgatggaccgccgccttgctccgtgaaggga

SEQ ID NO: 534128 - DNA, 75 bp, synthetic construct
  source 1..75: mol_type = other DNA
aacggtgaaccgctcgcgggtaaggggaaaattggcggtatgctggcgctgcgtggcgaagggacgccgtttccg

SEQ ID NO: 534129 - DNA, 75 bp, synthetic construct
  source 1..75: mol_type = other DNA
caataccgccgtgatcaacggagaaacggttctcagcacggatatcgccggcctgggggtgcggatagaaaacgc

SEQ ID NO: 534130 - DNA, 75 bp, synthetic construct
  source 1..75: mol_type = other DNA
aactcaaagcagtgccagtcaaacaggatggcgtgacgctgacaggcgcgcagtttaacgccagcatgacaatgg

SEQ ID NO: 534131 - DNA, 75 bp, synthetic construct
  source 1..75: mol_type = other DNA
agtgccagtgaaagagaacggggtacaactgacggcggcggaattcaacgccaccatgactatggtggtggatta

SEQ ID NO: 534132 - DNA, 75 bp, synthetic construct
  source 1..75: mol_type = other DNA
ttgaattacagttcacttcgcgaattgtatgcggtggcaaaccgtgagcctgtcaccattcatcctgacgatgca

SEQ ID NO: 534133 - DNA, 75 bp, synthetic construct
  source 1..75: mol_type = other DNA
tttacggaagggaagagtgagctgcaatggctggaaacgttctataacgttgcgcggcagcgtggagaaaatcag

SEQ ID NO: 534134 - DNA, 75 bp, synthetic construct
  source 1..75: mol_type = other DNA
gcgctggcatggctggaaaaatacaacggtccggaactgacacttacagcgtttgaaccaccggccagctcataa

SEQ ID NO: 534135 - DNA, 75 bp, synthetic construct
  source 1..75: mol_type = other DNA
gcgattacagcaatcagcatctggtgccgatgaaacaagtggtgccaccgcgtggtgaagcacgtaatgattttg

SEQ ID NO: 534136 - DNA, 75 bp, synthetic construct
  source 1..75: mol_type = other DNA
gtgggcgggtggcgccaacttcacccatcatcaggacactaatcgcctgatacgagcttggcaaaaaccggagct

SEQ ID NO: 534137 - DNA, 75 bp, synthetic construct
  source 1..75: mol_type = other DNA
ggtaatacggcgctggcatggctggaaaaatacaccggtccggaactgacacttacagcgtttgaaccaccggcc

SEQ ID NO: 534138 - DNA, 75 bp, synthetic construct
  source 1..75: mol_type = other DNA
gttgcaacctaccgtaacaatggcttctttggtcaggttgatggtctgaactttgctctgcaatatcagggtaat

SEQ ID NO: 534139 - DNA, 75 bp, synthetic construct
  source 1..75: mol_type = other DNA
tgggaaacttggcggcggtggtatcgctaacaaaactcagaactttgaagttgttgctcagtaccaatttgattt

SEQ ID NO: 534140 - DNA, 75 bp, synthetic construct
  source 1..75: mol_type = other DNA
ggtatcactacaatgaatacagcaaatttgctggtggtgatacagctgaagcatggacatttggtgcaaaatacg

SEQ ID NO: 534141 - DNA, 75 bp, synthetic construct
  source 1..75: mol_type = other DNA
ctgaattacagttctctgcgcgaattgtacgcggtggcaaaccgtgagcctgtcaccattcatcctgacgatgcc

SEQ ID NO: 534142 - DNA, 75 bp, synthetic construct
  source 1..75: mol_type = other DNA
cggcagcggcgaaacacgccgatatcgtcctccctgcaaccacctcgtttgagcgtaatgacctcaccatgaccg

SEQ ID NO: 534143 - DNA, 75 bp, synthetic construct
  source 1..75: mol_type = other DNA
tttcttaccattttgccaatggtggtaaccctacgcgccgcgctgcggtgctttcatctatgcagggcagcttgc

SEQ ID NO: 534144 - DNA, 75 bp, synthetic construct
  source 1..75: mol_type = other DNA
tgctgaatgggcggcgactatttgtggcatttcagcagagaaaatccgcgaactggcagctattttccatcaaaa

SEQ ID NO: 534145 - DNA, 75 bp, synthetic construct
  source 1..75: mol_type = other DNA
tttaaagctggtgcgaccaatgtttcaattcaactcaagaatggccagacgtttaattttccaaatgttccaatt

SEQ ID NO: 534146 - DNA, 75 bp, synthetic construct
  source 1..75: mol_type = other DNA
gcagccgctgtttttgagcctgccgcagctgaggcactctgtcccgctgccgtttcagaagacctggcgttcgtc

SEQ ID NO: 534147 - DNA, 75 bp, synthetic construct
  source 1..75: mol_type = other DNA
attatgccgttaagtttctacgcagtgaagcgtctagtgtacgtttgttcgccgaccagcttcgcaaaggaggcg

SEQ ID NO: 534148 - DNA, 75 bp, synthetic construct
  source 1..75: mol_type = other DNA
tgctggatggactgtcatttgcaatgaccgcgttgttctatattgtgataagacacatctcacaggttggggctt

SEQ ID NO: 534149 - DNA, 75 bp, synthetic construct
  source 1..75: mol_type = other DNA
cagctgaatgtcacgaataaactgttgggcagtaataataccgtcctggtcgactttttaaacaagccagccagt

SEQ ID NO: 534150 - DNA, 75 bp, synthetic construct
  source 1..75: mol_type = other DNA
atggagctggtttacggttctgtgtcaggaaaatcttttagctgggaagaccggggaatggccctgagcatgaaa

SEQ ID NO: 534151 - DNA, 75 bp, synthetic construct
  source 1..75: mol_type = other DNA
gggtggagatggctatggagcatatgcagtcgagcggttcgttaacatttggagattgctacatatcacttaacg

SEQ ID NO: 534152 - DNA, 75 bp, synthetic construct
  source 1..75: mol_type = other DNA
ctttgactttggtttaagtctgggcgctgcttactctaactctgaccgtaccgacaatcaggttcacaaaggtac

SEQ ID NO: 534153 - DNA, 75 bp, synthetic construct
  source 1..75: mol_type = other DNA
tttacagaaggaaaaagtgagctgcaatggctggaaacgttttataacgtcgcccgacaacgtggggcacatcag

SEQ ID NO: 534154 - DNA, 75 bp, synthetic construct
  source 1..75: mol_type = other DNA
attatgccgttaagtttctacgcagtgaagcatctagtgtacgtttgttcgccgaccagcttcgcaaaggaggca

SEQ ID NO: 534155 - DNA, 75 bp, synthetic construct
  source 1..75: mol_type = other DNA
gtttcgccgtttcttcgagtatttatctgaatgggcaatgcatagccagacagagcacccagccaccgatgcttt

SEQ ID NO: 534156 - DNA, 75 bp, synthetic construct
  source 1..75: mol_type = other DNA
acaggacttttcacttaacaccccagccaccgatgctttcctggctgaagtgcgggcgcagggggtggagatgtt

SEQ ID NO: 534157 - DNA, 75 bp, synthetic construct
  source 1..75: mol_type = other DNA
gatgtatgctgaaacccgcaatatgacaccatatggtaatgtgggtatcgcaaataaaacccagaactttgagaa

SEQ ID NO: 534158 - DNA, 75 bp, synthetic construct
  source 1..75: mol_type = other DNA
gcgtgggtacgctttgccgatttcgccgtacaggacgcaccaacggaagtgtggggcaaccattttactgcacgt

SEQ ID NO: 534159 - DNA, 75 bp, synthetic construct
  source 1..75: mol_type = other DNA
actgaaaaaatcagccatgaacgacgacgggactattctttgctgcagttgtgtaccgaaaactacgctgaaact

SEQ ID NO: 534160 - DNA, 75 bp, synthetic construct
  source 1..75: mol_type = other DNA
tatcaactggcagggacaaatatttcgcggtaataaccaacaggtattgctggagcaattagaaaatcagggaat

SEQ ID NO: 534161 - DNA, 75 bp, synthetic construct
  source 1..75: mol_type = other DNA
cgaatcctccctcggcagaaagccacctgaacggttttaacaccgaccagatgctgaagcagctgggcaatctga

SEQ ID NO: 534162 - DNA, 75 bp, synthetic construct
  source 1..75: mol_type = other DNA
tggcggtgcatcgaaagcggcacagacactcagtgactactacatcaaacgcgctgagcagtatcacccggtgat

SEQ ID NO: 534163 - DNA, 75 bp, synthetic construct
  source 1..75: mol_type = other DNA
catcgctgccgtacattccgtcaggaagttttgcgaaagccatgctgattgaaggggcggatgccaatgcctcag

SEQ ID NO: 534164 - DNA, 75 bp, synthetic construct
  source 1..75: mol_type = other DNA
ccgtcattcctattggggcgggtaacgaagtgaccgttgtctttcaggacggttttcagctgaaaaccattgaag

SEQ ID NO: 534165 - DNA, 75 bp, synthetic construct
  source 1..75: mol_type = other DNA
gccatggatatctgctggtctgggttatgcacgggttcatcataaaacttcgtacatatataccgataacagccc

SEQ ID NO: 534166 - DNA, 75 bp, synthetic construct
  source 1..75: mol_type = other DNA
ggaatttcctgccgccgttgccgaggaagctgcgctactggcgctcgaggatgcgttcgtttctgatgatttcgc

SEQ ID NO: 534167 - DNA, 75 bp, synthetic construct
  source 1..75: mol_type = other DNA
cgcggtaataaccaacaggtactgctggaacaattagaaaatcaagggattcgtattccctattcttgccgtgcc

SEQ ID NO: 534168 - DNA, 75 bp, synthetic construct
  source 1..75: mol_type = other DNA
atgccacccggcagattgcggcgtttcagtcacaggtgcaggtacagcaggatgcgctgctggttgtcgatcgtc

SEQ ID NO: 534169 - DNA, 75 bp, synthetic construct
  source 1..75: mol_type = other DNA
gatgctgattgagggggctgacgccaacgcctccgtaaccggtaacgagtccacggtgccgatgcagctgcgcat

SEQ ID NO: 534170 - DNA, 75 bp, synthetic construct
  source 1..75: mol_type = other DNA
tcttaacggctttaataccgaccagatgctgaagcagctgggcaacctgaatccgcagacgtttatgtccggcag

SEQ ID NO: 534171 - DNA, 75 bp, synthetic construct
  source 1..75: mol_type = other DNA
tgtctaccgcatcaccttccgcgacacaaaacagattggtatcgactggacagcggtgtacagcgccgcaaaggg

SEQ ID NO: 534172 - DNA, 75 bp, synthetic construct
  source 1..75: mol_type = other DNA
tcctggctggcaccgggcagcgccacgctgaccgtgacggacacaccggaagtgcttaaccggattggggaatac

SEQ ID NO: 534173 - DNA, 75 bp, synthetic construct
  source 1..75: mol_type = other DNA
tgccaagttgcatgtcccggataagcgcggcgaacgtgatgcacttatcgctgcaacggcgctcgtacatggtat

SEQ ID NO: 534174 - DNA, 75 bp, synthetic construct
  source 1..75: mol_type = other DNA
acaccatatggtaatgtgggtatcgcaaataaaacccagaactttgaagctgtagcacagtatcagttcgatttt

SEQ ID NO: 534175 - DNA, 75 bp, synthetic construct
  source 1..75: mol_type = other DNA
attccaaaggcaaagatctttatgctcgtgatggacataaaggtgttgatgctgaccgcgtaaattatatcgaag

SEQ ID NO: 534176 - DNA, 75 bp, synthetic construct
  source 1..75: mol_type = other DNA
cgacgctcaggttaatcaactggccctgtacgccccacaagccacggtaaatcgtatcgacaactatgaagtcgt

SEQ ID NO: 534177 - DNA, 75 bp, synthetic construct
  source 1..75: mol_type = other DNA
gtggaaatgccgaacagcaaaacgtatgacgcaacgggatgttttgtggggctggaagcctggggggatgtctcc

SEQ ID NO: 534178 - DNA, 75 bp, synthetic construct
  source 1..75: mol_type = other DNA
atgctgaaacagctgggcaatctgaatccgcagcagtttatgtccggagacaagaacccgctgggcggggatgcc

SEQ ID NO: 534179 - DNA, 75 bp, synthetic construct
  source 1..75: mol_type = other DNA
aaactattgatatgccgattaaggggcatgtcagcttccggggtaaaaacggtatcaagggcgaagtggtgatgc

SEQ ID NO: 534180 - DNA, 75 bp, synthetic construct
  source 1..75: mol_type = other DNA
tggagtgatagtcatcaaggcacaggaataccgcagccaggaactgaaccgcgaagcggcgctggctcggctggt

SEQ ID NO: 534181 - DNA, 75 bp, synthetic construct
  source 1..75: mol_type = other DNA
tgacgtaccagtctgtgccggtgcctaaccggatacagcgtaaggtgtttacccgtaatgagggaaaacagggac

SEQ ID NO: 534182 - DNA, 75 bp, synthetic construct
  source 1..75: mol_type = other DNA
caccgccattcgtgcgcagggcgcgggcgggcagcatgttaataagacctcaacggctattcatctgcgttttga

SEQ ID NO: 534183 - DNA, 75 bp, synthetic construct
  source 1..75: mol_type = other DNA
ggtgtaccagaatccgctatctgtaaaaacgtcaaacagatgctggatgagctggagttcgggcgtaaatcgggt

SEQ ID NO: 534184 - DNA, 75 bp, synthetic construct
  source 1..75: mol_type = other DNA
tatttatgtgaataagcacgacgacggtactggtgatatgtcgcgttcacgtaagaagagtttcaactggtacaa

SEQ ID NO: 534185 - DNA, 75 bp, synthetic construct
  source 1..75: mol_type = other DNA
cgcgtcagcgtgaaattgccgcaaaacatggcattcgcctgactaaccacagtctctatctttacggtcactgtg

SEQ ID NO: 534186 - DNA, 75 bp, synthetic construct
  source 1..75: mol_type = other DNA
tcgcggtgatgccagcgtatgggtgattaacagcgacagtcgggcgatggatcctaagctggcggcgatgaaaat

SEQ ID NO: 534187 - DNA, 75 bp, synthetic construct
  source 1..75: mol_type = other DNA
gaaactcagccaaacgaagaagggctgaagttctacgatgatatgttcgatgaactgctgaaatacaacatcgaa

SEQ ID NO: 534188 - DNA, 75 bp, synthetic construct
  source 1..75: mol_type = other DNA
tgaaagtcggctgtatgctggcgatggtgccgctctacccttactcctgtaatccggacgatgtgatgttcgccc

SEQ ID NO: 534189 - DNA, 75 bp, synthetic construct
  source 1..75: mol_type = other DNA
ttcaacgaaattaacaaccagcgtaactggcgtgcaccgctgttcggttactgctgctccggcgtggtgtatacc

SEQ ID NO: 534190 - DNA, 75 bp, synthetic construct
  source 1..75: mol_type = other DNA
gtgccgcctcgctcagagaggcaatatcctctggcggtacgccgagagccgcgagattgttgggtaaacggtgtg

SEQ ID NO: 534191 - DNA, 75 bp, synthetic construct
  source 1..75: mol_type = other DNA
cggtttaccgctggataaccatccgcagtccaggaaaattcgtgcgctatggcttgaaatggctgctgctggcat

SEQ ID NO: 534192 - DNA, 75 bp, synthetic construct
  source 1..75: mol_type = other DNA
gatccctttctgctcgacgtgatccttgatgaagaaacgctggcccccttcctttcatggctggtccctgcgcgc

SEQ ID NO: 534193 - DNA, 75 bp, synthetic construct
  source 1..75: mol_type = other DNA
cagcgacctggatcgcatcgctgccgctgtgatgaaggaaaaacaaccgctgctgctggtcggctccgctggtat

SEQ ID NO: 534194 - DNA, 75 bp, synthetic construct
  source 1..75: mol_type = other DNA
tcggtgatgacgaaagccggtgggtttggcgatgagaccacgttgcatcaggttctgaattttatcgaggagaag

SEQ ID NO: 534195 - DNA, 75 bp, synthetic construct
  source 1..75: mol_type = other DNA
ctggccattattggttcaatgagcgaaatcgctcaacggcagatcgccacacttcattcacacccacgtatcaca

SEQ ID NO: 534196 - DNA, 75 bp, synthetic construct
  source 1..75: mol_type = other DNA
ggtactggcgatatgtcacgttcacgtaagaagagctttgattggtacaaagaagtgattgccagcaacggcgag

SEQ ID NO: 534197 - DNA, 75 bp, synthetic construct
  source 1..75: mol_type = other DNA
gaaccttaccgctggcgtgcgttaccaggcgcgggtagcccgttaccgcgagcaacgcacgcgacacttatatga

SEQ ID NO: 534198 - DNA, 75 bp, synthetic construct
  source 1..75: mol_type = other DNA
aacacatccgcaaggaatgacgccgtgggacgatgccatcgcgcagtggagttttgataaaggcctgcctgcggg

SEQ ID NO: 534199 - DNA, 75 bp, synthetic construct
  source 1..75: mol_type = other DNA
gcccgccaggccagcgagattcgtcagcatgtgctgaacactacccgactggtgaataatctactggatatggcg

SEQ ID NO: 534200 - DNA, 75 bp, synthetic construct
  source 1..75: mol_type = other DNA
acggtggtacgatcatcgcattcaaccgaccggaaggtggcgcttgttttcgtgttacacttcctcagcaaaccg

SEQ ID NO: 534201 - DNA, 75 bp, synthetic construct
  source 1..75: mol_type = other DNA
aaaagcagtagtgcgttatgcccgtgaacataatctcggcaagattattctcggtcgcccggcctcgcgccgctg

SEQ ID NO: 534202 - DNA, 75 bp, synthetic construct
  source 1..75: mol_type = other DNA
ccactctttgaacgggtgctgattaatctgctggagaacgcggtgaaatacgcgggtgcacaggccgaaattggt

SEQ ID NO: 534203 - DNA, 75 bp, synthetic construct
  source 1..75: mol_type = other DNA
ttggcgcacgtaacgataccgacgttgagattgtcaaaggattggaagcgggtgatgaagtggtgattggcgagg

SEQ ID NO: 534204 - DNA, 75 bp, synthetic construct
  source 1..75: mol_type = other DNA
tggccggggaagtcacgcaaatcaccactctgcaaggtcagacggtgattgccgcacaacaagcaccgaacattc

SEQ ID NO: 534205 - DNA, 75 bp, synthetic construct
  source 1..75: mol_type = other DNA
tggagttgcgcgcgcagcgtcagcaggcggaagcggaactgaaactggcacgggtgacgtattcacgtcagcaac

SEQ ID NO: 534206 - DNA, 75 bp, synthetic construct
  source 1..75: mol_type = other DNA
cggggaatctgcgtcagttgatgatcccggaacagcagcgcctgctggagacgtttacgctgttagtcgccaatg

SEQ ID NO: 534207 - DNA, 75 bp, synthetic construct
  source 1..75: mol_type = other DNA
caagggctggatattgtggttggcgtggtagaaacccacgggcggaaagataccgccgccatgctggaagggctg

SEQ ID NO: 534208 - DNA, 75 bp, synthetic construct
  source 1..75: mol_type = other DNA
ggtagcgttgcgcaatggttttatccttgaaggttgccttaaacaggctgagttcctgaatgatgcctttgatga

SEQ ID NO: 534209 - DNA, 75 bp, synthetic construct
  source 1..75: mol_type = other DNA
aattggacataatcttgttgcaggaattaaaaaaattaatgatattccatatattaaactagatctgagtgataa

SEQ ID NO: 534210 - DNA, 75 bp, synthetic construct
  source 1..75: mol_type = other DNA
aggttgcccgcagtcgcgccaccccgttgttggatttgatcatgacagcgttgacgccccatccaccgcaaaaac

SEQ ID NO: 534211 - DNA, 75 bp, synthetic construct
  source 1..75: mol_type = other DNA
cgcgcagtagaagaagcgcgcgcagtgactgacaaaccttccctgctgatgtgcaaaaccatcatcggtttcggt

SEQ ID NO: 534212 - DNA, 75 bp, synthetic construct
  source 1..75: mol_type = other DNA
cgttgaaggctggttcaccgacgacaccgcaatgcgtttcgaagcttacggctggcacgttattcgcgacatcga

SEQ ID NO: 534213 - DNA, 75 bp, synthetic construct
  source 1..75: mol_type = other DNA
cgtctgacttcgacgccaaagcgaaagagttcatcgctaaactgcaggctaatccggcgaaaatcgccagccgta

SEQ ID NO: 534214 - DNA, 75 bp, synthetic construct
  source 1..75: mol_type = other DNA
caaaagtcagtattttaagctataaaattatcaatgattatggcgcaagaactcctgtgtttgaggtccatttaa

SEQ ID NO: 534215 - DNA, 75 bp, synthetic construct
  source 1..75: mol_type = other DNA
cacagaatgcaaagtcttttagttatacaacgattaatgattatggtgggaaaaacccggttgtagatattaaat

SEQ ID NO: 534216 - DNA, 75 bp, synthetic construct
  source 1..75: mol_type = other DNA
ccggagctgaagctggaaagtgtggtgattgtcagtcgtcatggtgtgcgtgcaccaaccaaggccacgcaactg

SEQ ID NO: 534217 - DNA, 75 bp, synthetic construct
  source 1..75: mol_type = other DNA
ttggctgacaccgcgcggtggtgagctaatcgcttatctcggacattaccaacgccagcgtctggtggctgacgg

SEQ ID NO: 534218 - DNA, 75 bp, synthetic construct
  source 1..75: mol_type = other DNA
cgtctgacttcgacgcgaaagcaaaagagttcattgctaaactgcaggctaacccggcgaaaatcgccagccgta

SEQ ID NO: 534219 - DNA, 75 bp, synthetic construct
  source 1..75: mol_type = other DNA
atggcgattgcagaaaaaacgctggcggcgcagtttaaccgtccgggccacgacattgtcgaccactacacctac

SEQ ID NO: 534220 - DNA, 75 bp, synthetic construct
  source 1..75: mol_type = other DNA
aagcgtctcagaatgctatcgaagctttcggtccgctgttgcctgaattcctcggcggttctgctgacctggcac

SEQ ID NO: 534221 - DNA, 75 bp, synthetic construct
  source 1..75: mol_type = other DNA
aggttgcccgcagccgcgccaccccgttattagatttgatcaagacagcgttgacgccccatccaccgcaaaaac

SEQ ID NO: 534222 - DNA, 75 bp, synthetic construct
  source 1..75: mol_type = other DNA
cacctcaccggttacgatctgccgatggaagaactgaaaaacttccgtcaactgcattccaaaacgccgggccac

SEQ ID NO: 534223 - DNA, 75 bp, synthetic construct
  source 1..75: mol_type = other DNA
cctctataaaaatggatttgacgaaataaaatactttcagaatgaaatcacaaatattgagatgaaagctatgtc

SEQ ID NO: 534224 - DNA, 75 bp, synthetic construct
  source 1..75: mol_type = other DNA
atgactgtggaaaatgttaatgctacagttaaagaatatctgagtaaacccgcgaatacccacactggagtattg

SEQ ID NO: 534225 - DNA, 75 bp, synthetic construct
  source 1..75: mol_type = other DNA
aatatgatgatcctgctgtgtggatgacgcaggagaaagtgttaaagaatatgactgtggaaaatgttaatgcta

SEQ ID NO: 534226 - DNA, 75 bp, synthetic construct
  source 1..75: mol_type = other DNA
cctgtttaacgcgtcttacgtaaaagcaccaaacagctcggctgttactgctggtcacgttaccactaacgcaat

SEQ ID NO: 534227 - DNA, 75 bp, synthetic construct
  source 1..75: mol_type = other DNA
gtgaacattgctgttcataacatgaaaaacaaagctggcgctgctgaaattaagcaggtccatatgaacaattct

SEQ ID NO: 534228 - DNA, 75 bp, synthetic construct
  source 1..75: mol_type = other DNA
caaaaaagagaataattggaaacacaatacttctggcagataacagcctaaaaagcgatatatctgattttaaga

SEQ ID NO: 534229 - DNA, 75 bp, synthetic construct
  source 1..75: mol_type = other DNA
cgggcggctgattgccgccgccttaccgcaggatgaaaagttaattaccgggcaactgggcaatggcttgcgata

SEQ ID NO: 534230 - DNA, 75 bp, synthetic construct
  source 1..75: mol_type = other DNA
agagccatggcgcaatgcttccgacgtcactgttgtttattgtcggacacgataccaatctggcgaatctgggcg

SEQ ID NO: 534231 - DNA, 75 bp, synthetic construct
  source 1..75: mol_type = other DNA
tttctcttctgcttccgttaacactgtcgcctgcatacgctcagaatgagccggagctaaagctggaaagtgtgg

SEQ ID NO: 534232 - DNA, 75 bp, synthetic construct
  source 1..75: mol_type = other DNA
aagaagcgctggcgctgataaaggataatttaagtaagcttccggctaacaaagcagctgaaaatcgcgtctggc

SEQ ID NO: 534233 - DNA, 75 bp, synthetic construct
  source 1..75: mol_type = other DNA
tgcattatctcctgcagccattacggcgctggaaaatgaatatgccaacaaaaaactggcggcttatgtcttccc

SEQ ID NO: 534234 - DNA, 75 bp, synthetic construct
  source 1..75: mol_type = other DNA
ccagcggagaaattcgcccagcagatgtatgagacgcgctatgctgatgaccgcacgaaattactgcaagaaaat

SEQ ID NO: 534235 - DNA, 75 bp, synthetic construct
  source 1..75: mol_type = other DNA
atgttgagtaaaaagttgttgcttgtttgtgtgttatgtccgacgttaaccgcctgttctgttgatgagattgct

SEQ ID NO: 534236 - DNA, 75 bp, synthetic construct
  source 1..75: mol_type = other DNA
tcgcaaagtgctggaacaaaacttccgcgtcgaatttgccgataaaggcgaaggccgctggacgctgcgcctgac

SEQ ID NO: 534237 - DNA, 75 bp, synthetic construct
  source 1..75: mol_type = other DNA
gcaacgtatcgctgtgatgtggtccgagaaatctaatcagatgacggggctgccatccgggaaacggcaggtttt

SEQ ID NO: 534238 - DNA, 75 bp, synthetic construct
  source 1..75: mol_type = other DNA
gaatgatgaggtaaatgcgatccgcaataacggcacaactgacggaaaatggcaggcaagtgcgattattgacaa

SEQ ID NO: 534239 - DNA, 75 bp, synthetic construct
  source 1..75: mol_type = other DNA
tggctacagtatgttccacgcttagtgcatgttccgtggaagagatggctgctgtgaacaagaaaatcagtgacg

SEQ ID NO: 534240 - DNA, 75 bp, synthetic construct
  source 1..75: mol_type = other DNA
agtcagcgacgaaacaggagaagagtcattcactgaactggataacaaccagcgtgaactgacctatcaggaacc

SEQ ID NO: 534241 - DNA, 75 bp, synthetic construct
  source 1..75: mol_type = other DNA
cgaagaacgcgatatcgagctgataaaaggccttagggcagacctgcgtgaggcgggcgagagcaatattggtat

SEQ ID NO: 534242 - DNA, 75 bp, synthetic construct
  source 1..75: mol_type = other DNA
attctcgatctcatctgggaaacgctgaccgtcaaagacgcaaaagtaaatttcgacagccaactggagaaattt

SEQ ID NO: 534243 - DNA, 75 bp, synthetic construct
  source 1..75: mol_type = other DNA
tcatcagtctgtgggaaggctggagtatgggggacgtcatcggtaaacctgacgccggggattatgccagccgcc

SEQ ID NO: 534244 - DNA, 75 bp, synthetic construct
  source 1..75: mol_type = other DNA
ttctagcaatgccttatgtatttttagtgatagcgaaaacaaatacacacaggttaaagatctgagcatgcacaa

SEQ ID NO: 534245 - DNA, 75 bp, synthetic construct
  source 1..75: mol_type = other DNA
taactttttttttactaccccctacattatttctactaggcggtaagtcatatcagcaaaacttaacacaatcta

SEQ ID NO: 534246 - DNA, 75 bp, synthetic construct
  source 1..75: mol_type = other DNA
ggtaccactaaagtcacttatggcgagcatgtgtttgatttcggcaaaccgtttgaaaaactcaccatgcgcgaa

SEQ ID NO: 534247 - DNA, 75 bp, synthetic construct
  source 1..75: mol_type = other DNA
aatcactagaattacatgctgttgcagaaagtcacgtcacacctcttcatcagttaatctgtaaaaataaaacat

SEQ ID NO: 534248 - DNA, 75 bp, synthetic construct
  source 1..75: mol_type = other DNA
caaaatgttcatgattttcaaagaagatgaacttatcggcgttatctcgtttaatcgtattgaaccactgaataa

SEQ ID NO: 534249 - DNA, 75 bp, synthetic construct
  source 1..75: mol_type = other DNA
gtttattgacagtaaaagataccctggttgatgaaactatcggattttctaaaacaggtaaaaaagtgcctgggc

SEQ ID NO: 534250 - DNA, 75 bp, synthetic construct
  source 1..75: mol_type = other DNA
atattcatcagcataaaggaaccaccagtgccgtgcggcggggggtggagccgttcggctttctgatccgcatta

SEQ ID NO: 534251 - DNA, 75 bp, synthetic construct
  source 1..75: mol_type = other DNA
tttctgatccgcattattgagtggtggcagaccggagagacaccgggcacgtttcgtctggatatcggcgtgcag

SEQ ID NO: 534252 - DNA, 75 bp, synthetic construct
  source 1..75: mol_type = other DNA
ttgccggtgccgctgcgtgacttgtggaatccaacgacctgtccggtcagtttcctgccttatctcgcctgggcg

SEQ ID NO: 534253 - DNA, 75 bp, synthetic construct
  source 1..75: mol_type = other DNA
aacgaaacaattatttctggcggcaccgcgcatgaaggcggggcagtccacgttattgacacagtgagagtgaat

SEQ ID NO: 534254 - DNA, 75 bp, synthetic construct
  source 1..75: mol_type = other DNA
aacgacagcgcagggcggtcagaagcgtcgccacccgtgcacggaacgaactgataacaaccgagaagagaaaaa

SEQ ID NO: 534255 - DNA, 75 bp, synthetic construct
  source 1..75: mol_type = other DNA
agtgaaccggacagtgcgggaccgggtcgggtcacacgtaaaaagaccgtggtggtgaacacgactcctgcctgg

SEQ ID NO: 534256 - DNA, 75 bp, synthetic construct
  source 1..75: mol_type = other DNA
cgcctggttcacctggacttagagtacagaaatggccggtacagtctcagacgacagagcagcccaggtgcgatc

SEQ ID NO: 534257 - DNA, 75 bp, synthetic construct
  source 1..75: mol_type = other DNA
gaccttatacaatccataatatctagctgtttggctgagaaaccttacaattggttgatttgtgagggtactaca

SEQ ID NO: 534258 - DNA, 75 bp, synthetic construct
  source 1..75: mol_type = other DNA
tgctcatttctccggtttgctctacaccatctcaaccctgttttttgctgatccggaattaacaccggacagttt

SEQ ID NO: 534259 - DNA, 75 bp, synthetic construct
  source 1..75: mol_type = other DNA
tggcaatgccggaccggattcattcagcattctggaagagcaatccaccgccgaagctgatagccatgataattt

SEQ ID NO: 534260 - DNA, 75 bp, synthetic construct
  source 1..75: mol_type = other DNA
catcctccgtccgttcctgtacggaggcgcgctgctgggattttctggcgcattgctgtcattaattttgtccga

SEQ ID NO: 534261 - DNA, 75 bp, synthetic construct
  source 1..75: mol_type = other DNA
gtggtgcgctggatatgctggaagaaaacccgcttccggcagtggcggtggtgatcccgaaactcgattttcagg

SEQ ID NO: 534262 - DNA, 75 bp, synthetic construct
  source 1..75: mol_type = other DNA
atgaccgaaacgataaaagtaagtgaatcacttgaattacatgctgttgcagaaagtcatgtcacacctctttat

SEQ ID NO: 534263 - DNA, 75 bp, synthetic construct
  source 1..75: mol_type = other DNA
atcccgatttggtcgttgattgcggcaatacggatgaaacctggatctccctggcacggcaggttagcgaacaga

SEQ ID NO: 534264 - DNA, 75 bp, synthetic construct
  source 1..75: mol_type = other DNA
tctttctcgtgaggacgcgttgggcgagttccgtaactggtctggttttggcggcgcgctggacatgctggagga

SEQ ID NO: 534265 - DNA, 75 bp, synthetic construct
  source 1..75: mol_type = other DNA
ttgctgctggtgtgttcaatgattggctgggtggcagcgtggcttgccacggtgcaacatttacgccactttacg

SEQ ID NO: 534266 - DNA, 75 bp, synthetic construct
  source 1..75: mol_type = other DNA
agcagtcttgcaaagggcgaaaccaccaaagcggcgtttaatcagatggtgcaagggcataagctgcctgcctgg

SEQ ID NO: 534267 - DNA, 75 bp, synthetic construct
  source 1..75: mol_type = other DNA
tcaccttaattgccatgcagtggctgatggcgtttgatgccgccaacctggtgatgctgtatctgcttggcgtgg

SEQ ID NO: 534268 - DNA, 75 bp, synthetic construct
  source 1..75: mol_type = other DNA
actgccgatcgcgtagatgaacaaatgcgcgcctggcggggacatcctggcgaagagaaagtctggcacacgcgt

SEQ ID NO: 534269 - DNA, 75 bp, synthetic construct
  source 1..75: mol_type = other DNA
atgactgaaacgataaaagtaagcgaatcacttgaattacatgctgttgcggaaagtcatgtcacacctctttat

SEQ ID NO: 534270 - DNA, 75 bp, synthetic construct
  source 1..75: mol_type = other DNA
tatatcaggccatcaaaagaatgcgccgactggagcgtgaaaaatatcaaatgcaactatttaaggatgagtcat

SEQ ID NO: 534271 - DNA, 75 bp, synthetic construct
  source 1..75: mol_type = other DNA
tgcaggatgacaccatcctggcacatcttgacaatcccgccgaggatacgtcacgctttccggcactgctggcgg

SEQ ID NO: 534272 - DNA, 75 bp, synthetic construct
  source 1..75: mol_type = other DNA
cgcaaatcccctggttattgctcagcggtaaactggaacagtcagcagaacagatagagacgcttggaaaaatgt

SEQ ID NO: 534273 - DNA, 75 bp, synthetic construct
  source 1..75: mol_type = other DNA
gttatacgctgacggtggcaatgcttattccggagaattattactgttgcttcagtagcaatattcatgcttctg

SEQ ID NO: 534274 - DNA, 75 bp, synthetic construct
  source 1..75: mol_type = other DNA
caggtatacctaaaactgatttaattgaacaaatcagaccgattcatcaaaaatatggcacagctgaatactcat

SEQ ID NO: 534275 - DNA, 75 bp, synthetic construct
  source 1..75: mol_type = other DNA
ggccgtccggctgcggtaaaaccaccctgctgaatctgattgccggttttgtgccttatcagcacggcagcattc

SEQ ID NO: 534276 - DNA, 75 bp, synthetic construct
  source 1..75: mol_type = other DNA
cggaccgtatagccaccgcaatcctgacccatgcagggcgtaacggaccgttccttgccggtggagatataacgg

SEQ ID NO: 534277 - DNA, 75 bp, synthetic construct
  source 1..75: mol_type = other DNA
ggttttaatcactttcttgacatctctaaattgccattatttattttagcttcttcggtacctcttgcagcaatc

SEQ ID NO: 534278 - DNA, 75 bp, synthetic construct
  source 1..75: mol_type = other DNA
acatggcattcgcctgactaaccacagtctctatctttacggtcactgcgccgaaggcgattgccgcgaagatga

SEQ ID NO: 534279 - DNA, 75 bp, synthetic construct
  source 1..75: mol_type = other DNA
atctggcagctttctggcggtcagcgtcagcgggtagggattgcccgcgcgctggcggctaatccccggatgtta

SEQ ID NO: 534280 - DNA, 75 bp, synthetic construct
  source 1..75: mol_type = other DNA
ttcctcttttgattttgcccgtcaggcattaattccattgccagagcacattcgccagttacccaggctgggacg

SEQ ID NO: 534281 - DNA, 75 bp, synthetic construct
  source 1..75: mol_type = other DNA
atgtcactaaccagacggaggtttacacagattcttgcgtcgacgttgttcctgcatcatctgccgtcctttgca

SEQ ID NO: 534282 - DNA, 75 bp, synthetic construct
  source 1..75: mol_type = other DNA
tgttttaagccgcgtatttgagcaacgggaggcgttctcattagtgtgctcattaatgaaaaactgcattcgcgg

SEQ ID NO: 534283 - DNA, 75 bp, synthetic construct
  source 1..75: mol_type = other DNA
ggccgtctggctgcggcaaaaccaccttgctgaatctgattgccggttttgtgccttatcagcatggcagcattc

SEQ ID NO: 534284 - DNA, 75 bp, synthetic construct
  source 1..75: mol_type = other DNA
ccgattatggcggcaaacctgtgctggaagatatcaatctgacgctggatagcggcgaactgctggtcgtactgg

SEQ ID NO: 534285 - DNA, 75 bp, synthetic construct
  source 1..75: mol_type = other DNA
gtgcgttttccggcagacaggatggtttatcgcgggcctgatggcggcttacccgccagtgccgcgcccacagaa

SEQ ID NO: 534286 - DNA, 75 bp, synthetic construct
  source 1..75: mol_type = other DNA
agcgaccccttcggatgcggcagctacgttacagtccatgcagtcctgtcggcgggagcctgcggcgctggagcg

SEQ ID NO: 534287 - DNA, 75 bp, synthetic construct
  source 1..75: mol_type = other DNA
ttatcgcgggcctgatggcgggcttacccgccagtgccgcgcccgcagaaacatcgtcaatggccggtgtggcgg

SEQ ID NO: 534288 - DNA, 75 bp, synthetic construct
  source 1..75: mol_type = other DNA
cgatacatcagtccttccacgcaatatcttctcgcagtcgtatctgctttacgttatcgcacagggcactgatgt

SEQ ID NO: 534289 - DNA, 75 bp, synthetic construct
  source 1..75: mol_type = other DNA
aagtacagaatcaggatctgggcagcggcaagctgactttaaaagttggtcagattgatggcgaagcctggcacc

SEQ ID NO: 534290 - DNA, 75 bp, synthetic construct
  source 1..75: mol_type = other DNA
ccagttcaatagcatgaagaaagacctcggttacggtctgctgctgaaacgctatacgccaaacgtggcggatgc

SEQ ID NO: 534291 - DNA, 75 bp, synthetic construct
  source 1..75: mol_type = other DNA
atgaccaagttctggggcaagttgtttggtatcaactttgctctgggtgtggcaaccggtctgaccatggagttc

SEQ ID NO: 534292 - DNA, 75 bp, synthetic construct
  source 1..75: mol_type = other DNA
atggggaaacgatataaaataactgcgacaataatcaaacccggtaatatgccggttcagtggttgcgttaccag

SEQ ID NO: 534293 - DNA, 75 bp, synthetic construct
  source 1..75: mol_type = other DNA
gtccggcaatgggtgtggaagaactcgccgcggttaaagaagttctcgaatcaggatggatcactaccggtccga

SEQ ID NO: 534294 - DNA, 75 bp, synthetic construct
  source 1..75: mol_type = other DNA
ggcaaccggtttaaccatggagttccagttcgggactaactggtcttattattctcactatgtaggggatatctt

SEQ ID NO: 534295 - DNA, 75 bp, synthetic construct
  source 1..75: mol_type = other DNA
tgcaggcgatctcatcttctcgatggtgctgatttgcggcctgtataccctgttcctggtggcagaattgttctt

SEQ ID NO: 534296 - DNA, 75 bp, synthetic construct
  source 1..75: mol_type = other DNA
ttgggatcgtctgggtaaagttcagcatatgtgtgtcacctggctggtggcgcttggttcaaacctgtccgcact

SEQ ID NO: 534297 - DNA, 75 bp, synthetic construct
  source 1..75: mol_type = other DNA
taatccacctgaagccggggcaaaaagcctggtttacggtgcttggcgatccgctgacgcgctacgaagggcaaa

SEQ ID NO: 534298 - DNA, 75 bp, synthetic construct
  source 1..75: mol_type = other DNA
ttccgtgttagccagaagtgggaacaacgtgcaaaacttgcccttgctggtgaacagcgtcttacaagaaatgtt

SEQ ID NO: 534299 - DNA, 75 bp, synthetic construct
  source 1..75: mol_type = other DNA
agtagcgtctttcagtgatgagggtctatccggttacaaaggtaagcatcttactggtcagtttggtgacatgtt

SEQ ID NO: 534300 - DNA, 75 bp, synthetic construct
  source 1..75: mol_type = other DNA
tcttatctacacaaaggatgctttagccgatgatttaggaatctcaatcattcagcgtgttaaagcctacatagc

SEQ ID NO: 534301 - DNA, 75 bp, synthetic construct
  source 1..75: mol_type = other DNA
atgaaccgcatcttaggcaacgggatagagattcacactctacaggacggtttagtctatacaaaggatgcttta

SEQ ID NO: 534302 - DNA, 75 bp, synthetic construct
  source 1..75: mol_type = other DNA
tgataacccattaacgattaacatcttcaaaggtctgtttaggtgtcagtgtggggctagtgtccatcctaccgg

SEQ ID NO: 534303 - DNA, 75 bp, synthetic construct
  source 1..75: mol_type = other DNA
gattctcatcagccatacaaggcgctgaaggtgcagattcaaccagacgacaaaatgacctgttcaagcaatggt

SEQ ID NO: 534304 - DNA, 75 bp, synthetic construct
  source 1..75: mol_type = other DNA
agaacaccttgaaacagaagccttgatgaatcgcatcttaggcaacgggttagagattcacacgctacaagatgg

SEQ ID NO: 534305 - DNA, 75 bp, synthetic construct
  source 1..75: mol_type = other DNA
ctatccggttacaaaggtaaacacttatcagggcaatttggggatatgctctcccgcattgaatcaggggagttt

SEQ ID NO: 534306 - DNA, 75 bp, synthetic construct
  source 1..75: mol_type = other DNA
atgaaaaagcggaaaaccgtgaagaagcgttacgttattgcgctggtgataatcattgccggactgattgcgtta

SEQ ID NO: 534307 - DNA, 75 bp, synthetic construct
  source 1..75: mol_type = other DNA
ctagtgttcaccctacagggactaagaataagtatcagggcgtttatcggtgcaataaccatcttgatggtcgct

SEQ ID NO: 534308 - DNA, 75 bp, synthetic construct
  source 1..75: mol_type = other DNA
acacctgcaagtgataacccattaacgattaacatcttcaagggattattccggtgtcagtgtggggctagtgtc

SEQ ID NO: 534309 - DNA, 75 bp, synthetic construct
  source 1..75: mol_type = other DNA
gctacccgcgaagatatcgtcaaaatgcgtcaggcattgcaactggaagagcgtgaactggcttccagcgcgccg

SEQ ID NO: 534310 - DNA, 75 bp, synthetic construct
  source 1..75: mol_type = other DNA
gcactgggttgcgttgtgcaacttctgtgatgacggtctggcggaggcggacaataacacagcggaaagagcgct

SEQ ID NO: 534311 - DNA, 75 bp, synthetic construct
  source 1..75: mol_type = other DNA
atcttctggttaacactttttattgggtatctgatagctgcggcgaagcaggaaaaaatcaagatcctcaagaag

SEQ ID NO: 534312 - DNA, 75 bp, synthetic construct
  source 1..75: mol_type = other DNA
agccaatggcggcattcctgaccagcaagctcggcggtattccggtgaaagtttcccttagtcgtgaagagtgtt

SEQ ID NO: 534313 - DNA, 75 bp, synthetic construct
  source 1..75: mol_type = other DNA
atgtccgcgtaatttcgacacaagacaccgatattacaccattcgaccccggcgcgtttgcatcacgtcagagct

SEQ ID NO: 534314 - DNA, 75 bp, synthetic construct
  source 1..75: mol_type = other DNA
tgttttagctacacctctaacacctggcctgtcggcgtagaaatagcaggcgcgcgcctgttgatgaatcaggat

SEQ ID NO: 534315 - DNA, 75 bp, synthetic construct
  source 1..75: mol_type = other DNA
ccgctgctggcagaaggtcaggtacacggcggaatgggaatgggcattggctgggcgctatttgaagagatgatc

SEQ ID NO: 534316 - DNA, 75 bp, synthetic construct
  source 1..75: mol_type = other DNA
tggatttggtgagcgacgcagtcgagttagaagagctggttgaagataccgctgctcgttgcgggcgcgatctat

SEQ ID NO: 534317 - DNA, 75 bp, synthetic construct
  source 1..75: mol_type = other DNA
ccagcgtcagctattggttagtttcgaaaaagaagatgtatcggcggcatacgcgattgaggaaggcgaagttcc

SEQ ID NO: 534318 - DNA, 75 bp, synthetic construct
  source 1..75: mol_type = other DNA
tggtggaagatcgcaaatctttgcgctcacgcatcgataaactcaagcgcagtatcgataaactggagaacgcgc

SEQ ID NO: 534319 - DNA, 75 bp, synthetic construct
  source 1..75: mol_type = other DNA
acgctgccgttcccgccgcacgcgcatcaggcccgggcatttcagcgtctgggaagcgacgcgccacagccgacg

SEQ ID NO: 534320 - DNA, 75 bp, synthetic construct
  source 1..75: mol_type = other DNA
atttggctgtacttttgttgatctgacggttgatattgcgctgtgtaaagtgaccatcaatcgcatcctcaacgt

SEQ ID NO: 534321 - DNA, 75 bp, synthetic construct
  source 1..75: mol_type = other DNA
ccaccggttatgccgttgccggagtggataaagatcgctttaatccggcaattaccgccctgcatcaacagcttt

SEQ ID NO: 534322 - DNA, 75 bp, synthetic construct
  source 1..75: mol_type = other DNA
acggaactgttgcaggtactgatcccggatatgctcaaagagcgtaaggacgagctggagtttgctaatgaatgc

SEQ ID NO: 534323 - DNA, 75 bp, synthetic construct
  source 1..75: mol_type = other DNA
ggcatgcctggacacttgacgaaaacaagcgcgataccgccgatcgcgcactgctaactcgccatgttcgtcacc

SEQ ID NO: 534324 - DNA, 75 bp, synthetic construct
  source 1..75: mol_type = other DNA
atctttgaatgggaaaaacgccgtgcagagtgccagaaccagcaaggcaatttacgtcgtggcgttggcgtcgcc

SEQ ID NO: 534325 - DNA, 75 bp, synthetic construct
  source 1..75: mol_type = other DNA
ataaagtcgcttacctttatcctcgttgtgcctatgcttacagttcaaagacctgctataccaacctcccctcgg

SEQ ID NO: 534326 - DNA, 75 bp, synthetic construct
  source 1..75: mol_type = other DNA
acatcgctggcatggatggaggatgactcgcgaattaccatcgtttccagcacccagatcccgcacattgttcgc

SEQ ID NO: 534327 - DNA, 75 bp, synthetic construct
  source 1..75: mol_type = other DNA
ttgacggaagcaggatgctgggctcatgcgcggcgcaaaatccacgatgtatatatcagtaccaaaagcgcgacg

SEQ ID NO: 534328 - DNA, 75 bp, synthetic construct
  source 1..75: mol_type = other DNA
cgctttctaccaccctgaacgcggcgggcagctctctgccgaaagctccatcaaaaccaccactaacccaccggc

SEQ ID NO: 534329 - DNA, 75 bp, synthetic construct
  source 1..75: mol_type = other DNA
tgatgcacttccagtcaccgaccggtgtggaagcgtcgtttgcgcatttgtggaatgacggcggctggttcccga

SEQ ID NO: 534330 - DNA, 75 bp, synthetic construct
  source 1..75: mol_type = other DNA
gaaatcactgccacgcgcaattaactccattccgatccgcatcattatgttctacgtcttcgcgctgattgtaat

SEQ ID NO: 534331 - DNA, 75 bp, synthetic construct
  source 1..75: mol_type = other DNA
ttttactattgacgggcaaatgggcgtaaaccgagacggaacgttgaaaggctatagtctggatgttctgtctaa

SEQ ID NO: 534332 - DNA, 75 bp, synthetic construct
  source 1..75: mol_type = other DNA
atggcgacgccgttgccatcgtcgtggcccgcgatgaactcacggcagaaaaagcggcgcaattggtcagcattg

SEQ ID NO: 534333 - DNA, 75 bp, synthetic construct
  source 1..75: mol_type = other DNA
ataaatcttttagtgacttcgcttccgatttattggggccgtgggcaggatatttcaccggctggacttattggt

SEQ ID NO: 534334 - DNA, 75 bp, synthetic construct
  source 1..75: mol_type = other DNA
gctgatagttaccccgttatggtttatcttgctggggctgggctggttgtttattggtaaaaaacgcatggcgaa

SEQ ID NO: 534335 - DNA, 75 bp, synthetic construct
  source 1..75: mol_type = other DNA
gctggcacgttattcgcgacatcgacggtcatgacgcagcatccatcaaacgcgcagtagaagaagcgcgcgcag

SEQ ID NO: 534336 - DNA, 75 bp, synthetic construct
  source 1..75: mol_type = other DNA
ggcgtttattgaaaaattgcaggccaaaccggcgaaaatcgccagccgtaaagcgtcgcagaatacgattgaagc

SEQ ID NO: 534337 - DNA, 75 bp, synthetic construct
  source 1..75: mol_type = other DNA
ataaaccaatacagaatcgctataatgaagcattaaatgatttaaacagttataccaatgctaatagcgtgactt

SEQ ID NO: 534338 - DNA, 75 bp, synthetic construct
  source 1..75: mol_type = other DNA
atcggcacagcaatggatttaacacccaccattttagttatgacacctgtgcttgtacctttgattaaacaggct

SEQ ID NO: 534339 - DNA, 75 bp, synthetic construct
  source 1..75: mol_type = other DNA
atggagttacaggccaaatttccattacaaaattgtttctcgcgggtatcgtaccgggcgtaattatgggtatgg

SEQ ID NO: 534340 - DNA, 75 bp, synthetic construct
  source 1..75: mol_type = other DNA
gctggcacgtaatccgcggtattgacggtcacgacgctgccgctattaaacgcgcagtagaagaagcgcgtgcag

SEQ ID NO: 534341 - DNA, 75 bp, synthetic construct
  source 1..75: mol_type = other DNA
gtaataaagagttaagccctgaattcgtgttacagtggtgttctgcaaacatgccagaaattatatctcgcgcaa

SEQ ID NO: 534342 - DNA, 75 bp, synthetic construct
  source 1..75: mol_type = other DNA
aaatagcatctattctgaaaaaaatagaggatagaatacatgtcaatcaaaaaataaatgatattttagaacaga

SEQ ID NO: 534343 - DNA, 75 bp, synthetic construct
  source 1..75: mol_type = other DNA
ggcccaggggttgtgacgggacgatatggcaccattggtgaagttttttatgtagttgatgatttttggccaatc

SEQ ID NO: 534344 - DNA, 75 bp, synthetic construct
  source 1..75: mol_type = other DNA
aaatattatcctccctggtggctaccgacaggaaaacgttctgcctggtattacctcagcggaagagatggatta

SEQ ID NO: 534345 - DNA, 75 bp, synthetic construct
  source 1..75: mol_type = other DNA
acgcataacgggtctgccagatgagcagcctgtgaagtcgttttttcgcaggttatctcaggagtgtggttttca

SEQ ID NO: 534346 - DNA, 75 bp, synthetic construct
  source 1..75: mol_type = other DNA
gacgtctgacgaaagagtgcggtttccctgtatcacctcatcgctttcggcatacgctggccagtacgctgatga

SEQ ID NO: 534347 - DNA, 75 bp, synthetic construct
  source 1..75: mol_type = other DNA
ttgcgatccagatcccttacgcgctgggcataattgcaacgcgttccgtggatactccagttatcggcctgaaag

SEQ ID NO: 534348 - DNA, 75 bp, synthetic construct
  source 1..75: mol_type = other DNA
gtattacataatcagggaataacattagaaaacgaacatatgaaaatagaggaaattagcccaagcgataataaa

SEQ ID NO: 534349 - DNA, 75 bp, synthetic construct
  source 1..75: mol_type = other DNA
cctccgattcggggatcggcaaagagtgcgcgttattactggcgcagcaggggtttgatattggcattacctggc

SEQ ID NO: 534350 - DNA, 75 bp, synthetic construct
  source 1..75: mol_type = other DNA
agtggacaagcttatcgacggtcccacccgcgatgccaagctgcaacgcatcatggattacgttactaccgctga

SEQ ID NO: 534351 - DNA, 75 bp, synthetic construct
  source 1..75: mol_type = other DNA
ggcgaaatgccgtctgacttcgacgcgaaagcaaaagagttcattgctaaactgcaggctaacccggcgaaaatc

SEQ ID NO: 534352 - DNA, 75 bp, synthetic construct
  source 1..75: mol_type = other DNA
gtagagcaggtcgcttctctgcgcgtaaccccgaacatgtctacatggcgtccatgtgaccaggttgaatccgcg

SEQ ID NO: 534353 - DNA, 75 bp, synthetic construct
  source 1..75: mol_type = other DNA
tttatttcagcagccatgcagcagtcttttaaagattattaacattttatccagtattgaaaatgtattttatcc

SEQ ID NO: 534354 - DNA, 75 bp, synthetic construct
  source 1..75: mol_type = other DNA
tggacgccttcacccgcgaccagatgcaaactctgctgctgaaactctggcaggagacgggaaagcaggtgctgt

SEQ ID NO: 534355 - DNA, 75 bp, synthetic construct
  source 1..75: mol_type = other DNA
gtcagcgggtggggattgcccgcgcgttggcggcaaatccccagctgttattactcgacgaaccgtttggtgcgc

SEQ ID NO: 534356 - DNA, 75 bp, synthetic construct
  source 1..75: mol_type = other DNA
cctttgtaggtttgttcttcttcggttgggatcgtctgggtaaagttcagcatatgtgtgtcacctggctggtgg

SEQ ID NO: 534357 - DNA, 75 bp, synthetic construct
  source 1..75: mol_type = other DNA
tttcgcaaatctttatcgccgttgaagtggacaagcttatcgacggcgccacccgcgatgccaagctacaacgta

SEQ ID NO: 534358 - DNA, 75 bp, synthetic construct
  source 1..75: mol_type = other DNA
ttcacgcggcgttgacagcgaaacggctgatgcctgtgcagagatgttcgcccgcaccaccgaatccggcgttta

SEQ ID NO: 534359 - DNA, 75 bp, synthetic construct
  source 1..75: mol_type = other DNA
atgcgtcgcctgacgcagcaggataatcccgctatcgcccgcgtcattcgtcaggtatccgccgaatacggtctt

SEQ ID NO: 534360 - DNA, 75 bp, synthetic construct
  source 1..75: mol_type = other DNA
gtatctaaaatatcatctggagttcaaccagaaaataccataatactatcatcccgtgcgccagtgggatatttg

SEQ ID NO: 534361 - DNA, 75 bp, synthetic construct
  source 1..75: mol_type = other DNA
caaaatgcccccgtagaaccagtaggattaattgacaggacatttggccaatcagaaaacatacaacaagcgaat

SEQ ID NO: 534362 - DNA, 75 bp, synthetic construct
  source 1..75: mol_type = other DNA
gatagtatcgccaacaaactgcgtggacacggtaaattgtatcgggccattttgctcgatgtttcaaagcgattg

SEQ ID NO: 534363 - DNA, 75 bp, synthetic construct
  source 1..75: mol_type = other DNA
acggcggaatgggaatgggcattggctgggcgctatttgaagagatgatcatcgatgcgaaaagcggcgtggtcc

SEQ ID NO: 534364 - DNA, 75 bp, synthetic construct
  source 1..75: mol_type = other DNA
cgctccccccaaaaaaggtgagctcattataacacaaccagaaaatcattatatgcaaacagtgaggcataagtt

SEQ ID NO: 534365 - DNA, 75 bp, synthetic construct
  source 1..75: mol_type = other DNA
agaacattacattaggggatatcatgaattgcttactttttctcaaacaggaatatggaatcgcaatggcagagg

SEQ ID NO: 534366 - DNA, 75 bp, synthetic construct
  source 1..75: mol_type = other DNA
atgcaaaaaaaattcaggctctcgagatgttcaaaacaaagatatcatctatgaatggaggtcaagcatttgttt

SEQ ID NO: 534367 - DNA, 75 bp, synthetic construct
  source 1..75: mol_type = other DNA
tttgttcatcagattagtgaaataacagaatctagctggatgtcatcggaagaacaacatacaaaacaaattcag

SEQ ID NO: 534368 - DNA, 75 bp, synthetic construct
  source 1..75: mol_type = other DNA
tatttttaaagaattaaccccacaggcaatggcgcattcttcagaatcatttcagcatatatctgttgggaagga

SEQ ID NO: 534369 - DNA, 75 bp, synthetic construct
  source 1..75: mol_type = other DNA
aatataggggcaaatccagtgatgaccggagttaacaccatcatgcgtgaatatccaaatggcgaaacaacacac

SEQ ID NO: 534370 - DNA, 75 bp, synthetic construct
  source 1..75: mol_type = other DNA
cgttaggtattgatcctgttgaaattcgtttacgcaacgcctcacgcgaaggagatgctaatccgctcacgggca

SEQ ID NO: 534371 - DNA, 75 bp, synthetic construct
  source 1..75: mol_type = other DNA
ttatagagtgatagaatcgatagaaaacactgattttatttatcaaaaaagcacaaaaaaaaatattggaattag

SEQ ID NO: 534372 - DNA, 75 bp, synthetic construct
  source 1..75: mol_type = other DNA
aagaattcattagtaaagttttataaagactctaatggtaacttttatcaagctgacggattaaaaggaggtgga

SEQ ID NO: 534373 - DNA, 75 bp, synthetic construct
  source 1..75: mol_type = other DNA
gaaaaaataaacaaaaatataattaatgaacctcagcaacgtggctcatcttatagagtgatagaatcgatagaa

SEQ ID NO: 534374 - DNA, 75 bp, synthetic construct
  source 1..75: mol_type = other DNA
tactttacgtgcggcaatagccgaagaaaactggctgcttgatgaccgtctggcagtcggtggcgcgtcgatggg

SEQ ID NO: 534375 - DNA, 75 bp, synthetic construct
  source 1..75: mol_type = other DNA
attatgtcatccggcggatatgaacgtctggaatctatgtatccaaaactcgtagaaaaattcactgttgccagc

SEQ ID NO: 534376 - DNA, 75 bp, synthetic construct
  source 1..75: mol_type = other DNA
ctgtggctgcatctgctgcagtatccggttctgcgatggcgtggactgcaaacggcactggtggttctgttgacc

SEQ ID NO: 534377 - DNA, 75 bp, synthetic construct
  source 1..75: mol_type = other DNA
cattatcgcgccactgttggagtgggaagcaacaaaccacctggaacaactcggggacaggccgctcctgctgtg

SEQ ID NO: 534378 - DNA, 75 bp, synthetic construct
  source 1..75: mol_type = other DNA
gcgcaggctggcttacgggtaataatgccggatgcgcccgatcatggtatccgttttagtggtgatgcatcgcga

SEQ ID NO: 534379 - DNA, 75 bp, synthetic construct
  source 1..75: mol_type = other DNA
cggttaaatcaattttggcaaatcttgctacaaagtatgcaggaattcattactttacgtgcggcagtagctgaa

SEQ ID NO: 534380 - DNA, 75 bp, synthetic construct
  source 1..75: mol_type = other DNA
attttatgacagactggtggtctcaatatcctccgggcgatatgagagatagtcttgcatttgaaaatatgaacg

SEQ ID NO: 534381 - DNA, 75 bp, synthetic construct
  source 1..75: mol_type = other DNA
ggtgatcatgatgcaggaatgacagaggtaacattatgccgaggaactattgcctctcaggctgaaaacattgtt

SEQ ID NO: 534382 - DNA, 75 bp, synthetic construct
  source 1..75: mol_type = other DNA
tttgataaaattcatatcaggcactcaaggtctcttcctgaagaacatgcagcaccagctgaaaaccccgatgtt

SEQ ID NO: 534383 - DNA, 75 bp, synthetic construct
  source 1..75: mol_type = other DNA
tattgaatggatgtacagagcttaaatcaataaactgtttacccctcaacttatcttcattaagtatagttggat

SEQ ID NO: 534384 - DNA, 75 bp, synthetic construct
  source 1..75: mol_type = other DNA
gctcatcattagaggctataaattgcaacatacctggctctgttgataatttgtccttatgccattgtcgttctt

SEQ ID NO: 534385 - DNA, 75 bp, synthetic construct
  source 1..75: mol_type = other DNA
tgagtaatctattttctgaatcatttccaattttcagtattccttatcataaatcttgttcacagaatttcgttt

SEQ ID NO: 534386 - DNA, 75 bp, synthetic construct
  source 1..75: mol_type = other DNA
caacaggaactgcagatgcgcgaaatggcaggccgggtggctaaactggaagcagaagctgccagggcacaggca

SEQ ID NO: 534387 - DNA, 75 bp, synthetic construct
  source 1..75: mol_type = other DNA
tttcaaggttaaatacacatattgcgctggctcctgttcagcagacaccggcgtttaaggcacagcttgcacagc

SEQ ID NO: 534388 - DNA, 75 bp, synthetic construct
  source 1..75: mol_type = other DNA
ttgatgactggcaggggtttgttgataccacgacgacagaaggccagcccagcccgttgatgagtgcctgggaag

SEQ ID NO: 534389 - DNA, 75 bp, synthetic construct
  source 1..75: mol_type = other DNA
cttgtctggtcgcctcatcttttgaagcagacgcagatgatgccgatgacgccgccgaactggctgacgatgcgg

SEQ ID NO: 534390 - DNA, 75 bp, synthetic construct
  source 1..75: mol_type = other DNA
attgccgaatgtcatgttaactgcctgattgaatcagatgctcaggcttatgcaaacgctgaatttatagcagat

SEQ ID NO: 534391 - DNA, 75 bp, synthetic construct
  source 1..75: mol_type = other DNA
agtatcagtcatgggatcgacagcagaacgaatggcttcagcgtgaacgccgtcgtgtgctgcttcaggtggttt

SEQ ID NO: 534392 - DNA, 75 bp, synthetic construct
  source 1..75: mol_type = other DNA
cttatcattggttccgcacgaggggagcaggtacaaaaagcaggaacaattaacagttcaagtatcaattttggt

SEQ ID NO: 534393 - DNA, 75 bp, synthetic construct
  source 1..75: mol_type = other DNA
atcagacaaatatcatgaaagtaacggaaccagtattgaaaataccggtaacggaaatattctcacccgcctggg

SEQ ID NO: 534394 - DNA, 75 bp, synthetic construct
  source 1..75: mol_type = other DNA
aaaagatgcttataatacatcaataattttttctggcgggtataattcattagatatttattcagattctgtgat

SEQ ID NO: 534395 - DNA, 75 bp, synthetic construct
  source 1..75: mol_type = other DNA
aggtcaaagatggggggacaacgtctggtgctgtataacagcacaggcctcacactcttgacgcccatggaatat

SEQ ID NO: 534396 - DNA, 75 bp, synthetic construct
  source 1..75: mol_type = other DNA
cgggacaggaaagcatggaaacccgcgccgggttactggctgaagcatcggtggttatccgccgtatgaaagggt

SEQ ID NO: 534397 - DNA, 75 bp, synthetic construct
  source 1..75: mol_type = other DNA
catgccttttcattccagaataacagtaacacaactgatttcactggtactctggcgctgtctgacgccacattt

SEQ ID NO: 534398 - DNA, 75 bp, synthetic construct
  source 1..75: mol_type = other DNA
aatgcgaaattcctgctggcggatctctggtcgagtacgttgacgatatgcgcgagaagctggaagccgcagaga

SEQ ID NO: 534399 - DNA, 75 bp, synthetic construct
  source 1..75: mol_type = other DNA
gatgaagcatacagagattgggtcgataacggtgctgatacggataatcgagattatcagaagccattaacaggt

SEQ ID NO: 534400 - DNA, 75 bp, synthetic construct
  source 1..75: mol_type = other DNA
tgcgtgaggcggcgcagaacgcgaaagatttaggtgggattaataattacaagcgaggtgagcaagctgttgccg

SEQ ID NO: 534401 - DNA, 75 bp, synthetic construct
  source 1..75: mol_type = other DNA
tgagctggaaggcaaagacagcaaaatagccaatcttaccgccgaacgcgatgctcttcgtgaaggtgagatggg

SEQ ID NO: 534402 - DNA, 75 bp, synthetic construct
  source 1..75: mol_type = other DNA
tcgcggactgggatatgcaggaaaaattacaaattttgctgactggatcactgagtttggtaaggctgcccggac

SEQ ID NO: 534403 - DNA, 75 bp, synthetic construct
  source 1..75: mol_type = other DNA
ttgatgccagaaataaaatcacctctgctgaatctgcggtaaattctgcgagaaataacctcagtgccagaacaa

SEQ ID NO: 534404 - DNA, 75 bp, synthetic construct
  source 1..75: mol_type = other DNA
tggctcaagagttgaaagcgatcggcgaccagctccaggagttgcagaagaaacttattcaggggccgaatatta

SEQ ID NO: 534405 - DNA, 75 bp, synthetic construct
  source 1..75: mol_type = other DNA
gctggctcctgttcagcagacaccggcgtttaaggcacagcttgcacagagaatgtcagaggttattcaggggct

SEQ ID NO: 534406 - DNA, 75 bp, synthetic construct
  source 1..75: mol_type = other DNA
cggtagggaagctgcgtgttgagcttgaggagacaaaatcaaaactcaacgagcagcgcgagtattacgaaggtg

SEQ ID NO: 534407 - DNA, 75 bp, synthetic construct
  source 1..75: mol_type = other DNA
ttcgtgaaatcgctgaaaaaacaaaaattgctggtgaaacacctgtaatgcctttcgatcagcgaattaatgcgc

SEQ ID NO: 534408 - DNA, 75 bp, synthetic construct
  source 1..75: mol_type = other DNA
cgttgagctggaagctgcagagaagcgcattgcagaactggaagccgaacctgtaagccaaacttacaagttgaa

SEQ ID NO: 534409 - DNA, 75 bp, synthetic construct
  source 1..75: mol_type = other DNA
ggtacgtcatgacaggtacaagaatgtacggcatcggagatggtgttgatgaagagcacgtcgatgcttactgtt

SEQ ID NO: 534410 - DNA, 75 bp, synthetic construct
  source 1..75: mol_type = other DNA
gaggattatcaaacggtaatggcatacaaagtttctgaagtcatcgctgcaatccgcgccgcaggcattcgcatc

SEQ ID NO: 534411 - DNA, 75 bp, synthetic construct
  source 1..75: mol_type = other DNA
caacggatgcgcagaactggttacaggcgcgcgggagtcatgtaaatgaatcatatctcggtgtggcgcgtccga

SEQ ID NO: 534412 - DNA, 75 bp, synthetic construct
  source 1..75: mol_type = other DNA
atggacttttttacgttattttcaccggatggggtcatgctggaaacaaacgtggtatgtatcgttatcgcgtta

SEQ ID NO: 534413 - DNA, 75 bp, synthetic construct
  source 1..75: mol_type = other DNA
taccttgttagttatactgcaactggcatttggtaaaaaagtggcggcaatccgccgggctgaagaaagtaaata

SEQ ID NO: 534414 - DNA, 75 bp, synthetic construct
  source 1..75: mol_type = other DNA
tggttgccgttaaccgcacagtttgaggggcaactgaacagtctgtcaccgtggcagccggggatcagtccgcca

SEQ ID NO: 534415 - DNA, 75 bp, synthetic construct
  source 1..75: mol_type = other DNA
tgccttgttagccatattgcaactggcatttggtaaaaaagtagcggcaattcgccgggctgaagaaagtaaata

SEQ ID NO: 534416 - DNA, 75 bp, synthetic construct
  source 1..75: mol_type = other DNA
attccttatcctgtactccttttacagtatgtttattccacgcctgccgatttatgaccgtagctggatcgccgc

SEQ ID NO: 534417 - DNA, 75 bp, synthetic construct
  source 1..75: mol_type = other DNA
atttctgggaatacctatcgggttatacgcgttgtcgtatttacccgaccattttatgaaggtgggcttaggcgg

SEQ ID NO: 534418 - DNA, 75 bp, synthetic construct
  source 1..75: mol_type = other DNA
agggggaaattatctttgaacccagaactttacaaaaagaaggataccagtcagggcgaaggaaagggggattca

SEQ ID NO: 534419 - DNA, 75 bp, synthetic construct
  source 1..75: mol_type = other DNA
agctgcggaagctgctgcatactccaagggaaaattatctttgaacccagagctttacaaaaagaaggataccac

SEQ ID NO: 534420 - DNA, 75 bp, synthetic construct
  source 1..75: mol_type = other DNA
tgctggtatacggctttcgcttttgcggtgtcacctttgtcctgcatgatgacgccgactttaaacatcgcatca

SEQ ID NO: 534421 - DNA, 75 bp, synthetic construct
  source 1..75: mol_type = other DNA
tcaggtccatatcgttttcgttttcatgagccggtgccggatatagctcattttcgccggacaacaggggctatg

SEQ ID NO: 534422 - DNA, 75 bp, synthetic construct
  source 1..75: mol_type = other DNA
tttttggtgagcctggtttggtattatcaatattactgattggctttatttttaatggattagcacaagtaccat

SEQ ID NO: 534423 - DNA, 75 bp, synthetic construct
  source 1..75: mol_type = other DNA
aagggaaaattatctttgaacccagagctttacaaaaagaaggataccacccgggacaaaaggaagagtgattca

SEQ ID NO: 534424 - DNA, 75 bp, synthetic construct
  source 1..75: mol_type = other DNA
gctgattgcctccggttctatgttgataaaaggcgcgctgggaattcccgctgctgccgcgcttctgcctccttt

SEQ ID NO: 534425 - DNA, 75 bp, synthetic construct
  source 1..75: mol_type = other DNA
gaacgtactccagtacttcatctccacccacggtgctcgtaagggtctggcggataccgcactgaaaactgcgaa

SEQ ID NO: 534426 - DNA, 75 bp, synthetic construct
  source 1..75: mol_type = other DNA
agctggaactgcgtggtcttgctaccaccatcaaagctgcgaagaaaatggttgagcgcgaacaagctgtcgttt

SEQ ID NO: 534427 - DNA, 75 bp, synthetic construct
  source 1..75: mol_type = other DNA
catacctgcgtctgcatcagtgtggtctgccgaagaaaatggcactggagctgttcaaaccgtttatctacggca

SEQ ID NO: 534428 - DNA, 75 bp, synthetic construct
  source 1..75: mol_type = other DNA
tcaacaaaggtgaagcaatcggtgttatcgcggcacagtccattggtgaaccgggtacacagctgaccatgcgta

SEQ ID NO: 534429 - DNA, 75 bp, synthetic construct
  source 1..75: mol_type = other DNA
gcccagctggaagcgcgtgcgctgatgatgtctactaacaacatcctgtccccggcgaacggcgaaccaatcatc

SEQ ID NO: 534430 - DNA, 75 bp, synthetic construct
  source 1..75: mol_type = other DNA
tggtgacactctggcgcgtattccgcaggaatctggcggtactaaagacatcaccggtggtctgccgcgcgttgc

SEQ ID NO: 534431 - DNA, 75 bp, synthetic construct
  source 1..75: mol_type = other DNA
tggctgaaatcagcggtatcgtttccttcggtaaagaaaccaaaggtaaacgtcgtctggttatcaccccggtag

SEQ ID NO: 534432 - DNA, 75 bp, synthetic construct
  source 1..75: mol_type = other DNA
gaagcggtagacgccctgctggataacggtcgtcgtggtcgtgcgatcactggttctaacaagcgtcctctgaaa

SEQ ID NO: 534433 - DNA, 75 bp, synthetic construct
  source 1..75: mol_type = other DNA
tgcttgaaattacctgcccgccaccggagctggtcagaaacgctgtcaggattatggagcataaatcaggggttg

SEQ ID NO: 534434 - DNA, 75 bp, synthetic construct
  source 1..75: mol_type = other DNA
gaccaagcgtatcaagctgctggaagcgttcgttcagtctggcaacaaaccagagtggatgatcctgaccgttct

SEQ ID NO: 534435 - DNA, 75 bp, synthetic construct
  source 1..75: mol_type = other DNA
cggataccgcactgaaaacggcgaactccggttacctgactcgtcgtctggttgacgtggcgcaggacctggtgg

SEQ ID NO: 534436 - DNA, 75 bp, synthetic construct
  source 1..75: mol_type = other DNA
tgatcccggcaggtaccggttacgcgtaccaccaggatcgtatgcgtcgccgtgctgcgggtgaagctccggctg

SEQ ID NO: 534437 - DNA, 75 bp, synthetic construct
  source 1..75: mol_type = other DNA
ctgcgaggctttgctggctggggatatttcttagccgggaaactggcgcattgtgcgctgtgtctgatacttccc

SEQ ID NO: 534438 - DNA, 75 bp, synthetic construct
  source 1..75: mol_type = other DNA
gaccttttatgcgccagcaacatcactattggccactggtcgccgcgctcacctttccctggtatatctgggtag

SEQ ID NO: 534439 - DNA, 75 bp, synthetic construct
  source 1..75: mol_type = other DNA
ggtacgaaagtttatctggcgaaatcaggcgatcatcggtatgccgacggatgggcattcgtcaaaatggcggtg

SEQ ID NO: 534440 - DNA, 75 bp, synthetic construct
  source 1..75: mol_type = other DNA
gcttcctgacaggagcgattaggccaggaaccacttttggcaaggatgactaccgcagcaccgtgccgcgtttcg

SEQ ID NO: 534441 - DNA, 75 bp, synthetic construct
  source 1..75: mol_type = other DNA
tgctgacattgttctttcgcagaaagatacgcagcagataaccgaggcgctggaaacaattaaaatcgtcggtga

SEQ ID NO: 534442 - DNA, 75 bp, synthetic construct
  source 1..75: mol_type = other DNA
actgggcgaagggacatacgcagttaccaccagaagagggcaaaatgcccgtgggcagactggcgcatacctttg

SEQ ID NO: 534443 - DNA, 75 bp, synthetic construct
  source 1..75: mol_type = other DNA
agtcgcattattgcggatatcgcaaagcagaaggggctggattaccagttactgacgttatcggatttgttgggg

SEQ ID NO: 534444 - DNA, 75 bp, synthetic construct
  source 1..75: mol_type = other DNA
attttttagccggtaagctggcgcacggagcgatgtgtttgatactacctttttggctgctgtcaggtgtattca

SEQ ID NO: 534445 - DNA, 75 bp, synthetic construct
  source 1..75: mol_type = other DNA
cgctggcgggagattaaaaagcaattcacccatgcttgtggattgaaaaatatctggcaaccacgtttttgggag

SEQ ID NO: 534446 - DNA, 75 bp, synthetic construct
  source 1..75: mol_type = other DNA
tcctcaacaatcgctcacttcgcaaagcctctgaagaggtagcagcggaaatggcggcgcaaccctgccctggtg

SEQ ID NO: 534447 - DNA, 75 bp, synthetic construct
  source 1..75: mol_type = other DNA
gagagaaggcccgaacgtaaacgtcttctggtgagtctcggcactgtcaaaccgatggttgacggccttgatcta

SEQ ID NO: 534448 - DNA, 75 bp, synthetic construct
  source 1..75: mol_type = other DNA
agtggctttgcccgccttcgttgtggctgttgaagcggatgatgcggcgctttctgccgattttccggcggcggt

SEQ ID NO: 534449 - DNA, 75 bp, synthetic construct
  source 1..75: mol_type = other DNA
acccaggcgcttgaaaccattaaaatcgtcggcgaacgttactcccctgaacatcaggctcgcgtgggccgttaa

SEQ ID NO: 534450 - DNA, 75 bp, synthetic construct
  source 1..75: mol_type = other DNA
gctggtctatggcaaaacgtcagatcacgtgctcggcgtgcgggcggtgttgttggggggcgatattctcgatac

SEQ ID NO: 534451 - DNA, 75 bp, synthetic construct
  source 1..75: mol_type = other DNA
ggcaaaggttttcgcgccgaatacagcccggcgtttttcggtgaggaactttttgcagaactgcgtaaagtgaaa

SEQ ID NO: 534452 - DNA, 75 bp, synthetic construct
  source 1..75: mol_type = other DNA
atgaagcgaaaaaccataaaaattcgctcgggatctatgagttatcctggcatcaggcgatgcagcgactgccgc

SEQ ID NO: 534453 - DNA, 75 bp, synthetic construct
  source 1..75: mol_type = other DNA
aaagtggacgcggtgaagcgcggtacatttgaccggcagatccccatcgcggtacgtcagcaatggcgcggggca

SEQ ID NO: 534454 - DNA, 75 bp, synthetic construct
  source 1..75: mol_type = other DNA
aaagtggacgcggtaaagcgcggtacatttgatcggcagatccctatcgcggtacgccagcagtggcgcggtgcg

SEQ ID NO: 534455 - DNA, 75 bp, synthetic construct
  source 1..75: mol_type = other DNA
ggcgggtgttgaacgtatctatgcgatgcgcaaaaaagctgttggcctgcttggcaatgctaaaggcgccgctaa

SEQ ID NO: 534456 - DNA, 75 bp, synthetic construct
  source 1..75: mol_type = other DNA
actggtgctctgttatcgtgatgaatataaactggtcctcggcgaggaacgcggcgagtttaacgtcttgctggc

SEQ ID NO: 534457 - DNA, 75 bp, synthetic construct
  source 1..75: mol_type = other DNA
atttgaaaccattcggctacttttttgcgccagaactttcgaccagcaatcgcgcaacgctcggcgggatgatca

SEQ ID NO: 534458 - DNA, 75 bp, synthetic construct
  source 1..75: mol_type = other DNA
gttagcacaaaagccgtggattgttcccatccctggcaccactaaactgcaccggctggaggaaaacctggccgc

SEQ ID NO: 534459 - DNA, 75 bp, synthetic construct
  source 1..75: mol_type = other DNA
cgcgaaatacggtggtttgttgtggggcgaacacggcaaaggttttcgcgccgaatacagcccggcgttttttgg

SEQ ID NO: 534460 - DNA, 75 bp, synthetic construct
  source 1..75: mol_type = other DNA
ccatcaaaattgatgtgccggagtttcgctctcgtttcctgcagctctatcacacccgttatttacgcccgctgc

SEQ ID NO: 534461 - DNA, 75 bp, synthetic construct
  source 1..75: mol_type = other DNA
tcaacccagggaaaatttgcccaccggaaggtatcgacgcgccgatgatgaaagtggacgcggtgaagcgtggca

SEQ ID NO: 534462 - DNA, 75 bp, synthetic construct
  source 1..75: mol_type = other DNA
atgaatacgcagatacagcaggaaatccatgttctccacagctttcgagagtttaacgacaatgactgtgaggtt

SEQ ID NO: 534463 - DNA, 75 bp, synthetic construct
  source 1..75: mol_type = other DNA
tccttttggtcaaagctatattacagggataaggaaaaataatttaaccggacgactggaaatattgacctgtac

SEQ ID NO: 534464 - DNA, 75 bp, synthetic construct
  source 1..75: mol_type = other DNA
ccgaagcagtggcagtgttccggattcagcaacagcagcaacagcagcgtgaaacatcggctgtggtaaaaaccg

SEQ ID NO: 534465 - DNA, 75 bp, synthetic construct
  source 1..75: mol_type = other DNA
ctgcacagaaaaacctttcgtatgttctggctgagaagctggcgcaacgcatcttaaaaggtgaatatgaacccg

SEQ ID NO: 534466 - DNA, 75 bp, synthetic construct
  source 1..75: mol_type = other DNA
ttgccgccttcgcggaatttcctgccgccgttgccgaggaagttgcgctactggcgctcgaggatgcgttcgttt

SEQ ID NO: 534467 - DNA, 75 bp, synthetic construct
  source 1..75: mol_type = other DNA
gtgctgttggtcgcactgctgagctgtactaccccctttttcgtcgtgctcgcatcctcaagcgccacggcggat

SEQ ID NO: 534468 - DNA, 75 bp, synthetic construct
  source 1..75: mol_type = other DNA
gcaacggcaggtttatggaagagccgtgcatctggttcagcggattctgcagccagggacggagcctgttttgaa

SEQ ID NO: 534469 - DNA, 75 bp, synthetic construct
  source 1..75: mol_type = other DNA
ataatattaataatttatacagtacgttagagtcctacaaatatcaattgaatagcggcgggcgtgacggcttta

SEQ ID NO: 534470 - DNA, 75 bp, synthetic construct
  source 1..75: mol_type = other DNA
tctcagacggagatgcagaagatagaacaggcgctggagacggtaaaaatcattggcgagcgttacccagctaat

SEQ ID NO: 534471 - DNA, 75 bp, synthetic construct
  source 1..75: mol_type = other DNA
attacagcgatattcctgcgtctggtagcgatgcatgggctgacgccaaacgcggcaattttttgccaaatccag

SEQ ID NO: 534472 - DNA, 75 bp, synthetic construct
  source 1..75: mol_type = other DNA
attttgttttttatatcgttctatttttacgattatttattaatgtatctaaatttatatttccctggaaatttt

SEQ ID NO: 534473 - DNA, 75 bp, synthetic construct
  source 1..75: mol_type = other DNA
taaaattgaaactgatatgcaggaactttttgaagataaaaacctcttactaacgtttgatagtaacgaaggaaa

SEQ ID NO: 534474 - DNA, 75 bp, synthetic construct
  source 1..75: mol_type = other DNA
caattaaaagccattagaatagaaacaaaagaaaaagaaggtgaaattcgttcactattgagatttcacaaagct

SEQ ID NO: 534475 - DNA, 75 bp, synthetic construct
  source 1..75: mol_type = other DNA
cttgttgacgctgcactggcagacgacgcagccgctgtttttgagcctgccgcagccgaggcgctctgtcccgct

SEQ ID NO: 534476 - DNA, 75 bp, synthetic construct
  source 1..75: mol_type = other DNA
tgctccgtcacgccattattaaagttaagcgagacaggccctttgaaatcaacgcctgggtcgttttgccagagc

SEQ ID NO: 534477 - DNA, 75 bp, synthetic construct
  source 1..75: mol_type = other DNA
tctcaacgttccatcgcgatgtcgcgaaagggttatatcccatcgattgggcgggggacgtaacggatttaaatg

SEQ ID NO: 534478 - DNA, 75 bp, synthetic construct
  source 1..75: mol_type = other DNA
ttgaataatagaatcaatcatcttgctcctgatgagtttctcagaaaccctagctttaagaaaaactgcgacttg

SEQ ID NO: 534479 - DNA, 75 bp, synthetic construct
  source 1..75: mol_type = other DNA
acccgaaaaatgccggggatgggtaaggttaatcgcggcctcctgttagagatagcagcggcgcacatgaatcca

SEQ ID NO: 534480 - DNA, 75 bp, synthetic construct
  source 1..75: mol_type = other DNA
tcaatgttctccacagctttcgtgcgtttaacaacaatgactgtgaggttcgtgattatatctatgaattgatga

SEQ ID NO: 534481 - DNA, 75 bp, synthetic construct
  source 1..75: mol_type = other DNA
cattcttcgtgcaatcatgcgtggcgagacccgaaaaattccggggatgggtaaagttaatcgcgcccatctgtt

SEQ ID NO: 534482 - DNA, 75 bp, synthetic construct
  source 1..75: mol_type = other DNA
tttccggcgcatgaatgttacgtggagccgttctgcggcgcagcagcgctctattttcttaagacacctggtaag

SEQ ID NO: 534483 - DNA, 75 bp, synthetic construct
  source 1..75: mol_type = other DNA
accgggtatccgcagtttgaagagtatctgacaggtaagagcgataatacgccgaagagcgcggtctgggcggcg

SEQ ID NO: 534484 - DNA, 75 bp, synthetic construct
  source 1..75: mol_type = other DNA
cctaccttgatgacatcgccgtaaagcagtggcgggaaaaatcgcgccagcttgcggaacggggagacctcaccc

SEQ ID NO: 534485 - DNA, 75 bp, synthetic construct
  source 1..75: mol_type = other DNA
agagcagattttcgccattgaagaggatccacacttcttcaagaaatatgtactatattatagtagtgcggaaga

SEQ ID NO: 534486 - DNA, 75 bp, synthetic construct
  source 1..75: mol_type = other DNA
aacggcctgaatattcacagtgtagagattaattacagtcttgcagcgaagggaacatcacgaagtgaacttatt

SEQ ID NO: 534487 - DNA, 75 bp, synthetic construct
  source 1..75: mol_type = other DNA
tcccctggattggcgggaaacgccgtctggccaaacatattctgccattgtttcctgctcatacctgctacgtgg

SEQ ID NO: 534488 - DNA, 75 bp, synthetic construct
  source 1..75: mol_type = other DNA
cctcgacttccaccgtgcgtaccgctggttcttcgggtgcgaacccgtttgcttgtatcgcagcaggtattgctt

SEQ ID NO: 534489 - DNA, 75 bp, synthetic construct
  source 1..75: mol_type = other DNA
gtgatgcaggtgaaacagaattatcagcccgtcttaatgaaccgctggcgaatggtgccgtgatccacatcgtgc

SEQ ID NO: 534490 - DNA, 75 bp, synthetic construct
  source 1..75: mol_type = other DNA
cggtgtgtttcaggtggtgcttggggcggcgctgattgcggtggcatggtggaaccctgtgggctggctgggggc

SEQ ID NO: 534491 - DNA, 75 bp, synthetic construct
  source 1..75: mol_type = other DNA
cggcgctgattgcggtggcatggtggaaccctgtgggctggctgggtgccgcggctgtatcgggcatgtatgcgg

SEQ ID NO: 534492 - DNA, 75 bp, synthetic construct
  source 1..75: mol_type = other DNA
gaaagacaagaatgactctttccgtctgatgggcttcggtcaccgtgtatataaaaactacgacccgcgtgccac

SEQ ID NO: 534493 - DNA, 75 bp, synthetic construct
  source 1..75: mol_type = other DNA
tcgcaatggcacgtaccgttggctggatcgcccactggagcgaaatgcacagtgacggtatgaagattgcccgtc

SEQ ID NO: 534494 - DNA, 75 bp, synthetic construct
  source 1..75: mol_type = other DNA
tggtaccaggtacgcattgccgggcgtgatgcaggtgaaaccgaattgtctgcccgtcttaatgagccgctggca

SEQ ID NO: 534495 - DNA, 75 bp, synthetic construct
  source 1..75: mol_type = other DNA
gtgatgctggtgaaaccgaattgtctgcccgtcttaatgagccgctggcaaatggtgccgtgatccacatcgtgc

SEQ ID NO: 534496 - DNA, 75 bp, synthetic construct
  source 1..75: mol_type = other DNA
gtaatggcataccgaaagattttgattactggttaaaacaaagtgtcgaacccttactcaaaaacccatttgata

SEQ ID NO: 534497 - DNA, 75 bp, synthetic construct
  source 1..75: mol_type = other DNA
tacgcattgccgggagggatacgtcagagcaggtgctccatgcacgactgcatgagtcactgcgtgacggtgatg

SEQ ID NO: 534498 - DNA, 75 bp, synthetic construct
  source 1..75: mol_type = other DNA
ctgcctttacggggatttccaacgatttggccgccgcatcgatcttcgtgtgaaaacgggggcagaagcgatccg

SEQ ID NO: 534499 - DNA, 75 bp, synthetic construct
  source 1..75: mol_type = other DNA
ctgcctttacggggattttcaacgatttggccgccgcatcgagcttcgtgtgaaaacgggggcagaagccatccg

SEQ ID NO: 534500 - DNA, 75 bp, synthetic construct
  source 1..75: mol_type = other DNA
cgccgtatatcccaggacatcagcacccgtgatgaaggcgggggcggaacggtcgtggttgtcgggcgacaggga

SEQ ID NO: 534501 - DNA, 75 bp, synthetic construct
  source 1..75: mol_type = other DNA
tggcaaatggtgccgtgatccacatcgtgccgcgtctggcgggagcaaaaagtggcggtgtgtttcaggtggtgc

SEQ ID NO: 534502 - DNA, 75 bp, synthetic construct
  source 1..75: mol_type = other DNA
ctgcctttacggggatttgcaacgatttggccgccgcatcgatcttcgtgtgaaaacgggggcagaagccatccg

SEQ ID NO: 534503 - DNA, 75 bp, synthetic construct
  source 1..75: mol_type = other DNA
ggtgtattggcgaaaatgaaaagctataagcctaaagatgctatttacatccctactggcggtctttatttgttc

SEQ ID NO: 534504 - DNA, 75 bp, synthetic construct
  source 1..75: mol_type = other DNA
gtgatgcaggcgaaaatgaattatcagcccgtcttaatgaaccgctggcaaatggtgctgtgatccatatcgtgc

SEQ ID NO: 534505 - DNA, 75 bp, synthetic construct
  source 1..75: mol_type = other DNA
tttggccgccgcatcgaccttcgtgtaaaaacgggggctgaagccatccgggcgctgtccacacaggtcccagcg

SEQ ID NO: 534506 - DNA, 75 bp, synthetic construct
  source 1..75: mol_type = other DNA
cggtgtgtttcaggcggtgctgggtgcggcgctgattgcggtggcatggtggaaccctgtgggctggctgggtgc

SEQ ID NO: 534507 - DNA, 75 bp, synthetic construct
  source 1..75: mol_type = other DNA
tgaaaacgggggctgaagccatccgggcgctggccacacagcttccgtcgtttcgccagaaactgaatgagggct

SEQ ID NO: 534508 - DNA, 75 bp, synthetic construct
  source 1..75: mol_type = other DNA
cgcttggcggtgttgcacagatgctggcccctaaacccaaaaccccccgcacacagacaacggataacggcaaac

SEQ ID NO: 534509 - DNA, 75 bp, synthetic construct
  source 1..75: mol_type = other DNA
gtatgaccggtatcctgttttctctcggtgccagtatgattctggggggtgtggcgcagatgctggccccgaaac

SEQ ID NO: 534510 - DNA, 75 bp, synthetic construct
  source 1..75: mol_type = other DNA
gtaatggcattccaaaagatttcgactactggttgaaccaaagcgttgaacctctcttaaaaaatccatttgaga

SEQ ID NO: 534511 - DNA, 75 bp, synthetic construct
  source 1..75: mol_type = other DNA
ttatctgcccgtcttaatgaaccgctggcaaatggtgccgtgatccacgtcgttccgcgtctggcgggtgccaaa

SEQ ID NO: 534512 - DNA, 75 bp, synthetic construct
  source 1..75: mol_type = other DNA
cggcgtatttcaggctgtgctgggggcgacgctgattgcggtggcatggtggaaccctgcaggctggctgggtgc

SEQ ID NO: 534513 - DNA, 75 bp, synthetic construct
  source 1..75: mol_type = other DNA
ggtgaaatgcgcgtgggatcccgcgtggtatctcaggagatcagcactgcagaagaaggcgatggtggtcaggtt

SEQ ID NO: 534514 - DNA, 75 bp, synthetic construct
  source 1..75: mol_type = other DNA
aacggcaaacagaacacgtacttttcctcgctggataacatgattgcccaggggaacccgatgccggtgccttac

SEQ ID NO: 534515 - DNA, 75 bp, synthetic construct
  source 1..75: mol_type = other DNA
ggtgaaatgcgcgtggggtcccgtgtggtatctcaggagatcagcactgcagatgaaggcgatggtggtcaggtt

SEQ ID NO: 534516 - DNA, 75 bp, synthetic construct
  source 1..75: mol_type = other DNA
ggtgaaatgcgcgtgggctcccgggtggtatctcaggagatcagcactgcagacgaaggcgatggtggtcaggtt

SEQ ID NO: 534517 - DNA, 75 bp, synthetic construct
  source 1..75: mol_type = other DNA
ggtgaaatgcgcgtgggttcccgtgtggtatctcaggagatcagcactgcagaggaaggcgatggtggtcaggtt

SEQ ID NO: 534518 - DNA, 75 bp, synthetic construct
  source 1..75: mol_type = other DNA
tgctgggtgcggcgttgattgctacggcaatctggatgccggggatcagtatcgctttcagtgacattctctttt

SEQ ID NO: 534519 - DNA, 75 bp, synthetic construct
  source 1..75: mol_type = other DNA
ctgtacggtgaaatgcgcgtggggtcacgtgtggcatctcaggagatcagcacggcagatgaaggggatggtggt

SEQ ID NO: 534520 - DNA, 75 bp, synthetic construct
  source 1..75: mol_type = other DNA
gggcactggccacacagatcccggcgtttcgtcagaaactgaacaacggctggtatcaggtacgcattgccgggc

SEQ ID NO: 534521 - DNA, 75 bp, synthetic construct
  source 1..75: mol_type = other DNA
agccagaactcccacagcgaccagcacggataacggcaaacagaacacctatttttcttcgctagataatatggt

SEQ ID NO: 534522 - DNA, 75 bp, synthetic construct
  source 1..75: mol_type = other DNA
atgacgcttggcggtgttgcacagatgctggcaccgaaagcgagtaccgcaacaacgaccagcacggataacggt

SEQ ID NO: 534523 - DNA, 75 bp, synthetic construct
  source 1..75: mol_type = other DNA
tggcagcatgaccattcccgcccggtggggcagtgtacggtacgccgggtcagcgaagggctggaaatcacggca

SEQ ID NO: 534524 - DNA, 75 bp, synthetic construct
  source 1..75: mol_type = other DNA
cacagatgctggcccctaaacccagaactccccgcacacagacaacggataacggcaaacagaacacgtattttt

SEQ ID NO: 534525 - DNA, 75 bp, synthetic construct
  source 1..75: mol_type = other DNA
tttgtggcggcaaatctgcagcccaccggtgcggtatggctgatgtccagcacgaatgctcttgcgctgtccatg

SEQ ID NO: 534526 - DNA, 75 bp, synthetic construct
  source 1..75: mol_type = other DNA
ctgcgtccgcagaccattatcgggcgatttggtcagggcgggatccctgcacttcgtcaggtgccgttcaatatc

SEQ ID NO: 534527 - DNA, 75 bp, synthetic construct
  source 1..75: mol_type = other DNA
aacagattaaaagttttgaaaacaagcgtgcagcgctggcagcctcccttgaggaggtcatgaccaaagccgcag

SEQ ID NO: 534528 - DNA, 75 bp, synthetic construct
  source 1..75: mol_type = other DNA
cccgtttgcaggcagcggctcaacctgcgtggccgccctccagtccggacgccggtatatcggtatcgagctgct

SEQ ID NO: 534529 - DNA, 75 bp, synthetic construct
  source 1..75: mol_type = other DNA
tgaacggcgagtatggcagcgagtttggcggatttttccccgtccaggtccgtttcacgcctgcccacgaacgtt

SEQ ID NO: 534530 - DNA, 75 bp, synthetic construct
  source 1..75: mol_type = other DNA
tgaccttcgggccaggctgaacgatatggagcatcgctgtcgctttgattccgatgtgcttgttgaacgcctgac

SEQ ID NO: 534531 - DNA, 75 bp, synthetic construct
  source 1..75: mol_type = other DNA
agcagcctgcaaccgctgattgagagcttcacacacccgaacgctattgtgctggacccttttgcaggcagcggc

SEQ ID NO: 534532 - DNA, 75 bp, synthetic construct
  source 1..75: mol_type = other DNA
atgtcccgttttgtcctcggtaactgcatcgatgttatagcccgtattcctgataacgccattgatttcatactg

SEQ ID NO: 534533 - DNA, 75 bp, synthetic construct
  source 1..75: mol_type = other DNA
tcgccacgaatgcgcctacatcctggcaaaaggccgtccacgtctgccacaaaacccgctgccggacgtgctggg

SEQ ID NO: 534534 - DNA, 75 bp, synthetic construct
  source 1..75: mol_type = other DNA
tcggtttccgtgaccgttccgggcgcaccatcgccggcgataaaaccgatgagtggctgcaaccggcctgtaatg

SEQ ID NO: 534535 - DNA, 75 bp, synthetic construct
  source 1..75: mol_type = other DNA
ctgcaaccggcctgtaatgaaatgttccgcgtactcaaaaaagatgcgctgatggtcagcttctacggctggaac

SEQ ID NO: 534536 - DNA, 75 bp, synthetic construct
  source 1..75: mol_type = other DNA
acctgccagtaatgagatgtaccgcgtactaaaaaaagatgcgctgatggtgagtttctatggctggaaccgtat

SEQ ID NO: 534537 - DNA, 75 bp, synthetic construct
  source 1..75: mol_type = other DNA
tgggctggaaatacagcggcaaccgccaccacccgaccgaaaaaccggtctccagcctgcaaccgttgatcgaga

SEQ ID NO: 534538 - DNA, 75 bp, synthetic construct
  source 1..75: mol_type = other DNA
gtactatcccctttttcgtcgtgctcgcatcctccagcgccacggcggatgcaatatcctctgcccgttttgctg

SEQ ID NO: 534539 - DNA, 75 bp, synthetic construct
  source 1..75: mol_type = other DNA
ccatcacccgacggaaaagcccgttaccagcctgcaaccgctgattgagagcttcacacacccgaactcaattgt

SEQ ID NO: 534540 - DNA, 75 bp, synthetic construct
  source 1..75: mol_type = other DNA
cctggcaaaagggcgtccggcgctgcctcagaagccattgcccgacgtgctgggctggaaatattcaggcaatcg

SEQ ID NO: 534541 - DNA, 75 bp, synthetic construct
  source 1..75: mol_type = other DNA
ctgatcgacgaggcaaaagacctgttccgggaacacaacaacaggactgactatctcgccatccgaaacaccttt

SEQ ID NO: 534542 - DNA, 75 bp, synthetic construct
  source 1..75: mol_type = other DNA
gcaaaaacccgaaaaccagcaccggaggttatcgccaccctgagacagtgcgccgcctgtggtcgccatggcggc

SEQ ID NO: 534543 - DNA, 75 bp, synthetic construct
  source 1..75: mol_type = other DNA
ttagaatgaaagagcttactgaaaaacaacgaccgcaatctgatgatcctgatttttgggatgtgtggtctggca

SEQ ID NO: 534544 - DNA, 75 bp, synthetic construct
  source 1..75: mol_type = other DNA
ctgagcgggaaatccgcgcatttgcagacaaggcaaacagcacccgaacgctgcttatccacgcagattttaagg

SEQ ID NO: 534545 - DNA, 75 bp, synthetic construct
  source 1..75: mol_type = other DNA
cgacgcctgcggtcgccatggcggtggctactgcccggactgcggaccggtaacgggagatgcaacttactgcgt

SEQ ID NO: 534546 - DNA, 75 bp, synthetic construct
  source 1..75: mol_type = other DNA
catgggtaacacgctttgcgtgtactgcgatcccccttacctgccttgcaatggccgggacaatttcaccgccta

SEQ ID NO: 534547 - DNA, 75 bp, synthetic construct
  source 1..75: mol_type = other DNA
tgccggcgataaaaccgatgaatggctgcaaccggcctgtattgaaatgtttcgcgtactcaaaaaagatgcgct

SEQ ID NO: 534548 - DNA, 75 bp, synthetic construct
  source 1..75: mol_type = other DNA
gggctggaaatattcgggcaatcgtcatcacccgacggaaaagcccgttaccagcctgcaaccgctgattgagag

SEQ ID NO: 534549 - DNA, 75 bp, synthetic construct
  source 1..75: mol_type = other DNA
gcatcgatgttatggcccgtatccctgataacgccattgatttcatccttaccgatcctccatatctcgtcggtt

SEQ ID NO: 534550 - DNA, 75 bp, synthetic construct
  source 1..75: mol_type = other DNA
gtgagcaactcagggtaggtactgtagattttgtttcacccaatgaaattagagcactattagatatcgattcac

SEQ ID NO: 534551 - DNA, 75 bp, synthetic construct
  source 1..75: mol_type = other DNA
ctggaaacgaacaccttatgaccgaccgatttacaccacatccactggtgctacaggaaataaaatatattcctg

SEQ ID NO: 534552 - DNA, 75 bp, synthetic construct
  source 1..75: mol_type = other DNA
tggccacctggtgtttaccaaaacctacacatcgaaggccgcatatgtgggctatcgccacgaatgcgcttacat

SEQ ID NO: 534553 - DNA, 75 bp, synthetic construct
  source 1..75: mol_type = other DNA
atgaagttaaaacaacaaactgtgcgactttcacgtcgcaccttaaccgacccaccatatctcgttggttttcgt

SEQ ID NO: 534554 - DNA, 75 bp, synthetic construct
  source 1..75: mol_type = other DNA
taaccgacccgccatatctcgtcggtttgcgtgaccgttccgggcgcaccatcgccggcgataaaaccgatgaat

SEQ ID NO: 534555 - DNA, 75 bp, synthetic construct
  source 1..75: mol_type = other DNA
tgatttccattacctcagcgtgcccgccgcttactctggctgttgaaaatgtattaaacaatcgtgatgccgctg

SEQ ID NO: 534556 - DNA, 75 bp, synthetic construct
  source 1..75: mol_type = other DNA
tgataacgccattgatttcatactgactgacccgccgtacctcgtcggttttcgtgaccgttccgggcgcaccat

SEQ ID NO: 534557 - DNA, 75 bp, synthetic construct
  source 1..75: mol_type = other DNA
taacggacccgccatatctcgtcggtttccgtgaccgttccgggcgcaccatcgccggcgataaaaccgatgaat

SEQ ID NO: 534558 - DNA, 75 bp, synthetic construct
  source 1..75: mol_type = other DNA
cacagatgttggcaccgaaagccagtaccgcaacaacgaccagcacggataacggtaagcagaacacgtatttct

SEQ ID NO: 534559 - DNA, 75 bp, synthetic construct
  source 1..75: mol_type = other DNA
atgttctgcccgttctgtacggtgaaatgcgcgtggggtcgcgggtggtctctcaggagatcagcacggcagacg

SEQ ID NO: 534560 - DNA, 75 bp, synthetic construct
  source 1..75: mol_type = other DNA
ctgctgttttctctcggtgccagtatgacgcttggcggtgttgcacagatgctggcccctaaacccaaaaccccc

SEQ ID NO: 534561 - DNA, 75 bp, synthetic construct
  source 1..75: mol_type = other DNA
tggcgtcaccgggcatggcacgcatctgcctttacggggatttgcaacgatttggccgccgcatcgaccttcggg

SEQ ID NO: 534562 - DNA, 75 bp, synthetic construct
  source 1..75: mol_type = other DNA
tggcgtcaccgggcatggcacgcatctgcctttacggggatttccaacgatttggccgccgcatcgaccttcgcg

SEQ ID NO: 534563 - DNA, 75 bp, synthetic construct
  source 1..75: mol_type = other DNA
agtgcgttcccatcacggtgacagccatctgggacacgtcttccctgacgggccacaggataccggtggattacg

SEQ ID NO: 534564 - DNA, 75 bp, synthetic construct
  source 1..75: mol_type = other DNA
gacagcaacgactggccgccgtgcaacgggccatgcagcagggggccgcgaatgataactggtttgaaccggagg

SEQ ID NO: 534565 - DNA, 75 bp, synthetic construct
  source 1..75: mol_type = other DNA
gtgcgactttcacgtcgcacactgactgacccgccgtacctcgtcggttttcgtgaccgtttcgggcgcaccatc

SEQ ID NO: 534566 - DNA, 75 bp, synthetic construct
  source 1..75: mol_type = other DNA
cccgccgtacctcgtcggttttcgtgaccgtcaggggcgtaccattactggcgataaaaccgatgaatggctgca

SEQ ID NO: 534567 - DNA, 75 bp, synthetic construct
  source 1..75: mol_type = other DNA
gccgggcagcaacgccttgccgccgtgcaacgggccatgcagcagggggccgcgaatgatgactggtttatgccg

SEQ ID NO: 534568 - DNA, 75 bp, synthetic construct
  source 1..75: mol_type = other DNA
tgccggcgataaaaccgatgaatggctgcaaccggcctgtaatgaaatgttccgcgtactcaaaaaagatacgct

SEQ ID NO: 534569 - DNA, 75 bp, synthetic construct
  source 1..75: mol_type = other DNA
caccgtgccgggcagcaacgccttgccgccgtgcaacgggccatgcagcagggggccgcgaatgatgactggttt

SEQ ID NO: 534570 - DNA, 75 bp, synthetic construct
  source 1..75: mol_type = other DNA
ttaatgcagtatctccagaaactcgagccagtgatatggagaaaagttctaagatggtgagtgctctgattgatg

SEQ ID NO: 534571 - DNA, 75 bp, synthetic construct
  source 1..75: mol_type = other DNA
agaaggttaaatggcagattaccagccctgaattgttggaagaaaagagtaaagcgatcagcgatattgaagggg

SEQ ID NO: 534572 - DNA, 75 bp, synthetic construct
  source 1..75: mol_type = other DNA
tcggtttccgtgaccgtcaggggcgtaccatcgccggcgataaaaccgatgaatggctgcaaccggcctgtaatg

SEQ ID NO: 534573 - DNA, 75 bp, synthetic construct
  source 1..75: mol_type = other DNA
ctgcaacccgcctgtaaccagatgtaccgcgttctcaaaaaagatgcgctgatgatgagtttctacggctggaac

SEQ ID NO: 534574 - DNA, 75 bp, synthetic construct
  source 1..75: mol_type = other DNA
gatggtgagcttctatggctggaaccgcgtcgatcgctttgtggccgcctggaaaaatgcgggattcagcgtggt

SEQ ID NO: 534575 - DNA, 75 bp, synthetic construct
  source 1..75: mol_type = other DNA
ggtatgttcggtcacgtcgacgcaggtgtcttgcacgtccgtccggcgctggatatgtgcgatccgcaacaagag

SEQ ID NO: 534576 - DNA, 75 bp, synthetic construct
  source 1..75: mol_type = other DNA
gcattaggcgctcataccgtggtggttggcggggcaatcactcgcccacagcagatcacggcacgctttgtcgca

SEQ ID NO: 534577 - DNA, 75 bp, synthetic construct
  source 1..75: mol_type = other DNA
aaactgccaggcatgtgctggcggaaaatgactgtggattcttacgtgaggtcctggcagcggtcagcgttccgg

SEQ ID NO: 534578 - DNA, 75 bp, synthetic construct
  source 1..75: mol_type = other DNA
actacgctctacggctataccgcagaaactgccaggcatgtgctggcggaaaatgactgtggattcttacgtgag

SEQ ID NO: 534579 - DNA, 75 bp, synthetic construct
  source 1..75: mol_type = other DNA
gcgaaaaaacatctgcgtccggtagcgcgtcagccgctggaagtggttcgtgacaaactgactgcgattactgac

SEQ ID NO: 534580 - DNA, 75 bp, synthetic construct
  source 1..75: mol_type = other DNA
gatgcggcactttctgccgattttccggcggcggtggcactggctgaggcctgcccggcacttgttgacgcggca

SEQ ID NO: 534581 - DNA, 75 bp, synthetic construct
  source 1..75: mol_type = other DNA
cccggaacgtgccgcacgttgcctgacattaggcgctcataccgtggtggttggggggcaatcactcgtccgcag

SEQ ID NO: 534582 - DNA, 75 bp, synthetic construct
  source 1..75: mol_type = other DNA
ctgctcgttctattgcaaacacattgcacgcaatggcagaaagaggatacgatcattctgtcgattttcctcgcc

SEQ ID NO: 534583 - DNA, 75 bp, synthetic construct
  source 1..75: mol_type = other DNA
tgcgtgagcagtacggggtcggaccggtatgcagtgaactgcatattgccccgtcaacgtattaccactgtcagc

SEQ ID NO: 534584 - DNA, 75 bp, synthetic construct
  source 1..75: mol_type = other DNA
aaagcctacgcatgttttcctgcaggcaggcgtgggggcaatggccggtggcgttctgggataccttgccgatgc

SEQ ID NO: 534585 - DNA, 75 bp, synthetic construct
  source 1..75: mol_type = other DNA
tatttatgccaaagggatcggcacaggccagcgttgacaggatcaggaatttaggggcagcgtgtattgttactg

SEQ ID NO: 534586 - DNA, 75 bp, synthetic construct
  source 1..75: mol_type = other DNA
ttggggactagcagtaatcccaactggattcctactatactccggatataaaaaaggaagaaagaaaagagcaat

SEQ ID NO: 534587 - DNA, 75 bp, synthetic construct
  source 1..75: mol_type = other DNA
gtttttgacgatcagatccgtggtccgatcgaattcagcaaccaggagctggatgatctgattatccgtcgtacc

SEQ ID NO: 534588 - DNA, 75 bp, synthetic construct
  source 1..75: mol_type = other DNA
actacattaacacgctgccgccggagtatgttgctacccatttacagtggcacatcgagcaggaaaatatcgata

SEQ ID NO: 534589 - DNA, 75 bp, synthetic construct
  source 1..75: mol_type = other DNA
tgaggagcctgaatgggcattacgtgccgaaaaggtcgctgcgcgtatgcaggatctcacctcttttattgttaa

SEQ ID NO: 534590 - DNA, 75 bp, synthetic construct
  source 1..75: mol_type = other DNA
gccagcctgcagggccgcgctgtgtatcatccttcctgtagcctgacccgcaaactgggagtgaaggaagagccg

SEQ ID NO: 534591 - DNA, 75 bp, synthetic construct
  source 1..75: mol_type = other DNA
atgccgctgcgtgtcgccgtaaccggtgcggggcagtctccggcactggatgttaccgttcacgcaattggtagg

SEQ ID NO: 534592 - DNA, 75 bp, synthetic construct
  source 1..75: mol_type = other DNA
ctattcagacgacggcggacgagctggaagtgggaatgggtaaagttggtatgccgctgcgtgtcgccgttactg

SEQ ID NO: 534593 - DNA, 75 bp, synthetic construct
  source 1..75: mol_type = other DNA
gcgaagagcaaatggcgaaaggtgagaagccgcgttatgacggtcgctgccgccacagccatgagcatcatgctg

SEQ ID NO: 534594 - DNA, 75 bp, synthetic construct
  source 1..75: mol_type = other DNA
tctcggacgtctttgccgccttcgcggaatttcctgccgccgttgccgaggaagcggcactactggcgcttgatg

SEQ ID NO: 534595 - DNA, 75 bp, synthetic construct
  source 1..75: mol_type = other DNA
aattgcctgccgccgttgccgaggaagcggcactaaccggggcaaatgatgagtatcgtcctgttaacctgcggc

SEQ ID NO: 534596 - DNA, 75 bp, synthetic construct
  source 1..75: mol_type = other DNA
gggcactgcctataaatgctactgctccaaagagcgtctggaagcgctgcgtgaagagcaaatggcaaaaggtga

SEQ ID NO: 534597 - DNA, 75 bp, synthetic construct
  source 1..75: mol_type = other DNA
gtattggtgacgcactgaaatcacggatggcacgagactccgtattgctgctggaaaaactgggttgtcgcgtta

SEQ ID NO: 534598 - DNA, 75 bp, synthetic construct
  source 1..75: mol_type = other DNA
ggtacgttctcggtcaaaatggccgaaatatccggcgagatggtgaaggaaaaggtttcacacctgatggaagcc

SEQ ID NO: 534599 - DNA, 75 bp, synthetic construct
  source 1..75: mol_type = other DNA
atcacccatcctgtagtctgtcccgcaaattgggtgtgaaggatgaaccacttacgctcctgaaaaatgtgcgtg

SEQ ID NO: 534600 - DNA, 75 bp, synthetic construct
  source 1..75: mol_type = other DNA
tgtcactgaatccgctttacaaacccatcgaactgaatggcggttacaccattaaaggtaaagtttcacaaatac

SEQ ID NO: 534601 - DNA, 75 bp, synthetic construct
  source 1..75: mol_type = other DNA
ccgcctttttcctgccggtccccggacagagcacaaaggaagtcgccgccggctccgctttacccggccatgcgg

SEQ ID NO: 534602 - DNA, 75 bp, synthetic construct
  source 1..75: mol_type = other DNA
tatattagcgataatatccaggatattgagttaataaaaaaatcttttatcgggtatggttactataacaaaaaa

SEQ ID NO: 534603 - DNA, 75 bp, synthetic construct
  source 1..75: mol_type = other DNA
ataaagcaccaacttgaagaggataaaatgggagagcagttatcgattccctatccgggcagcccgtttacgggc

SEQ ID NO: 534604 - DNA, 75 bp, synthetic construct
  source 1..75: mol_type = other DNA
gagtggaaaagcgtacggattctggaagcagagtgccgcgcagatcatatccatatgcttgtggaaatcccaccc

SEQ ID NO: 534605 - DNA, 75 bp, synthetic construct
  source 1..75: mol_type = other DNA
ccaaatggcgtaaaggctggatcccaccggttactactgccgccagactcccttcagtgtcccgggtaagccgct

SEQ ID NO: 534606 - DNA, 75 bp, synthetic construct
  source 1..75: mol_type = other DNA
tgtgacagtcagtcgctgggtgcgttcaggaacattccctgaaatgtcaacccggcctccaaagcgaggacttct

SEQ ID NO: 534607 - DNA, 75 bp, synthetic construct
  source 1..75: mol_type = other DNA
ccgaggtggtagccgcgcagttagtgaaagaggtgaaacgctacctggcaagcccggcggcggtgggggaatatc

SEQ ID NO: 534608 - DNA, 75 bp, synthetic construct
  source 1..75: mol_type = other DNA
catagtttttgcgccaaaataccgaagaaaagtgttctacagagagaagcgtaaagcaacaggcagtattttgag

SEQ ID NO: 534609 - DNA, 75 bp, synthetic construct
  source 1..75: mol_type = other DNA
cgctgatgatcttcacggtcttcgggcaatgcgtagtgggcggttttatcgttctggcgctggcgttaatcaaag

SEQ ID NO: 534610 - DNA, 75 bp, synthetic construct
  source 1..75: mol_type = other DNA
gtcgtcggtgaaaagcgcgtcagtgccgaagtggtcgccgcccaactggtgaaagaggttaaacgctacctggca

SEQ ID NO: 534611 - DNA, 75 bp, synthetic construct
  source 1..75: mol_type = other DNA
ggcgctggcgggcgcgggagaatttacggtcgcccatccctcatgccatctgctgaccaatatcgcggtggtgga

SEQ ID NO: 534612 - DNA, 75 bp, synthetic construct
  source 1..75: mol_type = other DNA
gaaagaggtgaaacgctacctggcaagcccggcggcggtgggggaatatctcgccgaccaactggtactgccgat

SEQ ID NO: 534613 - DNA, 75 bp, synthetic construct
  source 1..75: mol_type = other DNA
tgtggagatcccgcccaaaatgagcgtatccggctttatgggatatctgaaagggaaaagcagtctgatgcttta

SEQ ID NO: 534614 - DNA, 75 bp, synthetic construct
  source 1..75: mol_type = other DNA
ctgcaggaagaccagggacaattactgactcttgccggtgaacctgacggaaaactccgcgcagcaggtcgttaa

SEQ ID NO: 534615 - DNA, 75 bp, synthetic construct
  source 1..75: mol_type = other DNA
gtcgttatttctgatggcctgtcaactgatgcgatcaccgtgaactacgaagagatcctgccgccgctgatggcg

SEQ ID NO: 534616 - DNA, 75 bp, synthetic construct
  source 1..75: mol_type = other DNA
tggtctgtctacggatgccatcaccgtgaactacgaagaaattctgccgccgctgatggcgggcttgcaacatgc

SEQ ID NO: 534617 - DNA, 75 bp, synthetic construct
  source 1..75: mol_type = other DNA
ggaaattgaagaggatggcagcactatcagtgacgatgcggcgaagcaacggggtgaaataaaagtgggaataac

SEQ ID NO: 534618 - DNA, 75 bp, synthetic construct
  source 1..75: mol_type = other DNA
acgccagttgtctgctaaacatcggcggtcggcttagccgtgaagggcatcctgtaaaagtgatgcatattgctg

SEQ ID NO: 534619 - DNA, 75 bp, synthetic construct
  source 1..75: mol_type = other DNA
gtgaatgtaaatttctttgtcacctgtattggtgacgcactgaaatcacggatggcacgagactccgtattgctg

SEQ ID NO: 534620 - DNA, 75 bp, synthetic construct
  source 1..75: mol_type = other DNA
tgcaggcatttattggggagctggacggcggcgtatttgaaaccaaaatcggcgcagttctcagtgaagtcgctt

SEQ ID NO: 534621 - DNA, 75 bp, synthetic construct
  source 1..75: mol_type = other DNA
gccgaaggtgataacggctggtgtctggcgctggttgagccggatggcgaacgcacttttatgtcattcagcggt

SEQ ID NO: 534622 - DNA, 75 bp, synthetic construct
  source 1..75: mol_type = other DNA
tgctgcctgaattaaccacgcgtcagccggtgatggtcgtcggcgcggcggtcattgacgtgatcgccgacgctt

SEQ ID NO: 534623 - DNA, 75 bp, synthetic construct
  source 1..75: mol_type = other DNA
cggacgtacaggtcgttgtctccgatggcctgtcaactgatgccatcaccgtcaactatgaagagatcctgccgc

SEQ ID NO: 534624 - DNA, 75 bp, synthetic construct
  source 1..75: mol_type = other DNA
cgccgatgtatgtcaatcgcggtggtcgcctgacaattctgcaggaagaccagggacaattactgactcttgccg

SEQ ID NO: 534625 - DNA, 75 bp, synthetic construct
  source 1..75: mol_type = other DNA
gtggaaaaaatggcggcattcgtctgggtaaaccggcgagtgcgatacgtattggtgatgtggtgcgcgagctgg

SEQ ID NO: 534626 - DNA, 75 bp, synthetic construct
  source 1..75: mol_type = other DNA
acccgggcacgccatcgggtatgggcactgtttaacaaagagaatccctctccctttgtggaaatactgaaaaat

SEQ ID NO: 534627 - DNA, 75 bp, synthetic construct
  source 1..75: mol_type = other DNA
tgtgtgcagaggaaggggtaactcaggcagagttgatagaaaggcttattgagaaagagacctgtcaccggaata

SEQ ID NO: 534628 - DNA, 75 bp, synthetic construct
  source 1..75: mol_type = other DNA
ggaattgcctgccgccgttgccgaggaagcggcactactggcgctcgaggatgcgttcgtttctgatgatttcgc

SEQ ID NO: 534629 - DNA, 75 bp, synthetic construct
  source 1..75: mol_type = other DNA
ccgctaaacagtttaaccaatggcgacaaaaaagccgttactctgctggaagagagccagcttgatgctttgctg

SEQ ID NO: 534630 - DNA, 75 bp, synthetic construct
  source 1..75: mol_type = other DNA
agcgcactgaaggcagaaaatgccgttgatttttccggtttgattcatcaggccattgtaatccttgagaaaggc

SEQ ID NO: 534631 - DNA, 75 bp, synthetic construct
  source 1..75: mol_type = other DNA
cgcaggaagcggaaaaacgtccgtgctggtagcgcgagccggctggttgctggcgcgcggcgaagcgtctcctga

SEQ ID NO: 534632 - DNA, 75 bp, synthetic construct
  source 1..75: mol_type = other DNA
gcaaaattgatgacgcagcagccgaaaagctcagtaaaacagcacaggccgctccgctcccaaaaggcccgaccc

SEQ ID NO: 534633 - DNA, 75 bp, synthetic construct
  source 1..75: mol_type = other DNA
gcaaaattgatgacgcagcagccgaaaagctcagcaaaacagcacaggccgctccgttcccaaaagacccgaccc

SEQ ID NO: 534634 - DNA, 75 bp, synthetic construct
  source 1..75: mol_type = other DNA
tgtatttctgcacggtggtgtgtgcgttatatctggtgagcgggggctataaggttatccgtaattacgtgcagg

SEQ ID NO: 534635 - DNA, 75 bp, synthetic construct
  source 1..75: mol_type = other DNA
ttgagtactgcgagagagaggggataacacaggctcagttcattgagaaaattatcaaagatgaactgcagagac

SEQ ID NO: 534636 - DNA, 75 bp, synthetic construct
  source 1..75: mol_type = other DNA
gctacggcagaagattacgagcgcgttattgcctggtgccatgaacatggctatctcgatgacagccgatttgtg

SEQ ID NO: 534637 - DNA, 75 bp, synthetic construct
  source 1..75: mol_type = other DNA
caagtgcgtctgtatgggcaagtcagatactaatgattgctaacagaatcaatgatatcagatacgtatcaggcc

SEQ ID NO: 534638 - DNA, 75 bp, synthetic construct
  source 1..75: mol_type = other DNA
cattgttcaacaaagagaatccttctccctttgtcgaagtcctgaaaaaactggatgttccggtggcgagaaaac

SEQ ID NO: 534639 - DNA, 75 bp, synthetic construct
  source 1..75: mol_type = other DNA
gcgcatttacgcgaaatcgctgcaggcgatggatttcagccccatcactgataaaacctcatataacgccattga

SEQ ID NO: 534640 - DNA, 75 bp, synthetic construct
  source 1..75: mol_type = other DNA
gtcaggaaaaattatattctccagtgtggcccgggccggttcagaaacaggaaaaaactgaacgcattgctgaac

SEQ ID NO: 534641 - DNA, 75 bp, synthetic construct
  source 1..75: mol_type = other DNA
cgctggagacttcaactcgcttgaaaagcagctcaaggattggggcgctaatgatgaagatattaagagccttca

SEQ ID NO: 534642 - DNA, 75 bp, synthetic construct
  source 1..75: mol_type = other DNA
ctgccggaaggttttggcattgaagcctgctggtattacaaagacggcgaagtgctgccggttcctgttgattac

SEQ ID NO: 534643 - DNA, 75 bp, synthetic construct
  source 1..75: mol_type = other DNA
ctggagctgggcaccatcagcgacgatgacaaagcccgtcttacgcagtggatggcatatatcaaagcggtaaag

SEQ ID NO: 534644 - DNA, 75 bp, synthetic construct
  source 1..75: mol_type = other DNA
gcgatgaatttcagtgccgtcactgataaagcctcatataacgccattgaatggcccgtctctccggaaaccctt

SEQ ID NO: 534645 - DNA, 75 bp, synthetic construct
  source 1..75: mol_type = other DNA
gtgaagctatagggggtactcaggctgagatgcttgctggaacagataaagcaaagatgtgctttcagttaactg

SEQ ID NO: 534646 - DNA, 75 bp, synthetic construct
  source 1..75: mol_type = other DNA
gactattcatgccagcaaagggcaacaggcggattacgtgattattgttggcttgcaggaggggagtgatggctt

SEQ ID NO: 534647 - DNA, 75 bp, synthetic construct
  source 1..75: mol_type = other DNA
gataagctctctggttacgctaaaccggaagagcgcatcctggttctggcgcgttaccaccacatgaagcccgcc

SEQ ID NO: 534648 - DNA, 75 bp, synthetic construct
  source 1..75: mol_type = other DNA
ggtatttattgcatcaacaataacctataaaagttcttcctatgatgtgacttttgagaacaaatcgatagctag

SEQ ID NO: 534649 - DNA, 75 bp, synthetic construct
  source 1..75: mol_type = other DNA
ttaaaaactatcttagtaacaacatgcagaatgatagcgaaataattgaagatattaatttaatgtataataaaa

SEQ ID NO: 534650 - DNA, 75 bp, synthetic construct
  source 1..75: mol_type = other DNA
acatttgtttcaagaagttttcgatagtgtggttgatatccataaagaactcaataaggatattatcagaatagg

SEQ ID NO: 534651 - DNA, 75 bp, synthetic construct
  source 1..75: mol_type = other DNA
gctaaagtgttgcccgaaaattggtggcaacatcctgctgcattaggtgcaaccgacagcgatatcgaaatcatc

SEQ ID NO: 534652 - DNA, 75 bp, synthetic construct
  source 1..75: mol_type = other DNA
aatcgatgggaaatgtgtcacccagggtctttattaaattttataacgggaatcatgtcattctcgttacacaat

SEQ ID NO: 534653 - DNA, 75 bp, synthetic construct
  source 1..75: mol_type = other DNA
ctttacatatcctggagcaaataaaagccatctacaatcaagtaatagcgatgttgttgctgctgcagctataag

SEQ ID NO: 534654 - DNA, 75 bp, synthetic construct
  source 1..75: mol_type = other DNA
ttggtcaaaatgtttcaagagtcacagcgggaaaaaaaccgtatgatttattattcctgaatgatgatacaaaac

SEQ ID NO: 534655 - DNA, 75 bp, synthetic construct
  source 1..75: mol_type = other DNA
gacaagggctaagcttcgaacaaatgctcaaagagatgggcaccgggctggtggtgacggagctgatgggccagg

SEQ ID NO: 534656 - DNA, 75 bp, synthetic construct
  source 1..75: mol_type = other DNA
tgtaattgccgaagaaaatggcgatatggagcgtgattacgcctacaccattggtcgcgcgatgagcgatctgca

SEQ ID NO: 534657 - DNA, 75 bp, synthetic construct
  source 1..75: mol_type = other DNA
ctcaagttgaagcgcagcgcaagattctggaagaagcagtttccactgcgctggagttggcctcaggcaaatcgg

SEQ ID NO: 534658 - DNA, 75 bp, synthetic construct
  source 1..75: mol_type = other DNA
ggtgattcaaaaatgtggcttgaagcaaataaagagatgaaatcagctatcaaccttccgtggtatcgcaggaaa

SEQ ID NO: 534659 - DNA, 75 bp, synthetic construct
  source 1..75: mol_type = other DNA
aaagttgccgttatttctacgaagattttgccgagtttgatgctgatgcagcgaaaaaacatctgcgcccggtcg

SEQ ID NO: 534660 - DNA, 75 bp, synthetic construct
  source 1..75: mol_type = other DNA
tcttttaccgtcagaggacggaaggcattgcgcacctgcggacgattaatggtgatttttgcgataccgtcggtg

SEQ ID NO: 534661 - DNA, 75 bp, synthetic construct
  source 1..75: mol_type = other DNA
atatcgcccgcgcctttgaagatgcggtggtcgatacgctgatgattaagtgcaagcgagcgttggatcagacgg

SEQ ID NO: 534662 - DNA, 75 bp, synthetic construct
  source 1..75: mol_type = other DNA
cgggcgctttgtcttcccgcgcccgatgaccgaccgtccagggctggatttcagcttttctggtctgaaaacctt

SEQ ID NO: 534663 - DNA, 75 bp, synthetic construct
  source 1..75: mol_type = other DNA
cgggcgctttgttttcccgcgtccgatgaccgaccgtccagggctggatttcagcttttctggtctgaaaacctt

SEQ ID NO: 534664 - DNA, 75 bp, synthetic construct
  source 1..75: mol_type = other DNA
aaggggtgcgtaccgagcgtcgcgatattattaaagatggcatcctgactcagtggttgctgaccagctattccg

SEQ ID NO: 534665 - DNA, 75 bp, synthetic construct
  source 1..75: mol_type = other DNA
caaatctctgcaaccctggctgctcagtaccgccgcctgacctttcctcgcatcgccgcaggttcgaaaactttt

SEQ ID NO: 534666 - DNA, 75 bp, synthetic construct
  source 1..75: mol_type = other DNA
ctgatccgggtggctattcaggaagcggccagacaaaatctggtggcctttgcccgggagccgatgattgatttt

SEQ ID NO: 534667 - DNA, 75 bp, synthetic construct
  source 1..75: mol_type = other DNA
ggcagaaatgattgcgaagtatgaagtggataccggcaaaacgctgtacccggcacaggcagaacgtctgctgat

SEQ ID NO: 534668 - DNA, 75 bp, synthetic construct
  source 1..75: mol_type = other DNA
ttaatcgagcagggaagctggcggcgaaatttcgcgcgaacggtcagcccgtgtttctggtgcgcgttggttggt

SEQ ID NO: 534669 - DNA, 75 bp, synthetic construct
  source 1..75: mol_type = other DNA
ggcaacatcctgctgcattaggtgcaactgacagtgatatcgaaatcatcaaacgtcagtggggtgcgttttacg

SEQ ID NO: 534670 - DNA, 75 bp, synthetic construct
  source 1..75: mol_type = other DNA
ttcaaaaaactcaaaaccaaaaaacttatcaagtccgtcaatggtcagccctatcgaatcaacactaccgggctg

SEQ ID NO: 534671 - DNA, 75 bp, synthetic construct
  source 1..75: mol_type = other DNA
atgtgctggcatcactggctgacttcttcgcggctgccgtgttctgtgccaccacggacgcgttacgcgccacct

SEQ ID NO: 534672 - DNA, 75 bp, synthetic construct
  source 1..75: mol_type = other DNA
ggtgcctggacttttgaattgcgcgttaatgccgtggcggcgctggaaaccgccttgcttgacctgttaggtcag

SEQ ID NO: 534673 - DNA, 75 bp, synthetic construct
  source 1..75: mol_type = other DNA
ctgtcggtgcgcgtaacgacgcaggtccgatgcagtacctgatccccggctggacctttgaccgtaaacgtcccg

SEQ ID NO: 534674 - DNA, 75 bp, synthetic construct
  source 1..75: mol_type = other DNA
agatcaccatctaccgcaatcaggatgcaaactcggtaaaagacgaggcaaacaacgccatccagaactgggttg

SEQ ID NO: 534675 - DNA, 75 bp, synthetic construct
  source 1..75: mol_type = other DNA
tctcctgatgaaatagataaatcctcaaatattaataacggctggttggccaggacattatttggtcaaaagaag

SEQ ID NO: 534676 - DNA, 75 bp, synthetic construct
  source 1..75: mol_type = other DNA
gctgaaggtagtggcagaaaacgaatggtcaaactgtacggcgatcactcttaacatgaccggggtgtccgatgg

SEQ ID NO: 534677 - DNA, 75 bp, synthetic construct
  source 1..75: mol_type = other DNA
gtctggaatctaccttgctgggtatctctcgtaaagggatatgcgtagttgatcaccgatcattctatgatgtga

SEQ ID NO: 534678 - DNA, 75 bp, synthetic construct
  source 1..75: mol_type = other DNA
tcctgatgatgttttggctctggtaggtggagttgaccagcaaaaagaccgtctggaatctaccttgctgggtat

SEQ ID NO: 534679 - DNA, 75 bp, synthetic construct
  source 1..75: mol_type = other DNA
gccagcattgcggacacagacacgtaatggaatggagtaacgtccattttgattggcatcaagttaatggtaaat

SEQ ID NO: 534680 - DNA, 75 bp, synthetic construct
  source 1..75: mol_type = other DNA
gcccgttgattctgcttgatgaatgtgatgctgccagtgctagtgaagagggcgatccgattgcacttgcggcta

SEQ ID NO: 534681 - DNA, 75 bp, synthetic construct
  source 1..75: mol_type = other DNA
ccaatccctcacaataagcctaatcgtcgtcctatggcgcgtcctgtgcgtcgtaatagctgggttaataacttc

SEQ ID NO: 534682 - DNA, 75 bp, synthetic construct
  source 1..75: mol_type = other DNA
gaagttgatgcggctgatgagtcagacgaagggaacccgatccagctagcggaacaacgcgcaaccactttcggg

SEQ ID NO: 534683 - DNA, 75 bp, synthetic construct
  source 1..75: mol_type = other DNA
gatacttcgccataccttgcacaattctttttatgctctcgtgtttatcagcagtatggtccgcactaaagaaaa

SEQ ID NO: 534684 - DNA, 75 bp, synthetic construct
  source 1..75: mol_type = other DNA
atgacagggagcgtacctttggtggtcaggcctgggtggacaatatcgtggagaaggacacccgtccgacttttg

SEQ ID NO: 534685 - DNA, 75 bp, synthetic construct
  source 1..75: mol_type = other DNA
agtttttcactaacagagtgacaaaagtgctggggatgaccctggcactgatgatggccagtcagagtgcgatgg

SEQ ID NO: 534686 - DNA, 75 bp, synthetic construct
  source 1..75: mol_type = other DNA
gattggcatgtaatcaatggtaaatcactgccgaatccagacacagccgtttaccgttgcccgtcatgtgaaact

SEQ ID NO: 534687 - DNA, 75 bp, synthetic construct
  source 1..75: mol_type = other DNA
cagttgggtaaaactcttgtgctaaacggtattatctttcataggatcgccagcaaccccactaatataggtgtt

SEQ ID NO: 534688 - DNA, 75 bp, synthetic construct
  source 1..75: mol_type = other DNA
aaaaattgtgctaaagtgctcggcgcagttgggtaaaactcttgtgctaaacggtattatctttcataggatcgc

SEQ ID NO: 534689 - DNA, 75 bp, synthetic construct
  source 1..75: mol_type = other DNA
gaaaaatcaggatggtcgcaatctgccatgtgttgaaagcgcccgttatgtttgccctcattgccagagtgattg

SEQ ID NO: 534690 - DNA, 75 bp, synthetic construct
  source 1..75: mol_type = other DNA
tgtgaaagaatatggctcagatagtgaattccatgagcagtccctatggataccaacagaaccgcactacaacac

SEQ ID NO: 534691 - DNA, 75 bp, synthetic construct
  source 1..75: mol_type = other DNA
gtttaatctgggattggcatatgggttgaattttttaattgataaaatccaaagcaagagctatgaatatatatc

SEQ ID NO: 534692 - DNA, 75 bp, synthetic construct
  source 1..75: mol_type = other DNA
agtattcttaatcagaccgttaataaccatttatatatttatgttgatggggaggttaatccatttctaaatacg

SEQ ID NO: 534693 - DNA, 75 bp, synthetic construct
  source 1..75: mol_type = other DNA
ttggctggtggtgacgatggttcttggcgcagtctttgtctggatgatggtgcgtgtgtataacagcatcgatac

SEQ ID NO: 534694 - DNA, 75 bp, synthetic construct
  source 1..75: mol_type = other DNA
gaatatagagatattaatcccacctaagcatctacaagatgagtatgagattatttataaaaaaataaaaaaagg

SEQ ID NO: 534695 - DNA, 75 bp, synthetic construct
  source 1..75: mol_type = other DNA
aaaaggactaagcatttatgataaaagcgcaatgcaacttcaacttttagcatcaaacctatcgaataaatattt

SEQ ID NO: 534696 - DNA, 75 bp, synthetic construct
  source 1..75: mol_type = other DNA
aagcattaaccagcaatggttatcaagcgatatgcgtatgttttttgttccgtgtcctcattgcggggaacacca

SEQ ID NO: 534697 - DNA, 75 bp, synthetic construct
  source 1..75: mol_type = other DNA
ccagtaccccgaccagtaagctcggaagcattaaccagcaatggttatcaagcgatatgcgtatgttttttgttc

SEQ ID NO: 534698 - DNA, 75 bp, synthetic construct
  source 1..75: mol_type = other DNA
tcgcaatctaacgagcaaatagaagaaactaagccaatcacacgaccacaacgtcaaaacatcgccagacgtcca

SEQ ID NO: 534699 - DNA, 75 bp, synthetic construct
  source 1..75: mol_type = other DNA
accgggataaacttgacacaatcagaaaatggatgtgcatcagaaaagtcggagaaaaatattctgatatttcag

SEQ ID NO: 534700 - DNA, 75 bp, synthetic construct
  source 1..75: mol_type = other DNA
aagtaaccttgatgggtcacaacgaacgaaccgtttatattcttgcacatcgtagctttatgacaatgaacgctg

SEQ ID NO: 534701 - DNA, 75 bp, synthetic construct
  source 1..75: mol_type = other DNA
cccgcacaggtggtcatgaattgcttatgctgggcgttaacgttggtaaatccgctgttcgtgaaatgctggtta

SEQ ID NO: 534702 - DNA, 75 bp, synthetic construct
  source 1..75: mol_type = other DNA
tctttaactattaccgtcaccaacaatgataaagagaaaacttttggtggtcaggcatgggtggacaacatagtt

SEQ ID NO: 534703 - DNA, 75 bp, synthetic construct
  source 1..75: mol_type = other DNA
catctgtatgaccgcttaccgctacatcgtccggcaatccgccgtatcgcactgatatttatcgtactgattgta

SEQ ID NO: 534704 - DNA, 75 bp, synthetic construct
  source 1..75: mol_type = other DNA
ccctgcttctggtctgcatggcagtgatgttttatctgtcatcaggtaatgcgccacagatcaaccgcagcgatc

SEQ ID NO: 534705 - DNA, 75 bp, synthetic construct
  source 1..75: mol_type = other DNA
acttactcaaaacaggcaggtaaagagcagtatctgatcccctatttcatctccgcgcaccccggtacgcgtgat

SEQ ID NO: 534706 - DNA, 75 bp, synthetic construct
  source 1..75: mol_type = other DNA
gctttatgggatatctgaaagggaaaagcagtctgatactttacgagcagtttggtgatttgaaattcaaataca

SEQ ID NO: 534707 - DNA, 75 bp, synthetic construct
  source 1..75: mol_type = other DNA
acggcggatgcaatatcctctgcccgttttgccgctgtctcagcgcgcgttgccgcggattccgccgtacttttg

SEQ ID NO: 534708 - DNA, 75 bp, synthetic construct
  source 1..75: mol_type = other DNA
ggcaacctagtgaatttaaaaatgttcagatcgaacaaaatggagacatggaaacctactacaatgcgataaaaa

SEQ ID NO: 534709 - DNA, 75 bp, synthetic construct
  source 1..75: mol_type = other DNA
ggcatgtttggtcacgttgatgcgggggtgttgcacgttcgtccggcactggatatgtgtgacccacagcaagag

SEQ ID NO: 534710 - DNA, 75 bp, synthetic construct
  source 1..75: mol_type = other DNA
tgcgttccgccggaacacctggcggattatattgctgagtttcgcgcgttgctcgatagtcacggcttaagttat

SEQ ID NO: 534711 - DNA, 75 bp, synthetic construct
  source 1..75: mol_type = other DNA
gaggggttttcatctgaaattatgggcaactccaaagttggagaattttcagttacacctaatttaaataagtta

SEQ ID NO: 534712 - DNA, 75 bp, synthetic construct
  source 1..75: mol_type = other DNA
tgcacatgttagggattcagtattcaatgaactattttttgggatgttctctttttgataaggaatgcacatcgc

SEQ ID NO: 534713 - DNA, 75 bp, synthetic construct
  source 1..75: mol_type = other DNA
gtcgaatgctgcagaaattgaatccctgggcattggcgaggtaattaaagttttttttgtttttattttatttgt

SEQ ID NO: 534714 - DNA, 75 bp, synthetic construct
  source 1..75: mol_type = other DNA
catagttttcgcgcccaaataccgaagacaagcgttctatggagagaagcgtagggcagtaggcagcatattaag

SEQ ID NO: 534715 - DNA, 75 bp, synthetic construct
  source 1..75: mol_type = other DNA
aatgactggggaagtctgcagacctggactattaaccagaagaaactggcagtaccggaagtaacaaaagctgat

SEQ ID NO: 534716 - DNA, 75 bp, synthetic construct
  source 1..75: mol_type = other DNA
cgtttttcactaaccgggtgacaaaagcactgggaatgacgctggcgctgatgatgacctgtcagagtgcgatgg

SEQ ID NO: 534717 - DNA, 75 bp, synthetic construct
  source 1..75: mol_type = other DNA
ctgcaccaggcgattgtcgatgcgattatccaaagcgatggcgacgcggcatttaaagcttgtcaggcgctgcta

SEQ ID NO: 534718 - DNA, 75 bp, synthetic construct
  source 1..75: mol_type = other DNA
ccggctctggagggaagtggtattgcagtggccctgcgcacgaagctgaaattattctaccgcccgaaggcactg

SEQ ID NO: 534719 - DNA, 75 bp, synthetic construct
  source 1..75: mol_type = other DNA
aatgactggggaagcctgcagacttggacaattaataagaagaaaccgacagcaccggaagcagcaaaaactgag

SEQ ID NO: 534720 - DNA, 75 bp, synthetic construct
  source 1..75: mol_type = other DNA
tgccgaaggacaaagagtcggtgtactggctgaacctgcaggatataccgccggccctggagggcagcggtattg

SEQ ID NO: 534721 - DNA, 75 bp, synthetic construct
  source 1..75: mol_type = other DNA
cgttcggtgtgacaattccgtccggacgtcagcatatgatcgaaaatcagtccgatattatcgaccacatcatcc

SEQ ID NO: 534722 - DNA, 75 bp, synthetic construct
  source 1..75: mol_type = other DNA
catagtatttgcgccaaaataccgaagacaggtgttctacagagagaagcgtagagcaataggcggtattttgag

SEQ ID NO: 534723 - DNA, 75 bp, synthetic construct
  source 1..75: mol_type = other DNA
aggaacagggagttctggtgcagagggtattacgtcgatacggtgggtaagaacacggtgaagatacaggattac

SEQ ID NO: 534724 - DNA, 75 bp, synthetic construct
  source 1..75: mol_type = other DNA
aagccttgctcaccccaggcgaagtggcgaaacgcagtggggtagcggtatctgcactgcatttctatgagagca

SEQ ID NO: 534725 - DNA, 75 bp, synthetic construct
  source 1..75: mol_type = other DNA
catccgccgccaacaatatttccaacagtacgaagtgccaaatgagacacataaaaatgtggtgatagaaaacag

SEQ ID NO: 534726 - DNA, 75 bp, synthetic construct
  source 1..75: mol_type = other DNA
gacattaacaccctgtaccttgattcatttaaaagtaaaaacaactgcaaatcttttgaaaccaattcaaattta

SEQ ID NO: 534727 - DNA, 75 bp, synthetic construct
  source 1..75: mol_type = other DNA
gtctttttccaggtcaagccggacggtaccgccctgtggccatcgaaaattttgccgtggtccgatcttatgacc

SEQ ID NO: 534728 - DNA, 75 bp, synthetic construct
  source 1..75: mol_type = other DNA
atgcgcggtatctggctggccactgtgtctcgcctcgactggccacctgtttcctcggttaatatcagtaacccc

SEQ ID NO: 534729 - DNA, 75 bp, synthetic construct
  source 1..75: mol_type = other DNA
tgacgaatcctacgctgacacgcgtcgatgggtggaacaaggattgctggattacattgctccccaaatttactg

SEQ ID NO: 534730 - DNA, 75 bp, synthetic construct
  source 1..75: mol_type = other DNA
ccattggtcggagaaaacgaaaatgcgttatttttcccaaccaaatccatcgaactgcttttcacacagagcgat

SEQ ID NO: 534731 - DNA, 75 bp, synthetic construct
  source 1..75: mol_type = other DNA
cttgttgacgctgcactggcagacgacgcagccgctgtttttgagcctgctgctgctgaggcactctgtgctgct

SEQ ID NO: 534732 - DNA, 75 bp, synthetic construct
  source 1..75: mol_type = other DNA
gagaggatccggggtacgatccgctgcaatttatgctcgacgaagcccacaagcgcgggatgaaagtacatgcct

SEQ ID NO: 534733 - DNA, 75 bp, synthetic construct
  source 1..75: mol_type = other DNA
ttcacaccacacgtcattctgttgcctctttactggtttcgagtggtcaattcagcctgtatgacgttaaagccc

SEQ ID NO: 534734 - DNA, 75 bp, synthetic construct
  source 1..75: mol_type = other DNA
gggatagataaaagtgaagtctgtttccacactacgcgccattccgtcgcatcattacttgtctccagcggacag

SEQ ID NO: 534735 - DNA, 75 bp, synthetic construct
  source 1..75: mol_type = other DNA
ccgcattatcgattattgatgctatcccacgagttggcagtaatccgtatctgttcgccattaaggataatggca

SEQ ID NO: 534736 - DNA, 75 bp, synthetic construct
  source 1..75: mol_type = other DNA
atgcgaggtatctggctggctactgtctctcgcctcgactggccccccgtttcctcggttaatatcagtaacccc

SEQ ID NO: 534737 - DNA, 75 bp, synthetic construct
  source 1..75: mol_type = other DNA
tagatgaaataaaagaagagttaacaaaagacattcaaaaacagtttaacgacatgctcaaaaaggcatttaagg

SEQ ID NO: 534738 - DNA, 75 bp, synthetic construct
  source 1..75: mol_type = other DNA
aatatgaagttcgaaggtgcgtggacaccttcaatccatatgcctcgctgggccagccgtattgcactggaaatt

SEQ ID NO: 534739 - DNA, 75 bp, synthetic construct
  source 1..75: mol_type = other DNA
agacgacagttagtagccctaccctcgttacacagcatgactctgagtgtctaccaaatatctgtttcgagcacc

SEQ ID NO: 534740 - DNA, 75 bp, synthetic construct
  source 1..75: mol_type = other DNA
acacccgatggaactgtaaatatcacatagtatttgcgccaaaataccgaagacaggtgttctacagagggaagc

SEQ ID NO: 534741 - DNA, 75 bp, synthetic construct
  source 1..75: mol_type = other DNA
cgctattatctgggtaatgctgacgagatcgcggcgaaagcagcggccgttgcgaaccagggtaaagcgaagtaa

SEQ ID NO: 534742 - DNA, 75 bp, synthetic construct
  source 1..75: mol_type = other DNA
cagcttgaagaggataaaatgggagagcagttatcgattcccaatccgggcagcccgtttacgggccgtaagtaa

SEQ ID NO: 534743 - DNA, 75 bp, synthetic construct
  source 1..75: mol_type = other DNA
cgctgatgatcttcacggtcttcgggcaatgtgtggcgggtggttttatcgttctggctttggcgctgctcaaag

SEQ ID NO: 534744 - DNA, 75 bp, synthetic construct
  source 1..75: mol_type = other DNA
acaccgatgggcttcttcctgactatgtttatgggaggcccgctgctgggatatttgttactgcgtctggcgggg

SEQ ID NO: 534745 - DNA, 75 bp, synthetic construct
  source 1..75: mol_type = other DNA
tgaaattcaaatacagaaacagggagttctggtgccgagggtactatgtcgatacggtgggtaagaacacggcga

SEQ ID NO: 534746 - DNA, 75 bp, synthetic construct
  source 1..75: mol_type = other DNA
tatggctatctgaagggtaaacgcagtcagatgctctatgagcaatttagagatctcaagttcaaatacaggaac

SEQ ID NO: 534747 - DNA, 75 bp, synthetic construct
  source 1..75: mol_type = other DNA
ctgcaggaagaccagggacaattactgactcttgccggtgagcctgacggaaaactccgcgcagcaggtcattaa

SEQ ID NO: 534748 - DNA, 75 bp, synthetic construct
  source 1..75: mol_type = other DNA
tgaaaatcaaacacaaactctcatatgttcgcccgactaaccgctggaaaatttccgaagaagacaccaccgaaa

SEQ ID NO: 534749 - DNA, 75 bp, synthetic construct
  source 1..75: mol_type = other DNA
gtttatgggatatctgaaagggaaaagcagtctgatgctttacgagcagtttggtgatttgaaattcaaatacag

SEQ ID NO: 534750 - DNA, 75 bp, synthetic construct
  source 1..75: mol_type = other DNA
atatataaagcaacagctcgaagaagataaaattggcgaacaattattgaacccatatccaggcagctcgtttac

SEQ ID NO: 534751 - DNA, 75 bp, synthetic construct
  source 1..75: mol_type = other DNA
ttgcgaaagcagaatgctgtgtatgtggagatcccgtcgaaaatgagcgtatcgaggtttatgggccatctgaag

SEQ ID NO: 534752 - DNA, 75 bp, synthetic construct
  source 1..75: mol_type = other DNA
gccggttcggtcattgtgactggtggcctgaaattaattgataaaacgctggcaacatcacaagtatctgccgcg

SEQ ID NO: 534753 - DNA, 75 bp, synthetic construct
  source 1..75: mol_type = other DNA
ggctatgttgcatgtcttgccggggaattcagcagaatacgtgggagtggtcctgtttttcaacaaggatacgca

SEQ ID NO: 534754 - DNA, 75 bp, synthetic construct
  source 1..75: mol_type = other DNA
aaactgaaaggcagcaatcgctgctacaacatcattgctcaaaaactaaggcagtgcagaaacggatctccatgc

SEQ ID NO: 534755 - DNA, 75 bp, synthetic construct
  source 1..75: mol_type = other DNA
ggcgggaatatccgcaactggatggcgtgttctgtaccaacgatgaccttgccgtcggcgcggcgtttgaatgcc

SEQ ID NO: 534756 - DNA, 75 bp, synthetic construct
  source 1..75: mol_type = other DNA
gctacattaccgaagaagacgcacgcgggcagattaacgagctaaaagctaacggcaccgaagcggtggtcggcg

SEQ ID NO: 534757 - DNA, 75 bp, synthetic construct
  source 1..75: mol_type = other DNA
agctttcaccggcattgcgtacgctgtggctgatagtgacgatggttcttggcgtcatctttgtctggatgatgg

SEQ ID NO: 534758 - DNA, 75 bp, synthetic construct
  source 1..75: mol_type = other DNA
aaagtctgcttaccctggactcactcggaacaggtgtcgtttctttttcgtttgggcaacccccagggaaagtgc

SEQ ID NO: 534759 - DNA, 75 bp, synthetic construct
  source 1..75: mol_type = other DNA
caggtttttgccgaagtgttacgcggaattgaaagcgttaccgacgcacacggttatcaaaccatgttggctcac

SEQ ID NO: 534760 - DNA, 75 bp, synthetic construct
  source 1..75: mol_type = other DNA
cttctgacgctttcgtggtcgctgtggatgcagaagtggctgccgatttttgtgatgctgcggcattcgtttctg

SEQ ID NO: 534761 - DNA, 75 bp, synthetic construct
  source 1..75: mol_type = other DNA
agcgctggtgccggactatggtgcgctgatgtcctggcgtatcgtacttttggctgttgccctgtgcttgtggat

SEQ ID NO: 534762 - DNA, 75 bp, synthetic construct
  source 1..75: mol_type = other DNA
aggaacgcctcgaatcgatgctctcgtggaatatcgacgggctgatcctgactgaacgtacccatacgccgcgta

SEQ ID NO: 534763 - DNA, 75 bp, synthetic construct
  source 1..75: mol_type = other DNA
ttacgcaacccggagcaggtctccgtcgccttacgcggcaagattgccgccgctcttgatgaactgggttatatt

SEQ ID NO: 534764 - DNA, 75 bp, synthetic construct
  source 1..75: mol_type = other DNA
aggatgtggctgaccgtgtaggcgtgaccaaaatgacggtcagccgctttttgcgtaacccggagcaggtttccg

SEQ ID NO: 534765 - DNA, 75 bp, synthetic construct
  source 1..75: mol_type = other DNA
tggtatttgaagttcataaagatgatcttgaggcggtagcgaagaaaatccatcaactgatggagaattgtactc

SEQ ID NO: 534766 - DNA, 75 bp, synthetic construct
  source 1..75: mol_type = other DNA
gtgggctggatacgctgtatgctgagccggaaaaaattgctggcctaagcttccgcggtgcgaaaacaatggcgg

SEQ ID NO: 534767 - DNA, 75 bp, synthetic construct
  source 1..75: mol_type = other DNA
tcttacgataactacgtcactatccttgatgaagatacgctgaaagaatggattacgaagctggaaaaagcgccg

SEQ ID NO: 534768 - DNA, 75 bp, synthetic construct
  source 1..75: mol_type = other DNA
gcgcaggcactgctgcaggggcttggcgggctggatacgctgtatgccgagccggaaaaaattgctggcctaagc

SEQ ID NO: 534769 - DNA, 75 bp, synthetic construct
  source 1..75: mol_type = other DNA
atatcattctgccattaagtggagtggtgatgatgttttatgccttgtgttttattaatcaaagcattcaacaac

SEQ ID NO: 534770 - DNA, 75 bp, synthetic construct
  source 1..75: mol_type = other DNA
tcctcggcccggaagaggtggtgaataagtacggcgtaccgccagaactgatcatcgacttcctggcgctgatgg

SEQ ID NO: 534771 - DNA, 75 bp, synthetic construct
  source 1..75: mol_type = other DNA
aaaccgcgcaggcattgctgcaaggtcttggcgggctggatacgctgtatgccgagccagaaaaaattgctgggt

SEQ ID NO: 534772 - DNA, 75 bp, synthetic construct
  source 1..75: mol_type = other DNA
gaaaccgacagccttgataacatctctgctaacctggtcgggctttcttttgctatcgagccaggcgtagcggca

SEQ ID NO: 534773 - DNA, 75 bp, synthetic construct
  source 1..75: mol_type = other DNA
gtttattgcgccagaggattatgtgattgtctcagcggactactcgcagattgaactgcgcattatggcgcatct

SEQ ID NO: 534774 - DNA, 75 bp, synthetic construct
  source 1..75: mol_type = other DNA
cgaacgctaccctggcgtgctggagtatatggaacgcacccgtgctcaggctaaagagcagggctacgttgaaac

SEQ ID NO: 534775 - DNA, 75 bp, synthetic construct
  source 1..75: mol_type = other DNA
gatgcggatgtcaccttacagttgcatctgaaaatgtggccagagctgcaaaaacataaaggtccgttgaacgtc

SEQ ID NO: 534776 - DNA, 75 bp, synthetic construct
  source 1..75: mol_type = other DNA
agctggaaaagaaagcgcatgaaattgcaggtgaagaatttaacctttcttccaccaagcagttgcaaaccattc

SEQ ID NO: 534777 - DNA, 75 bp, synthetic construct
  source 1..75: mol_type = other DNA
caaagctcgagcaaaataaagaagtggcttacctctcatatcaactggcgacgattaaaaccgatgttgagttgg

SEQ ID NO: 534778 - DNA, 75 bp, synthetic construct
  source 1..75: mol_type = other DNA
catcagcataaaggaaccaccagtgctgtgcggcgggtggtggagccgttcggcttcctgatccgcattattgag

SEQ ID NO: 534779 - DNA, 75 bp, synthetic construct
  source 1..75: mol_type = other DNA
tgttggtggcatcgccggctgtatttgcagccagctttgactgccaaaaggcttcggcagaaatcgaacacaaaa

SEQ ID NO: 534780 - DNA, 75 bp, synthetic construct
  source 1..75: mol_type = other DNA
tcaaaaacaccatcatacactaaatcagtaagttggcagcatcacccaagggttgaagcgattcgcaacggaaaa

SEQ ID NO: 534781 - DNA, 75 bp, synthetic construct
  source 1..75: mol_type = other DNA
aatctgctggctgaatttcctcaacaaacgatatttgaacatcgttggtgtggaaaagttgctgcaatagtatgc

SEQ ID NO: 534782 - DNA, 75 bp, synthetic construct
  source 1..75: mol_type = other DNA
ttgtccggttaatgctctgactttccagtccgatagcgtacaactggacgagcaaaaatgtattggctgtaaaag

SEQ ID NO: 534783 - DNA, 75 bp, synthetic construct
  source 1..75: mol_type = other DNA
attttttggcgacagcaaaggtgctgagattcccggaagtgcagatgcatgaaatcctaagtgactttgccagaa

SEQ ID NO: 534784 - DNA, 75 bp, synthetic construct
  source 1..75: mol_type = other DNA
agcaaggcagacacaaagcaggctgagagcggtaaaaagctaactctggagtcattccgagctaagtatattgaa

SEQ ID NO: 534785 - DNA, 75 bp, synthetic construct
  source 1..75: mol_type = other DNA
gaaaaacgccgagttggtggaagagagtgcgcaggtgtcggcgatggtgaaacaccgcgccagccgactggaaga

SEQ ID NO: 534786 - DNA, 75 bp, synthetic construct
  source 1..75: mol_type = other DNA
ccactttttacgccacttcccggcgctggtgggctggcttccggcgcacacgccacgtctggcgcaggttgatcc

SEQ ID NO: 534787 - DNA, 75 bp, synthetic construct
  source 1..75: mol_type = other DNA
tatcatgctttttacagcatgatgtttgtctttgtttttcatgcagttaaaaataaagccatccctaataattga

SEQ ID NO: 534788 - DNA, 75 bp, synthetic construct
  source 1..75: mol_type = other DNA
tactgccccggacgcagaaacagacaccagtgcagccgtaccggcacaggctgttgctgtaaccggttctctggg

SEQ ID NO: 534789 - DNA, 75 bp, synthetic construct
  source 1..75: mol_type = other DNA
tgcggcactggatttcagtcgccggatggataatgccgcccgtgcacctgtactggatgccccgtccaccacaac

SEQ ID NO: 534790 - DNA, 75 bp, synthetic construct
  source 1..75: mol_type = other DNA
tatcggaaaaacagccgccatgctgggggctgcgctggataccgtcattctgacggcatctgagcagggcttttc

SEQ ID NO: 534791 - DNA, 75 bp, synthetic construct
  source 1..75: mol_type = other DNA
cagcccgatagcgtacaactggacgagcaaaaatgtattggttgtaaaagatgcgcaatcgcttgcccctttggc

SEQ ID NO: 534792 - DNA, 75 bp, synthetic construct
  source 1..75: mol_type = other DNA
agcctccctcgccgcactggataagcaaattatgctcactcagcgtagcgttaacgcccaacagtttggcgccga

SEQ ID NO: 534793 - DNA, 75 bp, synthetic construct
  source 1..75: mol_type = other DNA
gccctattttcaccctaatcgacactcgtcactggtacgtgatcgccaacttccgcgaaactgatctgaaaaata

SEQ ID NO: 534794 - DNA, 75 bp, synthetic construct
  source 1..75: mol_type = other DNA
gaatttgtcagcatcaatctgctaccggatgtggacctcgaaaccttcctgaatgagcagcgtaacgcacatccg

SEQ ID NO: 534795 - DNA, 75 bp, synthetic construct
  source 1..75: mol_type = other DNA
cccggtcaccggtaacggcaagatcatcaacgaactggaaggcatcttcgaaggtgctggctggaacgtgatcaa

SEQ ID NO: 534796 - DNA, 75 bp, synthetic construct
  source 1..75: mol_type = other DNA
gcggaagacgttgaccgtgcaagaactgcgcagcgcgccgcagaagcggatcttaatgccgtattgttacaggcg

SEQ ID NO: 534797 - DNA, 75 bp, synthetic construct
  source 1..75: mol_type = other DNA
ctgaaaaatattcgctcaggtacacccgcaaccattcgcctgatgagcgacagcggcaaaaccttcgagggtaaa

SEQ ID NO: 534798 - DNA, 75 bp, synthetic construct
  source 1..75: mol_type = other DNA
tgttgttgagtgcactggattttatacttccgcagaaaaatcgcaggcacatctggatgccggggcaaagaaagt

SEQ ID NO: 534799 - DNA, 75 bp, synthetic construct
  source 1..75: mol_type = other DNA
tgctgtatggcccggaaggcagcgccaatgaagtgttgcagggctatcgcgaaatggggcagatgctggcaaagg

SEQ ID NO: 534800 - DNA, 75 bp, synthetic construct
  source 1..75: mol_type = other DNA
atgtcgcaggctgctctgaacacgcgaaacagcgaagaagaggtttcttctcgccgcaataatggaacgcgtctg

SEQ ID NO: 534801 - DNA, 75 bp, synthetic construct
  source 1..75: mol_type = other DNA
gccggtgaaatgaaaactatcgtttataacgtcaatgacgacactctggatggcaacgacaccattgtttccgtg

SEQ ID NO: 534802 - DNA, 75 bp, synthetic construct
  source 1..75: mol_type = other DNA
gaaaacggtcgcctggtacgataacgaatatggcttcgtcacacagcttattcgcaccctcgaaaaattcgctaa

SEQ ID NO: 534803 - DNA, 75 bp, synthetic construct
  source 1..75: mol_type = other DNA
cactctggatggcaacgacaccattgtttccgtggcgtcatgcaccactaactgtcttgcgccgatggccaaagc

SEQ ID NO: 534804 - DNA, 75 bp, synthetic construct
  source 1..75: mol_type = other DNA
acatcgcttttaatttattatcatgctttttacagcatgatgtttgtctttgtttttcatgaagttaaaaataag

SEQ ID NO: 534805 - DNA, 75 bp, synthetic construct
  source 1..75: mol_type = other DNA
taatctcccatgcacgcgaaagcgttagttatctggaaaacgtgaaaggacgcgttagcaaagaaggtgcggact

SEQ ID NO: 534806 - DNA, 75 bp, synthetic construct
  source 1..75: mol_type = other DNA
tgacgaggcagaggaggcattgggcggcgatgatagttcggtctctatcccggtggcgtggtttgaactcgctct

SEQ ID NO: 534807 - DNA, 75 bp, synthetic construct
  source 1..75: mol_type = other DNA
tacatctccgagcaataagaaaattgctgtctctccatctttgacggattttgtaacttggcaaaaggatactac

SEQ ID NO: 534808 - DNA, 75 bp, synthetic construct
  source 1..75: mol_type = other DNA
ggacagggtaatcacgcaggtggtgatactggatgcagataaaaagcagatacagtgcgtggtaagaccgctgca

SEQ ID NO: 534809 - DNA, 75 bp, synthetic construct
  source 1..75: mol_type = other DNA
ggccaacgcattcgataaagcccgggcaacgcaaacttcgcagcagaaagaatggagtaccatgctgttaagtat

SEQ ID NO: 534810 - DNA, 75 bp, synthetic construct
  source 1..75: mol_type = other DNA
attgaggaaagcgaagccggactgcaaattaccggataaggcgatgagttatctggagcggaacggactgataag

SEQ ID NO: 534811 - DNA, 75 bp, synthetic construct
  source 1..75: mol_type = other DNA
gacgaagactctattgattttttagcatctttgaaacaaaaaatatggaaaatcccttcaggtgagttattgaat

SEQ ID NO: 534812 - DNA, 75 bp, synthetic construct
  source 1..75: mol_type = other DNA
taaagaacgagctgttgcatattgtcagtggaaactaaatctcagaattacgggatgtgtgtttgaaggtaaacg

SEQ ID NO: 534813 - DNA, 75 bp, synthetic construct
  source 1..75: mol_type = other DNA
ggataccacatagaaaatcgagaattattgataaaacatgagagcattcttagatttgagtcatctttagcaagg

SEQ ID NO: 534814 - DNA, 75 bp, synthetic construct
  source 1..75: mol_type = other DNA
tctgtggacttggctctatcccactgccgaaactgcacagtattgattctgctgttgcaacatatgaaggtttct

SEQ ID NO: 534815 - DNA, 75 bp, synthetic construct
  source 1..75: mol_type = other DNA
tcagtcaaatcgttctgaaaaaattccttcctggttttatgtcagatttagttctggcgaaaaccgtagaccgtc

SEQ ID NO: 534816 - DNA, 75 bp, synthetic construct
  source 1..75: mol_type = other DNA
ggctgtaccttatggaataacgtttattgaaaaacattttactttaaataaagattttgaaggtcctgatcataa

SEQ ID NO: 534817 - DNA, 75 bp, synthetic construct
  source 1..75: mol_type = other DNA
ctttttccccgtccaggttcgtttcacgccagcccacgaacgtttccacctggcattatgttcgccgggagacgt

SEQ ID NO: 534818 - DNA, 75 bp, synthetic construct
  source 1..75: mol_type = other DNA
tgctgaatcagaagctgggtgattttgccccattgatgccccatagaccacaaactagcagtagaggattattaa

SEQ ID NO: 534819 - DNA, 75 bp, synthetic construct
  source 1..75: mol_type = other DNA
ccgacatttattgcgtcacagatggggcactccagcgccagcatggtctacaatgtttatggcgcatggatgcct

SEQ ID NO: 534820 - DNA, 75 bp, synthetic construct
  source 1..75: mol_type = other DNA
ggaggatattgatttaaaagctaaaacaatgactatccgtcgtaattatacaaaactcggtgagttcactctacc

SEQ ID NO: 534821 - DNA, 75 bp, synthetic construct
  source 1..75: mol_type = other DNA
atttcttccataaaagggcgctcagtggtcacggtaaactactatatgacaaccatagctggaatgtttcaattt

SEQ ID NO: 534822 - DNA, 75 bp, synthetic construct
  source 1..75: mol_type = other DNA
gcggatcacggttacttagaggtgaacccattcgagggaattaagcctctgaaaaaagccagggcagaaccagat

SEQ ID NO: 534823 - DNA, 75 bp, synthetic construct
  source 1..75: mol_type = other DNA
tccggacctcactacaaggttgactccatcagggagtcatggacaagtatcttaaaacgcgcaggtctgagacac

SEQ ID NO: 534824 - DNA, 75 bp, synthetic construct
  source 1..75: mol_type = other DNA
cggtggattttatcatggatggcggagcggatatgtccggcagttttacacagcagggcgggggactgtatatcc

SEQ ID NO: 534825 - DNA, 75 bp, synthetic construct
  source 1..75: mol_type = other DNA
ggggaacagcagtaaggatgtttttaaaggaagtgaacaggcaataggtttcagcaatgtcacacctgttattac

SEQ ID NO: 534826 - DNA, 75 bp, synthetic construct
  source 1..75: mol_type = other DNA
tggttcaggtgcagcggcggtttgaccggaagccgtcagccattcactggcactggcggcgtcactggatgcagg

SEQ ID NO: 534827 - DNA, 75 bp, synthetic construct
  source 1..75: mol_type = other DNA
aatatcacctcagatgccgtatttaacttcttcgataatgacactatgcgacacgaaaaatgcctcgccagaatc

SEQ ID NO: 534828 - DNA, 75 bp, synthetic construct
  source 1..75: mol_type = other DNA
gtggacgtaagacagagcatccacagtgcgcacgcaaaaacgctggatacccaggggctgcgcaatgaatttttg

SEQ ID NO: 534829 - DNA, 75 bp, synthetic construct
  source 1..75: mol_type = other DNA
tgctggcctggtctgaggagcgtggcgggctgaacggaagcggtgagtatgattttatgacgggggcagctggtc

SEQ ID NO: 534830 - DNA, 75 bp, synthetic construct
  source 1..75: mol_type = other DNA
ggattaacctgcaatgacgagaacttcaccaccaaggcgggggcccagcgcgtggcggcagaactggggattgta

SEQ ID NO: 534831 - DNA, 75 bp, synthetic construct
  source 1..75: mol_type = other DNA
gaacatatcaaggcgggaataacacttgctgatgcggtgaatttcctggtcgaaaaatacgaactggttcgtatc

SEQ ID NO: 534832 - DNA, 75 bp, synthetic construct
  source 1..75: mol_type = other DNA
tgaaacatttagaacatccaatatttatcgcaaaaggaaaccattggactcttcaacttgtcaaccatgtatctt

SEQ ID NO: 534833 - DNA, 75 bp, synthetic construct
  source 1..75: mol_type = other DNA
gggggctataacttccagtgggcgtggtcgagtgcgtgggcttgtgcgcaggatttgattgcagcgaagtcgtcc

SEQ ID NO: 534834 - DNA, 75 bp, synthetic construct
  source 1..75: mol_type = other DNA
tggcgaaggatgaaacaggcttcacgcttgaactgaacggcatgactgtcggttgcgaaaagctggtcatcgcga

SEQ ID NO: 534835 - DNA, 75 bp, synthetic construct
  source 1..75: mol_type = other DNA
aaccagtacaaactggtgagaaagatgtgtgaagtggtttcgcaatcggaaaatgggcgcgttgccattgtcaga

SEQ ID NO: 534836 - DNA, 75 bp, synthetic construct
  source 1..75: mol_type = other DNA
tggtttggtttttccttcgttataaaggagggagctgctattgagaggaagagtttagtaaataatctgatctca

SEQ ID NO: 534837 - DNA, 75 bp, synthetic construct
  source 1..75: mol_type = other DNA
aaaaagggggatgaaataatagttcctgctgtttcttggtcaactacttattatccgttgcaacaatatggattg

SEQ ID NO: 534838 - DNA, 75 bp, synthetic construct
  source 1..75: mol_type = other DNA
gtgatggtgagttcagggtctacagcaaatttattaatgattgctgcattatttttcacaaaaaaaccgagatta

SEQ ID NO: 534839 - DNA, 75 bp, synthetic construct
  source 1..75: mol_type = other DNA
gaaaccacctaaaaacaattgtaacatcttatctgctatcagatttaggaatcaataacattattattgaaaaat

SEQ ID NO: 534840 - DNA, 75 bp, synthetic construct
  source 1..75: mol_type = other DNA
aactaaaaaagacaaaagaattataccctgatgcttttttctccattagaaaagaacttgttttctactttagga

SEQ ID NO: 534841 - DNA, 75 bp, synthetic construct
  source 1..75: mol_type = other DNA
atggcaacaaaaaaatacgaactaacaaaagaacacttttttcatggtgaattttggcaccaacttgatgataac

SEQ ID NO: 534842 - DNA, 75 bp, synthetic construct
  source 1..75: mol_type = other DNA
tgaacgtttacagcaactcgggcaaatcccggatgtttcgctaaaacagctcaacgtgcgtgaccaacaggcact

SEQ ID NO: 534843 - DNA, 75 bp, synthetic construct
  source 1..75: mol_type = other DNA
agaagtgacgcgagcggcgatggtgctgctgaaatatcccactcttgagttggtggagtataaagtggcacgcat

SEQ ID NO: 534844 - DNA, 75 bp, synthetic construct
  source 1..75: mol_type = other DNA
ctccagcgaaccgggcgcgctggccccactgatggataaaggcgagcagctggcctgggtctggcgcagcaaagc

SEQ ID NO: 534845 - DNA, 75 bp, synthetic construct
  source 1..75: mol_type = other DNA
ccgatgtcgggtttgagcagggcggagaagtgacgcgagcggcgatggtgctgctgaaatacccctctcttgagc

SEQ ID NO: 534846 - DNA, 75 bp, synthetic construct
  source 1..75: mol_type = other DNA
gcctgttctccgtgagaattggcgaatgtggcgtgagtttctggtgtacaaatccaccaccggaaaaaccgttcc

SEQ ID NO: 534847 - DNA, 75 bp, synthetic construct
  source 1..75: mol_type = other DNA
tgcacaatgcaatcttcgttgctccaacgctttatgcatatgacttttatgccgataaaactgtcgtagaaattg

SEQ ID NO: 534848 - DNA, 75 bp, synthetic construct
  source 1..75: mol_type = other DNA
cttattgtttgatgttggtgtggcagatgcactttccaaacgtctggtcagcagtgttctggatgccgcagttgt

SEQ ID NO: 534849 - DNA, 75 bp, synthetic construct
  source 1..75: mol_type = other DNA
gatcgcagagggtttagctggcaagaacaaacgccatatctcacgaatattgatatcatgagggcccgccgcgat

SEQ ID NO: 534850 - DNA, 75 bp, synthetic construct
  source 1..75: mol_type = other DNA
gaacatttcgatgccggtatcactctcgctaatgccattaactttctagtggaaaagtacgaactggttcgtatc

SEQ ID NO: 534851 - DNA, 75 bp, synthetic construct
  source 1..75: mol_type = other DNA
gaacatatcgatgccggtatatctttggccgatgccgttaattttctggtggaaaagtacgggttggtgcgtatt

SEQ ID NO: 534852 - DNA, 75 bp, synthetic construct
  source 1..75: mol_type = other DNA
tgcgtggaaaaagatatcgacgtggcagccgaatccctgaaagtcgccgaagccttccgtattcatacctttatt

SEQ ID NO: 534853 - DNA, 75 bp, synthetic construct
  source 1..75: mol_type = other DNA
tataatttagacaatctgtacgacgcgttcctgaagctggcagataaaaaaggtcaggtgttcgattatgacctg

SEQ ID NO: 534854 - DNA, 75 bp, synthetic construct
  source 1..75: mol_type = other DNA
caacatatcgatgccggtatatctttggccgatgccgttaattttctggtggaaaagtacgggctggttcgtatt

SEQ ID NO: 534855 - DNA, 75 bp, synthetic construct
  source 1..75: mol_type = other DNA
agtatctgatcgaccaactgcttgctgaagcccgcaaaggcggagtcaacgtagctgcaggcaccggtatcagca

SEQ ID NO: 534856 - DNA, 75 bp, synthetic construct
  source 1..75: mol_type = other DNA
cattagcggcagcggtactgctgacctttggttttggtctcgccgcacatgctgcgcccgtcaataaaggagcct

SEQ ID NO: 534857 - DNA, 75 bp, synthetic construct
  source 1..75: mol_type = other DNA
tccataccacaaacggacgcgcctgggctactgacgaggtgcctgtgcttgctaccggcttccagtgtggcggag

SEQ ID NO: 534858 - DNA, 75 bp, synthetic construct
  source 1..75: mol_type = other DNA
ctgtcctctgaaggagtacgggactggtgggttctgccttcagagcctgactgctgtgccgatgaggactgtgcg

SEQ ID NO: 534859 - DNA, 75 bp, synthetic construct
  source 1..75: mol_type = other DNA
atacgatgcctgttgctgttcagccaggagcttttctgccatccgcgagccagtgtgacagttgatgaagaatgt

SEQ ID NO: 534860 - DNA, 75 bp, synthetic construct
  source 1..75: mol_type = other DNA
gtatgcgttatcttcgggctgcactggggcctgataccgttaatgattaacaacctcgccgtgctgggccatgat

SEQ ID NO: 534861 - DNA, 75 bp, synthetic construct
  source 1..75: mol_type = other DNA
ctggcacaggttctgcgtgaacatggcgaaagtgatgcagcaacgcgagctgaaaaggcgctgcagcaggcgctc

SEQ ID NO: 534862 - DNA, 75 bp, synthetic construct
  source 1..75: mol_type = other DNA
attaacactgggtgatacctggtcttcatcagatgttttcgacagcgtgagtattcgtggtgctaaacttgagtc

SEQ ID NO: 534863 - DNA, 75 bp, synthetic construct
  source 1..75: mol_type = other DNA
ggtttaaatttaggggcgtggcgttttcgtgattattctacatggagtcgttcaggtaattcaccgggtaaaatt

SEQ ID NO: 534864 - DNA, 75 bp, synthetic construct
  source 1..75: mol_type = other DNA
atcgctcaggtgatgaacgacgctccggcagtggcatctaccgactatatgaaactgttcgctgagcaggtccgt

SEQ ID NO: 534865 - DNA, 75 bp, synthetic construct
  source 1..75: mol_type = other DNA
gtcttaacggacgaagactgctcaaccctttttcctggtttgtaccttgtcggccctcatgtgcggcatgccggt

SEQ ID NO: 534866 - DNA, 75 bp, synthetic construct
  source 1..75: mol_type = other DNA
gttcactaaattctggatacagctacgataataatggtaaccagcaatttaactatggtttaagtggtgccctgg

SEQ ID NO: 534867 - DNA, 75 bp, synthetic construct
  source 1..75: mol_type = other DNA
ttatccgtaaatgtctcattgccgatcagcaattggttatcaccagctgtcgatgggcgtactgcgacaaattct

SEQ ID NO: 534868 - DNA, 75 bp, synthetic construct
  source 1..75: mol_type = other DNA
ggcctggttgaaaagcgtggttgatgactggtattgtgcgccactggaagggccgcgtggtgccacagcagagca

SEQ ID NO: 534869 - DNA, 75 bp, synthetic construct
  source 1..75: mol_type = other DNA
ggcgtaggttctgacgtatatagcgttacttccttcactgaactggctcgtgatggtcaggattgtgagcgctgg

SEQ ID NO: 534870 - DNA, 75 bp, synthetic construct
  source 1..75: mol_type = other DNA
tccggacttatataaactggcgtatgcaaaagctttcgatattgcaccagatgatgttgataaacacatgcgtca

SEQ ID NO: 534871 - DNA, 75 bp, synthetic construct
  source 1..75: mol_type = other DNA
tggtgcaacatcgtttgatgttactcaggctaacagttcgcttgtggatgggagcaaacatcaagggcaatctta

SEQ ID NO: 534872 - DNA, 75 bp, synthetic construct
  source 1..75: mol_type = other DNA
tgctgtcatcatgcatgacggtctggagcgtatgtacggtgaaaaacaagagaacgtttactactacatcactac

SEQ ID NO: 534873 - DNA, 75 bp, synthetic construct
  source 1..75: mol_type = other DNA
aaccgttgacggcgattaccagaccttcaaatcgaaagatggtgcgtatgttcgcgaacacttcttcggtaaata

SEQ ID NO: 534874 - DNA, 75 bp, synthetic construct
  source 1..75: mol_type = other DNA
aacgtggcgaaatcgataagaaagtggttgctgacgcaattaccaaattcaacatcgatgcagaaaaagttaacc

SEQ ID NO: 534875 - DNA, 75 bp, synthetic construct
  source 1..75: mol_type = other DNA
catgggatgccgcaatggcggacgctaaagcggaagataccgtgctggtgtgtggttcgttccacacggtcgcac

SEQ ID NO: 534876 - DNA, 75 bp, synthetic construct
  source 1..75: mol_type = other DNA
cggcggaatatctcaccgggcgtatgaaagcgctcgaaaaacgggcgcgtgctggcggttatcggtatgctacat

SEQ ID NO: 534877 - DNA, 75 bp, synthetic construct
  source 1..75: mol_type = other DNA
caattttgccgggacgtttccagattgtgagcgagtcgccacgcgttatttttgatgtcgcgcataatccacatg

SEQ ID NO: 534878 - DNA, 75 bp, synthetic construct
  source 1..75: mol_type = other DNA
cgcattgttgcagcgttgtggcgttgaatggagttattccgtgaccgatcataactggtcgtttaccgatgcgca

SEQ ID NO: 534879 - DNA, 75 bp, synthetic construct
  source 1..75: mol_type = other DNA
tggttggggccggatcgtgaaagcattggtcgcgagaaagcggggattttccgccacgaaaaaccggcgattgtc

SEQ ID NO: 534880 - DNA, 75 bp, synthetic construct
  source 1..75: mol_type = other DNA
ggcctggttgaaaagcgtagttgatgactggtattgtgcgccactggaagggccgcgcggtgctacagcagagca

SEQ ID NO: 534881 - DNA, 75 bp, synthetic construct
  source 1..75: mol_type = other DNA
tttatgaaatgaaggggatgaaccgggaagcagctgatgcatatctcaccgcctttaatttacgcccaggggcaa

SEQ ID NO: 534882 - DNA, 75 bp, synthetic construct
  source 1..75: mol_type = other DNA
atgcaacaacctgtagttcgcgttggcgaatggcttgttactccgtccataaaccaaataagtcgcaatgggcgt

SEQ ID NO: 534883 - DNA, 75 bp, synthetic construct
  source 1..75: mol_type = other DNA
ggaaagatgagaatagcaggtgatgacggccttccggcatggacagatataccagcaccaactcaagaagacata

SEQ ID NO: 534884 - DNA, 75 bp, synthetic construct
  source 1..75: mol_type = other DNA
tgtgtttgctgccggtgactgtacgactgttccgtacaagcagatcatcatcgccactggcgaaggtgctaaagc

SEQ ID NO: 534885 - DNA, 75 bp, synthetic construct
  source 1..75: mol_type = other DNA
ctgcacgctgccggtggtgcagacaacccggcaggtgttgatgataaagatctggttaaatacgccgatgttggc

SEQ ID NO: 534886 - DNA, 75 bp, synthetic construct
  source 1..75: mol_type = other DNA
atgggctttagcgctggtgcggcatacacctcttctgaccgcaccaatgaccaggttaaccatactgcggcaggt

SEQ ID NO: 534887 - DNA, 75 bp, synthetic construct
  source 1..75: mol_type = other DNA
ctgacccctggattatctggccatcacgctaccatgatccgcagacccatgagtttatcgacagaacgcagttga

SEQ ID NO: 534888 - DNA, 75 bp, synthetic construct
  source 1..75: mol_type = other DNA
agacagcatgaaaaacatttactatttaatgataaggttatagaagctagtcggctaaagaatgaaattattacc

SEQ ID NO: 534889 - DNA, 75 bp, synthetic construct
  source 1..75: mol_type = other DNA
aaagtatttgccttacatcaatatggtcgtttaaaactttggttaccagagcttttagtgaatgagttctggaga

SEQ ID NO: 534890 - DNA, 75 bp, synthetic construct
  source 1..75: mol_type = other DNA
atttctggaaaacgcctcgcaaaaacaaaatgacatgcaaaaatccgcatttttttaaatgcttttccggcgtaa

SEQ ID NO: 534891 - DNA, 75 bp, synthetic construct
  source 1..75: mol_type = other DNA
aaatcacctcgctggcgcaggcccatccggtactgacgcgccagctactgatagcaggcggtgcgttgctggcaa

SEQ ID NO: 534892 - DNA, 75 bp, synthetic construct
  source 1..75: mol_type = other DNA
atcatcgccactggcgaaggtgccaaagcctctctgagtgcctttgactacctgattcgcaccaaaactgcataa

SEQ ID NO: 534893 - DNA, 75 bp, synthetic construct
  source 1..75: mol_type = other DNA
aacgatgtcatcagtgcttacaccgagtgctttagggaaggtgcgaataagcggggaaattcttctcggctgact

SEQ ID NO: 534894 - DNA, 75 bp, synthetic construct
  source 1..75: mol_type = other DNA
gatactacgacagcaatgtactgcgtttgcctaaggataagcgtgaaacctacaatgcccaagtagatcggctta

SEQ ID NO: 534895 - DNA, 75 bp, synthetic construct
  source 1..75: mol_type = other DNA
ttcctgtgatagaagacgccgacaaagccggatatggatggcaattcgacatccacgaggggacaaaacttcaca

SEQ ID NO: 534896 - DNA, 75 bp, synthetic construct
  source 1..75: mol_type = other DNA
catgcagaaacgcagcaaatctggttgaaactttctggcgcctatcgcaatggcagtactgaaactctcaacgat

SEQ ID NO: 534897 - DNA, 75 bp, synthetic construct
  source 1..75: mol_type = other DNA
tttttgttcgaggattaccattagcggaacattgccgatatgttcctgattacgacgccacaccggagagttatc

SEQ ID NO: 534898 - DNA, 75 bp, synthetic construct
  source 1..75: mol_type = other DNA
gtctggtcgctgcaaccggcgcatatttccgtttctgcgcccccagctccggggcgttcttctcctgtatcggga

SEQ ID NO: 534899 - DNA, 75 bp, synthetic construct
  source 1..75: mol_type = other DNA
gtgctgcggcggcaatttactccgcacgtaagggtatccgtactggtctgatgggcgaacgtttcggtggtcaga

SEQ ID NO: 534900 - DNA, 75 bp, synthetic construct
  source 1..75: mol_type = other DNA
aaagccgaccaggtattgcaggacaaactgcgtagtctgaaaaacgtcgacatcattctgaatgcgcaaaccacc

SEQ ID NO: 534901 - DNA, 75 bp, synthetic construct
  source 1..75: mol_type = other DNA
cattattctgaatgcgcaaaccacggaagtgaaaggcgacggcagcaaagtcgttggtctggaatatcgagatcg

SEQ ID NO: 534902 - DNA, 75 bp, synthetic construct
  source 1..75: mol_type = other DNA
cgtcggcttttactacccgatgacccagccgattaaagatgcggtagaaaccgtttatcaacggctggaaggctg

SEQ ID NO: 534903 - DNA, 75 bp, synthetic construct
  source 1..75: mol_type = other DNA
gctaaaccccggcgagatccgcatcatcgacccggatgacatcgccgagatgtttatgatgactacccataacat

SEQ ID NO: 534904 - DNA, 75 bp, synthetic construct
  source 1..75: mol_type = other DNA
agcaagctgatcccggccgcggttgaaggcggtctgcatcagattgaaacagcttccggcgcggtactgaaagcc

SEQ ID NO: 534905 - DNA, 75 bp, synthetic construct
  source 1..75: mol_type = other DNA
tcactggttctgccacaattttaaaacaagtcgcgcatacaaaccagatgaagtttcatctggtttacgcttggt

SEQ ID NO: 534906 - DNA, 75 bp, synthetic construct
  source 1..75: mol_type = other DNA
cccgtaaagtagagataaatattgaagcgaaacctacggcagaagaattgcagcaaattttcgagcaatatgccg

SEQ ID NO: 534907 - DNA, 75 bp, synthetic construct
  source 1..75: mol_type = other DNA
tatcgcccgtgacataacacattttgtaaagcgtgaggtaattgctgcaagagaagtcgaccaatccgactggac

SEQ ID NO: 534908 - DNA, 75 bp, synthetic construct
  source 1..75: mol_type = other DNA
acatcgtgaatgccaacatcaacgcccttttagagaaggcggaagacccgcagaaattggtgcgtctgatgatcc

SEQ ID NO: 534909 - DNA, 75 bp, synthetic construct
  source 1..75: mol_type = other DNA
cgggcatatgacggtctgagtgttgctggcccttcaggtgcatacgagtattttgcacgcagcgccagcggtctg

SEQ ID NO: 534910 - DNA, 75 bp, synthetic construct
  source 1..75: mol_type = other DNA
gtcaaaaaagccagtataagactgaaagggagtgtaggagtgaaggtcataagtgggaaacttgtttgcacagaa

SEQ ID NO: 534911 - DNA, 75 bp, synthetic construct
  source 1..75: mol_type = other DNA
ttaaaagcgcaggctaaagagattgccggatgcgaaaaccgcgtctggctgggatataccgtggctgaaaacggc

SEQ ID NO: 534912 - DNA, 75 bp, synthetic construct
  source 1..75: mol_type = other DNA
gtacacgcgtactggatgtgatcagtgatttcaaaggatacacgcatgttatggtcattggtggcggcgcgccgc

SEQ ID NO: 534913 - DNA, 75 bp, synthetic construct
  source 1..75: mol_type = other DNA
aaattacaatgtcgatcagctcattattaaccgccacgatgaagattatctgaacgacaatatcaatgacccatc

SEQ ID NO: 534914 - DNA, 75 bp, synthetic construct
  source 1..75: mol_type = other DNA
aaaatataaaatcttatctcttccgaaatatcaacatttagaattttctgaaccggtttatattgagaaaagaaa

SEQ ID NO: 534915 - DNA, 75 bp, synthetic construct
  source 1..75: mol_type = other DNA
tatgaaaaaagagatcggtgaactggaaaacaaactcagtgaaacccgtgctcgtcagcaggcattgatgttgcg

SEQ ID NO: 534916 - DNA, 75 bp, synthetic construct
  source 1..75: mol_type = other DNA
gagctggcgctgcgtaaagaaaaagaagatttggcgcgttctgcgttaatcgaaaagcagaaactgactgacctg

SEQ ID NO: 534917 - DNA, 75 bp, synthetic construct
  source 1..75: mol_type = other DNA
acatcgtgaacgccaacattaacgcgttgctggaaaaggctgaagatccgcagaagctggtgcggttgatgatcc

SEQ ID NO: 534918 - DNA, 75 bp, synthetic construct
  source 1..75: mol_type = other DNA
gcatttgcttgccaggataaatttgatattcagcttaaaaatgggaaaacatttacatcgctttatcttctgttt

SEQ ID NO: 534919 - DNA, 75 bp, synthetic construct
  source 1..75: mol_type = other DNA
gtgctcttattgagaactacgagcaagtcgatatcgagaccaaacttttggtgcctctgaagaaaactttcctgc

SEQ ID NO: 534920 - DNA, 75 bp, synthetic construct
  source 1..75: mol_type = other DNA
caatatcatcctgaatgggtggaagaggggatggggatcgctcggcaggttaaatggaatactcaagaaatcgac

SEQ ID NO: 534921 - DNA, 75 bp, synthetic construct
  source 1..75: mol_type = other DNA
ggtctggcgttttgtgaatgagatccaaaagggtgattgggttattacctattcgccagccaaccgtacttattt

SEQ ID NO: 534922 - DNA, 75 bp, synthetic construct
  source 1..75: mol_type = other DNA
atgcggaagataataattgcatccgtggtgatactggcatcgtcttattccgttgccagcttcgcaaaagatcca

SEQ ID NO: 534923 - DNA, 75 bp, synthetic construct
  source 1..75: mol_type = other DNA
atgaaactcacgcttatacatattatgattattggcgcttttatctttgcattcttgcaagtggtattattagcc

SEQ ID NO: 534924 - DNA, 75 bp, synthetic construct
  source 1..75: mol_type = other DNA
gaaaggcgactgggctatcacttattcaccttctaatcggacctatttaatagggaaaattgcctcagattttga

SEQ ID NO: 534925 - DNA, 75 bp, synthetic construct
  source 1..75: mol_type = other DNA
gaaaatgccgttttggcagtggggttatttagcaccccatattcagtgtaaatacgatagattctttatacgcta

SEQ ID NO: 534926 - DNA, 75 bp, synthetic construct
  source 1..75: mol_type = other DNA
cgacgatggcgagctggacgatgagatcacacaagccctttcgctggtaaacccgccgccagatacgccggtgaa

SEQ ID NO: 534927 - DNA, 75 bp, synthetic construct
  source 1..75: mol_type = other DNA
tctgcgtgaattaccgtcttttggtatgaaagcgataattgtttcaatctggatgcttgtagttgcatatcttat

SEQ ID NO: 534928 - DNA, 75 bp, synthetic construct
  source 1..75: mol_type = other DNA
acctgtgcgctgatcccgaccaccacgccgggcgtggaaattggtcgtcgccacttcccgctgaacgtaccgttc

SEQ ID NO: 534929 - DNA, 75 bp, synthetic construct
  source 1..75: mol_type = other DNA
tggcaccgtctgacaagctggatcataaagtggcgaagattttacaagtgccgaacgccactcgctcacgtattg

SEQ ID NO: 534930 - DNA, 75 bp, synthetic construct
  source 1..75: mol_type = other DNA
gaagaggcgctggtggatgtgattgccgccgacccaattcatcagcggatctgtaaagagctgggtaaaaacctg

SEQ ID NO: 534931 - DNA, 75 bp, synthetic construct
  source 1..75: mol_type = other DNA
tgatgacgcctgcgttttccacatgatggggcaaccgcaagaaacgcgtcacattgtgatgcataacgagcaggc

SEQ ID NO: 534932 - DNA, 75 bp, synthetic construct
  source 1..75: mol_type = other DNA
atgagtcctggcgatacgacggaagtgataagtacccgtggtctcagcctgtgctgtatcacatttgcctcgaga

SEQ ID NO: 534933 - DNA, 75 bp, synthetic construct
  source 1..75: mol_type = other DNA
gcgttccgccagtacggcgacaactggcggcaccaaaacgcccgttgggaccaacgccaattgagttgctgaaac

SEQ ID NO: 534934 - DNA, 75 bp, synthetic construct
  source 1..75: mol_type = other DNA
tggtcttacggtggatgcagtgatggaagagtaccggcgctggcgcaatgaatcctggcgatacgacgggagtga

SEQ ID NO: 534935 - DNA, 75 bp, synthetic construct
  source 1..75: mol_type = other DNA
ggcgacaactggcggcacccaaacgcccgtcgggaccaacgccaattgagttgctgaaacaggaatatgaacgcc

SEQ ID NO: 534936 - DNA, 75 bp, synthetic construct
  source 1..75: mol_type = other DNA
aatcctggcgatacgacgggagtgataaatacccgtggccacagcctgtgctgtaccacatctgcctcgaaatgc

SEQ ID NO: 534937 - DNA, 75 bp, synthetic construct
  source 1..75: mol_type = other DNA
gaaggtcgtgaagtaagagggtgtaaagacgagaacattaaaacactgttagagaatgcattcgagattcttacc

SEQ ID NO: 534938 - DNA, 75 bp, synthetic construct
  source 1..75: mol_type = other DNA
tgatgaggatgattggtatgggtcttacgattcgttttatttcaagcggtccgagcttgtgagcttcttcccaga

SEQ ID NO: 534939 - DNA, 75 bp, synthetic construct
  source 1..75: mol_type = other DNA
caggtctgccgccagtgcatggactgctgccgggcgggtgaaacatggcctccggacctggctgagtttgtggcg

SEQ ID NO: 534940 - DNA, 75 bp, synthetic construct
  source 1..75: mol_type = other DNA
catggcctccggacctggctgagtttgtggcgctgatttcggagagcggggcaaatccatttggtctgacggtgg

SEQ ID NO: 534941 - DNA, 75 bp, synthetic construct
  source 1..75: mol_type = other DNA
ataaaaagcagatacagtgcgtggtaagaccgctgcaaattctgcgtgctgacgggacgtgggaaaatattggcg

SEQ ID NO: 534942 - DNA, 75 bp, synthetic construct
  source 1..75: mol_type = other DNA
cttacagcacaactgcgtctggggccggcagacatcctggagtcagatgagaatggtattattccggagcaggac

SEQ ID NO: 534943 - DNA, 75 bp, synthetic construct
  source 1..75: mol_type = other DNA
atgacagacctttcacacagcagggaaaaggacaaaatcaatccggtggtgttttacacctccggattgattttg

SEQ ID NO: 534944 - DNA, 75 bp, synthetic construct
  source 1..75: mol_type = other DNA
gaaaccttcctgttagaaggcagccagggcaacgacctgatggactacagcaaaaagcaggtgatcaccgatatt

SEQ ID NO: 534945 - DNA, 75 bp, synthetic construct
  source 1..75: mol_type = other DNA
tattgcagccgatgcacacgccagatgccgataccgcagaacatcctgacgacgatttatgggcatcattatgct

SEQ ID NO: 534946 - DNA, 75 bp, synthetic construct
  source 1..75: mol_type = other DNA
aactaccacatacagtaattgactcattgaaagaagcattaaacagcagtctttatgctgaatatgcaaaaatag

SEQ ID NO: 534947 - DNA, 75 bp, synthetic construct
  source 1..75: mol_type = other DNA
aagcggcactgatcgccttgtcggtgataatcgccacgatctctgtcacctccggtgtcgataagggcattcgtg

SEQ ID NO: 534948 - DNA, 75 bp, synthetic construct
  source 1..75: mol_type = other DNA
ttgcccaggaagcgatggtccatccggagcgcggcttctacagcctgttggcgcagtatccggcatttaccttta

SEQ ID NO: 534949 - DNA, 75 bp, synthetic construct
  source 1..75: mol_type = other DNA
cgtaccggcattgtccggtaccggtgcgcgtgcaggtgatttaaaagggattaatgtgaaataccgttatgagtt

SEQ ID NO: 534950 - DNA, 75 bp, synthetic construct
  source 1..75: mol_type = other DNA
caggattaccggcgtgatgaagtgaaaccggggtatgtgaaggagaccaccaccgccagtgatggtcatactgcg

SEQ ID NO: 534951 - DNA, 75 bp, synthetic construct
  source 1..75: mol_type = other DNA
gtagagacggtggttattgaccttgcttatgaaggttccggcagtggcgactggcgcactgacggtttcatcgtg

SEQ ID NO: 534952 - DNA, 75 bp, synthetic construct
  source 1..75: mol_type = other DNA
tatgttttgtcagccttctggcagggttcgctcttcctgcgcaggctgaaaccggacacggtgcgctttctgtgg

SEQ ID NO: 534953 - DNA, 75 bp, synthetic construct
  source 1..75: mol_type = other DNA
tgaagtgaaaccggggtatgtgaaggagaccaccaccgccagtgatggccatactgcgcgtcatctgtcgccggc

SEQ ID NO: 534954 - DNA, 75 bp, synthetic construct
  source 1..75: mol_type = other DNA
tagcgaggataggtttttcatcctgtgggaaaaacgtgtatatatcaaataaagcctcattctatggtgcctcaa

SEQ ID NO: 534955 - DNA, 75 bp, synthetic construct
  source 1..75: mol_type = other DNA
gctgagcgggcaagcacaggtcacgctgacagagaaaccggaatggcagctgaggctgcaattcccgcaactgaa

SEQ ID NO: 534956 - DNA, 75 bp, synthetic construct
  source 1..75: mol_type = other DNA
aaactgattgatttcctcaaagaaacaccggttccgctgcgggtttacggcaactggcagcaactcaattacagc

SEQ ID NO: 534957 - DNA, 75 bp, synthetic construct
  source 1..75: mol_type = other DNA
accactactgagtcatcaactgagcgttaagcaggtgatgctaaaaggggcagtgatccaactgacgccgcagac

SEQ ID NO: 534958 - DNA, 75 bp, synthetic construct
  source 1..75: mol_type = other DNA
gggccactgcgttggcacgtctggccgcaacttagtattctctccgggcgcatgtcccttaccgcccagggtgcc

SEQ ID NO: 534959 - DNA, 75 bp, synthetic construct
  source 1..75: mol_type = other DNA
caaatggcagcaacttaactacagcctgcaagtggatcaactgttgcgcaaacacttacaggatgaggccaaacg

SEQ ID NO: 534960 - DNA, 75 bp, synthetic construct
  source 1..75: mol_type = other DNA
acgttgaatctgacagagcagacttgcgatacccagtttgatattcgcgtcattggcggctggaatggcgaaagt

SEQ ID NO: 534961 - DNA, 75 bp, synthetic construct
  source 1..75: mol_type = other DNA
caggttatgctcaaaacggtagcactgttctgatgaatcccctaatgatttttatcaaaatcattaagttaaggt

SEQ ID NO: 534962 - DNA, 75 bp, synthetic construct
  source 1..75: mol_type = other DNA
agaagcgagtgactggcaccagcgagcgaagagagcagatcattcagcgcctgcgtcagcaagggagtgtgcagg

SEQ ID NO: 534963 - DNA, 75 bp, synthetic construct
  source 1..75: mol_type = other DNA
tgctttgctggaagcggaaggcgttgagctgctgatgaccggcgggcatttgcgccgtcagtcgcaatcttttta

SEQ ID NO: 534964 - DNA, 75 bp, synthetic construct
  source 1..75: mol_type = other DNA
atgaatgtactaaaaaaacttatgcagcgtctgtgtggttgcggaaagcatgatggccgtgaacacgtggagttg

SEQ ID NO: 534965 - DNA, 75 bp, synthetic construct
  source 1..75: mol_type = other DNA
gatcattgttgatgaaggcattcctgcggatagtctggaaggcctgcgaaaggctggggttgaagtgattctggt

SEQ ID NO: 534966 - DNA, 75 bp, synthetic construct
  source 1..75: mol_type = other DNA
ccgtcagtcgagccatcagtggaagacaaaagcgcactgaacaccgcgatgaaacgcagcgttgcgaaagctgcc

SEQ ID NO: 534967 - DNA, 75 bp, synthetic construct
  source 1..75: mol_type = other DNA
ttcccaatacccatttcttaatcaccgacagtgtggacaactctgatcttaacactgcattaagaatgctggcgc

SEQ ID NO: 534968 - DNA, 75 bp, synthetic construct
  source 1..75: mol_type = other DNA
tgggtgcggataaaaagccgatacagtgcgtggtgaggccgctgcaaattcggtgtgctgatgggacgtgggaaa

SEQ ID NO: 534969 - DNA, 75 bp, synthetic construct
  source 1..75: mol_type = other DNA
aaccccgaagtacgagccagaattgagcaacaagcggcagagcaaggttgggagtcattgcatcgtcaactgcag

SEQ ID NO: 534970 - DNA, 75 bp, synthetic construct
  source 1..75: mol_type = other DNA
gatatcgggacggcgaagccgaacgctgaagagttactcgccgcgccgcaccgattgctggatattcgcgatccg

SEQ ID NO: 534971 - DNA, 75 bp, synthetic construct
  source 1..75: mol_type = other DNA
taaaagaaatgggcttcaaaagcgttggagaaaatgtaaaaatatcagataaggcatctttttatgggtgtgata

SEQ ID NO: 534972 - DNA, 75 bp, synthetic construct
  source 1..75: mol_type = other DNA
tggatgcggataaaaagcagatacagtgtgtggtaagaccgctgcaaattctgcgtgctgacgggacgtgggaaa

SEQ ID NO: 534973 - DNA, 75 bp, synthetic construct
  source 1..75: mol_type = other DNA
ctatatatgacacgagtgcattacagcaccttataaatattcaggccgaccaccctcttagccgggagccgataa

SEQ ID NO: 534974 - DNA, 75 bp, synthetic construct
  source 1..75: mol_type = other DNA
cccaggcgctggtccggttccttaatcaacagtacgtcagcattgatggcattgaaacgcccttcgtggagggcg

SEQ ID NO: 534975 - DNA, 75 bp, synthetic construct
  source 1..75: mol_type = other DNA
actacctttcggttgatgatcttatcgaaatcaatcgccttttaattgagcttcagacaccagatgaacctgttg

SEQ ID NO: 534976 - DNA, 75 bp, synthetic construct
  source 1..75: mol_type = other DNA
atgagtgatatcagtaaggcgagcctgcctaaggcgatttttttgatggggccgacggcctccggtaaaacggcg

SEQ ID NO: 534977 - DNA, 75 bp, synthetic construct
  source 1..75: mol_type = other DNA
acgacggggagaagtgaataaacaaccgaacattgaagagctgaaaaaacgcatggaacaaagccggttgcgtaa

SEQ ID NO: 534978 - DNA, 75 bp, synthetic construct
  source 1..75: mol_type = other DNA
ggacattatttttgtagagccggaggaaacagaccagacggtttaaatgagccggttacgaatgacatgaacata

SEQ ID NO: 534979 - DNA, 75 bp, synthetic construct
  source 1..75: mol_type = other DNA
atggtgtggtgtttactcagcaggcgtgtgtgacagagggcgagcaagagtcgccgctgacggtgctttccagga

SEQ ID NO: 534980 - DNA, 75 bp, synthetic construct
  source 1..75: mol_type = other DNA
aataaaccgatgctctaccagggaacctggcagcatggtttaaataacctgtttaccggctataccggcgtcacc

SEQ ID NO: 534981 - DNA, 75 bp, synthetic construct
  source 1..75: mol_type = other DNA
agtgtttagcgtgccttacgcctccgttgctcagctgctgcgcccaggcatgacccgctacgcgctctcagccgg

SEQ ID NO: 534982 - DNA, 75 bp, synthetic construct
  source 1..75: mol_type = other DNA
cccttgctacccctggagaaacaaccggattaacaccattttcaattaacttaacaggttgtacatctactgtag

SEQ ID NO: 534983 - DNA, 75 bp, synthetic construct
  source 1..75: mol_type = other DNA
ggcagcacggtctgagcaatatgtttaccggttacacgggggtgaccggctttaatgactatcaggcgttcctgc

SEQ ID NO: 534984 - DNA, 75 bp, synthetic construct
  source 1..75: mol_type = other DNA
gatctgtcgcgcttttcgaccagcgcgattaccgaaggcacttactcccttgacgtctacaccaacgacgagtgg

SEQ ID NO: 534985 - DNA, 75 bp, synthetic construct
  source 1..75: mol_type = other DNA
gcgccgaaggccacggttaagtggagcggcggacagtgctcggtggaattaagtcaggaaaaaacaaaggaaacg

SEQ ID NO: 534986 - DNA, 75 bp, synthetic construct
  source 1..75: mol_type = other DNA
ttagatattgtcaatggattatatcagtcctctaaaaaaataattttagataacgagttacacacatcaaaacaa

SEQ ID NO: 534987 - DNA, 75 bp, synthetic construct
  source 1..75: mol_type = other DNA
tctctggttgaagcaatgaaagaacctgagatcgtcattgaagaaacaaaagaagaatctccagcagttgaacca

SEQ ID NO: 534988 - DNA, 75 bp, synthetic construct
  source 1..75: mol_type = other DNA
tttataaaattgcgctgggcattgagtacgacggcagtaagtattacggctggcaacggcagaatgaagtccgca

SEQ ID NO: 534989 - DNA, 75 bp, synthetic construct
  source 1..75: mol_type = other DNA
aaacattgtttcaagctgataggcgaagaattacgagcatttaagaacgagtcctctcaaagaggtttgcttaat

SEQ ID NO: 534990 - DNA, 75 bp, synthetic construct
  source 1..75: mol_type = other DNA
aaaataattttccactagggttgatatctttgccattttcgatatacagaacaatacgtcaattcaaaagaacaa

SEQ ID NO: 534991 - DNA, 75 bp, synthetic construct
  source 1..75: mol_type = other DNA
tactctggaaaaagagcatcaggaaataatgtctctatcaggtattgatataggaaccggagatattatattcaa

SEQ ID NO: 534992 - DNA, 75 bp, synthetic construct
  source 1..75: mol_type = other DNA
tttcatcgcagagctgactggtcgtgggcaggatgtggcggaaggccgggcctgcgttccgggtgtgaagaaacc

SEQ ID NO: 534993 - DNA, 75 bp, synthetic construct
  source 1..75: mol_type = other DNA
acgacttttcgtcaggcgttttacggctgtaccgggctgagagcggtgggtgagagcgtgtttgccgggtgcacc

SEQ ID NO: 534994 - DNA, 75 bp, synthetic construct
  source 1..75: mol_type = other DNA
ggacaatcagggtgagaacggcggggagtgtcaggttcagggtgtacgggtacagcagcacggcttacaacgacc

SEQ ID NO: 534995 - DNA, 75 bp, synthetic construct
  source 1..75: mol_type = other DNA
gaaaactgtaccggagtgacatcgttctatcagacctttgatggttgcacggggctgatgacgataccagacgga

SEQ ID NO: 534996 - DNA, 75 bp, synthetic construct
  source 1..75: mol_type = other DNA
ttaagggactggatgaagtgggcagtgatacaggcagaacaggagaatgacatgaatatactaaaaaaacttatg

SEQ ID NO: 534997 - DNA, 75 bp, synthetic construct
  source 1..75: mol_type = other DNA
gcataccagaatgctatcgggattaatcaacatactgaatacctgactgaaaccggaaagttaattatagacaac

SEQ ID NO: 534998 - DNA, 75 bp, synthetic construct
  source 1..75: mol_type = other DNA
cgtgggaaaatattggcgggatgaaatacccgacagcttcacaaaaccggagtccggctccggttttttgttggt

SEQ ID NO: 534999 - DNA, 75 bp, synthetic construct
  source 1..75: mol_type = other DNA
tctcgatatgccgccgggcactggtgatattcagttgacgctggcgcagaacattcctgtaactggtgcggttgt

SEQ ID NO: 535000 - DNA, 75 bp, synthetic construct
  source 1..75: mol_type = other DNA
atggagcgtctgtgtggttgcggaaagcatgatgactgtgaacacgggcagtcgcttacagtacaactgcgactg

SEQ ID NO: 535001 - DNA, 75 bp, synthetic construct
  source 1..75: mol_type = other DNA
gcgaatgaatccgtgttgcagacctgccttcaggcttacggtcataaggtatcccgtgatgtggtgcgcactcag

SEQ ID NO: 535002 - DNA, 75 bp, synthetic construct
  source 1..75: mol_type = other DNA
gcgtcgggacagcggtatgtggcgacagtgacaacggacagtgaagggcactggtcgtatgaaatggaggatgat

SEQ ID NO: 535003 - DNA, 75 bp, synthetic construct
  source 1..75: mol_type = other DNA
gccgtcagggattgcctggagccgtctgcctgacagtgtgcagcacaggctgatacgcggactggcacaggcgta

SEQ ID NO: 535004 - DNA, 75 bp, synthetic construct
  source 1..75: mol_type = other DNA
tatggcctgatctggactatctcgttctcgatatgccgccgggcactggtgatattcagttgacgctggcgcaga

SEQ ID NO: 535005 - DNA, 75 bp, synthetic construct
  source 1..75: mol_type = other DNA
caaagtcgccaggcgtgaagatctcaccaccgtcggcgtgaacagctacgtctcaccggggatgtgcgccaccaa

SEQ ID NO: 535006 - DNA, 75 bp, synthetic construct
  source 1..75: mol_type = other DNA
cagtgtggactggacgctgctgctggtgtttatggcgatgtttatcgacgtccatttactgacccagcttccagc

SEQ ID NO: 535007 - DNA, 75 bp, synthetic construct
  source 1..75: mol_type = other DNA
caaacaacgttttaaaatgccctacattggcttgactggaagttatcgttatgaagattttgagctaggtggcac

SEQ ID NO: 535008 - DNA, 75 bp, synthetic construct
  source 1..75: mol_type = other DNA
tttgcagggcgtgttgagcaatgtgagccatttatccgaacccggattatggttaacggcaattggtttatcgca

SEQ ID NO: 535009 - DNA, 75 bp, synthetic construct
  source 1..75: mol_type = other DNA
ctctattcaataccgatgctgttgtgggcggcgctggtgggatacgttttattcgttatgctcccggcctggtaa

SEQ ID NO: 535010 - DNA, 75 bp, synthetic construct
  source 1..75: mol_type = other DNA
cggacggagaaagagccataggctacaaacagcgttttaagatgccctacattggcctgacgggcagttaccgtt

SEQ ID NO: 535011 - DNA, 75 bp, synthetic construct
  source 1..75: mol_type = other DNA
gaacgtctaaaaaaacttatgcagcgtctgtgcggttgcggaaagcatgatgaccgtgaacacggggagttactt

SEQ ID NO: 535012 - DNA, 75 bp, synthetic construct
  source 1..75: mol_type = other DNA
tcgtttacacctgacaacataaatgcggacattagtcttggaactctgagcggaaaaacaaaagagcgtgtttat

SEQ ID NO: 535013 - DNA, 75 bp, synthetic construct
  source 1..75: mol_type = other DNA
ccgtccgtttcatcgcgtttctcggcgtatcgatgcctaacttctggctggcgtttttgctggtgatggcgtttt

SEQ ID NO: 535014 - DNA, 75 bp, synthetic construct
  source 1..75: mol_type = other DNA
taaatacagtggctgggtagaagcatctgataacgatgaacactatgcccgtgtaaaaagaatcacttatcgcag

SEQ ID NO: 535015 - DNA, 75 bp, synthetic construct
  source 1..75: mol_type = other DNA
ttcagagatgatatcggctccttcccgaatggagaaagagcaatcggctacaaacaacgttttaaaatgccctac

SEQ ID NO: 535016 - DNA, 75 bp, synthetic construct
  source 1..75: mol_type = other DNA
ggggcgcaaaatggtgcgccgctttgctacggagcgtcggctggcgatgtttatggtgctggcggcggcgctgct

SEQ ID NO: 535017 - DNA, 75 bp, synthetic construct
  source 1..75: mol_type = other DNA
agtatctaaatgaatggccattaaaatattctcgtatcgttcaggctgaagactgcattttttatggcgtttttg

SEQ ID NO: 535018 - DNA, 75 bp, synthetic construct
  source 1..75: mol_type = other DNA
aatggttaccgtatcgaactgggggaagtcaaaagccaccttgaacagctcgacagcgtagggagtgccgccgtg

SEQ ID NO: 535019 - DNA, 75 bp, synthetic construct
  source 1..75: mol_type = other DNA
tattagcgcaggctgaggtttcgcaggtcagcgctgcgcgcgagaatctggcgttgcggcgtaaacgtgcccaac

SEQ ID NO: 535020 - DNA, 75 bp, synthetic construct
  source 1..75: mol_type = other DNA
gctgaaaacctggggtctgctggagctggtaaactccgtggttggcctgataatcgtgttgatcatcagcatgat

SEQ ID NO: 535021 - DNA, 75 bp, synthetic construct
  source 1..75: mol_type = other DNA
atgggccgttttgatgaatggttagacgacacaaggccggtaacagtcgcaccggttaccggcatcggcgatacc

SEQ ID NO: 535022 - DNA, 75 bp, synthetic construct
  source 1..75: mol_type = other DNA
cctacatcatggcgtggttgataaccgtgctgatccgtctggcaacgggtcagggcgtggtctcagccatgacgg

SEQ ID NO: 535023 - DNA, 75 bp, synthetic construct
  source 1..75: mol_type = other DNA
tatctggtggcgttttcatctttattcgataccgatgctgttgtgggcggcgctggtgggatatgttttgttggt

SEQ ID NO: 535024 - DNA, 75 bp, synthetic construct
  source 1..75: mol_type = other DNA
cgtcgcgtggtgctcagtgtggactggacgctgctgctggtgtttatggcgatgtttatcgacgtccatttacta

SEQ ID NO: 535025 - DNA, 75 bp, synthetic construct
  source 1..75: mol_type = other DNA
gctacggagcgtcggctggcgatgtttatggtactggcggcggcgctgctttctacctttctgaccaacgatgtc

SEQ ID NO: 535026 - DNA, 75 bp, synthetic construct
  source 1..75: mol_type = other DNA
ttgccgctgatctccggtgcgagtctctatctgacagaggcggaacgcgccgcagacagcttccgtatgattccg

SEQ ID NO: 535027 - DNA, 75 bp, synthetic construct
  source 1..75: mol_type = other DNA
aatgaaacgtcgctgcctccgccgccgctgcaatatgccgattatgccttctggcagcgcgaatggttccaggat

SEQ ID NO: 535028 - DNA, 75 bp, synthetic construct
  source 1..75: mol_type = other DNA
ataagtttatcaccaccgactatttgcaacagtgcctgtataagcggccatggtatgcccggagccacagctgcg

SEQ ID NO: 535029 - DNA, 75 bp, synthetic construct
  source 1..75: mol_type = other DNA
gagaggtatactttacagttcggttacagagcattccgttgccatatttgcacataataacagacagttcagtct

SEQ ID NO: 535030 - DNA, 75 bp, synthetic construct
  source 1..75: mol_type = other DNA
aggtaattataatattattgattctgtcgatactgaatatatcgaaaaaacatcagtagtgccaaacaacgcatt

SEQ ID NO: 535031 - DNA, 75 bp, synthetic construct
  source 1..75: mol_type = other DNA
agataaggctgataattttatttttattggcagcactgtcatttattggcctttttttcatcattaactatcaac

SEQ ID NO: 535032 - DNA, 75 bp, synthetic construct
  source 1..75: mol_type = other DNA
cgggggagacttacccgaaatctgatttattcaacaaagccgctgaggtactgaaaaagacccccggtattatta

SEQ ID NO: 535033 - DNA, 75 bp, synthetic construct
  source 1..75: mol_type = other DNA
tccggtggcgggtcgaattgcttcgttgttcgccacattacacgccattggcattgagtcagatgatggcgtgga

SEQ ID NO: 535034 - DNA, 75 bp, synthetic construct
  source 1..75: mol_type = other DNA
gcatgataacgatctggccgtattgcttaatggttcagaactgcgtgataccagacaggcgaagcagataatgaa

SEQ ID NO: 535035 - DNA, 75 bp, synthetic construct
  source 1..75: mol_type = other DNA
ggtacgtcgatgattgccgccacgccgctggctttcgccaacgtgatgccagaaggcaacattggggggggcatt

SEQ ID NO: 535036 - DNA, 75 bp, synthetic construct
  source 1..75: mol_type = other DNA
gccaggcgttgacgcaggtgcgtcgctgggacagtgcctgtcagaaattacccgatgccagtctggcgctgattt

SEQ ID NO: 535037 - DNA, 75 bp, synthetic construct
  source 1..75: mol_type = other DNA
cgttacggcgcgacgtaacgcaatagcgcctgtcagcagcggatttatttgcggtttgtataccggcggtacgct

SEQ ID NO: 535038 - DNA, 75 bp, synthetic construct
  source 1..75: mol_type = other DNA
gtttatttaatgaccactcgtgtgttccgtcggcaattttctgaaatgacagagctggttaatacgctggcattt

SEQ ID NO: 535039 - DNA, 75 bp, synthetic construct
  source 1..75: mol_type = other DNA
aagtgcgcgtattgctacttgatgtcgtgattggcttcggtgcgactgccgatcctgccgcctcactggtaagcg

SEQ ID NO: 535040 - DNA, 75 bp, synthetic construct
  source 1..75: mol_type = other DNA
ggaaggcaacattggtgtcattggcgcttctggtacagggattcaggaactgtgttcgcagattgcgctggcagg

SEQ ID NO: 535041 - DNA, 75 bp, synthetic construct
  source 1..75: mol_type = other DNA
atgacggagttagccagaacaatagtcgcaggagtcgggggcgcagataacattgtgagtctgatgcattgcgca

SEQ ID NO: 535042 - DNA, 75 bp, synthetic construct
  source 1..75: mol_type = other DNA
tattctgatgtaggattagtgacgccattgcgtgatggaatgaatctggtggcgaaagaatttgtcgccgcgcag

SEQ ID NO: 535043 - DNA, 75 bp, synthetic construct
  source 1..75: mol_type = other DNA
taaaaacttatatgaatcaaatggatggataaaagatgagcgttacaacgctctattttctaggatgcaggaagt

SEQ ID NO: 535044 - DNA, 75 bp, synthetic construct
  source 1..75: mol_type = other DNA
agaaagaaattgttgaggctgcaaataggcttcatgttgattcagttcttccttctcatttatcaggaaatgagc

SEQ ID NO: 535045 - DNA, 75 bp, synthetic construct
  source 1..75: mol_type = other DNA
attggcatcgaaccggatgatattgctaaacaggctgccggaccgctgccaccgaaactggcacaattaaaagcg

SEQ ID NO: 535046 - DNA, 75 bp, synthetic construct
  source 1..75: mol_type = other DNA
caaaaagccatacagcctgcggcaaagcgtttcgaacagaagtttacccgattggcattgagccaaaagaaatag

SEQ ID NO: 535047 - DNA, 75 bp, synthetic construct
  source 1..75: mol_type = other DNA
gaactgaaaaacgtacaaaatatcttttctgtcgaacggctggattattccaaaggtttgccggagcgttttctc

SEQ ID NO: 535048 - DNA, 75 bp, synthetic construct
  source 1..75: mol_type = other DNA
tcgtaccccagagtctgcaccggctgatttatggtccggacaaacggaccacgccgcccctggatgatgatctga

SEQ ID NO: 535049 - DNA, 75 bp, synthetic construct
  source 1..75: mol_type = other DNA
atgagtgcacgttttctggggatgaaccccgaggccaccggcacactcagcgatacggaccatctgtggaacagc

SEQ ID NO: 535050 - DNA, 75 bp, synthetic construct
  source 1..75: mol_type = other DNA
atgacggagttagccagaacaatagtcgcaggcgcagataacattgtgagtctgatgcattgtgcaacgcgatta

SEQ ID NO: 535051 - DNA, 75 bp, synthetic construct
  source 1..75: mol_type = other DNA
atggaagagtttttttaactctcttcctgaacaggaaaaacggaccatcgccagactgggcatcattacttggct

SEQ ID NO: 535052 - DNA, 75 bp, synthetic construct
  source 1..75: mol_type = other DNA
aaggtcgttttctgcgcgcagtaaaaaatgtctctgtcaatgagccattcttccagggccatttccctggaaaac

SEQ ID NO: 535053 - DNA, 75 bp, synthetic construct
  source 1..75: mol_type = other DNA
tgcgtcagtctatcaaacgtctggtaaaccattttcgtgagctgggaaatgttcgtttttatgatgaacaggggt

SEQ ID NO: 535054 - DNA, 75 bp, synthetic construct
  source 1..75: mol_type = other DNA
aagccaccttgctggcggcggcgctgattcatccgctttcgcctgccatacagcaacgcactccgtcattactgg

SEQ ID NO: 535055 - DNA, 75 bp, synthetic construct
  source 1..75: mol_type = other DNA
cgcgaccgctgggtgctggccgttgccggtacacacggcaaaaccaccaccgcgggaatggcgacctggattctg

SEQ ID NO: 535056 - DNA, 75 bp, synthetic construct
  source 1..75: mol_type = other DNA
atggcgacctggattctggaacagtgtggttacaaaccgggatttgtgatcggcggtgtgccggggaactttgag

SEQ ID NO: 535057 - DNA, 75 bp, synthetic construct
  source 1..75: mol_type = other DNA
gcgttcagcctgcacactggagcggcgatgtggatacgctggcagatatggtggtgaaaaccgctcagccgggcg

SEQ ID NO: 535058 - DNA, 75 bp, synthetic construct
  source 1..75: mol_type = other DNA
tggggtatcgatgatgttccggtgatcgttcaggataagaaatttagcgccgacgggcagattgattatcaactg

SEQ ID NO: 535059 - DNA, 75 bp, synthetic construct
  source 1..75: mol_type = other DNA
gcctgatggcgattgccgcggcccgtcatgttggcgtttctccggcagatgccgctaatgcgttgggttcgttca

SEQ ID NO: 535060 - DNA, 75 bp, synthetic construct
  source 1..75: mol_type = other DNA
gtggtgaaaaccgctcagcctggcgaccatattctggtgatgagcaacggcggttttggtgggatccatcagaaa

SEQ ID NO: 535061 - DNA, 75 bp, synthetic construct
  source 1..75: mol_type = other DNA
cgtggtgcagccacaatcagcaccatgatgacacgctatatgttcgagctgaccttgtgaatggcaactatccgg

SEQ ID NO: 535062 - DNA, 75 bp, synthetic construct
  source 1..75: mol_type = other DNA
ggaacgtttcctgcccgctgattgcgtcactgcaagacggaacgaagctcgctgcatcggcgcgggggagtcacg

SEQ ID NO: 535063 - DNA, 75 bp, synthetic construct
  source 1..75: mol_type = other DNA
tgctgtctgaactggtgtgcgcctgccacgcgcggaaagggaacgtttcctgcccgctgattgcgtcactgcaag

SEQ ID NO: 535064 - DNA, 75 bp, synthetic construct
  source 1..75: mol_type = other DNA
aagctaaccactgacgcttctgaatgggaagtcttgttggatggcgaaaaagtgggcgaagtgaaatggtcgctg

SEQ ID NO: 535065 - DNA, 75 bp, synthetic construct
  source 1..75: mol_type = other DNA
ggggatggagtttattacagcgaactgtacggagccagcggctggtcgccgccagtaaaaacacaggtggtgaac

SEQ ID NO: 535066 - DNA, 75 bp, synthetic construct
  source 1..75: mol_type = other DNA
tggaagtgcgagacaatgttgagcgccgggcttatgaaattgctctggcatcgctggaagcagtatcggatgaac

SEQ ID NO: 535067 - DNA, 75 bp, synthetic construct
  source 1..75: mol_type = other DNA
cggtgcaatctacccgcaacacgctgccccgcgtggttggctgcgcctgcgtttgctcaatggctgtaatgcccg

SEQ ID NO: 535068 - DNA, 75 bp, synthetic construct
  source 1..75: mol_type = other DNA
agcaagggatatctggctgcaaccgctgcgcattctcgatacccgcaactccagcagcctgaaagaaggcgtcat

SEQ ID NO: 535069 - DNA, 75 bp, synthetic construct
  source 1..75: mol_type = other DNA
ccggacgatttcccggtcagcgcgtttacgctgcgcctgcactttaaccgcccgttacctgccgacatcaagcta

SEQ ID NO: 535070 - DNA, 75 bp, synthetic construct
  source 1..75: mol_type = other DNA
attctgcgtaatgcctcgctgccgatgatcaccgccgtggggatgcacatcggcgaactgatcggcgggacgatg

SEQ ID NO: 535071 - DNA, 75 bp, synthetic construct
  source 1..75: mol_type = other DNA
gtataaacccggatgtttttgaacaaatttttaccctcctgaatacacactgtaaatcatcagaagctgcacttg

SEQ ID NO: 535072 - DNA, 75 bp, synthetic construct
  source 1..75: mol_type = other DNA
gaaagcttccagcaccagatggagtacagccgccagcgggaagtcgtctactggcatcaccggactaaaacgtcc

SEQ ID NO: 535073 - DNA, 75 bp, synthetic construct
  source 1..75: mol_type = other DNA
cagctttatctgtggttttgcgaatgcctgatggatgcggagctgattgccggagagcgccacctgccgctgccg

SEQ ID NO: 535074 - DNA, 75 bp, synthetic construct
  source 1..75: mol_type = other DNA
cggcgctcgattatctgcgtctgtctaacctgccgccgacgccagaaatgttggcctctacccgcaccatgctcg

SEQ ID NO: 535075 - DNA, 75 bp, synthetic construct
  source 1..75: mol_type = other DNA
atcgtattgagctaacggtgttcgtcgataacgcgccagcaattaaggtctataaaaaatttggctttgagattg

SEQ ID NO: 535076 - DNA, 75 bp, synthetic construct
  source 1..75: mol_type = other DNA
attaaccccgcaccctttgtctgtgagggggagatctatttcctggggacggtgctctcatacttctttgccctt

SEQ ID NO: 535077 - DNA, 75 bp, synthetic construct
  source 1..75: mol_type = other DNA
cctttatgtcgctggcgattaacgcgcggctactgcgcgccagtatgctggacgtcgccggtcagcgtcacgtca

SEQ ID NO: 535078 - DNA, 75 bp, synthetic construct
  source 1..75: mol_type = other DNA
cctttatgtcgctggcgattaacgcgcgactgctgcgcgccagtatgctggacgtcgccggtcagcgtcacgtca

SEQ ID NO: 535079 - DNA, 75 bp, synthetic construct
  source 1..75: mol_type = other DNA
ctgtaatttgattgtcgatttgctcaacgccgcgctggacccgcgcattcgtcgtcatgaaggagcgcacgcgtg

SEQ ID NO: 535080 - DNA, 75 bp, synthetic construct
  source 1..75: mol_type = other DNA
gaaggtatccgactgctgcgtcccgatgtcgccaaacctgtctggcataattcgcttcgcctgccaaaaggtgag

SEQ ID NO: 535081 - DNA, 75 bp, synthetic construct
  source 1..75: mol_type = other DNA
agcgtggccaatgacgttacgtattcagccgggttatgaccacagttactacttcattgcctcttttatagagga

SEQ ID NO: 535082 - DNA, 75 bp, synthetic construct
  source 1..75: mol_type = other DNA
aggggattgccttcaaggcttcacaacttggaaaaaaatatgcgtggtcacatcttcagacacttattgattatt

SEQ ID NO: 535083 - DNA, 75 bp, synthetic construct
  source 1..75: mol_type = other DNA
gtgccagtgccagtgccagtgccagtgccagtgccagtgccagtgccagtgccagtgccatcatgcgagcctgaa

SEQ ID NO: 535084 - DNA, 75 bp, synthetic construct
  source 1..75: mol_type = other DNA
gcaatgttagagcacagaactggcgagaaatgtgcaaagacgatcatacaggaagctatagatacactgctcaca

SEQ ID NO: 535085 - DNA, 75 bp, synthetic construct
  source 1..75: mol_type = other DNA
gcagaacaaactgcagctccctgccctaagtcacagttgcaaaccctgatcgacaaggcattaatccaacgtccc

SEQ ID NO: 535086 - DNA, 75 bp, synthetic construct
  source 1..75: mol_type = other DNA
tgctttgaatctacccacgagatgctactggaacagttaagtcagcataaactggacatgataatttccgattgc

SEQ ID NO: 535087 - DNA, 75 bp, synthetic construct
  source 1..75: mol_type = other DNA
cggggctggctgaatatggcccatttttaccacacggcctgcaggtggagctgccggatattgccgccacgacca

SEQ ID NO: 535088 - DNA, 75 bp, synthetic construct
  source 1..75: mol_type = other DNA
tttacctcacggactgcaggtggagctgccggacattccgacaaccaccaccgtgcagaccgtccagctatggga

SEQ ID NO: 535089 - DNA, 75 bp, synthetic construct
  source 1..75: mol_type = other DNA
accttataagcacacggatcattagtgaactcgaaatgtctcacggtctgacagtgaccaaaactgcatctcccc

SEQ ID NO: 535090 - DNA, 75 bp, synthetic construct
  source 1..75: mol_type = other DNA
ggttgttttccatgaaaattggcgagtgtggtgtcagtttctggtgcactaacccgctgccggaaaagccgtttc

SEQ ID NO: 535091 - DNA, 75 bp, synthetic construct
  source 1..75: mol_type = other DNA
tgcttcgaatccacccacgaaatgctactggagcaattaagccagcataaactggatatgatcatttccgactgt

SEQ ID NO: 535092 - DNA, 75 bp, synthetic construct
  source 1..75: mol_type = other DNA
ttatgtttcgccactccattcctggtcgtagctatcgctttcacgcctttcggcagaaaggtgcgtgattcaatg

SEQ ID NO: 535093 - DNA, 75 bp, synthetic construct
  source 1..75: mol_type = other DNA
gtgtcacatccaataatcaatatcggtcgtcatcatggtggttctgatgactggcgtacaccgtatcgtctattt

SEQ ID NO: 535094 - DNA, 75 bp, synthetic construct
  source 1..75: mol_type = other DNA
caggtcaaagacaacttactggcttcggtgtgtatatacaaaccccttcctgcatgagattcgaacgttacaccg

SEQ ID NO: 535095 - DNA, 75 bp, synthetic construct
  source 1..75: mol_type = other DNA
atgacagtcagcagcacgatttccgttttttgccgcgacggggtgttccgtaccgtttactgccacctgcacggt

SEQ ID NO: 535096 - DNA, 75 bp, synthetic construct
  source 1..75: mol_type = other DNA
tgcgtcatttattgaatgatgccggattctgcccctctgccgatcaaatggtgattatgggtggcccgctaatgg

SEQ ID NO: 535097 - DNA, 75 bp, synthetic construct
  source 1..75: mol_type = other DNA
cccaccatacagcgatattccgtcgttcctcttaaaagcgtctgaagcagatttagcggtattcctgataccgta

SEQ ID NO: 535098 - DNA, 75 bp, synthetic construct
  source 1..75: mol_type = other DNA
cattaaccgtggtggactaagaggaagacccaccatttacccacctgagacgctcgacagcttcataaagctata

SEQ ID NO: 535099 - DNA, 75 bp, synthetic construct
  source 1..75: mol_type = other DNA
ggaaatagtggcgcgcgtgaatcgacctataccattaccatagagcgcctgccggtgctggataatccggtcaaa

SEQ ID NO: 535100 - DNA, 75 bp, synthetic construct
  source 1..75: mol_type = other DNA
attcttggtgaaggtgacgataaaacagcgaaaacgccgcagtgggcttcgcaaattaccggtatcccggtggac

SEQ ID NO: 535101 - DNA, 75 bp, synthetic construct
  source 1..75: mol_type = other DNA
gtattgcctgggtattgattaacgaaaatctcgttgatcaaccttttctcgataaatactgcgtcggctatgacg

SEQ ID NO: 535102 - DNA, 75 bp, synthetic construct
  source 1..75: mol_type = other DNA
ttcgcagctattgtactggcctttgttttacctatagcaggcttcagcggaagctggggagtactcgcaacatta

SEQ ID NO: 535103 - DNA, 75 bp, synthetic construct
  source 1..75: mol_type = other DNA
ctattcgtcatcgtcatcctcttcattcgacaatgacaatttccgcggcggcggcggttcatctggcggcggtgg

SEQ ID NO: 535104 - DNA, 75 bp, synthetic construct
  source 1..75: mol_type = other DNA
ggcgcgtgaaattggcacagcaaaacccgcttatatctgccagggctgggggccacaacgccaggcaaacggcga

SEQ ID NO: 535105 - DNA, 75 bp, synthetic construct
  source 1..75: mol_type = other DNA
cggggcttgtcgaatacggcccctttttacctcacggactgcaggtggagctgccggacattccgacaaccacca

SEQ ID NO: 535106 - DNA, 75 bp, synthetic construct
  source 1..75: mol_type = other DNA
ggtggtatgcctgatccgacgttgcctgagcttcctgatggcacgctcagggccgacggaatcactggcctgtga

SEQ ID NO: 535107 - DNA, 75 bp, synthetic construct
  source 1..75: mol_type = other DNA
gtgtcagtggcagtgcacgtgcgtcatatctggctcagggacgccgggcagtgctgtatctgtggtcgtgtggtt

SEQ ID NO: 535108 - DNA, 75 bp, synthetic construct
  source 1..75: mol_type = other DNA
acgggtgaatattctgaatggtgaacagcgtcgtgtcagtggcagtgcacgtgtttccctcaagcgtcatatctg

SEQ ID NO: 535109 - DNA, 75 bp, synthetic construct
  source 1..75: mol_type = other DNA
aaagcgtggccgatgacgctgcgtattcagccgggatatgatcacagttactacttcatcgcctcttttatagag

SEQ ID NO: 535110 - DNA, 75 bp, synthetic construct
  source 1..75: mol_type = other DNA
cgacggcgctgcaaactgtacctgaacaaaatattgatgtaacaaatagcgagaacgcattaattattaaaatga

SEQ ID NO: 535111 - DNA, 75 bp, synthetic construct
  source 1..75: mol_type = other DNA
atggctgtgcttcgtacgttaccgggcagaatcaaaacactgaatacccgacgggtgaatattctgaagggtgaa

SEQ ID NO: 535112 - DNA, 75 bp, synthetic construct
  source 1..75: mol_type = other DNA
ggattaacctgcaatgacgagaacttcaccaccaaagcgggggcccaacgcgtagcggcggaactggggattgta

SEQ ID NO: 535113 - DNA, 75 bp, synthetic construct
  source 1..75: mol_type = other DNA
gtaccgaatgccatcgacaaaagtctgctcgtgaagcggcgggtggtatgccggacccgacactgccggaggtgt

SEQ ID NO: 535114 - DNA, 75 bp, synthetic construct
  source 1..75: mol_type = other DNA
gggctacgatttaggtcagggcgcggggttttatctcaacgccacacaaaaaccgtgggcgacgcattacaggat

SEQ ID NO: 535115 - DNA, 75 bp, synthetic construct
  source 1..75: mol_type = other DNA
gatctcagcgatgagtttgtcaatgaactgacggcggctggcgtggtatttcgttattacgatccccgccctcgc

SEQ ID NO: 535116 - DNA, 75 bp, synthetic construct
  source 1..75: mol_type = other DNA
agcatatgtccagctacggcccacaggccaaacaggattacgcggtgcggctggaagggccgattgttgaagata

SEQ ID NO: 535117 - DNA, 75 bp, synthetic construct
  source 1..75: mol_type = other DNA
ggattacgcggtgcgccttgaagggccgattgtcgaagatattctgcaatttgaactggaaaacctgccaggaca

SEQ ID NO: 535118 - DNA, 75 bp, synthetic construct
  source 1..75: mol_type = other DNA
aaacatatggctttaataaaaaactggattgggttagcaacgagcaactttccgaattaaccgggatattgccgc

SEQ ID NO: 535119 - DNA, 75 bp, synthetic construct
  source 1..75: mol_type = other DNA
atagatttggtagatgggaaaagtattattatatacaactaagaggcgcttttttatcggctattcatcaccaga

SEQ ID NO: 535120 - DNA, 75 bp, synthetic construct
  source 1..75: mol_type = other DNA
tttgaaattagagataatattggcacagaaaatatattcagttcgtttagtgatttctcttcattcttaaacgaa

SEQ ID NO: 535121 - DNA, 75 bp, synthetic construct
  source 1..75: mol_type = other DNA
acggggcttggttcacagttccatggtataacattttgtaaattaattgataaaagcactccattacttattaat

SEQ ID NO: 535122 - DNA, 75 bp, synthetic construct
  source 1..75: mol_type = other DNA
gcacgtcaaggtgtacgacgcggccaccaacagagaacggctggagccgctgagccagcgtgctgcaggtctgcg

SEQ ID NO: 535123 - DNA, 75 bp, synthetic construct
  source 1..75: mol_type = other DNA
tgagcttaccgctatggcagagaaactgggcgcggtaacctacatcgacgcgccggtgggcaccacctttgcgca

SEQ ID NO: 535124 - DNA, 75 bp, synthetic construct
  source 1..75: mol_type = other DNA
ccgccgccgctggagagactgacgtttgagactgaaatcacgtcggaatacctgttaaccctgaaaggaaacagc

SEQ ID NO: 535125 - DNA, 75 bp, synthetic construct
  source 1..75: mol_type = other DNA
gaccgagtcggtaaatacctggggccgtaagctgattgccgacggcgcactgcttggctttgagtgctggtacga

SEQ ID NO: 535126 - DNA, 75 bp, synthetic construct
  source 1..75: mol_type = other DNA
ggcaaccgtaccgccgcctggccaaccgtgacccatatgcgcaactttgaaaatgtgcggcgtaccggggatgtg

SEQ ID NO: 535127 - DNA, 75 bp, synthetic construct
  source 1..75: mol_type = other DNA
tacctgaatcaggtaagaaaagtttacccaaatcaggtaaaggcacttacccgaatcaggtaaacacaaaagaca

SEQ ID NO: 535128 - DNA, 75 bp, synthetic construct
  source 1..75: mol_type = other DNA
ttttaccaaattcaaaaaaccaagcaaataatcgtttcaaaacgttaaacagcaaagctattggcaggctacttg

SEQ ID NO: 535129 - DNA, 75 bp, synthetic construct
  source 1..75: mol_type = other DNA
cttttttatcggctattcatcaccagatcattgaaaatcaactggatacagaaacaataactattagttatgaat

SEQ ID NO: 535130 - DNA, 75 bp, synthetic construct
  source 1..75: mol_type = other DNA
agacggagctggccgccggtcacctgttgctgagctacaaatacacgccgccgccaccgctggagcggctgacgt

SEQ ID NO: 535131 - DNA, 75 bp, synthetic construct
  source 1..75: mol_type = other DNA
gatctctaccactatcgctttcgttcgtgccctgaacgtaatgctgaagaacaagtcgatcaaagacagactggt

SEQ ID NO: 535132 - DNA, 75 bp, synthetic construct
  source 1..75: mol_type = other DNA
actttcggtatggaaggtctgttccgccagattggtatttacagcccgaacggtcagcagtacaccccgcaggac

SEQ ID NO: 535133 - DNA, 75 bp, synthetic construct
  source 1..75: mol_type = other DNA
gaaattccagctggaggaaatatgccgcctgttccgggtgccgatgcacatggtgcagaacactgatcgctcgac

SEQ ID NO: 535134 - DNA, 75 bp, synthetic construct
  source 1..75: mol_type = other DNA
aaagttcagctgctgggttccggttctattctgcgtcacgtccgtgaagcagcacagatcctggcgaaagattac

SEQ ID NO: 535135 - DNA, 75 bp, synthetic construct
  source 1..75: mol_type = other DNA
gctgaacgaaaactaccacatgccggcaatgccggaaggtgctgaggaaggtatccgtaaaggtatctacaaact

SEQ ID NO: 535136 - DNA, 75 bp, synthetic construct
  source 1..75: mol_type = other DNA
agaacgtttactactacatcaccacgctgaacgaaaactatcacatgccggcaatgccggaaggtgctgaggaag

SEQ ID NO: 535137 - DNA, 75 bp, synthetic construct
  source 1..75: mol_type = other DNA
gctcacgccggatgcttatgagcgcatgaagagggattttgaggagcgtcatcttgggctgggtaatgcgcaccg

SEQ ID NO: 535138 - DNA, 75 bp, synthetic construct
  source 1..75: mol_type = other DNA
gcggataaaaagcagatacagtgcgtggtaagaccgctgcaaattctgcgtgctgacgggacgtgggaaaatatt

SEQ ID NO: 535139 - DNA, 75 bp, synthetic construct
  source 1..75: mol_type = other DNA
gagctggtggtcacctgtctgtgcctgaggggaaacttttacgcctacaaagtgaaagcatttggcgaagtggct

SEQ ID NO: 535140 - DNA, 75 bp, synthetic construct
  source 1..75: mol_type = other DNA
cctacaaggtaaaggcactgggggaagtggtggagcttcttccgatagatccgggctgtgtggaaccgaagctga

SEQ ID NO: 535141 - DNA, 75 bp, synthetic construct
  source 1..75: mol_type = other DNA
gcgtcagggtgctggcagagtctgttggtatgctgccctgcagtctctacaaaatcagcggtaccctgaaaacac

SEQ ID NO: 535142 - DNA, 75 bp, synthetic construct
  source 1..75: mol_type = other DNA
gtgtatctgacaccgatgaacatgaccaccagtccctctgctggcgatgacaacggtaagaaaaaggagagtgga

SEQ ID NO: 535143 - DNA, 75 bp, synthetic construct
  source 1..75: mol_type = other DNA
ggcggtacttccggtcgtaccaccctgaacggtgaaggtctgcagcacgaagacggtcacagccacattcagtcg

SEQ ID NO: 535144 - DNA, 75 bp, synthetic construct
  source 1..75: mol_type = other DNA
atgaccgttatttatcagaccaccatcacccgtatcggcgcgagtgccactgacgccctcagcgaccagatgctc

SEQ ID NO: 535145 - DNA, 75 bp, synthetic construct
  source 1..75: mol_type = other DNA
gaccgctgttggcagcgtggcggaagacaaccttcgcgaactgggtcatgtcaccctgcgcttcgatggtttaaa

SEQ ID NO: 535146 - DNA, 75 bp, synthetic construct
  source 1..75: mol_type = other DNA
tttgaagcctacgccacggggatcaactggggaatttactctcccaatgactgccgcgacctggaagatatgaat

SEQ ID NO: 535147 - DNA, 75 bp, synthetic construct
  source 1..75: mol_type = other DNA
ttgcagaaaagctgtgatatggcgcaagtctctgccgattacaatgcgctgtttattggtgatgaatgtgccgta

SEQ ID NO: 535148 - DNA, 75 bp, synthetic construct
  source 1..75: mol_type = other DNA
caccggcgaacgtctgcataaactgatctccacgcatcccaatggctatatgacgccgcaggagttctgggagct

SEQ ID NO: 535149 - DNA, 75 bp, synthetic construct
  source 1..75: mol_type = other DNA
tgtcgtctgttccgggtgccattgcacatggtgcagaacaccgatcgcgccaccttcaacaatatcgaagaactg

SEQ ID NO: 535150 - DNA, 75 bp, synthetic construct
  source 1..75: mol_type = other DNA
agcgaccgaagagcacggggccagactgttcagcaatggcgcggtgacgtcgggtgtgttgcgtacagagcagac

SEQ ID NO: 535151 - DNA, 75 bp, synthetic construct
  source 1..75: mol_type = other DNA
gcgcacgctgacgctggacggtctggtggggctgaatcccatcgcctatgcccgcgaggcaatatcgctggcggc

SEQ ID NO: 535152 - DNA, 75 bp, synthetic construct
  source 1..75: mol_type = other DNA
gagcagagcaaagagatctctaccactatcgctttcgttcgtgccctgaacgtaatgctgaagaacaagtcgatc

SEQ ID NO: 535153 - DNA, 75 bp, synthetic construct
  source 1..75: mol_type = other DNA
gtgggactgaatcccatcgcctatgcccgtgaggcaatatcgctggcagctgcgaccgaagagcacggggccaga

SEQ ID NO: 535154 - DNA, 75 bp, synthetic construct
  source 1..75: mol_type = other DNA
ttgtgccgtatctgacccgtattgaacagcggatcaatacagggctggtcagggagagcaaacaggggaagtttt

SEQ ID NO: 535155 - DNA, 75 bp, synthetic construct
  source 1..75: mol_type = other DNA
gagctggttattgtctgcctgtgtctgcgggggaatttttacgcctacaaggtgaaggcgctgggggaagtagtg

SEQ ID NO: 535156 - DNA, 75 bp, synthetic construct
  source 1..75: mol_type = other DNA
gaaagcagatcagcagtcagcgggccatgcgactgacggcggttttttcctgcgtcagggtgctggcggagtcgg

SEQ ID NO: 535157 - DNA, 75 bp, synthetic construct
  source 1..75: mol_type = other DNA
tgatagcaaacaacctggtattcaattacctggactacttactttggtgtcgtgacagaaataaagctgaggtag

SEQ ID NO: 535158 - DNA, 75 bp, synthetic construct
  source 1..75: mol_type = other DNA
cctactctggtttataaacactggttgaatggagctttgtactatctgtttaatgcccattccgctgaaaaccag

SEQ ID NO: 535159 - DNA, 75 bp, synthetic construct
  source 1..75: mol_type = other DNA
tggacaaaaattcaaatagctacgcatgaacaagccatgttaatggtgttttttaaggactcgaataagggtttt

SEQ ID NO: 535160 - DNA, 75 bp, synthetic construct
  source 1..75: mol_type = other DNA
tagaagcggcgcgtgtgctggaaagtctgcacggcgcgctggctgctgatgccgcgctgttaagcgccgcagaac

SEQ ID NO: 535161 - DNA, 75 bp, synthetic construct
  source 1..75: mol_type = other DNA
ttttcttataagtggaaaggggtctggcgacatcatagaggaaattgacaagctaagtgcagagctgagaaggaa

SEQ ID NO: 535162 - DNA, 75 bp, synthetic construct
  source 1..75: mol_type = other DNA
gccctagctggacaacattcaatacagacagaaaaaaaatagctgaactgaaagcacgtatcacactccctactc

SEQ ID NO: 535163 - DNA, 75 bp, synthetic construct
  source 1..75: mol_type = other DNA
atggacaatagttctctgttgttctggtgcttatatatcacatcctttttcggcgcatttgttattacccggtgg

SEQ ID NO: 535164 - DNA, 75 bp, synthetic construct
  source 1..75: mol_type = other DNA
ccgttatttgccattttcatgcccgctaaatactttcgttactgatgctgtccgctttccaccatttcatcatca

SEQ ID NO: 535165 - DNA, 75 bp, synthetic construct
  source 1..75: mol_type = other DNA
cctgtatagcgttacagcactggcatatgctgcatccgtggattttgcacgcaccaatgggcgtatctcgttcaa

SEQ ID NO: 535166 - DNA, 75 bp, synthetic construct
  source 1..75: mol_type = other DNA
tcgcagcatcagcaatcccattttgcggtctgagcaatggattatgacacgctggaacaataaacaactgccggt

SEQ ID NO: 535167 - DNA, 75 bp, synthetic construct
  source 1..75: mol_type = other DNA
tcctgatggcaacgtgaataactggctaatgaatggcggacaatggttcttcatgctggacgctgatcaggaaat

SEQ ID NO: 535168 - DNA, 75 bp, synthetic construct
  source 1..75: mol_type = other DNA
atagatggacagcaaacctgtgtcacccttgggtcggcggttattttttccgcaatattattgccaggtatgcag

SEQ ID NO: 535169 - DNA, 75 bp, synthetic construct
  source 1..75: mol_type = other DNA
tacattcgcgagcaggcgggcattcctgatcgtagcgataaccgcgttcagcgtgaactgctggatgccgccatt

SEQ ID NO: 535170 - DNA, 75 bp, synthetic construct
  source 1..75: mol_type = other DNA
gtaaaaataatacccccgtcacaacgcccgggatacttgcggaagaacttgggttgtcatacgacacctataccg

SEQ ID NO: 535171 - DNA, 75 bp, synthetic construct
  source 1..75: mol_type = other DNA
gcggtagcggtacgccgttcgatcagctccagctctgtacgacgctgggggtagcaaaaatcaacgtgggggcgg

SEQ ID NO: 535172 - DNA, 75 bp, synthetic construct
  source 1..75: mol_type = other DNA
tttggcgcaccatggcaccgctaacccgcgatgctattagtgcaatgtgggaagagctggaagaagatcctgaag

SEQ ID NO: 535173 - DNA, 75 bp, synthetic construct
  source 1..75: mol_type = other DNA
actttctgatcaggcttatgcgcgtatcaaaaaggattttgaggaacggcatgtcgggctgggaaattctcatcg

SEQ ID NO: 535174 - DNA, 75 bp, synthetic construct
  source 1..75: mol_type = other DNA
gtgtggagccgaagctgaactgtcagtggcagccggtttatcaggtgacatttccggatggttctgtggatgtgc

SEQ ID NO: 535175 - DNA, 75 bp, synthetic construct
  source 1..75: mol_type = other DNA
caggcagaacaggagaatgacatgaacatattaaaaaaaattatgcagcgtctgtgcggttgcggaaagcatgat

SEQ ID NO: 535176 - DNA, 75 bp, synthetic construct
  source 1..75: mol_type = other DNA
attgatattattgaccccaaatggggaatgcagattgaatcaagactgagagaatttattcgtagtcatttaatt

SEQ ID NO: 535177 - DNA, 75 bp, synthetic construct
  source 1..75: mol_type = other DNA
acagtaactcttggaataatatgaatggctatatatcttccttttgtatgctaataaatgaaaaatctgcaaaaa

SEQ ID NO: 535178 - DNA, 75 bp, synthetic construct
  source 1..75: mol_type = other DNA
gtgtggaaccgaagctgaacagccagtggcagccggtttatcaggtgacgtttccggatggttccgtggatgtgt

SEQ ID NO: 535179 - DNA, 75 bp, synthetic construct
  source 1..75: mol_type = other DNA
gtgtggtaccgaagcttaacagtagctgggagccgatctatcaggtcacattcccggatggctccacggatgtac

SEQ ID NO: 535180 - DNA, 75 bp, synthetic construct
  source 1..75: mol_type = other DNA
gaaagcagatcagcagtcagcgggccatgcgactgacggcggttttttcctgcgtcagagtgctggcagagtcgg

SEQ ID NO: 535181 - DNA, 75 bp, synthetic construct
  source 1..75: mol_type = other DNA
tcgacgcttaccagaagcgtaagcgccgtgaaggtaaacgcgtacatcctacgaccctgcattacgcctgggccc

SEQ ID NO: 535182 - DNA, 75 bp, synthetic construct
  source 1..75: mol_type = other DNA
aggtaaacgcgtgcatcccacaaccctgcattacgtctgggcccgggagtttggggagtgcaaaggtaaaaaaca

SEQ ID NO: 535183 - DNA, 75 bp, synthetic construct
  source 1..75: mol_type = other DNA
gctggaacgtgctggctatctggcgaaggagcataccaaagctcgcggcaccggtgagcgcaactttggctgcag

SEQ ID NO: 535184 - DNA, 75 bp, synthetic construct
  source 1..75: mol_type = other DNA
gaaaccgggcgacagtatggatgctcagcatccggtgctgaaaaaagagccttatattgttgttctggtggatga

SEQ ID NO: 535185 - DNA, 75 bp, synthetic construct
  source 1..75: mol_type = other DNA
tgccgctggaaacctgcttacaggcggtcagtgagcaaagtgaaaaactgcatgtgaaaagtttgggaatggcgc

SEQ ID NO: 535186 - DNA, 75 bp, synthetic construct
  source 1..75: mol_type = other DNA
aaaacactatcacctgatgctgctggtcaaccgggatacctggtgtcgtgccggtgattaccgcgctccgggatc

SEQ ID NO: 535187 - DNA, 75 bp, synthetic construct
  source 1..75: mol_type = other DNA
aacggacgcagctgtgatatcccgcttcatcaatgccctgaaagcccgaatctacgcttaccagaaacgtaagct

SEQ ID NO: 535188 - DNA, 75 bp, synthetic construct
  source 1..75: mol_type = other DNA
aacggacgcagctgtgatatcccgcttcatcaatgccctgaaagcccgaatcaacgcttaccagaagcgtaagcc

SEQ ID NO: 535189 - DNA, 75 bp, synthetic construct
  source 1..75: mol_type = other DNA
aacggacgcagctgtgatatcccgcttcatcaatgccctgaaagcccgaatcaacgcttaccagaaccgtaagcg

SEQ ID NO: 535190 - DNA, 75 bp, synthetic construct
  source 1..75: mol_type = other DNA
gctggaacgcgctgactatctggcgaaggagcataccaaagctcacggcaccggtgagcgcaactttggttgcag

SEQ ID NO: 535191 - DNA, 75 bp, synthetic construct
  source 1..75: mol_type = other DNA
caacggacgcagctgtgatatcccgcttcatcaatgccctgaaagcccgaatcaacgcttaccagaagcgtaagc

SEQ ID NO: 535192 - DNA, 75 bp, synthetic construct
  source 1..75: mol_type = other DNA
aacggacgcagctgtgatatcccgcttcatcaatgccctgaaagcccgaatctacgcttaccagaatcgtaagca

SEQ ID NO: 535193 - DNA, 75 bp, synthetic construct
  source 1..75: mol_type = other DNA
atcagcagccgcaacaaccggtagcgccacagccgcagtatcaacagccgcaacaaccggtagcgccacagccgc

SEQ ID NO: 535194 - DNA, 75 bp, synthetic construct
  source 1..75: mol_type = other DNA
gatggaagcgcaggggattgtcagcgaacaggggcacaacggaaatcgtgaagtgctggccccaccgccatttga

SEQ ID NO: 535195 - DNA, 75 bp, synthetic construct
  source 1..75: mol_type = other DNA
cgaaaaaattgctgaagccgatcgcatgatgcgtccgattccagacccgtactggaagccgggtgatagtatgga

SEQ ID NO: 535196 - DNA, 75 bp, synthetic construct
  source 1..75: mol_type = other DNA
ctggcgatcagtacaacgatgatgaaatcgatgcgatgcagcaggatgaactggcacgtcagttcgcccagacac

SEQ ID NO: 535197 - DNA, 75 bp, synthetic construct
  source 1..75: mol_type = other DNA
caaaacgcctcccgcgatgcggtgattaaattacagcgtagcgagcgggggattgagtgggggctgtatgccatc

SEQ ID NO: 535198 - DNA, 75 bp, synthetic construct
  source 1..75: mol_type = other DNA
cattggttataaccgtgcagcgcgtattatcgaacagatggaagcgcaggggattgtcagtgaacaggggcacaa

SEQ ID NO: 535199 - DNA, 75 bp, synthetic construct
  source 1..75: mol_type = other DNA
gattttgaattttcgccaatgaaagcgttgctggatgatggtccacacgaaccgctgtttacgccaattgttgaa

SEQ ID NO: 535200 - DNA, 75 bp, synthetic construct
  source 1..75: mol_type = other DNA
cggttgttggtttgcctggcgtcatcagtccagtgacgaatacattgattattttgccgtttcgctacgcatcat

SEQ ID NO: 535201 - DNA, 75 bp, synthetic construct
  source 1..75: mol_type = other DNA
ctggcagccgtggcgctggtactgggcaccgttgtactgattaagatgaagcgcacccaatacatctgggtaact

SEQ ID NO: 535202 - DNA, 75 bp, synthetic construct
  source 1..75: mol_type = other DNA
cgcaggcgatccggtcgttgccgatctggcaaaaatgccgcatttgttggttgcgggcactaccggctccggtaa

SEQ ID NO: 535203 - DNA, 75 bp, synthetic construct
  source 1..75: mol_type = other DNA
gccgcaacccgttgaacagcagcctgttgtggagcctgaacccgttgtagaagagacaaaacccgcgcgtccgcc

SEQ ID NO: 535204 - DNA, 75 bp, synthetic construct
  source 1..75: mol_type = other DNA
gcgggttataacgaaaaaattgctgaagccgatcgcatgatgcgtccgattccagacccgtactggaagccgggt

SEQ ID NO: 535205 - DNA, 75 bp, synthetic construct
  source 1..75: mol_type = other DNA
aaaatgctggagctttcggtttatgaaggcattccgcatctgttaacggaagtcgttaccgacatgaaagatgct

SEQ ID NO: 535206 - DNA, 75 bp, synthetic construct
  source 1..75: mol_type = other DNA
tccggggtcactggccgggatgattaaacaggcctggtgcagtgccctgggggtggatgccgggccttatgccac

SEQ ID NO: 535207 - DNA, 75 bp, synthetic construct
  source 1..75: mol_type = other DNA
tatgctgatacacaagatttatacagtctgccagagaaagcggcggatatcataacgggtggtctggatggttga

SEQ ID NO: 535208 - DNA, 75 bp, synthetic construct
  source 1..75: mol_type = other DNA
gcgtgccgaaagatgttcaaatcttctttccgatggcggctttgctaggcgcgttgctcgggttggggatgttgg

SEQ ID NO: 535209 - DNA, 75 bp, synthetic construct
  source 1..75: mol_type = other DNA
ggcgccgggatgtataccctgcttagcgtgccgaaagatgttcaaatcttctttccgatggcggctttgctaggc

SEQ ID NO: 535210 - DNA, 75 bp, synthetic construct
  source 1..75: mol_type = other DNA
tatcgcctgacgtcacgttatcgccattatgccgcctttgagcgggcaaccttcgaacagggcaagccgacacag

SEQ ID NO: 535211 - DNA, 75 bp, synthetic construct
  source 1..75: mol_type = other DNA
ccgctgatgtttgttatgccgagaaagtagcgcaggaaaaaggctttttctatcgcctgacgtcacgttatcgcc

SEQ ID NO: 535212 - DNA, 75 bp, synthetic construct
  source 1..75: mol_type = other DNA
cgccagcagatggctgggtgaccaacctcaacgtctataccggtgagtttattactcgaggatcaacggcggttg

SEQ ID NO: 535213 - DNA, 75 bp, synthetic construct
  source 1..75: mol_type = other DNA
gcgtagtcactattttgctgacggcagtggtgccgaaaatcatcgaacagtttgatcatctcggacacgcgctgc

SEQ ID NO: 535214 - DNA, 75 bp, synthetic construct
  source 1..75: mol_type = other DNA
ctgcgctgggataaaaccctgctgcgcctgcctgttatcgggcgggtcgctcgcgggctaaatacggcgcgcttt

SEQ ID NO: 535215 - DNA, 75 bp, synthetic construct
  source 1..75: mol_type = other DNA
cactggcaacatcgttttttatctattatatgcggtttatatcgacaagggaatttgggaaatatttgatatgtg

SEQ ID NO: 535216 - DNA, 75 bp, synthetic construct
  source 1..75: mol_type = other DNA
aacagcggcagcgcctgaaatcacgattgttgcaggccatgctctatccgctggtattgctggtggtggcaacgg

SEQ ID NO: 535217 - DNA, 75 bp, synthetic construct
  source 1..75: mol_type = other DNA
aacgtgttccggtacgtattcgtctcgacaaccagcaagagaacatctggcctgcgggcaccactgctacagtgg

SEQ ID NO: 535218 - DNA, 75 bp, synthetic construct
  source 1..75: mol_type = other DNA
ttcatcaatgccctgaaagcccgaatcgacgcttaccagaagcgtaagcgccgtgaaggtaaacgcgtacatccc

SEQ ID NO: 535219 - DNA, 75 bp, synthetic construct
  source 1..75: mol_type = other DNA
gttgcacgcactggatgttcatccccgtctgacggcattgcgggttgatctgcgtctcccggatgtaccggcagc

SEQ ID NO: 535220 - DNA, 75 bp, synthetic construct
  source 1..75: mol_type = other DNA
ctggcggagttgcggctgttctcgccaatgatgctgtacatgatcgcctccggcgaacagagcggcgaactggaa

SEQ ID NO: 535221 - DNA, 75 bp, synthetic construct
  source 1..75: mol_type = other DNA
ttcatcaatgccctgaaagcccgaatcgacgcttatcagaaacgtaagcatcgggaaggtaaacgcgtgcattcc

SEQ ID NO: 535222 - DNA, 75 bp, synthetic construct
  source 1..75: mol_type = other DNA
tccggggtcactggccggaatgattgaacaggcctggtgcagtgccctgggggtggatgccgggccttatgccac

SEQ ID NO: 535223 - DNA, 75 bp, synthetic construct
  source 1..75: mol_type = other DNA
tccgggttcactggccggtatgattgaacaggcctggtgcagtgccctgggggtggatgccgggccttatgccac

SEQ ID NO: 535224 - DNA, 75 bp, synthetic construct
  source 1..75: mol_type = other DNA
tccgggatcactggccgggatgattgaacaggcctggtgcagtgccctgggggtggatgccgggccttatgccac

SEQ ID NO: 535225 - DNA, 75 bp, synthetic construct
  source 1..75: mol_type = other DNA
cgatgatgctgtacatgatcgcctccggcgaacagagcggtgaactggaaaccatgcttgaacaggccgcagtca

SEQ ID NO: 535226 - DNA, 75 bp, synthetic construct
  source 1..75: mol_type = other DNA
aaaacactatcacctgatgctgctggtcaaccgggatacctggtgtcgtgccggtgattaccgcgctccggagtc

SEQ ID NO: 535227 - DNA, 75 bp, synthetic construct
  source 1..75: mol_type = other DNA
ggtgtcgtgccggcgattaccgcgctccggggtcactggccgggatgattaaacaggcctggtgcagtgccctgg

SEQ ID NO: 535228 - DNA, 75 bp, synthetic construct
  source 1..75: mol_type = other DNA
gtgaagttggcgctgcgcttgatgacggctacaagcagggcgtgcttccacagcgtccggctttagtgaacctgc

SEQ ID NO: 535229 - DNA, 75 bp, synthetic construct
  source 1..75: mol_type = other DNA
aacatctcaaccaaagtctttaatagtggattaggtatttccgtattccgcgacaactccacccgtacccgcttc

SEQ ID NO: 535230 - DNA, 75 bp, synthetic construct
  source 1..75: mol_type = other DNA
cttcccgatggcggccctgctgggcgcgttgctcggactggggatgctggcacagcgcagcgaactggtggtgat

SEQ ID NO: 535231 - DNA, 75 bp, synthetic construct
  source 1..75: mol_type = other DNA
tgagaaatgggtgacggatacggatgcacagcatagcgccgcagtagaagcggcagaagcacagcgccagtcact

SEQ ID NO: 535232 - DNA, 75 bp, synthetic construct
  source 1..75: mol_type = other DNA
tgagaaatgggtgacggataccgatgcacagcatagcggcgcagtagaagcggcagaagcacagcgccagtcact

SEQ ID NO: 535233 - DNA, 75 bp, synthetic construct
  source 1..75: mol_type = other DNA
tgagaaatgggtgacggataccgatgcacagcatagcgccgcagtagaagccgcagaagcacagcgccagtcact

SEQ ID NO: 535234 - DNA, 75 bp, synthetic construct
  source 1..75: mol_type = other DNA
ctgcagaagcacagcgccagtcgctgattgatcctgcaatggcttccattagtctgattcaactgaaattccagg

SEQ ID NO: 535235 - DNA, 75 bp, synthetic construct
  source 1..75: mol_type = other DNA
ctgcagaagcacagcgccagtcgctgattgatactgcaatggcttccattagtctgattcaactgaaattacagg

SEQ ID NO: 535236 - DNA, 75 bp, synthetic construct
  source 1..75: mol_type = other DNA
cagcagaagcacagcgccagtcgctgattgattctgcaatggcttccattagtctgattcaactgaaattgcagg

SEQ ID NO: 535237 - DNA, 75 bp, synthetic construct
  source 1..75: mol_type = other DNA
atgcgtcccgcgactatcgccccgttaccgccatacgataaatgggatggtgagaaatgggtgacggatactgaa

SEQ ID NO: 535238 - DNA, 75 bp, synthetic construct
  source 1..75: mol_type = other DNA
atgcgtcccgcgactatcgcccccttagcgccatacgataaatgggatggtgagaaatgggtgacggatactgaa

SEQ ID NO: 535239 - DNA, 75 bp, synthetic construct
  source 1..75: mol_type = other DNA
atgcgtcccgcgactatcgcccccttaccgccatacgataaatgggatggtgagaaatgggtgaccgatactgaa

SEQ ID NO: 535240 - DNA, 75 bp, synthetic construct
  source 1..75: mol_type = other DNA
tgagaaatgggtgacggataccgatgcacagcatagcgtcgcagtagaagctgcagaagcacagcgccagtcact

SEQ ID NO: 535241 - DNA, 75 bp, synthetic construct
  source 1..75: mol_type = other DNA
tgagaaatgggtgacggataccgatgcacagcatagcgacgcagtagaagcagcagaagcacagcgccagtcact

SEQ ID NO: 535242 - DNA, 75 bp, synthetic construct
  source 1..75: mol_type = other DNA
tgagaaatgggtgacggatacagatgcacagcatagcgccgcagtagaagcagcagaagcacagcgccagtcact

SEQ ID NO: 535243 - DNA, 75 bp, synthetic construct
  source 1..75: mol_type = other DNA
ctgcagaagcacagcgccagtcgctgattgatgctgcaatggcttccattagtctgattcaactgaaattgcagg

SEQ ID NO: 535244 - DNA, 75 bp, synthetic construct
  source 1..75: mol_type = other DNA
ttggtacgcagcagttctggctgcgtctgccggggcaggaacgccgtgtgctggacgcgcacttttccccgatgg

SEQ ID NO: 535245 - DNA, 75 bp, synthetic construct
  source 1..75: mol_type = other DNA
atggacgacctgacccaacgctactacgaagccgaaatgcgctacctgcgtgaagcggggaaagaatttgcgcag

SEQ ID NO: 535246 - DNA, 75 bp, synthetic construct
  source 1..75: mol_type = other DNA
ctggacgcgcacttttccccgatgggttttgatgacgatgaccgactgtggccgaaaggcgagtcggcgttcagc

SEQ ID NO: 535247 - DNA, 75 bp, synthetic construct
  source 1..75: mol_type = other DNA
gatgattgttatgaagcgcacgctacagcagcttctgggcggcgcaccgtttattatcagcggtgcctgcgggat

SEQ ID NO: 535248 - DNA, 75 bp, synthetic construct
  source 1..75: mol_type = other DNA
tggtgcctttagcgccgctttccgttgtgtatgtattattagcttatgccatctggattatttatggacttattg

SEQ ID NO: 535249 - DNA, 75 bp, synthetic construct
  source 1..75: mol_type = other DNA
tggagcgcctgttcgagggcttcgcttttttaatgggccgcctgcgcgaaaagctggacgacgatctgccggaac

SEQ ID NO: 535250 - DNA, 75 bp, synthetic construct
  source 1..75: mol_type = other DNA
cctgacttaactctgtgctggattacattgacgcggtgacggcaacagataccagcaccgcgccggatgtcatct

SEQ ID NO: 535251 - DNA, 75 bp, synthetic construct
  source 1..75: mol_type = other DNA
ccagacttaacactgtgctggattacattgacgcggtgacggcaacagataccagcaccgcgccggatgtcatct

SEQ ID NO: 535252 - DNA, 75 bp, synthetic construct
  source 1..75: mol_type = other DNA
cggcagaagcacagcgccagtcgctgattgattctgcaatggcttccattagtctgattcaactgaaattacagg

SEQ ID NO: 535253 - DNA, 75 bp, synthetic construct
  source 1..75: mol_type = other DNA
ccggacttaacgctgtgctggattacattgacgcggtgacggcaacagataccagcaccgcgccggatgtcatct

SEQ ID NO: 535254 - DNA, 75 bp, synthetic construct
  source 1..75: mol_type = other DNA
cccgacttaaccctgtgctggattacattgacgcggtgacggcaacagataccagcaccgcgccggatgtcatct

SEQ ID NO: 535255 - DNA, 75 bp, synthetic construct
  source 1..75: mol_type = other DNA
atgcgtcccgcgactatcgcccccttaacgccatacgataaatgggatggtgagaaatgggtgacagatactgaa

SEQ ID NO: 535256 - DNA, 75 bp, synthetic construct
  source 1..75: mol_type = other DNA
aacgcggcgaactggtcgcaaaagccattgatgtcttcccgcagtttgtccgtttcccgaatacgctggaagaag

SEQ ID NO: 535257 - DNA, 75 bp, synthetic construct
  source 1..75: mol_type = other DNA
ctccgctttccccatcgccaccggcacttactacaaagtggactactccgctggagtggacatttctcgctataa

SEQ ID NO: 535258 - DNA, 75 bp, synthetic construct
  source 1..75: mol_type = other DNA
agggcgatgaaactgaagcgacgcgttgtttacgtctggcggcgaccggcgatcgcaccattaacatccacagtt

SEQ ID NO: 535259 - DNA, 75 bp, synthetic construct
  source 1..75: mol_type = other DNA
atgtgcatttcaaatttttattacaggcgtaaaatatcagataaacttatcaatgatgtatataatgcaataaat

SEQ ID NO: 535260 - DNA, 75 bp, synthetic construct
  source 1..75: mol_type = other DNA
catttttgccgataaccaacctgattttacctggctggatgcttatgaagagaaacgtttcgagcaatatttcct

SEQ ID NO: 535261 - DNA, 75 bp, synthetic construct
  source 1..75: mol_type = other DNA
gtctggcggcgaccggcgatcgcaccattaacattcacagttattacaacgatcagccggttgattatctcttct

SEQ ID NO: 535262 - DNA, 75 bp, synthetic construct
  source 1..75: mol_type = other DNA
ggcggatattctcgccacgcgcaaattccacccgtgggaaggcggagaagggaaggtcaccagccagtttatcct

SEQ ID NO: 535263 - DNA, 75 bp, synthetic construct
  source 1..75: mol_type = other DNA
cgcgacgttaacgctctgatgaccgccgggcaactgattaactggggaatgcccaccctggcggcagagatgctg

SEQ ID NO: 535264 - DNA, 75 bp, synthetic construct
  source 1..75: mol_type = other DNA
cattgacgtgttcccgaagtttgttcgtttccctaatacgctggaagaagtcgcggcactggagagtattgaaga

SEQ ID NO: 535265 - DNA, 75 bp, synthetic construct
  source 1..75: mol_type = other DNA
gttaacgccctgatgaccgccgggcaactgattaactggggcatgcccgccctggcggcagatatgctgaacgca

SEQ ID NO: 535266 - DNA, 75 bp, synthetic construct
  source 1..75: mol_type = other DNA
ctgacgccagcgaccgccattcagggcgtgttgcatggtatcaatcctgacagactaaccattgaactctccgat

SEQ ID NO: 535267 - DNA, 75 bp, synthetic construct
  source 1..75: mol_type = other DNA
aaccaatcaggaagtgctttgcctgcataacctgctgctggtgttaagtggtcgtcaggacaacgcgcgtttgca

SEQ ID NO: 535268 - DNA, 75 bp, synthetic construct
  source 1..75: mol_type = other DNA
cacttcagaatgtattttttgaaagatttttaaaaatacgcagaccattaaatgtccaaagagattatcagggag

SEQ ID NO: 535269 - DNA, 75 bp, synthetic construct
  source 1..75: mol_type = other DNA
gcgctggccgctttcgatagcctggacgagaaccggaaaaaccattggctgcttgaatctgcaaagttaggttag

SEQ ID NO: 535270 - DNA, 75 bp, synthetic construct
  source 1..75: mol_type = other DNA
tctggaatttatgccggataacgttatcgccctgggtgacttcaaacgcggttattacatcgttgatcatgaaac

SEQ ID NO: 535271 - DNA, 75 bp, synthetic construct
  source 1..75: mol_type = other DNA
ggttataccgttatccccgaactgaacaccgaaatcatgcgaatgctggcggatgagtccaccatgcgccgcatc

SEQ ID NO: 535272 - DNA, 75 bp, synthetic construct
  source 1..75: mol_type = other DNA
atgcgtcccgcgactatcgccccattaccgccatacgataaatgggatggtgagaaatgggtgacagatactgaa

SEQ ID NO: 535273 - DNA, 75 bp, synthetic construct
  source 1..75: mol_type = other DNA
ggttcagcaggcggttgagcgtagtacagacgtgcaggcgcaggagaactatgacagcgccacgcggctggatga

SEQ ID NO: 535274 - DNA, 75 bp, synthetic construct
  source 1..75: mol_type = other DNA
gatatcctcctcggcggtggcgcgcagcaggcacagtcggcgccgaacaaaccgcgtccggtgatagccaacggc

SEQ ID NO: 535275 - DNA, 75 bp, synthetic construct
  source 1..75: mol_type = other DNA
ttcctgtcttaccctcgcgcggccactgccgacaaaacccgtccgttcggtacgctggagaagatggaagcggct

SEQ ID NO: 535276 - DNA, 75 bp, synthetic construct
  source 1..75: mol_type = other DNA
gaaagcgaaataccgcaaaaatgccgtctgggtgatgaactcgggcacggcagggacactacagaagctgaaaaa

SEQ ID NO: 535277 - DNA, 75 bp, synthetic construct
  source 1..75: mol_type = other DNA
gaacatttcgtacagcctttacgttcagtgagttagctggcttggatgtaaccactcgttcatcgataggaattt

SEQ ID NO: 535278 - DNA, 75 bp, synthetic construct
  source 1..75: mol_type = other DNA
tggcggtgcgaccgttaaccacggtgaagagggtaaggcacgcgaacagaccagcaccccgcagattaacgaggt

SEQ ID NO: 535279 - DNA, 75 bp, synthetic construct
  source 1..75: mol_type = other DNA
ttcgcactgtatgccgatatccacttattcactcaactgaccttaattctgcaacctacaggaaagtgcctgcaa

SEQ ID NO: 535280 - DNA, 75 bp, synthetic construct
  source 1..75: mol_type = other DNA
aactgaatgaagtcagtatccgcctgtatccgatctacgcttacccgaaaaccactcaggaaattatcgattttt

SEQ ID NO: 535281 - DNA, 75 bp, synthetic construct
  source 1..75: mol_type = other DNA
actcatctcccgaatgacagaggaagagcgaagtaaccttatcgaagcactcaaaacatcttcaggtgtaaaata

SEQ ID NO: 535282 - DNA, 75 bp, synthetic construct
  source 1..75: mol_type = other DNA
gctgcagttgaagaactgaaagcgctgtccgtaccatgctctgactctaaagcgattgctcaggttggtaccatc

SEQ ID NO: 535283 - DNA, 75 bp, synthetic construct
  source 1..75: mol_type = other DNA
gggtcaggctaaacgtgttgtgatcaacaaagacactaccaccatcatcgatggcgtgggtgaagaagctgcaat

SEQ ID NO: 535284 - DNA, 75 bp, synthetic construct
  source 1..75: mol_type = other DNA
ttgcggatgctaattgtggagcggttatcgcggaaccattccgtcaggaagaattaaatgcgatcttacgcaaag

SEQ ID NO: 535285 - DNA, 75 bp, synthetic construct
  source 1..75: mol_type = other DNA
ggcctgggcggagaatgctcgccattatgccgatactcaggatttgtatagcttgccagagaaagccgcggatat

SEQ ID NO: 535286 - DNA, 75 bp, synthetic construct
  source 1..75: mol_type = other DNA
aaaagagcaacaaaacttattgctacaagttggatcagattttgttcgtaaaggtgtggatcgctcaattgaagc

SEQ ID NO: 535287 - DNA, 75 bp, synthetic construct
  source 1..75: mol_type = other DNA
gattatggtttggtacttaccatttactgaattatcccgccagttacagcgcgccgatatatcgttttgctgact

SEQ ID NO: 535288 - DNA, 75 bp, synthetic construct
  source 1..75: mol_type = other DNA
gtggaaaatggacggaacggtacgtcaggaagtcttcagtcgtcgcggtggcttgtggttcggtacttaccattt

SEQ ID NO: 535289 - DNA, 75 bp, synthetic construct
  source 1..75: mol_type = other DNA
tttgatgatctgatcagcatggtgccgatggggcagacgctgtttggttcgctcaacccggtacgcaccggtggg

SEQ ID NO: 535290 - DNA, 75 bp, synthetic construct
  source 1..75: mol_type = other DNA
aaggcgtggttgctggtggtggtgttgcgctgatccgcgtagcgtctaaactggctgacctgcgtggtcagaacg

SEQ ID NO: 535291 - DNA, 75 bp, synthetic construct
  source 1..75: mol_type = other DNA
cgctttcatttttggctgtttttgttttagcgggatgcagtagccaggcgccgcaaccgttgaaaaaaggtgaaa

SEQ ID NO: 535292 - DNA, 75 bp, synthetic construct
  source 1..75: mol_type = other DNA
gtggaaaatggacggtacagtccgtcaggaagtcttcagtcgccgcggcgggttgtggtttggtactttggtact

SEQ ID NO: 535293 - DNA, 75 bp, synthetic construct
  source 1..75: mol_type = other DNA
gtcaattgcagttgaacgtgacagatcgtaaaaccggacaaacttcgactattgaagtgtcgggtttacaaaata

SEQ ID NO: 535294 - DNA, 75 bp, synthetic construct
  source 1..75: mol_type = other DNA
atttttgtttctggcggcaagcgcgggctggacatcgaactggcggcaagcgacctggcgaagatccttgatgcc

SEQ ID NO: 535295 - DNA, 75 bp, synthetic construct
  source 1..75: mol_type = other DNA
ggttagatatcgaactggcagcaggcgatctggcgaagatcctcgatgcgaaatttgccgatattgctcgccgcg

SEQ ID NO: 535296 - DNA, 75 bp, synthetic construct
  source 1..75: mol_type = other DNA
aacttgagcttctcggaatggagccgagtgtttggcgatgaaaagatgacaacagcgttgttggaccgactaacc

SEQ ID NO: 535297 - DNA, 75 bp, synthetic construct
  source 1..75: mol_type = other DNA
atgatagcgataattctactcatcatccttcacatctggctctgtagacagggtggtgatcacttctggagtgaa

SEQ ID NO: 535298 - DNA, 75 bp, synthetic construct
  source 1..75: mol_type = other DNA
gtttcctgaatggaatcaaaataatgaatattgggaaagcttaggaggaagtccatatattggacctcgttatta

SEQ ID NO: 535299 - DNA, 75 bp, synthetic construct
  source 1..75: mol_type = other DNA
atggaaacgttattaccaaacgttaatacgtctgaaggttgttttgaaattggtgtcactatcagtaaccgggag

SEQ ID NO: 535300 - DNA, 75 bp, synthetic construct
  source 1..75: mol_type = other DNA
atacgtctgaagggtgttttgatattggtgttctgctcagtaaccgggagtttactgaagatgccattaaaatgc

SEQ ID NO: 535301 - DNA, 75 bp, synthetic construct
  source 1..75: mol_type = other DNA
gaaaatatgagccttatcttctcaatgataattccatactttccagaattgctcttcttgaactcggtattttcg

SEQ ID NO: 535302 - DNA, 75 bp, synthetic construct
  source 1..75: mol_type = other DNA
cactgccatatcatcgaaacaggcaacaatagttatcggtttaaagaatcaagcagaaaggctaaaacagcgagg

SEQ ID NO: 535303 - DNA, 75 bp, synthetic construct
  source 1..75: mol_type = other DNA
gattttaccagtaatcccgaaggtgcattaagcagccaggctaaaaatctgttcagcaagtatggagccttcgat

SEQ ID NO: 535304 - DNA, 75 bp, synthetic construct
  source 1..75: mol_type = other DNA
aggcatataaagaccagttagccacggcaacaggtataaggaatattgcggcattcacaaatgaactaagtaatc

SEQ ID NO: 535305 - DNA, 75 bp, synthetic construct
  source 1..75: mol_type = other DNA
atgaaaaacgcactggaacggcataaccggggcgaggcggtggtcattccggtaattttaagaaactgtgcatgg

SEQ ID NO: 535306 - DNA, 75 bp, synthetic construct
  source 1..75: mol_type = other DNA
acgcaactgggggcggagctgatagcgggattgccggaggcgctgaccagtccggggacaacggcgctgtgggaa

SEQ ID NO: 535307 - DNA, 75 bp, synthetic construct
  source 1..75: mol_type = other DNA
gcaactgtatctctggctggagaaggacaatgtgcgttttcgtacctcctggattgcggcagcgcagtactgcga

SEQ ID NO: 535308 - DNA, 75 bp, synthetic construct
  source 1..75: mol_type = other DNA
gcaggtgcaggctctgcttgagaaagatggcgtgcgtttcagcgcgacctggcaggcggcggcgcagtactgcga

SEQ ID NO: 535309 - DNA, 75 bp, synthetic construct
  source 1..75: mol_type = other DNA
gtgatctggcgaaaatgagtgagcaggagcgcaacgtttaccagcttatccgtctgcattatctggcccagttcc

SEQ ID NO: 535310 - DNA, 75 bp, synthetic construct
  source 1..75: mol_type = other DNA
acgccggttctggcacagctcgatcccggttttgtttcacgtatctggaatgacaaaaaaattacggcacaccat

SEQ ID NO: 535311 - DNA, 75 bp, synthetic construct
  source 1..75: mol_type = other DNA
ttacggtgatcagccgcctgctgaagcgtgcgtctgaagtggtgatcgccacggatgcggacagggaaggagaag

SEQ ID NO: 535312 - DNA, 75 bp, synthetic construct
  source 1..75: mol_type = other DNA
gttttgtggactgtccccacaaaagtgtaaccggctcatttaaaccgtctggtctgtttcctccggctctacaaa

SEQ ID NO: 535313 - DNA, 75 bp, synthetic construct
  source 1..75: mol_type = other DNA
aacgtgcagccgggcgacagcatcacgctggtggatcacaatcagcgtaagaatttgcagattaaaggcattgtg

SEQ ID NO: 535314 - DNA, 75 bp, synthetic construct
  source 1..75: mol_type = other DNA
acaaacctgcagcgggatttctgatttgcaggtgccgctacgtgacttgtggaatccagctacctgtccggtcag

SEQ ID NO: 535315 - DNA, 75 bp, synthetic construct
  source 1..75: mol_type = other DNA
gttaaacaaaggtgacaactgtattgtcagtggcgcagcggtggaagacaaaaaaaccagcccacctcccccgtt

SEQ ID NO: 535316 - DNA, 75 bp, synthetic construct
  source 1..75: mol_type = other DNA
attgttgcagggaaaaatggcgggaagggccggaaaaccgcgcggggcaaaaaaacggcagcaaagacgacagcg

SEQ ID NO: 535317 - DNA, 75 bp, synthetic construct
  source 1..75: mol_type = other DNA
gcaggccggagaggtgattattgccaccgatgctgaccgggaaggtgaggttatcgcccgtgagctactggcgta

SEQ ID NO: 535318 - DNA, 75 bp, synthetic construct
  source 1..75: mol_type = other DNA
aggccagcgttcgcgccgcgctggcgacgataaagcccggaagtacgactttaccctactatttagccgggcttg

SEQ ID NO: 535319 - DNA, 75 bp, synthetic construct
  source 1..75: mol_type = other DNA
ggtcattcctgtgatcttaagagagtgtgcctggcatcagttaccgttcggcagcattatggcagcgacaattga

SEQ ID NO: 535320 - DNA, 75 bp, synthetic construct
  source 1..75: mol_type = other DNA
accttgctcactaacgagggtatggctgaacatctctgggatatgttttttgagccaataaaacagcgggctcgt

SEQ ID NO: 535321 - DNA, 75 bp, synthetic construct
  source 1..75: mol_type = other DNA
taatggctggcaacgaggaggcgcaggctaaatgcgttcaggtaatgaacatcagagttaacgaactaaaacagg

SEQ ID NO: 535322 - DNA, 75 bp, synthetic construct
  source 1..75: mol_type = other DNA
gagtagattccgtttttacaccgcgttcaagcaaccttactctatctgttatagccaggataatgttgttcgaaa

SEQ ID NO: 535323 - DNA, 75 bp, synthetic construct
  source 1..75: mol_type = other DNA
atgtggcatacattacttaactggcattcgggaacagagtggtctgctgtatcggctttaggttcagttgtatcg

SEQ ID NO: 535324 - DNA, 75 bp, synthetic construct
  source 1..75: mol_type = other DNA
cgtttagaatttccaaacaccaatatagagtattttaatgaagaatggtccgaaaacgctgaatcaagtacaaga

SEQ ID NO: 535325 - DNA, 75 bp, synthetic construct
  source 1..75: mol_type = other DNA
gcgctatgggaacaatcactcgaacaggtggctcagggacacctgtctctggatgtgtttatgcaaaagcaaatc

SEQ ID NO: 535326 - DNA, 75 bp, synthetic construct
  source 1..75: mol_type = other DNA
aaagtctgtatgaaaaacataaagccaccacgtatccccggacggactgcgggtatctgccggtgtccatgcgtg

SEQ ID NO: 535327 - DNA, 75 bp, synthetic construct
  source 1..75: mol_type = other DNA
ccgggctggaagccggaacagaaacattgccgtcccttcacgaaggtgaattctgtgtggtacaggaggcaaagg

SEQ ID NO: 535328 - DNA, 75 bp, synthetic construct
  source 1..75: mol_type = other DNA
taatggctggaaacgaggaggcgcaggctaaatgcgttcaggtaatgaacataagagttaacgaactaaaacagg

SEQ ID NO: 535329 - DNA, 75 bp, synthetic construct
  source 1..75: mol_type = other DNA
agtggcaaaatccgatcccgctgtggccccggtactgaatcagctggacagggaatttgtctcgcgtgtctggaa

SEQ ID NO: 535330 - DNA, 75 bp, synthetic construct
  source 1..75: mol_type = other DNA
gataaagggagaactctgtgctctggatggtgctgaacagaaggagctgaaaaccgtacctccccgtccttttac

SEQ ID NO: 535331 - DNA, 75 bp, synthetic construct
  source 1..75: mol_type = other DNA
aatgaatcccttgctaaactaaatgcttcattaagagaagcgcttgttaaagccaaaggtcacacatccaccagc

SEQ ID NO: 535332 - DNA, 75 bp, synthetic construct
  source 1..75: mol_type = other DNA
tcagatggataacaccaagtttaatgaagcccttgctaaactaaattcaagtgtacgagaggcaatcactaaagc

SEQ ID NO: 535333 - DNA, 75 bp, synthetic construct
  source 1..75: mol_type = other DNA
cgctcttaaacaaccaagacaaccgagaaaaaatacaggtgaccgagcagtaagagcagcttatcaggctaacat

SEQ ID NO: 535334 - DNA, 75 bp, synthetic construct
  source 1..75: mol_type = other DNA
aacccaattgtcgagaaatacattaagagtcagttttacgcattaagtagtaaagctggtcagatggataacacc

SEQ ID NO: 535335 - DNA, 75 bp, synthetic construct
  source 1..75: mol_type = other DNA
aactttgctcttgataatttaaaccctgaagcagctaagaatccgaacttacaccaatcaggtattggaacagag

SEQ ID NO: 535336 - DNA, 75 bp, synthetic construct
  source 1..75: mol_type = other DNA
agacagccacgaattagcggcaacagagcaatcacagcagcttattcagcgaatatgtctaagctaaaaggtctt

SEQ ID NO: 535337 - DNA, 75 bp, synthetic construct
  source 1..75: mol_type = other DNA
atgagcaaatttacagttgatagttttatcgttgaactaggcttcaatgaaaacgttattaagggactgcaaaga

SEQ ID NO: 535338 - DNA, 75 bp, synthetic construct
  source 1..75: mol_type = other DNA
gaatacttggaacaactcactaacggatattttcaaaggttctgaagatggtttacaggacttcacaagaagctt

SEQ ID NO: 535339 - DNA, 75 bp, synthetic construct
  source 1..75: mol_type = other DNA
gagcaattacagcagcgcatagtgtgaatatgtctaagcttggtgatattaatccgctgatggctaaaatgttta

SEQ ID NO: 535340 - DNA, 75 bp, synthetic construct
  source 1..75: mol_type = other DNA
cagcttgatagtaatctgacaagttctttagggcaacttgaaagaaagcttaacaaaacttttaataagctggag

SEQ ID NO: 535341 - DNA, 75 bp, synthetic construct
  source 1..75: mol_type = other DNA
ctagcagccttgataatttaagttcagcagcggttaaaacagcaggtgcatttatcagctttcaggctgtactat

SEQ ID NO: 535342 - DNA, 75 bp, synthetic construct
  source 1..75: mol_type = other DNA
agctaaagagtctatgggtattcaaggttctgaagaactttttagaaatatgattggctattctcgtttaatggg

SEQ ID NO: 535343 - DNA, 75 bp, synthetic construct
  source 1..75: mol_type = other DNA
aaactgagattgaggatactttaaagccacttagacagccaagacaaccaagaaaagttacaggtgaccgagctg

SEQ ID NO: 535344 - DNA, 75 bp, synthetic construct
  source 1..75: mol_type = other DNA
ggaggttggtctgaaaaaagaagcatcacaacgagcggcacaattcgttttaggtgatgaaggtgctaaacgagc

SEQ ID NO: 535345 - DNA, 75 bp, synthetic construct
  source 1..75: mol_type = other DNA
ggcaggttaaacaattcactaagaacttatcacagacaacaggtacggacttagccgaaacacaatcacagtttg

SEQ ID NO: 535346 - DNA, 75 bp, synthetic construct
  source 1..75: mol_type = other DNA
gtagtctcatgacttctatgtcacatggtgttgatagcatgaccgatatttcttacaaggtacgagcgttctttg

SEQ ID NO: 535347 - DNA, 75 bp, synthetic construct
  source 1..75: mol_type = other DNA
ctggcagtcaaataccagttagcaccaccagcacaaacgcacgtcaaaactcaggatctgggggtggtcaagcag

SEQ ID NO: 535348 - DNA, 75 bp, synthetic construct
  source 1..75: mol_type = other DNA
cagctcatcagctccggcaccaaaggtgcaaaaggaagagccaatcgaagtacagccaggcaagcgcaaaattat

SEQ ID NO: 535349 - DNA, 75 bp, synthetic construct
  source 1..75: mol_type = other DNA
ttcttggtggcaatagtaccggtgctgattttctttgcctatagagcttttatgaataaccggagcgactccgaa

SEQ ID NO: 535350 - DNA, 75 bp, synthetic construct
  source 1..75: mol_type = other DNA
gagttatttaaaaaccttacaggttacgcccgtttaatgggtcgttcagatgagcagattcaaagagcattaacc

SEQ ID NO: 535351 - DNA, 75 bp, synthetic construct
  source 1..75: mol_type = other DNA
aaacccgctgtcactatggatgatgtgaaaggttggtttaatagtgcagctacaaagattgctggttttcagcat

SEQ ID NO: 535352 - DNA, 75 bp, synthetic construct
  source 1..75: mol_type = other DNA
atgagcaaatttacagttgatagttttatcgttgaattaggcttcagtgaaaacgttgttaaaggcttgcaaaga

SEQ ID NO: 535353 - DNA, 75 bp, synthetic construct
  source 1..75: mol_type = other DNA
caaaggtttcaggattaatacaaagcagcttgatagtaatctgacaagttctttagggcaacttgaaagaaaatt

SEQ ID NO: 535354 - DNA, 75 bp, synthetic construct
  source 1..75: mol_type = other DNA
gcgattcatctaagccaaatcaaattaatgagggatgggctaagattggtggttctatcgctgactggtttaatg

SEQ ID NO: 535355 - DNA, 75 bp, synthetic construct
  source 1..75: mol_type = other DNA
tctaaacgctcttggtggaactggtaaaacattaggtgaaagttttggtagcttgatgagcgatatgtcacatgg

SEQ ID NO: 535356 - DNA, 75 bp, synthetic construct
  source 1..75: mol_type = other DNA
gagctattacagcagcttactcagctaatatgtctaagctaaaaggtcttaacccaattgtcgagaaatacatta

SEQ ID NO: 535357 - DNA, 75 bp, synthetic construct
  source 1..75: mol_type = other DNA
gacgtggcggtagtgggcatccgatggtcactgtcgcatcagatatcgcgcaagctcgtacgaaaatactggcca

SEQ ID NO: 535358 - DNA, 75 bp, synthetic construct
  source 1..75: mol_type = other DNA
ggaagcccagggcaaggtatccaaagtacttatgcgcttctggcaagcagcgctggattgcgtttaggtatggga

SEQ ID NO: 535359 - DNA, 75 bp, synthetic construct
  source 1..75: mol_type = other DNA
aggcatgattgaggcggattccgcgcgtcatgcccgtcaattgttgcgtggtaaagagcttatccccgtgcacat

SEQ ID NO: 535360 - DNA, 75 bp, synthetic construct
  source 1..75: mol_type = other DNA
gcatcgaacgggtctgacacctccagcacgggcacggtagagaatccgtatgctgacgttggaatgcccagaaat

SEQ ID NO: 535361 - DNA, 75 bp, synthetic construct
  source 1..75: mol_type = other DNA
tcctgcacctccattaccttcacaaaccgacggtgcaggggggcgtggtcagctcattaactctacggggccgtt

SEQ ID NO: 535362 - DNA, 75 bp, synthetic construct
  source 1..75: mol_type = other DNA
cctcagcagtgcattgattgttggtgggggaattggtgctggtgtaacgactgcgctccatagacgaaatcagcc

SEQ ID NO: 535363 - DNA, 75 bp, synthetic construct
  source 1..75: mol_type = other DNA
tagccgcttcggtatcttcagtatatttcctatgctgttggttgtgctttatggcgttggtatttatctcactac

SEQ ID NO: 535364 - DNA, 75 bp, synthetic construct
  source 1..75: mol_type = other DNA
tggagtgaatccagattaaacatctcattgctgatgcttgaagttaagcatatggcgcgcggcaaggggctgcgt

SEQ ID NO: 535365 - DNA, 75 bp, synthetic construct
  source 1..75: mol_type = other DNA
ttgatgtggttaaaccttgtagccgctgtattttcaccaccgtcagcccagaaaaagggcaaaaacatccggcag

SEQ ID NO: 535366 - DNA, 75 bp, synthetic construct
  source 1..75: mol_type = other DNA
ctgttgaaatccctggaaagctggttgcggaaaagatgaagaccctgtcgcgacactcagagttggcgaaggcgt

SEQ ID NO: 535367 - DNA, 75 bp, synthetic construct
  source 1..75: mol_type = other DNA
attacaacatgggctgggaggattaacgggtagtggtgatagcagcgccgcgaataattcgaataacccaccagt

SEQ ID NO: 535368 - DNA, 75 bp, synthetic construct
  source 1..75: mol_type = other DNA
ccggatgacccaacctctactgaccctgatgctgccgcaagtacagctgaagctgcgacaaaagatcagttaacg

SEQ ID NO: 535369 - DNA, 75 bp, synthetic construct
  source 1..75: mol_type = other DNA
gggggggcgagagcgcagtaagtactgccaatgccgcaccaacgccgggacccgcacgtttcgtttaaatatatc

SEQ ID NO: 535370 - DNA, 75 bp, synthetic construct
  source 1..75: mol_type = other DNA
tttgaatagtttaggtgggagtggtaagagtcttggtgaagctcttggtagcttgatgagcgatatgtcaagtgg

SEQ ID NO: 535371 - DNA, 75 bp, synthetic construct
  source 1..75: mol_type = other DNA
cagcagcgcatagcgtgaatatgagcaaacttcgtgactttaatcctatgcttgagaaatattttagaagccagt

SEQ ID NO: 535372 - DNA, 75 bp, synthetic construct
  source 1..75: mol_type = other DNA
aattcaaaatcagaaaaattaaacgggatattgagcgcagttgtgataatgccgaaaaatacttctggcttttcg

SEQ ID NO: 535373 - DNA, 75 bp, synthetic construct
  source 1..75: mol_type = other DNA
tactttaaagccacttagacagccaagacagccacgaattagcggcaacagagcaatcacagcagcttattcagc

SEQ ID NO: 535374 - DNA, 75 bp, synthetic construct
  source 1..75: mol_type = other DNA
caacttgacagtaatttaacggtttctttagggcaacttgaaaggaagtttaataagacctttgacaagattgag

SEQ ID NO: 535375 - DNA, 75 bp, synthetic construct
  source 1..75: mol_type = other DNA
attaatggtgacagagcagctaatagtcttgataacctgtcttcagcagcagttaaaacagcaggtgcatttatc

SEQ ID NO: 535376 - DNA, 75 bp, synthetic construct
  source 1..75: mol_type = other DNA
acgaactcggtcacgccttgggggaaggatcgcccgtcgagcggttcgttcgccttggcgggaaggccctgctgt

SEQ ID NO: 535377 - DNA, 75 bp, synthetic construct
  source 1..75: mol_type = other DNA
aataggatttgtcatctggtcatttttcacatattatcaagaaatttaccccattttaaaaactggtgctttatt

SEQ ID NO: 535378 - DNA, 75 bp, synthetic construct
  source 1..75: mol_type = other DNA
ttctttgtcgttgatatcttcgagtatcttgattggcacatcaataatattgataatattctctgcgttcagaga

SEQ ID NO: 535379 - DNA, 75 bp, synthetic construct
  source 1..75: mol_type = other DNA
gtagtaggcgaagttaaaaccgcaacacgccccagcgtgacctggcaagacggtgctgccgatttcatgggtggc

SEQ ID NO: 535380 - DNA, 75 bp, synthetic construct
  source 1..75: mol_type = other DNA
ctataaacttcggggagtgattttagaggcccgccataccggtctggtaaaggccaatgaaaacttccaggaatg

SEQ ID NO: 535381 - DNA, 75 bp, synthetic construct
  source 1..75: mol_type = other DNA
tcacctatcttgagaagcacttcggagccactccgatcgtgccagcacacgaagccgcccagcgctcttgcgagc

SEQ ID NO: 535382 - DNA, 75 bp, synthetic construct
  source 1..75: mol_type = other DNA
actaatgcatggaataaaatacgccacgtgtgatcaagtatttttaagtgatgcagatactttcgttccacctga

SEQ ID NO: 535383 - DNA, 75 bp, synthetic construct
  source 1..75: mol_type = other DNA
tgaaaaacccaattaatgaagcggaatggcgtacaacatggggaaatattgaagcgtatgatctcagctatctaa

SEQ ID NO: 535384 - DNA, 75 bp, synthetic construct
  source 1..75: mol_type = other DNA
tcagcagccgcaacaaccggttgcaccgcagccgcagtatcagcagccacaacaaccggttgcgccgcagcagca

SEQ ID NO: 535385 - DNA, 75 bp, synthetic construct
  source 1..75: mol_type = other DNA
gagccggtggttgccgatctggcgaaaatgccgcacttgttggttgcgggactaccggttccggtaagtctgtcg

SEQ ID NO: 535386 - DNA, 75 bp, synthetic construct
  source 1..75: mol_type = other DNA
tctcacttgcggatgccacctgcgaggcaggtgtgagctggaaaggtcgagcccattcagcagcgaccgacgcta

SEQ ID NO: 535387 - DNA, 75 bp, synthetic construct
  source 1..75: mol_type = other DNA
tttggagtgtaccggatagcagattgccaaccaatgcggagaaggggttgttcaccggcatcacaaaagcaaata

SEQ ID NO: 535388 - DNA, 75 bp, synthetic construct
  source 1..75: mol_type = other DNA
agagtttcgtcgctgggtattggatattctggaccgtgaagctgaaaaaagcgctataccgccacaacctcatat

SEQ ID NO: 535389 - DNA, 75 bp, synthetic construct
  source 1..75: mol_type = other DNA
ctgggtcggcctcctgcgtcacgtagtaaacgctctgtctcaagaaatggcaaatcgtaccctgacaacgggtat

SEQ ID NO: 535390 - DNA, 75 bp, synthetic construct
  source 1..75: mol_type = other DNA
tatttatgaactggtcaacgtagcaggcacaaaattcggcaccttcaaccaaggtgacgaactgaatatgcagtc

SEQ ID NO: 535391 - DNA, 75 bp, synthetic construct
  source 1..75: mol_type = other DNA
gcccacttccggaagaagacgagaagaaaatccgcaagtttcacgtcaatggcgtggcggtgggtgttattgcgc

SEQ ID NO: 535392 - DNA, 75 bp, synthetic construct
  source 1..75: mol_type = other DNA
tataacgatgatgaaattgatgcgatgcagcaggatgaactggcgcgtcaattcgcccagacacagcagcaacgc

SEQ ID NO: 535393 - DNA, 75 bp, synthetic construct
  source 1..75: mol_type = other DNA
cgaaacgtatccgcgtgccaactcgtcgtgaattggcgtcttacggtattaagctgccctcacagcgtgcggcgg

SEQ ID NO: 535394 - DNA, 75 bp, synthetic construct
  source 1..75: mol_type = other DNA
gcaccggaaggttacccacagcagccacaatatgcgcagcctgcagtgcaatataatgagccgctgcaacaacct

SEQ ID NO: 535395 - DNA, 75 bp, synthetic construct
  source 1..75: mol_type = other DNA
gtgaaaccatcgtcagggatgcggttgccaaatggcgtaaaggctggaacccatcggttactactgccgtcagac

SEQ ID NO: 535396 - DNA, 75 bp, synthetic construct
  source 1..75: mol_type = other DNA
gtgttgattgtgggggagtctgtacgtgtcgacaatatgtctttgtatggatatacacgctctacgacaccgcaa

SEQ ID NO: 535397 - DNA, 75 bp, synthetic construct
  source 1..75: mol_type = other DNA
tattttcaactatcagtcagggatacaggtattgatacctacgtgttgattgtgggggagtctgtacgtgtcgac

SEQ ID NO: 535398 - DNA, 75 bp, synthetic construct
  source 1..75: mol_type = other DNA
attagatgtaatgataatctaatactgccacattatttacattggtatataaactctacttctggaagtaaacat

SEQ ID NO: 535399 - DNA, 75 bp, synthetic construct
  source 1..75: mol_type = other DNA
atgcttacattggtggtaatatcaccacggtggcaagtaaagtttactggttatatttctgctatagaggtgcgc

SEQ ID NO: 535400 - DNA, 75 bp, synthetic construct
  source 1..75: mol_type = other DNA
gggtccatcagtagctgaacaagttaagaaaccacgccataaaaaaccggtatataccgtaagaaaaacgacagc

SEQ ID NO: 535401 - DNA, 75 bp, synthetic construct
  source 1..75: mol_type = other DNA
gtacatgcatccggacgagatttacagcgcctggcggtgcgtctggctgattatcctgatgcaagtgtacttgat

SEQ ID NO: 535402 - DNA, 75 bp, synthetic construct
  source 1..75: mol_type = other DNA
acgtagaaaagcagtttagctctcaagccagcgaatatctgactagtaccgtacatgcatccggacgagatttac

SEQ ID NO: 535403 - DNA, 75 bp, synthetic construct
  source 1..75: mol_type = other DNA
tcaatgaagccaatctgatagttgataatttaattacagataagttaccgctggaattttcttcatgggtcgcga

SEQ ID NO: 535404 - DNA, 75 bp, synthetic construct
  source 1..75: mol_type = other DNA
gcggcacatcgttagtttcacttgtaccagtcagtgagttgtgggttgatgcaaattataaagaaaaccaaatag

SEQ ID NO: 535405 - DNA, 75 bp, synthetic construct
  source 1..75: mol_type = other DNA
atgctttccgatttattagtctgatgtgtgaaaaagaaccggagttgaaaatagcgcagcaactggtactcgagt

SEQ ID NO: 535406 - DNA, 75 bp, synthetic construct
  source 1..75: mol_type = other DNA
aggggcgaagaaaattatgcatcccgatttattagtctgatgtgtgaaaaagaaccggagttgaaaatagcacag

SEQ ID NO: 535407 - DNA, 75 bp, synthetic construct
  source 1..75: mol_type = other DNA
ttgccagaaccattaccgactacctcaagcgcaccaacccgatggataaaaccatcgtcttctgtaacgacatcg

SEQ ID NO: 535408 - DNA, 75 bp, synthetic construct
  source 1..75: mol_type = other DNA
gagcggagatgtgttaatggcaggtgcccttttcccagcgttaccggtctaccggattgccagtgtggtggtcat

SEQ ID NO: 535409 - DNA, 75 bp, synthetic construct
  source 1..75: mol_type = other DNA
gtaacggttattccaccgggtttcgactggcccgcattgcataatgaagccatgcgaccgttacccctgcatatc

SEQ ID NO: 535410 - DNA, 75 bp, synthetic construct
  source 1..75: mol_type = other DNA
gatgtgcgccctgaatgattttttaatgaccctgggcgtttttatcagatggctcgcctggcaaaacaggatata

SEQ ID NO: 535411 - DNA, 75 bp, synthetic construct
  source 1..75: mol_type = other DNA
ccatgggggaatatcgtagtggaaataacctgcaaagcacccccaagttcgtacaagcaagcttgatgcatggtc

SEQ ID NO: 535412 - DNA, 75 bp, synthetic construct
  source 1..75: mol_type = other DNA
taatatcgccggactgagccgtctgatatgctgtcaccgcttcagtattgtcagacaaaaaacctacattacccg

SEQ ID NO: 535413 - DNA, 75 bp, synthetic construct
  source 1..75: mol_type = other DNA
tgagtaccggtttgatattaacagaacggcacagatcattgtgtctctggctagtcaggctaaggggaaatgcaa

SEQ ID NO: 535414 - DNA, 75 bp, synthetic construct
  source 1..75: mol_type = other DNA
gaggttttctttggcatgaaggtgacaattattctataaacgcagagcttcgagaagaatcactttcagacatta

SEQ ID NO: 535415 - DNA, 75 bp, synthetic construct
  source 1..75: mol_type = other DNA
gtggcgttgtggagtatgttaggagggtggttatccgcaattgcaactctgtttgccgtgttggtttcattatat

SEQ ID NO: 535416 - DNA, 75 bp, synthetic construct
  source 1..75: mol_type = other DNA
ttggctggttgttggctcaggcagtgaggaatatgaagccagtctgcgtatgcagattgaatcattggggatgaa

SEQ ID NO: 535417 - DNA, 75 bp, synthetic construct
  source 1..75: mol_type = other DNA
tcaggcaaaagacatatttgacacgaaaaacaaaatttttttcaataaatcatttttgcgatgaggtgattgttc

SEQ ID NO: 535418 - DNA, 75 bp, synthetic construct
  source 1..75: mol_type = other DNA
tcgttggcttataattggttcaggtgatgaggaaatagaatctaacctgcagttactcattaagaatttggggat

SEQ ID NO: 535419 - DNA, 75 bp, synthetic construct
  source 1..75: mol_type = other DNA
cgagattgatctggcaagtggcacagacgaagagattgcagagtcgcttaaagctgcattaccgcagtggcgtaa

SEQ ID NO: 535420 - DNA, 75 bp, synthetic construct
  source 1..75: mol_type = other DNA
ggcaccacctggtacatatcgggtcgacatttatttgaacgacgaatttatgactagtcgggatattacttttat

SEQ ID NO: 535421 - DNA, 75 bp, synthetic construct
  source 1..75: mol_type = other DNA
gtctgcaacgtttgcgttatctgttgctgctgtggggcgcggatcgtaacggcgctaatccaatgacgccggaag

SEQ ID NO: 535422 - DNA, 75 bp, synthetic construct
  source 1..75: mol_type = other DNA
tctgctggtcatggcgaccggaacagggaaaacctataccgcattccagatcatctggcgcctgtggaaatcaaa

SEQ ID NO: 535423 - DNA, 75 bp, synthetic construct
  source 1..75: mol_type = other DNA
attctgcctctggaaaggatacacacaagctcagcttccggtgattactcaggactattacgacgatggcagcgg

SEQ ID NO: 535424 - DNA, 75 bp, synthetic construct
  source 1..75: mol_type = other DNA
tgccagaagcgcagaactacgaatcgtgggttggtttaattcgccatgtagtgaacgcgctgtcacaggacatgg

SEQ ID NO: 535425 - DNA, 75 bp, synthetic construct
  source 1..75: mol_type = other DNA
attctctggaacctattgatgaaaaaaacctattctttttcagtggtttgaagcaaggccagagcgatacgaaaa

SEQ ID NO: 535426 - DNA, 75 bp, synthetic construct
  source 1..75: mol_type = other DNA
ttgccttcgccagatgcaatgggaccaaaacttccggaaccggcaacgggaattacccagccagatccgcagcaa

SEQ ID NO: 535427 - DNA, 75 bp, synthetic construct
  source 1..75: mol_type = other DNA
cgtaaatatggccgacttgcctggagtcctggacttcctgacctggtgaagaggaaactgcctgtgactcagaca

SEQ ID NO: 535428 - DNA, 75 bp, synthetic construct
  source 1..75: mol_type = other DNA
tcaatgggcgcaagctgtatttgtctccagtaataggtaatgactccaacttattgatagtgttttatgttcaga

SEQ ID NO: 535429 - DNA, 75 bp, synthetic construct
  source 1..75: mol_type = other DNA
aatggacgccgggaacatgctgaaaccggcactggctcgtggtgagttgcactgtgtaggcgccacgacgctgga

SEQ ID NO: 535430 - DNA, 75 bp, synthetic construct
  source 1..75: mol_type = other DNA
acaccatcgcccaggcgctgggtcgcccgctgcgcttcgaaccgcaagcggatgccgcaccggttaacaactatg

SEQ ID NO: 535431 - DNA, 75 bp, synthetic construct
  source 1..75: mol_type = other DNA
acaccatcgcccaggcgctgggtcgcccgctgcgcttcgaaccgcaagcagatgccgcgccggttaacaactatg

SEQ ID NO: 535432 - DNA, 75 bp, synthetic construct
  source 1..75: mol_type = other DNA
cgatcagatcttcgttcattgctattacggcgaatccagaagtggcgcgatagcgctgtacctccagaacaaaca

SEQ ID NO: 535433 - DNA, 75 bp, synthetic construct
  source 1..75: mol_type = other DNA
tgccgcgtctggcgcgtggtcaggagatcccttgctttgcactgaccagccccgaagcgggttccgatgcgggcg

SEQ ID NO: 535434 - DNA, 75 bp, synthetic construct
  source 1..75: mol_type = other DNA
cagaaactggtgcgtctgatgatccaggagatggaagatacattggttgaagtacgttctacttcggcgcgtgcg

SEQ ID NO: 535435 - DNA, 75 bp, synthetic construct
  source 1..75: mol_type = other DNA
agcatgttgacaaaacaacatggaagggcaaaacggcatttaaagatacggtcatcgacatggcgcgttacaaag

SEQ ID NO: 535436 - DNA, 75 bp, synthetic construct
  source 1..75: mol_type = other DNA
aagaattctcgaagagacttcgcgctgcattgcttgatgctggcgtgggtgggcgtgggcaggctggcaggatca

SEQ ID NO: 535437 - DNA, 75 bp, synthetic construct
  source 1..75: mol_type = other DNA
atgctcgggcaaagcaacttcctggcgcgtgcttaccagggcgcaccgattgccatcaccgttgaaggggccaac

SEQ ID NO: 535438 - DNA, 75 bp, synthetic construct
  source 1..75: mol_type = other DNA
agatggaagggattgaagagccgctggcgcgtattgccgggaatgcttatgtaatggatgctgcggcatcgctga

SEQ ID NO: 535439 - DNA, 75 bp, synthetic construct
  source 1..75: mol_type = other DNA
ctgccggaaagcgaatactcagcaccgctgcgtttccagctggccgatttcgctccacgcgacaatttcgtctgg

SEQ ID NO: 535440 - DNA, 75 bp, synthetic construct
  source 1..75: mol_type = other DNA
gctcagaagagctgaaaagcgtggtggccgacccgcactatcgcaacgactggggattctacgacgataccgttc

SEQ ID NO: 535441 - DNA, 75 bp, synthetic construct
  source 1..75: mol_type = other DNA
tttactggcgatggtattaacgacgcggttctctataccttaaccaacagcctgaccggtgctggcgtcagcaaa

SEQ ID NO: 535442 - DNA, 75 bp, synthetic construct
  source 1..75: mol_type = other DNA
tcctcggccttgggcgcagcagcttgtccgggcagtcgatgtcagaagtgttcctcaacattaaagagaaagtac

SEQ ID NO: 535443 - DNA, 75 bp, synthetic construct
  source 1..75: mol_type = other DNA
ttcagcatgttgacaaaacaacatggaagagcaagacggcatttaaagatacggtcatcgacatggcgcgttaca

SEQ ID NO: 535444 - DNA, 75 bp, synthetic construct
  source 1..75: mol_type = other DNA
cgctccacgcgacaatttcgtctgggttgaccgttgctacaagatggcacaactctgggctccggaactggcact

SEQ ID NO: 535445 - DNA, 75 bp, synthetic construct
  source 1..75: mol_type = other DNA
atggttaaaaaagacgatttaaaagaagaattctcgaaaagacttcgcgctgcattgcttgatgctggcgttggt

SEQ ID NO: 535446 - DNA, 75 bp, synthetic construct
  source 1..75: mol_type = other DNA
ggaaggggttccggtacagtaccgtcgcgacgaagaacttatccacgaccacgccctgctggtggattttagcca

SEQ ID NO: 535447 - DNA, 75 bp, synthetic construct
  source 1..75: mol_type = other DNA
cgatgaacaaagcctggtcgttgtgcagtacgctggatgaagccaaatcattgcaaaaagaggtcgcgtttttgt

SEQ ID NO: 535448 - DNA, 75 bp, synthetic construct
  source 1..75: mol_type = other DNA
ccggtaaacacttgccgctgcgcagcaacattacgccaggcagtaaaaaagcgggcgtggtgtggcacactcaag

SEQ ID NO: 535449 - DNA, 75 bp, synthetic construct
  source 1..75: mol_type = other DNA
gttgagttttttgctgaagaaggcgaggaaggtgaatgcctgcctgtgctcagcggtgaggccgcacaaagcgtc

SEQ ID NO: 535450 - DNA, 75 bp, synthetic construct
  source 1..75: mol_type = other DNA
agttcaatgcccaaaaatacgttttgcaggacggcgacatcatgtggcaagttgagttttttgccgacgaagggg

SEQ ID NO: 535451 - DNA, 75 bp, synthetic construct
  source 1..75: mol_type = other DNA
agcttctgaaagaaactcttgaagaagaaaaggccaccgacatcaaactaactgatctggcccttaataacgtaa

SEQ ID NO: 535452 - DNA, 75 bp, synthetic construct
  source 1..75: mol_type = other DNA
attccgtggcggaaaagcacagcgctcatgggaactgattcaggcactgaatgcccgggaaagtacactgaatgc

SEQ ID NO: 535453 - DNA, 75 bp, synthetic construct
  source 1..75: mol_type = other DNA
acgacggttccgtacaagcagatcatcatcgccactggcgaaggtgccaaagcctctctgagtgcttttgactac

SEQ ID NO: 535454 - DNA, 75 bp, synthetic construct
  source 1..75: mol_type = other DNA
ggacctgatgatgccgtcaaccgtcgaatcagcctgctggttctgaacagacaagcagaacaagctattttgcat

SEQ ID NO: 535455 - DNA, 75 bp, synthetic construct
  source 1..75: mol_type = other DNA
ataaatacggctacgccaagcatatgcgcgatgcgctaccgaatgcgtcgtttatgggctttaccggtacaccga

SEQ ID NO: 535456 - DNA, 75 bp, synthetic construct
  source 1..75: mol_type = other DNA
acataggtttgctgtcggatgagttcctggaggaagtgcgggaaatgccgcagcgtaatctggctgtagaattgc

SEQ ID NO: 535457 - DNA, 75 bp, synthetic construct
  source 1..75: mol_type = other DNA
aaacgcctgacccgggattaccggggaatgatgctttatgccctgctctggcgtcagggcatgatcacacgcccg

SEQ ID NO: 535458 - DNA, 75 bp, synthetic construct
  source 1..75: mol_type = other DNA
cacacacctgcccacaggaaacctgtgcagccattgaacgactgattgcaatgctcaccaacccggacgaactga

SEQ ID NO: 535459 - DNA, 75 bp, synthetic construct
  source 1..75: mol_type = other DNA
tggcggtaggtatcgctcacgtgttccacaaagtgctgccgatggctgacatgggcttctggtatcacttcggta

SEQ ID NO: 535460 - DNA, 75 bp, synthetic construct
  source 1..75: mol_type = other DNA
actttatggtgctgtttatctcctctcgccgtaacggcgcatctctcggtgagatgatcaaagaagagatgggac

SEQ ID NO: 535461 - DNA, 75 bp, synthetic construct
  source 1..75: mol_type = other DNA
cgttgtccgcatggtgtctgacagtctggagcggcagaacctgcaaatccagacgctggcagatgccactgatga

SEQ ID NO: 535462 - DNA, 75 bp, synthetic construct
  source 1..75: mol_type = other DNA
ggatatcaccggcggtaaaggcattatgctcgggcagagcaacttcctggcacgagcttaccagggcgcgccgat

SEQ ID NO: 535463 - DNA, 75 bp, synthetic construct
  source 1..75: mol_type = other DNA
gcagtggctggagcagggaaacggcatgccttttctcgccagcgatcagcaccaattctgccgccaggacactcg

SEQ ID NO: 535464 - DNA, 75 bp, synthetic construct
  source 1..75: mol_type = other DNA
gcaactcagggcgctgctggcaccaccaccggatatgctttcagcagaccagttggcacagctcagcagaacacc

SEQ ID NO: 535465 - DNA, 75 bp, synthetic construct
  source 1..75: mol_type = other DNA
atcgactgatcaaagaaatgcgtctggaaggtattaccggcattgaggctgcaaatgcctggcttgccactttca

SEQ ID NO: 535466 - DNA, 75 bp, synthetic construct
  source 1..75: mol_type = other DNA
acgcaatatttcgcgtcagtggtccggagaaccgcaataccaccgttacccagttcggacgtgtgctctatgacc

SEQ ID NO: 535467 - DNA, 75 bp, synthetic construct
  source 1..75: mol_type = other DNA
tatagattttgaaggacagaaaaaatttaggaaaggcagtcaaagtgaggagtatcttacgtttattcaaaatga

SEQ ID NO: 535468 - DNA, 75 bp, synthetic construct
  source 1..75: mol_type = other DNA
caaccggcatcacacagtttggccgtgtactttctgaactggggatcgagttgatttgtgccaacagtccgcagg

SEQ ID NO: 535469 - DNA, 75 bp, synthetic construct
  source 1..75: mol_type = other DNA
aagttggcgcaaagcaaaatggatgaactcgaacgcgatggtaagcgtgatcggagcaaaaagatgcctaaacga

SEQ ID NO: 535470 - DNA, 75 bp, synthetic construct
  source 1..75: mol_type = other DNA
aacgtggccagcccagcaaccgcaggttgaccgaatctctcaaactacgcgtgctcagactgatacgtgaaaact

SEQ ID NO: 535471 - DNA, 75 bp, synthetic construct
  source 1..75: mol_type = other DNA
gttcgtagcttctggcttggtttgacgcgcgggttaaccagcagtacgccaaccggcgatgcaactaaacgttat

SEQ ID NO: 535472 - DNA, 75 bp, synthetic construct
  source 1..75: mol_type = other DNA
aaggcgtttacaccaacccgaattacggcgatgaaggttatgccgcagcggtaggaggtggtttgcagtggaaaa

SEQ ID NO: 535473 - DNA, 75 bp, synthetic construct
  source 1..75: mol_type = other DNA
ggttatcgctacctgaacctttctggtaaagacggtaaccgcgacaacgccgtggctgacggcccgtatgttggg

SEQ ID NO: 535474 - DNA, 75 bp, synthetic construct
  source 1..75: mol_type = other DNA
tttgtcaaagaagttaaaccgggcgtgcgaagggcgacggaagggacgttgatcgacaccgcaacgttgctggcg

SEQ ID NO: 535475 - DNA, 75 bp, synthetic construct
  source 1..75: mol_type = other DNA
caaaagagatatctttccgccagcttaactcattagaaacgcatatgaaggaagaggaattcgatgtttttgagt

SEQ ID NO: 535476 - DNA, 75 bp, synthetic construct
  source 1..75: mol_type = other DNA
actttgcccctatgcgtaaatcgatgatttctgcgccagtgtttcgtggattccgcaaagtgatgccgccgatgt

SEQ ID NO: 535477 - DNA, 75 bp, synthetic construct
  source 1..75: mol_type = other DNA
tgcgcagtattaatgttgatgactttgatccggaagagctggcgacgaagccggtaaagttgccggagaaagtgc

SEQ ID NO: 535478 - DNA, 75 bp, synthetic construct
  source 1..75: mol_type = other DNA
ctgaatatggcttaaccgaatcgggcggggtggtccttttttccgcagccgatcgcgggcgttcattaagcttgc

SEQ ID NO: 535479 - DNA, 75 bp, synthetic construct
  source 1..75: mol_type = other DNA
ccaacagcagcgctgtgacgcgtttattcagtttgccagcgatgttatgttgacgcgctgtgaactgaccagcga

SEQ ID NO: 535480 - DNA, 75 bp, synthetic construct
  source 1..75: mol_type = other DNA
caggctgaacaggcgatggatgatttgctacaaaacttcccgaaccgcgtggttgccggactgctgaatgtggtg

SEQ ID NO: 535481 - DNA, 75 bp, synthetic construct
  source 1..75: mol_type = other DNA
gcagcacgttgcaaaaccctgctgaccccgaaagttcggtgatgtatgtcgccgcccccattatggacggctcac

SEQ ID NO: 535482 - DNA, 75 bp, synthetic construct
  source 1..75: mol_type = other DNA
aaaaggacaaaatcaatccggtggtgttttacacttccgccggactgattttgttgttttccctgacaacgatcc

SEQ ID NO: 535483 - DNA, 75 bp, synthetic construct
  source 1..75: mol_type = other DNA
gcgactggaggaactggggatcagcgaacgtttacagcaggaatgcaatgccattgtttgggacccggcgaaagg

SEQ ID NO: 535484 - DNA, 75 bp, synthetic construct
  source 1..75: mol_type = other DNA
tcatggctggcgaatggcgttatcaatccactgcctttactgagtgctgaatatcccttcactgacctggaagag

SEQ ID NO: 535485 - DNA, 75 bp, synthetic construct
  source 1..75: mol_type = other DNA
tgccgctggaaacctgcttacaggcggtcagtgagcaaagtgaaaaactgcatgtaaaaagcctcggaatggcgc

SEQ ID NO: 535486 - DNA, 75 bp, synthetic construct
  source 1..75: mol_type = other DNA
gcaaaccaggtagatgcagataatatcagttggggatatcggggtgggaaactggatttaaatgggtatgatttt

SEQ ID NO: 535487 - DNA, 75 bp, synthetic construct
  source 1..75: mol_type = other DNA
attatacaacaaaccctgtttttgatatgataaaagaagaaatgctgaacgggacgaataaaaatgcctttatat

SEQ ID NO: 535488 - DNA, 75 bp, synthetic construct
  source 1..75: mol_type = other DNA
tgttgatgcgtaatggcgacagccgtccgttgcataaaccgacgacgccgctgccttctctggatttgctgacac

SEQ ID NO: 535489 - DNA, 75 bp, synthetic construct
  source 1..75: mol_type = other DNA
gcaatataatgagccgctgcaacaacctgtacagccacagcagccgtattatgcgcctgcagcggaacagcctgt

SEQ ID NO: 535490 - DNA, 75 bp, synthetic construct
  source 1..75: mol_type = other DNA
ggcgcagatacgtcgttatcaacacagcaggcactcgaacgttatggtgttaattataaaggcgagaagaaactt

SEQ ID NO: 535491 - DNA, 75 bp, synthetic construct
  source 1..75: mol_type = other DNA
tacgccaaaaccggcatatcaacctgcgcctgaatctgaaggattgcagtacaccacagtagcgaaccaacttac

SEQ ID NO: 535492 - DNA, 75 bp, synthetic construct
  source 1..75: mol_type = other DNA
tgagttatgaacgcggtaacacgttgatgtttggtttcactttacggaccaatttcaacgatctgcgccctgccc

SEQ ID NO: 535493 - DNA, 75 bp, synthetic construct
  source 1..75: mol_type = other DNA
tataacggtatgaagatgatttcagcaaacccgggaaatacctttgataaaaaccagggacctcttgccagttat

SEQ ID NO: 535494 - DNA, 75 bp, synthetic construct
  source 1..75: mol_type = other DNA
ctctgactctggaaaaagactcacgactgacggttaatatgtggctggtgaactcaggcacaattaacgttggtg

SEQ ID NO: 535495 - DNA, 75 bp, synthetic construct
  source 1..75: mol_type = other DNA
gaacatttaacttcggtacccttcatcttgaaaatgcggattttgctgttgcacgcaatgctgacgtgaaaggta

SEQ ID NO: 535496 - DNA, 75 bp, synthetic construct
  source 1..75: mol_type = other DNA
tgccagtttgcaggcagaagacaaggataaaatgtgtgacgggaattttgttaacccgatcagcgatatctgctg

SEQ ID NO: 535497 - DNA, 75 bp, synthetic construct
  source 1..75: mol_type = other DNA
gcctgaaccatccggttggcgcgttgctgttgagctatgccggttcgcgctttgacaggccggatgataccggtg

SEQ ID NO: 535498 - DNA, 75 bp, synthetic construct
  source 1..75: mol_type = other DNA
gatatccgtgattatagcgttgccaacttagcaagttcgtacgcagactcagcagaaagcaaaccctctgaatca

SEQ ID NO: 535499 - DNA, 75 bp, synthetic construct
  source 1..75: mol_type = other DNA
tctttattcaatttggagtttcttgaagatattggctatatggaggatgatttatttatagatgctgtagatcat

SEQ ID NO: 535500 - DNA, 75 bp, synthetic construct
  source 1..75: mol_type = other DNA
gtggatgccaactgccatatccggctgcatcagcaggcgctgccggatggcgcgcatattttgattaatgacttc

SEQ ID NO: 535501 - DNA, 75 bp, synthetic construct
  source 1..75: mol_type = other DNA
ggttttccgtcaccggccgcagactataccgaagacgaactggatctgaacacctactgtatccgtcgccccagc

SEQ ID NO: 535502 - DNA, 75 bp, synthetic construct
  source 1..75: mol_type = other DNA
cccgccgcgactattcactgccgcctcgccgctgcctgttgtgcgagcaaagcgcagctgtttgcgcgcgtggaa

SEQ ID NO: 535503 - DNA, 75 bp, synthetic construct
  source 1..75: mol_type = other DNA
taccgatctgcgtaaaacccataaccaggtagactggccccctgaatctccagacaaccaatatcacttaaataa

SEQ ID NO: 535504 - DNA, 75 bp, synthetic construct
  source 1..75: mol_type = other DNA
caaaatgcacgtggtaaagcgtctcaggaattaagagcatggctggacttggggttactgacggaagaaaaagta

SEQ ID NO: 535505 - DNA, 75 bp, synthetic construct
  source 1..75: mol_type = other DNA
atacggcaaacccgtcaatgccaatccagttctgcccggccccgccccctgtttttaaacgtatcggactggcta

SEQ ID NO: 535506 - DNA, 75 bp, synthetic construct
  source 1..75: mol_type = other DNA
accggtgttcgccatatcaaggaagtgtttatccttatcccaagaaaaacagtaagtccacgctggctgcgggga

SEQ ID NO: 535507 - DNA, 75 bp, synthetic construct
  source 1..75: mol_type = other DNA
gggtgacagacaccaccctgaaggtggtggcagccgatccgaatacggtgtccggtatcaagtccgtgggtacgc

SEQ ID NO: 535508 - DNA, 75 bp, synthetic construct
  source 1..75: mol_type = other DNA
ccgacgttcggggagtcctgtgcaccgtgggtgtttgacctggtggcggccctgtttggctcctacgatgcgcag

SEQ ID NO: 535509 - DNA, 75 bp, synthetic construct
  source 1..75: mol_type = other DNA
ggtggacaaatgctgtcacgcaaataccagctctatccaatgacggcagagcgagaagtaccggttggacaataa

SEQ ID NO: 535510 - DNA, 75 bp, synthetic construct
  source 1..75: mol_type = other DNA
cccactcgccgcaggtgggctatgtcgacccggcacaggctgtgctcgacgaggttaatggcgtgatcgccagcg

SEQ ID NO: 535511 - DNA, 75 bp, synthetic construct
  source 1..75: mol_type = other DNA
tgccagtgtttattaacggcgtcgcaacgccgctgccgggctttcagcgtacccgcatgctcggtgaagtgattg

SEQ ID NO: 535512 - DNA, 75 bp, synthetic construct
  source 1..75: mol_type = other DNA
gtcacttaaaaaactcaggccggagtcggtaacctcgcgcatacatccgggcagtgatgtgattgtctgcgctga

SEQ ID NO: 535513 - DNA, 75 bp, synthetic construct
  source 1..75: mol_type = other DNA
atcatcgacgctgaactgtttgcactggcaggtctggatgcacaacatctgcaactgctggttcatagcggctcg

SEQ ID NO: 535514 - DNA, 75 bp, synthetic construct
  source 1..75: mol_type = other DNA
caacgccggatgataacggtctggtgattattcccggttcacgtggtgattactcctggctggttaaacctgttg

SEQ ID NO: 535515 - DNA, 75 bp, synthetic construct
  source 1..75: mol_type = other DNA
tactcctggctggttaaacctgttgcgaacgaaaaaacgctccactcgctggcgcatggggcggggcgtaaatgg

SEQ ID NO: 535516 - DNA, 75 bp, synthetic construct
  source 1..75: mol_type = other DNA
aaaatccgggcatctcgacgtggtgcttaatcgcctggcggattacaccgaacagcggcagcgcctgaaatcacg

SEQ ID NO: 535517 - DNA, 75 bp, synthetic construct
  source 1..75: mol_type = other DNA
accatgcttgaacaggccgcagttaaccaggaacgagaatttgatacccaggtggggctggcgttggggctgttt

SEQ ID NO: 535518 - DNA, 75 bp, synthetic construct
  source 1..75: mol_type = other DNA
ccgcatggtgtggtgttggcaatgtttccgcttatctggatcggcgtagtttgtgttattggtgcttttagcgcc

SEQ ID NO: 535519 - DNA, 75 bp, synthetic construct
  source 1..75: mol_type = other DNA
tggcgcacgtcttcggtgaacgcactctggccacactggaacgtcttctgagcctgctgtcggcctttgaggtcg

SEQ ID NO: 535520 - DNA, 75 bp, synthetic construct
  source 1..75: mol_type = other DNA
gatggctggccgctgtatgaatcacgcctgaagggaaagctgtgcacgttatcagcaagcgttacactcagcgca

SEQ ID NO: 535521 - DNA, 75 bp, synthetic construct
  source 1..75: mol_type = other DNA
gtcacttaaaaaactcaggtcgcagtcggtaacctcgcgcatacaaccgggcagtgatgtgattgtctgcgctga

SEQ ID NO: 535522 - DNA, 75 bp, synthetic construct
  source 1..75: mol_type = other DNA
tggtttcagtgacaaccacacacatgttcaggtcggtgtcgacaaaaaacatgagctggacggactggatttgtt

SEQ ID NO: 535523 - DNA, 75 bp, synthetic construct
  source 1..75: mol_type = other DNA
ggcgtagcgccaaccgtggcgattgctcgcaggcgtgccgtttgccatacacattgaaagacgatcaggggcggg

SEQ ID NO: 535524 - DNA, 75 bp, synthetic construct
  source 1..75: mol_type = other DNA
gcgattcatcaggccacggacgcgaccattgagttctttattcatggtgcactgtgcgtggcatattccggtcag

SEQ ID NO: 535525 - DNA, 75 bp, synthetic construct
  source 1..75: mol_type = other DNA
tccagtcgcggttaacgctgttagtcttgttgggctttattcacggtttattgttctgggacggcgatattctgc

SEQ ID NO: 535526 - DNA, 75 bp, synthetic construct
  source 1..75: mol_type = other DNA
gctactggtttaccgaccacctgctgcttgatggcggtattttcaccaatatttacaacaactacgacaagttta

SEQ ID NO: 535527 - DNA, 75 bp, synthetic construct
  source 1..75: mol_type = other DNA
ggttttggtgcccgtcataatgccagtaatagcctgaaagatattgccgagctggtgccgtttgcccatcgttat

SEQ ID NO: 535528 - DNA, 75 bp, synthetic construct
  source 1..75: mol_type = other DNA
gatggcctgaacgtgatgattaaacgtgaagtcgtcggttttcgtgccaatacggtcgagaaaaccggagaaaat

SEQ ID NO: 535529 - DNA, 75 bp, synthetic construct
  source 1..75: mol_type = other DNA
cttcacggcggcgttgaagcgatcagtaatcgtgccgatggtgttggcaacagtttactggcactgggcgcacag

SEQ ID NO: 535530 - DNA, 75 bp, synthetic construct
  source 1..75: mol_type = other DNA
tggtactgataaaaacaaagccattcagacagtaaaagaccggattctggcagaacgtgccaaacagcctgttat

SEQ ID NO: 535531 - DNA, 75 bp, synthetic construct
  source 1..75: mol_type = other DNA
ccgattatggggctgttattacaaataatgcacagcaaaaatctcgtcttttgcttgaactgaaggctatggata

SEQ ID NO: 535532 - DNA, 75 bp, synthetic construct
  source 1..75: mol_type = other DNA
ccggcgtcatgctttatctggtggggcttggcgttttgctgttattgggggggatttccgatagccagaccagcc

SEQ ID NO: 535533 - DNA, 75 bp, synthetic construct
  source 1..75: mol_type = other DNA
aagccgctttaagctggtgctggcaatcgcctgcgtcggacggatggcgctgaccaactatctattgcaaacgct

SEQ ID NO: 535534 - DNA, 75 bp, synthetic construct
  source 1..75: mol_type = other DNA
ccggcgtcatgctttatctggtggggcttggcgttttgctgttattggggttgatttccgatagccagaccagcc

SEQ ID NO: 535535 - DNA, 75 bp, synthetic construct
  source 1..75: mol_type = other DNA
gtctgctgttccggcaggaaagacgaagtaaggaaaaaggtatggatgattcagattgtgctcaggaagtcatgg

SEQ ID NO: 535536 - DNA, 75 bp, synthetic construct
  source 1..75: mol_type = other DNA
aggcgtcggagcgacggcaattggtgatttcggcagtgcggcgggagagctacccgtgcctgtggagctggcgga

SEQ ID NO: 535537 - DNA, 75 bp, synthetic construct
  source 1..75: mol_type = other DNA
tgattagcgccgctgagaagtttgttgaggatcagagaactctgcatccgctcaacccgatttgggataaccagt

SEQ ID NO: 535538 - DNA, 75 bp, synthetic construct
  source 1..75: mol_type = other DNA
actgcgtaggtgccacgacgcttgatgaatatcgccagtacatcgaaaaagatgctgcgctggaacgtcgtttcc

SEQ ID NO: 535539 - DNA, 75 bp, synthetic construct
  source 1..75: mol_type = other DNA
ggaatggagaaccattcaacagagttatcgaagcagagaacatcaatgactgctatgaccactggatgatatggg

SEQ ID NO: 535540 - DNA, 75 bp, synthetic construct
  source 1..75: mol_type = other DNA
ctgtgatggagcggggatcagaacgcgccctttgtaaccggctgacacgtaagcgccgggcaatggatgctccgg

SEQ ID NO: 535541 - DNA, 75 bp, synthetic construct
  source 1..75: mol_type = other DNA
gaagggtcaggatttccgtcatgtaggcggtgatgagctggataaactgctggcgggaaaagatagcgacaaata

SEQ ID NO: 535542 - DNA, 75 bp, synthetic construct
  source 1..75: mol_type = other DNA
cccccgcgagggcggcgggggcgaatatccattgcaggatggctttggctggaccaacggtgtggtacgccgttt

SEQ ID NO: 535543 - DNA, 75 bp, synthetic construct
  source 1..75: mol_type = other DNA
atgctcaatcagaaaattcaaaaccctaatccagacgaactgatgatcgaggtcgatctctgctatgagctggac

SEQ ID NO: 535544 - DNA, 75 bp, synthetic construct
  source 1..75: mol_type = other DNA
attgccaactattttgatgtaccagtaaaactggtgcgtatcctggtggtgctgtcgattttcttcggtctggcg

SEQ ID NO: 535545 - DNA, 75 bp, synthetic construct
  source 1..75: mol_type = other DNA
acagttaacgatccgtacagcgatcaggttgttatcgataaaggtagcgttaatggcgtttatgaaggccagccg

SEQ ID NO: 535546 - DNA, 75 bp, synthetic construct
  source 1..75: mol_type = other DNA
cgtatcggcgaccgctgccagaatatttgtgagtttatcttctactacgtgaaaggtcaggatttccgtcacgtc

SEQ ID NO: 535547 - DNA, 75 bp, synthetic construct
  source 1..75: mol_type = other DNA
tgaagcctgcagaagaagattaattaatgaaaaacatgctcaatttgtacccaacaaagacaaacacgaccagag

SEQ ID NO: 535548 - DNA, 75 bp, synthetic construct
  source 1..75: mol_type = other DNA
gaggcgcagtcagagcttacgttaaccggctttaaggcaagggatctaccttacaatgagctttcaagagatagc

SEQ ID NO: 535549 - DNA, 75 bp, synthetic construct
  source 1..75: mol_type = other DNA
aaaactgccaaaagaagcatggcgggaatttaatcagaattaccgtcctgaatattttggaaaaattaaagagtt

SEQ ID NO: 535550 - DNA, 75 bp, synthetic construct
  source 1..75: mol_type = other DNA
gccaaagaacataaagccgaagtgctggactatcttaaggacaagatcgcaacggctaaagaagcgcgtgaaaat

SEQ ID NO: 535551 - DNA, 75 bp, synthetic construct
  source 1..75: mol_type = other DNA
gtacagccactcaaaaacatctgaaatcagaaggtgttcatacaccggtgaccgttattcctcctggctttgatt

SEQ ID NO: 535552 - DNA, 75 bp, synthetic construct
  source 1..75: mol_type = other DNA
atctgttcatcaacaagaatagccatttgaaaaagatcagagtttcagaggtgatgaaaatctcagattctgact

SEQ ID NO: 535553 - DNA, 75 bp, synthetic construct
  source 1..75: mol_type = other DNA
acagccgcaacccgttgaacagcagcctgttgtggagcctgaacccgttgtagaagagacaaaacccgcgcgtcc

SEQ ID NO: 535554 - DNA, 75 bp, synthetic construct
  source 1..75: mol_type = other DNA
tcaaggattagagttaatgcgaaacattgcttggatcagtatatgttccaaaactttgatgacgatactaacttt

SEQ ID NO: 535555 - DNA, 75 bp, synthetic construct
  source 1..75: mol_type = other DNA
ggtgtctcgtctggttggggcacctccgggatatgtgggttatgaagaaggtggctacctgactgaagcggtgcg

SEQ ID NO: 535556 - DNA, 75 bp, synthetic construct
  source 1..75: mol_type = other DNA
cacctttctggaaattattcttggggtggataatattatttttctttcactggtggtggcaaaacttccgttatc

SEQ ID NO: 535557 - DNA, 75 bp, synthetic construct
  source 1..75: mol_type = other DNA
agctattagtttttatacgacatttaatactttaattctggggtatatttttaacccaactatcgtaggcgtttt

SEQ ID NO: 535558 - DNA, 75 bp, synthetic construct
  source 1..75: mol_type = other DNA
atgttagtttcagttcttattactgaatttatcatcacactaatgatgatatttagtttttataaggttactcat

SEQ ID NO: 535559 - DNA, 75 bp, synthetic construct
  source 1..75: mol_type = other DNA
cgttaccattattgattcctggtgtcattgctcatttctatataaagaaagaaaaaattgcgaccttgaataaag

SEQ ID NO: 535560 - DNA, 75 bp, synthetic construct
  source 1..75: mol_type = other DNA
atgtcactggaaaatgcccctgacgatgtcaaactggccgtcgatttaattgtgctgctggaagaaaatcagatc

SEQ ID NO: 535561 - DNA, 75 bp, synthetic construct
  source 1..75: mol_type = other DNA
ttgctccgtttgttttatgggtgtttctctgttttttgtatattcaatgtgaaaatgaaatgagtatgtcggaat

SEQ ID NO: 535562 - DNA, 75 bp, synthetic construct
  source 1..75: mol_type = other DNA
caatcatgggatttagtccatgggctgtagccaaatctgttcgtcagtctgcatccccgacgtttgaactgtttt

SEQ ID NO: 535563 - DNA, 75 bp, synthetic construct
  source 1..75: mol_type = other DNA
aatgacggaaaagtacctgatatccgcagccaagagacactaccaaaagaagaaaatcaccaggatcggaagtgg

SEQ ID NO: 535564 - DNA, 75 bp, synthetic construct
  source 1..75: mol_type = other DNA
gcgctgtcttcgtttatttgccgttcagaatccccgacgtttgaacttttttaccaggaatataagcgactggga

SEQ ID NO: 535565 - DNA, 75 bp, synthetic construct
  source 1..75: mol_type = other DNA
ctgaacagattttttatcccggctggctgatggtcagccagctgcgcagcgggcaaccggttgaggatggtaagg

SEQ ID NO: 535566 - DNA, 75 bp, synthetic construct
  source 1..75: mol_type = other DNA
cgccagcatttcatgttgctctgtttgttttatgggtgttcctctgttttttgtacattcgctgtaaaaatgaaa

SEQ ID NO: 535567 - DNA, 75 bp, synthetic construct
  source 1..75: mol_type = other DNA
atgcacttccgagtcacaggtgaaaggaatggagaaccattcaacagagttatcgaagcagagaacatcaatgac

SEQ ID NO: 535568 - DNA, 75 bp, synthetic construct
  source 1..75: mol_type = other DNA
gagaagcgagcccgtgaacgtgaacaacttgcggcctggtatcaaccgattccagaaccggttaaagaaccagaa

SEQ ID NO: 535569 - DNA, 75 bp, synthetic construct
  source 1..75: mol_type = other DNA
gtggatgccaactgccatatccgactacatcagcaagcgctgccggatggcgcacatattttgattaatgacttc

SEQ ID NO: 535570 - DNA, 75 bp, synthetic construct
  source 1..75: mol_type = other DNA
tgttttatcaggagtatcaatccctaagattaaaatctgtttttaaatttgaaccaagatttgaacaacttttaa

SEQ ID NO: 535571 - DNA, 75 bp, synthetic construct
  source 1..75: mol_type = other DNA
tgaaacatcccctgcacttaataagcaatttgcttattatgcattatggaatattacagaggcacttaaagcatc

SEQ ID NO: 535572 - DNA, 75 bp, synthetic construct
  source 1..75: mol_type = other DNA
ttcccgatgcggtattatttgtttagtaaaaaaaacaagaaataaattaatgatttcagggaaaatgtatagatt

SEQ ID NO: 535573 - DNA, 75 bp, synthetic construct
  source 1..75: mol_type = other DNA
tagaataaaagatgataaaattgaatctggaaaagcttatttaagagtgttaacaattatatgtttaattgttcc

SEQ ID NO: 535574 - DNA, 75 bp, synthetic construct
  source 1..75: mol_type = other DNA
aaaaaaattatagggtttagtagcaggttaactgtttttaatttagttaactatttctcacgtaatgcagatgct

SEQ ID NO: 535575 - DNA, 75 bp, synthetic construct
  source 1..75: mol_type = other DNA
gtctaatattttactttggttggcaccaactggaattatccagtcaattcttagttgctccggtagcatattaat

SEQ ID NO: 535576 - DNA, 75 bp, synthetic construct
  source 1..75: mol_type = other DNA
atgtaatcaatgcgctagttgttttatattttacgtttaaaagtataaagcttaatatttattcattctgtaaga

SEQ ID NO: 535577 - DNA, 75 bp, synthetic construct
  source 1..75: mol_type = other DNA
gtgctgcgcgcgctggatattgtaaaacgcgattatgaaaagaaattaacgcgcgatgatgaggcggaaaagtga

SEQ ID NO: 535578 - DNA, 75 bp, synthetic construct
  source 1..75: mol_type = other DNA
cacaaaataaacggctggagagccgatatctgtatctcggtagccccgtcaaacagatccgcccgttaagtgatg

SEQ ID NO: 535579 - DNA, 75 bp, synthetic construct
  source 1..75: mol_type = other DNA
tagccccgtcaaacagatccgcccgttaagtgatgaagagaaggctgggttacgctattccgcgaataattacgt

SEQ ID NO: 535580 - DNA, 75 bp, synthetic construct
  source 1..75: mol_type = other DNA
atgaaaaaaatgattctaatgatcctggctctcggcatttcactgcccgtgatggcgagtgaaaaagtcattgat

SEQ ID NO: 535581 - DNA, 75 bp, synthetic construct
  source 1..75: mol_type = other DNA
atgagaataattgatctttttagtgggtgtggggggttgtccctaggctttttgaagggggggtttgatgttgta

SEQ ID NO: 535582 - DNA, 75 bp, synthetic construct
  source 1..75: mol_type = other DNA
tttattctcgcaaaagattgccattttttttcatgaaccgattcttgctcaaactttaaaaataatatctattgc

SEQ ID NO: 535583 - DNA, 75 bp, synthetic construct
  source 1..75: mol_type = other DNA
tagaaaccaagatgatttgaaacttattagggagatatatttaaaaacaatatttataatttcaatgattactat

SEQ ID NO: 535584 - DNA, 75 bp, synthetic construct
  source 1..75: mol_type = other DNA
cccccggtatgccagcaggaagtcctggaatggagatgggagcccgaaaagaggcttacgatgttatcgcattct

SEQ ID NO: 535585 - DNA, 75 bp, synthetic construct
  source 1..75: mol_type = other DNA
cacgatacataaggcaatgctgtctggttcagggatttatggtcttgccaccccgggcatgcctgcggggagccc

SEQ ID NO: 535586 - DNA, 75 bp, synthetic construct
  source 1..75: mol_type = other DNA
atgcatgaccaggtaaataatgcccaggcgccggcccatcagatgcagtcctctgcggccagaagtaccgttcag

SEQ ID NO: 535587 - DNA, 75 bp, synthetic construct
  source 1..75: mol_type = other DNA
tggaagactgttatttcagccataaacaaccaccagcaacacaaaactcccccaccccaaatgatggatgcgcat

SEQ ID NO: 535588 - DNA, 75 bp, synthetic construct
  source 1..75: mol_type = other DNA
tactttaagtaagtcacaaaaccccatatctcccaaagcccgctccctcatcctatggacagaacgtggcgcagc

SEQ ID NO: 535589 - DNA, 75 bp, synthetic construct
  source 1..75: mol_type = other DNA
cactacgcccgccagggtatcatcacgcccgaaatggaattcatcgccattcgcgagaatatgggtcgcgagcgc

SEQ ID NO: 535590 - DNA, 75 bp, synthetic construct
  source 1..75: mol_type = other DNA
aatccgattcgctggatatctcctggctgaaagataaagacagcatcgacgccgacagcctgccggagccggatg

SEQ ID NO: 535591 - DNA, 75 bp, synthetic construct
  source 1..75: mol_type = other DNA
gacttcggcgatatgtacgaagggctgttgcagaagaacgccaacgaaaccaagtctggcgcgggccagtacttc

SEQ ID NO: 535592 - DNA, 75 bp, synthetic construct
  source 1..75: mol_type = other DNA
caaggttactcaaagtaacttagttgcaccgcgtacaaagcacctcatcctctggacagaacgcggagcagcccg

SEQ ID NO: 535593 - DNA, 75 bp, synthetic construct
  source 1..75: mol_type = other DNA
aaattcgcgataacgccatgtcgaaagcccgcttcgaatttcgctgggaagaccagtttaatctggccctcgacc

SEQ ID NO: 535594 - DNA, 75 bp, synthetic construct
  source 1..75: mol_type = other DNA
cttagcccgacgctaattggcggtagcaaagaacagccgcagtacgaagaaaacgaagcgattccggtctacgac

SEQ ID NO: 535595 - DNA, 75 bp, synthetic construct
  source 1..75: mol_type = other DNA
actggaagactgttatttcagccagaaacagccaccagcagcacaaaactccccaacaccaaatgatggatgcgc

SEQ ID NO: 535596 - DNA, 75 bp, synthetic construct
  source 1..75: mol_type = other DNA
gaatttgtccgtgatgaagtcgctgccggacgtgccattatccccgccaacatcaaccatccggaatcggagccg

SEQ ID NO: 535597 - DNA, 75 bp, synthetic construct
  source 1..75: mol_type = other DNA
tgaaagtgaatgccaatatcggcaactcagcggtcacctcttccattgaagaagaagtggaaaaactggtgtggt

SEQ ID NO: 535598 - DNA, 75 bp, synthetic construct
  source 1..75: mol_type = other DNA
aatgagctttggcgcacgtctgccggaaaatatcactgcggaatttgtccgtgatgaagttgctgccggacgtgc

SEQ ID NO: 535599 - DNA, 75 bp, synthetic construct
  source 1..75: mol_type = other DNA
gcaggtacggcgggctttttgattgaagccgaccgctatgttaagtcgcaaaccaatgatctggacgaccttgat

SEQ ID NO: 535600 - DNA, 75 bp, synthetic construct
  source 1..75: mol_type = other DNA
aaagaatggttggtaagtttttgcaatcaactccacatttgagaaattttataaaaaatatataccaaagaataa

SEQ ID NO: 535601 - DNA, 75 bp, synthetic construct
  source 1..75: mol_type = other DNA
tgctttcacaaagcttggtcgtaacccgaacgacatcgagctgtatatgttcgcccaggcgaactccgagcactg

SEQ ID NO: 535602 - DNA, 75 bp, synthetic construct
  source 1..75: mol_type = other DNA
cttagcctccaccagcttagtgaaaaggcggcaaagaccatgctggccttcgacctcgaagtgtatgagaaattt

SEQ ID NO: 535603 - DNA, 75 bp, synthetic construct
  source 1..75: mol_type = other DNA
taatctgattgtttttgtcctggcaatgttgctcccagtaaccacagttttcatttttatgttgctgggcggtaa

SEQ ID NO: 535604 - DNA, 75 bp, synthetic construct
  source 1..75: mol_type = other DNA
ctttcgattatcagtgagaacgatattttcattatgaatagtgactacttcaatgacccggagaaagttcagtta

SEQ ID NO: 535605 - DNA, 75 bp, synthetic construct
  source 1..75: mol_type = other DNA
caatcacttttctcggtgctaattttgaaaaatcattgatctataaaggaaacaaagaattatttgaaagtactg

SEQ ID NO: 535606 - DNA, 75 bp, synthetic construct
  source 1..75: mol_type = other DNA
gcaggtacggcgggctttttgattgaagctgaccgctacgttaagtcgcagactaacgatctggacgaccttgat

SEQ ID NO: 535607 - DNA, 75 bp, synthetic construct
  source 1..75: mol_type = other DNA
aggcgcatattgtcgccactaacccgccgtttggcagcgccgcaggcaccaacattacccgcacctttgttcacc

SEQ ID NO: 535608 - DNA, 75 bp, synthetic construct
  source 1..75: mol_type = other DNA
aggggaatggagttttaacgccgaagagacggaagttgccgacagcgaagagaacaaaaacaccgaccagcatct

SEQ ID NO: 535609 - DNA, 75 bp, synthetic construct
  source 1..75: mol_type = other DNA
gtattattcgcaacaagaacaatgaaatctttataacccgccgcgccgcagatgcgcacatggcgaataagctgg

SEQ ID NO: 535610 - DNA, 75 bp, synthetic construct
  source 1..75: mol_type = other DNA
cccggtgagtggatgtcgctggtcggtcttaatgccgatgattttccgccagccaatgaaccggtaattgcgaag

SEQ ID NO: 535611 - DNA, 75 bp, synthetic construct
  source 1..75: mol_type = other DNA
aatgttgttgagccggaataccataccgaccctgaacagacttttgctggatgactaccgctataaaattttgcg

SEQ ID NO: 535612 - DNA, 75 bp, synthetic construct
  source 1..75: mol_type = other DNA
caggctggagaagtgatccaagatcccgctgcgggcaccgcagggtttttgattgccgccgatcaatacatcaag

SEQ ID NO: 535613 - DNA, 75 bp, synthetic construct
  source 1..75: mol_type = other DNA
cgccagcggtcaggtgcagatgattgttggtacgcacgccatcttccaggaacaggtgcagtttaacggtctggc

SEQ ID NO: 535614 - DNA, 75 bp, synthetic construct
  source 1..75: mol_type = other DNA
cgctggcaatgactgcatatgccgatctcgatacctcggtcattgatgagttaccgccaggtcgtacgcctgtga

SEQ ID NO: 535615 - DNA, 75 bp, synthetic construct
  source 1..75: mol_type = other DNA
catcattgaccgcgtgcgccacgcctgcatgactgaaggtcgtcaggcgtactgggtttgtacgttgattgaaga

SEQ ID NO: 535616 - DNA, 75 bp, synthetic construct
  source 1..75: mol_type = other DNA
caggccgccgcgtgctggcctatggcgaagcaaagcgcggtaaatatggtgcggagatgatccacccggaatacc

SEQ ID NO: 535617 - DNA, 75 bp, synthetic construct
  source 1..75: mol_type = other DNA
gcggagatgatccatccggaatatcgcgtacagggtgatctcagtactccggagctacaggaaacgctcacgccg

SEQ ID NO: 535618 - DNA, 75 bp, synthetic construct
  source 1..75: mol_type = other DNA
tcccgctcagttccctaacgggcgttggcgcagcgcttagtaacaagctggcgaaaatcaacctgcataccgtgc

SEQ ID NO: 535619 - DNA, 75 bp, synthetic construct
  source 1..75: mol_type = other DNA
caggagatcgcggaacgtgctggtaaatctgtaccgcatgtttataagtacctcacagcagtaagaaaatggcct

SEQ ID NO: 535620 - DNA, 75 bp, synthetic construct
  source 1..75: mol_type = other DNA
gttaaaaatggcctgctgagcatccagagttggagtcctcgcgacttcacgcatgaccgacaccgtaccgtggac

SEQ ID NO: 535621 - DNA, 75 bp, synthetic construct
  source 1..75: mol_type = other DNA
gcttagaagacctgaacttctggaaaacctggctctgactgaagagcaagcaaggttgctggcggagttcaaaac

SEQ ID NO: 535622 - DNA, 75 bp, synthetic construct
  source 1..75: mol_type = other DNA
taatgccgaatttaaagtggccgacttactgcgcgatcaagccatgatcccggaagttcagcgcctggcacggca

SEQ ID NO: 535623 - DNA, 75 bp, synthetic construct
  source 1..75: mol_type = other DNA
gtcaggcgtactgggtttgtacgttgattgaagagtcagagttactggaagcgcaggcggcggaagctacctggg

SEQ ID NO: 535624 - DNA, 75 bp, synthetic construct
  source 1..75: mol_type = other DNA
gacgctaccggaagcgttgcgcactttgcaccgcccgccgccgacgctacagcttagcgatctggaaaccgggca

SEQ ID NO: 535625 - DNA, 75 bp, synthetic construct
  source 1..75: mol_type = other DNA
aggcttccatccgcatcagttgatcatgaccgccacgccgatcccccgcacgctggcgatgactgcgtatgctga

SEQ ID NO: 535626 - DNA, 75 bp, synthetic construct
  source 1..75: mol_type = other DNA
tgatcccgctttacaccgcagagtgcggcgagtgtgagttctgtcgttccggcaaaaccaacctctgtgttgcgg

SEQ ID NO: 535627 - DNA, 75 bp, synthetic construct
  source 1..75: mol_type = other DNA
atatcgatctggaaccgtttgtgactcacaccatgacgctggatgaaattaatgacgcctttgatttaatgcatg

SEQ ID NO: 535628 - DNA, 75 bp, synthetic construct
  source 1..75: mol_type = other DNA
ccgcaatggtcgcatcctaaatgggtgcggttggggatcaccagccttgaagagtatgcccgccactttaactgc

SEQ ID NO: 535629 - DNA, 75 bp, synthetic construct
  source 1..75: mol_type = other DNA
actccgcatgaacggtttgctttcattggcactggcaacacaaacggttctggtgatgaaaccggcttgtaccag

SEQ ID NO: 535630 - DNA, 75 bp, synthetic construct
  source 1..75: mol_type = other DNA
gttcgcgatggatacgaagaacacaatatcagccaaccaattgggcctcgtgagcttttgttgtcggccaagatt

SEQ ID NO: 535631 - DNA, 75 bp, synthetic construct
  source 1..75: mol_type = other DNA
cgacgcatttaccctctccggcgatgacccggaaggtgtattcccggtagttctcggtcacgaaggggctggcgt

SEQ ID NO: 535632 - DNA, 75 bp, synthetic construct
  source 1..75: mol_type = other DNA
ccgccgaaaccggatgaaaacactgccgcgctgtggcagcaactggcagacgcccagtcgtcttttgatccacgt

SEQ ID NO: 535633 - DNA, 75 bp, synthetic construct
  source 1..75: mol_type = other DNA
aagaaagcattttgctgactatcccgccaggcagccaggccgggcaacgattgcgcgttaaaggcaaaggtctgg

SEQ ID NO: 535634 - DNA, 75 bp, synthetic construct
  source 1..75: mol_type = other DNA
tgttagatgctgtcccactcagttccctaacgggcgttggcgcagcacttagtaacaaactggcgaaaatcaacc

SEQ ID NO: 535635 - DNA, 75 bp, synthetic construct
  source 1..75: mol_type = other DNA
tgcttcagtccgcttatggccgttttgtctggttcatgctgtgcgtggccggaccgggcaaggatgaggcatggg

SEQ ID NO: 535636 - DNA, 75 bp, synthetic construct
  source 1..75: mol_type = other DNA
gactatgacggcctttactgggccgatggtgtgacacttgaggtggaaggcggggactacaacgtcattgagcat

SEQ ID NO: 535637 - DNA, 75 bp, synthetic construct
  source 1..75: mol_type = other DNA
acaccgttatcgtgctatccccctggctaaagagctttacggggttgatgttgaatacgtggatgttgttgaaga

SEQ ID NO: 535638 - DNA, 75 bp, synthetic construct
  source 1..75: mol_type = other DNA
tcggccgggtactcggcacggtctcggcggtgatgctgtcagcctcgcccatggttatgcttgcggccggcgcgt

SEQ ID NO: 535639 - DNA, 75 bp, synthetic construct
  source 1..75: mol_type = other DNA
gcgaacccctgctgcgccctctctttggtatagtgatgatcttcgtgggcatcgttggcgccaacggcagcgtca

SEQ ID NO: 535640 - DNA, 75 bp, synthetic construct
  source 1..75: mol_type = other DNA
gcaacaatggttaagtgctgccgagcgacttggctttttgagtgaacgagtcctgttacaacaaaagttagaaaa

SEQ ID NO: 535641 - DNA, 75 bp, synthetic construct
  source 1..75: mol_type = other DNA
ggtggcagcttgctggcaaactggtgattgtctggctgctctggtgtggtggcttcttcagtcaggcccgcgcag

SEQ ID NO: 535642 - DNA, 75 bp, synthetic construct
  source 1..75: mol_type = other DNA
ctcagggactggcgcagttcatgcctgccactgccgactggataagtcagctgatgccgggacttaacagccgtg

SEQ ID NO: 535643 - DNA, 75 bp, synthetic construct
  source 1..75: mol_type = other DNA
acgcctgtcagtccgcgccgggacctttctggttcatatggcatgggtattctttgtcgcaatgttgctctggtg

SEQ ID NO: 535644 - DNA, 75 bp, synthetic construct
  source 1..75: mol_type = other DNA
tttgactttggtctgcgtccatcgctgggttatgtcttatcgaaagggaaagatattgaaggtatcggtgatgaa

SEQ ID NO: 535645 - DNA, 75 bp, synthetic construct
  source 1..75: mol_type = other DNA
tgcggtatcggtcgtgacgagtacaacccggacaaattgcgttatcacagcattatcatcatgaccgatgcggac

SEQ ID NO: 535646 - DNA, 75 bp, synthetic construct
  source 1..75: mol_type = other DNA
ccgctggatcacgagtttatcaccggtggcgaatatcgtcgtatctgcacgctgggtgagaaactgcgtggcctt

SEQ ID NO: 535647 - DNA, 75 bp, synthetic construct
  source 1..75: mol_type = other DNA
gatgacagcttctacgctgccaacggcatctctaccgatgatattgtcgctttaggtctggtttatcagttctaa

SEQ ID NO: 535648 - DNA, 75 bp, synthetic construct
  source 1..75: mol_type = other DNA
atttggtcggtaccgacggtgataaagatctggttaaatacgccgatgttggcgcgacttactatttcaacaaaa

SEQ ID NO: 535649 - DNA, 75 bp, synthetic construct
  source 1..75: mol_type = other DNA
ataaagcagagagtgatactgcacagcaaaaaacgcgtctcgcttttgccgggttgaaatataaagatttgggtt

SEQ ID NO: 535650 - DNA, 75 bp, synthetic construct
  source 1..75: mol_type = other DNA
actgctggggctgggcatcgaactggcccgctacgggcaggcccgaacgggtaagcacagtttctggtggcagct

SEQ ID NO: 535651 - DNA, 75 bp, synthetic construct
  source 1..75: mol_type = other DNA
tattacagacattgaaaatgatgttgaattgaaaagcaccagtacagttgccgtaccacgtcaggggtcagtgat

SEQ ID NO: 535652 - DNA, 75 bp, synthetic construct
  source 1..75: mol_type = other DNA
attattaaccaaagcattacatttattgaaattgaaggaaaaaaaaacgcacaagcctgtatcacacttaagaat

SEQ ID NO: 535653 - DNA, 75 bp, synthetic construct
  source 1..75: mol_type = other DNA
gtgactataaaaccaactaaaaattatcacaatcatctgacccgtatcgccacgttttgcgcgctgctgtattgc

SEQ ID NO: 535654 - DNA, 75 bp, synthetic construct
  source 1..75: mol_type = other DNA
agcccgtaaattgcctggcccattatcaacaaaacgcagaagcagaaaagatcgcacaaacgattatcatcaatg

SEQ ID NO: 535655 - DNA, 75 bp, synthetic construct
  source 1..75: mol_type = other DNA
aacgcagtgatggtcaaaacattccttttgcggcagatatatatgacgaacgaggcaatgttattggcaatgttg

SEQ ID NO: 535656 - DNA, 75 bp, synthetic construct
  source 1..75: mol_type = other DNA
ctgcgcgtgctggctgatgacattctttaccatcgcctgccgacgcgttttacgatggaaaagcaaattggcgca

SEQ ID NO: 535657 - DNA, 75 bp, synthetic construct
  source 1..75: mol_type = other DNA
ctggagtatgacgaaccgggtagttctggcgatgccaatatcatggatgcgccggagatgcagccgcacgaaggc

SEQ ID NO: 535658 - DNA, 75 bp, synthetic construct
  source 1..75: mol_type = other DNA
cgcaactgcatcaggaaagcggctggcggactgatgcggtctcgccggtgggcgctcaggggctggcgcagttta

SEQ ID NO: 535659 - DNA, 75 bp, synthetic construct
  source 1..75: mol_type = other DNA
gaggtgcaaaagctggtcgagcggagccatgcggaggaggttatccgctggaatgcacaaactgtcgccgcccgc

SEQ ID NO: 535660 - DNA, 75 bp, synthetic construct
  source 1..75: mol_type = other DNA
aaccgctacgcgagtcacttagcctgctgtaccgtgaactggcagattattgcgaagccaaatacagcctgctta

SEQ ID NO: 535661 - DNA, 75 bp, synthetic construct
  source 1..75: mol_type = other DNA
atgttcccctaccctttctactgaccgggttaaccctgatgcttggcgtcactgccgaactggggcctttacacg

SEQ ID NO: 535662 - DNA, 75 bp, synthetic construct
  source 1..75: mol_type = other DNA
tcgcgctggatggcgcaacgctgcacaccaacgccagtgcaccggcattggctggcgaagcgttagagaaactgg

SEQ ID NO: 535663 - DNA, 75 bp, synthetic construct
  source 1..75: mol_type = other DNA
ccagtggagatcccgcacgaatttagccaggaatcggcaggcggaaattcaatggttgtgccaatgattcagagc

SEQ ID NO: 535664 - DNA, 75 bp, synthetic construct
  source 1..75: mol_type = other DNA
ggatacggaaacgacctggtgcgctggtttaccggatacgttgaacgcagccagcccgctgaaaacggctcggtg

SEQ ID NO: 535665 - DNA, 75 bp, synthetic construct
  source 1..75: mol_type = other DNA
aaaaccagcacctgttgcttcagctacgccagcaccagccctgaatgtcatccccaacaccggagacacaatcga

SEQ ID NO: 535666 - DNA, 75 bp, synthetic construct
  source 1..75: mol_type = other DNA
ggataaaacaaccgtgcttggcacggccactcttctggccggggcggtggtccatatcagcgagggtgattacag

SEQ ID NO: 535667 - DNA, 75 bp, synthetic construct
  source 1..75: mol_type = other DNA
tgacgaatacggcaagccagccgcaaatacgccggtttattctgccgttccgctacctgtaccaatggcgggcag

SEQ ID NO: 535668 - DNA, 75 bp, synthetic construct
  source 1..75: mol_type = other DNA
ggttcactgaggggcggcaggataagccctttgtgcgtcagattatggcggagggtcataacctgccagcggtta

SEQ ID NO: 535669 - DNA, 75 bp, synthetic construct
  source 1..75: mol_type = other DNA
ctgagataatcgggaaacagtccactaatgtggcgggagccgtagatgttgatgtggggggaaccctgactgaaa

SEQ ID NO: 535670 - DNA, 75 bp, synthetic construct
  source 1..75: mol_type = other DNA
tatttcacggtgaaagaagtggtgctggatgatgaagatggctaccagatacggctgacgccccaattaacgggt

SEQ ID NO: 535671 - DNA, 75 bp, synthetic construct
  source 1..75: mol_type = other DNA
actccaagacagcagaagaattatacgagtggtatctggatgataaattaattataaatcgggtaatgactccaa

SEQ ID NO: 535672 - DNA, 75 bp, synthetic construct
  source 1..75: mol_type = other DNA
cgcgctgtttgcctggttacgggagaacggcatcctgatagcgtccggcggacgtaaaaatgtgccgtttcagca

SEQ ID NO: 535673 - DNA, 75 bp, synthetic construct
  source 1..75: mol_type = other DNA
aacccggtgagcaattacagcagcagcgggaagaagtatccctgagggtgactcaggcgggtgactgggtaaggc

SEQ ID NO: 535674 - DNA, 75 bp, synthetic construct
  source 1..75: mol_type = other DNA
gggccaaccgtccatatcggcagtgagagtataaacacgctgaccatgatgttggacaccattgatttactggca

SEQ ID NO: 535675 - DNA, 75 bp, synthetic construct
  source 1..75: mol_type = other DNA
acagcgggatcacggtcagtgtgcctgatgcacagtacagcgatacccctatcccacattttactcataacggta

SEQ ID NO: 535676 - DNA, 75 bp, synthetic construct
  source 1..75: mol_type = other DNA
accacaggtgttgcaacttatcgtaacaatgacttctttggtctggttgatggtctgaactttgctgctcagtat

SEQ ID NO: 535677 - DNA, 75 bp, synthetic construct
  source 1..75: mol_type = other DNA
tgtgaacctttccgccagtgggtaattgaagataactttgttgccggacgccctgaatgggaaaaagcaggcgcc

SEQ ID NO: 535678 - DNA, 75 bp, synthetic construct
  source 1..75: mol_type = other DNA
acgacttaggtatgggcatgagttttggtgccgcctataccagctccgatcgcactaaccagcaggctgaattct

SEQ ID NO: 535679 - DNA, 75 bp, synthetic construct
  source 1..75: mol_type = other DNA
gatgccggaaatcatcgaacgcggtcacgtttacattgcccagccaccgctgtacaaagtgaaaaaaggtaagca

SEQ ID NO: 535680 - DNA, 75 bp, synthetic construct
  source 1..75: mol_type = other DNA
gcttccgtgcggcgatgacccgtaccctgaacgcctacatggacaaagaaggttacagcaaaaaagccaaagtca

SEQ ID NO: 535681 - DNA, 75 bp, synthetic construct
  source 1..75: mol_type = other DNA
tgggaaaccaccatggacccggaaagtcgtcgtatgctgcgcgttaccgttaaggatgcgattgccgctgaccag

SEQ ID NO: 535682 - DNA, 75 bp, synthetic construct
  source 1..75: mol_type = other DNA
tcatattatctgtgggaattatgtatcttgtctctgctgctgccatgatggtgaaaaacatccacttaaaaaaac

SEQ ID NO: 535683 - DNA, 75 bp, synthetic construct
  source 1..75: mol_type = other DNA
ctttatccgccagaccgtgccagacggaaccagcctgccggatattcagcctggcgagcagctgcagcagcaacg

SEQ ID NO: 535684 - DNA, 75 bp, synthetic construct
  source 1..75: mol_type = other DNA
ccggtcgatattccggcagagttcagccagggtgctgctggcggtaattccatgacattgccggttatccagagt

SEQ ID NO: 535685 - DNA, 75 bp, synthetic construct
  source 1..75: mol_type = other DNA
aatgaaaaccaggtcactcatgagcaagaaggcacgacaaacggtggcgatcgcaatatcaaaaacgccaatggc

SEQ ID NO: 535686 - DNA, 75 bp, synthetic construct
  source 1..75: mol_type = other DNA
gcctgctggagctatttaattcgctacgctgtagaagaaattccaggtatgacagcaggctttgccgctaactat

SEQ ID NO: 535687 - DNA, 75 bp, synthetic construct
  source 1..75: mol_type = other DNA
cagagcaaaacgtgggttttatttggtaaaaccaatcacggcaagctcagcggcgaaatactgtaccggttggtg

SEQ ID NO: 535688 - DNA, 75 bp, synthetic construct
  source 1..75: mol_type = other DNA
ggacggcggtaatgaagacagcatctatctaagctttagcattcctatcgaaaagttactgggttcagaacatcg

SEQ ID NO: 535689 - DNA, 75 bp, synthetic construct
  source 1..75: mol_type = other DNA
caaattaccgataataactatactgccgggctgttgggccttggcctgaataccgcgtacggtgcgttttcagtc

SEQ ID NO: 535690 - DNA, 75 bp, synthetic construct
  source 1..75: mol_type = other DNA
tgagcagtatctggaaatttcaattccgcaggcgtacgtctataaaacgtatggcggttatgttgacccttcact

SEQ ID NO: 535691 - DNA, 75 bp, synthetic construct
  source 1..75: mol_type = other DNA
ttaccgaccctgcgtctgcttactcgcagtgcagaggttatacaaatccaggcgcaacgtttacaggctcccctt

SEQ ID NO: 535692 - DNA, 75 bp, synthetic construct
  source 1..75: mol_type = other DNA
cagtcgtatgctgccctcttcgttgtccagctacgcccctattatccgtggcgttgccaatactaacgccaaagt

SEQ ID NO: 535693 - DNA, 75 bp, synthetic construct
  source 1..75: mol_type = other DNA
tagtcgtatgctgccctcttcactgtccagctacgcccccatcatccgtggcgttgccaatactaacgccaaagt

SEQ ID NO: 535694 - DNA, 75 bp, synthetic construct
  source 1..75: mol_type = other DNA
ccgcaggcttacgtctataaaacatatggcggttatgttgacccctcactttgggagtcgggtattaatgccgcc

SEQ ID NO: 535695 - DNA, 75 bp, synthetic construct
  source 1..75: mol_type = other DNA
cagagaaggcgaagaaggcgattgcctggacatcaaaaaatcgatcgagcaagcggaagtcagctatgacggcag

SEQ ID NO: 535696 - DNA, 75 bp, synthetic construct
  source 1..75: mol_type = other DNA
cttgccgttgtacaagcccctggagcaaaaggtgcgcgcattaactatggcaacagtacagtagatcgctgggga

SEQ ID NO: 535697 - DNA, 75 bp, synthetic construct
  source 1..75: mol_type = other DNA
attaaagcacccggagcgaagggggcacgagtcaataacggtactgatgaaatcgatcgctggggttatgccgtt

SEQ ID NO: 535698 - DNA, 75 bp, synthetic construct
  source 1..75: mol_type = other DNA
attgtaaattgcattatcaactccctgtacaaccagaaaccctgggaaacacaaatactttattattaaacaatc

SEQ ID NO: 535699 - DNA, 75 bp, synthetic construct
  source 1..75: mol_type = other DNA
cgtcggttacagtaaaagtgtgtcctggggtagtttcagcgtcaacctgcaacgtagctggaatgaggacggcga

SEQ ID NO: 535700 - DNA, 75 bp, synthetic construct
  source 1..75: mol_type = other DNA
gggaccaccaaccgcacgcacgcgaatgattatcgtcaggcggtgaatgaaaataccgcgctgttgatgaaagta

SEQ ID NO: 535701 - DNA, 75 bp, synthetic construct
  source 1..75: mol_type = other DNA
gtgttcttgtcgtcgatggcggtggttctgttcgtcgcgcactggtcgatgctgaactggcgcgtctggcagtac

SEQ ID NO: 535702 - DNA, 75 bp, synthetic construct
  source 1..75: mol_type = other DNA
cagatacggtggcagcgatcgccacctctctggccgcggcgattaacgcaaaaaccacgctacctgtaaccgcaa

SEQ ID NO: 535703 - DNA, 75 bp, synthetic construct
  source 1..75: mol_type = other DNA
ggactgttggtaacatatattccacgttggaacatggaaaggagtacaccgaatctgaattaagagaaatgatta

SEQ ID NO: 535704 - DNA, 75 bp, synthetic construct
  source 1..75: mol_type = other DNA
atgaaatacgatacttcggagctttgtgacatctatcaagaagatgttaacgtcgtggaaccgctgttctccaac

SEQ ID NO: 535705 - DNA, 75 bp, synthetic construct
  source 1..75: mol_type = other DNA
ctgctcgaacagaatggccgtggtcatgtcctcgtcgtcgatggcggtggttctgttcgtcgcgcactggtcgat

SEQ ID NO: 535706 - DNA, 75 bp, synthetic construct
  source 1..75: mol_type = other DNA
gacctggaagagctggatatcggcatccaggcgatggcagcaattccagtcggtgccgctggcgaaggcattggc

SEQ ID NO: 535707 - DNA, 75 bp, synthetic construct
  source 1..75: mol_type = other DNA
ttctgctgattgcgggaattgtggttggtccaatgatcgccggacatcaaggttacgtactgatccagaccgata

SEQ ID NO: 535708 - DNA, 75 bp, synthetic construct
  source 1..75: mol_type = other DNA
aatgcagcgcatcgcatggcacaaagcgcaggggcacaaggttgtcgttgtttccggcggacttgaggcttactt

SEQ ID NO: 535709 - DNA, 75 bp, synthetic construct
  source 1..75: mol_type = other DNA
gggggcggaagatgcctgtatcgttaataacaatgcggcggcggtgttattgatgttggcggccactgccagcgg

SEQ ID NO: 535710 - DNA, 75 bp, synthetic construct
  source 1..75: mol_type = other DNA
attggaacacggaaaagaatattctgaacaggaactaataaaaatgattaaggagggtaaagtaatcagcaaata

SEQ ID NO: 535711 - DNA, 75 bp, synthetic construct
  source 1..75: mol_type = other DNA
aagttattcagagatttttaaatgaaagatatggagagaagtatcttacagcaagaggagtggatagttggatgg

SEQ ID NO: 535712 - DNA, 75 bp, synthetic construct
  source 1..75: mol_type = other DNA
gatcgcccgctgttatggagcacattgggtcagtcgctgatgaagcatggcgaatggcaggaagcatccctcgcc

SEQ ID NO: 535713 - DNA, 75 bp, synthetic construct
  source 1..75: mol_type = other DNA
gaacactaacgccaaggtcactattacccaaggcagttataagatctatgaaaccaccgtaccgccaggtgcgtt

SEQ ID NO: 535714 - DNA, 75 bp, synthetic construct
  source 1..75: mol_type = other DNA
ggccagaacaaccaggcctttgtgcgtggtatcgaagataacggcgtgttgcaggtgaactggtccgataaggac

SEQ ID NO: 535715 - DNA, 75 bp, synthetic construct
  source 1..75: mol_type = other DNA
tggcgtcaccacctccgcctccccgtaccgtgaaaacaacatcacgctcgatattcaggagctggaaaacgacgt

SEQ ID NO: 535716 - DNA, 75 bp, synthetic construct
  source 1..75: mol_type = other DNA
aggaggtcgattacggctcgttttatcttaatggtagttggacggattactggagcggaagccatagccagagca

SEQ ID NO: 535717 - DNA, 75 bp, synthetic construct
  source 1..75: mol_type = other DNA
gccgccgatattcatgatgaaacaaatgcaatcattggcaacgttgggcagggcgggcaggcatttgttcgcggt

SEQ ID NO: 535718 - DNA, 75 bp, synthetic construct
  source 1..75: mol_type = other DNA
attaataaagacgacttgcatcatgaaccaaacttactacaagcgacctattaccgtggtttaagtaacctgttc

SEQ ID NO: 535719 - DNA, 75 bp, synthetic construct
  source 1..75: mol_type = other DNA
gtcttgacctgtcgttagccatacctaaatcctcagtgaactatgacccctctgaacaacgtctggatatcaatg

SEQ ID NO: 535720 - DNA, 75 bp, synthetic construct
  source 1..75: mol_type = other DNA
acctcggcacaccgcagttgaaagcgtcaacgtcaattaacgttccggacccgacaccgtttgtgacttatttct

SEQ ID NO: 535721 - DNA, 75 bp, synthetic construct
  source 1..75: mol_type = other DNA
aaaccattgccgatacgttggggccgggcggcattatgcgcgcactgcgtaccattccgcacctgtggcaaattt

SEQ ID NO: 535722 - DNA, 75 bp, synthetic construct
  source 1..75: mol_type = other DNA
ttcccggagtgcgcattgcatacacatgcttgaacaggggaaagccagttatctgtataccggtcatgaccacag

SEQ ID NO: 535723 - DNA, 75 bp, synthetic construct
  source 1..75: mol_type = other DNA
caggataaaattgtcggttttctctacctcggtacgccgcagctgaaagcatctacgtcgattaacgtcccggac

SEQ ID NO: 535724 - DNA, 75 bp, synthetic construct
  source 1..75: mol_type = other DNA
tgaatcgcccgatcaaaccgcagagagtacctatgccgggctgatgggcggctttaatttatggggatggcattt

SEQ ID NO: 535725 - DNA, 75 bp, synthetic construct
  source 1..75: mol_type = other DNA
gtgcattaactgaaagtccggtagtgcgtgaagcattcggttgccgtgagcaggataaaattgtcggttttctct

SEQ ID NO: 535726 - DNA, 75 bp, synthetic construct
  source 1..75: mol_type = other DNA
cccactccagtgtctatataccggatgataaaggtaccaggggcaaagctatcgcatctcctggaacaaattttt

SEQ ID NO: 535727 - DNA, 75 bp, synthetic construct
  source 1..75: mol_type = other DNA
atgatcggcagtatgggccagggcggtcaggcatttgtgcgtggtattaacgacagtggggaattaaccgtgcgc

SEQ ID NO: 535728 - DNA, 75 bp, synthetic construct
  source 1..75: mol_type = other DNA
atgatcggcagcatgggccagggtggtcaggcatttgtgcgcggtattaacgacagcggggaattaatcgtgcgt

SEQ ID NO: 535729 - DNA, 75 bp, synthetic construct
  source 1..75: mol_type = other DNA
caccatgcagacgtactcacgtatgaaaaaccagtttaccgtcagcatcaaccagccgctgaaaacgacttacga

SEQ ID NO: 535730 - DNA, 75 bp, synthetic construct
  source 1..75: mol_type = other DNA
ccgaacagcttgtgaccctactcgccagagaaggtgaagaagaagactgtcttgatctggcaaagtcatacgatc

SEQ ID NO: 535731 - DNA, 75 bp, synthetic construct
  source 1..75: mol_type = other DNA
ttcacagataattatgggtgatgcctataccaccggtgaaacatttgactctgtcaacgtccgcggcgttcgcct

SEQ ID NO: 535732 - DNA, 75 bp, synthetic construct
  source 1..75: mol_type = other DNA
acactggcatataccctgaacgcgtatcacacaagttcagataacgacaatagtgacagcgtctatggcgcattt

SEQ ID NO: 535733 - DNA, 75 bp, synthetic construct
  source 1..75: mol_type = other DNA
tagaggttgctattccgcaatcaagcgtcgcttacaacagcaatgatcagcggcttgatatcagcatgccgcaaa

SEQ ID NO: 535734 - DNA, 75 bp, synthetic construct
  source 1..75: mol_type = other DNA
ttcgccagccagaaaagctaacggataacgcaattttgcaaaaacgcgaaaatgctgcgcaggattgcctcaacc

SEQ ID NO: 535735 - DNA, 75 bp, synthetic construct
  source 1..75: mol_type = other DNA
ctatgacgtcagcgtgtttattaataaccaggccagcgccaatctgaaaatcgagtttattgaattagaccctaa

SEQ ID NO: 535736 - DNA, 75 bp, synthetic construct
  source 1..75: mol_type = other DNA
tagaggttgctattccgcaatcgagcgtcgcttacaatagcaacgatcagcggcttgatatcagcatgccgcaaa

SEQ ID NO: 535737 - DNA, 75 bp, synthetic construct
  source 1..75: mol_type = other DNA
cattgcctcgggctacagccaggataatcgctggagttacagcgtgaataccgcctataacgcgcagaaaaacag

SEQ ID NO: 535738 - DNA, 75 bp, synthetic construct
  source 1..75: mol_type = other DNA
cgatatcgccgcgcttcgctctcaactggtgatgggtgaaaccaataccacaggagaaaccttcgactcggtgcc

SEQ ID NO: 535739 - DNA, 75 bp, synthetic construct
  source 1..75: mol_type = other DNA
cgacaccaacccggccaaattcgaacttgcccgtcagttcggtgcaaccgactgcatcaacccgaacgaccatga

SEQ ID NO: 535740 - DNA, 75 bp, synthetic construct
  source 1..75: mol_type = other DNA
gatatcaacaaatggggtatcgaccatacctttgaatgcatcggtaacgtcaacgtgatgcgtgcggcgctggaa

SEQ ID NO: 535741 - DNA, 75 bp, synthetic construct
  source 1..75: mol_type = other DNA
tcaacttgacgccatcctttatgccaacagaaagaaggaattaacagagcctcaaatcagtaagcgccccgagaa

SEQ ID NO: 535742 - DNA, 75 bp, synthetic construct
  source 1..75: mol_type = other DNA
ggctcattaaccatcatgattttaaagtgcctcttgtagaagatcctatctacaaagtggttgggaatagtgaac

SEQ ID NO: 535743 - DNA, 75 bp, synthetic construct
  source 1..75: mol_type = other DNA
gcgttttaatacaggtggtaggtattatgaatctgtatactacatcacgctaatttttaactatggtcaatcttc

SEQ ID NO: 535744 - DNA, 75 bp, synthetic construct
  source 1..75: mol_type = other DNA
ttaacatccttcgttgagcgctttaatccgatgttattcggcatagactttaagcagtcgatgcgattaccaatg

SEQ ID NO: 535745 - DNA, 75 bp, synthetic construct
  source 1..75: mol_type = other DNA
gggttggatcttctttatcaacgtgccaattggcgtggcagtggtgttgatgacgctacagaccttgcgcggacg

SEQ ID NO: 535746 - DNA, 75 bp, synthetic construct
  source 1..75: mol_type = other DNA
ttatcatcctcaccgtggtggcggtggtggctatctgcttcctgattgtctgggagctgaccgacgataacccga

SEQ ID NO: 535747 - DNA, 75 bp, synthetic construct
  source 1..75: mol_type = other DNA
ctaagcgttctattgcgctggcgttgtggtcgatgacggtgattgtcgcgccaatttgcggcccaatccttggtg

SEQ ID NO: 535748 - DNA, 75 bp, synthetic construct
  source 1..75: mol_type = other DNA
cgtgcctatacctttgaaccgggtatggattttggcgcgtcggcctggccgcagtttatccagggcttcgcggtg

SEQ ID NO: 535749 - DNA, 75 bp, synthetic construct
  source 1..75: mol_type = other DNA
cgcccaggcgatgtacagtcaactggaagggctggggatgacgcaacagcaggcctctggctggattgcccagca

SEQ ID NO: 535750 - DNA, 75 bp, synthetic construct
  source 1..75: mol_type = other DNA
tgggagctgacagatgacaacccaatagttgatctgtcgctgtttaagtcacgcaattttaccattggctgcttg

SEQ ID NO: 535751 - DNA, 75 bp, synthetic construct
  source 1..75: mol_type = other DNA
atcgatgcggctcccgatgatgatgctgggcgctgaatatttcgttctgaaagaaggggagtttacgggtattaa

SEQ ID NO: 535752 - DNA, 75 bp, synthetic construct
  source 1..75: mol_type = other DNA
gtatcggcggcggtacagacgaaattatgatttacgttgcaggtcggcagattctgaaagattaccagaataaat

SEQ ID NO: 535753 - DNA, 75 bp, synthetic construct
  source 1..75: mol_type = other DNA
tatgcgggcgctggcggataacggtatttccatgcttggcgtgccggaagaatttggtggtatccctgcggatta

SEQ ID NO: 535754 - DNA, 75 bp, synthetic construct
  source 1..75: mol_type = other DNA
atgatccgcattgaaattcttttcgaccgccagagcacaaaaagcctcaaatcaggtacacttcaggctctacag

SEQ ID NO: 535755 - DNA, 75 bp, synthetic construct
  source 1..75: mol_type = other DNA
aaaacggctggaggagcagctggaacatgctgcccaccatgatgcgatgaccggattactgaatcggcgacagtt

SEQ ID NO: 535756 - DNA, 75 bp, synthetic construct
  source 1..75: mol_type = other DNA
atgctcagcacctgcgaagtctatctcgacaacgtggaggttgaagagagcgacatggtgggcgaagaaggaatg

SEQ ID NO: 535757 - DNA, 75 bp, synthetic construct
  source 1..75: mol_type = other DNA
cgtcacccaaatgctggcgctgatggaagtgtcaaaatgcggtgctccggcatttttgattaccaacggtcaatg

SEQ ID NO: 535758 - DNA, 75 bp, synthetic construct
  source 1..75: mol_type = other DNA
gaatggattcatttcacaggtagcggatatctgttacgtaccgatgcgtggtcatatccggttctgcggcttaaa

SEQ ID NO: 535759 - DNA, 75 bp, synthetic construct
  source 1..75: mol_type = other DNA
tccgccagtgttactgtcgggcaaccatgccgagatacgtcgctggcgtttgaaacagtcgctgggccgtacctg

SEQ ID NO: 535760 - DNA, 75 bp, synthetic construct
  source 1..75: mol_type = other DNA
ctccgtacagatgatgcttttctgaaggagttaatgagactgggaaggatgcagaagcatctgtttgttcaggga

SEQ ID NO: 535761 - DNA, 75 bp, synthetic construct
  source 1..75: mol_type = other DNA
aaagaaatcgaacaacgtctgaaaccacactacccggatatctggctgcatatgtgggaatccccgtccttcaga

SEQ ID NO: 535762 - DNA, 75 bp, synthetic construct
  source 1..75: mol_type = other DNA
gtatctgtcacaggagcccgcaacgacaaggataaagaacgtatccagtctctgctggaagaaatctggcaggac

SEQ ID NO: 535763 - DNA, 75 bp, synthetic construct
  source 1..75: mol_type = other DNA
ttttggggaaattatgaggggatctctcaggacctggcctcaacagaccgcatgccaccatttgctgcccttacc

SEQ ID NO: 535764 - DNA, 75 bp, synthetic construct
  source 1..75: mol_type = other DNA
tgacactgcaaaccctgcgcggacgcgaaacccgcaccgaacggcggcggattgatgccgtggggctggcactgc

SEQ ID NO: 535765 - DNA, 75 bp, synthetic construct
  source 1..75: mol_type = other DNA
gactgggtggagaaacgctgtcgaagattgaatggctggcgctcggcgtaattgtcttcgcggtggtactggtca

SEQ ID NO: 535766 - DNA, 75 bp, synthetic construct
  source 1..75: mol_type = other DNA
attgtcttcgcggtggtgctggtcacattggggaaatatctcttccctgcgaaacctgtcgtcgcgccagttata

SEQ ID NO: 535767 - DNA, 75 bp, synthetic construct
  source 1..75: mol_type = other DNA
aaatctgtcagtgactccggtgagtttgaagggtatggctccgtctttggtgtaaaggacagccacgatgatgtg

SEQ ID NO: 535768 - DNA, 75 bp, synthetic construct
  source 1..75: mol_type = other DNA
taccgctgaacctgaaatctgtcagtgattccggggaatttgaaggttacggttctgtttttggtgttaaggaca

SEQ ID NO: 535769 - DNA, 75 bp, synthetic construct
  source 1..75: mol_type = other DNA
ctgttattgctggctgtcggtaatggcatggtgacggttgccgagcatcaaaatgttccttccggcatcgccgcc

SEQ ID NO: 535770 - DNA, 75 bp, synthetic construct
  source 1..75: mol_type = other DNA
ggccgccgttaatgatggcaggcgtgcgattcctggcagccggtattttattgctggcatttttgctactgcgcg

SEQ ID NO: 535771 - DNA, 75 bp, synthetic construct
  source 1..75: mol_type = other DNA
ctgtcacggcgcatgtctcattgttagatgtgggctatctcactccagccagagccaccaactcagggctgaaca

SEQ ID NO: 535772 - DNA, 75 bp, synthetic construct
  source 1..75: mol_type = other DNA
cgcggagaaagatcgagcacgtgcagtgtacctaaataatccaacggcaaagaatgaggtaacatatttcgaaac

SEQ ID NO: 535773 - DNA, 75 bp, synthetic construct
  source 1..75: mol_type = other DNA
ctttcctacaacctcaacggatatcacagtgaaagtccaggcagaacaaatgacagtatctacgcggcattcaac

SEQ ID NO: 535774 - DNA, 75 bp, synthetic construct
  source 1..75: mol_type = other DNA
aacgacgcttaaactggaaccaaacagttttattgatgaagacctgcggcaatattattccgacctcttgtggtc

SEQ ID NO: 535775 - DNA, 75 bp, synthetic construct
  source 1..75: mol_type = other DNA
aacacgaagaagccctgcgtattgctcaggagatgctggagagaggtttagacagagagttagttctgatggtga

SEQ ID NO: 535776 - DNA, 75 bp, synthetic construct
  source 1..75: mol_type = other DNA
atgcatccgcttactcatccattgcctgtcacggcgcatgtctcattgttagatgtgggctatctcactccagcc

SEQ ID NO: 535777 - DNA, 75 bp, synthetic construct
  source 1..75: mol_type = other DNA
taccgctgctggtcaatattttgttgatggggggcgcattctggtggctctttacacagctcgatgtctggatcc

SEQ ID NO: 535778 - DNA, 75 bp, synthetic construct
  source 1..75: mol_type = other DNA
cctgcctgggagcagtttaaaaaggattacatcagtcaggaagggcgcgtcatcgaccccagcgacgcgcgcaaa

SEQ ID NO: 535779 - DNA, 75 bp, synthetic construct
  source 1..75: mol_type = other DNA
tgacgatgctgctgttggctgcctttagtgttcaggcagcctgtacctggcctgcctgggagcagtttaaaaagg

SEQ ID NO: 535780 - DNA, 75 bp, synthetic construct
  source 1..75: mol_type = other DNA
agaatatatatggatgatgtttttgacaaggtaatagaaaacagtaaggaaggatttaataagtttcttaaggag

SEQ ID NO: 535781 - DNA, 75 bp, synthetic construct
  source 1..75: mol_type = other DNA
gattatgctcgaccggggtaaagagctggactggttttcatcacaggaaattatcatccttaccgtggtggcggt

SEQ ID NO: 535782 - DNA, 75 bp, synthetic construct
  source 1..75: mol_type = other DNA
ggccgcttcgcgcataaactggatatgcggcggctggtaaccttcagctttattatgtatgccgtctgcttctac

SEQ ID NO: 535783 - DNA, 75 bp, synthetic construct
  source 1..75: mol_type = other DNA
agaaagttgatgtcgcgacggggaaagcgcagggtaaagggccagtcggtttttctgcggctatgttgccgtttc

SEQ ID NO: 535784 - DNA, 75 bp, synthetic construct
  source 1..75: mol_type = other DNA
tggctggtatcagggggaatatatttgctggcctgccaccctgggcgatgtgaataaccagtcagaagcaacata

SEQ ID NO: 535785 - DNA, 75 bp, synthetic construct
  source 1..75: mol_type = other DNA
cgccggcttcgaacgcatctttaagcgtcttggcgtgggagacgttaaaacactggaacggcaactgcagcatga

SEQ ID NO: 535786 - DNA, 75 bp, synthetic construct
  source 1..75: mol_type = other DNA
tccctggtattgggcaaaccgtcgcgccggtactgtggttcctgtttagcgcctggatgtttagccatccagtat

SEQ ID NO: 535787 - DNA, 75 bp, synthetic construct
  source 1..75: mol_type = other DNA
aattgccctgttggatgaacaaaggcgaaccgcaaaagctggcggcagcgtgcaaacgtttctggctttggcttg

SEQ ID NO: 535788 - DNA, 75 bp, synthetic construct
  source 1..75: mol_type = other DNA
acaacacgcagctgctgatccagataatccgtcagtacgggcgaacatgcaggcgttatcagtttgaagtcatta

SEQ ID NO: 535789 - DNA, 75 bp, synthetic construct
  source 1..75: mol_type = other DNA
gtgcgggcctgcgtgaagttctggtcgcaggtgtacgggtggatctcctggccgttaaagcagtttgacccgctg

SEQ ID NO: 535790 - DNA, 75 bp, synthetic construct
  source 1..75: mol_type = other DNA
agctatgaatcaccgtggggaaccctggcaggttcagtttctgcaaatagcgataacagtcgtcaagtgtctctc

SEQ ID NO: 535791 - DNA, 75 bp, synthetic construct
  source 1..75: mol_type = other DNA
accttcaccctcaataccgatgagctgaaagatatcaaaattcatggtcgggtagtcgcttctttagctgtgagg

SEQ ID NO: 535792 - DNA, 75 bp, synthetic construct
  source 1..75: mol_type = other DNA
atgtcgattttacataaagccactcttacaggtggcctggttctgggcgtcgctttttctgctatggcccatccg

SEQ ID NO: 535793 - DNA, 75 bp, synthetic construct
  source 1..75: mol_type = other DNA
ggcacttatcgtgttgactggcgcgcggtttcttcagatacgcaccctattaccggtaattacacctttacagtg

SEQ ID NO: 535794 - DNA, 75 bp, synthetic construct
  source 1..75: mol_type = other DNA
acgaagttctgggaagagagtgtggttacgttaaccatcctgatgataaaggtgggccgacaaagtggggaatta

SEQ ID NO: 535795 - DNA, 75 bp, synthetic construct
  source 1..75: mol_type = other DNA
tgtggctacgaagatgcttcaacgttggctgaatgttttcaaccgtggcgggcagttgtatccagatatggatgt

SEQ ID NO: 535796 - DNA, 75 bp, synthetic construct
  source 1..75: mol_type = other DNA
atgcaaaattccgtcgcaattaatcagccagttaaaacacctcaaatgctgttcggatctgacaacattaatgac

SEQ ID NO: 535797 - DNA, 75 bp, synthetic construct
  source 1..75: mol_type = other DNA
aagcagctggcggcgtggatgcgtcagacctgcctcgatgagaagccggcgcgtgccggcagactgccgtcgata

SEQ ID NO: 535798 - DNA, 75 bp, synthetic construct
  source 1..75: mol_type = other DNA
gaaacccgctaaaagccactgacgcgcctgcggcttgtccaacaccgtgccgcccgggaaaaatttcccgcccgt

SEQ ID NO: 535799 - DNA, 75 bp, synthetic construct
  source 1..75: mol_type = other DNA
ggtcgccagcggcaccgcgcctttcggcggtgaaattatcgatgagcgtggtggttatgccgatcacgtcaccct

SEQ ID NO: 535800 - DNA, 75 bp, synthetic construct
  source 1..75: mol_type = other DNA
taatttttttaggtacttcagccggtgtgccaacccgcacgcgcaatgtcacggcaatattgcttaacctgcaac

SEQ ID NO: 535801 - DNA, 75 bp, synthetic construct
  source 1..75: mol_type = other DNA
cactatgtgggtgaccgaggatgagcaccggcgtctgctggagcgctgcgacggtaaacagctcgcggcctggat

SEQ ID NO: 535802 - DNA, 75 bp, synthetic construct
  source 1..75: mol_type = other DNA
ttacgttaaccatcctgatgataaaggtgggccgacaaagtggggaattactgagaaagttgcccgggcgcacgg

SEQ ID NO: 535803 - DNA, 75 bp, synthetic construct
  source 1..75: mol_type = other DNA
tgcacgcagggcgaccgctatctggaactggcagaaaaacgtgaggccaatgagtcgtttgtctacggctggatg

SEQ ID NO: 535804 - DNA, 75 bp, synthetic construct
  source 1..75: mol_type = other DNA
tgcaaaaacgaggcaaagacggcgaattggtactggtgaaagcgctgaactgcacgcagggcgaccgctatctgg

SEQ ID NO: 535805 - DNA, 75 bp, synthetic construct
  source 1..75: mol_type = other DNA
actcttaatgcattacgggcatatctgaaaaatcgcagcagggatggtgaactggtactggtgaaagccctgaac

SEQ ID NO: 535806 - DNA, 75 bp, synthetic construct
  source 1..75: mol_type = other DNA
cgggcagacaggccgagaattgatgcctggcagacgctggtgaatcaccattacgggctgcatgacccgaacgcc

SEQ ID NO: 535807 - DNA, 75 bp, synthetic construct
  source 1..75: mol_type = other DNA
ggcgcggcggtggcgccggtccggtggattacctgctggggaaaaaccggcagcgcgacggcgcaaccgtcctgc

SEQ ID NO: 535808 - DNA, 75 bp, synthetic construct
  source 1..75: mol_type = other DNA
cgcgccgaccggccgcgcatcgatgcctggcagaccatcgtgaacggcagactggggctgcacgacccgaacgcg

SEQ ID NO: 535809 - DNA, 75 bp, synthetic construct
  source 1..75: mol_type = other DNA
tccagtagagcttaaaaaatatattgagcttctacgctaccctgaaatagagaaaggcttatcaatcaataaaaa

SEQ ID NO: 535810 - DNA, 75 bp, synthetic construct
  source 1..75: mol_type = other DNA
cagagtgcaagatacagcgtcttcgtgtccgtcattgcttaaaattcttgaaatctacctgacaattaacagcac

SEQ ID NO: 535811 - DNA, 75 bp, synthetic construct
  source 1..75: mol_type = other DNA
ctttgatcaggtggccgcattatcctctgatattgccgcagagctgtgtgataccggtgtgaatatggggccaac

SEQ ID NO: 535812 - DNA, 75 bp, synthetic construct
  source 1..75: mol_type = other DNA
atgaaatcaaaagataaaatttttgatgaagtcctgggcaaagaaggtggttatgtcaatcacccggatgataag

SEQ ID NO: 535813 - DNA, 75 bp, synthetic construct
  source 1..75: mol_type = other DNA
gcgatttgaccagatcgccgcattatcccctgatattgccgcagagctgtgtgataccggtgtgaatatggggcc

SEQ ID NO: 535814 - DNA, 75 bp, synthetic construct
  source 1..75: mol_type = other DNA
gagagagctatgaggcattttctaacaaagagctattgcaggtgttgcaagtattttccggtaattcagcagaaa

SEQ ID NO: 535815 - DNA, 75 bp, synthetic construct
  source 1..75: mol_type = other DNA
aaagcgtcatcttgctaatgaccattggcgaagatcgggcggctgaagtgttcaagcacctctcccagcgcgaag

SEQ ID NO: 535816 - DNA, 75 bp, synthetic construct
  source 1..75: mol_type = other DNA
atgatgaaactggccctgacgctggaagccgacagcgttaacgtacaggcactgaacatggggcgcattgtcgtt

SEQ ID NO: 535817 - DNA, 75 bp, synthetic construct
  source 1..75: mol_type = other DNA
atgcgatgatcatggttttacccgggagcactacaatcagctgaagaagttcagcccggaggcattacgtgaaat

SEQ ID NO: 535818 - DNA, 75 bp, synthetic construct
  source 1..75: mol_type = other DNA
tcagcccggaaacattacgtgaaattattgctgaaatagccagctgtcatccatcaaccagtgtattgctcagga

SEQ ID NO: 535819 - DNA, 75 bp, synthetic construct
  source 1..75: mol_type = other DNA
atcagaatggattcatttcacaggtagcggatatctgttacgtaccgatgcgtggtcatatccggttctgcggct

SEQ ID NO: 535820 - DNA, 75 bp, synthetic construct
  source 1..75: mol_type = other DNA
gatttttccatcggtcgtaatgccaatgtaatgggagacattcaggctagcaagtcagacattacaattggtgac

SEQ ID NO: 535821 - DNA, 75 bp, synthetic construct
  source 1..75: mol_type = other DNA
ttcctggttctgctgatatttaccacgcaattcacctttcatttgacatatgggttacctgtccactcacctcac

SEQ ID NO: 535822 - DNA, 75 bp, synthetic construct
  source 1..75: mol_type = other DNA
atgtttgagtttaatatggcagaacttcttcgccaccgctgggggcgtctgcgcttatatcgtttcctcggttct

SEQ ID NO: 535823 - DNA, 75 bp, synthetic construct
  source 1..75: mol_type = other DNA
atgtttgagttttatatggcagaacttcttcgccaccgttggctgcgcctgcgcttatatcgttttcccggttct

SEQ ID NO: 535824 - DNA, 75 bp, synthetic construct
  source 1..75: mol_type = other DNA
catacgctgcagtaccgcgcatatcacggcaaaggacaacgccaggttgtactcgctgtcacatcagacgaatga

SEQ ID NO: 535825 - DNA, 75 bp, synthetic construct
  source 1..75: mol_type = other DNA
aacagccttgccattccgcccgctgatgccatcgatcatcagggacgtctggtactcattcagtatcgtcctaaa

SEQ ID NO: 535826 - DNA, 75 bp, synthetic construct
  source 1..75: mol_type = other DNA
tttactctgcgcttatggcgcgataaacgtctggctctactcgccacagtaatttatctctcattgtttattgtc

SEQ ID NO: 535827 - DNA, 75 bp, synthetic construct
  source 1..75: mol_type = other DNA
gcgcttatatcgtttccttggttctgttttgaccgattaccggatactgaagaattacgccaaaacactgaaagg

SEQ ID NO: 535828 - DNA, 75 bp, synthetic construct
  source 1..75: mol_type = other DNA
attgtcgaaaagtgcatccaacagataaccagaaagtatgggagtatgtcagaggatacctggtgttgataaacg

SEQ ID NO: 535829 - DNA, 75 bp, synthetic construct
  source 1..75: mol_type = other DNA
ggcactgaatatcaacgccaacgattacctacgttcggtgctggtcaaagcccttggtgaagagcgtgccgccag

SEQ ID NO: 535830 - DNA, 75 bp, synthetic construct
  source 1..75: mol_type = other DNA
atggcgcagagccgctgcacgctggcaggaattgctgctgaactacctgcaggaagatgatcggatctgtatcca

SEQ ID NO: 535831 - DNA, 75 bp, synthetic construct
  source 1..75: mol_type = other DNA
aattgggccgccctggcgcggcgcgtgccgttggtgcggcaaacggatcgaatcccatcagcatcgtcgtacctt

SEQ ID NO: 535832 - DNA, 75 bp, synthetic construct
  source 1..75: mol_type = other DNA
cgcgataccgccagcggtattgaaacgctcaactttatggagccgcagagcgccgccgatctgattcgtgatgag

SEQ ID NO: 535833 - DNA, 75 bp, synthetic construct
  source 1..75: mol_type = other DNA
cctgctggaagatattctcgaaacccgcgataccgccagcggtattgaaacgctcaactttatggagccgcagag

SEQ ID NO: 535834 - DNA, 75 bp, synthetic construct
  source 1..75: mol_type = other DNA
ctctgggtgaagaacgtgccgccagcctgctggaagatattctcgaaactcgcgataccgccagcggtattgaaa

SEQ ID NO: 535835 - DNA, 75 bp, synthetic construct
  source 1..75: mol_type = other DNA
gccattatcctgcgtctttatcagaatgacagcgctgtcggggtgctgtttatgacgataatgaccggatgtatg

SEQ ID NO: 535836 - DNA, 75 bp, synthetic construct
  source 1..75: mol_type = other DNA
atgtcatttaaataccgggacaatccactttattacagggctgcaagggaggctttgcgacttgaacaatccggc

SEQ ID NO: 535837 - DNA, 75 bp, synthetic construct
  source 1..75: mol_type = other DNA
atgtctggatatctcacctgctggaaaacctgccggaagagaaactggcatcggcgctgaaagatgacaacccga

SEQ ID NO: 535838 - DNA, 75 bp, synthetic construct
  source 1..75: mol_type = other DNA
cgccggataaccagctatttcgcattcagttagcagagacaacatacacgctgagagtcatttggcgtgattctg

SEQ ID NO: 535839 - DNA, 75 bp, synthetic construct
  source 1..75: mol_type = other DNA
cagcggataaccagcaattcagcatcatcctggcggggaccacctggcggattagcatcatatggcgagatctgt

SEQ ID NO: 535840 - DNA, 75 bp, synthetic construct
  source 1..75: mol_type = other DNA
attgccatctggtccccgccgggagacatcccctggattgtcgcaacggcagcaggcggagccttactttatctg

SEQ ID NO: 535841 - DNA, 75 bp, synthetic construct
  source 1..75: mol_type = other DNA
ttctatgatatatataaaaaataatcctgacaacgtttatgacatcgataagagactaagtgcgttttttaaccc

SEQ ID NO: 535842 - DNA, 75 bp, synthetic construct
  source 1..75: mol_type = other DNA
ctatcgatactattgatgacaaagcaatatatcaattgaatgtttatttaggttcagaaagaaactacaaactaa

SEQ ID NO: 535843 - DNA, 75 bp, synthetic construct
  source 1..75: mol_type = other DNA
atgaaaacaagcactttaaaaaaagagaatgtagtttttgcaatgatgaaggggtataggttcaggatttcagat

SEQ ID NO: 535844 - DNA, 75 bp, synthetic construct
  source 1..75: mol_type = other DNA
ctgtggtcccccccgtttcggcctgtacgctgacgactttttctgcaaccccggcactggccgacggatttcagc

SEQ ID NO: 535845 - DNA, 75 bp, synthetic construct
  source 1..75: mol_type = other DNA
ttttccgctctccaaaactaatctggcggcgctgtttgtgatcacctttatttacggctggaaccagtatttgtg

SEQ ID NO: 535846 - DNA, 75 bp, synthetic construct
  source 1..75: mol_type = other DNA
cgccgcgccgatgacgctcatccccggcacgcatctgctggaaaacatccacaacatctgggtgaacggggtagg

SEQ ID NO: 535847 - DNA, 75 bp, synthetic construct
  source 1..75: mol_type = other DNA
agatattattgtccgcggcggcgaaaatattagcagccgtgaagtggaagatattttattgcagcatcctaaaat

SEQ ID NO: 535848 - DNA, 75 bp, synthetic construct
  source 1..75: mol_type = other DNA
tgaaagcgccgcatcattcattatcgctggaagaggtggtggctttttttagccgtaaacgggtcgcaaaatata

SEQ ID NO: 535849 - DNA, 75 bp, synthetic construct
  source 1..75: mol_type = other DNA
agcactcaaaatcatgacgatgacactgctggttgggatcgctgtttctattatcgatggttatcactccgacct

SEQ ID NO: 535850 - DNA, 75 bp, synthetic construct
  source 1..75: mol_type = other DNA
agcaaaggaaggtgcatcagttgaagtaatcgctaaagcattagaccataaatctataaactcatcagggatata

SEQ ID NO: 535851 - DNA, 75 bp, synthetic construct
  source 1..75: mol_type = other DNA
attgtgtttacccacataaggttgccgataaaatgccagagtcgatgcgtattggttatcttaataccttggcat

SEQ ID NO: 535852 - DNA, 75 bp, synthetic construct
  source 1..75: mol_type = other DNA
gtagctgaacatcgtgatgtcattcacaagattggagtgactggcggcaaagtagaggcgcgtattgccaatgcg

SEQ ID NO: 535853 - DNA, 75 bp, synthetic construct
  source 1..75: mol_type = other DNA
ggtgaccagataaaagtgctgtgggctgacaataacggactgtgcctcttcaccaaacgcctggagcggggccac

SEQ ID NO: 535854 - DNA, 75 bp, synthetic construct
  source 1..75: mol_type = other DNA
ttaaaggcttgcgctgagagagccaattcatcagctaaagataagcgcggatctgaatggagcgttaatgatgca

SEQ ID NO: 535855 - DNA, 75 bp, synthetic construct
  source 1..75: mol_type = other DNA
ctggcagcgtaggctgggccaatgcgtcggcggctgtacgcggctggttgcgtatgagccaacttggtggcgcgg

SEQ ID NO: 535856 - DNA, 75 bp, synthetic construct
  source 1..75: mol_type = other DNA
caatccgtaagcgctgcacaaatcatcatgaaatggcaggaaactgcgcgcattgatgagaaccgcgccggggca

SEQ ID NO: 535857 - DNA, 75 bp, synthetic construct
  source 1..75: mol_type = other DNA
ggatctcagcggcggcaactccagcatcaaagaaaactacatggttgtgaccaatgtgtttttccctgaggcaga

SEQ ID NO: 535858 - DNA, 75 bp, synthetic construct
  source 1..75: mol_type = other DNA
tgccgcactggcgcaacagtccggtgaggccgaagccggggcactgattcaggcggcgctgtctgacgggcgact

SEQ ID NO: 535859 - DNA, 75 bp, synthetic construct
  source 1..75: mol_type = other DNA
cagacgctgcgcgccgtaaacaacggcaagcctgccccggcggcgggctggttcagccaggtggaatggcgtgaa

SEQ ID NO: 535860 - DNA, 75 bp, synthetic construct
  source 1..75: mol_type = other DNA
aatgagcaattcgggaccggcagcctgcgagaagcagtattcggtggcctgaacagcgcggcgcgcacgacgggc

SEQ ID NO: 535861 - DNA, 75 bp, synthetic construct
  source 1..75: mol_type = other DNA
atgaaaaagacactcatcgcttcactcacccaggaaattaacaccgccactcccggtgtcatccagctcttcccg

SEQ ID NO: 535862 - DNA, 75 bp, synthetic construct
  source 1..75: mol_type = other DNA
tatttttactggcatcctgtatggcctttagtatgaatgcccagacagcgaacactgacgtgcttcccgatgctg

SEQ ID NO: 535863 - DNA, 75 bp, synthetic construct
  source 1..75: mol_type = other DNA
gacggagcgtgaattaagtcgagcatccgcgcttcgagcttctttctctcaggcgttggcaacggttggctttcg

SEQ ID NO: 535864 - DNA, 75 bp, synthetic construct
  source 1..75: mol_type = other DNA
ttaactacgatttcgaccaggccgggctggttaaatttattgccagcggcagcaacgaccgggagatcgccgacg

SEQ ID NO: 535865 - DNA, 75 bp, synthetic construct
  source 1..75: mol_type = other DNA
agacaccatcgcaaaagacgtgagcaagcagagcaacccttcggcgctggctgatttcatgaccaaggtgcgccg

SEQ ID NO: 535866 - DNA, 75 bp, synthetic construct
  source 1..75: mol_type = other DNA
tagatattgcgtttgatattatcgctaaggcagcgagcagctatagcatcactagccctatggacaacttgtcca

SEQ ID NO: 535867 - DNA, 75 bp, synthetic construct
  source 1..75: mol_type = other DNA
tggcgcaggtgatagccaaattgttaccgcttcagctactgcgtggcgttggcctggagcaacggcaacatgtcc

SEQ ID NO: 535868 - DNA, 75 bp, synthetic construct
  source 1..75: mol_type = other DNA
ttctcaatatttgatttttaaaaaaataattgggaacggaaatcaatatctcagtaatgaggttttacttattga

SEQ ID NO: 535869 - DNA, 75 bp, synthetic construct
  source 1..75: mol_type = other DNA
gccgaaggttcaggccaatgatatcaagcaggccgcggaacagtttgaggcgatttttttacgcaacatgctgaa

SEQ ID NO: 535870 - DNA, 75 bp, synthetic construct
  source 1..75: mol_type = other DNA
tattttactcgccgcctcttccctgaagtcctgctggctgagccgaacctggcgggtgaaaacagcgtctggctg

SEQ ID NO: 535871 - DNA, 75 bp, synthetic construct
  source 1..75: mol_type = other DNA
ggacggcggcgcgatggtttaccgggtgcatgtggataccgaagataacccgttcaccggcggtctgttcagcca

SEQ ID NO: 535872 - DNA, 75 bp, synthetic construct
  source 1..75: mol_type = other DNA
gcagcagtacagctacgtacttctcgaaaacgtagaagctatggttgatgaagcctgccgcgcggtcatgcttca

SEQ ID NO: 535873 - DNA, 75 bp, synthetic construct
  source 1..75: mol_type = other DNA
gcgtatggtcgggcggacatggctgaccatcacgatggtgtcaggactgctgttcgccagcctgagcggggtgtt

SEQ ID NO: 535874 - DNA, 75 bp, synthetic construct
  source 1..75: mol_type = other DNA
ccggagcgctaaaaacgcgtcaggatgtcactgaggcgcttacagcggcaggttttgaggtggtgaggacaacca

SEQ ID NO: 535875 - DNA, 75 bp, synthetic construct
  source 1..75: mol_type = other DNA
ttacggtctgcatgaccccaacgccccggagaaccgccggacgctgacccttcctgataacctgccggaaacgaa

SEQ ID NO: 535876 - DNA, 75 bp, synthetic construct
  source 1..75: mol_type = other DNA
ggggttttatgacgatgagttgtgtaacaccctggcgcagcagcacgggattgggattgcggcgatgattgtgaa

SEQ ID NO: 535877 - DNA, 75 bp, synthetic construct
  source 1..75: mol_type = other DNA
tcctgacacttaaaatgccttgggtatcctcagaatcgataattaccgcccttcgcctatctgagtctaagagcg

SEQ ID NO: 535878 - DNA, 75 bp, synthetic construct
  source 1..75: mol_type = other DNA
cgtttaagcctttaaattataaccttcccgtaacacaaatggattgcgtttcaacaggcttgttcttgttggggt

SEQ ID NO: 535879 - DNA, 75 bp, synthetic construct
  source 1..75: mol_type = other DNA
gtgcatgtggataccgaagataacccgttcaccggcggtctgttcagccagttccgtttaccggatacgttgtat

SEQ ID NO: 535880 - DNA, 75 bp, synthetic construct
  source 1..75: mol_type = other DNA
tactggcactgcttacacccttcaacatcggcatgctcaccagcgatgactggggcagctatggccgggaggtgc

SEQ ID NO: 535881 - DNA, 75 bp, synthetic construct
  source 1..75: mol_type = other DNA
gaacatggggcgcattgtcgttgacgttgatggtgtcactctcgctgaactgattaacgtggtctgtgataatgg

SEQ ID NO: 535882 - DNA, 75 bp, synthetic construct
  source 1..75: mol_type = other DNA
tattcacccaatgcattgagcgtaataatctgacgctacgcactgagagatcccctcataatttccccaaaacgt

SEQ ID NO: 535883 - DNA, 75 bp, synthetic construct
  source 1..75: mol_type = other DNA
aacattcttgagcaagtggtcaaggttctaagggaatctggttataggattaactcatcgaaggctaatgagaat

SEQ ID NO: 535884 - DNA, 75 bp, synthetic construct
  source 1..75: mol_type = other DNA
atgaagggacaaaaactcgcgccaaagcgaataacttcttcgcctgttgcccatgctgatgtggctcttatctgc

SEQ ID NO: 535885 - DNA, 75 bp, synthetic construct
  source 1..75: mol_type = other DNA
ctggcattgctcacaccctttaatatcggaatgctgaccactgatgagtgggggagctatatcagggcgcttccg

SEQ ID NO: 535886 - DNA, 75 bp, synthetic construct
  source 1..75: mol_type = other DNA
gcgctgacgctctccggcaaactggacgataaggcgcgggaagcggcgataaatgagatggattaccgcctgttg

SEQ ID NO: 535887 - DNA, 75 bp, synthetic construct
  source 1..75: mol_type = other DNA
gcgcggccaggtggatgatattttcacgcagtctgccgcccgccagtacgggctgggcaacagctcgctggcaac

SEQ ID NO: 535888 - DNA, 75 bp, synthetic construct
  source 1..75: mol_type = other DNA
gcaatggtttaccgggtgcatgtggataccgaagataacccgttcaccggcggtctgttcagcctgttccgttta

SEQ ID NO: 535889 - DNA, 75 bp, synthetic construct
  source 1..75: mol_type = other DNA
cgctgttctataaagatgaaggattccgtgacgcatatcgtatcgcgttgggtacaacctactattacgataaaa

SEQ ID NO: 535890 - DNA, 75 bp, synthetic construct
  source 1..75: mol_type = other DNA
acgcagcgccgtgttcagtttctcccgtcagatgcagggaacgggagaaatcgtcacttcactgctcgccgcatt

SEQ ID NO: 535891 - DNA, 75 bp, synthetic construct
  source 1..75: mol_type = other DNA
gcgctgaaagcagtacagctacgtctggatcaaaacagcagcgatccaatcttcgccacccgccagatggcaaaa

SEQ ID NO: 535892 - DNA, 75 bp, synthetic construct
  source 1..75: mol_type = other DNA
ccgtggttgaagagaccagggaggtcgtggacaccacgccacaatctgtcacagtagaaaaaaagagtaataaca

SEQ ID NO: 535893 - DNA, 75 bp, synthetic construct
  source 1..75: mol_type = other DNA
cggcaccgtcggatcgaaccgcgatgagttcatcatgatccgcaagatgaagaacgttaactggctggatgatga

SEQ ID NO: 535894 - DNA, 75 bp, synthetic construct
  source 1..75: mol_type = other DNA
tcgcggtggaccgattgtctggatcagcgaaacagatgcccgagaactgaccattgtcgataacgactgggtgga

SEQ ID NO: 535895 - DNA, 75 bp, synthetic construct
  source 1..75: mol_type = other DNA
cttgatcgactttaacgtccgtgcagaacgcatgggctggctgccgtctgcgccgcagttaggcactaacccgct

SEQ ID NO: 535896 - DNA, 75 bp, synthetic construct
  source 1..75: mol_type = other DNA
ggctatcgctattgctctggctgcaggtgtcggtttgtatggctggggtaaacaacaggccgtcaatcagacggc

SEQ ID NO: 535897 - DNA, 75 bp, synthetic construct
  source 1..75: mol_type = other DNA
atccttaagcttaatcagctttcaaatcaggtagataacctgcgtctggctgataatgacagcgatggttcgccg

SEQ ID NO: 535898 - DNA, 75 bp, synthetic construct
  source 1..75: mol_type = other DNA
aacggcgtctggctggcggcagtttgtcagcggttttaacgaggcgctgacgatggcgtggcgggcgctggcagc

SEQ ID NO: 535899 - DNA, 75 bp, synthetic construct
  source 1..75: mol_type = other DNA
tgccgatgaaccgaccggcgcactggacagccattctggcgaagaggtcatggcgatcctgcatcagttacgcga

SEQ ID NO: 535900 - DNA, 75 bp, synthetic construct
  source 1..75: mol_type = other DNA
gattcttatgacctttgtcaaatattaagcccaaaaagacctacgcagctccgggagcttcgttatatcgcggat

SEQ ID NO: 535901 - DNA, 75 bp, synthetic construct
  source 1..75: mol_type = other DNA
ctgtcggctctaaccgcgacgaattcatcatgatccgcaagatgaagaacgttaactggctggatgatgaaggtc

SEQ ID NO: 535902 - DNA, 75 bp, synthetic construct
  source 1..75: mol_type = other DNA
aaccactggtatcacatggatatgaactaccgtgggatgatcaatatgctgatcttctgcggttgtgtcgggcaa

SEQ ID NO: 535903 - DNA, 75 bp, synthetic construct
  source 1..75: mol_type = other DNA
gtcgtcgttctcgacagtaatacccgccgtcagcttttcccgcataaagcggatgtggttggcgaggtgattctg

SEQ ID NO: 535904 - DNA, 75 bp, synthetic construct
  source 1..75: mol_type = other DNA
agatgaacacgtttcttacaacgccggttacaccaacgttcacgagctgatcccttggcgtacgctctctggtcg

SEQ ID NO: 535905 - DNA, 75 bp, synthetic construct
  source 1..75: mol_type = other DNA
cgtcagctgcagcaactgagttatgcccgggtgttgatcctggatgaaataggctatctgccgatgaacagagag

SEQ ID NO: 535906 - DNA, 75 bp, synthetic construct
  source 1..75: mol_type = other DNA
tccgtttattcacccgctgtctgcggcggtcgatccggcctgggaagcgaaaagcgactgggaaatctacaaagc

SEQ ID NO: 535907 - DNA, 75 bp, synthetic construct
  source 1..75: mol_type = other DNA
tctggtggtgacgctggacttccgtctgtcgagcacctgtctctattccgacatcattttgccgacggcgacttg

SEQ ID NO: 535908 - DNA, 75 bp, synthetic construct
  source 1..75: mol_type = other DNA
cggaagtgacgcctgaacgagtgcgtcaggtgcgcgcgcaacttccagtattaaacaaccgtcgttttgcgccgc

SEQ ID NO: 535909 - DNA, 75 bp, synthetic construct
  source 1..75: mol_type = other DNA
gatctttcggttaaatcagcacagctgctggaaggcgaattcctcggacgtttacggcgagaaagtaaacgtaac

SEQ ID NO: 535910 - DNA, 75 bp, synthetic construct
  source 1..75: mol_type = other DNA
ttatacggtcatcagaaaggagatgaagtgttatgctcgcttgcccatactcttgaaagttgcgcccgcaaaggc

SEQ ID NO: 535911 - DNA, 75 bp, synthetic construct
  source 1..75: mol_type = other DNA
ggaaaacggctgcccgtgggataaagagcagacattttcttctattgcgccttacacccttgaagaaacctacga

SEQ ID NO: 535912 - DNA, 75 bp, synthetic construct
  source 1..75: mol_type = other DNA
ggaaaacggctgcccgtgggataaagagcagacatttgccaccattgcgccttacacccttgaagaagcctacga

SEQ ID NO: 535913 - DNA, 75 bp, synthetic construct
  source 1..75: mol_type = other DNA
ggacaaaagcggaaatcgcattgcaaaaagcgaacgaaaaatttgagcgtcgttttcgcgaagtggagcgtattg

SEQ ID NO: 535914 - DNA, 75 bp, synthetic construct
  source 1..75: mol_type = other DNA
catggcaaatgaagaaaaacgcttctatggcgtacagttccacccggaagtgactcatacccgccaggggatgcg

SEQ ID NO: 535915 - DNA, 75 bp, synthetic construct
  source 1..75: mol_type = other DNA
ctgcgcctttgtcggcagcgattaatgcgcaaattacgcgcaaataagccagcgtcatcagacgaaccggagcaa

SEQ ID NO: 535916 - DNA, 75 bp, synthetic construct
  source 1..75: mol_type = other DNA
tcaagaagggcctgacgtcttgtctcgttactgtcctgtccgggttatctgtctggagattcaactctgtttcct

SEQ ID NO: 535917 - DNA, 75 bp, synthetic construct
  source 1..75: mol_type = other DNA
gtaaagggatttcgtggaatacccaggatgaaattgatttcctcggtaaactcaattacaccaagcgtgatggcc

SEQ ID NO: 535918 - DNA, 75 bp, synthetic construct
  source 1..75: mol_type = other DNA
atgaatcaaatcgaccgtttgctcaccatcatgcagcgcctgcgccacccggaaaacggctgcccgtgggataaa

SEQ ID NO: 535919 - DNA, 75 bp, synthetic construct
  source 1..75: mol_type = other DNA
tcaattgttgatatagaacaggtcaaagagttgagtcgggttaatggagacttgggccgacttggggggttactg

SEQ ID NO: 535920 - DNA, 75 bp, synthetic construct
  source 1..75: mol_type = other DNA
aattaatactctgctgggaaaaatcgacgccacgcaaagcgcccttcgtgacgtaatggacaggatactgagtaa

SEQ ID NO: 535921 - DNA, 75 bp, synthetic construct
  source 1..75: mol_type = other DNA
gcgtggtaaaacagaaatcaccgaaattgtgctgcgcaaaccgcattccggtgcgctgcgcggtacacgcctgca

SEQ ID NO: 535922 - DNA, 75 bp, synthetic construct
  source 1..75: mol_type = other DNA
gcgcggtaaaacagaaattaccgaaattgtgctgcgaaaaccgcagtccggtgcgctgcgcggcacacgcctgca

SEQ ID NO: 535923 - DNA, 75 bp, synthetic construct
  source 1..75: mol_type = other DNA
ttgccgcgcgtggactggaaatgacaggtgttgacctcgaaacaatgaaagaagtctggcaacaggtaaaacggc

SEQ ID NO: 535924 - DNA, 75 bp, synthetic construct
  source 1..75: mol_type = other DNA
tcccgcaatcatctgtgcgttatgatgtgaatgatcaacgactggatattgatgtcccacaggcatgggtcatga

SEQ ID NO: 535925 - DNA, 75 bp, synthetic construct
  source 1..75: mol_type = other DNA
atcacaacctcacgcagatcgctacgttttgcgcgctgctttatagctccagttgcctaagcgcagaacaagttg

SEQ ID NO: 535926 - DNA, 75 bp, synthetic construct
  source 1..75: mol_type = other DNA
catgcgtaattactcgcgcatgaaaaatcaggttacggtcagtattaaccaaccgctaaaatttgagaaaaaaga

SEQ ID NO: 535927 - DNA, 75 bp, synthetic construct
  source 1..75: mol_type = other DNA
tttaaagacattgctgaccaaaatcgaaaagactcaggatgagttacgaactgttatcggtactgttttaaaaga

SEQ ID NO: 535928 - DNA, 75 bp, synthetic construct
  source 1..75: mol_type = other DNA
gtcactaatcaaaactcttttggcaaaaattgagtcaacccaaaacgagctacgaacagtaatggataggatact

SEQ ID NO: 535929 - DNA, 75 bp, synthetic construct
  source 1..75: mol_type = other DNA
gattactggggcttggccttaataccagccttggcgcattttctgtcgatgtgactcactccaatgtccgcatcc

SEQ ID NO: 535930 - DNA, 75 bp, synthetic construct
  source 1..75: mol_type = other DNA
ttgtcacttttttgttgaagaagtcggtgcttgccggtttaccgtatcaggcagagttacaggttccgcaggata

SEQ ID NO: 535931 - DNA, 75 bp, synthetic construct
  source 1..75: mol_type = other DNA
ataaaatgctggcagcgaaaaattaccaggcggcgctgtttattctgcgccagctggagttcggtctgttcgatt

SEQ ID NO: 535932 - DNA, 75 bp, synthetic construct
  source 1..75: mol_type = other DNA
taactatgccgcgctgaatacggcgcagaagaaagcggttgataacgcactgcgtgattttgaactgtctggtat

SEQ ID NO: 535933 - DNA, 75 bp, synthetic construct
  source 1..75: mol_type = other DNA
atgacgaatccgttactgactccctttgaattgcctccgttttctaaaattctcccggaacatgtcgttcctgcc

SEQ ID NO: 535934 - DNA, 75 bp, synthetic construct
  source 1..75: mol_type = other DNA
tgaatattttgccggtaatcttagcattattgatacgcttcccactgccacaggggggacgccatttcagcgcga

SEQ ID NO: 535935 - DNA, 75 bp, synthetic construct
  source 1..75: mol_type = other DNA
gggggggacgccatttcagcgcgaagtctggaaaacactacgcactatcccctgcgggcaggtaatgcattacgg

SEQ ID NO: 535936 - DNA, 75 bp, synthetic construct
  source 1..75: mol_type = other DNA
gtgcgctgcgcggtacacgcctgcaggccattatggatatggatgtgaacgcgatgatgaccgtgatcccccgca

SEQ ID NO: 535937 - DNA, 75 bp, synthetic construct
  source 1..75: mol_type = other DNA
ccactaaaatggcagaaaatccgcagcaggtgctggatttcttaaccgatctggcaaaacgcgcgcgtccacaag

SEQ ID NO: 535938 - DNA, 75 bp, synthetic construct
  source 1..75: mol_type = other DNA
cacatttttgccggtggttatgcggcaggttactacagctacctgtgggccgatgtactggcagcagatgccttc

SEQ ID NO: 535939 - DNA, 75 bp, synthetic construct
  source 1..75: mol_type = other DNA
atgagcgataagcagactgaaaagaccattcaactggatacccctatcaagcgcggtaaaacggaaatcaccgaa

SEQ ID NO: 535940 - DNA, 75 bp, synthetic construct
  source 1..75: mol_type = other DNA
cgccttcgccaaagccgaatttggcgtcgatgagttgcagccgtgggatatcgcttactacagcgaaaaacaaaa

SEQ ID NO: 535941 - DNA, 75 bp, synthetic construct
  source 1..75: mol_type = other DNA
tgcgtaggccagatgcgtaaagctgacggttctctgcaaaaaccggtcgcgtatttgacttgtaacttcaaccgc

SEQ ID NO: 535942 - DNA, 75 bp, synthetic construct
  source 1..75: mol_type = other DNA
ctaccaaaatggcggagaacccgcagcaggtgcttgatttcttaaccgatctggcaaaacgcgcccgtccgcagg

SEQ ID NO: 535943 - DNA, 75 bp, synthetic construct
  source 1..75: mol_type = other DNA
tacgccagcgttacggcaatcgctatgacctgacgcgagatgttgacggtttctactgccgtgaaattgtgaaac

SEQ ID NO: 535944 - DNA, 75 bp, synthetic construct
  source 1..75: mol_type = other DNA
ggggcgagttgccacggcacatggttttcgctcaacattcagggactggtgtagtgaacaggggtattcgcggga

SEQ ID NO: 535945 - DNA, 75 bp, synthetic construct
  source 1..75: mol_type = other DNA
tcacggcgtccctctccggcccgaccggcgagattgttctgggctacggttccgccagttcagaggaggggatca

SEQ ID NO: 535946 - DNA, 75 bp, synthetic construct
  source 1..75: mol_type = other DNA
aaaacggattgcgatggttgcctggtgcccctgaaaaatcattttattcaccagatcaggaagacgtggcattgc

SEQ ID NO: 535947 - DNA, 75 bp, synthetic construct
  source 1..75: mol_type = other DNA
gtattgagagctcactttgttggttgaatcaaccaaaccatcatttaatctcagcggatagtgaattttatcctt

SEQ ID NO: 535948 - DNA, 75 bp, synthetic construct
  source 1..75: mol_type = other DNA
gctctcgtctcggaatttcccctcgatgttccaccccttgcttacaatttcccacgaagaaatcgcattatcagt

SEQ ID NO: 535949 - DNA, 75 bp, synthetic construct
  source 1..75: mol_type = other DNA
ccagcgtgttgaaattgccggaagtgaagcggatggagtgctttgacatcagccataccatgggtgaacaaaccg

SEQ ID NO: 535950 - DNA, 75 bp, synthetic construct
  source 1..75: mol_type = other DNA
tgttctttgagccggaaggtgagggatttagtttgccgccagattcacccgcgctgcatgttatccagcatattc

SEQ ID NO: 535951 - DNA, 75 bp, synthetic construct
  source 1..75: mol_type = other DNA
acgccagcgttgaggatattgcaaaagtgccgggtatttcgcaaggtctggcagaaaagatcttctggtcgttga

SEQ ID NO: 535952 - DNA, 75 bp, synthetic construct
  source 1..75: mol_type = other DNA
atggctacttattcttttatggacgtcacggcgtccctctccggcccgaccggcgagattgatctgggctacggt

SEQ ID NO: 535953 - DNA, 75 bp, synthetic construct
  source 1..75: mol_type = other DNA
acagccggataacgccaacgctaaagcaggtaatacgatgccctgggtgtttgactgcggcaaaatcgaccaggt

SEQ ID NO: 535954 - DNA, 75 bp, synthetic construct
  source 1..75: mol_type = other DNA
cggtgagattgatctgggctatggttccgccagttcagaggaggggatcaccgttgcaatgggcggcccaaaaaa

SEQ ID NO: 535955 - DNA, 75 bp, synthetic construct
  source 1..75: mol_type = other DNA
gtttaatgagcatcagcagcttgtacggcgatgatatggtccgtatagctcactggctggcaaaacagtcgcata

SEQ ID NO: 535956 - DNA, 75 bp, synthetic construct
  source 1..75: mol_type = other DNA
agggcgttgatttgcaggattacgctaaccgattaattgcacgctatagcaacccggcgttacgtcatcgaacct

SEQ ID NO: 535957 - DNA, 75 bp, synthetic construct
  source 1..75: mol_type = other DNA
cagtgggtaatagaagataactttgttgccggacgtccggaatgggaaaaagcgggagccgaactggttagcgat

SEQ ID NO: 535958 - DNA, 75 bp, synthetic construct
  source 1..75: mol_type = other DNA
catacgctgcagtaccgcacatatcacggaaacggacaatgcctggttgtactcgctgtcaaatcagacgaatga

SEQ ID NO: 535959 - DNA, 75 bp, synthetic construct
  source 1..75: mol_type = other DNA
ggcttagaaaccgtgttggctgcgatgtgtgaaccgcaaatcgcgattgtctctctgacaatcaccgaaaaaggg

SEQ ID NO: 535960 - DNA, 75 bp, synthetic construct
  source 1..75: mol_type = other DNA
tatcctggctgcccagcatcacagcgattggggctactatgaagtgaatctgattggcggcgaacagcaaatcgt

SEQ ID NO: 535961 - DNA, 75 bp, synthetic construct
  source 1..75: mol_type = other DNA
agagtgacggaaacgtacttgtctttattagcgcatggcgcgaaagcgaccgtggcaaaatattccgtgaagtaa

SEQ ID NO: 535962 - DNA, 75 bp, synthetic construct
  source 1..75: mol_type = other DNA
atgaaccagctacctcgccgtgcgctttcgcgttatgccctgacttttcagggaaatatcctttcagtaaactgt

SEQ ID NO: 535963 - DNA, 75 bp, synthetic construct
  source 1..75: mol_type = other DNA
cacatatcacggaaacggacaacgcctggttgtactcgctgtcacaccagaccagtgacttcggtgaatcagaat

SEQ ID NO: 535964 - DNA, 75 bp, synthetic construct
  source 1..75: mol_type = other DNA
cagtgccggatgttcacccgtgtccggcgcacgcactccacctcacccgtggagaactccttaattaccaaccct

SEQ ID NO: 535965 - DNA, 75 bp, synthetic construct
  source 1..75: mol_type = other DNA
atacagcgatgctgacggagaatatccacttttataagcgtgcttcatcgttttataaagagaagcagcttattg

SEQ ID NO: 535966 - DNA, 75 bp, synthetic construct
  source 1..75: mol_type = other DNA
attaattatataataactgataaatctcctggcgcagaatgggttgagttttgcaaaaataataatatccagctt

SEQ ID NO: 535967 - DNA, 75 bp, synthetic construct
  source 1..75: mol_type = other DNA
caataaaaccaccatggcagccgattccagtagtaccgtaatggaattgctcaaattgttacaggaccgtagtga

SEQ ID NO: 535968 - DNA, 75 bp, synthetic construct
  source 1..75: mol_type = other DNA
gttcaccagcgtctgaccgcgcttgcaagcgtgttgaaattgccgaaagtgaagcggatggagtgttttgacatc

SEQ ID NO: 535969 - DNA, 75 bp, synthetic construct
  source 1..75: mol_type = other DNA
atacacctcttctgaccgcaccaatgatcaggttaaccatactgcggcgggtggtgataaagcagacgcgtggac

SEQ ID NO: 535970 - DNA, 75 bp, synthetic construct
  source 1..75: mol_type = other DNA
aattgtcacacacggagagaataattttcctcggtttatgtctggggttaaccacctattctgctttatccgcag

SEQ ID NO: 535971 - DNA, 75 bp, synthetic construct
  source 1..75: mol_type = other DNA
aatggcagcattgtcgcggaaaatggtcaggtttatctgactggacttccacagtctgaaccgccccgggtttcc

SEQ ID NO: 535972 - DNA, 75 bp, synthetic construct
  source 1..75: mol_type = other DNA
tgagtggttacaccgtcaagcctcctaccggagacaccagtgagcagacactatttattgattattttaatctgt

SEQ ID NO: 535973 - DNA, 75 bp, synthetic construct
  source 1..75: mol_type = other DNA
gttgactataaaatcaacctgttggatgaagatgacagtttctacgctgccaatggcatctctaccgatgatatt

SEQ ID NO: 535974 - DNA, 75 bp, synthetic construct
  source 1..75: mol_type = other DNA
acaacactgaatcctcaaaaaaccagtcatggacccgtctggcatttgccggattgaaatttgcagattacggtt

SEQ ID NO: 535975 - DNA, 75 bp, synthetic construct
  source 1..75: mol_type = other DNA
ggtacttcctgccgcctgggttcgcggccgctcaaagagcatcattggtcaacgttgcttgccgctcgtgcgctg

SEQ ID NO: 535976 - DNA, 75 bp, synthetic construct
  source 1..75: mol_type = other DNA
atggaatatgctggtggctcttcaggcgggaaaaattgtcgctcgttatgccaaattgcatctttatgatgcgtt

SEQ ID NO: 535977 - DNA, 75 bp, synthetic construct
  source 1..75: mol_type = other DNA
cgtttcccggagctggcgttggcacaggctttacagggagcagaaatccttgtacttcccgctgcctgggttcgc

SEQ ID NO: 535978 - DNA, 75 bp, synthetic construct
  source 1..75: mol_type = other DNA
caactcacggtgctattgccagagcaacatttaaattagcgggcgcgtcctcgattatggctgcacagtctcatc

SEQ ID NO: 535979 - DNA, 75 bp, synthetic construct
  source 1..75: mol_type = other DNA
taccgactggcgtggctatgccatattaccatttgcgacagaatatagagaaaaccgtgttgctcttaacgcgaa

SEQ ID NO: 535980 - DNA, 75 bp, synthetic construct
  source 1..75: mol_type = other DNA
ttcgcagactggggagagatgttcggcgataacgtactggcaacagcgatcctggatcggctgctgcaccactca

SEQ ID NO: 535981 - DNA, 75 bp, synthetic construct
  source 1..75: mol_type = other DNA
atatccgctggatttattcaaagggggtgaaactccccggccttgaggcccgccgttcggcggatgaatggttat

SEQ ID NO: 535982 - DNA, 75 bp, synthetic construct
  source 1..75: mol_type = other DNA
gattcagctaaaacttttgttcaggagactctgaaagatacctggaagtctgctgacgagtggtttgttcactaa

SEQ ID NO: 535983 - DNA, 75 bp, synthetic construct
  source 1..75: mol_type = other DNA
atgcgaattgagatctgtatcgctaaagaaaaaatcagcaaaatgccaaaaggttctattcctgccctacagcaa

SEQ ID NO: 535984 - DNA, 75 bp, synthetic construct
  source 1..75: mol_type = other DNA
atgggaaacacatcaatacaaacgcagagttaccgtgcggtagataaagatgcagggcaaagcagaagttacatt

SEQ ID NO: 535985 - DNA, 75 bp, synthetic construct
  source 1..75: mol_type = other DNA
aggcggtgcgacgcgtcaccgaaaaacagtttgtttccaataccggcgacgacctcgacgttattggtgtggcgt

SEQ ID NO: 535986 - DNA, 75 bp, synthetic construct
  source 1..75: mol_type = other DNA
gcgatgaatcacacgatcacgcgattggcgggcaccgtaaaaaacgggcgaaggtcaaaaataccagttccctgg

SEQ ID NO: 535987 - DNA, 75 bp, synthetic construct
  source 1..75: mol_type = other DNA
ctgacgagtggtttgttcactaattacagtaaaatcggtaacggctggaaatcattcaatactcgcactatcgaa

SEQ ID NO: 535988 - DNA, 75 bp, synthetic construct
  source 1..75: mol_type = other DNA
tatctgcgttcggtattggtcaaagctctgggtgaagaacgtgccgccagcctgctggaagatattctcgaaacc

SEQ ID NO: 535989 - DNA, 75 bp, synthetic construct
  source 1..75: mol_type = other DNA
aaaagccaccagcaacgatggcctttctgttacacgcaccgcagataaggattctgcaaaaacttttgttcagga

SEQ ID NO: 535990 - DNA, 75 bp, synthetic construct
  source 1..75: mol_type = other DNA
gctggatttattcaaagggggtgaaactccccggccttgaggcccgccgttcggcggatgaatggttatgtcgct

SEQ ID NO: 535991 - DNA, 75 bp, synthetic construct
  source 1..75: mol_type = other DNA
actattttaagagccgtagataaagaatccgcgcaagagtttgtacaagaaacgcttcaaaatgtctgggaaaca

SEQ ID NO: 535992 - DNA, 75 bp, synthetic construct
  source 1..75: mol_type = other DNA
tggcgcaaaaaattgctccgctatgcgtggaattatatgaactcaagccgacgcgtgaacaaagtagtacgttac

SEQ ID NO: 535993 - DNA, 75 bp, synthetic construct
  source 1..75: mol_type = other DNA
aaaagtctggatgcgtttgccgcccggtatcgtctggccgaaatggcagagcatacgctggatgttcagtattac

SEQ ID NO: 535994 - DNA, 75 bp, synthetic construct
  source 1..75: mol_type = other DNA
aaaggctttgcgcagtacagcaactccaccgacagcgacgcagaagaccgcgccgccacatcaaaggcagtaaaa

SEQ ID NO: 535995 - DNA, 75 bp, synthetic construct
  source 1..75: mol_type = other DNA
cggtcacccagtacggcctcctgtcgccgaacgcgaccgcgttttccatcattctggacacgacagtcggcgact

SEQ ID NO: 535996 - DNA, 75 bp, synthetic construct
  source 1..75: mol_type = other DNA
gtattttctttgggggaatgaagcaaccacacgattctcaaatctcgtaaaaactattaatattgccggaaaaag

SEQ ID NO: 535997 - DNA, 75 bp, synthetic construct
  source 1..75: mol_type = other DNA
gaatccatgattcagtatcgtgcgccggtcacccagtacggcctcctgtcgccgaacgcgaccgcgttttccatc

SEQ ID NO: 535998 - DNA, 75 bp, synthetic construct
  source 1..75: mol_type = other DNA
ggtaacagcctgcatgtcagttacgatgccattaacagcacagctaccatcagtgccggtgtggcttatatcggt

SEQ ID NO: 535999 - DNA, 75 bp, synthetic construct
  source 1..75: mol_type = other DNA
gagcaaaacaggcggcgtgcaggatgtgcgttatggttccgaaatgtattacaacccgggaggtaaccagatatc

SEQ ID NO: 536000 - DNA, 75 bp, synthetic construct
  source 1..75: mol_type = other DNA
ccgttttacaacaccccgaagaacgtgctgttcacccagctcgggatgcgggataacgacgggcgattcaccacc

SEQ ID NO: 536001 - DNA, 75 bp, synthetic construct
  source 1..75: mol_type = other DNA
gcacttaacgccagggttgcaacggaggggcagttgagcggaatcatcagtgagtggggggaactccagaaatat

SEQ ID NO: 536002 - DNA, 75 bp, synthetic construct
  source 1..75: mol_type = other DNA
tgtgctgcagggcagcaacagtggtgacgcagcccgccagctgctgaccagccaggcttccgggcaggcagcaga

SEQ ID NO: 536003 - DNA, 75 bp, synthetic construct
  source 1..75: mol_type = other DNA
tattaaggtggggaggggtattattattatcttccagaacattggcaatggatattcctgttgaaattacaggag

SEQ ID NO: 536004 - DNA, 75 bp, synthetic construct
  source 1..75: mol_type = other DNA
tgaaaatgtacttatgacaaatataaataattttggcatagctctttaccaaggggatggaacaacacacaaatt

SEQ ID NO: 536005 - DNA, 75 bp, synthetic construct
  source 1..75: mol_type = other DNA
cagaactgacgaccgtcaccctgacaccacaggtaaacgcaaaatacgggctgtcccgtatcgagcttgacgacg

SEQ ID NO: 536006 - DNA, 75 bp, synthetic construct
  source 1..75: mol_type = other DNA
cacaaagttacatcccgatattattgttaatattcactctttagctaataacggcgattttcttaatcgggagta

SEQ ID NO: 536007 - DNA, 75 bp, synthetic construct
  source 1..75: mol_type = other DNA
gtgggagcgattttatccgcagcgccccgctacgcgtagggacgagaaactccgtgtctgtcttgggtgccattt

SEQ ID NO: 536008 - DNA, 75 bp, synthetic construct
  source 1..75: mol_type = other DNA
attctgttactgcggatggtgacctggattggtcgctggtcgatgctcgacctgtttgtcatatctttaaccatg

SEQ ID NO: 536009 - DNA, 75 bp, synthetic construct
  source 1..75: mol_type = other DNA
ggggcgaaccactgttgcatatctggctgttaggtattcgtattgacgccaacgtcatgcaaggcatctggcaaa

SEQ ID NO: 536010 - DNA, 75 bp, synthetic construct
  source 1..75: mol_type = other DNA
cgccaacaaaaaagataacagtgaggtcaatcggcgaggaactggcgcgtgatgattatcaacggtgtccgcaat

SEQ ID NO: 536011 - DNA, 75 bp, synthetic construct
  source 1..75: mol_type = other DNA
atttatcgccagtattctggtgccatttaccaaagtgattgttatgttcactttattgttgagcattcattttaa

SEQ ID NO: 536012 - DNA, 75 bp, synthetic construct
  source 1..75: mol_type = other DNA
atatccaggccggtgtcggcctattctcttttgtagcgctggttattttaacgacggtgacgttgtcacatctta

SEQ ID NO: 536013 - DNA, 75 bp, synthetic construct
  source 1..75: mol_type = other DNA
acgtggtgctggaagttgatccggacagggcaattattactcaggaaatcggagacagacgctatctgcaacgaa

SEQ ID NO: 536014 - DNA, 75 bp, synthetic construct
  source 1..75: mol_type = other DNA
ttggtgatgattctggctggcatttttacagtcagaggaatacggataacagcataacgtttgccgtaaacgggc

SEQ ID NO: 536015 - DNA, 75 bp, synthetic construct
  source 1..75: mol_type = other DNA
aattgctggtgacttttgaggtcgtcgcacgtcatgaaagttataccagagcagcagaggagttagcgttaaccc

SEQ ID NO: 536016 - DNA, 75 bp, synthetic construct
  source 1..75: mol_type = other DNA
gtgacggacgcgactggtcgctaacgcgcctggcggcaatggccttcacaatgctgttgctgatgccttttgcgt

SEQ ID NO: 536017 - DNA, 75 bp, synthetic construct
  source 1..75: mol_type = other DNA
tcagggattatgtcgctggcgaacagcaatattgcggtagccgggattgtgtttattgccagcatcctggtgccg

SEQ ID NO: 536018 - DNA, 75 bp, synthetic construct
  source 1..75: mol_type = other DNA
atgctgttgctgatgccgtttgcctggggcgaaccgctgttgcatatctggctgttaggtattcgtattgacgcc

SEQ ID NO: 536019 - DNA, 75 bp, synthetic construct
  source 1..75: mol_type = other DNA
caggctggacatcactggccagcaactggctgtacagcagcaccactgtaattctgagcaacggcagaaaatact

SEQ ID NO: 536020 - DNA, 75 bp, synthetic construct
  source 1..75: mol_type = other DNA
aggtaaaaacgacattgccggattcggcaagtgtaagggagtttgcccggctgcaaatcgccttcgcccactgtt

SEQ ID NO: 536021 - DNA, 75 bp, synthetic construct
  source 1..75: mol_type = other DNA
taaagaactttccgttgaaccaactgaaaccacagtaaatccaggtgacacattaagcgttggtgttgcttcaac

SEQ ID NO: 536022 - DNA, 75 bp, synthetic construct
  source 1..75: mol_type = other DNA
tttctatgaagtagctcaggcgattaagcacgaaccggatggcattaccaaagaagcgctaatgaaagcaatgac

SEQ ID NO: 536023 - DNA, 75 bp, synthetic construct
  source 1..75: mol_type = other DNA
gcagtgcatgcttcaagtggagaagtaagagatgtaatatcgcagccgagtagttcctggggaataaaaaaagcc

SEQ ID NO: 536024 - DNA, 75 bp, synthetic construct
  source 1..75: mol_type = other DNA
taaatacggttataaaaccaaacgcgctttattcaaggacatgaaacattgcattattcattgtgttaatggtgt

SEQ ID NO: 536025 - DNA, 75 bp, synthetic construct
  source 1..75: mol_type = other DNA
actgatttcctacaccttcatttcgcttgattgtctggcggaagagttagaagacccgttcggtacagaaaacaa

SEQ ID NO: 536026 - DNA, 75 bp, synthetic construct
  source 1..75: mol_type = other DNA
gccagcagcgccgcgtgaacgccaatcaccagcgtcgtcttaaaacgtctaaggagaagcccgactacgacgaca

SEQ ID NO: 536027 - DNA, 75 bp, synthetic construct
  source 1..75: mol_type = other DNA
tcaccagcgtcgtcttaaaacgtctaaggagaagcccgactacgacgacaatctgtttggcgagcctgatgaagg

SEQ ID NO: 536028 - DNA, 75 bp, synthetic construct
  source 1..75: mol_type = other DNA
cagaatgttcttgctggtgtaaatgtgaaaacttcatatttttctaatggaaaatataatgtgaatggtcgaatg

SEQ ID NO: 536029 - DNA, 75 bp, synthetic construct
  source 1..75: mol_type = other DNA
tatctgcgattccagcatgtgtcttccttgatgaacgccatcgccagagatttctatgaagtagctcaggcgatt

SEQ ID NO: 536030 - DNA, 75 bp, synthetic construct
  source 1..75: mol_type = other DNA
gactatctggaagcattaaaggttctcgaagcttcagaggttaattacaccgcattgctgtcattgggttgttat

SEQ ID NO: 536031 - DNA, 75 bp, synthetic construct
  source 1..75: mol_type = other DNA
cattaagcgttggtgttgcttcaactgcaacgactcaatcagtgaccttcacacccaaagagacgccccagatta

SEQ ID NO: 536032 - DNA, 75 bp, synthetic construct
  source 1..75: mol_type = other DNA
ataaagcaattaacaatacaagagataaaaatcctaatactgatgttaaacatagtcaaattcaagagataaaaa

SEQ ID NO: 536033 - DNA, 75 bp, synthetic construct
  source 1..75: mol_type = other DNA
aagctggtttacgagcagtattacgggaatgaagtggcgctgttcggtgagtctgaacgccagaagaatcctcac

SEQ ID NO: 536034 - DNA, 75 bp, synthetic construct
  source 1..75: mol_type = other DNA
gtggtgatgccgcccgccagttgctgaccagccaggcttccgggcaggcagcagatgcggttacgcagtggctga

SEQ ID NO: 536035 - DNA, 75 bp, synthetic construct
  source 1..75: mol_type = other DNA
cacaggtaagacgtgtcgcagtttatgggctggccggattgcagttcttttttcaggttaccccggcatttgccg

SEQ ID NO: 536036 - DNA, 75 bp, synthetic construct
  source 1..75: mol_type = other DNA
ggaatgaagtggcactgtttggcgagtctgaacgccagaagaatcctcacgccatcactgccggtgtcacctgga

SEQ ID NO: 536037 - DNA, 75 bp, synthetic construct
  source 1..75: mol_type = other DNA
aaagtaccattgcgtatctcttccctggcggtaaggaaggtctgttgacaggtatccgtggttattatgcctgcc

SEQ ID NO: 536038 - DNA, 75 bp, synthetic construct
  source 1..75: mol_type = other DNA
aatcagcgcacagtctgtcaccttcacccgtaccgtccgtggtgtcatcacggttgaaaaagagcgtgtttatcc

SEQ ID NO: 536039 - DNA, 75 bp, synthetic construct
  source 1..75: mol_type = other DNA
aggtagctctaacggtgtggaacttaccggattgcaactggacgaagaaagaaaacaagtgatgaaaattatgca

SEQ ID NO: 536040 - DNA, 75 bp, synthetic construct
  source 1..75: mol_type = other DNA
actggactgcaactggacgaagaaaggaagcaagtgatgaaaattatgcagaaggtgtgggaagacgacagctgg

SEQ ID NO: 536041 - DNA, 75 bp, synthetic construct
  source 1..75: mol_type = other DNA
taccgcaatctgcgccccctgtatcccaaaacggtaattcgtatccgcaaaggtagctctaacggtgtggaactg

SEQ ID NO: 536042 - DNA, 75 bp, synthetic construct
  source 1..75: mol_type = other DNA
ccaccgatcatggtgagaaggtttatctttacagcaaagcggtcagattatggcactggtcgaatgcgttactct

SEQ ID NO: 536043 - DNA, 75 bp, synthetic construct
  source 1..75: mol_type = other DNA
ctgaaaggtgaagacaaagccgctatcgaagcgaaaatgcaggaactggcacaggtttcccagaaactgatggaa

SEQ ID NO: 536044 - DNA, 75 bp, synthetic construct
  source 1..75: mol_type = other DNA
aagagccgcgtaaagacgttaacccggacgaagctgtggcaatcggtgctgccgttcagggtggtgtactgactg

SEQ ID NO: 536045 - DNA, 75 bp, synthetic construct
  source 1..75: mol_type = other DNA
gggggatgactgggaaggtcgttttgactgggtgaaatcagaatgtgatgtgatatatttacctcgtacgccttc

SEQ ID NO: 536046 - DNA, 75 bp, synthetic construct
  source 1..75: mol_type = other DNA
tcgcaaaatacagccaacaaccgctggtgaaatatatcggccagccggttatcaacattgttgaactcaatctgg

SEQ ID NO: 536047 - DNA, 75 bp, synthetic construct
  source 1..75: mol_type = other DNA
gatgcggcgaccggcttcaccgaagcgttcacccatctgcgcacaggagcaccctgcgctgaccggatcgggcta

SEQ ID NO: 536048 - DNA, 75 bp, synthetic construct
  source 1..75: mol_type = other DNA
agcgggctggacaataatatcaccccgcaagcggcggtctggcaaatcccacgcgtggcgaaagcgcgtaatctc

SEQ ID NO: 536049 - DNA, 75 bp, synthetic construct
  source 1..75: mol_type = other DNA
accaccgcactggggcaatggtggtttccctggcaggccaacggttcgttgattcgtgaaggtgatacggtgcgc

SEQ ID NO: 536050 - DNA, 75 bp, synthetic construct
  source 1..75: mol_type = other DNA
gggggatgattggaaggggcgttttgattgggtttcagatgtttgtgaagtggtttatttaccacgtaccccttc

SEQ ID NO: 536051 - DNA, 75 bp, synthetic construct
  source 1..75: mol_type = other DNA
ttgcggtaagtatggcctttgactttgatatctatcttaccgatgagatcacttcggtgggggatgcccgcttca

SEQ ID NO: 536052 - DNA, 75 bp, synthetic construct
  source 1..75: mol_type = other DNA
tgattgtcactgcgttatcgggtatccagcgaacatcaatgaacagtctcgccagcagaaaccagtaccaacagc

SEQ ID NO: 536053 - DNA, 75 bp, synthetic construct
  source 1..75: mol_type = other DNA
cgtcctcttttatgttagctggttgcacgccgcgcatagaagtggctgcaccgaaagaacccatcaccattaata

SEQ ID NO: 536054 - DNA, 75 bp, synthetic construct
  source 1..75: mol_type = other DNA
tcgacgcggtggacatctctcccgacgcgctggcggttgccgaacagaatatcgaagaacacggtctgatccaca

SEQ ID NO: 536055 - DNA, 75 bp, synthetic construct
  source 1..75: mol_type = other DNA
tagcggctgcattgcgattgcctgtgcttatgccttcccggatgcagaagtcgacgcggttgatatctctcccga

SEQ ID NO: 536056 - DNA, 75 bp, synthetic construct
  source 1..75: mol_type = other DNA
atcatggtctcgcacgatatgaaaaacttacgccaacaatgcgatatgggtattttgctgcgcaacagcaccctt

SEQ ID NO: 536057 - DNA, 75 bp, synthetic construct
  source 1..75: mol_type = other DNA
gagcatgcgcgctatctggatgtctatcatcactatcagctcaccggcgaacgcagcgtcttcgctcacgggatc

SEQ ID NO: 536058 - DNA, 75 bp, synthetic construct
  source 1..75: mol_type = other DNA
gaagacgtgattaaaagcgagcattactttactgcttatgatggacgtaatggtgcaatttccagcaacgaatat

SEQ ID NO: 536059 - DNA, 75 bp, synthetic construct
  source 1..75: mol_type = other DNA
gaaagccagcggtgagattttgtttatgcaattactgctcttgctgcgtaaaaacagtttgcaggagagcatgga

SEQ ID NO: 536060 - DNA, 75 bp, synthetic construct
  source 1..75: mol_type = other DNA
agtaaccacttttcgacgctgtttcgccgtgagtttaactggtcaccacgcgatattcgccagcggcgggatggc

SEQ ID NO: 536061 - DNA, 75 bp, synthetic construct
  source 1..75: mol_type = other DNA
tcagcatttttgccgggcagtctggcgttggcaaatccagcctgctgaacgcgttgctggggctgcaaaaagaga

SEQ ID NO: 536062 - DNA, 75 bp, synthetic construct
  source 1..75: mol_type = other DNA
cccggagatcggtcgcaagatcgcccgcgaaaatgcggtgaataaaatctggatgctggaaggttacttgctgaa

SEQ ID NO: 536063 - DNA, 75 bp, synthetic construct
  source 1..75: mol_type = other DNA
gagagtcaaagtgggcatgggaacagatatcggtgccggaacaacttttaacatgctgcaaacgctgaacgaagc

SEQ ID NO: 536064 - DNA, 75 bp, synthetic construct
  source 1..75: mol_type = other DNA
gaaatcaccagtgccgttcaatgtggcagttgttgaaaaaggttcgtcactttatggataccgtcagcccattcc

SEQ ID NO: 536065 - DNA, 75 bp, synthetic construct
  source 1..75: mol_type = other DNA
agaatggaaagtactatcttgccggtgcgctgcacagcggtacgggaaaagtcagctacgttggtgggaaaagta

SEQ ID NO: 536066 - DNA, 75 bp, synthetic construct
  source 1..75: mol_type = other DNA
atggtaaatctccctcctgagctggggtcacctgatgtatgggctggtggaggtgttgggctgattgcaggtctt

SEQ ID NO: 536067 - DNA, 75 bp, synthetic construct
  source 1..75: mol_type = other DNA
aaacagcgcatcacgtctcaacttgcttctggcctggctggaggaccattttgccgatgaggtgaattgggatgc

SEQ ID NO: 536068 - DNA, 75 bp, synthetic construct
  source 1..75: mol_type = other DNA
gctggagtacagaactgctggcaataaaaatcaatgagataaccggttgccagttaaatgccggaaccgttcgcc

SEQ ID NO: 536069 - DNA, 75 bp, synthetic construct
  source 1..75: mol_type = other DNA
agaatgaaaagtattatcttgccggtgcactgcacagcggtacgagtaaagtcagctacattggtggaaacagta

SEQ ID NO: 536070 - DNA, 75 bp, synthetic construct
  source 1..75: mol_type = other DNA
atgaaaatagtgatagccgcgtttgcgtcctcttttatgttggttggttgcaagcctcgcattgaagtggctgcg

SEQ ID NO: 536071 - DNA, 75 bp, synthetic construct
  source 1..75: mol_type = other DNA
ttattatattattcataaatataaaaacttccatcgctgaagagtcaggtgtgaattttaattcggattttttaa

SEQ ID NO: 536072 - DNA, 75 bp, synthetic construct
  source 1..75: mol_type = other DNA
taaacaattaatgtatggtgcaacaggtggcatgactatccatcctggcggagtaacattatcccaggaagttag

SEQ ID NO: 536073 - DNA, 75 bp, synthetic construct
  source 1..75: mol_type = other DNA
catctgcttctatccctgtcttacagcgtgaagggcgtttgcgttacagtgccgctattggacgatatcgtcagg

SEQ ID NO: 536074 - DNA, 75 bp, synthetic construct
  source 1..75: mol_type = other DNA
cgaccgtatggaagcggacttagtgccaaaacatggcatcgaaattgatttcattcgtatctctggtctgcgtgg

SEQ ID NO: 536075 - DNA, 75 bp, synthetic construct
  source 1..75: mol_type = other DNA
aatgctttaatcgataccaatggtgttagtgatataagggttaataatggaacaggtgtaagttctgactggcga

SEQ ID NO: 536076 - DNA, 75 bp, synthetic construct
  source 1..75: mol_type = other DNA
gccagaacaacttaaacattgggggatctctttatctgatataaacggtgatcctgagaaaattcttgaacatga

SEQ ID NO: 536077 - DNA, 75 bp, synthetic construct
  source 1..75: mol_type = other DNA
attttctacccctatattggtcgcctgaaagtggccgggaaaacgcttacccaggtacgcaacgagattacagcg

SEQ ID NO: 536078 - DNA, 75 bp, synthetic construct
  source 1..75: mol_type = other DNA
atgaaaaagaacatttttaagttttcggtactgacattggctgttctgtctttgacagcatgtacccttgttcct

SEQ ID NO: 536079 - DNA, 75 bp, synthetic construct
  source 1..75: mol_type = other DNA
gaggagctgtgggagcgattttatccgcagcgccccgctacgcgtagggacgagaaacttcgtgtctgtcttggg

SEQ ID NO: 536080 - DNA, 75 bp, synthetic construct
  source 1..75: mol_type = other DNA
tggaaccgtgtgatttctctgctggtaccgacgatttccggggtgcatgacctgacagagacttcacggtggatt

SEQ ID NO: 536081 - DNA, 75 bp, synthetic construct
  source 1..75: mol_type = other DNA
tgattgatcagttgcgcgccaaaccgattatgtcgcaggctaacccggagctggagcagcaaatcgcgaactatg

SEQ ID NO: 536082 - DNA, 75 bp, synthetic construct
  source 1..75: mol_type = other DNA
cacgctgaaaatggaccgcagcggtatgaccctggcggaagcgctgggtaacgctgagggtatgaatcaggatgt

SEQ ID NO: 536083 - DNA, 75 bp, synthetic construct
  source 1..75: mol_type = other DNA
agcgtacaaaccagacgtggtgctcggtatgggcggctacgtatcaggtccaggtggtctggccgcgtggtcgtt

SEQ ID NO: 536084 - DNA, 75 bp, synthetic construct
  source 1..75: mol_type = other DNA
ggctgtggctatgtgaaatcgaaagattactggcgtcttggcgctatcttcggggtgatttatattgccatgctg

SEQ ID NO: 536085 - DNA, 75 bp, synthetic construct
  source 1..75: mol_type = other DNA
ctcgcagagagtggacgctgattggccttgtcattctcagcttaggtttgtgggtgtttggcagtgaagtgatta

SEQ ID NO: 536086 - DNA, 75 bp, synthetic construct
  source 1..75: mol_type = other DNA
ctgctggcgccgtttacaccgtcaaacactgcacgtactggtgggaccgttttcccggtcataaaaaacctgcca

SEQ ID NO: 536087 - DNA, 75 bp, synthetic construct
  source 1..75: mol_type = other DNA
gttgctggaaggaccatacgttgaaacggcacctgaagtggtagcggcattcagaccgaagagtgcaagacgtga

SEQ ID NO: 536088 - DNA, 75 bp, synthetic construct
  source 1..75: mol_type = other DNA
gttgctggaagggccatacgttgaaacggcaccagaagtggttgctgcattcagaccgaagagtgcaagacgcga

SEQ ID NO: 536089 - DNA, 75 bp, synthetic construct
  source 1..75: mol_type = other DNA
aagaccgtcagcaatactggaatgcgctaccgctggaaaaagcgggcgcagccaaaattatcgagcagccacagc

SEQ ID NO: 536090 - DNA, 75 bp, synthetic construct
  source 1..75: mol_type = other DNA
cgtttaatgcgcaaaaacaggcgctgaaatggggtctggctggtttttccagcaccacggtatggctggtatttg

SEQ ID NO: 536091 - DNA, 75 bp, synthetic construct
  source 1..75: mol_type = other DNA
ggcaatgattgtcggcatgatcctcgagccaattccggcaacagcgatcagttttattgcggttactatttgcgt

SEQ ID NO: 536092 - DNA, 75 bp, synthetic construct
  source 1..75: mol_type = other DNA
tgcggcttaaacgcctggggctgtcaaaaatgttccgccgtctggttgtcacacttatccggcgttatggcgtca

SEQ ID NO: 536093 - DNA, 75 bp, synthetic construct
  source 1..75: mol_type = other DNA
catgagtacgcacctggaaggattctcaccaaacgcaacggtgattgtactggttctggtgttctactttgcaca

SEQ ID NO: 536094 - DNA, 75 bp, synthetic construct
  source 1..75: mol_type = other DNA
attgcccttttcctggtgaaattcatgggcaaacgcacgctgacgttgggttatgcgattgtcattatcgacatt

SEQ ID NO: 536095 - DNA, 75 bp, synthetic construct
  source 1..75: mol_type = other DNA
ccactgtttaaatcattcccgaacgatccgtctgcacgtcgtattggcggttatttaatgtggatgatggtcatc

SEQ ID NO: 536096 - DNA, 75 bp, synthetic construct
  source 1..75: mol_type = other DNA
gaagtgattgtcgtcacctcacaaatggtcgatggcgatattaatcggctacgttctattgccggaattacccac

SEQ ID NO: 536097 - DNA, 75 bp, synthetic construct
  source 1..75: mol_type = other DNA
ccatgaaaaaactgtttatggcagtactggctcttagctgggcttttagcgcaacggcgaccgaacgtatcgtgg

SEQ ID NO: 536098 - DNA, 75 bp, synthetic construct
  source 1..75: mol_type = other DNA
tcactctgccgcgtgtaccagccacccttgagcagatgtacgccaacattcgtcaactggcaaaaacgttacagg

SEQ ID NO: 536099 - DNA, 75 bp, synthetic construct
  source 1..75: mol_type = other DNA
aacatctgtttgcccaggtagtaaccgatgtccaggccgtagagcaactactccaggaacagggatacgaaccgg

SEQ ID NO: 536100 - DNA, 75 bp, synthetic construct
  source 1..75: mol_type = other DNA
aacctgattctgggaatgggcccgcgtattgctgatgtcgttgagtctttacaccagcagctttggccgcaataa

SEQ ID NO: 536101 - DNA, 75 bp, synthetic construct
  source 1..75: mol_type = other DNA
atgccaaggatcatcaccaggccgtttcttttttccccactaacgttatgtatttcagccgtggcctctgccgcg

SEQ ID NO: 536102 - DNA, 75 bp, synthetic construct
  source 1..75: mol_type = other DNA
cgtatgcgcgcggggcgattttcggtctgactcgtggggtgaacgctaaccacattatacgcgcgacgctggagt

SEQ ID NO: 536103 - DNA, 75 bp, synthetic construct
  source 1..75: mol_type = other DNA
actggcgagaaagcggtgaaatcagaaaacggcctactgaccaccatcgcctgcggcccgactggcgaagtgaac

SEQ ID NO: 536104 - DNA, 75 bp, synthetic construct
  source 1..75: mol_type = other DNA
tccaatctccgggatcgccggtgaccagcaggccgcgctgtttggtcagttgtgcgtgaaagaagggatggcgaa

SEQ ID NO: 536105 - DNA, 75 bp, synthetic construct
  source 1..75: mol_type = other DNA
tgctggtccatttccacaatgaagcctgggggggggagaaggtcttcatcctgctggagcgcctgatccgtgagc

SEQ ID NO: 536106 - DNA, 75 bp, synthetic construct
  source 1..75: mol_type = other DNA
ccgatgatcgatgccgccacgccgttactggggatggtgatgcgcctggacgggatgaacagtcagaccatgccg

SEQ ID NO: 536107 - DNA, 75 bp, synthetic construct
  source 1..75: mol_type = other DNA
ccggtgaaaatgaatatctggctatggggaatataccggagaggcagagtaccgtggtgccggacagcgatggcg

SEQ ID NO: 536108 - DNA, 75 bp, synthetic construct
  source 1..75: mol_type = other DNA
gcgtcattgtttcgttccgttacattctctgcacgtttattgatgaagcggcgctgggcaacggctggtccaaca

SEQ ID NO: 536109 - DNA, 75 bp, synthetic construct
  source 1..75: mol_type = other DNA
ttgagcgaagccggatgtgaggtcgatatctggcgaaccacctactatcaccagatgccgtcacaccaggcgatt

SEQ ID NO: 536110 - DNA, 75 bp, synthetic construct
  source 1..75: mol_type = other DNA
atacttcgttttaaatggcacttcatcttctaacaaagtggttttaaacgccctgctgacaccgggtgatctggt

SEQ ID NO: 536111 - DNA, 75 bp, synthetic construct
  source 1..75: mol_type = other DNA
atgcagagaatcaatactttgtcgatccttgcaaactgttgctgacaaccccaggtattgatgcacgtaacggcg

SEQ ID NO: 536112 - DNA, 75 bp, synthetic construct
  source 1..75: mol_type = other DNA
acctggactgcactatcgaaaaacagggacgtgaaaactacatcattgttcatggccgcaatccgaaattaaaac

SEQ ID NO: 536113 - DNA, 75 bp, synthetic construct
  source 1..75: mol_type = other DNA
ctgtgggagctgttccagcttgattatcgcgtcctgttgcagcaccacgccttgcgtgcccttccgaagaaagaa

SEQ ID NO: 536114 - DNA, 75 bp, synthetic construct
  source 1..75: mol_type = other DNA
caatacgatccagccggaaaccgcgcgtgctctggcgtcgcatcccaatatcattgggattaaagacagcgccgg

SEQ ID NO: 536115 - DNA, 75 bp, synthetic construct
  source 1..75: mol_type = other DNA
cacctttcttccgcgcactggtcgattatgtcaatcaaggtaacagcgcgtttgattgccctggtcatcagggcg

SEQ ID NO: 536116 - DNA, 75 bp, synthetic construct
  source 1..75: mol_type = other DNA
ggtgaggcgctgttccgtgccgacttgtgcaacgccgacgtagcgatgggcgatctgctgattcacgaaggcgcg

SEQ ID NO: 536117 - DNA, 75 bp, synthetic construct
  source 1..75: mol_type = other DNA
taatgctgaatgcctgcgagcatcccacggagaaacattgtgggaaaagagaaaaaatcacgcattctgacgaaa

SEQ ID NO: 536118 - DNA, 75 bp, synthetic construct
  source 1..75: mol_type = other DNA
cgttgctacaggctggcgcgacaccggtttatctggaaaccgcacgtaacccgtatggttttatcggtggtattg

SEQ ID NO: 536119 - DNA, 75 bp, synthetic construct
  source 1..75: mol_type = other DNA
ccctgttaacaccgggggatctggtgctgtttgaccgtaataaccataaatctaatcaccacggagcgttgctac

SEQ ID NO: 536120 - DNA, 75 bp, synthetic construct
  source 1..75: mol_type = other DNA
ggtgaggcgctgttccgtgctgacttgtgcaacgcggatgtggcaatgggcgatctgctgattcacgaaggcgcg

SEQ ID NO: 536121 - DNA, 75 bp, synthetic construct
  source 1..75: mol_type = other DNA
gacgacaaaatgctcgacgcgctggatatcccgcgcgagatgctgcctgaagtgcgtcgctcttcggaagtgtac

SEQ ID NO: 536122 - DNA, 75 bp, synthetic construct
  source 1..75: mol_type = other DNA
tgttcctggttcaatggacgtcaaaattagtgtctatgatggtgcatcgaacaaacatcttgaaaaactaacatt

SEQ ID NO: 536123 - DNA, 75 bp, synthetic construct
  source 1..75: mol_type = other DNA
agctcgcctttccctgcaggagcgacgttcggtaatcatgacccccgttacggtggcaaaggtgatttttttaac

SEQ ID NO: 536124 - DNA, 75 bp, synthetic construct
  source 1..75: mol_type = other DNA
atgacagatgcagaaagagaatatcttattagttacctgattggttatttattgggtcgacgcctggaagccctg

SEQ ID NO: 536125 - DNA, 75 bp, synthetic construct
  source 1..75: mol_type = other DNA
aactgtttaaagattttgcacatacgactcaatttcaggcccaagtcaaaggaagagttaaagataacccatatc

SEQ ID NO: 536126 - DNA, 75 bp, synthetic construct
  source 1..75: mol_type = other DNA
tgtttttatgaaaacagctaaagacataattgcaacgctaaagattggtaacgctccgattgatttaaaaatcct

SEQ ID NO: 536127 - DNA, 75 bp, synthetic construct
  source 1..75: mol_type = other DNA
atcaatgaaaattctgatgaaatcagaatgatgagtaaccaactcttactaaaaaacaatggaagctcagtaaca

SEQ ID NO: 536128 - DNA, 75 bp, synthetic construct
  source 1..75: mol_type = other DNA
ctgtagtattaggtattcaaaccttagagatgggcgttttaggtggtatcatcgccggggtaataacttattttc

SEQ ID NO: 536129 - DNA, 75 bp, synthetic construct
  source 1..75: mol_type = other DNA
taaacgtgccctgtaccacaatgctgctgccgtggtgctggcacacaatcacccgtccggcgaagtcacccccag

SEQ ID NO: 536130 - DNA, 75 bp, synthetic construct
  source 1..75: mol_type = other DNA
cttatcaccgaacgtctggtacaggcactgggcctggtggatatccgggtgccggaccatctgatagtcggtggc

SEQ ID NO: 536131 - DNA, 75 bp, synthetic construct
  source 1..75: mol_type = other DNA
atgacacaaaaaaaatcttttaaatcaaaattatgggagtttttacaaagtctggggaaaacctttatgttcccg

SEQ ID NO: 536132 - DNA, 75 bp, synthetic construct
  source 1..75: mol_type = other DNA
gttcataagttccgacagtttcgttacatccggtttctgaacaagagggccagaaaacgcctcaacacaaagcta

SEQ ID NO: 536133 - DNA, 75 bp, synthetic construct
  source 1..75: mol_type = other DNA
gtggcttacgccatctaccgcaccgcgcgtccggaaaatcggccggtcattaaggggttgctgctttccagcgtg

SEQ ID NO: 536134 - DNA, 75 bp, synthetic construct
  source 1..75: mol_type = other DNA
cgccgttttgtgaataactcctacctgcatctgggcgtattcagcggacgtgatctggttggcgtttttcagtgg

SEQ ID NO: 536135 - DNA, 75 bp, synthetic construct
  source 1..75: mol_type = other DNA
atggggaaaacaataacagctctcattactcctgaaaatctcgcattagcattaacaggaaagtcagacttgcca

SEQ ID NO: 536136 - DNA, 75 bp, synthetic construct
  source 1..75: mol_type = other DNA
tgatgatgtgctggctgcgcaccgcgttccgccgcaactgatgggggcgatgccgggcgaaaaaaagtgcgtttg

SEQ ID NO: 536137 - DNA, 75 bp, synthetic construct
  source 1..75: mol_type = other DNA
tgcccggcaaacgtcctggcatcagtctgcgctttactttaagcgcaatgtattactcggttgctacatcccgca

SEQ ID NO: 536138 - DNA, 75 bp, synthetic construct
  source 1..75: mol_type = other DNA
attgcctcgcggtcgttactgcgcgaggtaaaaacgacattgccggattcggcaagtgtaagggagtttgcccgg

SEQ ID NO: 536139 - DNA, 75 bp, synthetic construct
  source 1..75: mol_type = other DNA
acaggcggaagtgctggctcattatctcaagactgaagatcttcagcgtgtactggcttcgaactctccagctaa

SEQ ID NO: 536140 - DNA, 75 bp, synthetic construct
  source 1..75: mol_type = other DNA
aacaacattctatgaacttgatggcgagtggtatcacgagatttgcaagaatgcaatcaaacgaggaggacagcg

SEQ ID NO: 536141 - DNA, 75 bp, synthetic construct
  source 1..75: mol_type = other DNA
tgcgtccgattacgcctcacaggcagcacagctggcgacggagggtatctcagggatggtgaataacatcacgga

SEQ ID NO: 536142 - DNA, 75 bp, synthetic construct
  source 1..75: mol_type = other DNA
atactgctgcaatgccagcgtgatgacaaaacccttagcactaatccgctggtctggcggcgcgtaaagccataa

SEQ ID NO: 536143 - DNA, 75 bp, synthetic construct
  source 1..75: mol_type = other DNA
atgtcaacgcggcagatcgtacagcttgctgactcccttgtcaaaggctgggaaaccagaattccggcaatgaaa

SEQ ID NO: 536144 - DNA, 75 bp, synthetic construct
  source 1..75: mol_type = other DNA
cgactgatttaccagcggctttccacattgaacaacgcgcccacacctttccgtggagtgaaaaaacctttgcca

SEQ ID NO: 536145 - DNA, 75 bp, synthetic construct
  source 1..75: mol_type = other DNA
gagcaactggcactggtggggcagaatacagagctggcgaagctgaagtaccagactgcgcagggcgaactgaaa

SEQ ID NO: 536146 - DNA, 75 bp, synthetic construct
  source 1..75: mol_type = other DNA
ggcaggcagtcttgtgcagctgattgaccagcgggtgcaggcggtgatgctgtccatgcgacgtgacggaggaat

SEQ ID NO: 536147 - DNA, 75 bp, synthetic construct
  source 1..75: mol_type = other DNA
cggtaaatcgacattaatgaaaatattggccggtgtttatccgccaacccagggaacaataaaactacgtggtga

SEQ ID NO: 536148 - DNA, 75 bp, synthetic construct
  source 1..75: mol_type = other DNA
gtgggcgatctgcaatgtgaagcgattctttccgagcctttctttctgctttgccatcgcgatagcgctttggcc

SEQ ID NO: 536149 - DNA, 75 bp, synthetic construct
  source 1..75: mol_type = other DNA
caacatcttattgatcacggataccgcgacatcggcatcatctgcggcccgcgtgaaatgctgaatactcaggat

SEQ ID NO: 536150 - DNA, 75 bp, synthetic construct
  source 1..75: mol_type = other DNA
actggcgattcgtaatggtgagctaaaaatggacaccggcaaaattgccgatgcgctgatcagcgaagcacagca

SEQ ID NO: 536151 - DNA, 75 bp, synthetic construct
  source 1..75: mol_type = other DNA
ggcgtggcgttttcgcacggcgcgaacgacgggcagaaagggatcggcctggtaatgctggtactggtggggatt

SEQ ID NO: 536152 - DNA, 75 bp, synthetic construct
  source 1..75: mol_type = other DNA
atcatggcggtagcactggcgctcggcattggcaccatgattggctggcgtcgtgtagcgatgaccatcggtgag

SEQ ID NO: 536153 - DNA, 75 bp, synthetic construct
  source 1..75: mol_type = other DNA
atctgtgtgactacatcctgtttgactccgcatgggtcggctatgaacagtttattccgatgatggcggactgtt

SEQ ID NO: 536154 - DNA, 75 bp, synthetic construct
  source 1..75: mol_type = other DNA
gtactttgttttaaacggcacctcctcttccaacaaagtggttttaaacgccctgctgacaccgggtgatctggt

SEQ ID NO: 536155 - DNA, 75 bp, synthetic construct
  source 1..75: mol_type = other DNA
gtgatctgatccttcaactcagcaaaagttcgatttattcaacaaagccccacggtgcgttgctacaggctggcg

SEQ ID NO: 536156 - DNA, 75 bp, synthetic construct
  source 1..75: mol_type = other DNA
caacagcattccattcgtaactcgttatccgggaaccacggaccctaacaaagtttatacctatgtcggtgacta

SEQ ID NO: 536157 - DNA, 75 bp, synthetic construct
  source 1..75: mol_type = other DNA
ttatccttaagtaaaaatgcccctcattatagatggatgtggtttattgctatgtctttttttattggagggaaa

SEQ ID NO: 536158 - DNA, 75 bp, synthetic construct
  source 1..75: mol_type = other DNA
actgcaatgccattcaagagggaaaatataaaacaggcatgtcagaccgtttcgctgtcgccaatgagtgtgtaa

SEQ ID NO: 536159 - DNA, 75 bp, synthetic construct
  source 1..75: mol_type = other DNA
gcgcgaaaccactgacgcgccggtaacgaacacccgggcggcaaaaacaaccgactccaccagcaccagcaccag

SEQ ID NO: 536160 - DNA, 75 bp, synthetic construct
  source 1..75: mol_type = other DNA
atgaccgtacatcactgcttagcacccataaggtgctgcgtaatacctattttctgctgagcctgacgctggcct

SEQ ID NO: 536161 - DNA, 75 bp, synthetic construct
  source 1..75: mol_type = other DNA
gcttcgatttcgatgttgaaattggcaagggcgaaaccatgaaatacatcctggcgctgaaagatcagcctgagg

SEQ ID NO: 536162 - DNA, 75 bp, synthetic construct
  source 1..75: mol_type = other DNA
aaatttttaggtgaatgtaaagccgcagaccctgcatcaataagcaaaatcctttcaaaatttggcagagtgaaa

SEQ ID NO: 536163 - DNA, 75 bp, synthetic construct
  source 1..75: mol_type = other DNA
atggatcgtatagttagttcttcacatgaccgtacatcattacttagtacccataaggtgctgcgtaatacctat

SEQ ID NO: 536164 - DNA, 75 bp, synthetic construct
  source 1..75: mol_type = other DNA
taaaacggcgaataagccgaccgggattatctccgcattcgcctttaccggttttctgggttatatcctcggacc

SEQ ID NO: 536165 - DNA, 75 bp, synthetic construct
  source 1..75: mol_type = other DNA
ggtctgattctgacgctggtgggtatgtatggtttgatgttcctgacctataaaacggcgaataagccgaccggg

SEQ ID NO: 536166 - DNA, 75 bp, synthetic construct
  source 1..75: mol_type = other DNA
attatgttgataatgagttaaaaattgagtttggatgtattcctccatgtctgttacctattgggaatagaactc

SEQ ID NO: 536167 - DNA, 75 bp, synthetic construct
  source 1..75: mol_type = other DNA
gcaaaactctgccattcagtaataggactttatgattatgtaatttccggaagatatcatttagatggggatcta

SEQ ID NO: 536168 - DNA, 75 bp, synthetic construct
  source 1..75: mol_type = other DNA
atgagtattgatcgcacttcgcctctgaagcctgtaagcaccgttcaaccgcgcgaaaccactgacgcgccggta

SEQ ID NO: 536169 - DNA, 75 bp, synthetic construct
  source 1..75: mol_type = other DNA
ctcacactgtggatgatgggcaatcttggacaggcgcaatggccgacgttattggtcgccagttcattcattctg

SEQ ID NO: 536170 - DNA, 75 bp, synthetic construct
  source 1..75: mol_type = other DNA
aacagctacgacaactcacgttgtggatgatgggcaatctcggtcaggcgcaatggccaacgttattggttgcca

SEQ ID NO: 536171 - DNA, 75 bp, synthetic construct
  source 1..75: mol_type = other DNA
cattcttaattcatttggtgtggggtgttcagaggatagcttgaaaatattactgcaatcccaaagagtcgtttt

SEQ ID NO: 536172 - DNA, 75 bp, synthetic construct
  source 1..75: mol_type = other DNA
gctgtttgaccgcaataaccataaatctaatcaccacggggcgttgctacaggctggtgcaacaccggtttatct

SEQ ID NO: 536173 - DNA, 75 bp, synthetic construct
  source 1..75: mol_type = other DNA
aatcagatgatgttaatgctaacgagttgacgctggtatttaaaacacggatcaaaatgttttatcgccccgcac

SEQ ID NO: 536174 - DNA, 75 bp, synthetic construct
  source 1..75: mol_type = other DNA
gagttgacgctggtatttaaaacacggatcaaaatgttttatcgccccgcacacctgaagggacgggtaaacgat

SEQ ID NO: 536175 - DNA, 75 bp, synthetic construct
  source 1..75: mol_type = other DNA
gtgtctctgttgacggatgctcatcgtcgaggtgcaaaggttctcattactaacagtggcgcgccaaacatcaga

SEQ ID NO: 536176 - DNA, 75 bp, synthetic construct
  source 1..75: mol_type = other DNA
ctgaccgaaccggacaccaataccaatgcggagggtgaatcagccgccgtggatgtgcaactggtgtacctgact

SEQ ID NO: 536177 - DNA, 75 bp, synthetic construct
  source 1..75: mol_type = other DNA
atactaccgattatcaacaccggtatcgcccataaggaagccggcgttggccagattggcgccggaatcaccacg

SEQ ID NO: 536178 - DNA, 75 bp, synthetic construct
  source 1..75: mol_type = other DNA
gaaggtctctatgtgggggtcgcctcagaaaacggaatctatggtcactcccgtttttgcaacaccgattttgac

SEQ ID NO: 536179 - DNA, 75 bp, synthetic construct
  source 1..75: mol_type = other DNA
ggattacgtggtgggcttgatgatgagcgtggcgcgctaactttaaagtatgtggagcttgcaaatgcaattgac

SEQ ID NO: 536180 - DNA, 75 bp, synthetic construct
  source 1..75: mol_type = other DNA
aaggcggttgtttttggcataaattgccagaaattgagaaagtttcattgccgcataccagaaaacatattttcc

SEQ ID NO: 536181 - DNA, 75 bp, synthetic construct
  source 1..75: mol_type = other DNA
cctcccggcacgtccaatacctatttcatttgccagaatacgtgaaagattagccttgatgtcatcggtaagtga

SEQ ID NO: 536182 - DNA, 75 bp, synthetic construct
  source 1..75: mol_type = other DNA
gaaaggctgcaaggttttcctgatgggcatacgttgatccctacggaaaagcgtaaaaaagtttcttcagatgaa

SEQ ID NO: 536183 - DNA, 75 bp, synthetic construct
  source 1..75: mol_type = other DNA
aaattgggcgaaaagatgatgctggaccgcagggtaaagggtggcaaaaagagataagttttactcttgattccc

SEQ ID NO: 536184 - DNA, 75 bp, synthetic construct
  source 1..75: mol_type = other DNA
ggcatacgttgatcccgacggaaaagcgtaaaaaagttaattcagatgaactggtatatcttcgcaatcactatc

SEQ ID NO: 536185 - DNA, 75 bp, synthetic construct
  source 1..75: mol_type = other DNA
atggatctaattgggatctgtatggacctaattattggatctatccagtggataatgtggataagtgaaaaaccg

SEQ ID NO: 536186 - DNA, 75 bp, synthetic construct
  source 1..75: mol_type = other DNA
cacctgggtggtgaagacttcgacagtcgtctgatcaactatctggttgaagaattcaagaaagatcagggcatt

SEQ ID NO: 536187 - DNA, 75 bp, synthetic construct
  source 1..75: mol_type = other DNA
tgccgtggcggggcattatgctggccattctcctgaacaccttcctgctggcgatctggtggctgggatacagca

SEQ ID NO: 536188 - DNA, 75 bp, synthetic construct
  source 1..75: mol_type = other DNA
tggctacgcaactcaggcgtctcccagcgtgatgtcctcgccaacatcatcgacaacgcgaagcagtgccgcatc

SEQ ID NO: 536189 - DNA, 75 bp, synthetic construct
  source 1..75: mol_type = other DNA
tcacgtatttcgggtgtcttcgaacattgcgaagcgcggaaaacgttttatggtcgccagttagaaaccgcagcc

SEQ ID NO: 536190 - DNA, 75 bp, synthetic construct
  source 1..75: mol_type = other DNA
cgccgctgttgctggatcttaatgagaacgatccgggtattctggttacgcaatccgtacataaacagcaggctg

SEQ ID NO: 536191 - DNA, 75 bp, synthetic construct
  source 1..75: mol_type = other DNA
gattatggatggcaccactcctcgtgtgctggagaacgccgaaggcgatcgcaccacgccttctatcattgccta

SEQ ID NO: 536192 - DNA, 75 bp, synthetic construct
  source 1..75: mol_type = other DNA
tgcgtgtttactcgcggtttcgtgcgtcagtacaacgccgcactcgggtatgacaacgcatccgccgacaccggt

SEQ ID NO: 536193 - DNA, 75 bp, synthetic construct
  source 1..75: mol_type = other DNA
tgctggaacatctgatcgacgaactggaaaaacgcggcgtggcgacactatggctggaagtccgtgcctcaaacg

SEQ ID NO: 536194 - DNA, 75 bp, synthetic construct
  source 1..75: mol_type = other DNA
atgaacacgatttcttccctcgaaacgactgatttaccagcggctttccacattgaacaacgcgcccacgccttt

SEQ ID NO: 536195 - DNA, 75 bp, synthetic construct
  source 1..75: mol_type = other DNA
ctgcaaagcgtgacggtgataccgcgctcagtcagttgcagtcagcatttgacgcgtacaaaacggagcaggcaa

SEQ ID NO: 536196 - DNA, 75 bp, synthetic construct
  source 1..75: mol_type = other DNA
gggctttattacctgggctacaaaagcgggcatgaaaacgccacgcgcgacggcgataaggcggtcagtgagttg

SEQ ID NO: 536197 - DNA, 75 bp, synthetic construct
  source 1..75: mol_type = other DNA
gtgtggactaacctgctaaaaaatctgccgtggcgcagtctgctgctggcggtggtcataaatgcttttctgatt

SEQ ID NO: 536198 - DNA, 75 bp, synthetic construct
  source 1..75: mol_type = other DNA
aggagcaaatccgcgtgctgattgatgcgattgcttccattgcctcggatgccgggtgtgccattccgcagtcca

SEQ ID NO: 536199 - DNA, 75 bp, synthetic construct
  source 1..75: mol_type = other DNA
aagatgcaattggtcctaacatccgtcgatatctatttgtcccagatgaatataaaaatgataaaaaaaccattg

SEQ ID NO: 536200 - DNA, 75 bp, synthetic construct
  source 1..75: mol_type = other DNA
aatgagagggatataaattcagaatctataaaatacatcaaaagcattataaaaaatgacattattcttgtgggg

SEQ ID NO: 536201 - DNA, 75 bp, synthetic construct
  source 1..75: mol_type = other DNA
cggcgtgccggtggagaaagtcgcagcagcctacggcaagctcgcaacggacccgacatcgggcctgatcgcgat

SEQ ID NO: 536202 - DNA, 75 bp, synthetic construct
  source 1..75: mol_type = other DNA
ccagacatcatcatgccgacgggtaatgaagaaacggaaacgggtgagaaattcgaagataacgcgctgccgtgg

SEQ ID NO: 536203 - DNA, 75 bp, synthetic construct
  source 1..75: mol_type = other DNA
caactgcagaaactggaaaaacagaatgtcagcagtgtgatcatcgacctgcgtagcaatggtggtggggcgttg

SEQ ID NO: 536204 - DNA, 75 bp, synthetic construct
  source 1..75: mol_type = other DNA
atgggtattaagggaatgtggaaagatcttcgcacatcaccagttgacacactggtcagatggcaggagcaacgc

SEQ ID NO: 536205 - DNA, 75 bp, synthetic construct
  source 1..75: mol_type = other DNA
ttatttaatgttgatcctggttctcaccgtttcatcattatgatgacgttgacagggttgactctggtgatcagc

SEQ ID NO: 536206 - DNA, 75 bp, synthetic construct
  source 1..75: mol_type = other DNA
tcacacttacccgacgttatggcgtcagtctcattcatctggatgccagcgctgaatatctgccgggcctgccca

SEQ ID NO: 536207 - DNA, 75 bp, synthetic construct
  source 1..75: mol_type = other DNA
ccgaaaccctgactgaacacggcacgcgctactgcatggcgcagaattatctgcctgccattaaagatggcgaca

SEQ ID NO: 536208 - DNA, 75 bp, synthetic construct
  source 1..75: mol_type = other DNA
tattccgtactgtacggttcacaggcaattggcggtattgttaacttcatcaccaaaaagggtgaatctccggac

SEQ ID NO: 536209 - DNA, 75 bp, synthetic construct
  source 1..75: mol_type = other DNA
aatttgccaacgaagtaaaaacgacacagcctgttcccagtccgatgattcaggctctgaccgttcataacaagt

SEQ ID NO: 536210 - DNA, 75 bp, synthetic construct
  source 1..75: mol_type = other DNA
gacctgtttgggtaataagttgcttaatgattgtgttgtggtcaggccttatctcccatggacgaaataagctcc

SEQ ID NO: 536211 - DNA, 75 bp, synthetic construct
  source 1..75: mol_type = other DNA
tggcttgacggacgatgtcaaagttcaactgcagaaactggaaaaacaaaatgtcagcagtgtcattatcgacct

SEQ ID NO: 536212 - DNA, 75 bp, synthetic construct
  source 1..75: mol_type = other DNA
gcgatcaacccaaagaacatcatcctaaagctaattggctgcgtgatggcattttacggcagcattttgggactg

SEQ ID NO: 536213 - DNA, 75 bp, synthetic construct
  source 1..75: mol_type = other DNA
tacatggcaccctgtgagcaatgtgtatacattcgctacgccatgtttgtgatggttattggaggattggttgca

SEQ ID NO: 536214 - DNA, 75 bp, synthetic construct
  source 1..75: mol_type = other DNA
cgatgggcgcgttaattatcctggcgcactctttcttccagatctatctctacatggcaccctgtgagcaatgtg

SEQ ID NO: 536215 - DNA, 75 bp, synthetic construct
  source 1..75: mol_type = other DNA
attaaccggcattcgcgtaccgccgcaaaccgaacgcaaacacatcattttcgaaaacgattcgccggaagccat

SEQ ID NO: 536216 - DNA, 75 bp, synthetic construct
  source 1..75: mol_type = other DNA
actggaacctatctggttaaccaagaatgaaactgccagtcgtctacgtggacgtattgaaacagtgatcgatta

SEQ ID NO: 536217 - DNA, 75 bp, synthetic construct
  source 1..75: mol_type = other DNA
actggagacctatgcctaccctttcattggcaaaaaggccgttagtgaaatcaccaaagtcgatcttctggcaat

SEQ ID NO: 536218 - DNA, 75 bp, synthetic construct
  source 1..75: mol_type = other DNA
cgcctggcgcagaccaacagtgaagatgttttctcgctggcaatgacggcgtttgctcgcgaaatcgatccgcat

SEQ ID NO: 536219 - DNA, 75 bp, synthetic construct
  source 1..75: mol_type = other DNA
aagctgagttgaatgcgctgtgggacagtaaggttaaattcgacgagttaagcctgaagctggcgggaaaaacgg

SEQ ID NO: 536220 - DNA, 75 bp, synthetic construct
  source 1..75: mol_type = other DNA
cagttgcagaaactggaaaaacagaatgtcagcagtgtcatcatcgacctgcgtagcaatggcggtggggcgttg

SEQ ID NO: 536221 - DNA, 75 bp, synthetic construct
  source 1..75: mol_type = other DNA
atgggtattaagggaatgtggaaagaccttcgcacttcaccggtggacacgctggtaagatggcaagaacaacgt

SEQ ID NO: 536222 - DNA, 75 bp, synthetic construct
  source 1..75: mol_type = other DNA
atgccaaagaaagccagagaactgtctgcacttgcggtttccagacttaaagctgacgggcgttatgccgttggc

SEQ ID NO: 536223 - DNA, 75 bp, synthetic construct
  source 1..75: mol_type = other DNA
taatccccttcaggaaaaacacgagcaaaaagcccggcaggaaatactggcccggaagaaaaagacctttgccga

SEQ ID NO: 536224 - DNA, 75 bp, synthetic construct
  source 1..75: mol_type = other DNA
gagcctgcgcgactgtaacgagaaactgtttaccgcctggttctctgacttaacgccagaaacgctggttacgcg

SEQ ID NO: 536225 - DNA, 75 bp, synthetic construct
  source 1..75: mol_type = other DNA
tgccggatacataccggtatcatctgtctcatcgtattcgccgggtgcttgggattgaaaagacatcatcgccat

SEQ ID NO: 536226 - DNA, 75 bp, synthetic construct
  source 1..75: mol_type = other DNA
tgccggatacataccggtatcatctgtctcatcgtattcgccggctggttgggattgaaaagacatcatcgccat

SEQ ID NO: 536227 - DNA, 75 bp, synthetic construct
  source 1..75: mol_type = other DNA
tgccggatacataccggtatcatctgtctcatcgtattcgccggctgtttgggaatgaaaagacatcatcgccat

SEQ ID NO: 536228 - DNA, 75 bp, synthetic construct
  source 1..75: mol_type = other DNA
gaggcgggtttactggtgaccgcactggacggcctgttctggtttggcagtcagcgtattgcggctgatgtcctg

SEQ ID NO: 536229 - DNA, 75 bp, synthetic construct
  source 1..75: mol_type = other DNA
atgcgtacacgaattgattatctggcggataaatactgttttacagaactgaatgaatcgccccgtcttcgccgg

SEQ ID NO: 536230 - DNA, 75 bp, synthetic construct
  source 1..75: mol_type = other DNA
aaggccagcctttctggtgtgccggatacattccggtatcatctgtctcaccgtattcgtcgcgtggttgggaat

SEQ ID NO: 536231 - DNA, 75 bp, synthetic construct
  source 1..75: mol_type = other DNA
tcgtctggttgtcactcttagccggagttatggcgtccgtctcattcatctggttgccagcgccgcatttctgcc

SEQ ID NO: 536232 - DNA, 75 bp, synthetic construct
  source 1..75: mol_type = other DNA
gaatgaatctccacgccttcgccggcagtggcaggatgttctggaggagtgccggcagacagaggccgggccaga

SEQ ID NO: 536233 - DNA, 75 bp, synthetic construct
  source 1..75: mol_type = other DNA
tcgtctggttgtcactcttagccggcgttatggcgtccgtctcattcatctggttgccagcgccgaatttctgcc

SEQ ID NO: 536234 - DNA, 75 bp, synthetic construct
  source 1..75: mol_type = other DNA
tgccggatacataccggtatcatctgtctcatcgtattcgccggttgattgggagtgaaaagacatcatcgccat

SEQ ID NO: 536235 - DNA, 75 bp, synthetic construct
  source 1..75: mol_type = other DNA
gcatggcaggcactgcgcgtcagtgtgaagagttccaccatgaagatgattaccagctttgcagcaccattgata

SEQ ID NO: 536236 - DNA, 75 bp, synthetic construct
  source 1..75: mol_type = other DNA
gccggcagacagaggccggaccagaagaacggctgcgtattgccctgctgaatgtggattacgtcaccagttttg

SEQ ID NO: 536237 - DNA, 75 bp, synthetic construct
  source 1..75: mol_type = other DNA
aaggccagcctttctggtgtgaaccgccccgggtttcctggagagtgttttatctgtgaactcaggctgccagat

SEQ ID NO: 536238 - DNA, 75 bp, synthetic construct
  source 1..75: mol_type = other DNA
cgacgaccggaaaatcgcttcgcatcactcaaatcacatttaacataatatacattatgcgcaccaacattcgtt

SEQ ID NO: 536239 - DNA, 75 bp, synthetic construct
  source 1..75: mol_type = other DNA
tttgtcactcatgacctcaatgaagcgataactattggtcagcagattttagttatgagtcaaggacgaattgcg

SEQ ID NO: 536240 - DNA, 75 bp, synthetic construct
  source 1..75: mol_type = other DNA
aatataactcaggctatacagagaccatctacagctatgtaaacaacatctttaccaaagaaggcggcacacatg

SEQ ID NO: 536241 - DNA, 75 bp, synthetic construct
  source 1..75: mol_type = other DNA
aacttgttttacgaaaagccctgtgataccacctatgtgggcacattatgcaggtaattcttctggttttgtaat

SEQ ID NO: 536242 - DNA, 75 bp, synthetic construct
  source 1..75: mol_type = other DNA
gagcggatataattgataaattgatgatggatgaaacacatataggaataaaattctctcatttacatgaatata

SEQ ID NO: 536243 - DNA, 75 bp, synthetic construct
  source 1..75: mol_type = other DNA
gcaatgaaaatggttcagtcttacaccgtggcttaaacgcagaaggatgggcgcatctttttgcaaaggaagaag

SEQ ID NO: 536244 - DNA, 75 bp, synthetic construct
  source 1..75: mol_type = other DNA
gctgatgccctgaggctgagaaatgccggaatgccgatggtgactacgaccgtggaggtgcacgataacctgacg

SEQ ID NO: 536245 - DNA, 75 bp, synthetic construct
  source 1..75: mol_type = other DNA
aatgtggattacgtcaccagttttgaactgccttttcgcttgttgcttacccgtacaccacaactgattgctgcg

SEQ ID NO: 536246 - DNA, 75 bp, synthetic construct
  source 1..75: mol_type = other DNA
cgaataaatactcttttacagaacggaacgaatcgccacgtcttcgccggcagtggcaggatgttctggaggagt

SEQ ID NO: 536247 - DNA, 75 bp, synthetic construct
  source 1..75: mol_type = other DNA
tgaccatccagttggataatcaccagcaagggatcggcacctcgctgttttgggtggtctataaccttggtttta

SEQ ID NO: 536248 - DNA, 75 bp, synthetic construct
  source 1..75: mol_type = other DNA
tgatgtatactatggcggggctctatttattcagcggcattctggtgcagtttcttaaagtgcctggcgaaaaat

SEQ ID NO: 536249 - DNA, 75 bp, synthetic construct
  source 1..75: mol_type = other DNA
tggacggcctgttctggtctggcagtcagcgtattgcggctgatgtcctgagactaagacagagcggaatgccgg

SEQ ID NO: 536250 - DNA, 75 bp, synthetic construct
  source 1..75: mol_type = other DNA
aacaggagtgcgaagcgctgctggttgacttcccggaacaggaaaaagagctacgggagttgtcggcatggatag

SEQ ID NO: 536251 - DNA, 75 bp, synthetic construct
  source 1..75: mol_type = other DNA
ctccaggcggtaagcggcgggacatggacgggttgtatttatgatgtaaataaaatcggcgcggccttgcgcgat

SEQ ID NO: 536252 - DNA, 75 bp, synthetic construct
  source 1..75: mol_type = other DNA
ttagccgcctggcaaactatctcaatccggataaaagaaactggcggcgaaaggcattacctcagtgcgttcccg

SEQ ID NO: 536253 - DNA, 75 bp, synthetic construct
  source 1..75: mol_type = other DNA
aagtctcaggctcggcctatcgcgaaaccaaagatcgtggcttccaccacggcactttgctgctcaatgccgacc

SEQ ID NO: 536254 - DNA, 75 bp, synthetic construct
  source 1..75: mol_type = other DNA
agcggaaattatctccccggacaaaacgccggacttgccgaacttcgccgaaacctttgcccgccagagtagctg

SEQ ID NO: 536255 - DNA, 75 bp, synthetic construct
  source 1..75: mol_type = other DNA
gctacaacaagttacagatcccggtacagagcagtctggcgcgttatgctgactggctgaaagattttaaacagg

SEQ ID NO: 536256 - DNA, 75 bp, synthetic construct
  source 1..75: mol_type = other DNA
aaccgatgataacggtaacgaacaaacaattgttttagatggtaattgtgtatttggtgattggcagttaacgaa

SEQ ID NO: 536257 - DNA, 75 bp, synthetic construct
  source 1..75: mol_type = other DNA
aagttgaaagacgcaggttatttggtccttgacgcaagtgctgtcgtcggtgctccaagtgacgtgtacctccct

SEQ ID NO: 536258 - DNA, 75 bp, synthetic construct
  source 1..75: mol_type = other DNA
ctcacgggaggaggccaccgcaatattaaacgcccgacccagtcatcaggatttacttcctgatcctgagctgcc

SEQ ID NO: 536259 - DNA, 75 bp, synthetic construct
  source 1..75: mol_type = other DNA
tggaagaaacctaccaggttaccagtgccctgaagcatctgtcatacggtaagcatgtttcgttaatcaccgatg

SEQ ID NO: 536260 - DNA, 75 bp, synthetic construct
  source 1..75: mol_type = other DNA
gcgttatgcggactggctggaagattttaaacaggggcctaccggtaaagagaggactgtctatggcatctacag

SEQ ID NO: 536261 - DNA, 75 bp, synthetic construct
  source 1..75: mol_type = other DNA
atacgcttatcttgtataccaatttttgattcaatcacaaaaaacaaatacactccattacattgtgtaaaaaat

SEQ ID NO: 536262 - DNA, 75 bp, synthetic construct
  source 1..75: mol_type = other DNA
cggtctgtttgacagcaaaggcacactcatcgccgtgggtaatgttgcggaaggttacaaaccgcagcttgatga

SEQ ID NO: 536263 - DNA, 75 bp, synthetic construct
  source 1..75: mol_type = other DNA
tatatttatgtagtgattgaacatcagagccgtgaggatattcatatggcctttcgtctgatgcgatattccatg

SEQ ID NO: 536264 - DNA, 75 bp, synthetic construct
  source 1..75: mol_type = other DNA
agataaaagaatctgtcaggagatcattgcgcgaaaaaatggcgaaaatgatccccgaagaagataaaagcgccc

SEQ ID NO: 536265 - DNA, 75 bp, synthetic construct
  source 1..75: mol_type = other DNA
ccattgtgaaagatccggagcatgtcgagacggaagaacagttgtgggataagtttgtgctgatgcatcacgcgg

SEQ ID NO: 536266 - DNA, 75 bp, synthetic construct
  source 1..75: mol_type = other DNA
ctattgtgaaagatccgcaacatgtagagacggaagaacagttgtgggataaatttgtgctgatgcaccacgcgg

SEQ ID NO: 536267 - DNA, 75 bp, synthetic construct
  source 1..75: mol_type = other DNA
tcgtcacactcatccggcgttatggcgtcagtctcattcatctggatgccagcgctgaatgcctgccgggtttac

SEQ ID NO: 536268 - DNA, 75 bp, synthetic construct
  source 1..75: mol_type = other DNA
cggcgcgatgatccgctggctcgatttcaacgatacctggctggcggcggagtggggccatccttccgacaacct

SEQ ID NO: 536269 - DNA, 75 bp, synthetic construct
  source 1..75: mol_type = other DNA
gcccggaatttgatcgtgaaatcgttgatatcgtcgattacgtcatgaactacgaaatcagctctaaagtggcct

SEQ ID NO: 536270 - DNA, 75 bp, synthetic construct
  source 1..75: mol_type = other DNA
gcgcacattcatgccgcagctcctgggccattagcaagacgatatgatcctaatcaaacaccagatgaaaggaaa

SEQ ID NO: 536271 - DNA, 75 bp, synthetic construct
  source 1..75: mol_type = other DNA
gctgaaatttacggtgattatgatgcatcagacgcaggatatgacgccggagatgatgatatcgcgatagaaccg

SEQ ID NO: 536272 - DNA, 75 bp, synthetic construct
  source 1..75: mol_type = other DNA
atgtttataggtgacggcaaaagtactggggtaaccaccggcattagtagcaacctgaccagttggctctcttcc

SEQ ID NO: 536273 - DNA, 75 bp, synthetic construct
  source 1..75: mol_type = other DNA
caaactataaaacgctggcacagattggcattaccagcgatgccagtaccggcaagctggaaatcgcgaccgaca

SEQ ID NO: 536274 - DNA, 75 bp, synthetic construct
  source 1..75: mol_type = other DNA
ccgccattctcggtgccgctggtggcttcggcggtagctactacgtgatgagcgaacaaacggcaagcatccatc

SEQ ID NO: 536275 - DNA, 75 bp, synthetic construct
  source 1..75: mol_type = other DNA
gcttactgggccacacgccccagccatttcgtgttactgaacgcgcaaaaactgcgtgatacgcagcaaatgatg

SEQ ID NO: 536276 - DNA, 75 bp, synthetic construct
  source 1..75: mol_type = other DNA
gggaaatatccggcagaggcacgccttcaccccgtatcccgtgggccacagcttattccggtattactcatactc

SEQ ID NO: 536277 - DNA, 75 bp, synthetic construct
  source 1..75: mol_type = other DNA
cgagtcaggaggatacgctatcgttgaactgtcacaggcaaacgatacagaactttatggttttgtttctgctgt

SEQ ID NO: 536278 - DNA, 75 bp, synthetic construct
  source 1..75: mol_type = other DNA
ccccacatatgatgcaggactgcaaatttgaaggaaatgagctgcatggtaagctcaaagaaaagcagaaagctg

SEQ ID NO: 536279 - DNA, 75 bp, synthetic construct
  source 1..75: mol_type = other DNA
actatggtggtgatcatggggccaatctcgttttgggggaacgtcgttccccgtgcatttgaacgtattggcggt

SEQ ID NO: 536280 - DNA, 75 bp, synthetic construct
  source 1..75: mol_type = other DNA
tatccactggcgcattcaactggcgaaaagtctcactgaatataatcgcgtctatcagtcagcgttctcaccgaa

SEQ ID NO: 536281 - DNA, 75 bp, synthetic construct
  source 1..75: mol_type = other DNA
ggcgatgagattgtcgcgctgaccgtcggcggttcattgttgcaaaactcaaaagtacgcaaagacgtgttatct

SEQ ID NO: 536282 - DNA, 75 bp, synthetic construct
  source 1..75: mol_type = other DNA
atgaaaataataacctgctttaagctggtgcctgaagaacaggacattgttgtcactcccgaatacaccctgaat

SEQ ID NO: 536283 - DNA, 75 bp, synthetic construct
  source 1..75: mol_type = other DNA
ggagccaggccacgccgcttgctgaactgatcggcgttcgcgtaccgccgcaaacagaacgcaaacacatcattc

SEQ ID NO: 536284 - DNA, 75 bp, synthetic construct
  source 1..75: mol_type = other DNA
atgcattaccagccaaaacaagatttactcaatgatcgcattatcctggtgacgggagccagcgatggtattggt

SEQ ID NO: 536285 - DNA, 75 bp, synthetic construct
  source 1..75: mol_type = other DNA
tgttacgtgctatggcggaaacccacaatggacaaccagtattggcggtgcctcagtgcgtatcgtcgcaggcgt

SEQ ID NO: 536286 - DNA, 75 bp, synthetic construct
  source 1..75: mol_type = other DNA
atcccctcatgggctgacgataccttgggtgctagtgcctgactggcgtagcctgctgacagaaataccgaacct

SEQ ID NO: 536287 - DNA, 75 bp, synthetic construct
  source 1..75: mol_type = other DNA
acggcaaaggacaacgcctggttgtattcgctgtcacatcagacgaatgacttcggcgaatcagaatggattcat

SEQ ID NO: 536288 - DNA, 75 bp, synthetic construct
  source 1..75: mol_type = other DNA
agaagaaatttgtgaagcgaagccgccagaagaaggtgtatttaataatgttgattcatatgatggtggtcgcta

SEQ ID NO: 536289 - DNA, 75 bp, synthetic construct
  source 1..75: mol_type = other DNA
tgtcctcatttctcctttttcacatgctgagtcatgggaaagcattactaaatccacttatcaaagttctgccta

SEQ ID NO: 536290 - DNA, 75 bp, synthetic construct
  source 1..75: mol_type = other DNA
ctgcaacatggaagcctacaggtgctgtagctgacccctctgataaaccctcaaccccccaaaatggtggtggtg

SEQ ID NO: 536291 - DNA, 75 bp, synthetic construct
  source 1..75: mol_type = other DNA
caaaagcagaactcttcaccctgaccggcaactccaacctggcgctgtctgtcgtagctgaagcgctttcaatta

SEQ ID NO: 536292 - DNA, 75 bp, synthetic construct
  source 1..75: mol_type = other DNA
aaaatcgccgactgcttgtcttcgcttgatgctctgatcgcagcagaaatccaaaagctcggcacccttaagacc

SEQ ID NO: 536293 - DNA, 75 bp, synthetic construct
  source 1..75: mol_type = other DNA
gtagttctggcggtggctctagtggttccagtctttctaaaggtgatattcagtctgcgatcgaaggtgcttcac

SEQ ID NO: 536294 - DNA, 75 bp, synthetic construct
  source 1..75: mol_type = other DNA
atattcgtcgcagctatcctgccggtgatgagcaggttgaggtgctgaagggcatcagcctcgatatttatgctg

SEQ ID NO: 536295 - DNA, 75 bp, synthetic construct
  source 1..75: mol_type = other DNA
gacaaatttactgctcttacagctgagcttacagctgagcttaccctgcgaaaaaaacagtacaactactatcgt

SEQ ID NO: 536296 - DNA, 75 bp, synthetic construct
  source 1..75: mol_type = other DNA
ttttcgacattctttgaatccaaaatttatttcctattacatgcaaaccgattcgtttatttctgaaaaagcaaa

SEQ ID NO: 536297 - DNA, 75 bp, synthetic construct
  source 1..75: mol_type = other DNA
caccagaagaaatttgtgaagcgaagccgccagaagaaggggtatttaataatgttgattcatatgatggtggtc

SEQ ID NO: 536298 - DNA, 75 bp, synthetic construct
  source 1..75: mol_type = other DNA
atgaattactactaagtcgcctgatccgctatgttacggtttcaggcgataaaggggataactttgctagcaagg

SEQ ID NO: 536299 - DNA, 75 bp, synthetic construct
  source 1..75: mol_type = other DNA
ccatggcgtggcgggcgttggcagcgaataaaatgcgtaccttgctgactatgctggggattattattggcattg

SEQ ID NO: 536300 - DNA, 75 bp, synthetic construct
  source 1..75: mol_type = other DNA
gcaggttggcattgtagagagtgaagacagcaaacaatggctgctggaaggatttgacgtacagcaggacaaagc

SEQ ID NO: 536301 - DNA, 75 bp, synthetic construct
  source 1..75: mol_type = other DNA
ttggaacactgaatggaaaaccagcactgatagatattcctcagccgaccaaaaaggaattaatagctattgctg

SEQ ID NO: 536302 - DNA, 75 bp, synthetic construct
  source 1..75: mol_type = other DNA
tatggttatgtgtggctgaacatggaaacggcgcatcagcttgagttgctatcgaatctgatttgccgggccttg

SEQ ID NO: 536303 - DNA, 75 bp, synthetic construct
  source 1..75: mol_type = other DNA
cgattcaggcaggtaaatccgtaatggacgtcggatataaaagctttctgacggaaatgaacaatctgaactacc

SEQ ID NO: 536304 - DNA, 75 bp, synthetic construct
  source 1..75: mol_type = other DNA
aataataccgttacacccggaacgcagaacgactttgtaatggatggcggagtggacacgcagggaagtttcact

SEQ ID NO: 536305 - DNA, 75 bp, synthetic construct
  source 1..75: mol_type = other DNA
cagacggaactggtctatggcgcagtgtcaggaaaccgttttgcctggcagtctgaaggttatgacatcagtatg

SEQ ID NO: 536306 - DNA, 75 bp, synthetic construct
  source 1..75: mol_type = other DNA
aaactggacgattcaaaccacgggtaaagaagacccgatgtttagcccgtatatggaggatatttttacccgcgc

SEQ ID NO: 536307 - DNA, 75 bp, synthetic construct
  source 1..75: mol_type = other DNA
cacggcaaacgccagtcattgcacaaacggacgttctggttatcggtggcggtccggcaggattaacggcggcga

SEQ ID NO: 536308 - DNA, 75 bp, synthetic construct
  source 1..75: mol_type = other DNA
acttggtctttgtaaattaaggggaagtaatgggcgctttagaagtgcacagaatattcaggaagaaataggcgg

SEQ ID NO: 536309 - DNA, 75 bp, synthetic construct
  source 1..75: mol_type = other DNA
aaaaaagaattttaagagataaagagcttgccaaaattatgtttgaaaaaaacaaaaaaaccttattaagtttat

SEQ ID NO: 536310 - DNA, 75 bp, synthetic construct
  source 1..75: mol_type = other DNA
tatggttatgtgtggctgaacatggaaacggcacatcagcttgagttgctatcgagtctgatttgccgggccttg

SEQ ID NO: 536311 - DNA, 75 bp, synthetic construct
  source 1..75: mol_type = other DNA
tatggttatgtgtggctgaacatggaaacagcgcatcagcttgaattgctatcgaatctgatttgccgggccttg

SEQ ID NO: 536312 - DNA, 75 bp, synthetic construct
  source 1..75: mol_type = other DNA
tgttgttttatctgatgcgaaacaagttgttcctgataacattcactggggttatcgcggaggcacacttgacct

SEQ ID NO: 536313 - DNA, 75 bp, synthetic construct
  source 1..75: mol_type = other DNA
cgacctgccaaacgaataccgtcacgagccggagctggggctggcgtctggcactgatggcctgaaactgacacg

SEQ ID NO: 536314 - DNA, 75 bp, synthetic construct
  source 1..75: mol_type = other DNA
cggaagcgaacatgctggcgcgtatcgtgctgggtggcatgactgcaaaacagtgggcactggcgaacggcatta

SEQ ID NO: 536315 - DNA, 75 bp, synthetic construct
  source 1..75: mol_type = other DNA
cattgtcagtatgcgcgatccgcagctttttcatgcgcctgaagatgaaaagcaactgcgtaaaatcgtctggcg

SEQ ID NO: 536316 - DNA, 75 bp, synthetic construct
  source 1..75: mol_type = other DNA
aggataagtctgaatgtggagcgttctgagttcggttcttacaatatcgataagctaataaatgctaatattcgt

SEQ ID NO: 536317 - DNA, 75 bp, synthetic construct
  source 1..75: mol_type = other DNA
tcatggtcttcagtgacgacaaactatattccttaccagacctaccgtgattttgctgaaaataaaggacttttt

SEQ ID NO: 536318 - DNA, 75 bp, synthetic construct
  source 1..75: mol_type = other DNA
tggttctgcggtcatgaattttacgtcgatgaacgcgtgctggtgccgcgctcgccgattggtgaactgatcaac

SEQ ID NO: 536319 - DNA, 75 bp, synthetic construct
  source 1..75: mol_type = other DNA
ggcgatattaaccaatagcggttcgcttgcgacagctagcctggattttaattcaacagacaccacgaagccggt

SEQ ID NO: 536320 - DNA, 75 bp, synthetic construct
  source 1..75: mol_type = other DNA
gatggttattcatcagataaattgaatgtgaaacaatcactgacaggtggaaataacaccctgattgtggcacca

SEQ ID NO: 536321 - DNA, 75 bp, synthetic construct
  source 1..75: mol_type = other DNA
gattggccgaaccggtgtggatgtgggtaaatccttctctggtaaggactggaaagtgacagcccgggccggtct

SEQ ID NO: 536322 - DNA, 75 bp, synthetic construct
  source 1..75: mol_type = other DNA
cgcccgtcgcttccctggagattgttaagggaacattacagcatgcactggctaacagacgagacacccttgcag

SEQ ID NO: 536323 - DNA, 75 bp, synthetic construct
  source 1..75: mol_type = other DNA
atgagcatgaattatcagccggaactgaagttgagtacccgcaccgaacaactcgccagtagtcgtgatgccgct

SEQ ID NO: 536324 - DNA, 75 bp, synthetic construct
  source 1..75: mol_type = other DNA
agcaacagtagtgtaactatctcttcgactaacgcgaatctgaccgagagcagcatgtttacccactctgtaatc

SEQ ID NO: 536325 - DNA, 75 bp, synthetic construct
  source 1..75: mol_type = other DNA
aacggacccgatagggctgcggggcgggttaaacttatatgcttatgcgccgaatccgttaacgtatattgatcc

SEQ ID NO: 536326 - DNA, 75 bp, synthetic construct
  source 1..75: mol_type = other DNA
cccgaacagcaggatggctgggccggaatgctctcgcttcctcgcgaattaagccttgtcgatggtcgtgtgaga

SEQ ID NO: 536327 - DNA, 75 bp, synthetic construct
  source 1..75: mol_type = other DNA
ttcctggaccgctcatcggtggaagtgttcgttaacgatggcgatgccaccctgtccagccgtatttacccgcag

SEQ ID NO: 536328 - DNA, 75 bp, synthetic construct
  source 1..75: mol_type = other DNA
tgccatcactcctgacttacgcaaacgcgaatgtttccgcgtggagctgcgtaatgtgacctatgaccagcagcg

SEQ ID NO: 536329 - DNA, 75 bp, synthetic construct
  source 1..75: mol_type = other DNA
acagcttttaccgcgatgcgatgctgtctgccgcgaacccgtacaggtcgctggcactgcagtgtcgttccagcg

SEQ ID NO: 536330 - DNA, 75 bp, synthetic construct
  source 1..75: mol_type = other DNA
gcccgtatcacgcatgggcattcaaactcgatggcaatctggcccatgcacgtaactgcgaaaacgtcgccaatt

SEQ ID NO: 536331 - DNA, 75 bp, synthetic construct
  source 1..75: mol_type = other DNA
tactacccgaaaatttttgcgctaacccgcaagaggcgtggaccattcctgcccgtttttataccgatcagaacg

SEQ ID NO: 536332 - DNA, 75 bp, synthetic construct
  source 1..75: mol_type = other DNA
ggggcagaccatgaccacggataacggcagttcgcgttcacaggcggacgtgcacaatcaggtgcgcatggacat

SEQ ID NO: 536333 - DNA, 75 bp, synthetic construct
  source 1..75: mol_type = other DNA
attctgtggaacacccgcaacaaccactggatgccccgtgattatgagtgggttgatccccgttttctgaaagcc

SEQ ID NO: 536334 - DNA, 75 bp, synthetic construct
  source 1..75: mol_type = other DNA
tggcaggtattctgcgcaatgccgccgacggcatcacacgtgatttttttatccttgccgaagagatggaagaac

SEQ ID NO: 536335 - DNA, 75 bp, synthetic construct
  source 1..75: mol_type = other DNA
aaagccctactgggcgtggatgtgccggacagccttgatttgcccggtgatatgccggtatttctggattatcag

SEQ ID NO: 536336 - DNA, 75 bp, synthetic construct
  source 1..75: mol_type = other DNA
tgtcaggcgctgccggagcggtcgcgggccatggagggcggttatcgtgatgacgatgaggcatatcatgaattt

SEQ ID NO: 536337 - DNA, 75 bp, synthetic construct
  source 1..75: mol_type = other DNA
tgagcttcaggaaacgctgaacgcggacgactttgccctgcaactggcggaggtgtgctttaaggcgcgtgtgct

SEQ ID NO: 536338 - DNA, 75 bp, synthetic construct
  source 1..75: mol_type = other DNA
actggactatctggccaacatcttccgggtcggcggtgttgatcaactgactgactaccgtatcaatatcggggg

SEQ ID NO: 536339 - DNA, 75 bp, synthetic construct
  source 1..75: mol_type = other DNA
ttgtgctgcaacaggaacgccaccagcagttaccaggtagtgacaagcgtaaagaccccgatggaaaaacatggg

SEQ ID NO: 536340 - DNA, 75 bp, synthetic construct
  source 1..75: mol_type = other DNA
acccctcttgtattgggtggcgtatctggaaagtttgatgtaggcatctttaactcagctaacatgatcaaacaa

SEQ ID NO: 536341 - DNA, 75 bp, synthetic construct
  source 1..75: mol_type = other DNA
atgaatacttcattggtgctgggtcttgcggaaggccaggagagaaaagaaaaaccaactttaatgaggcatctc

SEQ ID NO: 536342 - DNA, 75 bp, synthetic construct
  source 1..75: mol_type = other DNA
cttaatgaatgcccggataatggcgaaggtggaagtaaccagtcgatgataagccagatcataagtaaatacggg

SEQ ID NO: 536343 - DNA, 75 bp, synthetic construct
  source 1..75: mol_type = other DNA
agtgggtaacaaaccctcgataccatatagatgaattgactgtgaaaggtgatattgttctttctgataatgcaa

SEQ ID NO: 536344 - DNA, 75 bp, synthetic construct
  source 1..75: mol_type = other DNA
acagatgtacctaacgagcaattagagtgggtaacaaaccctcgataccatatagatgaattgactgtgaaaggt

SEQ ID NO: 536345 - DNA, 75 bp, synthetic construct
  source 1..75: mol_type = other DNA
gattatccggtgatgtttggcacgctgtatattttcaccctgattggcctgctgctgaatatcgtcagtgatatc

SEQ ID NO: 536346 - DNA, 75 bp, synthetic construct
  source 1..75: mol_type = other DNA
ccgtatgttcagattaaacgagagcattgatcaggctctacaccatttcttaagcaaagaaggtggtaaaaatga

SEQ ID NO: 536347 - DNA, 75 bp, synthetic construct
  source 1..75: mol_type = other DNA
gactatctggccaacatcttccgcgtcggcggcattgaccagttgaccgactaccgcatcaacatcgggggctga

SEQ ID NO: 536348 - DNA, 75 bp, synthetic construct
  source 1..75: mol_type = other DNA
gagcacgctgattatctatctggtgtcgattccgttaggcattcgcaaagccgtttataacggtagccgctttga

SEQ ID NO: 536349 - DNA, 75 bp, synthetic construct
  source 1..75: mol_type = other DNA
ttccttgatgaagtgcgcaagcaatacgtggtgaccgcacgtgcgaaaggggtaagtgaaaaaaatattctctgg

SEQ ID NO: 536350 - DNA, 75 bp, synthetic construct
  source 1..75: mol_type = other DNA
atgggcgcttacctgattcgccgcctgttactggtaattccaacgttatgggcgattatcaccatcaactttttc

SEQ ID NO: 536351 - DNA, 75 bp, synthetic construct
  source 1..75: mol_type = other DNA
ttggtgtggcgaaagatattgctcagagcctggcgcatcttgatgcaatttccgcagccaacgcagtaacggtta

SEQ ID NO: 536352 - DNA, 75 bp, synthetic construct
  source 1..75: mol_type = other DNA
ttggtgtagcgaaagatatcgctcaaagtctggcgcatcttgatgcaatttccgcagccaatgctgtgacggtta

SEQ ID NO: 536353 - DNA, 75 bp, synthetic construct
  source 1..75: mol_type = other DNA
ccattggtcaggtgatttcgctggtgggtatggcggccctgctgtttgcaccattgaatgcagtgacgttctttg

SEQ ID NO: 536354 - DNA, 75 bp, synthetic construct
  source 1..75: mol_type = other DNA
tcgtctggttgtcacccttagccggggttatggcgtccgtctcattcatctggttgccagcgccgtatttctgcc

SEQ ID NO: 536355 - DNA, 75 bp, synthetic construct
  source 1..75: mol_type = other DNA
aatgtggattacgtcaccagttttgaactgccttttcgcttgctgcttacccgtacaccacaactgattgccgcg

SEQ ID NO: 536356 - DNA, 75 bp, synthetic construct
  source 1..75: mol_type = other DNA
taataatactgatgcttatattagggcattgtgtggtgagcttggtgttggggagaatgatcagcttgatatctc

SEQ ID NO: 536357 - DNA, 75 bp, synthetic construct
  source 1..75: mol_type = other DNA
gactggctgaaagattttaaacaggggcctaccggtaaagagagtactgtttatggcatctacggcattagtgaa

SEQ ID NO: 536358 - DNA, 75 bp, synthetic construct
  source 1..75: mol_type = other DNA
cgtatcagagataacgtcccgtactctgactcggataaaaagaaacttcaggacgcaaccaccaactggatggtt

SEQ ID NO: 536359 - DNA, 75 bp, synthetic construct
  source 1..75: mol_type = other DNA
ttaactccattttttaattacctgaaagaaaaaaatattttttattacaataatatcatttgcaataaccaaatc

SEQ ID NO: 536360 - DNA, 75 bp, synthetic construct
  source 1..75: mol_type = other DNA
gactcatctctgcattcgccattggttcttatggacttggtagcctggggttcaaatttatcgatacgcacctgc

SEQ ID NO: 536361 - DNA, 75 bp, synthetic construct
  source 1..75: mol_type = other DNA
tccttcggcctgttgagtctgggactggcaatttcttcttctgtggctggcaagctgcaggaacgctttggtgta

SEQ ID NO: 536362 - DNA, 75 bp, synthetic construct
  source 1..75: mol_type = other DNA
gggtatggcggccctgctgtttgcaccattgaatgcagtgacgttctttgcagcgattgcctgcgtggcatttaa

SEQ ID NO: 536363 - DNA, 75 bp, synthetic construct
  source 1..75: mol_type = other DNA
tcgtctggttgtcacccttagccggtgttatggcgtccgtctcattcatctggttgccagcgccggatttctgcc

SEQ ID NO: 536364 - DNA, 75 bp, synthetic construct
  source 1..75: mol_type = other DNA
ggttcatccgcaatccgttgatgcactgtttgaagccgcaagtcatatcaatatgcgcatgattgccggtaaggt

SEQ ID NO: 536365 - DNA, 75 bp, synthetic construct
  source 1..75: mol_type = other DNA
atgttacccaggatcagacacaataattttattggtgcggtggagttatttgtaaagtcatcgtatacaaaaaca

SEQ ID NO: 536366 - DNA, 75 bp, synthetic construct
  source 1..75: mol_type = other DNA
ccgtgaacggctgaagtatgcgctggaagccggtttactggtgactgcactggacgggctgttctggtctggtag

SEQ ID NO: 536367 - DNA, 75 bp, synthetic construct
  source 1..75: mol_type = other DNA
aacctttatctcggcagcggcttattcaacctgcaaaaagcatggcagaaaaaagtaaaagtcggcatgggtacc

SEQ ID NO: 536368 - DNA, 75 bp, synthetic construct
  source 1..75: mol_type = other DNA
caaacgctggcacaaaaatggtcgtctgttgtacgccattacgccacgcttcgcccccacttcatcgcccgaaca

SEQ ID NO: 536369 - DNA, 75 bp, synthetic construct
  source 1..75: mol_type = other DNA
gctacctgcaaagcaaagagctgatcaaacgctggcacaaaaatggtcgtctgttgtacgccattacgccacgct

SEQ ID NO: 536370 - DNA, 75 bp, synthetic construct
  source 1..75: mol_type = other DNA
gcgctgtttccgcatatgaccgtggagcagaacatcgcctttggcctgaaacaggacaaactaccgaaagcggaa

SEQ ID NO: 536371 - DNA, 75 bp, synthetic construct
  source 1..75: mol_type = other DNA
cgccaaacgcaaaccgcatcagctttccggcggccagcgccagcgagtggcgctggccagaagcctcgccaagcg

SEQ ID NO: 536372 - DNA, 75 bp, synthetic construct
  source 1..75: mol_type = other DNA
ccgccaatggttgtaacttcgcggtgggggaggtgatacacattgcctatctcggcgatctttcggtgtatcacg

SEQ ID NO: 536373 - DNA, 75 bp, synthetic construct
  source 1..75: mol_type = other DNA
ggtggatattctggagcgcgtcggtgtgacctgcgtaatggttactcacgatcaggaagaggcgatgaccatggc

SEQ ID NO: 536374 - DNA, 75 bp, synthetic construct
  source 1..75: mol_type = other DNA
ccgccaatggttgtaacttcgcggtaggggaggtgatgcacattgcctatctcggcgatctttcggtgtatcacg

SEQ ID NO: 536375 - DNA, 75 bp, synthetic construct
  source 1..75: mol_type = other DNA
accaaatcttacgatggtcaacatgcggtcgatgatgtcagtctgaccatttataaaggcgaaatctttgcactg

SEQ ID NO: 536376 - DNA, 75 bp, synthetic construct
  source 1..75: mol_type = other DNA
aataaaatcaatgaactggcatcagagtttaaaaagaataaattaataaactatgtcaatattttcaaaaagaat

SEQ ID NO: 536377 - DNA, 75 bp, synthetic construct
  source 1..75: mol_type = other DNA
caatatgtttggtcaggcagtgtcagcgctggcggcagtggctgctgccggagaggatgtggcggaactgaacgg

SEQ ID NO: 536378 - DNA, 75 bp, synthetic construct
  source 1..75: mol_type = other DNA
gcgtggaccagcctgccagttttaccgaaaccaccacgcatcagtgcttgcgtgatccgaagatagagcaatact

SEQ ID NO: 536379 - DNA, 75 bp, synthetic construct
  source 1..75: mol_type = other DNA
gccagaataagggacagggggccagtgccattcaggggtttaatcctgcggaggtcatcccgggttataccaact

SEQ ID NO: 536380 - DNA, 75 bp, synthetic construct
  source 1..75: mol_type = other DNA
accagatgtttcactaattgcggtttaatgtatattgatgacaatggaccaaaagctttattgcacttttatgac

SEQ ID NO: 536381 - DNA, 75 bp, synthetic construct
  source 1..75: mol_type = other DNA
aatcacggagtccattctcaatacgccgccggataacaagccgtcgctggatgcgccgtttatttcagaagggct

SEQ ID NO: 536382 - DNA, 75 bp, synthetic construct
  source 1..75: mol_type = other DNA
ctggaattcccgggccagctttatgaataccacgttcaatctgacctggaatgacaccattgcactgggaggcgc

SEQ ID NO: 536383 - DNA, 75 bp, synthetic construct
  source 1..75: mol_type = other DNA
gttagccgttctcaattcatatgcaggggtcaatggcaatactaactggtacacaataattcctgctggtgatgt

SEQ ID NO: 536384 - DNA, 75 bp, synthetic construct
  source 1..75: mol_type = other DNA
cggtactggtgtaaacccaggaagtttaagtgtgggagacgggaccgtaatattagcacagcgtgctgatgataa

SEQ ID NO: 536385 - DNA, 75 bp, synthetic construct
  source 1..75: mol_type = other DNA
tgcatgggaatttgggagcaacatggcctgcttcgcttaatagtggtaaagatctaacttttcagggcggcggta

SEQ ID NO: 536386 - DNA, 75 bp, synthetic construct
  source 1..75: mol_type = other DNA
cagtaataaccggggaactggttggtcaggaagaaccaaatcaacgggtattggtgtgtacgcttcagctatgtt

SEQ ID NO: 536387 - DNA, 75 bp, synthetic construct
  source 1..75: mol_type = other DNA
cgttggcaagtgtaacaatgaaggatactgcctggctggcaaatgagcagtcggtggttaagtcgctcactttga

SEQ ID NO: 536388 - DNA, 75 bp, synthetic construct
  source 1..75: mol_type = other DNA
cgccgtcagcagtcaggacgtagcaaataagttaaaggcactgggtgacaattctgtactgacccaaccggtgtc

SEQ ID NO: 536389 - DNA, 75 bp, synthetic construct
  source 1..75: mol_type = other DNA
atatcaaaaatacctgcatttctaagccgtctgttgttgcggtagctaaagttgaagataaggaaacaccgccgc

SEQ ID NO: 536390 - DNA, 75 bp, synthetic construct
  source 1..75: mol_type = other DNA
atattaacaataccgttaaagagcttatgaaccctgagctttcacatggtatcgtttctgctgctcaaaatttcg

SEQ ID NO: 536391 - DNA, 75 bp, synthetic construct
  source 1..75: mol_type = other DNA
tcaagcctatatgttaaaagataatatagatccaacagaaacaatggaaattactcaaaagctacgctctaaaga

SEQ ID NO: 536392 - DNA, 75 bp, synthetic construct
  source 1..75: mol_type = other DNA
tggcaggcgtgattggtgccgctattgcgttgtctggagccatcggcagttacgttttgctttccccaaaagctg

SEQ ID NO: 536393 - DNA, 75 bp, synthetic construct
  source 1..75: mol_type = other DNA
atgaccatcaccacagacaccactcttttacacgatccgcgtcgtcaggcggcgctgctgtactggcagggattt

SEQ ID NO: 536394 - DNA, 75 bp, synthetic construct
  source 1..75: mol_type = other DNA
acggaaacggacaatgcctggttgtactcgctgtcacatcagacgaatgacttcggcgaatcagaatggattcat

SEQ ID NO: 536395 - DNA, 75 bp, synthetic construct
  source 1..75: mol_type = other DNA
atgttcactataagtctaaaacaatcatacgaaaaaacgcatgcatactggagcggcgtatttgccatgacgctt

SEQ ID NO: 536396 - DNA, 75 bp, synthetic construct
  source 1..75: mol_type = other DNA
acacaaaagccacagagatctgtgcttcgcctgttcagcgttgccatcgtaccaacgggactgctggcctgcgga

SEQ ID NO: 536397 - DNA, 75 bp, synthetic construct
  source 1..75: mol_type = other DNA
gcgaattaaccgtggtgagacgatacctgaaccagtaaaacaacttcctgttatgggcggtagacctctaaatcg

SEQ ID NO: 536398 - DNA, 75 bp, synthetic construct
  source 1..75: mol_type = other DNA
agcgctatgaagattttaagaatcacgttaagacttattactatgatatttattcatcccatagcaatttgaaat

SEQ ID NO: 536399 - DNA, 75 bp, synthetic construct
  source 1..75: mol_type = other DNA
aaaccagttcagcggctattactaaatgaccttaacgttaatgctgctaaaaaagctcttacaaaattgcaggac

SEQ ID NO: 536400 - DNA, 75 bp, synthetic construct
  source 1..75: mol_type = other DNA
aataaatatgttttgcaggaaaacgcgcaagcagttgagattcagttgcagtgggcgctgaagaacagtgatgcc

SEQ ID NO: 536401 - DNA, 75 bp, synthetic construct
  source 1..75: mol_type = other DNA
gctccaaccaaagaacgtgttgaagcggcggcgatggccgcacgaaacatctggcgtgaatctcggttcgagctg

SEQ ID NO: 536402 - DNA, 75 bp, synthetic construct
  source 1..75: mol_type = other DNA
gcagcgaagtatctggctatacctcaacattattctcatgcagcgatgttactggcgggtgttattacctttgtg

SEQ ID NO: 536403 - DNA, 75 bp, synthetic construct
  source 1..75: mol_type = other DNA
ctccctcttttattacggcacctgggcagcgaagtatctggcgatgcctcaacattattctcatgcagcgatgtt

SEQ ID NO: 536404 - DNA, 75 bp, synthetic construct
  source 1..75: mol_type = other DNA
gcgtctgagcctggaaaatgacgtacctgagcctgtgcgcaataaaaaagctgctaccagcgaaagcgcgttttc

SEQ ID NO: 536405 - DNA, 75 bp, synthetic construct
  source 1..75: mol_type = other DNA
tgcaacaaataataatgcttattggtataaccttcctgatgaagttgctgctcgtattcgagctgaatggccacg

SEQ ID NO: 536406 - DNA, 75 bp, synthetic construct
  source 1..75: mol_type = other DNA
ggtgttcagcgttaccgtacctgttgccgggacagtggaaagtgcctcgctatcggttcatgcagggggtaatgg

SEQ ID NO: 536407 - DNA, 75 bp, synthetic construct
  source 1..75: mol_type = other DNA
atgaaaaaggtcgtttttgccttaaccgcactggcgttaacttctggcactgcatttgcagcagaatctggtgat

SEQ ID NO: 536408 - DNA, 75 bp, synthetic construct
  source 1..75: mol_type = other DNA
gcgtttgagtctggaaaatgatgttcctgagccagcacataataagaaggccgcagccagcgaaagcgccttctc

SEQ ID NO: 536409 - DNA, 75 bp, synthetic construct
  source 1..75: mol_type = other DNA
gcggtgtaccggtaatgttgctgatttccgaactgttaccgaaacggattcgggcattgggcttcgcactggttt

SEQ ID NO: 536410 - DNA, 75 bp, synthetic construct
  source 1..75: mol_type = other DNA
gattttaatctcccgggtgatggtgttgatctgtagctggccatcgttctggctgttggtgaattatcccagtcc

SEQ ID NO: 536411 - DNA, 75 bp, synthetic construct
  source 1..75: mol_type = other DNA
gtacttgctcgtttgattcagggtgttgcagcaggcggtgaagttggggcttcaatgtcgctactggtggagtca

SEQ ID NO: 536412 - DNA, 75 bp, synthetic construct
  source 1..75: mol_type = other DNA
ttggtagtacagtcgcaacctatatctccctcttttattacggtacatgggcggcgaagtatttaggaatgaacc

SEQ ID NO: 536413 - DNA, 75 bp, synthetic construct
  source 1..75: mol_type = other DNA
tgacggcgccagcgtggtatctgggcggaggtacgttgttgtcgatgctggcgttgttgtttgtgaaagaaccgg

SEQ ID NO: 536414 - DNA, 75 bp, synthetic construct
  source 1..75: mol_type = other DNA
ctggcttaaaagaaagccaggtacgccggaattaagtctggaaaggcccctgtttgatacagaagtttatgttaa

SEQ ID NO: 536415 - DNA, 75 bp, synthetic construct
  source 1..75: mol_type = other DNA
gcggcgctggagagcgccgggcaaatgctcccctgcgagccgccacattatggtgaagaagccacctggggcggg

SEQ ID NO: 536416 - DNA, 75 bp, synthetic construct
  source 1..75: mol_type = other DNA
tgggtgaatcagtgtctgaatatcaccgctctgactgcggtcacggatgccatgacggacagctatatacgccgg

SEQ ID NO: 536417 - DNA, 75 bp, synthetic construct
  source 1..75: mol_type = other DNA
ggcaggctgcagcaaatccgggcggaaggcgctgaccttcctgcccgcaccctgaagatggttttcccgggaatg

SEQ ID NO: 536418 - DNA, 75 bp, synthetic construct
  source 1..75: mol_type = other DNA
gggattgccgcgtactttgctgcactggcggtactgggcttcaaagttaaagaatttgcccgccggacggtgtaa

SEQ ID NO: 536419 - DNA, 75 bp, synthetic construct
  source 1..75: mol_type = other DNA
tgctgcgatgtatgtgctgggctttccggcggtgaaaagcgtgaatgcgcggcacgcaaaagagctgtggtcaat

SEQ ID NO: 536420 - DNA, 75 bp, synthetic construct
  source 1..75: mol_type = other DNA
tggtaactgttatccggtcgagaaagttattcgcatggataataccgaaatcccggcaggatttaatacagcacc

SEQ ID NO: 536421 - DNA, 75 bp, synthetic construct
  source 1..75: mol_type = other DNA
ggttggcgtcagtgtggcgctggcgggtgctatcggctttattggtctggtgatcccacatattctccggttgtg

SEQ ID NO: 536422 - DNA, 75 bp, synthetic construct
  source 1..75: mol_type = other DNA
tctgcggcttaaacgcctggggctgtcaaaaacgttccgtcgtctggttctcacacttaaccgacgttatggcgt

SEQ ID NO: 536423 - DNA, 75 bp, synthetic construct
  source 1..75: mol_type = other DNA
atggcaacagtagctcgaaggtgtgagggtgtcggtgcgggcgcacgtaggtcccaggtacttgtaaagaagaat

SEQ ID NO: 536424 - DNA, 75 bp, synthetic construct
  source 1..75: mol_type = other DNA
tttgtctggcaaatacgtcttccacgcacgctggctgtattgctggttggtgctgcgctggcgttatccggcgca

SEQ ID NO: 536425 - DNA, 75 bp, synthetic construct
  source 1..75: mol_type = other DNA
gcattagggattatctgtagcgcattaatgacgtgggccatttacttttccacatcggttgatttacgtcagtta

SEQ ID NO: 536426 - DNA, 75 bp, synthetic construct
  source 1..75: mol_type = other DNA
gtgaacaatggatctcgccaggtgactggttttctcctcgtggcgaactgttcgtctggcagattcgcctgccac

SEQ ID NO: 536427 - DNA, 75 bp, synthetic construct
  source 1..75: mol_type = other DNA
taaaacagatcgtttcccgggcaatatcgacgtagctatcaacgaaatgggggcagaaaccagtaaataccggaa

SEQ ID NO: 536428 - DNA, 75 bp, synthetic construct
  source 1..75: mol_type = other DNA
tgcgcgccgcagtcgtgttgaatgggaaaacagacagcgtaaaaagcagggactggataccctgggtatggatga

SEQ ID NO: 536429 - DNA, 75 bp, synthetic construct
  source 1..75: mol_type = other DNA
ggagtaatcacatcgggatcattatcggtcatgacggcgatgattttctggtcgcagaaagccgtgttcccctct

SEQ ID NO: 536430 - DNA, 75 bp, synthetic construct
  source 1..75: mol_type = other DNA
ttaaatacgaatcttcccgccagttctgttcaaaattcgtttttgatatttataaagaggcgctatgtatccagg

SEQ ID NO: 536431 - DNA, 75 bp, synthetic construct
  source 1..75: mol_type = other DNA
ggtgtttacaccccgtaaaggtgccggaacgctgaagttctgcgaaaaactgatggaaaaggcggtgggcttcac

SEQ ID NO: 536432 - DNA, 75 bp, synthetic construct
  source 1..75: mol_type = other DNA
acaccggcgctgtttgccgcccttgatgtgtctgaggatgcagtggcagctgcgcgccgcagccgtgtggtatgg

SEQ ID NO: 536433 - DNA, 75 bp, synthetic construct
  source 1..75: mol_type = other DNA
atcaccactctggctattgagtgcggactggcgacggaatctgatgccggaaaactatctattacccgtgctact

SEQ ID NO: 536434 - DNA, 75 bp, synthetic construct
  source 1..75: mol_type = other DNA
cagagtctgcgcattcttgagcagtgcctcaacaacatgccggaaggccccttcaaagcggatcacccgctgacc

SEQ ID NO: 536435 - DNA, 75 bp, synthetic construct
  source 1..75: mol_type = other DNA
gaaaccctgatcacccacttcctgcaagtgtcgtggggtccggtgatgcctgccaatgaatccttccagatggtt

SEQ ID NO: 536436 - DNA, 75 bp, synthetic construct
  source 1..75: mol_type = other DNA
gttcaaagcggatcacccgttgaccacgccgccgccgaaagagcgcacgttgcaacatatcgaaaccctgatcac

SEQ ID NO: 536437 - DNA, 75 bp, synthetic construct
  source 1..75: mol_type = other DNA
tggcatcatccgggtctggtgttgattcatgccgaaggagtagatacgcctcagcctgaactgaccgaggcagta

SEQ ID NO: 536438 - DNA, 75 bp, synthetic construct
  source 1..75: mol_type = other DNA
gccgaaaccttacgtcatgctgtttgatttacacggcatggacgaacgtctacgcacccaccgcgaagggctacc

SEQ ID NO: 536439 - DNA, 75 bp, synthetic construct
  source 1..75: mol_type = other DNA
ctaactggtatgagcgtgaaacctgggatctgtttggcattactttcgacggtcatcctaatttgcgccgcatca

SEQ ID NO: 536440 - DNA, 75 bp, synthetic construct
  source 1..75: mol_type = other DNA
cggaatatgacccgcttatcgggtgctaccttccgactgatatcacgttcacactggcgctgtttgccgcccttg

SEQ ID NO: 536441 - DNA, 75 bp, synthetic construct
  source 1..75: mol_type = other DNA
gccgggctggcagcagccagagcacaaggacgcgtaggtggaaggcccaacgcattaaaactgcatgaacgagag

SEQ ID NO: 536442 - DNA, 75 bp, synthetic construct
  source 1..75: mol_type = other DNA
ggtgtagggttatcgacgctttaccgatactttccggtggatggtcataggaaggataacgcagcaggaatgtaa

SEQ ID NO: 536443 - DNA, 75 bp, synthetic construct
  source 1..75: mol_type = other DNA
tccagacaacatcaattggtgatggaacaactatctggcagtttgttgtaatactaaaaggtgctgtaattggta

SEQ ID NO: 536444 - DNA, 75 bp, synthetic construct
  source 1..75: mol_type = other DNA
ttgacgatgctgttgtggcccgtatcagggatgtgctggcgtatacatttccgggacagaaattttctgtgcgga

SEQ ID NO: 536445 - DNA, 75 bp, synthetic construct
  source 1..75: mol_type = other DNA
atacggcaccttggttggccccaatgtttctgaggttatcaaggccgggccagcgctaatccttcaggaattagg

SEQ ID NO: 536446 - DNA, 75 bp, synthetic construct
  source 1..75: mol_type = other DNA
ccaaagatgcagaaggacctggcagtgaaatatttaactgcttccatcctgcaaataaaacggttgttctttcta

SEQ ID NO: 536447 - DNA, 75 bp, synthetic construct
  source 1..75: mol_type = other DNA
tctgatctaatacaggaatttgcacgtattcgtgaacgtggatgggcttttgataacgcagaggattcaccggga

SEQ ID NO: 536448 - DNA, 75 bp, synthetic construct
  source 1..75: mol_type = other DNA
tcaccggctttcgcacttatttgccagactcattacgtctcagattcgacgagcaattatctgtccgggctatcg

SEQ ID NO: 536449 - DNA, 75 bp, synthetic construct
  source 1..75: mol_type = other DNA
acttagaaccatttttatcaggttgttggcgcttcatcaaagaaatagacgataaaaaaaactcgatggctaact

SEQ ID NO: 536450 - DNA, 75 bp, synthetic construct
  source 1..75: mol_type = other DNA
cggcagacagaggaaatagcaccgtcgcgaaactggtcgattattgtaatgacgcggtgattaacgctattgcta

SEQ ID NO: 536451 - DNA, 75 bp, synthetic construct
  source 1..75: mol_type = other DNA
tgggaaaacagacagcgcaaaaagcagggactggataccctgggtatggatgaactgatagcgaaagcctggcgt

SEQ ID NO: 536452 - DNA, 75 bp, synthetic construct
  source 1..75: mol_type = other DNA
ctatatcccgaccgatatcacgttcacaccggcgctgtttgctgctctcgatgtgtctgaagaagcagtggcttc

SEQ ID NO: 536453 - DNA, 75 bp, synthetic construct
  source 1..75: mol_type = other DNA
ccgcaggtgacggaaccagtacatcggcttacgggtatgctccataagtatcaacatgcgttgaccgatagttaa

SEQ ID NO: 536454 - DNA, 75 bp, synthetic construct
  source 1..75: mol_type = other DNA
cgcatctggcaggcgccgccgcaggtcacagaatcggtgaatcggctggcgggcatgctgcataaataccagcac

SEQ ID NO: 536455 - DNA, 75 bp, synthetic construct
  source 1..75: mol_type = other DNA
tatcgcgcaccagcgcctgcgtgatgcgccgatcccggttaacgaggatcggcgtttcaccgacaaatgcgccgc

SEQ ID NO: 536456 - DNA, 75 bp, synthetic construct
  source 1..75: mol_type = other DNA
agcatgtgcttgatcaggataacggccatgcgcgttgcccatcctgcggggaatttattgaaatgaaagctcttt

SEQ ID NO: 536457 - DNA, 75 bp, synthetic construct
  source 1..75: mol_type = other DNA
agaatacgcgcccggaactgatcactgatacatttcgcgaattttttgacacgccggtagaaaccgcacaggacg

SEQ ID NO: 536458 - DNA, 75 bp, synthetic construct
  source 1..75: mol_type = other DNA
gcaaggaatgcgcagcaacctgaatatggaatcttcccgctgggcacgcgccaatcgacgtttaaaagcgatcaa

SEQ ID NO: 536459 - DNA, 75 bp, synthetic construct
  source 1..75: mol_type = other DNA
cgaaaaagcgactttccatttaaatgccggagaattaattgtgggtgcatctcttgaaggtgcaggtttatgtgc

SEQ ID NO: 536460 - DNA, 75 bp, synthetic construct
  source 1..75: mol_type = other DNA
aatgctgtatttcatgggaggtattgtcattatgttactcggtgcgggacgatattctgtatcaaccagaacatc

SEQ ID NO: 536461 - DNA, 75 bp, synthetic construct
  source 1..75: mol_type = other DNA
gagctattaaataaaatatgcattgtttcaatgctggctcgtttacgtctgatgccaaaaagatgtgcacaatga

SEQ ID NO: 536462 - DNA, 75 bp, synthetic construct
  source 1..75: mol_type = other DNA
tcatcattgcgatgatccgcgcaccattattgatgattctggtgtgctgtatctgggccggtttttgtacctgga

SEQ ID NO: 536463 - DNA, 75 bp, synthetic construct
  source 1..75: mol_type = other DNA
tccgcaaggcattccgaataacctgatgccgtacattgcccaggttgctgtaggccgtcgcgactcactggcgat

SEQ ID NO: 536464 - DNA, 75 bp, synthetic construct
  source 1..75: mol_type = other DNA
atggcgctggcggtggtgctgtcgttcatcctcacactgttgctcggctttgaggatattcctgttgaggaagcg

SEQ ID NO: 536465 - DNA, 75 bp, synthetic construct
  source 1..75: mol_type = other DNA
gccgatagagcatcttcactgtccctaattcatagggacttaaaaagtgctaaagagtggtaccaaatagctaat

SEQ ID NO: 536466 - DNA, 75 bp, synthetic construct
  source 1..75: mol_type = other DNA
tgatggcggtcgatccgctgcgtcgggttatttctccgcgtttctgggctggggttatttcattgccgttgctga

SEQ ID NO: 536467 - DNA, 75 bp, synthetic construct
  source 1..75: mol_type = other DNA
cgcagaaatcggcttgatgcgcgccacagagcagctctccagcatggagatgatggcggtcgatccgctgcgtcg

SEQ ID NO: 536468 - DNA, 75 bp, synthetic construct
  source 1..75: mol_type = other DNA
ggcgtgaggatgaacgggcaatattgcagcgatttgcctgccagtatatggctgattgggtatctggcgatgagg

SEQ ID NO: 536469 - DNA, 75 bp, synthetic construct
  source 1..75: mol_type = other DNA
aaaccagtctgggtatgctggtggcgttatcgctactgcgtgaactggggccggtggttgccgcgttgttgtttg

SEQ ID NO: 536470 - DNA, 75 bp, synthetic construct
  source 1..75: mol_type = other DNA
ttgtggtttctggcgtgttcatcggaatggtgttggggctgcaaggttatctggttctgaccacttatagtgcgg

SEQ ID NO: 536471 - DNA, 75 bp, synthetic construct
  source 1..75: mol_type = other DNA
agttggaaaggcattgatagtgggttcttctggtcggcaatgcaaaatgccgtcgactggcgtatggatctggtc

SEQ ID NO: 536472 - DNA, 75 bp, synthetic construct
  source 1..75: mol_type = other DNA
caaaagagttattctttttggtgtttagctgccacagggaaagatcccgtcaatttagataagttaaataagaag

SEQ ID NO: 536473 - DNA, 75 bp, synthetic construct
  source 1..75: mol_type = other DNA
ctgaatattttgggttgcatgactgtattattaactacaggcataattttgcagcacatagcggcaaccaagact

SEQ ID NO: 536474 - DNA, 75 bp, synthetic construct
  source 1..75: mol_type = other DNA
tatacttgatctagatttatcaagtgaaattagagcgttatttgtggcaagcctaacgttttatggtaaagcttt

SEQ ID NO: 536475 - DNA, 75 bp, synthetic construct
  source 1..75: mol_type = other DNA
agattataaaaaacatgctgagatccaactgaaagtttttagacatattttaagaaaggttcatcatcggggcgg

SEQ ID NO: 536476 - DNA, 75 bp, synthetic construct
  source 1..75: mol_type = other DNA
gatcagcagttaggtttgctggtggtcatgcagaaaatcgagcaggcagcatttcacgaagcgatacagaacggc

SEQ ID NO: 536477 - DNA, 75 bp, synthetic construct
  source 1..75: mol_type = other DNA
cattaattgagcagatttatcacacctttcgtcgttatcaggtgccgcagaaatttgtggtttgttgtgaatatt

SEQ ID NO: 536478 - DNA, 75 bp, synthetic construct
  source 1..75: mol_type = other DNA
acaaacgctggatgtgcgttgccatcgcggcattgttcattacgacccgaccgagttggtgatcaccgctcgcgc

SEQ ID NO: 536479 - DNA, 75 bp, synthetic construct
  source 1..75: mol_type = other DNA
tgttcgatatccatagcagcgattacgttctgaacgctgatctggtgaacgaccgtacctgggatacttccaagt

SEQ ID NO: 536480 - DNA, 75 bp, synthetic construct
  source 1..75: mol_type = other DNA
ccagacttgggcgtcaggcattactttttcccctctgtctggtgctctacgaattctcgacctatatcggcaacg

SEQ ID NO: 536481 - DNA, 75 bp, synthetic construct
  source 1..75: mol_type = other DNA
ggttatgccgcgattcaggaatcttttgaagaggcggtttgcatcaaaataaccgcgctaatggcgaatgtggcg

SEQ ID NO: 536482 - DNA, 75 bp, synthetic construct
  source 1..75: mol_type = other DNA
attcagggggccagtctagttcgtatcgacaacgcaacaggcgctggcgctatcgctgattacaaagataaagaa

SEQ ID NO: 536483 - DNA, 75 bp, synthetic construct
  source 1..75: mol_type = other DNA
caatgttgttgctgcaaccggtaactacaaagttcgtatcgacaacgcaactggcgctggcgctatcgctgatta

SEQ ID NO: 536484 - DNA, 75 bp, synthetic construct
  source 1..75: mol_type = other DNA
tcggtaacactgcggcgaatgctctgcaggttgatactctgaacctgaccagcactactgataccagtggtaaca

SEQ ID NO: 536485 - DNA, 75 bp, synthetic construct
  source 1..75: mol_type = other DNA
cctgcagctggtgtatcagctaccgcatctgaagaagatcggcatgctggttttgccacgcattaacttccacga

SEQ ID NO: 536486 - DNA, 75 bp, synthetic construct
  source 1..75: mol_type = other DNA
tagtcagatctccttgatcatcaacaccatttttgcttcgtttcttgcctcaggttccgtgtcgtggatgtacta

SEQ ID NO: 536487 - DNA, 75 bp, synthetic construct
  source 1..75: mol_type = other DNA
tctggcgtactgggcgtggcgctgggcaccattttgctaccgtcgctgtcgaaaagttttgccagcggcaatcac

SEQ ID NO: 536488 - DNA, 75 bp, synthetic construct
  source 1..75: mol_type = other DNA
ctggcgcaaaacattgaacaattcactctgttgcgcttcttgcagggcataagcctctgtttcattggcgctgtg

SEQ ID NO: 536489 - DNA, 75 bp, synthetic construct
  source 1..75: mol_type = other DNA
ccaggcttggacgtcaggcgttacttttccctctctgtctggtgctttacgaattttcaacctatatcggcaacg

SEQ ID NO: 536490 - DNA, 75 bp, synthetic construct
  source 1..75: mol_type = other DNA
tggggccggcgattcttggcgtctctgtgagccagatttctttaatcatcaacaccatatttgcctcgtttcttg

SEQ ID NO: 536491 - DNA, 75 bp, synthetic construct
  source 1..75: mol_type = other DNA
tgttgacaacgttgtagctgcaaccggtaactacaaagttcgtatcgacaactccactggtgctggcgcgattgc

SEQ ID NO: 536492 - DNA, 75 bp, synthetic construct
  source 1..75: mol_type = other DNA
atgcaaccgaatattctggtctttttcaccgatcaacagcgttgggatacggtgggctgctacaacccttccgtc

SEQ ID NO: 536493 - DNA, 75 bp, synthetic construct
  source 1..75: mol_type = other DNA
aatcatgttctggttcggctcagagcgcaacgtgcgatggagtgatgattcccgacgagagtacgagtggtcaca

SEQ ID NO: 536494 - DNA, 75 bp, synthetic construct
  source 1..75: mol_type = other DNA
agacgcaatactctcacttccgatcgacgacaagtcacctcacgaagtccacgtcaaagaacctaagcgaaccaa

SEQ ID NO: 536495 - DNA, 75 bp, synthetic construct
  source 1..75: mol_type = other DNA
caactgatcgactgggggggcgcgttacgctggctgaaatcgacagccgatgacaatcaaatccaccgtatcgcc

SEQ ID NO: 536496 - DNA, 75 bp, synthetic construct
  source 1..75: mol_type = other DNA
agaacaaaaaattcccggtaactgttatccggtagataaaactactcacactaataataacgaaataccggcagg

SEQ ID NO: 536497 - DNA, 75 bp, synthetic construct
  source 1..75: mol_type = other DNA
gttttgaaattggtgtcactatcagtaacccagtatttactgaagatgccattaacaagagaaaacaagaacggg

SEQ ID NO: 536498 - DNA, 75 bp, synthetic construct
  source 1..75: mol_type = other DNA
atgattttggctatacacgaatgaaaaccgtcggaaaactagtcgattcgacacttgttcctgaaggttatttca

SEQ ID NO: 536499 - DNA, 75 bp, synthetic construct
  source 1..75: mol_type = other DNA
aaaattcccggtaactgttacccggtcgataaagttattcaccaggataataacgaaatcccggcaggattttaa

SEQ ID NO: 536500 - DNA, 75 bp, synthetic construct
  source 1..75: mol_type = other DNA
tgactgtacatctcaatactggtgagtcgcttgatgcaatcaccggcatgtacaactcaatgaaagaatgcatgg

SEQ ID NO: 536501 - DNA, 75 bp, synthetic construct
  source 1..75: mol_type = other DNA
tctgcggcttaaacgcctggggctgtcaaaaacgttccgtcgtctggttttcacactgaacccacgttatggcgt

SEQ ID NO: 536502 - DNA, 75 bp, synthetic construct
  source 1..75: mol_type = other DNA
ttcagcctgcccgctttccgctgtttatcaacgccccgctggcctatcagggtgtttatctgctgaccgacttcg

SEQ ID NO: 536503 - DNA, 75 bp, synthetic construct
  source 1..75: mol_type = other DNA
gcatgtcgctggccggccgccccggtaacttcggcacgcgttttcacaattatctttatgaaaagctggggctga

SEQ ID NO: 536504 - DNA, 75 bp, synthetic construct
  source 1..75: mol_type = other DNA
gcagcgattgtcgcgggtgccaccactgcgcaaatctccggttggatgacggcactgggactggcaatggggttc

SEQ ID NO: 536505 - DNA, 75 bp, synthetic construct
  source 1..75: mol_type = other DNA
tgctgtggtggcatttctggtaacagcgagcgggctgacattggttgggattggttcggcgttttggggattaat

SEQ ID NO: 536506 - DNA, 75 bp, synthetic construct
  source 1..75: mol_type = other DNA
atcgcgtgcctgttctcaccgcatggtcaacgcctggcgcagcgttgttagtcaccggtttacagggattaacgc

SEQ ID NO: 536507 - DNA, 75 bp, synthetic construct
  source 1..75: mol_type = other DNA
atgagctggcggccctttttgtatctgattattaatccccacccgctattaagcgcccggcgcgggcatctgcgt

SEQ ID NO: 536508 - DNA, 75 bp, synthetic construct
  source 1..75: mol_type = other DNA
aagctcacaatggatccgccggtacccataacatccccggtgttcatggaagatggaggctatgagctgtttcac

SEQ ID NO: 536509 - DNA, 75 bp, synthetic construct
  source 1..75: mol_type = other DNA
aggttatcagttgtaatttgtgtcttgatccggcgtgtcaacggcaaaaaggtgagccccgctctctttgcctgc

SEQ ID NO: 536510 - DNA, 75 bp, synthetic construct
  source 1..75: mol_type = other DNA
gaggagtttgttgacgagggaacctgggaggccgtgcttcatattgaggtgtttctcagggcgaaagagacggac

SEQ ID NO: 536511 - DNA, 75 bp, synthetic construct
  source 1..75: mol_type = other DNA
aatcagcactgtgttatgccagcgcctttgcatccctagcggtggagacaagcaatgcttccgacatgcctgaac

SEQ ID NO: 536512 - DNA, 75 bp, synthetic construct
  source 1..75: mol_type = other DNA
ttttctcagggcaaaagaaccggactcggcactggatatgtggatggaagaaaaaattcttcctgcgctggaggc

SEQ ID NO: 536513 - DNA, 75 bp, synthetic construct
  source 1..75: mol_type = other DNA
caaagcccggaagcgcatccggataaagatcaacgttggctggcagctgccgtcgcaggcgttgtttatttgttt

SEQ ID NO: 536514 - DNA, 75 bp, synthetic construct
  source 1..75: mol_type = other DNA
tatattacccctgatttttcgtttgctcacagcctgagcgttgcactccccctttttctggtgacgatggcatcg

SEQ ID NO: 536515 - DNA, 75 bp, synthetic construct
  source 1..75: mol_type = other DNA
tggcgacgaaagctattgcgccacggtatgcggttattgcggcgatgatagttggcatcgtaatcgttattttac

SEQ ID NO: 536516 - DNA, 75 bp, synthetic construct
  source 1..75: mol_type = other DNA
tggctcagtggtggggggggattgtctggttgtggtgcccaccattcgtcaggggggaaattttccgccagggga

SEQ ID NO: 536517 - DNA, 75 bp, synthetic construct
  source 1..75: mol_type = other DNA
accggaccaaattcctaaaatcaaacaatactggggtgaacagctcaaaattcccgttattcctctcacgagtga

SEQ ID NO: 536518 - DNA, 75 bp, synthetic construct
  source 1..75: mol_type = other DNA
aatctgtaggcctgataagcgtggcgcttcaggcattggccaccacagccggatgcggcgtgaacgccttatccg

SEQ ID NO: 536519 - DNA, 75 bp, synthetic construct
  source 1..75: mol_type = other DNA
aaatcaaaaatgtccgtgatgttgccgatgatgctggcgttttaaatcatccacttctcaaggaatttagactgg

SEQ ID NO: 536520 - DNA, 75 bp, synthetic construct
  source 1..75: mol_type = other DNA
cggaatatgacccacagatcggctgtaatatcccgaccgatatcaccttcaccccggctctgttttccgcgcttg

SEQ ID NO: 536521 - DNA, 75 bp, synthetic construct
  source 1..75: mol_type = other DNA
gtgactgatctccttcaaaatcactattcacaggttaaaaacccgaatccggtattcacgccgcgtgaagggaaa

SEQ ID NO: 536522 - DNA, 75 bp, synthetic construct
  source 1..75: mol_type = other DNA
ggtatggatgagctgatagcgaaagcctggcgttttgtgcgtgagcgtttccgcagttaccagacagagcttaag

SEQ ID NO: 536523 - DNA, 75 bp, synthetic construct
  source 1..75: mol_type = other DNA
gactgcattattattggcatagtttattacattggggccagacctgtacagatcggtaaactttccggaggcgat

SEQ ID NO: 536524 - DNA, 75 bp, synthetic construct
  source 1..75: mol_type = other DNA
tggcgatttcgatcacgaactagctgatacattaggcataataatattgactaatgaaatagaaagtgttgagtt

SEQ ID NO: 536525 - DNA, 75 bp, synthetic construct
  source 1..75: mol_type = other DNA
taaatgggaattacattctgttattatttgtggtcctcgcgcttgggctatgtctcggaaagttacgacttggtt

SEQ ID NO: 536526 - DNA, 75 bp, synthetic construct
  source 1..75: mol_type = other DNA
tggattcttcgaaagtaaggatgacagtaatgagctggaagatctattgctggaagtgccacgccctaggaacaa

SEQ ID NO: 536527 - DNA, 75 bp, synthetic construct
  source 1..75: mol_type = other DNA
ccacttctcaaggaattagtgcggcggaaacagcatgtaaatcaggttatggctcgcattgaaatggcaaacgtc

SEQ ID NO: 536528 - DNA, 75 bp, synthetic construct
  source 1..75: mol_type = other DNA
atttgcccctttgcacagggtcgtggatgttacggttgcctgtatttcaaaccatttatagatggaaaccacaaa

SEQ ID NO: 536529 - DNA, 75 bp, synthetic construct
  source 1..75: mol_type = other DNA
ggttcccgggctcagtgcattactgctgaagatgaatcttcaggggtatgactaccgccgggatgatgagtttat

SEQ ID NO: 536530 - DNA, 75 bp, synthetic construct
  source 1..75: mol_type = other DNA
cgtacatcgcatcaatcgtagagcaaccggatttagacgaaattgaccacaaatttaagggagatcgtctatcaa

SEQ ID NO: 536531 - DNA, 75 bp, synthetic construct
  source 1..75: mol_type = other DNA
cgcttatctctgctgataacaagacgtcgcccagagatcgctgttcactgtattttgatacatgttttaccgcat

SEQ ID NO: 536532 - DNA, 75 bp, synthetic construct
  source 1..75: mol_type = other DNA
tatcacaggcgttgagaaggattttagaacgtccagagttgatggagcttgagccatttactccccgagatttgc

SEQ ID NO: 536533 - DNA, 75 bp, synthetic construct
  source 1..75: mol_type = other DNA
ctaaccgcaccatcatgcaggcttgcatgaccgataacgatgtcgtggtcgttgaccgtaactgccataaatcca

SEQ ID NO: 536534 - DNA, 75 bp, synthetic construct
  source 1..75: mol_type = other DNA
gggttccggaaagctttcagctttgagccagttattaaaaccccttttgatttgttaaaacaccttgcggtctgg

SEQ ID NO: 536535 - DNA, 75 bp, synthetic construct
  source 1..75: mol_type = other DNA
gctaggctgggggttctggaaagctttcagctttgagccagttattaaaaccccttttgatttgttaaaacacct

SEQ ID NO: 536536 - DNA, 75 bp, synthetic construct
  source 1..75: mol_type = other DNA
ctggcgaatgcctgtgccggtaacacctcgctggtgtatatcgaaaaatacacgggcaatgcgccgaagttaacg

SEQ ID NO: 536537 - DNA, 75 bp, synthetic construct
  source 1..75: mol_type = other DNA
tttttgccggatcttacggctggcgttcttctggcgtgttgcataaagcgcaaaccttactgcaacgttatatga

SEQ ID NO: 536538 - DNA, 75 bp, synthetic construct
  source 1..75: mol_type = other DNA
aatgcgccgcagcgagaagaacgaacagtacgttcgttatggtgatttccgcgccgatccggtgaaaaatgcgct

SEQ ID NO: 536539 - DNA, 75 bp, synthetic construct
  source 1..75: mol_type = other DNA
ggtgaacccattaatacttgagggcaagatcgtccagggcagacgtgtgttctcgctgatgaagcagtttctcag

SEQ ID NO: 536540 - DNA, 75 bp, synthetic construct
  source 1..75: mol_type = other DNA
ttcgtttggtcaaggcaaaccggttatctccctgctgggggaatatgacgccctggcaggtttaagtcagcaagc

SEQ ID NO: 536541 - DNA, 75 bp, synthetic construct
  source 1..75: mol_type = other DNA
agtacttccatcaattgaagaaatccggcaaaccggtgattgccattgatcctatccgttccgaaacgatcgagt

SEQ ID NO: 536542 - DNA, 75 bp, synthetic construct
  source 1..75: mol_type = other DNA
aaactgctgaccaccgttcaggactgctgggtaatgcatccgggcgaaagctggcacggcttcaaagatattccg

SEQ ID NO: 536543 - DNA, 75 bp, synthetic construct
  source 1..75: mol_type = other DNA
tggattgcgccgtataacccggcggaacagttccgcgatgcactgctcgccccgccagcctggcaggaaggcggc

SEQ ID NO: 536544 - DNA, 75 bp, synthetic construct
  source 1..75: mol_type = other DNA
tcgctgctggttggctgtctggtggtggtgttatcgctgattatgggcgttattctcggcctgatcgccggttac

SEQ ID NO: 536545 - DNA, 75 bp, synthetic construct
  source 1..75: mol_type = other DNA
ctttgagccagttattaaaaccccttttgatttgttaaaacaccttgcggtctggcaactgcaagtgtcaaacaa

SEQ ID NO: 536546 - DNA, 75 bp, synthetic construct
  source 1..75: mol_type = other DNA
cgttaccgcttcccgcgtggcgggagccggggcgctgcggcagatgtttatcaatattcttcccaactgccttgc

SEQ ID NO: 536547 - DNA, 75 bp, synthetic construct
  source 1..75: mol_type = other DNA
tcatgcgcgtggtcgatatcatgctggcgctgccaagtctgctgctggcgcttgtgttggtggctatcttcggcc

SEQ ID NO: 536548 - DNA, 75 bp, synthetic construct
  source 1..75: mol_type = other DNA
ctggtgctggtggcaatttttggcccgtcgattggtaacgcagcgctggcgctgacctttgttgcgctgccgcac

SEQ ID NO: 536549 - DNA, 75 bp, synthetic construct
  source 1..75: mol_type = other DNA
ttgcttgaccatactggcgcatttggcgaaagcgaaaaatatgccgcgcgcgtatttggtgccgatcgctcctgg

SEQ ID NO: 536550 - DNA, 75 bp, synthetic construct
  source 1..75: mol_type = other DNA
atgggcatcgaacgaacttccctcggttctttgcttgaccatactggcgcatttggcgaaagcgaaaaatatgcc

SEQ ID NO: 536551 - DNA, 75 bp, synthetic construct
  source 1..75: mol_type = other DNA
gggaacactggttaacacactctgctccttcaaacgccactatgacgcgaacacaccgctggcgcaggtgatgcc

SEQ ID NO: 536552 - DNA, 75 bp, synthetic construct
  source 1..75: mol_type = other DNA
atgggcaaaagtgccgccgccacggccttcgaacgaaactatgcaattctgcatagtttctttttgtgcacagaa

SEQ ID NO: 536553 - DNA, 75 bp, synthetic construct
  source 1..75: mol_type = other DNA
cagctttgagccagttattcaaaccccttttgatttgttaaaacaccttgcggtctggcaactgcaagtgtcaaa

SEQ ID NO: 536554 - DNA, 75 bp, synthetic construct
  source 1..75: mol_type = other DNA
ctgaacaggctgccgcccgtccccaggtaacggtgatcccgcgtgagcaacatgctatctcccgcaaagatatca

SEQ ID NO: 536555 - DNA, 75 bp, synthetic construct
  source 1..75: mol_type = other DNA
agcggcctgacttatcacgacgctttcgcgctggcaatgaacgatgtgttagacgaagcctgccgttcactggcg

SEQ ID NO: 536556 - DNA, 75 bp, synthetic construct
  source 1..75: mol_type = other DNA
tctgcggcttaaacgcctggggctgtcaaaaacgttccgtcgtctggttgtcacacttaacccacgttatggcgt

SEQ ID NO: 536557 - DNA, 75 bp, synthetic construct
  source 1..75: mol_type = other DNA
gcgtatgtcccgacgtcagggtaaacgcgcatggaaactgctggagcatcctaagttccgtgcggcttatgacct

SEQ ID NO: 536558 - DNA, 75 bp, synthetic construct
  source 1..75: mol_type = other DNA
tacgcgtattcataatgatatgcgcgttaatccggcgttcctgtttgccgccatgttctggtatccactgctgga

SEQ ID NO: 536559 - DNA, 75 bp, synthetic construct
  source 1..75: mol_type = other DNA
gacggcacagaagatcgcccaggaaagcggcctgacctatcacgacgctttcgcgctggcgatgaacgacgtgct

SEQ ID NO: 536560 - DNA, 75 bp, synthetic construct
  source 1..75: mol_type = other DNA
cgcggagttacttaaagcaattttgaaaaccatcctggttggcagcgtgacggggttttttctctggcatcactg

SEQ ID NO: 536561 - DNA, 75 bp, synthetic construct
  source 1..75: mol_type = other DNA
aaactcaacccgctaccgggcattaaacgtatgttctcggcgcaaactggcgcggagctgctgaaagctatcctg

SEQ ID NO: 536562 - DNA, 75 bp, synthetic construct
  source 1..75: mol_type = other DNA
ggcggggttggtggcattacgcattcgtgaaatagctgctgaaaataacgtcccgaccctcgaagcgccgccgct

SEQ ID NO: 536563 - DNA, 75 bp, synthetic construct
  source 1..75: mol_type = other DNA
gtctggttatcacactaatcccacgttatggcgtcagtctcattcatctggatgccagcgctgaatgcctgccgg

SEQ ID NO: 536564 - DNA, 75 bp, synthetic construct
  source 1..75: mol_type = other DNA
cggaatatgacccgcttatcgggtgctacattccgaccgatatcacgttcacaccggctctgtttgctgcccttg

SEQ ID NO: 536565 - DNA, 75 bp, synthetic construct
  source 1..75: mol_type = other DNA
gtctggttttcacactaaaccaacgttatggcgtcagtctcattcatctggatgccagcgctgaatgcctgccgg

SEQ ID NO: 536566 - DNA, 75 bp, synthetic construct
  source 1..75: mol_type = other DNA
atgttactcaccgatctccttcacggtaatacgcataccctgggtatggatgaactgatagcgaaagcctggcgt

SEQ ID NO: 536567 - DNA, 75 bp, synthetic construct
  source 1..75: mol_type = other DNA
ctatgacccgctggccaaccgcgtccagtgctccatcaccacactggccattgagtgcggactggcgacagagtc

SEQ ID NO: 536568 - DNA, 75 bp, synthetic construct
  source 1..75: mol_type = other DNA
acgccttcgcgttgctcagttgtccaaccccggaaacgggaaaaagcaagttttccccgctcccggcgtttccat

SEQ ID NO: 536569 - DNA, 75 bp, synthetic construct
  source 1..75: mol_type = other DNA
gtggcgtatgcccgttcacgtggcctgcgccggcgtatgccgccggtgctgcgccgcagggcgattgatacgctg

SEQ ID NO: 536570 - DNA, 75 bp, synthetic construct
  source 1..75: mol_type = other DNA
tgctctctgaactgttccgcattaacagccatctgctgtacatctcgacctttattcaggacgtcggtgcgatga

SEQ ID NO: 536571 - DNA, 75 bp, synthetic construct
  source 1..75: mol_type = other DNA
ctgggactgattacttaccagacggaatatgacccgcttatcgggtgctacattccgaccgatatcacgttcaca

SEQ ID NO: 536572 - DNA, 75 bp, synthetic construct
  source 1..75: mol_type = other DNA
tcaccctggtgaaacggcagctgacgcgtgaaatctcggaagggcgctttactgctaatggtgagacggtaaaac

SEQ ID NO: 536573 - DNA, 75 bp, synthetic construct
  source 1..75: mol_type = other DNA
ccggaaaactctccatcactcgtgccacccgtgccctgacgttcctgtcagagctggggttgattacctaccaga

SEQ ID NO: 536574 - DNA, 75 bp, synthetic construct
  source 1..75: mol_type = other DNA
gtggcggccctgaaccagacctcatttactgaaagcacataccgtcaggtaaagaacccgaatccggtgtttaca

SEQ ID NO: 536575 - DNA, 75 bp, synthetic construct
  source 1..75: mol_type = other DNA
cccgtgccctgacgttcctgtcagagctggggttgattacctaccagacggaatatgacccgcttatcgggtgct

SEQ ID NO: 536576 - DNA, 75 bp, synthetic construct
  source 1..75: mol_type = other DNA
accgccaggtaaagaacccgaatccggtcttcacaccccgtgaagatgcaggaacgctgccgttctgcgaaaaac

SEQ ID NO: 536577 - DNA, 75 bp, synthetic construct
  source 1..75: mol_type = other DNA
actgatagcgaaagcctggcgttttgttcgtgagcgtttccgcagttaccagacagagcttaagtcccggggaat

SEQ ID NO: 536578 - DNA, 75 bp, synthetic construct
  source 1..75: mol_type = other DNA
tgatggaaaaggcggtgggcttcacctcccgttttgatttcgccattcatgtggcacatgcccgctcccggggcc

SEQ ID NO: 536579 - DNA, 75 bp, synthetic construct
  source 1..75: mol_type = other DNA
cgctggcgtctggccggtgggcaacgccccgtacaacccacacatcttccggtgccggaagccctggattttatc

SEQ ID NO: 536580 - DNA, 75 bp, synthetic construct
  source 1..75: mol_type = other DNA
ttggcctcggcccggcaggatcggcgttggcgcggcagttagcaggcaaaatgcaggtgatcgcgctggataaaa

SEQ ID NO: 536581 - DNA, 75 bp, synthetic construct
  source 1..75: mol_type = other DNA
gtctggttgtcacactaaacctacgttatggcgtcagtctcattcatctggatgccagcgctgaatgcctgccgg

SEQ ID NO: 536582 - DNA, 75 bp, synthetic construct
  source 1..75: mol_type = other DNA
cggggaagcctggaggccgtgaagcgcgaaatcgaccgtcgcgtgaaggaacgcatgataatgtcgcggaacaac

SEQ ID NO: 536583 - DNA, 75 bp, synthetic construct
  source 1..75: mol_type = other DNA
atgcaggtgatcgcgctggataaaaagcaccagtatggtactgaaggtttcagcaaaccttgcggcggtctgctg

SEQ ID NO: 536584 - DNA, 75 bp, synthetic construct
  source 1..75: mol_type = other DNA
tttatcagcgccagttcgctggaggggattagctatgcgctggatagcgcagacattctgcgtgcggtgttactg

SEQ ID NO: 536585 - DNA, 75 bp, synthetic construct
  source 1..75: mol_type = other DNA
cgcagacattctgcgtgcggtgttactgaagcagccagagaagctcaataccgcttactggcgcgccacccgcaa

SEQ ID NO: 536586 - DNA, 75 bp, synthetic construct
  source 1..75: mol_type = other DNA
atgagcacgtcagacgatatccataacaccacagccactggcaaatgcccgttccatcagggcggtcacgaccag

SEQ ID NO: 536587 - DNA, 75 bp, synthetic construct
  source 1..75: mol_type = other DNA
gaaaacctgcagcgcaaaaagcagaaactgaaaccgctggagatggacgagctgatcgcaaaagcgtggcggttc

SEQ ID NO: 536588 - DNA, 75 bp, synthetic construct
  source 1..75: mol_type = other DNA
gtcccgttttgatttttccattcatgtggcgtttttgcgttcgctgggtaagcggcacaggatgccaccactgtt

SEQ ID NO: 536589 - DNA, 75 bp, synthetic construct
  source 1..75: mol_type = other DNA
acatcggcactgtttgccgccctcgatatttccgaagaggcggtggcctccgcacgccgcagtcgcgtggaatgg

SEQ ID NO: 536590 - DNA, 75 bp, synthetic construct
  source 1..75: mol_type = other DNA
cccccgcatcgtgatttcaacgataagtgggacgatgacgacgactggccgaaaaaggatcaaccgaagaagtaa

SEQ ID NO: 536591 - DNA, 75 bp, synthetic construct
  source 1..75: mol_type = other DNA
agcaaaaacggcgtcttcactgaccgcgttggcgtattgagcaatgacttcttcgtgaacttgctggatatgcgt

SEQ ID NO: 536592 - DNA, 75 bp, synthetic construct
  source 1..75: mol_type = other DNA
atggaacatttcgacgtggcgattattggcctcggcccggcaggatcggcgttggcacgaaaattagcaggcaaa

SEQ ID NO: 536593 - DNA, 75 bp, synthetic construct
  source 1..75: mol_type = other DNA
gatgcccagtttggtctggcgacgatgtgtatcggtctgggtcagggtattgcgacggtgtttgagcggatttaa

SEQ ID NO: 536594 - DNA, 75 bp, synthetic construct
  source 1..75: mol_type = other DNA
caattcgcaccccgatgggccgttcaaagggcggtgcttttcgtcacgtgcgtgcagaagatctctccgctcatt

SEQ ID NO: 536595 - DNA, 75 bp, synthetic construct
  source 1..75: mol_type = other DNA
gcagaaatgctggcgcgtatgcacggtatcagccgtgaaatgcaggatgcctttgccgcgcggtcacacgcccgc

SEQ ID NO: 536596 - DNA, 75 bp, synthetic construct
  source 1..75: mol_type = other DNA
gtgccggcagccctggattttattaacgagaaaccgacccatgagtaatctggccgcgatgctgcgcctgcccgc

SEQ ID NO: 536597 - DNA, 75 bp, synthetic construct
  source 1..75: mol_type = other DNA
atgagtgaaagccgcgcccgtgaattaggtcttaagccgcgcgcccgtgtgcgttcgatggcggtcgttggttgt

SEQ ID NO: 536598 - DNA, 75 bp, synthetic construct
  source 1..75: mol_type = other DNA
caattcgcaccccgatgggccgttcgaagggcggtgcttttcgtcacgtgcgtgcggaagatctctccgctcatt

SEQ ID NO: 536599 - DNA, 75 bp, synthetic construct
  source 1..75: mol_type = other DNA
gcgcagtggtgtggcgcatattccgcagatgaattgcgccgggcactattctgaaagcaggatgctttatcctaa

SEQ ID NO: 536600 - DNA, 75 bp, synthetic construct
  source 1..75: mol_type = other DNA
cgcctttcttattggtgaagcggcgggattcatcagcgccagctcactggaggggattagctatgcgctcgatag

SEQ ID NO: 536601 - DNA, 75 bp, synthetic construct
  source 1..75: mol_type = other DNA
acggtgttatttccctcacgctggcaggattttgtctgcggtaaggacaacgcctttcttattggtgaagcggcg

SEQ ID NO: 536602 - DNA, 75 bp, synthetic construct
  source 1..75: mol_type = other DNA
gagctgggactgattacctaccagacggaatatgatccgcttatcgggtgctacattccgaccgatatcacgttc

SEQ ID NO: 536603 - DNA, 75 bp, synthetic construct
  source 1..75: mol_type = other DNA
atctggcgtgaggatgataaatggcatgtcatttttcgtgcagacggttgggagcagcatatttctgcccgctat

SEQ ID NO: 536604 - DNA, 75 bp, synthetic construct
  source 1..75: mol_type = other DNA
agcaccagcatggtactgaaggtttcagtaaaccttgcggcggtctgctggcaccggacgcgcagcgatctttta

SEQ ID NO: 536605 - DNA, 75 bp, synthetic construct
  source 1..75: mol_type = other DNA
acagagcaactctccagtatggagatgatggcggtggatccgctgcgtcgggttatttctccccgtttctgggct

SEQ ID NO: 536606 - DNA, 75 bp, synthetic construct
  source 1..75: mol_type = other DNA
ttgagtattttcaataaacacgcacaccaggaacgtccgtatatcgtcatagtcgatattgatggaacaatatca

SEQ ID NO: 536607 - DNA, 75 bp, synthetic construct
  source 1..75: mol_type = other DNA
ttgagtattttcaataaacacgcacaccaggaacgtccgtatatcgtcatagtcgatattgatgggacgatatca

SEQ ID NO: 536608 - DNA, 75 bp, synthetic construct
  source 1..75: mol_type = other DNA
agtggcgcgtgttttcaggaggcacggcgtgcttacgttaatggtcagggagtatgaaaatgcgcttcttcatca

SEQ ID NO: 536609 - DNA, 75 bp, synthetic construct
  source 1..75: mol_type = other DNA
ggctccctgtcctgtatccgtagaagctgttgttgggaacacgattttccgaacgctgcgaaatcgcgtatccgt

SEQ ID NO: 536610 - DNA, 75 bp, synthetic construct
  source 1..75: mol_type = other DNA
ctggatatcgagcttgattatagtgacccgactcaatttaaacgggcttatgaactcattaagaattggggggaa

SEQ ID NO: 536611 - DNA, 75 bp, synthetic construct
  source 1..75: mol_type = other DNA
agtggcgcgtgttttcaggaggcacggcgtgcttacgttaatggtcagggagtatgaaaacgcgcttctccatca

SEQ ID NO: 536612 - DNA, 75 bp, synthetic construct
  source 1..75: mol_type = other DNA
tttcgaacaaagccgtattctgtttgccggtgacttacaggatgacctgcccgcgcgtttagataccgcgaccag

SEQ ID NO: 536613 - DNA, 75 bp, synthetic construct
  source 1..75: mol_type = other DNA
ctggatgttggctgcggtgcaggtgtgctttcagttgcgtttgcgcgccactcgccgaagattcgtctcactctg

SEQ ID NO: 536614 - DNA, 75 bp, synthetic construct
  source 1..75: mol_type = other DNA
atccggatctgctggatgaaacatttggcttccatgaagtcatcgcacaaaccgggcgtttcaaggtgtatcgcg

SEQ ID NO: 536615 - DNA, 75 bp, synthetic construct
  source 1..75: mol_type = other DNA
aacaccattctggacaggtctctgaacagcgtgatacagcctctgctgaccagagtgaacaggtgattcgtcatc

SEQ ID NO: 536616 - DNA, 75 bp, synthetic construct
  source 1..75: mol_type = other DNA
cacattgacagcctgaaacaggctatgctccttcttgaaaatcaccaggcaaaattaactgaatccccggcgcca

SEQ ID NO: 536617 - DNA, 75 bp, synthetic construct
  source 1..75: mol_type = other DNA
ccgcgcgtttagataccgcggccagccgtgctcatacccagcaattccaccactggcaggtattaagccgccaga

SEQ ID NO: 536618 - DNA, 75 bp, synthetic construct
  source 1..75: mol_type = other DNA
tatgggctttttttgccagtgccaccagagcgcataatcaacaagcagagcagactaaaaactcaacaactgacg

SEQ ID NO: 536619 - DNA, 75 bp, synthetic construct
  source 1..75: mol_type = other DNA
tcgagagaggaattgcttaaaaggaagagtttcggttctgttaatgacaacaaatatctgaatgcgatgtggcgt

SEQ ID NO: 536620 - DNA, 75 bp, synthetic construct
  source 1..75: mol_type = other DNA
tcgagagaggaattacttaagagaaattcttttccttcagtgaatcaaaacaaatatctgaatgcgatgtggcgg

SEQ ID NO: 536621 - DNA, 75 bp, synthetic construct
  source 1..75: mol_type = other DNA
tcgagagaggaattgcttaagagaaagagtttcggttctgttaatgacaacaaatatctgaatgcgatgtggcgt

SEQ ID NO: 536622 - DNA, 75 bp, synthetic construct
  source 1..75: mol_type = other DNA
tcgagagaggaattgcttaagagaaattcttctccgtcagtgaatcaaaacaaatatctgaatgcgatgtggcgc

SEQ ID NO: 536623 - DNA, 75 bp, synthetic construct
  source 1..75: mol_type = other DNA
tcgagagaggaattgcttaagagaaatagtttcggttctgttaatgacaacaaatatctgaatgcgatgtggcgg

SEQ ID NO: 536624 - DNA, 75 bp, synthetic construct
  source 1..75: mol_type = other DNA
tcgagagaggaattgcttaagagaaatgcttttccgtcagtgaatcaaaacaaatatctgaatgcgatgtttcgg

SEQ ID NO: 536625 - DNA, 75 bp, synthetic construct
  source 1..75: mol_type = other DNA
aagtgggatgagcgggcctttgatgcaggtaatttgtgtcagaaaccaggagaaacaacccgtctgactgagaaa

SEQ ID NO: 536626 - DNA, 75 bp, synthetic construct
  source 1..75: mol_type = other DNA
cagctatttttttctcaaggggtataagtgggatgagcgggcctttgatacagctaatttgtgtcagaaaccagg

SEQ ID NO: 536627 - DNA, 75 bp, synthetic construct
  source 1..75: mol_type = other DNA
gtcgcctctatggtgaatcttcaaagatacaaccaggagtactatctggttcagcaacgctgctcatgatattgc

SEQ ID NO: 536628 - DNA, 75 bp, synthetic construct
  source 1..75: mol_type = other DNA
gcgatggtcatcaccattatgaccacgatgattaatctgttggcgaccattggattatttaccttggttcccctg

SEQ ID NO: 536629 - DNA, 75 bp, synthetic construct
  source 1..75: mol_type = other DNA
atggccaacagtacccattatcgaatagtgcattacgaactgcaggatattatatgggataatattctgcagttt

SEQ ID NO: 536630 - DNA, 75 bp, synthetic construct
  source 1..75: mol_type = other DNA
ccaccgcctgacgcgatggaaggtatgcccctgaaggtcgaatacatttccgtcatggctcaggcgcagaagtct

SEQ ID NO: 536631 - DNA, 75 bp, synthetic construct
  source 1..75: mol_type = other DNA
aagcccttcaggttgagcagaagcgtaaggctcagctcatagataaggccactaacccgccgatggttgcaccga

SEQ ID NO: 536632 - DNA, 75 bp, synthetic construct
  source 1..75: mol_type = other DNA
aaagtttctttccagccaacagactgttgaacttgttcaggaattgaccgacacccaaaatttgggtgtcggtcc

SEQ ID NO: 536633 - DNA, 75 bp, synthetic construct
  source 1..75: mol_type = other DNA
aaaatattgcctgcctgcatgctccgcttgatgtccatgtttcggttgaccgcgttaatggctataagcaaagtc

SEQ ID NO: 536634 - DNA, 75 bp, synthetic construct
  source 1..75: mol_type = other DNA
gaaagagtactgcgacttgctgcgccgtgcggatgccatcttcattgaagagctgcgtaaagcagatctgtacga

SEQ ID NO: 536635 - DNA, 75 bp, synthetic construct
  source 1..75: mol_type = other DNA
gtggtgggttatagtaatgaaacgctgtcgtttattttaacgcctgcaccaggcggcatcgatgttccgacgcag

SEQ ID NO: 536636 - DNA, 75 bp, synthetic construct
  source 1..75: mol_type = other DNA
aggcatatcaccagatggtgaagctggggatcgtcgagcagcgcgaacgatacagccgtaccgcgattaacaaca

SEQ ID NO: 536637 - DNA, 75 bp, synthetic construct
  source 1..75: mol_type = other DNA
ccgcctgacggctaatcaggcatatcaccagatggtgaagctggggatcgtcgaacagcgcgaacgatacagccg

SEQ ID NO: 536638 - DNA, 75 bp, synthetic construct
  source 1..75: mol_type = other DNA
gatggaaaaggcgctgatcggaaaggttgataattcatgtgtcgcgcacaatgcccatgttgtttacctctacat

SEQ ID NO: 536639 - DNA, 75 bp, synthetic construct
  source 1..75: mol_type = other DNA
aacggcggtactcgcaaacttccttgctaccacatcacccgcgacggcttcgcgttcctggcaatgggcttcact

SEQ ID NO: 536640 - DNA, 75 bp, synthetic construct
  source 1..75: mol_type = other DNA
tcaggtgattcagcttacaccgcaagaagatgaatctaccctcaaagtagaactgttaatcggtcagacgctgga

SEQ ID NO: 536641 - DNA, 75 bp, synthetic construct
  source 1..75: mol_type = other DNA
cgtcacgttgccgttcgtcgagttcgtcagactttgtggcataccaacagccagatcgtccgcgaagttacgtaa

SEQ ID NO: 536642 - DNA, 75 bp, synthetic construct
  source 1..75: mol_type = other DNA
ctggccaaagccgaagggtacgaggatataaggattgctggtcttcgtcttgatatggataacgatttcaaaaca

SEQ ID NO: 536643 - DNA, 75 bp, synthetic construct
  source 1..75: mol_type = other DNA
gatccgcacgcttgaatgctctgcatcattcactgcccgcaatttttcggtgagtgattacaccgattgcacagg

SEQ ID NO: 536644 - DNA, 75 bp, synthetic construct
  source 1..75: mol_type = other DNA
ctccacagtcaagtctatcccgctcatgaccgggacgcctgtcaaaccggtatctcagggtaaagagtggcgtgc

SEQ ID NO: 536645 - DNA, 75 bp, synthetic construct
  source 1..75: mol_type = other DNA
atcggactcaccagcctttcgcagaccgttggcttcattggccaactcgcacagctcaaacctgaagcgctcgac

SEQ ID NO: 536646 - DNA, 75 bp, synthetic construct
  source 1..75: mol_type = other DNA
atcgctgcgttgccgattatcggtattctgctggttgtaggttggtttggcgtgcgcaaacgcgttgccgaaatt

SEQ ID NO: 536647 - DNA, 75 bp, synthetic construct
  source 1..75: mol_type = other DNA
atatgatcggtgtgaaatggtttgcggagatggagttctggtttgcgcttattaaagtgctcgccattgtgatct

SEQ ID NO: 536648 - DNA, 75 bp, synthetic construct
  source 1..75: mol_type = other DNA
gacagcaagaacaagccgttccgctccgtgtacttcgagagtggcggcgactccgacaagctgctgcgtgaatcc

SEQ ID NO: 536649 - DNA, 75 bp, synthetic construct
  source 1..75: mol_type = other DNA
aggttaaccactgcatcacgcctaacgtcaaccgcgacagcggtaagatggacagcaagaacaagccttaccgct

SEQ ID NO: 536650 - DNA, 75 bp, synthetic construct
  source 1..75: mol_type = other DNA
atggcggaaaccgaaaaagagcgtctgctgaagcagctagcacagctgaagagtgagcgcacatcgttcgaatcg

SEQ ID NO: 536651 - DNA, 75 bp, synthetic construct
  source 1..75: mol_type = other DNA
gctatgccattgatgctcctgctgacgcgcctgatggctcaagccgccccacgctgtcactgagtgcactgctga

SEQ ID NO: 536652 - DNA, 75 bp, synthetic construct
  source 1..75: mol_type = other DNA
ctgtccaaccagatcaccgatgcgacagcccccgacagggtcgccaccatccgctacaggaagattatccgccgt

SEQ ID NO: 536653 - DNA, 75 bp, synthetic construct
  source 1..75: mol_type = other DNA
tcgctacaagaagattatccgccacctggctgataacagcacccgcaacgagtactgggatgcccggttcacgtt

SEQ ID NO: 536654 - DNA, 75 bp, synthetic construct
  source 1..75: mol_type = other DNA
ttctgctggttgtgggttggtttggtgtacgcaaacgcgttgccgaaattcacagcactgcgccggtagtcgaag

SEQ ID NO: 536655 - DNA, 75 bp, synthetic construct
  source 1..75: mol_type = other DNA
atgagtaaacacgacaccgacacttcagatcaacacgccgcgaaacgccgctggcttaatgcccacgaagagggg

SEQ ID NO: 536656 - DNA, 75 bp, synthetic construct
  source 1..75: mol_type = other DNA
acaggctgctgacaagatgcaggctggtgtgattctgctggactttatgcgtcgggagttaaacctgtctaactc

SEQ ID NO: 536657 - DNA, 75 bp, synthetic construct
  source 1..75: mol_type = other DNA
atctaccacacgatgttcgacaacatgcaaaaagcgatcgacctcaatcgccctgcttgtcaggacaccggggaa

SEQ ID NO: 536658 - DNA, 75 bp, synthetic construct
  source 1..75: mol_type = other DNA
ttacctgggatatcgtccccgacggtgacgacgcggaaatcgaagtttacatggctggcggcggctgcacgctac

SEQ ID NO: 536659 - DNA, 75 bp, synthetic construct
  source 1..75: mol_type = other DNA
atggcaggcggcggctgcacgctacctggccgctcgaaagtgttaatgccgtcagaaggctacgaaggcgtggtg

SEQ ID NO: 536660 - DNA, 75 bp, synthetic construct
  source 1..75: mol_type = other DNA
agcaacgcggggcttaccgtggcaggaagaaaggcactgttgcaaagttagcgatgaggcagccttttgtcttat

SEQ ID NO: 536661 - DNA, 75 bp, synthetic construct
  source 1..75: mol_type = other DNA
tgctgggcacatcgccgcggtacgctgcgggttcatgccgatctcacctttgaaaatctgtctcacacccggagc

SEQ ID NO: 536662 - DNA, 75 bp, synthetic construct
  source 1..75: mol_type = other DNA
ggtggaaaccgccgccgtactctcgcgtaaagccattttgcgcccgattggcagccgccatcccaatccaaaagc

SEQ ID NO: 536663 - DNA, 75 bp, synthetic construct
  source 1..75: mol_type = other DNA
cgttactgaagcgcgcctgctgacccgttataccgtctgggcgggcctgatggcgggtgttggtttaacgctgtt

SEQ ID NO: 536664 - DNA, 75 bp, synthetic construct
  source 1..75: mol_type = other DNA
gggacaataatattcttacgttgcatgatgtttttaaaatctatcaaaatacaggggggcttcgtcttgtaaaaa

SEQ ID NO: 536665 - DNA, 75 bp, synthetic construct
  source 1..75: mol_type = other DNA
tcagtgttacatttgcacggggttttgccccgtatcagtagctcccataccaccggtcatcgtcgcttttttcca

SEQ ID NO: 536666 - DNA, 75 bp, synthetic construct
  source 1..75: mol_type = other DNA
gcgttcggcacctatctgctgctttccgtcggttataccgccatcaacgtgccgtactgcgcgctgatcaacacc

SEQ ID NO: 536667 - DNA, 75 bp, synthetic construct
  source 1..75: mol_type = other DNA
ttgggtatatcagggtcagcaccttcgaccagaacccggaacggcaactggaaggcgtcaaggttgatcgcgctt

SEQ ID NO: 536668 - DNA, 75 bp, synthetic construct
  source 1..75: mol_type = other DNA
caaaaggggatgataagtttatcaccaccgactatttgcaacagtgcctgctgagcttcgtccgcgaaggcgata

SEQ ID NO: 536669 - DNA, 75 bp, synthetic construct
  source 1..75: mol_type = other DNA
gaactgcgccaacgtgtcgaggctggcgagcaaaagaccaagctggctcgtgaattcggaatcagtcgcgaaacc

SEQ ID NO: 536670 - DNA, 75 bp, synthetic construct
  source 1..75: mol_type = other DNA
atcacgacgacgacacatatgtttataccaacgtctcactggcccgtggttttctgtcgcgatcccgccatgctt

SEQ ID NO: 536671 - DNA, 75 bp, synthetic construct
  source 1..75: mol_type = other DNA
cgttattcattgacttagacgtgcagaaacgtcctgctgtgatttcagttgttggcgcaggggggaaaaccagtc

SEQ ID NO: 536672 - DNA, 75 bp, synthetic construct
  source 1..75: mol_type = other DNA
tggcgtgcgcggcgtgattgtcggccgcgcgctgctggaagataaattcaccgtaacggaggccatccaatgctg

SEQ ID NO: 536673 - DNA, 75 bp, synthetic construct
  source 1..75: mol_type = other DNA
gcgcggatgagctgaatgcctttaccgagcatcacttctggctggcgttacgcaatgaaacgttcagcattgaat

SEQ ID NO: 536674 - DNA, 75 bp, synthetic construct
  source 1..75: mol_type = other DNA
cgctgggcgtggcgattaacctcaacgctggcgcggcggtcatttattcagcccgcactctggatgccgtcggtc

SEQ ID NO: 536675 - DNA, 75 bp, synthetic construct
  source 1..75: mol_type = other DNA
atcaccacaacgacacatatgtttttgccggagtccacctggcccgtgattttctgccgtgatcccgcaatgctt

SEQ ID NO: 536676 - DNA, 75 bp, synthetic construct
  source 1..75: mol_type = other DNA
cggtggtggcgctggcgaaagttggcggcggcgttgacagcctgagcacgccaattggtaaagttgccggtgtac

SEQ ID NO: 536677 - DNA, 75 bp, synthetic construct
  source 1..75: mol_type = other DNA
gcgctaacctgtcgctgggcggttcatcactggcggtggcgtggaaaacgaaaaacccggaactgcgccagacgg

SEQ ID NO: 536678 - DNA, 75 bp, synthetic construct
  source 1..75: mol_type = other DNA
ttgcaaggtcaacgcatcggctatgtccgcgtcagcagcttcgaccagaacccggaacggcaattggagggtgtt

SEQ ID NO: 536679 - DNA, 75 bp, synthetic construct
  source 1..75: mol_type = other DNA
atagcggcgccaaacaggtggcggtgagcggctggcaggagaactctggcgtcacgctggaagagctggttgaga

SEQ ID NO: 536680 - DNA, 75 bp, synthetic construct
  source 1..75: mol_type = other DNA
ggacgcgggtgtggcgcgcgtggtggtcggctcaacggcggtgaaatcgccggaagtggtgaaaggctggttcca

SEQ ID NO: 536681 - DNA, 75 bp, synthetic construct
  source 1..75: mol_type = other DNA
cgaacgcctgacccgtcagacgctgtttcgcatcaatgccctgtttatggcggcgtacaacgaaattcttgagct

SEQ ID NO: 536682 - DNA, 75 bp, synthetic construct
  source 1..75: mol_type = other DNA
tgtggttcagctcagcagtgcgaccaacagcacttccgagtcactggcggcaacaccaaaggcagtaaaggcagc

SEQ ID NO: 536683 - DNA, 75 bp, synthetic construct
  source 1..75: mol_type = other DNA
aaggagaacgttaacggtaatattcactttaactttggcagccagggtaaaggttcgatggtggtcgaaggctac

SEQ ID NO: 536684 - DNA, 75 bp, synthetic construct
  source 1..75: mol_type = other DNA
gaaaaagtgaactgcttgagcagcgggcagagccagttccttcccgcagtgttccggatggcgttaatttccttg

SEQ ID NO: 536685 - DNA, 75 bp, synthetic construct
  source 1..75: mol_type = other DNA
ctgggatctgtttaccgcctggcagaccgctggcgcgccgtcgaaagagagttgggcgttcactgcgttaggcgt

SEQ ID NO: 536686 - DNA, 75 bp, synthetic construct
  source 1..75: mol_type = other DNA
gtgaggttgatggagatgactggatggtgtcacgaccactacaaaaatacatttctggtaactggtataacgttg

SEQ ID NO: 536687 - DNA, 75 bp, synthetic construct
  source 1..75: mol_type = other DNA
actcctggtggtcattacgtgccgatagttaagggcttgtccattcgcaatggacagggctatcccggcgcggtc

SEQ ID NO: 536688 - DNA, 75 bp, synthetic construct
  source 1..75: mol_type = other DNA
cgcccagaagctcaacgaaaaggctatcctgctcagctctatcaattcaccgctgtggatctgcacgttgaaatc

SEQ ID NO: 536689 - DNA, 75 bp, synthetic construct
  source 1..75: mol_type = other DNA
gcgggcgaaggtatgaaccgccccgggtttcctggagagtgttttatctgtgaactcaggctgccagatcatcgt

SEQ ID NO: 536690 - DNA, 75 bp, synthetic construct
  source 1..75: mol_type = other DNA
acgttaatcggattgatgcttgtagtaccatcaaggatgcagaggatttgcagtcacttattgctggtatgattg

SEQ ID NO: 536691 - DNA, 75 bp, synthetic construct
  source 1..75: mol_type = other DNA
gatatgcaggacacaaaaaacgtgttccttttcgtgaaagcagaacatttcagcggaagtcttgatgctttccct

SEQ ID NO: 536692 - DNA, 75 bp, synthetic construct
  source 1..75: mol_type = other DNA
acaattcaaacaaatattattgcatttttcttctcatggatctatttatttgtcttgggattatggaagaaagct

SEQ ID NO: 536693 - DNA, 75 bp, synthetic construct
  source 1..75: mol_type = other DNA
cggattcagagagagaaaaaggaaggtggctttaaccagatggagtataacaagatcatgttggataacatggcc

SEQ ID NO: 536694 - DNA, 75 bp, synthetic construct
  source 1..75: mol_type = other DNA
tcatttaatgacctcaatgctcgcgcgtgaactgattacagaattaattgagcttcacgaaaaattgaaggcata

SEQ ID NO: 536695 - DNA, 75 bp, synthetic construct
  source 1..75: mol_type = other DNA
aacaggccggggatggcgttcttctgttttactcaaacggacagccagtattcaggctacagcccgcatctgttg

SEQ ID NO: 536696 - DNA, 75 bp, synthetic construct
  source 1..75: mol_type = other DNA
aagtcgggcgggatattcttgcgaaatcgaccgttgctgccgttatcgaatacctcggtttacaggaaacggtaa

SEQ ID NO: 536697 - DNA, 75 bp, synthetic construct
  source 1..75: mol_type = other DNA
cgaaacagcggcaaaacgggcagaggatattgctgatgccgtatctctggaagatgcgagtacgacgaaaaaagg

SEQ ID NO: 536698 - DNA, 75 bp, synthetic construct
  source 1..75: mol_type = other DNA
ctgctgaatccgcggcaacgcgtgccgaaacagcggcaaaacgggcagaggatattgctgatgccgtatctctgg

SEQ ID NO: 536699 - DNA, 75 bp, synthetic construct
  source 1..75: mol_type = other DNA
gcatcgacaaaggccagtgaagcagcgaaaagtgctgccgctgcagagtcctcaaaaagtgcggcggccaccagt

SEQ ID NO: 536700 - DNA, 75 bp, synthetic construct
  source 1..75: mol_type = other DNA
ccataaatcctttatttcaccgggtgctcttattgcgggtggcgtccgttataacaccgatggaaatatatttgg

SEQ ID NO: 536701 - DNA, 75 bp, synthetic construct
  source 1..75: mol_type = other DNA
gaagtggcgcatttgcagaccagttgaataatgccaccgcgccttttgttcagacgcagtttgcctggaatccca

SEQ ID NO: 536702 - DNA, 75 bp, synthetic construct
  source 1..75: mol_type = other DNA
ttgtgcggctgctttttgagcgggctggggtatctgacagcaggattaaccgccagcctgcccgtcatcagcctg

SEQ ID NO: 536703 - DNA, 75 bp, synthetic construct
  source 1..75: mol_type = other DNA
caccatcgggttgccgctcgccgtattgccgggctatgtccatgatgtgatgggatttagtgccttctgggcggg

SEQ ID NO: 536704 - DNA, 75 bp, synthetic construct
  source 1..75: mol_type = other DNA
ttgtgcggctgctttttgagcggtctggggtatctgacggcaggattaaccgccagtctgcccgtcatcagcctg

SEQ ID NO: 536705 - DNA, 75 bp, synthetic construct
  source 1..75: mol_type = other DNA
caacgcttaactattcaaatgaatttcattgctttcttctgttcctggatatatttatttgtcctggggttatgg

SEQ ID NO: 536706 - DNA, 75 bp, synthetic construct
  source 1..75: mol_type = other DNA
ttatggatttatcgcttggcgtgaccggaccactggctgggctggtgatgagctgggcgggcgtaccggtgattt

SEQ ID NO: 536707 - DNA, 75 bp, synthetic construct
  source 1..75: mol_type = other DNA
aatcgcgttattgctgacgtggcgattaaaaaaacggcctccggaacacgttcctgagaccgtctcatcatctta

SEQ ID NO: 536708 - DNA, 75 bp, synthetic construct
  source 1..75: mol_type = other DNA
tatagtctcagtattatacaatactctctgaatcgtcatttatcgacatggaatgtaatgtatacaaaattaata

SEQ ID NO: 536709 - DNA, 75 bp, synthetic construct
  source 1..75: mol_type = other DNA
tataatttcatttcatccggtaggcaatgaactatccgcaacttatcaaacatcaaacgatatcgcaatatatta

SEQ ID NO: 536710 - DNA, 75 bp, synthetic construct
  source 1..75: mol_type = other DNA
aaatacaaactttcatctttttattgtcatgtatatctattatatttatgtctatgcatgacaataatggaatat

SEQ ID NO: 536711 - DNA, 75 bp, synthetic construct
  source 1..75: mol_type = other DNA
ttccatgagcaactggacgagctgctgaaggcggcgctggcgatgcttatctggggtggcaaggtgcgcgttatc

SEQ ID NO: 536712 - DNA, 75 bp, synthetic construct
  source 1..75: mol_type = other DNA
tctgcggcttaaacgcctggggctgtcaaaaacgttccgtcgtctggttttcacactcaaccgacgttatggcgt

SEQ ID NO: 536713 - DNA, 75 bp, synthetic construct
  source 1..75: mol_type = other DNA
aatatacctgcgtggtgactgattcggcagagaaagcacagagtgtgacgtctgttgaatgcaccgtgacagtga

SEQ ID NO: 536714 - DNA, 75 bp, synthetic construct
  source 1..75: mol_type = other DNA
ttctcacaaggcgatttccctgcggtactggacgtagaagagcggggaaaattatcggcaaaagaattacgcaag

SEQ ID NO: 536715 - DNA, 75 bp, synthetic construct
  source 1..75: mol_type = other DNA
aagtacgggaaaaaagccgattatttactcaggagccgttttttatcacaccaatctggcgggctatttcaatga

SEQ ID NO: 536716 - DNA, 75 bp, synthetic construct
  source 1..75: mol_type = other DNA
tttctgcaaacggtggatttctcacaaggcgatttccctgcggtactggacgtagaagaacggggaaaattatcg

SEQ ID NO: 536717 - DNA, 75 bp, synthetic construct
  source 1..75: mol_type = other DNA
ggcggttgaggctgcgggtggtgtgccgccttattcttatgtctggaagaaaggtggttctcctgtttccggaca

SEQ ID NO: 536718 - DNA, 75 bp, synthetic construct
  source 1..75: mol_type = other DNA
tgaaatgttagtcaatgccgataaagcgttatatcaagccaaaagaaccggaaaaaacaaggtgataactcactc

SEQ ID NO: 536719 - DNA, 75 bp, synthetic construct
  source 1..75: mol_type = other DNA
acacgtattatttattagaagtggctattatttctttatctccgttaggtaacgatttatctacaatctatcaga

SEQ ID NO: 536720 - DNA, 75 bp, synthetic construct
  source 1..75: mol_type = other DNA
tggctgacgacccatctgctgccattgctggaggctctgcctgcagaggctacctcttatgttggtcgtgacttt

SEQ ID NO: 536721 - DNA, 75 bp, synthetic construct
  source 1..75: mol_type = other DNA
aataccaacgccaaagtcactattacgcaaggtggctataagatttatgaaacgactgtgccgccaggcgctttc

SEQ ID NO: 536722 - DNA, 75 bp, synthetic construct
  source 1..75: mol_type = other DNA
ccttattgccaccgatgcgccgtttatcccgtatccgggataccggccaccgaccgaaatggttcatcctgaaca

SEQ ID NO: 536723 - DNA, 75 bp, synthetic construct
  source 1..75: mol_type = other DNA
gaaattaacaaagggccggtgaaggcaaactcacgccgtcgtcgtcaggcggcccgcatgctggaggggtactga

SEQ ID NO: 536724 - DNA, 75 bp, synthetic construct
  source 1..75: mol_type = other DNA
gcggtggatcgcaccgatggcatcagcatgacctttgccgactggcgctttaacctgcgctcctccaacaccgaa

SEQ ID NO: 536725 - DNA, 75 bp, synthetic construct
  source 1..75: mol_type = other DNA
tctgcggcttaaacgcctggggctgtcaaaaacgttccgtcgtctggttatcacactaaacctacgttatggcgt

SEQ ID NO: 536726 - DNA, 75 bp, synthetic construct
  source 1..75: mol_type = other DNA
aatgcggccatgttgtcatacaacctcaacggatatcatagtgaaactcctggtcgaagaaatgacagcatttat

SEQ ID NO: 536727 - DNA, 75 bp, synthetic construct
  source 1..75: mol_type = other DNA
cctggctgtcccgtgccctgatagagtcccgcatgtccgctgatacgccggtattgcgtctgacctgcaaggaag

SEQ ID NO: 536728 - DNA, 75 bp, synthetic construct
  source 1..75: mol_type = other DNA
tattccggcaaaccgttggggtgatactcaggatttaatgggtgcagccgtattcctcgcaagtccggcatcgaa

SEQ ID NO: 536729 - DNA, 75 bp, synthetic construct
  source 1..75: mol_type = other DNA
ccttgtgcgccgggtgccgtttattctggagctgcggaacgtaccttttaaacagcaagagcaaatcacctggta

SEQ ID NO: 536730 - DNA, 75 bp, synthetic construct
  source 1..75: mol_type = other DNA
ggccgtagcggggatttgtcggtggactacccgttgttgcaggagaagaacctgatacgacgcgtgccattcgta

SEQ ID NO: 536731 - DNA, 75 bp, synthetic construct
  source 1..75: mol_type = other DNA
atgaggatacgctggacgacctgcgggcggttcaggtcgtcaacggtgttccgcgcgtgccggaacaacggtcaa

SEQ ID NO: 536732 - DNA, 75 bp, synthetic construct
  source 1..75: mol_type = other DNA
caactatgccgcaggcgaaatcgaagagggtttctgggaagaggacgaagacgacaagcacatcaaaacctacac

SEQ ID NO: 536733 - DNA, 75 bp, synthetic construct
  source 1..75: mol_type = other DNA
attatcggcaaaagaattacgcaagcgggtcagtcagtggttaaaaatggttgaaaagagcacgggcaaaaagcc

SEQ ID NO: 536734 - DNA, 75 bp, synthetic construct
  source 1..75: mol_type = other DNA
ggatgtgttatgtggtttattgccttgcaactggcgagagacggtattgctcatgcacaagccttgttcagttag

SEQ ID NO: 536735 - DNA, 75 bp, synthetic construct
  source 1..75: mol_type = other DNA
tgggcaataaagaaaaggcggataagcaaaaagccgtcagcgatattgtggcgctggaaaacgccctggatatgt

SEQ ID NO: 536736 - DNA, 75 bp, synthetic construct
  source 1..75: mol_type = other DNA
tggcaggctgagcctgagtctggtgcctccctgccgggccaccagttttcactgatggcccggcagagagtgcca

SEQ ID NO: 536737 - DNA, 75 bp, synthetic construct
  source 1..75: mol_type = other DNA
tcgccgtggttgctggcgctggtcacctggggcggcgtagccttcttgctgtggtatggttttggcgcttttaaa

SEQ ID NO: 536738 - DNA, 75 bp, synthetic construct
  source 1..75: mol_type = other DNA
gcagcctgggcggtcaacttgatcctgacccaaaacgttggtttgcattcgggacgattagcgcctctttcctgt

SEQ ID NO: 536739 - DNA, 75 bp, synthetic construct
  source 1..75: mol_type = other DNA
ggagcctcggcgggcagctcgatgtcgaaccaaaacgctggtttgcgcttgggacgattagcgcctctttcttgt

SEQ ID NO: 536740 - DNA, 75 bp, synthetic construct
  source 1..75: mol_type = other DNA
gagttctggtttgcgcttattaaagtgctcgccattgtgacctttttggtcgtgggtacagtgttcctcggtagt

SEQ ID NO: 536741 - DNA, 75 bp, synthetic construct
  source 1..75: mol_type = other DNA
agttatggactggtgaagggcttgccgcaaatagcacccgtgcaggaacaaaccctggtatactggctacatacg

SEQ ID NO: 536742 - DNA, 75 bp, synthetic construct
  source 1..75: mol_type = other DNA
gttggcgtcctgtcgatgctgattattgtggtttctggcgtgttcatcggaatggtgctggggctgcaaggttat

SEQ ID NO: 536743 - DNA, 75 bp, synthetic construct
  source 1..75: mol_type = other DNA
tgatgtcaataaaaattctttgtataaagaattatcggtctattattcgtgcaaaaatagagctctgattaatgg

SEQ ID NO: 536744 - DNA, 75 bp, synthetic construct
  source 1..75: mol_type = other DNA
aaccccgacctccataacgacgccctatccaaacatcgaatggcaactggaggggatgacgtgcaatagtggatt

SEQ ID NO: 536745 - DNA, 75 bp, synthetic construct
  source 1..75: mol_type = other DNA
cgatcttgcagaacgtctggccaatttttttaaggatgaaatcagcgaaatgcagattctttatcgtatttcagg

SEQ ID NO: 536746 - DNA, 75 bp, synthetic construct
  source 1..75: mol_type = other DNA
atctttatttgcccgccgaatgccgacgatgatttgctgcgccagatagcctcctacggtcgtggatacacctat

SEQ ID NO: 536747 - DNA, 75 bp, synthetic construct
  source 1..75: mol_type = other DNA
aaaaattcactgccttgttctgcgctctggggctaatttccatcgtggcgatttatcctcgtcagacggtgaatt

SEQ ID NO: 536748 - DNA, 75 bp, synthetic construct
  source 1..75: mol_type = other DNA
ttgccattggtgcagagtctgttccgtttaagtttgaattatcccaactggtaacaatgcgtatcagtgaagagt

SEQ ID NO: 536749 - DNA, 75 bp, synthetic construct
  source 1..75: mol_type = other DNA
ttgttggtggattgtacaagacccatacgaatcaagaacgggtcgttctagaaataaaagatgatgaagtgaaat

SEQ ID NO: 536750 - DNA, 75 bp, synthetic construct
  source 1..75: mol_type = other DNA
gattatttactcaggagccgttttttatcacacgaatctggcgggctatttcaatgaatatccgtggtgggtggc

SEQ ID NO: 536751 - DNA, 75 bp, synthetic construct
  source 1..75: mol_type = other DNA
gctgcgcggggcgtatcattatttctccccgtcggtagcagcgcctgttcaggcgcgattatttctgcaaacggt

SEQ ID NO: 536752 - DNA, 75 bp, synthetic construct
  source 1..75: mol_type = other DNA
aaatgcgaaaactttacttttcgcgcttcaaacgaaacagcggcattggccgctgtttttttattcattaagtgg

SEQ ID NO: 536753 - DNA, 75 bp, synthetic construct
  source 1..75: mol_type = other DNA
ctggcacagcgtgctgttgatctgatcagcaacgtcgcaggcgatcgtgtgacttaccggatcaccaaaggcgaa

SEQ ID NO: 536754 - DNA, 75 bp, synthetic construct
  source 1..75: mol_type = other DNA
ctggattacaacccaactggcgataaagaagcgccggtgtacgcgtgcctggtaggcaaaggcatcacctttgat

SEQ ID NO: 536755 - DNA, 75 bp, synthetic construct
  source 1..75: mol_type = other DNA
ggtaggcaaaggcatcacctttgattccggcggttacagcatcaaacagaccgcgtttatggactcgatgaagtc

SEQ ID NO: 536756 - DNA, 75 bp, synthetic construct
  source 1..75: mol_type = other DNA
ttgcgcaatggactgttaaaaaacgcggtagtcaacgaaattgcacatgctcacaatatcagcgcggcacaagta

SEQ ID NO: 536757 - DNA, 75 bp, synthetic construct
  source 1..75: mol_type = other DNA
gataaccgcctgatgatcatcgactgggtgcgtgacaccatcaacgcaccggcagaagaactggggccatcgcaa

SEQ ID NO: 536758 - DNA, 75 bp, synthetic construct
  source 1..75: mol_type = other DNA
gacttaccggatcactaaaggcgaagatctgcgcgagcagggttatatggggctgcacactgttggacgcggatc

SEQ ID NO: 536759 - DNA, 75 bp, synthetic construct
  source 1..75: mol_type = other DNA
aaattgatgttatccatgggaaggctgttacctcttctttggccgttgccgaatatttctgcaagcagcacaaaa

SEQ ID NO: 536760 - DNA, 75 bp, synthetic construct
  source 1..75: mol_type = other DNA
attcgtttggcggataaggctaatcttcatattcaccgtctcctgaatatcagcggagggcatcgtcatgcttaa

SEQ ID NO: 536761 - DNA, 75 bp, synthetic construct
  source 1..75: mol_type = other DNA
aaccgccgggtttacgactgacagcattgcccgctggccgctctttttgccggtactgcttttatgttcagcttt

SEQ ID NO: 536762 - DNA, 75 bp, synthetic construct
  source 1..75: mol_type = other DNA
taattcactgttatcggaggctgccatcatggctactgtcccagccctcactcgtctgaatgatgaagacttaca

SEQ ID NO: 536763 - DNA, 75 bp, synthetic construct
  source 1..75: mol_type = other DNA
gaagcctctaacgagcgtgagtttggttatgcacaggttgaagtacaaactgatagcgcgctcattcgtggcatc

SEQ ID NO: 536764 - DNA, 75 bp, synthetic construct
  source 1..75: mol_type = other DNA
ttgccaacatgctgtttggtcgtcttgaggtctttacattgctggtgctctttaccccgactttctggcgtgaat

SEQ ID NO: 536765 - DNA, 75 bp, synthetic construct
  source 1..75: mol_type = other DNA
aaacgtactgatattgttgagacgttatttggtatccgtgagaaatcttccggcaccattacgctgcacgggaaa

SEQ ID NO: 536766 - DNA, 75 bp, synthetic construct
  source 1..75: mol_type = other DNA
ggaaaatcaacattattaaaatgcctgtttggtatttatcaaaaagactccggcaccattttattccagggtaaa

SEQ ID NO: 536767 - DNA, 75 bp, synthetic construct
  source 1..75: mol_type = other DNA
gaactggcgaagaaaggcaaggggattattattatctcctctgaaatgcctgagttgttagggataacagaccgt

SEQ ID NO: 536768 - DNA, 75 bp, synthetic construct
  source 1..75: mol_type = other DNA
gttgattatctcgagcccggtaacgggcctgacggcgatatcgaacatcacaccgaaataacccttccttcctga

SEQ ID NO: 536769 - DNA, 75 bp, synthetic construct
  source 1..75: mol_type = other DNA
tgaaaaccgggttgcaggcgcggcacagttcaaaaatctgccggaggtcggaaagctgagactcccggcggcata

SEQ ID NO: 536770 - DNA, 75 bp, synthetic construct
  source 1..75: mol_type = other DNA
atgaaactgacgcctgttattgctgcactgcgtgcccgctgcccgtattttgaaaaccgggtggcaggcgcggca

SEQ ID NO: 536771 - DNA, 75 bp, synthetic construct
  source 1..75: mol_type = other DNA
ctttactcccacctgtcggtaatccacaaggtctggctgcagcagctttatcccatgttggcaaaagccgaatcc

SEQ ID NO: 536772 - DNA, 75 bp, synthetic construct
  source 1..75: mol_type = other DNA
agcggtttttttgcgcacgtttcctcacatccaaattatggtggggcgtgcaggggcatcgaaagatgcgccggg

SEQ ID NO: 536773 - DNA, 75 bp, synthetic construct
  source 1..75: mol_type = other DNA
atattaatgatgcttcggcactggcctgcctcataaatttgtcgctgaacccttcagaggtatgggggcgcaaat

SEQ ID NO: 536774 - DNA, 75 bp, synthetic construct
  source 1..75: mol_type = other DNA
tggctgcagcagctttatcctatgttggcaaaagccgaatctccgctggctgttagcttatatgactatattaat

SEQ ID NO: 536775 - DNA, 75 bp, synthetic construct
  source 1..75: mol_type = other DNA
ggcgaagttactgacctcaatttctctggtttcgaagtcactcctgccgactgggagcgcttcgtgactgattct

SEQ ID NO: 536776 - DNA, 75 bp, synthetic construct
  source 1..75: mol_type = other DNA
tgcaggaacttaaccgctggtttcgtgacggaagagggctttatgttcatgttattcgttgggaaccagaaacac

SEQ ID NO: 536777 - DNA, 75 bp, synthetic construct
  source 1..75: mol_type = other DNA
agcgcgttatctatcttcgcaaagactacccgcatgagtgctttagtcctttgtggaaattcaggcatgattttg

SEQ ID NO: 536778 - DNA, 75 bp, synthetic construct
  source 1..75: mol_type = other DNA
caaagcccgctgtaccgagcgacgttgcacataacgccagcgttctctgttcctacatttcatcaattcatcagg

SEQ ID NO: 536779 - DNA, 75 bp, synthetic construct
  source 1..75: mol_type = other DNA
ttcttctctaaacgtcatgacgatgttctgaaaaagatccgcattttggattgttctccagagttttgtgcccgc

SEQ ID NO: 536780 - DNA, 75 bp, synthetic construct
  source 1..75: mol_type = other DNA
ttgagtgtgaaggaccaccagcatattgattctgcaattccgggacgttacactgttctggcaccttataaagcg

SEQ ID NO: 536781 - DNA, 75 bp, synthetic construct
  source 1..75: mol_type = other DNA
agtcaccggtatttccacccctgtacgtctcaccacccttatggtcgtggaaagccttggtggtgagttatttaa

SEQ ID NO: 536782 - DNA, 75 bp, synthetic construct
  source 1..75: mol_type = other DNA
caaataacccgcgacggctttgcgtttcttgctatgggcttcactggtaaacgtgctgcccggttcaaagaggca

SEQ ID NO: 536783 - DNA, 75 bp, synthetic construct
  source 1..75: mol_type = other DNA
gtacgtctcaccacctctgtgattggcgtcccatgtggtgagttctttgaattcaacataggggctgtcaccatg

SEQ ID NO: 536784 - DNA, 75 bp, synthetic construct
  source 1..75: mol_type = other DNA
gagatcgatttccattctgccaaagaagcactggaaaatggtatttcgatggtacaccaggagttaaacctggta

SEQ ID NO: 536785 - DNA, 75 bp, synthetic construct
  source 1..75: mol_type = other DNA
atcggactgagcggcacggaagagatttacttcgccaccttccacctcggggtggacggcggcatcgaggtgacg

SEQ ID NO: 536786 - DNA, 75 bp, synthetic construct
  source 1..75: mol_type = other DNA
agcgagtcgctgaagctggcgctggcccgcgggttaatggatgccggtaccgacgtgctggacatcggcctgagc

SEQ ID NO: 536787 - DNA, 75 bp, synthetic construct
  source 1..75: mol_type = other DNA
tgatgtcgaagacggggcatgcgttcatcaaggagcggatgcgtcaggaagacgctatctacggcggggagatga

SEQ ID NO: 536788 - DNA, 75 bp, synthetic construct
  source 1..75: mol_type = other DNA
tacaggctcttcatgatttcattattgttgagaaaaacaattcacatggagagaaaagggaaaagaaatatggag

SEQ ID NO: 536789 - DNA, 75 bp, synthetic construct
  source 1..75: mol_type = other DNA
cagcttgaagcgcacaagacaacgccgggtaaggccagccaggtgcagacagccgccacttcttcatcacctgtg

SEQ ID NO: 536790 - DNA, 75 bp, synthetic construct
  source 1..75: mol_type = other DNA
gggctggatgttttcccgtacaccctggacggcatgggagatgcgtctttcccggatgccattccggcaacagag

SEQ ID NO: 536791 - DNA, 75 bp, synthetic construct
  source 1..75: mol_type = other DNA
ttaaagatggaaattgcactattgctggcgtccctgccaagataacatcatataaaacatcaaaaggttatatat

SEQ ID NO: 536792 - DNA, 75 bp, synthetic construct
  source 1..75: mol_type = other DNA
atcctaatgcctatgaatactggctttatcataaatatcggatgtggtggcttggctttgatcccctttcagtga

SEQ ID NO: 536793 - DNA, 75 bp, synthetic construct
  source 1..75: mol_type = other DNA
tcggaatggattcatttcacaggtagcggatatctgttacgtaccgatgcgtggtcatacccggttctgcggctt

SEQ ID NO: 536794 - DNA, 75 bp, synthetic construct
  source 1..75: mol_type = other DNA
gcgcatccgggcgcagtatgagccggcggccgcacacatcgacacaacggacggtatcagtattgaataccctga

SEQ ID NO: 536795 - DNA, 75 bp, synthetic construct
  source 1..75: mol_type = other DNA
cgacgtgctggatatcggcctgagcggcacggaagagatttacttcgccactttccacctcggggtggacggcgg

SEQ ID NO: 536796 - DNA, 75 bp, synthetic construct
  source 1..75: mol_type = other DNA
atgacacagttaacatgctttaaggcttatgacatccggggtgaactgggcgaggagctgaacgaggacatcgcc

SEQ ID NO: 536797 - DNA, 75 bp, synthetic construct
  source 1..75: mol_type = other DNA
acctcatcaatagcgtggactacaacgagcagaaagatacggtggtgttctatgcagaaccgaagctggccgaac

SEQ ID NO: 536798 - DNA, 75 bp, synthetic construct
  source 1..75: mol_type = other DNA
gtgcgagaaagtcggcgtcgattcggtgctggttgccgatgtgccagtggaagagtccgcgcccttccgccaggc

SEQ ID NO: 536799 - DNA, 75 bp, synthetic construct
  source 1..75: mol_type = other DNA
agccggtgctgacgcgctggagttaggcatccccttctccgacccactggcagatggcccgacgattcaaaacgc

SEQ ID NO: 536800 - DNA, 75 bp, synthetic construct
  source 1..75: mol_type = other DNA
cccaaccattcccattggcctgctgatgtatgccaatctggtatttaacaaaggcattgatgagttttatgcgca

SEQ ID NO: 536801 - DNA, 75 bp, synthetic construct
  source 1..75: mol_type = other DNA
acagtccgaccattaataccattattgctatcttcctgctgatttctggctgtaactacggcctgcatttctcgt

SEQ ID NO: 536802 - DNA, 75 bp, synthetic construct
  source 1..75: mol_type = other DNA
cacgctgagcgatgccgcagataacgccagcgtgctttactcccacctgtcggtaatccacaaggtctggctgca

SEQ ID NO: 536803 - DNA, 75 bp, synthetic construct
  source 1..75: mol_type = other DNA
ctgggactgtcaaaaacgttccgccgtctggttgtcacacttatccggcgttatggcgtcagtctcattcatctg

SEQ ID NO: 536804 - DNA, 75 bp, synthetic construct
  source 1..75: mol_type = other DNA
gctctctacccagccgggtgtcagctatagcgaacacaatctcagcaaagacaaaccgttaacacgaatgcagct

SEQ ID NO: 536805 - DNA, 75 bp, synthetic construct
  source 1..75: mol_type = other DNA
cgcgacagcgaaggcaatcatgttcaggccagcgccggtgaggcgttgctgctctctacccagccgggtgtcagc

SEQ ID NO: 536806 - DNA, 75 bp, synthetic construct
  source 1..75: mol_type = other DNA
aacatagaaataagagatagcctctccaactttgatgaaaattccgttgaattatatacagggaatcttgtgccc

SEQ ID NO: 536807 - DNA, 75 bp, synthetic construct
  source 1..75: mol_type = other DNA
acgacagtcactgtttaaagcgctcctgggctggaatcctgaagagcgcggaaacccgatcacctatgcaggcgg

SEQ ID NO: 536808 - DNA, 75 bp, synthetic construct
  source 1..75: mol_type = other DNA
aagcagaggtgatcacaaccgtctgggcattgccctgcaaatggcactgttgcaaatagtcggtggtgataaact

SEQ ID NO: 536809 - DNA, 75 bp, synthetic construct
  source 1..75: mol_type = other DNA
ctggcgcgttattttcatcttgatgaagcggataaagaatttatcgggaaaagccggggtgatcacaatcgacgg

SEQ ID NO: 536810 - DNA, 75 bp, synthetic construct
  source 1..75: mol_type = other DNA
tggaatataccttgccaaaaaactggcaacagttgtggatggaaacgacacccggttggttaaacagcctgcaac

SEQ ID NO: 536811 - DNA, 75 bp, synthetic construct
  source 1..75: mol_type = other DNA
ggtgatcgctggcctctattttcttctgcaaacccgctggggagcagaacatatcagcgcatgggtttccgagaa

SEQ ID NO: 536812 - DNA, 75 bp, synthetic construct
  source 1..75: mol_type = other DNA
aaagccagatgatacttaccgaatataagctagaccacaaaaccaataaatcactctcagtatatttgctccggc

SEQ ID NO: 536813 - DNA, 75 bp, synthetic construct
  source 1..75: mol_type = other DNA
gaaaagagaaacctggctggcagatgatgtaaaacaattgcgccaggaggaacgggaaaggcgaaaaaatataga

SEQ ID NO: 536814 - DNA, 75 bp, synthetic construct
  source 1..75: mol_type = other DNA
tgttcgggttgacgaaaaagagcgccaggtccgctgtaaaatctgcggtgcggttgtggagccgtttgactggat

SEQ ID NO: 536815 - DNA, 75 bp, synthetic construct
  source 1..75: mol_type = other DNA
gccaatgtcccgctgaaacctacggttagcgggcaattgcatgccgtgaatgccgcaaagcagcaagtgactcaa

SEQ ID NO: 536816 - DNA, 75 bp, synthetic construct
  source 1..75: mol_type = other DNA
tggccactgtggtgctgactgttccgatggtggaagaactggtgatcaggcaggacgaaaacggggctattccgt

SEQ ID NO: 536817 - DNA, 75 bp, synthetic construct
  source 1..75: mol_type = other DNA
atccgatatgacgcggttctgagctgggagcgtttcccgtatcgcctgtgcccgccgcagctgcttatgtcctta

SEQ ID NO: 536818 - DNA, 75 bp, synthetic construct
  source 1..75: mol_type = other DNA
aatgtggctatagcagtacgtcgtactttattaacactttccgccagtattatggcgtaacaccacaccagtttg

SEQ ID NO: 536819 - DNA, 75 bp, synthetic construct
  source 1..75: mol_type = other DNA
cccgccccgcgcgatgcagtcatttgacagtgtgctggatgagatgaagttcattcctgcggcgaaggattacgg

SEQ ID NO: 536820 - DNA, 75 bp, synthetic construct
  source 1..75: mol_type = other DNA
ggcgcggtgaacgctggtcgctggttgatcctgaaatctggacggcattgaccgccacggtatatggcgtggatg

SEQ ID NO: 536821 - DNA, 75 bp, synthetic construct
  source 1..75: mol_type = other DNA
atccggtacgacgctgttctgagctgggagcgtttcccgtatcgcctctgcccgccgcaactgctgatgtcttta

SEQ ID NO: 536822 - DNA, 75 bp, synthetic construct
  source 1..75: mol_type = other DNA
aaaagaggatgacccacgtaatcaggttaattttctttatgaaccatcggaaagaccatattgtcatcacgcttc

SEQ ID NO: 536823 - DNA, 75 bp, synthetic construct
  source 1..75: mol_type = other DNA
atcaagagcaatgggctatgcagacccttatgggatcaggaattcttgcaaggtgcagaatccataacgatgtaa

SEQ ID NO: 536824 - DNA, 75 bp, synthetic construct
  source 1..75: mol_type = other DNA
tcaggcgctggcgcgatatgcgatggatgtcgcaccgaagaatgttcgcaaagcagctggtggccagttcggatg

SEQ ID NO: 536825 - DNA, 75 bp, synthetic construct
  source 1..75: mol_type = other DNA
tatttttaataaaaactatcattggagtattagattactgatcccaatggttttattaatcctttatataatcat

SEQ ID NO: 536826 - DNA, 75 bp, synthetic construct
  source 1..75: mol_type = other DNA
ttgcctttatgacaggcaacgaattgcagtttgctcttggcgctccagagatggtcgtaatggtggcctccttag

SEQ ID NO: 536827 - DNA, 75 bp, synthetic construct
  source 1..75: mol_type = other DNA
gtgctgttcctgtggggaagcagccagacactaccagtggtcattggcatcaatcttcttgctcttattggtatt

SEQ ID NO: 536828 - DNA, 75 bp, synthetic construct
  source 1..75: mol_type = other DNA
tggctggttatccatctggttgccgttattgcggtcaccaaaatgaacgccagcccgctggaaacattactcacc

SEQ ID NO: 536829 - DNA, 75 bp, synthetic construct
  source 1..75: mol_type = other DNA
caggtccgttgtaaaatctgcggtgcagttgtggagccgtttgactggatgctctctgtggcaaaaagagaaacc

SEQ ID NO: 536830 - DNA, 75 bp, synthetic construct
  source 1..75: mol_type = other DNA
agactggcagatgatgtaaagctattgcgcctggaggaacaggaaaggcgaaaaaatataggaaagctaattcag

SEQ ID NO: 536831 - DNA, 75 bp, synthetic construct
  source 1..75: mol_type = other DNA
agactggcagatgatgtaaggctattgcgccaggaggaacaggaaagacgtaaaaatatagaaaagctaattcag

SEQ ID NO: 536832 - DNA, 75 bp, synthetic construct
  source 1..75: mol_type = other DNA
ggagttgatctttcgcgcgtcaccgttggtcactgcgatctgaaagacaatctcgacaacattttgaagatgatc

SEQ ID NO: 536833 - DNA, 75 bp, synthetic construct
  source 1..75: mol_type = other DNA
cgccaaccgctggtctgggtattggtatcgaccgaatgattatgctgtttacaaacagtcatactattcgcgacg

SEQ ID NO: 536834 - DNA, 75 bp, synthetic construct
  source 1..75: mol_type = other DNA
aaaagaggatgacccacgtaatcaggttaatttcctttatgagccatcggaaagaccatactgccatcacgcctc

SEQ ID NO: 536835 - DNA, 75 bp, synthetic construct
  source 1..75: mol_type = other DNA
aaaaaaaattcttgatgatcttcactcctgtaataaattagctttctttagttgccttaaagagtcaacaattca

SEQ ID NO: 536836 - DNA, 75 bp, synthetic construct
  source 1..75: mol_type = other DNA
tgactttaggtcgcggtggtccggtggtctggttgagtgaagccgatgccaaagatctgggtatcgccgataacg

SEQ ID NO: 536837 - DNA, 75 bp, synthetic construct
  source 1..75: mol_type = other DNA
gagatcgctgaggtgggcttcccgtactttggtggcgacggcactgaacacttcaacaaagtggaactggaaaac

SEQ ID NO: 536838 - DNA, 75 bp, synthetic construct
  source 1..75: mol_type = other DNA
gtcagccagcgtgttccggcagggatgaccatgatgtatcacgcgcaggaacgtatcgttaacctgcctggttcg

SEQ ID NO: 536839 - DNA, 75 bp, synthetic construct
  source 1..75: mol_type = other DNA
cggtgctctgactgcccgtgcggttgtcagccagcgtgttccggcagggatgaccatgatgtaccacgcgcagga

SEQ ID NO: 536840 - DNA, 75 bp, synthetic construct
  source 1..75: mol_type = other DNA
tctccgaagtgtgcgttggtcatctgggtaaagaaaccgacatcgtcacgctgcctatccagcacgactctgccg

SEQ ID NO: 536841 - DNA, 75 bp, synthetic construct
  source 1..75: mol_type = other DNA
ggtgaaagcctgctggtttatcgtccgccgatcgacacccgttcggtgaaagaagtgataggccagaaatccaac

SEQ ID NO: 536842 - DNA, 75 bp, synthetic construct
  source 1..75: mol_type = other DNA
ttcatccgtcattgccgttcgctcgacatgacgttgagcgagattcgcgcattgctgggtctgcgagacaacccg

SEQ ID NO: 536843 - DNA, 75 bp, synthetic construct
  source 1..75: mol_type = other DNA
ataaaatgttgggatattgagcttaacagattttctaaaaatgtgtttaaaaacatttcaatattcactgcattt

SEQ ID NO: 536844 - DNA, 75 bp, synthetic construct
  source 1..75: mol_type = other DNA
tgcattgtcggaaatgtacccggctgtaaagccataattaaagataatttcaatggatgtgtactaaaaacacat

SEQ ID NO: 536845 - DNA, 75 bp, synthetic construct
  source 1..75: mol_type = other DNA
acaccgacatgccgatgctggtgatgctggaagaacgcgacggttactacgctgcaggtcgtatgctgcgcgctg

SEQ ID NO: 536846 - DNA, 75 bp, synthetic construct
  source 1..75: mol_type = other DNA
tccttcggcggcgtgttgtttggttttgccattccgatgtttgctgcttttgtggcgaactctatcggtggcaaa

SEQ ID NO: 536847 - DNA, 75 bp, synthetic construct
  source 1..75: mol_type = other DNA
acgcggtgtgccggtgaatattttgcaacagtggggatggcctgaattaccgttgactggcgacggcaatattca

SEQ ID NO: 536848 - DNA, 75 bp, synthetic construct
  source 1..75: mol_type = other DNA
gctggaaaatctacgttaaaaaaggtctggtgacctgggaaaaccatcagactgactacccgcgcactcgcccgg

SEQ ID NO: 536849 - DNA, 75 bp, synthetic construct
  source 1..75: mol_type = other DNA
aatgtgaatggtgacactcctcaactatcaaaggatttcaaaaattcaataaattcacatctatattctctagaa

SEQ ID NO: 536850 - DNA, 75 bp, synthetic construct
  source 1..75: mol_type = other DNA
aacgcctgcaactggctgatggcagcaccgcactggtgaccaccgtttatgatttgacgctggcaaactacggcc

SEQ ID NO: 536851 - DNA, 75 bp, synthetic construct
  source 1..75: mol_type = other DNA
tctggtggtgacgctggacttccgtctgtcgagcacctgtctctattctgacatcattttgccgacggcgacctg

SEQ ID NO: 536852 - DNA, 75 bp, synthetic construct
  source 1..75: mol_type = other DNA
aagccagtaaagtgactgtggctgtcgcaaccgtggttatcttcggaaccatcgcgattttcctctacccggcaa

SEQ ID NO: 536853 - DNA, 75 bp, synthetic construct
  source 1..75: mol_type = other DNA
gctggctgatcggcgcgggtagcagcatttgtggtgctgcggcagtactggcgactgagccggtagtgaaagcgg

SEQ ID NO: 536854 - DNA, 75 bp, synthetic construct
  source 1..75: mol_type = other DNA
tatgctttcaaatatggtttttttcgagctggataaaataatttttaagctagtacaaagtcatggtggcctata

SEQ ID NO: 536855 - DNA, 75 bp, synthetic construct
  source 1..75: mol_type = other DNA
gctggaaaatctacgttaaaaatggtctggtgacctgggaaaaccaccagactgactaaccgcgcactcgcccgg

SEQ ID NO: 536856 - DNA, 75 bp, synthetic construct
  source 1..75: mol_type = other DNA
gctggaaaatctacgttaaaaatggtctggtgacctgggaaaaccaacagactgactacccgcgcactcgcccgg

SEQ ID NO: 536857 - DNA, 75 bp, synthetic construct
  source 1..75: mol_type = other DNA
gctggaaaatctacgttaaaaaaggtctggtgacctgggaaaaccaccagactgactatccgcgcactcgcccgg

SEQ ID NO: 536858 - DNA, 75 bp, synthetic construct
  source 1..75: mol_type = other DNA
gaacgtatgggctggctgccgtctgcgccgcagttaggcactaacccgctgactatcgctcgcgaagcagaaaaa

SEQ ID NO: 536859 - DNA, 75 bp, synthetic construct
  source 1..75: mol_type = other DNA
gctggaaaatctacgttaaaaacggtctggtgacctgggaaaaccatcagactgactaaccgcgcactcgcccgg

SEQ ID NO: 536860 - DNA, 75 bp, synthetic construct
  source 1..75: mol_type = other DNA
gctggaaaatctacgttaaaaacggtctggtgacctgggaaaaccaacagactgactatccgcgcactcgcccgg

SEQ ID NO: 536861 - DNA, 75 bp, synthetic construct
  source 1..75: mol_type = other DNA
caaccctttcccgcatacggtgcagtaccgcacatatcacggaaacggacaacgcctggttgtactcgctgtcac

SEQ ID NO: 536862 - DNA, 75 bp, synthetic construct
  source 1..75: mol_type = other DNA
caaccctttccggcatacgctgcagtaccgcacatatcacggaaacggacaacgcctggttgtactcgctgtcac

SEQ ID NO: 536863 - DNA, 75 bp, synthetic construct
  source 1..75: mol_type = other DNA
accagtgacgttggtgaatcagaatggattcatttcacaggtagcggatatctgttacgtaccgatgcgtggtca

SEQ ID NO: 536864 - DNA, 75 bp, synthetic construct
  source 1..75: mol_type = other DNA
ctggttgcaccgatcctgaccaaaatcgccgcagtggctgaagacggtgagccatgcgttacctatattggtgcc

SEQ ID NO: 536865 - DNA, 75 bp, synthetic construct
  source 1..75: mol_type = other DNA
ccaactctacacgctgttaaatcgtgcaaggttatttggcggtcagcatttggttattgctcagcagtcactgga

SEQ ID NO: 536866 - DNA, 75 bp, synthetic construct
  source 1..75: mol_type = other DNA
ttctgtgaagcctgtggcacggggatctattccagagcggtatgtacaaagtatgtttacagctaccagccagac

SEQ ID NO: 536867 - DNA, 75 bp, synthetic construct
  source 1..75: mol_type = other DNA
tggttcacaatggtattgaatacggagatatgcagctcattgctgaagcgtattctctgctcaaaggtggtctga

SEQ ID NO: 536868 - DNA, 75 bp, synthetic construct
  source 1..75: mol_type = other DNA
atggcttcgtgggggagttatgtgtttgagctttgtcgcattaacgcgaatcaggggttgacggcagaaatggac

SEQ ID NO: 536869 - DNA, 75 bp, synthetic construct
  source 1..75: mol_type = other DNA
caacataagcccgtgattgaactggaaggggcagaaaatcagattgccatgttgctccagctgcccgacaaagga

SEQ ID NO: 536870 - DNA, 75 bp, synthetic construct
  source 1..75: mol_type = other DNA
acaatcaaaggtaagcctgcaagtggacgtgatgttcttagccaggaacaggacggcattaaatcgcacacccac

SEQ ID NO: 536871 - DNA, 75 bp, synthetic construct
  source 1..75: mol_type = other DNA
gaacaaagataagatagcttcctaccaggggcgaccgctgcaactcctgcaagacgtggtgagagaaggtgaacg

SEQ ID NO: 536872 - DNA, 75 bp, synthetic construct
  source 1..75: mol_type = other DNA
gcgggcgcaggtaccgatgcagccatcgattccctgaaaccttatcttgacaaaggcgacatcatcattgatggt

SEQ ID NO: 536873 - DNA, 75 bp, synthetic construct
  source 1..75: mol_type = other DNA
aatatccggcattgtttctgcctttcctgccatggccggttgattctgcagacagatgctcatggggcatggttt

SEQ ID NO: 536874 - DNA, 75 bp, synthetic construct
  source 1..75: mol_type = other DNA
tttatccggtgtttcgcacctgccccgttcgtgacacaaaggcgcgacaccggatatccgcagtcctgcttacct

SEQ ID NO: 536875 - DNA, 75 bp, synthetic construct
  source 1..75: mol_type = other DNA
cagagcaacatgtacgaagtctgtttacaggtaccagccagatttgtaccaggactgcggaggtgcactcactta

SEQ ID NO: 536876 - DNA, 75 bp, synthetic construct
  source 1..75: mol_type = other DNA
aacttaacggaatcgagccggaaacgtggctacgccacgtgatcagtgtaatcaacacctggcctgccaactgcg

SEQ ID NO: 536877 - DNA, 75 bp, synthetic construct
  source 1..75: mol_type = other DNA
atcggaagtaattacagcaaggaactcaatgctgggtgtcattgctttatttgcttctttctttactttcatttc

SEQ ID NO: 536878 - DNA, 75 bp, synthetic construct
  source 1..75: mol_type = other DNA
tacattgaggatatggcgatgtttctatcgccattaccggtcgtgctggagtggcattgtgtgatgtgcgggcag

SEQ ID NO: 536879 - DNA, 75 bp, synthetic construct
  source 1..75: mol_type = other DNA
atctgcaagggaatgttgatattgctgggttctataatgagattctgggtggggtgtcatatgaatattatgatc

SEQ ID NO: 536880 - DNA, 75 bp, synthetic construct
  source 1..75: mol_type = other DNA
tgagcacctccacggcgacattaaccgatatgccgatgctggatattccgcaggtggtcaatacggttagcgatc

SEQ ID NO: 536881 - DNA, 75 bp, synthetic construct
  source 1..75: mol_type = other DNA
agcaacagaaggtggactgtgtggtgctgaatccggaaaagtcccacccttacattgaggatatggcgatgtttt

SEQ ID NO: 536882 - DNA, 75 bp, synthetic construct
  source 1..75: mol_type = other DNA
aagcctgtggcacggggatctattccagagcggtatgtacaaagtatgtttacagctaccagccagacttgttcc

SEQ ID NO: 536883 - DNA, 75 bp, synthetic construct
  source 1..75: mol_type = other DNA
cagtgctgattctgcgctcagcagaaatatccggcagtgtttctgcctttcctgtcatggccggttgattttgca

SEQ ID NO: 536884 - DNA, 75 bp, synthetic construct
  source 1..75: mol_type = other DNA
taaaaaagctaaagatttcaatatctacaaccctgtttatggtaataccagcaaatgtacaacggtttcggcgtc

SEQ ID NO: 536885 - DNA, 75 bp, synthetic construct
  source 1..75: mol_type = other DNA
ccatttgccaatctcccttcctgcgaggcgctggaagagcgtatcagcgaagaacagatgcaaaacctgcaacac

SEQ ID NO: 536886 - DNA, 75 bp, synthetic construct
  source 1..75: mol_type = other DNA
tggtaaggcggcggtcgtggtgccgaccgggtttatcaccgcgcagtcgggcattgataaagggattcgcgaaca

SEQ ID NO: 536887 - DNA, 75 bp, synthetic construct
  source 1..75: mol_type = other DNA
gcagtattttgatgtgaaaatcgaatacaccgatatgacgcctgaacagtttgccgcgaagatgaaagggtttac

SEQ ID NO: 536888 - DNA, 75 bp, synthetic construct
  source 1..75: mol_type = other DNA
ggaaaatctggagagtttgtttagccagtcgcgcgagctggaagaagaaattaagaagcagatggctgggctaaa

SEQ ID NO: 536889 - DNA, 75 bp, synthetic construct
  source 1..75: mol_type = other DNA
ggcgatttttgatagtttcaatgaatccggagtaaattcgccgatactgagcaatatgctctacctttcctgttt

SEQ ID NO: 536890 - DNA, 75 bp, synthetic construct
  source 1..75: mol_type = other DNA
ggccagacgattactcgagttacgtcaaatacctctgcatactattgcggaaaaatgtggctatagcagtacgtc

SEQ ID NO: 536891 - DNA, 75 bp, synthetic construct
  source 1..75: mol_type = other DNA
aaatcatcactcaggcattcctgtacaaattcctgaacgacaaattcgcctttgaagccaaaaaggtggataaaa

SEQ ID NO: 536892 - DNA, 75 bp, synthetic construct
  source 1..75: mol_type = other DNA
acacatcgctatgcacgttgctgcaagcaagccagaattcatcaaaccggaagatgtatccgctgaagtggtaga

SEQ ID NO: 536893 - DNA, 75 bp, synthetic construct
  source 1..75: mol_type = other DNA
tcagtgaatccgacgcgcaaacacgccagcaggcagcggcagtgatgcgccagcatctgaatgaagaaggagtca

SEQ ID NO: 536894 - DNA, 75 bp, synthetic construct
  source 1..75: mol_type = other DNA
cagcatcttaatgaagaaggggtgattcagtttctgttgaaatcttttgttgacggggagtggcgctttaacgtg

SEQ ID NO: 536895 - DNA, 75 bp, synthetic construct
  source 1..75: mol_type = other DNA
ggacgcgctggatctcagtgaagaacgggatgtcagccatcgcccctaccgcgacggttttgcgtcatgtaacgc

SEQ ID NO: 536896 - DNA, 75 bp, synthetic construct
  source 1..75: mol_type = other DNA
cgggggtcaatcaggccattgaacgtgttgaagcgcctgcgggttccgaagatgccacattaatgatggcccgcg

SEQ ID NO: 536897 - DNA, 75 bp, synthetic construct
  source 1..75: mol_type = other DNA
cgaatgcggggagcgcgcggcgcttctggacgggcttccggtattcattgatgcgcaggagcttcccgccgtggc

SEQ ID NO: 536898 - DNA, 75 bp, synthetic construct
  source 1..75: mol_type = other DNA
acacgctgttaaatcgtgcaaggttatttggcggtcagcatttggttattgctcagcagtcactggatagattat

SEQ ID NO: 536899 - DNA, 75 bp, synthetic construct
  source 1..75: mol_type = other DNA
attgctggtcgacccggagccggtgctgctacatgaatatcagcggctgattagcgaagagattgagcttagccg

SEQ ID NO: 536900 - DNA, 75 bp, synthetic construct
  source 1..75: mol_type = other DNA
agagaatccatgcctgggttggcgtgggattcgcattacgctcgatcagccggagatcttcttgatccaggtgcg

SEQ ID NO: 536901 - DNA, 75 bp, synthetic construct
  source 1..75: mol_type = other DNA
cgaaacgggtagattttatctcagttggcaccaacgatctgacgcagtatattctggccgtcgatcgcaataaca

SEQ ID NO: 536902 - DNA, 75 bp, synthetic construct
  source 1..75: mol_type = other DNA
attagccaggagatgggcatttctccgtcgctcttttctacccaaccgttgtggcaaatcgcgatggttcttcag

SEQ ID NO: 536903 - DNA, 75 bp, synthetic construct
  source 1..75: mol_type = other DNA
acaaattacgcgccatgccgccggggcgctatgtggtcgcggtcggtgcactacacctgtatggagaagggaatt

SEQ ID NO: 536904 - DNA, 75 bp, synthetic construct
  source 1..75: mol_type = other DNA
tacagcaaacgctttgccgccggtgcacaaaaagaaacggcggctattttcgatctttactcacacctgctttcg

SEQ ID NO: 536905 - DNA, 75 bp, synthetic construct
  source 1..75: mol_type = other DNA
gctcgcgtttgatgaagggatcgtcggcctggttggcaggctggcggaaccgataaaccttgcagatgcgcaaaa

SEQ ID NO: 536906 - DNA, 75 bp, synthetic construct
  source 1..75: mol_type = other DNA
tgtttgcacgatacatctcttctctgaaagagcagcgcgttgcggcgtccaaagtactgtctggtccgcaagcac

SEQ ID NO: 536907 - DNA, 75 bp, synthetic construct
  source 1..75: mol_type = other DNA
gtcgatggtgttaatctcactgaactgattaacaaggtcgctgaaaacggttattcactccgtgtggtggaggaa

SEQ ID NO: 536908 - DNA, 75 bp, synthetic construct
  source 1..75: mol_type = other DNA
cgtttttaggtgtcccgattattcagcgccgccagttgcttggcgtgctggtggtgcagcaacgtgagctgcgcc

SEQ ID NO: 536909 - DNA, 75 bp, synthetic construct
  source 1..75: mol_type = other DNA
tacagcaaacgctttgctgccggtgcacaaaaagaaacagcggctattttcgatctttactcacacctgctttct

SEQ ID NO: 536910 - DNA, 75 bp, synthetic construct
  source 1..75: mol_type = other DNA
ctgggtcagcgattgctgtttcatcttgatgacgctaatcaagggccgaacgcctggccggaacgtttcattctg

SEQ ID NO: 536911 - DNA, 75 bp, synthetic construct
  source 1..75: mol_type = other DNA
gtttggtttgtcataacatttacattgactatgtatgcatgtttaatatctgcacttgttattgttgatatcttt

SEQ ID NO: 536912 - DNA, 75 bp, synthetic construct
  source 1..75: mol_type = other DNA
atgaccaaatgcgatggttgttatgaccgtgttgcggagggaaaaaaaccgatctgcgtagagtcctgcccgcta

SEQ ID NO: 536913 - DNA, 75 bp, synthetic construct
  source 1..75: mol_type = other DNA
atgaagcgtgcgcctgtcattccaaaacatacgcttaagactcaaccgattgaagatacttcgtcatcggcacca

SEQ ID NO: 536914 - DNA, 75 bp, synthetic construct
  source 1..75: mol_type = other DNA
atgaaaaaatcagaagtattaggctattttggcggagttgttaaaacagccgccgctctaggaacgtcaaaaacc

SEQ ID NO: 536915 - DNA, 75 bp, synthetic construct
  source 1..75: mol_type = other DNA
ctggagagcaaaattatcctcgtgcagggcagtatcccggagatgcagaaagcgctggacagccgtatttacttt

SEQ ID NO: 536916 - DNA, 75 bp, synthetic construct
  source 1..75: mol_type = other DNA
tgtttgcccgtcagggtgaagtgatgaatccgctgcagtatgttccttttaaccagacgctgtatttcatcaatg

SEQ ID NO: 536917 - DNA, 75 bp, synthetic construct
  source 1..75: mol_type = other DNA
ccgatggtggattctttaattgcacgagtaggggctatggctcgcggcaatgtaattacattacccgtgtgtggt

SEQ ID NO: 536918 - DNA, 75 bp, synthetic construct
  source 1..75: mol_type = other DNA
gctggaaacatttctgcgcttgccgatgcggaaaacatctctcgtaagatcattacccgctgtatcaatacggcc

SEQ ID NO: 536919 - DNA, 75 bp, synthetic construct
  source 1..75: mol_type = other DNA
gctgcacttacagaaagtgattatcgagttctggttggtgagctggatgatgagcagatggctgcattgtccaga

SEQ ID NO: 536920 - DNA, 75 bp, synthetic construct
  source 1..75: mol_type = other DNA
ggttctgaaccttgaccggtcccgacttcctgtcgggtgcattgacaagattgaagccattcttagagaccttga

SEQ ID NO: 536921 - DNA, 75 bp, synthetic construct
  source 1..75: mol_type = other DNA
tttgcagataaagaggatttactgaaacagcaggccgcaactctccacgagcagaagaaagcgggggtaatcttt

SEQ ID NO: 536922 - DNA, 75 bp, synthetic construct
  source 1..75: mol_type = other DNA
gagcgcgatcaggaattactgaccgaagatgccttagatgatctcattccttcatttttactaaccggtcagcag

SEQ ID NO: 536923 - DNA, 75 bp, synthetic construct
  source 1..75: mol_type = other DNA
caagcggacgttattcctgtttatgccgcccctccagtgccagtagtacctgaagaaaaaccaatgcctaaccct

SEQ ID NO: 536924 - DNA, 75 bp, synthetic construct
  source 1..75: mol_type = other DNA
agtgcgtggcaatttgcgctacggcatggcgaaaagcatggtcgatcagttcgataagctggtggcgcttttagg

SEQ ID NO: 536925 - DNA, 75 bp, synthetic construct
  source 1..75: mol_type = other DNA
atgtcagccattcgctggatgagatcctccatctggcagaccgagtgatggtactggaaaacggccaggtgaaag

SEQ ID NO: 536926 - DNA, 75 bp, synthetic construct
  source 1..75: mol_type = other DNA
cgttgggcaaccattgcctgaccattaatgaaacgctgcccgccaatggcatcactgctatctttggcgtctccg

SEQ ID NO: 536927 - DNA, 75 bp, synthetic construct
  source 1..75: mol_type = other DNA
cccgctggagctggctaaagctatcagaaaaggtcctgacatgcccgaattcgatggaccaactccggtaactct

SEQ ID NO: 536928 - DNA, 75 bp, synthetic construct
  source 1..75: mol_type = other DNA
tcacactcatccaacgttatggcgtcagtctcattcatctggatgccagcgctgaatgtctgccggacctgccca

SEQ ID NO: 536929 - DNA, 75 bp, synthetic construct
  source 1..75: mol_type = other DNA
cggtagatgccggggcgaaaacatgggcagtcaaattccagcatcaaagctctttcaccgaacaatcaataaaag

SEQ ID NO: 536930 - DNA, 75 bp, synthetic construct
  source 1..75: mol_type = other DNA
gataaccttggtgactggagttacgtatatcatcgagagccagatgattttgagcgcaaacatttagtgatagag

SEQ ID NO: 536931 - DNA, 75 bp, synthetic construct
  source 1..75: mol_type = other DNA
ctattcgcaaaggtccggatatgcccgaggccgctggcaactatccggtaactccggatggttggataagctgta

SEQ ID NO: 536932 - DNA, 75 bp, synthetic construct
  source 1..75: mol_type = other DNA
ctggcgctgggcgatcagcatttgtgggtcaataagctggacgaaccgctgcaagctgcgctacgtatccgcatt

SEQ ID NO: 536933 - DNA, 75 bp, synthetic construct
  source 1..75: mol_type = other DNA
tcatccgcattacgcgatgaccgcgctggcgctgggcgatcagcatttgtgggttaataagctggacgaaccgct

SEQ ID NO: 536934 - DNA, 75 bp, synthetic construct
  source 1..75: mol_type = other DNA
tacaaccaccgcagcaaaccagcatccgcaacgtgttgcgcgcaaaagtggtcaacagttatgacgataatggtc

SEQ ID NO: 536935 - DNA, 75 bp, synthetic construct
  source 1..75: mol_type = other DNA
atcacggcaaaagacaacgcctggctgtactcgctgtcgcatcagacgaatgacaccggcgaatcagaatggatt

SEQ ID NO: 536936 - DNA, 75 bp, synthetic construct
  source 1..75: mol_type = other DNA
atgtccgggatatccggcttggtggtgctgccacatacaaacctgcgaacaatggcatgacatggacacatcagg

SEQ ID NO: 536937 - DNA, 75 bp, synthetic construct
  source 1..75: mol_type = other DNA
cggtaaaggcagcatatgaccttgctaacgggaaatacactgcacaggacgccaccacagcgcgaaaaggtcttg

SEQ ID NO: 536938 - DNA, 75 bp, synthetic construct
  source 1..75: mol_type = other DNA
aggtcattacagatacaggttgcggaaatatttgtcttgcaggtgctgtggtggaagttattggcacccgcggcg

SEQ ID NO: 536939 - DNA, 75 bp, synthetic construct
  source 1..75: mol_type = other DNA
acacaccatcaccgttaatgctacggggaacgcagaaaacaccgtaaaaaacatcgcatttaactatattgtgag

SEQ ID NO: 536940 - DNA, 75 bp, synthetic construct
  source 1..75: mol_type = other DNA
ggacttatccatgaagtctggcgacatgcgctgaacaaaatcagccaggataaacgaaacagtaattatattatc

SEQ ID NO: 536941 - DNA, 75 bp, synthetic construct
  source 1..75: mol_type = other DNA
cggatattccgggaaaggataccttcacgaaaaatatcggtgcctgtcgtgcttatagcggcgctttgagcactg

SEQ ID NO: 536942 - DNA, 75 bp, synthetic construct
  source 1..75: mol_type = other DNA
tgttcaggcaccagaggcggcaaaaaatatctcagaaagtttcgtggtggagaaggagacactatctggcatgaa

SEQ ID NO: 536943 - DNA, 75 bp, synthetic construct
  source 1..75: mol_type = other DNA
ggatctcagcggaggtaactccagcatcaaagaaaactacatggtcgtgaccaatgtatttttccctgaggccga

SEQ ID NO: 536944 - DNA, 75 bp, synthetic construct
  source 1..75: mol_type = other DNA
ccggatgatggggttgcgtgatggttttcgtcacgaactgctgacatctgtcatcaaggaacgaatcaacttcct

SEQ ID NO: 536945 - DNA, 75 bp, synthetic construct
  source 1..75: mol_type = other DNA
cgttacgggttcagttaacggaaaccgtgatgaattaattgatacaacacaagcaaggccaattcagtattgcat

SEQ ID NO: 536946 - DNA, 75 bp, synthetic construct
  source 1..75: mol_type = other DNA
tgccaccgctgctggcgaaggtgagttattcattggctggagtggcacgagcggtgcccatgcgcccgtacatat

SEQ ID NO: 536947 - DNA, 75 bp, synthetic construct
  source 1..75: mol_type = other DNA
gcgcattgcttatggcaattatggattctttatcaggaatgatggcggcagcacatatttaatgctgacggcctc

SEQ ID NO: 536948 - DNA, 75 bp, synthetic construct
  source 1..75: mol_type = other DNA
gccaccaacagcacgtctgaaacgctcgccgcaacaccaaaagcggtaaaggcagcatatgaccttgctaacggg

SEQ ID NO: 536949 - DNA, 75 bp, synthetic construct
  source 1..75: mol_type = other DNA
aacggcaagctgattgcttacccaatttctgtcgaagcgttatcgctgatttataacaaagatctgctgccgaac

SEQ ID NO: 536950 - DNA, 75 bp, synthetic construct
  source 1..75: mol_type = other DNA
tctgaccttcctggttgacctgattaaaaacaaacacatgaatgcagacaccgattactccatcgcagaagctgc

SEQ ID NO: 536951 - DNA, 75 bp, synthetic construct
  source 1..75: mol_type = other DNA
tcgctgttgaagcgttatcgctgatttataacaaagatctgctgccgaacccgccaaaaacctgggaagagatcc

SEQ ID NO: 536952 - DNA, 75 bp, synthetic construct
  source 1..75: mol_type = other DNA
agcgggatatcacaccgcgcctgggagcacgtctggtgcaggagggcaaccaactgcattatttggctgaccggg

SEQ ID NO: 536953 - DNA, 75 bp, synthetic construct
  source 1..75: mol_type = other DNA
ggccgctgattgctgccgacggtggttatgcgttcaagtatgaaaatgacaaatacaatgtgaaagacgttggtg

SEQ ID NO: 536954 - DNA, 75 bp, synthetic construct
  source 1..75: mol_type = other DNA
tgccgttcgtaccgcagtaatcaacgccgccagcggtcgtcagactgtcgatgccgccctgaaagatgcacagac

SEQ ID NO: 536955 - DNA, 75 bp, synthetic construct
  source 1..75: mol_type = other DNA
tactatctggcatgaaacagtacagggcgaggtaattcgctgggcgacaggtaatactgatgctcgggaagaatt

SEQ ID NO: 536956 - DNA, 75 bp, synthetic construct
  source 1..75: mol_type = other DNA
caatacatccacgaaggaagccgcattcaatttgtggggaaactcaagtcgtccggtggtggctgaattaggtga

SEQ ID NO: 536957 - DNA, 75 bp, synthetic construct
  source 1..75: mol_type = other DNA
atggaacggtttaagaccgctgactatcaataacgccaatggcggagtgtcaatggggcatggcctgagtgttac

SEQ ID NO: 536958 - DNA, 75 bp, synthetic construct
  source 1..75: mol_type = other DNA
atgagcaatatcacatggggcctgcagcgggatatcacgccgcgtctgggagtccgtctggtgcaggagggcaac

SEQ ID NO: 536959 - DNA, 75 bp, synthetic construct
  source 1..75: mol_type = other DNA
atgaaatctactgactcagagaacgatttatttctcaagtgggggctgaatcgtaatgtgacgccttgctttggc

SEQ ID NO: 536960 - DNA, 75 bp, synthetic construct
  source 1..75: mol_type = other DNA
agcacgtctggtgcaggagggcaaccggctgcactatctggctgaccgggcaagtatcaccggtaagtttagtga

SEQ ID NO: 536961 - DNA, 75 bp, synthetic construct
  source 1..75: mol_type = other DNA
tggcgatcgtttctctaatggtgttgacatggtaattacccgtaattactatagttacatggtaattaccattgt

SEQ ID NO: 536962 - DNA, 75 bp, synthetic construct
  source 1..75: mol_type = other DNA
atggaaaggaatctgattactacaaagattttaatgatacacaaaggattgcaaggttttcgtcaatgccgcgct

SEQ ID NO: 536963 - DNA, 75 bp, synthetic construct
  source 1..75: mol_type = other DNA
atacaggtcctgatgcaggtaatgttgataataagggtaatcatgagtcatatgaggtagcaaggtacactggcg

SEQ ID NO: 536964 - DNA, 75 bp, synthetic construct
  source 1..75: mol_type = other DNA
cggatattgatccactgactggcgcagtattctcattgattggatgtgtcatgttgtatggcgctgtaggggctg

SEQ ID NO: 536965 - DNA, 75 bp, synthetic construct
  source 1..75: mol_type = other DNA
gcaccgagttctttatcgcagcgctgttcattattcttatctgcgttttgctcttctttctgagaagtcctgata

SEQ ID NO: 536966 - DNA, 75 bp, synthetic construct
  source 1..75: mol_type = other DNA
tttgattattgggacgtaaaaaaaataaatgatatagaagttaataacttaggtatcgctggtataaactcgaag

SEQ ID NO: 536967 - DNA, 75 bp, synthetic construct
  source 1..75: mol_type = other DNA
aacagaaggccctgcatctgtttacagatgagttcagactggaacgccgcctgcagggactcggcctgggtagct

SEQ ID NO: 536968 - DNA, 75 bp, synthetic construct
  source 1..75: mol_type = other DNA
ggataccctgcaaacgacgataagaagcggattcttattctcccttacatggggtacacaataaagacgattcag

SEQ ID NO: 536969 - DNA, 75 bp, synthetic construct
  source 1..75: mol_type = other DNA
gggtatccagccagccacgaaacacaccggatcataaacctgccttatttcgggtatgaagtgaaaactatcaca

SEQ ID NO: 536970 - DNA, 75 bp, synthetic construct
  source 1..75: mol_type = other DNA
tattagatgaaaggctggaagagataatttcaaaatcaaaatcgcaatcagtccatgatgctatatttgaatcag

SEQ ID NO: 536971 - DNA, 75 bp, synthetic construct
  source 1..75: mol_type = other DNA
acaggctgtggcacgcaatgggtttccggttcccggccggggaaaccagctcaatgccgctgcgggcagacgaac

SEQ ID NO: 536972 - DNA, 75 bp, synthetic construct
  source 1..75: mol_type = other DNA
ctgcaggaaaaaatcgtgcagctcgaaggcaaaaaacggtcgcaaaaacagttaattacttcacttcagaatcgt

SEQ ID NO: 536973 - DNA, 75 bp, synthetic construct
  source 1..75: mol_type = other DNA
cattcgtgaaacagctgatcactaacggcatggcaaagaataacggtctgctgacttataccctgcttgaaagcc

SEQ ID NO: 536974 - DNA, 75 bp, synthetic construct
  source 1..75: mol_type = other DNA
gctcaccgacttggatactgtttggcgacgaggataaaacaccggatcccccagttgcactcaacaacgccttag

SEQ ID NO: 536975 - DNA, 75 bp, synthetic construct
  source 1..75: mol_type = other DNA
acgaaaaaaaccgggaggacattggattattcgggatttggcgggattagatttagtggggcttgcaagcctgta

SEQ ID NO: 536976 - DNA, 75 bp, synthetic construct
  source 1..75: mol_type = other DNA
tggggcgcaatgcgcaatttatgctcgatgtaatgcgcgaaacggggatcaacgtggtggcctgtaccggttatt

SEQ ID NO: 536977 - DNA, 75 bp, synthetic construct
  source 1..75: mol_type = other DNA
cagcgtggtacttcgaactgcattggttggaccggtcagaagcggcaattagcaaagggtatgaagttcatcttg

SEQ ID NO: 536978 - DNA, 75 bp, synthetic construct
  source 1..75: mol_type = other DNA
ttttgcaatgggaaaaagaaggaaaaatcatttggttaggtcgaagagatgacatccaaaatttaatcagaaata

SEQ ID NO: 536979 - DNA, 75 bp, synthetic construct
  source 1..75: mol_type = other DNA
gcgaacgcattagacatcgccgaaaaaacctcaaatacacccaaaggtctcttgctaaagccctgaaaatttctc

SEQ ID NO: 536980 - DNA, 75 bp, synthetic construct
  source 1..75: mol_type = other DNA
cgcctcgctggagttgctcacgtcacaatttcacaatgggaaagagacgaaacccagccagtcggaaaacgattg

SEQ ID NO: 536981 - DNA, 75 bp, synthetic construct
  source 1..75: mol_type = other DNA
cttattgatttcgtactgaatggcgttatgccaaaccgcacgccgtggtatctggtgttcctggcaggcgcgggc

SEQ ID NO: 536982 - DNA, 75 bp, synthetic construct
  source 1..75: mol_type = other DNA
gtgattgagatgaccaatcgttacatgggccgcaatgcgcaatttatgctcgatgtgatgcgtgagacgggaatc

SEQ ID NO: 536983 - DNA, 75 bp, synthetic construct
  source 1..75: mol_type = other DNA
ctgaaatgcgcgcaagagtagagaatttcaataaactcttcgaagaaatgcttaaagcgcgtaaaaacaaatcaa

SEQ ID NO: 536984 - DNA, 75 bp, synthetic construct
  source 1..75: mol_type = other DNA
gcacaagaacttcatgtggaaacagagctaactcccaaccacaaagaattgatcgaattattcgatgctcttcca

SEQ ID NO: 536985 - DNA, 75 bp, synthetic construct
  source 1..75: mol_type = other DNA
tttcctgttcatactgttaggcttatcctcccttataatttcgctatataccttcggaaggtgttggttagtgtt

SEQ ID NO: 536986 - DNA, 75 bp, synthetic construct
  source 1..75: mol_type = other DNA
ttgtcacacttacccgacgttatggcgtcagtctcattcatctggatgccagtgccggatgtctgccgggtttac

SEQ ID NO: 536987 - DNA, 75 bp, synthetic construct
  source 1..75: mol_type = other DNA
gttattgataaactggttacaaagtgctggcaggaagaagcatatgcagaagcacagttgagaaaagtgacaaga

SEQ ID NO: 536988 - DNA, 75 bp, synthetic construct
  source 1..75: mol_type = other DNA
gttccagacctgactgattatcagtggtacaaaggatatgcagacgtaattgataaactagtaacaaagtgctgg

SEQ ID NO: 536989 - DNA, 75 bp, synthetic construct
  source 1..75: mol_type = other DNA
aggtattgtcctggatgaaaaaaggacccggcttcatggcacacctgtttataagatttgtgggcgttgcaatgg

SEQ ID NO: 536990 - DNA, 75 bp, synthetic construct
  source 1..75: mol_type = other DNA
atgaaccttgaagctttaccaaaatattactccccaaaatcgccaaaattgagtgatgacgcaccggcgacaggc

SEQ ID NO: 536991 - DNA, 75 bp, synthetic construct
  source 1..75: mol_type = other DNA
tggtactggatttcataatgtattgcgcgaagtggtgaaacattccagaagcggggaatccgttatcaaagaaga

SEQ ID NO: 536992 - DNA, 75 bp, synthetic construct
  source 1..75: mol_type = other DNA
acaaaaatcctcttgggaagcatggggtgtgtacatatcaaaaaaacacatcctagaggaattagaaataccaaa

SEQ ID NO: 536993 - DNA, 75 bp, synthetic construct
  source 1..75: mol_type = other DNA
acaatatcgagacggtgagttttttgatgttgtccgcaatggtgaggagttcttcgaaacgcagagccgcaatgt

SEQ ID NO: 536994 - DNA, 75 bp, synthetic construct
  source 1..75: mol_type = other DNA
tgaagacggtgagatgtggtctgcaatgtggaatggcaatcgctgggatgatggcactgaatatccggatccgca

SEQ ID NO: 536995 - DNA, 75 bp, synthetic construct
  source 1..75: mol_type = other DNA
tctgcactcaaagaaacctcaacgccaatatggaaaaggaggcgaatgagtaatggatttgatataatgtacata

SEQ ID NO: 536996 - DNA, 75 bp, synthetic construct
  source 1..75: mol_type = other DNA
gaccagtaatttactatgcgtatgacattgagcaatataataatgagagagggttgtattttcctctaaatgaat

SEQ ID NO: 536997 - DNA, 75 bp, synthetic construct
  source 1..75: mol_type = other DNA
ggcttgtgattaccttgaccgtcaatacatgttaggcgacaacgtgatggttgcgcctgtgttcactgaagcggg

SEQ ID NO: 536998 - DNA, 75 bp, synthetic construct
  source 1..75: mol_type = other DNA
cagcgtgcagagggtgtaagggtaaaggtattgtcctggatgaaaaaaggacccggcttcatggcacacctgttt

SEQ ID NO: 536999 - DNA, 75 bp, synthetic construct
  source 1..75: mol_type = other DNA
gcggggaatctgtaatcaaggaagaatgggtgaaggaactatgtcagcattgccatggtaagggcgaagccagca

SEQ ID NO: 537000 - DNA, 75 bp, synthetic construct
  source 1..75: mol_type = other DNA
agctggtaccggacctgacggattatcagtggtacaaaggatatgcagatgtcattgataaactggttacaaagt

SEQ ID NO: 537001 - DNA, 75 bp, synthetic construct
  source 1..75: mol_type = other DNA
agggcaagcattggcagctaccgccaacggtatcgacagtaataccaaaatcgctcatctgaacggtaaccagtg

SEQ ID NO: 537002 - DNA, 75 bp, synthetic construct
  source 1..75: mol_type = other DNA
gtgggcgtccatacgtcatggttggggcgatggaatcgcttcgcctggacttcatcaatgccaatatcgagcgta

SEQ ID NO: 537003 - DNA, 75 bp, synthetic construct
  source 1..75: mol_type = other DNA
ttattgacagaatcaagaggtgtattactttttacaacattatcactgttattagccagttttaaattacataag

SEQ ID NO: 537004 - DNA, 75 bp, synthetic construct
  source 1..75: mol_type = other DNA
ttatgttggcagtatccaaaatgaaagcttcggtttgaatgattttatcgacaaagaatttaacattagcgcagt

SEQ ID NO: 537005 - DNA, 75 bp, synthetic construct
  source 1..75: mol_type = other DNA
aggtattgtcctggatgaaaaaaggacccggcttcatggcgcgcctgtttataagatttgtgggcgttgcaatgg

SEQ ID NO: 537006 - DNA, 75 bp, synthetic construct
  source 1..75: mol_type = other DNA
cacgccaccatttgctgcccttaccggcatacgctgcagtaccgcacatatcacggaaacggacaacgcctggct

SEQ ID NO: 537007 - DNA, 75 bp, synthetic construct
  source 1..75: mol_type = other DNA
tcagtggtataaggggtatgcggacgtcattggtaaactggtaacaaagtgctggcaggaagaagcatacgcgga

SEQ ID NO: 537008 - DNA, 75 bp, synthetic construct
  source 1..75: mol_type = other DNA
caacgcaatcgggttatctgacgctgaacctgcctgaaatgtgggaagtgtcaggttataaccgtgttgatccgc

SEQ ID NO: 537009 - DNA, 75 bp, synthetic construct
  source 1..75: mol_type = other DNA
acatgaaggctttaaagatgcttaccgcatcgcgttgggtaccacttattactacgatgataactggaccttccg

SEQ ID NO: 537010 - DNA, 75 bp, synthetic construct
  source 1..75: mol_type = other DNA
acctaccgctctgaagtgaaaattgacttcaagggtaactacagcagcgatcttaacccggcttttaataactac

SEQ ID NO: 537011 - DNA, 75 bp, synthetic construct
  source 1..75: mol_type = other DNA
gaacaacgtgaaaaattgcgccgacttggcgtgattactaactgggggattaataaaatagcagacggaaaaaat

SEQ ID NO: 537012 - DNA, 75 bp, synthetic construct
  source 1..75: mol_type = other DNA
cctgaataccgatgaatggccagctattaagacattatcactgccccgctgggctaaggaatatgcaaatgacta

SEQ ID NO: 537013 - DNA, 75 bp, synthetic construct
  source 1..75: mol_type = other DNA
taatgaaatacccaatccctgtaccgccactcacctggcaagctcgcattgtcgaaatactcgataaattcgaca

SEQ ID NO: 537014 - DNA, 75 bp, synthetic construct
  source 1..75: mol_type = other DNA
gtattcagtgaacgccaggtcgatgtgctcggtgaatgggcgggggatgctgattgcactgtgatcgcttacgcc

SEQ ID NO: 537015 - DNA, 75 bp, synthetic construct
  source 1..75: mol_type = other DNA
ctgaggttgttgcttttactttgacttccgctgaactggaaaagttcgggctgaatgagcaagatgaacaagaga

SEQ ID NO: 537016 - DNA, 75 bp, synthetic construct
  source 1..75: mol_type = other DNA
aaagcaagcataaaggaagtatcctgataataagtggtggtcccgggttaccaggcataaatccttatattaact

SEQ ID NO: 537017 - DNA, 75 bp, synthetic construct
  source 1..75: mol_type = other DNA
tttctggttgccagcacaactgttgaatgcggacgttatccggttgagattttcatgatgggcgaagaagcaaaa

SEQ ID NO: 537018 - DNA, 75 bp, synthetic construct
  source 1..75: mol_type = other DNA
gacagcattaacgtgcaggcactgaacatggggcgcattgtcgttgacgtcgatggtgttaatctcgctgaactg

SEQ ID NO: 537019 - DNA, 75 bp, synthetic construct
  source 1..75: mol_type = other DNA
taaaaaacgccacccgtaccagccgtggaaaccagtttgctgaaggctgggtactggccgttatcagtgaaatac

SEQ ID NO: 537020 - DNA, 75 bp, synthetic construct
  source 1..75: mol_type = other DNA
cgaacgttttccctccagcatcagagctattgttcttgatggggttgttgacatcgatgacttgaatgataattt

SEQ ID NO: 537021 - DNA, 75 bp, synthetic construct
  source 1..75: mol_type = other DNA
cgaccctgcggaactgctggccccttataccggtgatatcgccgctgaaggtatcagcaaagccatgcgcggagg

SEQ ID NO: 537022 - DNA, 75 bp, synthetic construct
  source 1..75: mol_type = other DNA
aagccattaccgaagagtggcgtatggcgccaggtccacttgaagtagcctggtttgcggaagaaacggcagccg

SEQ ID NO: 537023 - DNA, 75 bp, synthetic construct
  source 1..75: mol_type = other DNA
caaagaaacaactttgtttatggcaggcgcaaagagagcgcatgaatgagcgagagtttctttcctccccatccg

SEQ ID NO: 537024 - DNA, 75 bp, synthetic construct
  source 1..75: mol_type = other DNA
tcaagcgtcagtttctcttgtccatttctctgaatggacagcgtaatgctgtaaatctagcaaatgatatcgata

SEQ ID NO: 537025 - DNA, 75 bp, synthetic construct
  source 1..75: mol_type = other DNA
tgttcaaagcaatgcaaaaaacaaataaagaatcaacttcatccaataaaaagaatctattatacattgcaaaaa

SEQ ID NO: 537026 - DNA, 75 bp, synthetic construct
  source 1..75: mol_type = other DNA
ttgagtcgatgcttcagcattaccgccctgaaagattggggatgtacgaagataaaggtgttgtattttcgtcac

SEQ ID NO: 537027 - DNA, 75 bp, synthetic construct
  source 1..75: mol_type = other DNA
aaatgattgagaaaaataacggcattttagatggaaacttttccaatttactaatgacttatttaactgaaaata

SEQ ID NO: 537028 - DNA, 75 bp, synthetic construct
  source 1..75: mol_type = other DNA
tgccaaccagatgtatatcgatactggcgcagtgttctgcggaaacctcacattgattcaggtacagggagaagg

SEQ ID NO: 537029 - DNA, 75 bp, synthetic construct
  source 1..75: mol_type = other DNA
caaatttaaaattcaacatagcatcttctctttatttagttggtgcaatcatagtaataatgaaattcccatcac

SEQ ID NO: 537030 - DNA, 75 bp, synthetic construct
  source 1..75: mol_type = other DNA
gatgagctggatcacaactgggaagtgctggctgagccaatccagacagttatgcgtcgctatggcatcgaaaaa

SEQ ID NO: 537031 - DNA, 75 bp, synthetic construct
  source 1..75: mol_type = other DNA
taacgcagtattgcagcatctggcaagcaaactaccggtctcccgctggcagcgtgacctgaccgactctaccgt

SEQ ID NO: 537032 - DNA, 75 bp, synthetic construct
  source 1..75: mol_type = other DNA
aggcatgaagcaatttatcgacggtctggcgttgccagaagaagagaaagcccgcctgaaagcgatgacgccggc

SEQ ID NO: 537033 - DNA, 75 bp, synthetic construct
  source 1..75: mol_type = other DNA
gattttttttcttacctggttatgataaacataaaattgaattatcgaaaatgcacaaggattcattcctaaccc

SEQ ID NO: 537034 - DNA, 75 bp, synthetic construct
  source 1..75: mol_type = other DNA
tgggataaatgaaatagacgaaaacggtaaatttgtaataaaaaaacaaaactcagcactctatccaatttttaa

SEQ ID NO: 537035 - DNA, 75 bp, synthetic construct
  source 1..75: mol_type = other DNA
tataattcatcgcgattatattaaaaatcttcttgaagttataactaatacaaaagcacgaatcgtatatagtaa

SEQ ID NO: 537036 - DNA, 75 bp, synthetic construct
  source 1..75: mol_type = other DNA
ttctgtttttctttgcggaactgtgtctgccagacagatcgagtggcaatcctgtatgaccagcccatacagtga

SEQ ID NO: 537037 - DNA, 75 bp, synthetic construct
  source 1..75: mol_type = other DNA
caaccatcttgcgcaatggcagataaacaggcaacggctgaaacagtggaaccggatgcaactgaacatcatcag

SEQ ID NO: 537038 - DNA, 75 bp, synthetic construct
  source 1..75: mol_type = other DNA
cgtgtcgaggaaattatcgctgaaaataaaccgcccttttctgttttccgcgacaaattcatcaccatgcctggc

SEQ ID NO: 537039 - DNA, 75 bp, synthetic construct
  source 1..75: mol_type = other DNA
aatcggaacggaactaccaaaaagcggaacaaaacagcccaaatgcgttacaaaacgagccagaaacgaaacaac

SEQ ID NO: 537040 - DNA, 75 bp, synthetic construct
  source 1..75: mol_type = other DNA
ggattattctcgcgccatcgtggttgcgtccgtgaaagaagcaccaattgggatcgaggtcatccccgcgcacgt

SEQ ID NO: 537041 - DNA, 75 bp, synthetic construct
  source 1..75: mol_type = other DNA
gcttgctcaacacggcagcgaaaaaccggtaacgcacgtttcacgtgacgaactccaggtattacatattgcacg

SEQ ID NO: 537042 - DNA, 75 bp, synthetic construct
  source 1..75: mol_type = other DNA
ctgcctgaataccgatgaatggccagctattaaaacgttatcactgccccgctgggctaaggagtatgcaaatga

SEQ ID NO: 537043 - DNA, 75 bp, synthetic construct
  source 1..75: mol_type = other DNA
atgttctggaaacggataaattcgctgatgagtatgccattccggtaccggttcctgaatatgtggttactactt

SEQ ID NO: 537044 - DNA, 75 bp, synthetic construct
  source 1..75: mol_type = other DNA
tgcgattgcagtgatgaagctggtgaagcgacagcacctgtagtaactgaaatcatgtggccgtcatatttcgag

SEQ ID NO: 537045 - DNA, 75 bp, synthetic construct
  source 1..75: mol_type = other DNA
aaaaacctgttcgcgtcaatttgcccattgttgatgacctcccgccagaaggcgtatttgatacggaattctgca

SEQ ID NO: 537046 - DNA, 75 bp, synthetic construct
  source 1..75: mol_type = other DNA
atgatccgaaatgggtcaaggggatccagactcgcgattctgtgaaccagaaccagcatgaatcggaacggaact

SEQ ID NO: 537047 - DNA, 75 bp, synthetic construct
  source 1..75: mol_type = other DNA
gaggactggcaaaaatgccagcaagaagaaaacgccgggaaaacgtttatcagtccggatatgtatgaacaggca

SEQ ID NO: 537048 - DNA, 75 bp, synthetic construct
  source 1..75: mol_type = other DNA
aattcgcccggaactggtgacactggaggactggcaaaaatgccagcaagaagaaaacgccgggaaaacgtttat

SEQ ID NO: 537049 - DNA, 75 bp, synthetic construct
  source 1..75: mol_type = other DNA
agagcaattaaccgaaatcgcacggaaaattcgcccggaactggtgacactggaggactggcaaaaacgccagca

SEQ ID NO: 537050 - DNA, 75 bp, synthetic construct
  source 1..75: mol_type = other DNA
ctccgacaataaactgccggcaatcagatacagagactcaggaaaacataaccgaaaagcaacaagtattaaata

SEQ ID NO: 537051 - DNA, 75 bp, synthetic construct
  source 1..75: mol_type = other DNA
acgcatttccggccgttaattttaagagggaacagtccgatttacctgaattttgtgaattatggccaattcatc

SEQ ID NO: 537052 - DNA, 75 bp, synthetic construct
  source 1..75: mol_type = other DNA
gatgtttggtaacggtgagcgtccgctggtggaagtggcgcatcgtctggcgatgtgcgtaatactgcgattatc

SEQ ID NO: 537053 - DNA, 75 bp, synthetic construct
  source 1..75: mol_type = other DNA
aaaaaatttctcaatagatactattattatgcagtggcaagaactctatggaactataatttgctcaaaacatga

SEQ ID NO: 537054 - DNA, 75 bp, synthetic construct
  source 1..75: mol_type = other DNA
ggagtcgtcgatatcgatgacctggaggacaacttcacatggcaactcaaacaggcacagagttatcaggaaacg

SEQ ID NO: 537055 - DNA, 75 bp, synthetic construct
  source 1..75: mol_type = other DNA
gaactcatatcattaacaacagaccttctattatggcgttcatcatggccaacccttgcaactgccatacgccag

SEQ ID NO: 537056 - DNA, 75 bp, synthetic construct
  source 1..75: mol_type = other DNA
tcgtgtttcacgcatcacgcgcacggcttccggcgctaatgctggcggcgggaacctcaccgatcgcggcgaaga

SEQ ID NO: 537057 - DNA, 75 bp, synthetic construct
  source 1..75: mol_type = other DNA
aggaaaacacgatggtgaagaaaaaccgcaaccatcttgcgcaatggcagataaacaggcaacggctgaaacagt

SEQ ID NO: 537058 - DNA, 75 bp, synthetic construct
  source 1..75: mol_type = other DNA
aagcccggaaaaacattccatcaaaaaatcctgtcgatgccgataaattacttgctgcatcacgtggtgaatttg

SEQ ID NO: 537059 - DNA, 75 bp, synthetic construct
  source 1..75: mol_type = other DNA
acagtattcgtgcagttaagcagaaagtttccattccggttatcgcgaatggtgacattactgacccgcttaaag

SEQ ID NO: 537060 - DNA, 75 bp, synthetic construct
  source 1..75: mol_type = other DNA
ccggctaaaaaagtgaatcgcaagctcgtaggttcagccctcttgcagtacccggatgtcgttaaatcgatcctt

SEQ ID NO: 537061 - DNA, 75 bp, synthetic construct
  source 1..75: mol_type = other DNA
tgcagtacccggatgtcgtaaaatcgattctgaccgaggtcgttaatgcagtggacgttcctgtcaccctgaaga

SEQ ID NO: 537062 - DNA, 75 bp, synthetic construct
  source 1..75: mol_type = other DNA
ccgctgtcgctgattaccgagtctgtgtttgcacgatacatctcttctctgaaagagcagcgtgttgccgcatct

SEQ ID NO: 537063 - DNA, 75 bp, synthetic construct
  source 1..75: mol_type = other DNA
ggctcagcgtgattactttggtgctcatacctataagcgcaccgataaagaaggcgttttccacactgagtggtt

SEQ ID NO: 537064 - DNA, 75 bp, synthetic construct
  source 1..75: mol_type = other DNA
tgacatgcagctgattgctgaagcttatgcgcttttgaaaggcggtctggcactttccaacgaagagctggcgca

SEQ ID NO: 537065 - DNA, 75 bp, synthetic construct
  source 1..75: mol_type = other DNA
tcaccaaagatatcttcactaaaaaagatgaagatggtaactacctggttgatgttattctggatgaagctgcca

SEQ ID NO: 537066 - DNA, 75 bp, synthetic construct
  source 1..75: mol_type = other DNA
tgcgcagttcctgcagaagattactgatgcttatgcgcaaaacgctggtattgctaatctcctgctggcaccgta

SEQ ID NO: 537067 - DNA, 75 bp, synthetic construct
  source 1..75: mol_type = other DNA
ggcacagcgagactatttcggtgcacatacttataagcgcattgataaacaaggcgttttccataccgaatggct

SEQ ID NO: 537068 - DNA, 75 bp, synthetic construct
  source 1..75: mol_type = other DNA
tattctctgcttaaaggtggtctgaacctcaccaacgaagaacttgcgcagacctttaccgagtggaataacggt

SEQ ID NO: 537069 - DNA, 75 bp, synthetic construct
  source 1..75: mol_type = other DNA
ttgattctctcaagccatacctcgataaaggtgacatcatcattgatggtggtaacaccttcttccaggacacca

SEQ ID NO: 537070 - DNA, 75 bp, synthetic construct
  source 1..75: mol_type = other DNA
ggatgaagaaggtaaatacctcgttgatgtcattcttgatgaagctgcaaacaaaggtaccggtaagtggaccag

SEQ ID NO: 537071 - DNA, 75 bp, synthetic construct
  source 1..75: mol_type = other DNA
tcaccaaagatatcttcaccaagaaagatgaagacggtaactatctggttgatgtgattcttgatgaagctgcta

SEQ ID NO: 537072 - DNA, 75 bp, synthetic construct
  source 1..75: mol_type = other DNA
tgatatgcagctgatcgcagaagcctattctctgttgaaaggtggtctgaacctctctaacgacgagctcgcgaa

SEQ ID NO: 537073 - DNA, 75 bp, synthetic construct
  source 1..75: mol_type = other DNA
acaaaggtactggtaagtggaccagtcagagctcactggatcttggggaacctctgtccctgatcacggagtctg

SEQ ID NO: 537074 - DNA, 75 bp, synthetic construct
  source 1..75: mol_type = other DNA
gaaagatcagcgcgttgcggcttccaaagtgctgtctggtccgcaggctaaaccagctggtgacaaagcggaatt

SEQ ID NO: 537075 - DNA, 75 bp, synthetic construct
  source 1..75: mol_type = other DNA
gatggcgcgctaaatgccgcccgcgacaacattatttccgatattgcatcaggtagcgatgttcccgcgattctc

SEQ ID NO: 537076 - DNA, 75 bp, synthetic construct
  source 1..75: mol_type = other DNA
agctggtggaggagtcgccggacaaacgccgggaaagcgacagtaaagtgattcaacaggcgatagcacttttct

SEQ ID NO: 537077 - DNA, 75 bp, synthetic construct
  source 1..75: mol_type = other DNA
aacggcacaccgatttatctggagtttcagagttcatcgttcggattcaccgggcgaagcgtgtttcagcgcgtt

SEQ ID NO: 537078 - DNA, 75 bp, synthetic construct
  source 1..75: mol_type = other DNA
tttccgcgccgatccggtgaaaaatgcgctgggtacgccaagcggcaaaattgagatttactccaaaacgctgga

SEQ ID NO: 537079 - DNA, 75 bp, synthetic construct
  source 1..75: mol_type = other DNA
tctatgctaatgagaaaaggaaatatgaggcttcgaccctaaaaagatcgttatccatcaaagagaagaaaagaa

SEQ ID NO: 537080 - DNA, 75 bp, synthetic construct
  source 1..75: mol_type = other DNA
atgtttgattcactggcaaaagccggaaaatatttaggtcaggcggcgaagctgatgattggtatgcctgattac

SEQ ID NO: 537081 - DNA, 75 bp, synthetic construct
  source 1..75: mol_type = other DNA
tacctcggtaaaatcgtttcctatgctcagggcttctcccaactgcgcgctgcttctgacgagtacaactgggat

SEQ ID NO: 537082 - DNA, 75 bp, synthetic construct
  source 1..75: mol_type = other DNA
ggctcagcgtgattactttggtgcgcacacctataagcgcactgataaggaaggcgttttccatactgagtggtt

SEQ ID NO: 537083 - DNA, 75 bp, synthetic construct
  source 1..75: mol_type = other DNA
tgcatctgatgaatataagtgggatctgcaatacggtgagatagcgaagattttccgtgctggctgtatcattcg

SEQ ID NO: 537084 - DNA, 75 bp, synthetic construct
  source 1..75: mol_type = other DNA
ccgctgtcgctgattaccgagtctgtgtttgcacgttatatctcttctttgaaagatcagcgtgttgccgcatct

SEQ ID NO: 537085 - DNA, 75 bp, synthetic construct
  source 1..75: mol_type = other DNA
gatgcttacgccgaaaatccgaagattgctaacctgctgttagccccgtactttaagaaaattgccgacgattac

SEQ ID NO: 537086 - DNA, 75 bp, synthetic construct
  source 1..75: mol_type = other DNA
ctggttgctccaattctgaagcagattgctgcggttgctgaagacggcgagccatgtgtcacctatatcggtgct

SEQ ID NO: 537087 - DNA, 75 bp, synthetic construct
  source 1..75: mol_type = other DNA
ttaaagggcggatccgtcagatgcagcgagcggccgcacggcgtcggatgatggccgatgtgccgaaagcggatg

SEQ ID NO: 537088 - DNA, 75 bp, synthetic construct
  source 1..75: mol_type = other DNA
ggacctgacgaaaggaaatcataacttaacccgtgacttgccccaacctgaaggtattgtaacgttgcctgatga

SEQ ID NO: 537089 - DNA, 75 bp, synthetic construct
  source 1..75: mol_type = other DNA
gccccaacctgaaggaattgtaactctgcctgatgaaagcatttatgttgccagtgaacctgatatcctcgcgaa

SEQ ID NO: 537090 - DNA, 75 bp, synthetic construct
  source 1..75: mol_type = other DNA
ttcgtcgtaatcgtgagctttcagcagagggctttaacttcatcggtaccggtgtttccggcggtgaagaggggg

SEQ ID NO: 537091 - DNA, 75 bp, synthetic construct
  source 1..75: mol_type = other DNA
tcggtatggcagtgatggggcgcaaccttgcgctcaacatcgaaagccgcggttataccgtctctattttcaacc

SEQ ID NO: 537092 - DNA, 75 bp, synthetic construct
  source 1..75: mol_type = other DNA
aaagtactctccggcccgcaagcgcagccagcaggcgataaagctgaattcatcgagaaggttcgtcgcgcgtta

SEQ ID NO: 537093 - DNA, 75 bp, synthetic construct
  source 1..75: mol_type = other DNA
gtaggcaatatcggactttataggataggcatcagggttgagcgaacaaatcctttactacagttagcggacaat

SEQ ID NO: 537094 - DNA, 75 bp, synthetic construct
  source 1..75: mol_type = other DNA
tgtcggtactgaccttcatcatccgccaggcgcgggagtgtcaggaaaagatgaaccaggcagaagtactgtatc

SEQ ID NO: 537095 - DNA, 75 bp, synthetic construct
  source 1..75: mol_type = other DNA
ccctcaaaacgagggaggttcccctaaaatgagggacatccctcaaaacgagggaaaatcccctaaaacgaggga

SEQ ID NO: 537096 - DNA, 75 bp, synthetic construct
  source 1..75: mol_type = other DNA
aaaagacttctgaactattcttttttacagttacaaaagatatgcatatctcctttcgaaataaaattcagttag

SEQ ID NO: 537097 - DNA, 75 bp, synthetic construct
  source 1..75: mol_type = other DNA
cagaggaactaaatgatatacatgttaaagatatatccggcctggactttaataatgaaagtctgatgattctgt

SEQ ID NO: 537098 - DNA, 75 bp, synthetic construct
  source 1..75: mol_type = other DNA
atactagaaagcctcattgatcttaaaagtaaagataggcaaaagtttgatggcattatggcaaacgtaaatgac

SEQ ID NO: 537099 - DNA, 75 bp, synthetic construct
  source 1..75: mol_type = other DNA
ctggttgctccaatcctgaccaaaattgctgcggttgctgaagatggcgaaccgtgcgtgacctacattggcgct

SEQ ID NO: 537100 - DNA, 75 bp, synthetic construct
  source 1..75: mol_type = other DNA
accgtgtgttacctatattggtgccgatggtgcaggtcactacgtaaaaatggttcacaacggtattgaatacgg

SEQ ID NO: 537101 - DNA, 75 bp, synthetic construct
  source 1..75: mol_type = other DNA
tcggtatgggggtaatggggcgaaatttagcgctcaatatcgaaagccgtggttataccgtatctattttcaatc

SEQ ID NO: 537102 - DNA, 75 bp, synthetic construct
  source 1..75: mol_type = other DNA
aatcgcgaaaattttccgcgctggctgcatcattcgtgcacagttcctgcagaaaattaccgatgcatacgctga

SEQ ID NO: 537103 - DNA, 75 bp, synthetic construct
  source 1..75: mol_type = other DNA
tgatatgcagttgattgccgaagcttattcactgctgaaaggtggcctgaatctctccaacgaagagctggcaca

SEQ ID NO: 537104 - DNA, 75 bp, synthetic construct
  source 1..75: mol_type = other DNA
tatcgaaaaagtgcgtcgcgctttatacctcggtaaaatcgtttcctatgctcaaggcttctctcagctgcgtgc

SEQ ID NO: 537105 - DNA, 75 bp, synthetic construct
  source 1..75: mol_type = other DNA
cagcaggcgctgcgtgatgtcgtggcgtatgccgtgcagaatggtattccggtaccgacgttctctgccgcaatt

SEQ ID NO: 537106 - DNA, 75 bp, synthetic construct
  source 1..75: mol_type = other DNA
tatctgggcaaaatcgtttcttacgctcagggcttctctcagctacgcgctgcgtctgaagagtacaactgggat

SEQ ID NO: 537107 - DNA, 75 bp, synthetic construct
  source 1..75: mol_type = other DNA
gatgtcattcttgatgaagcagcaaataaaggtaccggtaagtggaccagccagagctcactggatctcggcgaa

SEQ ID NO: 537108 - DNA, 75 bp, synthetic construct
  source 1..75: mol_type = other DNA
ccagagtgcgctggatctcggtgaaccgctgtcgctgattaccgagtctgtgtttgcacgttatatctcttctct

SEQ ID NO: 537109 - DNA, 75 bp, synthetic construct
  source 1..75: mol_type = other DNA
tatgcgctgttgaaaggcggtcttgcactttccaacgaagagctggcgaaaacttttaccgaatggaatgaaggt

SEQ ID NO: 537110 - DNA, 75 bp, synthetic construct
  source 1..75: mol_type = other DNA
cttcaaaaatatcgctgatgaatatcagcaagcgctgcgtgatgtagtggcttatgctgtgcagaacggtattcc

SEQ ID NO: 537111 - DNA, 75 bp, synthetic construct
  source 1..75: mol_type = other DNA
tggtgggcagaaagaagcctatgagttggttgctccaattctgaagcagattgctgcggttgctgaagacggtga

SEQ ID NO: 537112 - DNA, 75 bp, synthetic construct
  source 1..75: mol_type = other DNA
atacagagccatcctggctgactggatgcagttaagcggaagtcatgaggaatggcagctaagcactacaacggg

SEQ ID NO: 537113 - DNA, 75 bp, synthetic construct
  source 1..75: mol_type = other DNA
tcctgcgttgggacgtccccggcaaccgggggcaagttacccgggcgcttccatgggaggacattggcgaccgtg

SEQ ID NO: 537114 - DNA, 75 bp, synthetic construct
  source 1..75: mol_type = other DNA
tgcgcatcaaggcgaccggccactggcagccaatttttgaacggctcggtattccaaccaatcgcagcgagggac

SEQ ID NO: 537115 - DNA, 75 bp, synthetic construct
  source 1..75: mol_type = other DNA
acgcagaagaactggatttgcattttctcgcaagccggatggatgactcaaagctggatttgattctggttgaag

SEQ ID NO: 537116 - DNA, 75 bp, synthetic construct
  source 1..75: mol_type = other DNA
gataagccgggcaaagatagctatgagctacgcaaggccggagcggcacaaaccatcgttgccagccagcagcgt

SEQ ID NO: 537117 - DNA, 75 bp, synthetic construct
  source 1..75: mol_type = other DNA
gccacgcaatttcacgaatacagcaccggaaaggcgcacgcagacgcgttaaaagatgcctggacagaaaatcac

SEQ ID NO: 537118 - DNA, 75 bp, synthetic construct
  source 1..75: mol_type = other DNA
gcaccagacagggaaagatcacgccgacgcgctgaaagacgcttaccagcaccatcatggcgctgccgggcggga

SEQ ID NO: 537119 - DNA, 75 bp, synthetic construct
  source 1..75: mol_type = other DNA
gtcaccaccaaaagcagcttgcgggcgattctggctgactggttacagcgtagcggctcacgtgaattgtggcgt

SEQ ID NO: 537120 - DNA, 75 bp, synthetic construct
  source 1..75: mol_type = other DNA
cgttggactgatgatgatctgtacggcatcattcgtgcagctaaaaaaaggcaaaaaaaccttcattctgcatga

SEQ ID NO: 537121 - DNA, 75 bp, synthetic construct
  source 1..75: mol_type = other DNA
ccaacgaggccgaagcacacaatgacgggctgttacccctggatgaaataggccaagccggaaacgcacgggagg

SEQ ID NO: 537122 - DNA, 75 bp, synthetic construct
  source 1..75: mol_type = other DNA
ctggaggccgcgcttgtgctgtcaggcaatgttacgggctgggatgttcaggcgtgccgtgatgccattcagcat

SEQ ID NO: 537123 - DNA, 75 bp, synthetic construct
  source 1..75: mol_type = other DNA
gcagcgtgagcaggagcgccagaaacaggcagcagaggacgcagatcagcgaagggctacgtttgcccgtctgta

SEQ ID NO: 537124 - DNA, 75 bp, synthetic construct
  source 1..75: mol_type = other DNA
gtgcgggatgcgcagacgcgctggcgcagtcttattccggctgattatggtgaacaggttcatcgtgtggctgag

SEQ ID NO: 537125 - DNA, 75 bp, synthetic construct
  source 1..75: mol_type = other DNA
cacatatgtggaaatcaccggggctattgagcaggcgggatccctgcgtggtctgtcgctgtctgatgtgctgaa

SEQ ID NO: 537126 - DNA, 75 bp, synthetic construct
  source 1..75: mol_type = other DNA
tgacgtcgatggtgttaatctcagtgaactgattaacaaagtcgctgaaaacggttattcactccgggtggtaga

SEQ ID NO: 537127 - DNA, 75 bp, synthetic construct
  source 1..75: mol_type = other DNA
agccacgcaagcaccttaaaatcaccatcatacactaaatcagtaagttggcagcattaccaaatcatcaataac

SEQ ID NO: 537128 - DNA, 75 bp, synthetic construct
  source 1..75: mol_type = other DNA
ccgaaaacacggtagttgctgacactgtgaaagaaaccagtgagcgtggcgtaaaacttacccaacccattgagc

SEQ ID NO: 537129 - DNA, 75 bp, synthetic construct
  source 1..75: mol_type = other DNA
agaacgtctgcaaacgatggtcagccacttcaccatcgatccttcccgcattaaacaacatgtccgttttggtag

SEQ ID NO: 537130 - DNA, 75 bp, synthetic construct
  source 1..75: mol_type = other DNA
tttattcagttatgtgcggttgccgtaaattttttgagcggtgcggactctggcgggaagaacgaacaggcgacg

SEQ ID NO: 537131 - DNA, 75 bp, synthetic construct
  source 1..75: mol_type = other DNA
cattaccgtgataacgccatgacctacaaagagcagcgcgataaagccacatccatcatcgctgatatgcagaag

SEQ ID NO: 537132 - DNA, 75 bp, synthetic construct
  source 1..75: mol_type = other DNA
caacccttaccagcatacgttgcagtaccgcacatatcacggaaacggacaacgcctggttgtactcgctgtcac

SEQ ID NO: 537133 - DNA, 75 bp, synthetic construct
  source 1..75: mol_type = other DNA
atgaatcgtgtgctgtatggcgtgcttattgtcctgctgcttggttgtggatcgctgtggctggcaacagaccat

SEQ ID NO: 537134 - DNA, 75 bp, synthetic construct
  source 1..75: mol_type = other DNA
ttattatctcatggctggcattcggtgcaggcataccgacaacagcggctatcccgctggctgatattggcgagc

SEQ ID NO: 537135 - DNA, 75 bp, synthetic construct
  source 1..75: mol_type = other DNA
aaggttgagtcggggaatatagagtcactacgtgatgctctggataaaatgaataatataaaactggaaggccac

SEQ ID NO: 537136 - DNA, 75 bp, synthetic construct
  source 1..75: mol_type = other DNA
cccacggtttcgacgtatggggaaacaagtgtgattcgccaaccgtatcattaagcccggcccgagttactgatg

SEQ ID NO: 537137 - DNA, 75 bp, synthetic construct
  source 1..75: mol_type = other DNA
ccgcgccgagtgtccgggtaaagacatctgggtatggacaggctataaactcgacgaactcaacgctgcgcaaat

SEQ ID NO: 537138 - DNA, 75 bp, synthetic construct
  source 1..75: mol_type = other DNA
atatcagcgaacttagcgcgtttaccgagaaaggcattcttgaagccactgccagtgtctcacaaacgccgcagc

SEQ ID NO: 537139 - DNA, 75 bp, synthetic construct
  source 1..75: mol_type = other DNA
ggtgcgattgccgccggacgtgagcacctggggtacccggaattgccagcgactacgcttcaaaacagctgctgg

SEQ ID NO: 537140 - DNA, 75 bp, synthetic construct
  source 1..75: mol_type = other DNA
tgtggtttgtgccgtcactggaagggcagctggtgctgctggttattaccggcgtgctcttttttgccttccgta

SEQ ID NO: 537141 - DNA, 75 bp, synthetic construct
  source 1..75: mol_type = other DNA
gcaacgcgacgggaaaacgctgacccttgatgatctggcaattgttggactggaatataccctgccgaaaaactg

SEQ ID NO: 537142 - DNA, 75 bp, synthetic construct
  source 1..75: mol_type = other DNA
ctaaccgccaacagcagcacggtgaatatcagcgaactgagtgcatttactgaaaaaggcattctggaagccacc

SEQ ID NO: 537143 - DNA, 75 bp, synthetic construct
  source 1..75: mol_type = other DNA
tctatattctcatcgcgttattcgtggtgatcgctggcctctattttctcctgcaaactcgctggggggcagaac

SEQ ID NO: 537144 - DNA, 75 bp, synthetic construct
  source 1..75: mol_type = other DNA
tgtggtttgtgccgtcactggaagggcaactggtgctactggttattaccggcgtgctcttttttgccttccgta

SEQ ID NO: 537145 - DNA, 75 bp, synthetic construct
  source 1..75: mol_type = other DNA
aacggggaacgcgtcgcacactgcattattactttgtcgcgcaggatattcacgagcgtgccagctcttctcata

SEQ ID NO: 537146 - DNA, 75 bp, synthetic construct
  source 1..75: mol_type = other DNA
gcttgctgacgacagcccgcacgggctaagtgatatctggctgcgtcttagccgtaactttacgccggaatccgc

SEQ ID NO: 537147 - DNA, 75 bp, synthetic construct
  source 1..75: mol_type = other DNA
tgccgttatctcgatgctattctcgaacaataccaccaggggcgcgataaccgtctggcatatcgtattgctcgt

SEQ ID NO: 537148 - DNA, 75 bp, synthetic construct
  source 1..75: mol_type = other DNA
gctgctggtcattaccggtgttctcttttttgccttccgtaacgtgcaatacgctcatgcaacgatgttcattac

SEQ ID NO: 537149 - DNA, 75 bp, synthetic construct
  source 1..75: mol_type = other DNA
gccagctcttcccatattcagtatcaaacgttgcgggaacattttcgccacagcgacgtgctgttccgtttccag

SEQ ID NO: 537150 - DNA, 75 bp, synthetic construct
  source 1..75: mol_type = other DNA
ccgctgccgaagttgattatcaaacgtaaacccgaatccatcttcgactaccgtttcgaagattttgagattgaa

SEQ ID NO: 537151 - DNA, 75 bp, synthetic construct
  source 1..75: mol_type = other DNA
tcgttttcatttattcgctggcggggaaatttcacactgtttattggcggactacagggcccccgggaagacggg

SEQ ID NO: 537152 - DNA, 75 bp, synthetic construct
  source 1..75: mol_type = other DNA
gatggagcagaccgcgcatatcctcaccgtgccgggcggcggcacgctgcactgcgactggtggttcaccaacga

SEQ ID NO: 537153 - DNA, 75 bp, synthetic construct
  source 1..75: mol_type = other DNA
caacccttacctgcatacgatgcagtaccgcacatatcacggaaacggacaacgcctggttgtactcgctgtcac

SEQ ID NO: 537154 - DNA, 75 bp, synthetic construct
  source 1..75: mol_type = other DNA
aacaactctatgcagatttgctggcacagtatgaaaggaagagcatttcacattcattgaattacgtaccacccc

SEQ ID NO: 537155 - DNA, 75 bp, synthetic construct
  source 1..75: mol_type = other DNA
cctgcagcggggacgggcacagcgattatccgggaggccacccgtgcctgttatggcctgtttccgcgccgtctg

SEQ ID NO: 537156 - DNA, 75 bp, synthetic construct
  source 1..75: mol_type = other DNA
ttatcatcttatccggagccttccgcaggaggtcaggcgaatgctgaacgtcagccgggaaacatcgcttgtccg

SEQ ID NO: 537157 - DNA, 75 bp, synthetic construct
  source 1..75: mol_type = other DNA
cagcactctgtcttatcgcgtcgggtcatgccctggcccacgatgtgtggatcaccggtaagcaggtacagaata

SEQ ID NO: 537158 - DNA, 75 bp, synthetic construct
  source 1..75: mol_type = other DNA
taatgaggatggtatcgtcacagtaccttctcttcatattggacagtggctggcgaaagtccaaaataagaaaag

SEQ ID NO: 537159 - DNA, 75 bp, synthetic construct
  source 1..75: mol_type = other DNA
ttgaccagatcactacggtgctgaaccagttaaaaaacgatccagattcccgtcgtattattgtttcggcatgga

SEQ ID NO: 537160 - DNA, 75 bp, synthetic construct
  source 1..75: mol_type = other DNA
agcacatggtgcagcgtctcctgaaaaatgtattggcgcagggcctgatggtgcacctgtggaggagcagggact

SEQ ID NO: 537161 - DNA, 75 bp, synthetic construct
  source 1..75: mol_type = other DNA
gcagttgagcacaaacatcctgttcataaagcagaactcacctttgtaactaatgaggatggtatcgtcacagta

SEQ ID NO: 537162 - DNA, 75 bp, synthetic construct
  source 1..75: mol_type = other DNA
agatgtgaagctgaaagttctgtataaaacttccccgcttgccggagccactctggagcttgactctgtcagtta

SEQ ID NO: 537163 - DNA, 75 bp, synthetic construct
  source 1..75: mol_type = other DNA
aggatgatgaagaaaaaccgcaaccatctggaacaacggcagatgaacagggagaggctgaaacaatggaaccgg

SEQ ID NO: 537164 - DNA, 75 bp, synthetic construct
  source 1..75: mol_type = other DNA
actgacaaagttttccctaatcccgttaattccagtctgggattaatgactgcttttttcgaagcatacctggac

SEQ ID NO: 537165 - DNA, 75 bp, synthetic construct
  source 1..75: mol_type = other DNA
ttgcaccgcctgcggtcaggctggcggcggcaactgtcctgactgcggcgcggtgatgggcgacgcaacgtatca

SEQ ID NO: 537166 - DNA, 75 bp, synthetic construct
  source 1..75: mol_type = other DNA
gcagcgtgtaacagaagaagaaaaacaggatgatgaagaaaaaccgcaaccatcttgcgcaatggcagatgaaca

SEQ ID NO: 537167 - DNA, 75 bp, synthetic construct
  source 1..75: mol_type = other DNA
gaacgacttaaagatcgcctgcaccgtgaaattattgagcatgattatcacctcagcgccgcaatgtattgcgat

SEQ ID NO: 537168 - DNA, 75 bp, synthetic construct
  source 1..75: mol_type = other DNA
tcacactcatccggcgttatggcgtcagtctcattcatctggatgccagcgctgaatatctgccgggcctgccca

SEQ ID NO: 537169 - DNA, 75 bp, synthetic construct
  source 1..75: mol_type = other DNA
actggcagaagaagagtcgcgtcgctgggcggagattattgaaatgtcgctcaaccttgaacaggcttccgatat

SEQ ID NO: 537170 - DNA, 75 bp, synthetic construct
  source 1..75: mol_type = other DNA
gcgttcaggtgatctttgcctcgctgaccggcgatattctgctggatgcgctgattggcgcgatgttcgccatta

SEQ ID NO: 537171 - DNA, 75 bp, synthetic construct
  source 1..75: mol_type = other DNA
gcgtctgaactcgctgttttgttcagtcgcttacagtgtgcttgaacaaccagatgaagatgaggggcgggacga

SEQ ID NO: 537172 - DNA, 75 bp, synthetic construct
  source 1..75: mol_type = other DNA
atgctggtgacctcgtttgtcgctcaggatctggtagccctcgcaccggctctggtcattgtgctgggggcagat

SEQ ID NO: 537173 - DNA, 75 bp, synthetic construct
  source 1..75: mol_type = other DNA
gaccgcgctaatggcgcgtattctcaccttcgatttatcctggttgtcaccactacttatttttatcggcgtgat

SEQ ID NO: 537174 - DNA, 75 bp, synthetic construct
  source 1..75: mol_type = other DNA
tgaaccggaactggatacccagctacggcctaaacatctggatgtcagcgcgctggatacgcccacgcttgctct

SEQ ID NO: 537175 - DNA, 75 bp, synthetic construct
  source 1..75: mol_type = other DNA
gcgaacccgtgcctatattggccagcatatgccgctctactgttccgcaatgggcaagatctacatggcgtttgg

SEQ ID NO: 537176 - DNA, 75 bp, synthetic construct
  source 1..75: mol_type = other DNA
tcagactggcgggggtaactgccctgactgtagtgcggtaatgggcgatagcacttacacagaaacttttggaga

SEQ ID NO: 537177 - DNA, 75 bp, synthetic construct
  source 1..75: mol_type = other DNA
tgatcgaccttgaaaccatgggaaacaatcctgatgccccgattatctcaataggtgcaatatttttcgatccgc

SEQ ID NO: 537178 - DNA, 75 bp, synthetic construct
  source 1..75: mol_type = other DNA
ccaccagcaggacgtgtgaccatctaatgatcgaccttgaaaccatgggaaaaaatcctgatgccccgatcatct

SEQ ID NO: 537179 - DNA, 75 bp, synthetic construct
  source 1..75: mol_type = other DNA
acagcgccagcaatccctgatatcgccatcatgattgccaacaggcttgaaaatttcgaaggtgataaatcatga

SEQ ID NO: 537180 - DNA, 75 bp, synthetic construct
  source 1..75: mol_type = other DNA
cgacgcaacgtatcagaaaacctttaatgaagaaaatcagaatgaatatcaggaaaaaggtctggaggaaatgga

SEQ ID NO: 537181 - DNA, 75 bp, synthetic construct
  source 1..75: mol_type = other DNA
cgggacaaaacagcccggatacgcaacaaaacgggccagaagagcaacagccagggccagtaatgcaacaggaag

SEQ ID NO: 537182 - DNA, 75 bp, synthetic construct
  source 1..75: mol_type = other DNA
gcccgcgacgtagccactggcattctggcccgttcaatggatgtggacatttataaccttcatccggcacatgct

SEQ ID NO: 537183 - DNA, 75 bp, synthetic construct
  source 1..75: mol_type = other DNA
gctgaatattattcatatcgctgcaccacatcttgaggcgctcaatattgcgactggagaaaccattaatttctc

SEQ ID NO: 537184 - DNA, 75 bp, synthetic construct
  source 1..75: mol_type = other DNA
catgagatccagccgttaacccgcaataccattaccgagctgcccgcgatgttcgacgaactggcgcacattcgt

SEQ ID NO: 537185 - DNA, 75 bp, synthetic construct
  source 1..75: mol_type = other DNA
aggccataaagcggaacaacacagtccaaatgcgcaacaaaacgagccagaaacgaaacagcctgaaccagtagc

SEQ ID NO: 537186 - DNA, 75 bp, synthetic construct
  source 1..75: mol_type = other DNA
ttgacggaattagcgacccgaacgatccgaaatgggttaaggggatccagactcgcgattctgtgtaccagaacc

SEQ ID NO: 537187 - DNA, 75 bp, synthetic construct
  source 1..75: mol_type = other DNA
attgaatgcggacgttatccggttgaaattttcatgatgggcgaagaagcaaaactggcaggccagcaggaatat

SEQ ID NO: 537188 - DNA, 75 bp, synthetic construct
  source 1..75: mol_type = other DNA
agctgctcgacccgctggagattcgcgaccttcacaaattggtacgcgacactgacaaagttttccctaatcccg

SEQ ID NO: 537189 - DNA, 75 bp, synthetic construct
  source 1..75: mol_type = other DNA
ggcaccagcggcaacgcaccgcgcagtatcagcttcagcgggccgtgggcgcagttccgccttttcggggccgga

SEQ ID NO: 537190 - DNA, 75 bp, synthetic construct
  source 1..75: mol_type = other DNA
tgaacccggtacgcgatgcaacactggcctatggcgactggggcgagcgcagccgtctggccgatatgggcctgt

SEQ ID NO: 537191 - DNA, 75 bp, synthetic construct
  source 1..75: mol_type = other DNA
ctggtgtggcttactgcccgggtgatgaggcgtctgcaactgattgaaaaacagcaaaaacagcagcgccaggaa

SEQ ID NO: 537192 - DNA, 75 bp, synthetic construct
  source 1..75: mol_type = other DNA
attgaccaggctggatccctgcgtggtctgtcgctgtctgatgtgctgaatctgaaagcggataccatgttaagg

SEQ ID NO: 537193 - DNA, 75 bp, synthetic construct
  source 1..75: mol_type = other DNA
attgatcaggctggatccctgcgtggtctgtcgctgtctgatgtgctgaatctgaaagcggataccatgtttaag

SEQ ID NO: 537194 - DNA, 75 bp, synthetic construct
  source 1..75: mol_type = other DNA
attgaacaggctggatccctgcgtggtctgtcgctgtctgatgtgctgaatctgaaagcggataccatgtttatg

SEQ ID NO: 537195 - DNA, 75 bp, synthetic construct
  source 1..75: mol_type = other DNA
tgacggcgatggattcctgggtacttaaccttacccgcagcgtgaaatacagtgacgccgaccgtgcggaaatcc

SEQ ID NO: 537196 - DNA, 75 bp, synthetic construct
  source 1..75: mol_type = other DNA
ctaccagcgggtttaccagagcctgaaaacgcgggcgctgggcgttcttcctgccgacctcaatctgcgtgacca

SEQ ID NO: 537197 - DNA, 75 bp, synthetic construct
  source 1..75: mol_type = other DNA
agcgacgctgaccagacagagatccagcgccagctgactgaacagtatctcagcgactacaccgccacctggcgg

SEQ ID NO: 537198 - DNA, 75 bp, synthetic construct
  source 1..75: mol_type = other DNA
cggccagttagtcgattacagccagggccgtaactataccgcccatctggtctggcctaacaatatgcgcgaagg

SEQ ID NO: 537199 - DNA, 75 bp, synthetic construct
  source 1..75: mol_type = other DNA
acactgcatgaagagcagtggctcaagccactggcgaaccgctggctggccacggcagcgtggggtattgttgcc

SEQ ID NO: 537200 - DNA, 75 bp, synthetic construct
  source 1..75: mol_type = other DNA
ccgcaggcattactcgcagagcctaatctggcaacagaaagccgcacctggctgatgcgttcccgtcgccgcctg

SEQ ID NO: 537201 - DNA, 75 bp, synthetic construct
  source 1..75: mol_type = other DNA
attgagcaggctggatccctgcgtggtctgtcgctgtctgatgtgctgaatctgaaagcggataccatgttaacg

SEQ ID NO: 537202 - DNA, 75 bp, synthetic construct
  source 1..75: mol_type = other DNA
tgacgtcgatggtgttaatctcattgaactgattaacaaagtctctgaaaacggttattcactccgggtggtgga

SEQ ID NO: 537203 - DNA, 75 bp, synthetic construct
  source 1..75: mol_type = other DNA
tgacgtcgatggtgttaatctcagtgaactgattaacaaagtcactgaaaacggttattcactccgggtggtgga

SEQ ID NO: 537204 - DNA, 75 bp, synthetic construct
  source 1..75: mol_type = other DNA
tgcgctgagggattttctggttctgggttatacccgaagggaggcctgtgaacgacataaggtttctcagggata

SEQ ID NO: 537205 - DNA, 75 bp, synthetic construct
  source 1..75: mol_type = other DNA
tgacgtcgatggtgttaatctcaatgaactgattaacaaagtcgctgaaaacggttattcactccgggtggtgga

SEQ ID NO: 537206 - DNA, 75 bp, synthetic construct
  source 1..75: mol_type = other DNA
tggcgattgccgccagccccagtaaaaaaccgatgtttactctggaagagcgtgtggcgctggcacagcacgcaa

SEQ ID NO: 537207 - DNA, 75 bp, synthetic construct
  source 1..75: mol_type = other DNA
ggatatttaagcacaagcttgtctcgcttatacagagtaaattacattgtaactcaattaattccttattatggc

SEQ ID NO: 537208 - DNA, 75 bp, synthetic construct
  source 1..75: mol_type = other DNA
tagtgtccagtctttatgcgtcaatttcgatcataattattatcgtgagatttaccttgttggtgctgatggtaa

SEQ ID NO: 537209 - DNA, 75 bp, synthetic construct
  source 1..75: mol_type = other DNA
tttgatcataattattatcgagagatctaccttgttgatgaggatagtagagctaaacgttataggttgtgtgac

SEQ ID NO: 537210 - DNA, 75 bp, synthetic construct
  source 1..75: mol_type = other DNA
ggtggcggcagcggacacgagccgatgcactgtggttatatcggtcaggggatgctttcgggggcctgtccgggc

SEQ ID NO: 537211 - DNA, 75 bp, synthetic construct
  source 1..75: mol_type = other DNA
caaaaaaagccgcttcattacgctgttggcgcataccgatggcgtcgaggcggcgaaagcgtttgttgaatcggt

SEQ ID NO: 537212 - DNA, 75 bp, synthetic construct
  source 1..75: mol_type = other DNA
tggctgacatggaatatgatgaatctgattacattagagattattctatttttaaattaattgcacaagatcaga

SEQ ID NO: 537213 - DNA, 75 bp, synthetic construct
  source 1..75: mol_type = other DNA
tttggcggatatctatttgccgcccctccagcgccgatagtgccggaagaagcaactccggaaaacgtagaaatg

SEQ ID NO: 537214 - DNA, 75 bp, synthetic construct
  source 1..75: mol_type = other DNA
acccaatatccccttgatgttaaaagacctatgtttttagtcgaaacacatagtgagcacattttgcttcgaatt

SEQ ID NO: 537215 - DNA, 75 bp, synthetic construct
  source 1..75: mol_type = other DNA
atggcctgggcggggattgtgctcgcatcaattatctggcgagtttttcttagtcaggcgttttctttgcccgct

SEQ ID NO: 537216 - DNA, 75 bp, synthetic construct
  source 1..75: mol_type = other DNA
atggagtctgcccgagcaagcgccgaaccgccaacagatccggttattaataataatccggaaccggcggcacag

SEQ ID NO: 537217 - DNA, 75 bp, synthetic construct
  source 1..75: mol_type = other DNA
tgataactgtgatacagctcattgcctgtaatctggctgattgggggagcgctgaaacagtttttatcctgtgct

SEQ ID NO: 537218 - DNA, 75 bp, synthetic construct
  source 1..75: mol_type = other DNA
tttgcatctggattttgatgatgtgaattttgattatgtggatttttatcgtactaatccggcaacaggattagc

SEQ ID NO: 537219 - DNA, 75 bp, synthetic construct
  source 1..75: mol_type = other DNA
acccttcaaccggatatcctatgcatggaggatttgattcagcaggaaatacttttgggactcgttggcaggact

SEQ ID NO: 537220 - DNA, 75 bp, synthetic construct
  source 1..75: mol_type = other DNA
gtcactgatcaatatagattgacccaattagatagaatcagatgcgtaagaatgggctggaaaatgaactccaaa

SEQ ID NO: 537221 - DNA, 75 bp, synthetic construct
  source 1..75: mol_type = other DNA
gaagatcccagagtatttcaaccactcgtaaaaacggttgagagagagattaatatcagtgaaaggttatgtatg

SEQ ID NO: 537222 - DNA, 75 bp, synthetic construct
  source 1..75: mol_type = other DNA
acaagacttttttaagctatacagagttatattcattatcagagtttcttagagtgaaaaggaagaaacgtaaaa

SEQ ID NO: 537223 - DNA, 75 bp, synthetic construct
  source 1..75: mol_type = other DNA
gcggccgacgccgttttcgcctgggctgatagcggtgatctgactttcgactcccttgatggtttcgttcaggct

SEQ ID NO: 537224 - DNA, 75 bp, synthetic construct
  source 1..75: mol_type = other DNA
atgaaaatatactggacaagaaaaaacattcctgaactttcagcactttcaccttcattaagaaagaaaaatttt

SEQ ID NO: 537225 - DNA, 75 bp, synthetic construct
  source 1..75: mol_type = other DNA
ttagctaattcagaatataactttgcggtaaatgaattgggtaatgactctaacttattgatagtgttttatgtt

SEQ ID NO: 537226 - DNA, 75 bp, synthetic construct
  source 1..75: mol_type = other DNA
ttattgtactatggcagggattgtttatatggttattttctcaaatacgaaaaaaacggcatgtgtcggatgagt

SEQ ID NO: 537227 - DNA, 75 bp, synthetic construct
  source 1..75: mol_type = other DNA
acgcggaagtcccggaagagatgaagcgcaaatggcagcgcgcgctcggcgaatacctcgaaaaacgtcagagcc

SEQ ID NO: 537228 - DNA, 75 bp, synthetic construct
  source 1..75: mol_type = other DNA
gctcatgatgaaatgtggtgttcagtccataaacagcctcatggtcaacggtataggcatatccatgcaactcca

SEQ ID NO: 537229 - DNA, 75 bp, synthetic construct
  source 1..75: mol_type = other DNA
agagtggagtgctcttcatcatgctgaagaagcattagcgacagccgcagtatgtttgatgagtgggcatcatga

SEQ ID NO: 537230 - DNA, 75 bp, synthetic construct
  source 1..75: mol_type = other DNA
atgccaaatcatgatcgattcgaatgccaaactgcgatcgattcagatgccattttgcataaggacatctgcaaa

SEQ ID NO: 537231 - DNA, 75 bp, synthetic construct
  source 1..75: mol_type = other DNA
gcggggataaacctcctgacccgcagcgtggtcacccaggcgcgtcagcgcgtgggggccgccccggtggaatga

SEQ ID NO: 537232 - DNA, 75 bp, synthetic construct
  source 1..75: mol_type = other DNA
gcttcgcgacggcatcgacatcatctttatgaacttcaaataccagttcatcgtgtacctgcatgatcatacgca

SEQ ID NO: 537233 - DNA, 75 bp, synthetic construct
  source 1..75: mol_type = other DNA
cttgccgcagggcgcgctttattaacggttagtgcatttatcgggttttgctggactgccgcgccagattgggat

SEQ ID NO: 537234 - DNA, 75 bp, synthetic construct
  source 1..75: mol_type = other DNA
ctttttgcagcccgcgctttattggctgtgagcgcattcattggtttttgctggactgctgcgccggattgggat

SEQ ID NO: 537235 - DNA, 75 bp, synthetic construct
  source 1..75: mol_type = other DNA
tgaatttaacgacattgggaatattctttttgcagcccgcgctttattggctgttagcgcattcattggtttttg

SEQ ID NO: 537236 - DNA, 75 bp, synthetic construct
  source 1..75: mol_type = other DNA
gccgataagcttgaaaattgtctgatgagcttaacgctgagtatccagagcctgcagaagcacgccatgcttgag

SEQ ID NO: 537237 - DNA, 75 bp, synthetic construct
  source 1..75: mol_type = other DNA
gccgataagcttgaaaattgtctgatgagcttaacgctgagtatccagagtctacagaagcatgcgatgcttgag

SEQ ID NO: 537238 - DNA, 75 bp, synthetic construct
  source 1..75: mol_type = other DNA
gccaacggctgaacgtttaagtgatattgcggatagcgggcagaaactgctgcaaaacgcctctgacaaggatct

SEQ ID NO: 537239 - DNA, 75 bp, synthetic construct
  source 1..75: mol_type = other DNA
attgcttctattatgaagtcattaggttcaatggcaccatttattaaggaaagcgaaaaggaaaacaatttctcg

SEQ ID NO: 537240 - DNA, 75 bp, synthetic construct
  source 1..75: mol_type = other DNA
taacactgttctggtaactgaaaggtgcaacaaccgttgccttttttgttctcagcctcctaagacaggaaacga

SEQ ID NO: 537241 - DNA, 75 bp, synthetic construct
  source 1..75: mol_type = other DNA
ttcagaaagagcaacctttgctcaggcctgtaaagcgtttctggatgccttaccaagtttgcttctggtgttcat

SEQ ID NO: 537242 - DNA, 75 bp, synthetic construct
  source 1..75: mol_type = other DNA
tctttatggacatgacaccggctgtactaatcttcacaccgatcttcttgccgattgcacaagagctgggaatgg

SEQ ID NO: 537243 - DNA, 75 bp, synthetic construct
  source 1..75: mol_type = other DNA
cagtttatcagtcgggtctgtataacgtgattgtttatcatcacacaggaaaagtcgcattaatgaaggaaggcc

SEQ ID NO: 537244 - DNA, 75 bp, synthetic construct
  source 1..75: mol_type = other DNA
ctgtttatcagtcaggtctgtataacgtcattgtttatcatcacacaggaggtgatgctgccaacttactgattt

SEQ ID NO: 537245 - DNA, 75 bp, synthetic construct
  source 1..75: mol_type = other DNA
actggctaactataccgaattggatgatatcgtagaattcgctggccgtgtgttctccaacatcaatcagatttc

SEQ ID NO: 537246 - DNA, 75 bp, synthetic construct
  source 1..75: mol_type = other DNA
tgtttggctgtttttttgtgttggtctttcttggtgtgcccatttcgttctcaatcggtattgccactgtagctt

SEQ ID NO: 537247 - DNA, 75 bp, synthetic construct
  source 1..75: mol_type = other DNA
tggataataaaatagcccgcgaggaatacgttcgccgtaggctcggtgttgatggttcagcaattcttacatctg

SEQ ID NO: 537248 - DNA, 75 bp, synthetic construct
  source 1..75: mol_type = other DNA
tccttgccggcccggcggtagtgtctttgctggcgaaagataagaagttacatcaccttacgtctaaacatcgcg

SEQ ID NO: 537249 - DNA, 75 bp, synthetic construct
  source 1..75: mol_type = other DNA
tatgatggtggctaacctttgtattgggctgttaacaccgccggtgggtagtgcgctatttgttggttgttctat

SEQ ID NO: 537250 - DNA, 75 bp, synthetic construct
  source 1..75: mol_type = other DNA
atgtttccctgggatatcgcggcaatcactgtttcgcaacgactggctaatggactggataactttgccctgttg

SEQ ID NO: 537251 - DNA, 75 bp, synthetic construct
  source 1..75: mol_type = other DNA
aaggttatgatccggcattttctaccgctgtaaacgtctcatcctgcattactggattactgataccgccctcaa

SEQ ID NO: 537252 - DNA, 75 bp, synthetic construct
  source 1..75: mol_type = other DNA
gtgaattacccggtggagtttgctgctaaaggacagttccgttttcgtgcgcagccggtgtttccggcgaacgtg

SEQ ID NO: 537253 - DNA, 75 bp, synthetic construct
  source 1..75: mol_type = other DNA
gctctgcgtttcttgccgggcaggtcgccaccctggattttggtaacccgggacaactggacgctgccggcgtgg

SEQ ID NO: 537254 - DNA, 75 bp, synthetic construct
  source 1..75: mol_type = other DNA
ctgacattcgggacttaccgcaagtccacgggggcgtctgtgcctccgcgtgacttcactgtgcgtctgtatgag

SEQ ID NO: 537255 - DNA, 75 bp, synthetic construct
  source 1..75: mol_type = other DNA
cagcctttcgagcggggcaggtcgcaactctggattttggtaacccgggccaactggatgcaaagggcgtggtca

SEQ ID NO: 537256 - DNA, 75 bp, synthetic construct
  source 1..75: mol_type = other DNA
acgaggccaatatgtctggcgataaaatcgaccacggcggctgtgtgaatacgctaaccactctgcgcccttcac

SEQ ID NO: 537257 - DNA, 75 bp, synthetic construct
  source 1..75: mol_type = other DNA
cagaaacgtgggattgccaacggcgatatggtgcgggtgtttaaccatcgtggcgaagttcggctaccagccaaa

SEQ ID NO: 537258 - DNA, 75 bp, synthetic construct
  source 1..75: mol_type = other DNA
tggattatcgatttcgctgaactgaaagcggcatttaaaccaacctatgatcgcctcgatcactattatctcaat

SEQ ID NO: 537259 - DNA, 75 bp, synthetic construct
  source 1..75: mol_type = other DNA
aagaaattttatcgtgaaggagtatttgttaacggcgcggcacagggttacctgatcgataagaaaaccgccgac

SEQ ID NO: 537260 - DNA, 75 bp, synthetic construct
  source 1..75: mol_type = other DNA
tttgccattatgcagttgccagtggccgatattaacgcccagaacgccattatgcatgacggcaaagcctcagaa

SEQ ID NO: 537261 - DNA, 75 bp, synthetic construct
  source 1..75: mol_type = other DNA
caaactgccgaatggcgcgaattacggcttcccggtcagcaccatgcatatcgttgccaacaaagcctggaccga

SEQ ID NO: 537262 - DNA, 75 bp, synthetic construct
  source 1..75: mol_type = other DNA
ggacggtttcggcaacagtggtcgactgatattcgggacttaccgtaaatccagtggcgtgcctgtattgccacg

SEQ ID NO: 537263 - DNA, 75 bp, synthetic construct
  source 1..75: mol_type = other DNA
ctgaagccagggaaagatgtggtctggttgcaggtgccgttctccgcactgccgggcgataaaaatgccgatacc

SEQ ID NO: 537264 - DNA, 75 bp, synthetic construct
  source 1..75: mol_type = other DNA
agcgatgatggctgacaccatcagtcgttacaaagagggtaagccggtgttttactacacctggacgccgtactg

SEQ ID NO: 537265 - DNA, 75 bp, synthetic construct
  source 1..75: mol_type = other DNA
tctttcaaatcagccagcctgttgggtaacagacgtagcttatagcactatacccccaattgctatggttcttga

SEQ ID NO: 537266 - DNA, 75 bp, synthetic construct
  source 1..75: mol_type = other DNA
ggtggagtcctgcatgttcttctgaaccagccgctccaggagaatggggggtgttaaaaacgaccgcagttcaat

SEQ ID NO: 537267 - DNA, 75 bp, synthetic construct
  source 1..75: mol_type = other DNA
aaaaaccgtttgaactgccggatgggtgggaatggtgtcgtttgaatgatttatttagttttattactgatggag

SEQ ID NO: 537268 - DNA, 75 bp, synthetic construct
  source 1..75: mol_type = other DNA
gcaaaaaatatccgtgacggttatttagactacaataactgtgattatatctcagcgattgactacgaaaaatcc

SEQ ID NO: 537269 - DNA, 75 bp, synthetic construct
  source 1..75: mol_type = other DNA
ctcaaaaagagcaagaaaggataaatactaaagtcatagagttaatgtctctctgcgaccaactggaacagcaat

SEQ ID NO: 537270 - DNA, 75 bp, synthetic construct
  source 1..75: mol_type = other DNA
tgctgcgtgttggtaatctattcacatcaaatgagtggtattactctgacctccaattagacgaaaacaaatata

SEQ ID NO: 537271 - DNA, 75 bp, synthetic construct
  source 1..75: mol_type = other DNA
gagttatatgtggaatatcctgatatatgtcattccgtatacgttatatgcgcttgcagccgggtttcttgttac

SEQ ID NO: 537272 - DNA, 75 bp, synthetic construct
  source 1..75: mol_type = other DNA
atcggtaagggtagggattttacagcaccgtgaaaaatctcataatttttatgaaatcactgtactcactatgga

SEQ ID NO: 537273 - DNA, 75 bp, synthetic construct
  source 1..75: mol_type = other DNA
gggacgatgctcacacatacggaaaatggcttcggttctattgctaatattttgctgattatcggggccggaggc

SEQ ID NO: 537274 - DNA, 75 bp, synthetic construct
  source 1..75: mol_type = other DNA
aaaaaccgtttgaacttccggaagggtgggagtggtgtcgtttaaatgatatttcatctaaaattactgatggag

SEQ ID NO: 537275 - DNA, 75 bp, synthetic construct
  source 1..75: mol_type = other DNA
ataatcttaagctgggatccggaaaataccgctcattacggacagtcgataccgctttgtacaaaaaacagtctt

SEQ ID NO: 537276 - DNA, 75 bp, synthetic construct
  source 1..75: mol_type = other DNA
aacagaatggtctggcaaaggctctgagggagattggccgcatcgaaaggtcattgtttatgctggactggttcc

SEQ ID NO: 537277 - DNA, 75 bp, synthetic construct
  source 1..75: mol_type = other DNA
tattacagtcaatgattcactctcataaacgaggcggagctcaaccatgcctatatcttggagaaattagtaaat

SEQ ID NO: 537278 - DNA, 75 bp, synthetic construct
  source 1..75: mol_type = other DNA
agccaaaacgccgaggaactggctgaaaactgggtgcgtattaacgagcacttcgacacactatttaccaccgaa

SEQ ID NO: 537279 - DNA, 75 bp, synthetic construct
  source 1..75: mol_type = other DNA
ttcaattgatcctggaagaagtaatggagttccacatatatctacgaaacagttagagatgacactatttcctct

SEQ ID NO: 537280 - DNA, 75 bp, synthetic construct
  source 1..75: mol_type = other DNA
caatccctgaccagtctggacgcacatcagcaactggttgaaaccctgttgggaacgcttacagacagccaaaac

SEQ ID NO: 537281 - DNA, 75 bp, synthetic construct
  source 1..75: mol_type = other DNA
tgctcaaacgaattgcgcaggaaaaagcacaactggtgaaagaaggaaaaataaaaaaacaaaaaccgttgccgc

SEQ ID NO: 537282 - DNA, 75 bp, synthetic construct
  source 1..75: mol_type = other DNA
tccgaactgctcaaacgtattgcgcaggaaaaagctcaactggtgaaagaagggaaaataaaaaaacaaaaatcg

SEQ ID NO: 537283 - DNA, 75 bp, synthetic construct
  source 1..75: mol_type = other DNA
ggtaaactggtgccgcaggacccgaacgatgaaccggcgtcggagctgttgaaacgtattgcggcggaaaaagcc

SEQ ID NO: 537284 - DNA, 75 bp, synthetic construct
  source 1..75: mol_type = other DNA
cacatcagcaactggttgaaaccctgttgggaacgcttacagacagccaaaacgccgaggaattggctgaaaact

SEQ ID NO: 537285 - DNA, 75 bp, synthetic construct
  source 1..75: mol_type = other DNA
agcaccttaaacccgatgaatactccgatgaatttaatgataattttctaccttatataactggccctgccgaat

SEQ ID NO: 537286 - DNA, 75 bp, synthetic construct
  source 1..75: mol_type = other DNA
gctgatggcgggctggtatccggactttctgccaggagagataaccggcacggggacgcttctcggtacgcccat

SEQ ID NO: 537287 - DNA, 75 bp, synthetic construct
  source 1..75: mol_type = other DNA
taccaccgaagccagcgtggatgcgttaaaacagaccattctgcaactggccgtaatgggtaaacttgtgccgca

SEQ ID NO: 537288 - DNA, 75 bp, synthetic construct
  source 1..75: mol_type = other DNA
gacatacactaaactcagattcattatctatgttattattacctgttccttgtgaaaaagaacaatgtaggataa

SEQ ID NO: 537289 - DNA, 75 bp, synthetic construct
  source 1..75: mol_type = other DNA
atccgaatgacgaacccgcctctgaactgctcaaacgaattgcgcaggaaaaagctcaactggtgaaagaaggga

SEQ ID NO: 537290 - DNA, 75 bp, synthetic construct
  source 1..75: mol_type = other DNA
agcgtcattagtggttatttaggcaaaaactggggcatcctgttaggtgcgctctatttcgtgatgttggttatc

SEQ ID NO: 537291 - DNA, 75 bp, synthetic construct
  source 1..75: mol_type = other DNA
gatttcctatcgctcgcgggaaaaatcgattgaagtagcgcggcataaagcgttgcgggcaatgaacatcgcgtt

SEQ ID NO: 537292 - DNA, 75 bp, synthetic construct
  source 1..75: mol_type = other DNA
gctggcgattgccgcacagtttattagcggtgacggcgcagcgtgggtgaaagtggtcagcgtcattctcaatat

SEQ ID NO: 537293 - DNA, 75 bp, synthetic construct
  source 1..75: mol_type = other DNA
ctgtttccgggttttagtgccgaagccagagaaacgctcctccactaccgttggccgggcaatattcgtgaactg

SEQ ID NO: 537294 - DNA, 75 bp, synthetic construct
  source 1..75: mol_type = other DNA
tggagttgatcgaaaaggtcgacgtgcacgctattgcgcacctgaccggcggcggcttctgggaaaacattccgc

SEQ ID NO: 537295 - DNA, 75 bp, synthetic construct
  source 1..75: mol_type = other DNA
tctgcgttggcgtggtagaaaaatcagaaatcatcgacggctctaaagtcagcgacggcgatgtgctgattgcac

SEQ ID NO: 537296 - DNA, 75 bp, synthetic construct
  source 1..75: mol_type = other DNA
aagcctttattaatgcaatggcggaaatttgcacgccgttgccgggtgcggtttccctgcttaacaccattcgcg

SEQ ID NO: 537297 - DNA, 75 bp, synthetic construct
  source 1..75: mol_type = other DNA
cattactctcaagtttagtggcgtccagtgtttgggctgatgccgcaagcgatctgaaaagccgcctggataaag

SEQ ID NO: 537298 - DNA, 75 bp, synthetic construct
  source 1..75: mol_type = other DNA
accaacaccggccgtaaatgtagcatgatcgaacacatcatgcagtcgatgcaattcccggcggaattgattgag

SEQ ID NO: 537299 - DNA, 75 bp, synthetic construct
  source 1..75: mol_type = other DNA
aggtcggtttgatgggattgtgggtatttttgctctcatcagtgattggttacccggcaatgtatctgtttcagc

SEQ ID NO: 537300 - DNA, 75 bp, synthetic construct
  source 1..75: mol_type = other DNA
attcgtgaactgaaaaacgtcgtggagcgatccgtttaccggcatggaaccagtgattacccgctggatgagata

SEQ ID NO: 537301 - DNA, 75 bp, synthetic construct
  source 1..75: mol_type = other DNA
gagcaaccagaaggtatcgcacccacctggaccgtttcatcgttgcatgaactggagcaactcctgtgtaaacac

SEQ ID NO: 537302 - DNA, 75 bp, synthetic construct
  source 1..75: mol_type = other DNA
tgcgtaaggcagcacaaaactatcagtcgacgctggcgtggtatcagtccatcccggacagcccaaatgctgaac

SEQ ID NO: 537303 - DNA, 75 bp, synthetic construct
  source 1..75: mol_type = other DNA
tgctcgacgccgggctgagtgccgaagaagccagtgcaggcgcacacgcggcaatgatcaactttgccaaatggc

SEQ ID NO: 537304 - DNA, 75 bp, synthetic construct
  source 1..75: mol_type = other DNA
ccagcaatacatcaaactccgcgatcaggagaacgaggatattgcgctaacggtagtgaagctgcgtgttgagct

SEQ ID NO: 537305 - DNA, 75 bp, synthetic construct
  source 1..75: mol_type = other DNA
gtgagcgaaattaattaccaggcactgcgtgaggcagcagaacgtgcaattccagcaatggaacgcctgttaatg

SEQ ID NO: 537306 - DNA, 75 bp, synthetic construct
  source 1..75: mol_type = other DNA
agggacgtttgttctcctataccgatacacaaatcagtcgtcttggtgggccgaatttccatgagattccgatta

SEQ ID NO: 537307 - DNA, 75 bp, synthetic construct
  source 1..75: mol_type = other DNA
caccgttcagggtggtgctggctcggcggatacggtgcgagatatccgtggcttcgcgaccaagttctacactga

SEQ ID NO: 537308 - DNA, 75 bp, synthetic construct
  source 1..75: mol_type = other DNA
acgggcgctcaaaaccgttcagcgacatgtacttactggcggcggaaaaacttaacgtgccgatcggtgagatct

SEQ ID NO: 537309 - DNA, 75 bp, synthetic construct
  source 1..75: mol_type = other DNA
atcgcgatgctgccgcaaggcagtcgctgcaacagctggcggttgggtactgacgaaccgctatcactggaaggc

SEQ ID NO: 537310 - DNA, 75 bp, synthetic construct
  source 1..75: mol_type = other DNA
cggcacacgtccgtctggtgatggtggcaaacgatcttcccgccctgaccgatcctttagtgagcgatgttctgc

SEQ ID NO: 537311 - DNA, 75 bp, synthetic construct
  source 1..75: mol_type = other DNA
gcttatgcttccgaaatcaaccggctgaaggcgctggttgcgaaactgcaacgtatgcagttcggtaaaagctca

SEQ ID NO: 537312 - DNA, 75 bp, synthetic construct
  source 1..75: mol_type = other DNA
acgcgaggctccgtggtattcgttgtttgacgccctgctgcatctggcgggaagtacactttcaagtgacagtgt

SEQ ID NO: 537313 - DNA, 75 bp, synthetic construct
  source 1..75: mol_type = other DNA
acgcgaggcaccgtggtacgcgttatttgacgccctgttgcaactggcaggaagccctctgtcaagtgacagtgt

SEQ ID NO: 537314 - DNA, 75 bp, synthetic construct
  source 1..75: mol_type = other DNA
tacagcaactgggcattacccagtggtcgctgcgtcgccctggcgcgttgcagggagaggtagccattgcgatcc

SEQ ID NO: 537315 - DNA, 75 bp, synthetic construct
  source 1..75: mol_type = other DNA
taaacgcagtacgcgttacagcgtcacatccagggctatcagagatgaaagcgaaggagatctggaccgcattcg

SEQ ID NO: 537316 - DNA, 75 bp, synthetic construct
  source 1..75: mol_type = other DNA
gccgctggtgacgacatggcggttatttgtggtgtgaaactaaacattgttgatgatcccacatacgagcaccgg

SEQ ID NO: 537317 - DNA, 75 bp, synthetic construct
  source 1..75: mol_type = other DNA
aaggactacaccaaagacgagatcggtcagttcaccgactttatgcgtgaagagatcaatctggtgcgtccgacc

SEQ ID NO: 537318 - DNA, 75 bp, synthetic construct
  source 1..75: mol_type = other DNA
cctctcgtccgtttgagatgaaccccaaacgttcggctgagattaacgtgctcatgacacggatggcggctgaaa

SEQ ID NO: 537319 - DNA, 75 bp, synthetic construct
  source 1..75: mol_type = other DNA
ggatgtgccggtaacagccgcaatggcctcaacaacgcaggataccattatcgatgcctgcacatggcgctggca

SEQ ID NO: 537320 - DNA, 75 bp, synthetic construct
  source 1..75: mol_type = other DNA
aaagtacgaaatggacacgctgactcgcctgggattttgtggttacttcctgatggtacgcgatctgatgaatca

SEQ ID NO: 537321 - DNA, 75 bp, synthetic construct
  source 1..75: mol_type = other DNA
tgggccgccctgcgtgaaaaagcgttgaattttggcgaagctgagcaggcgctgctgacaggacacgctttccac

SEQ ID NO: 537322 - DNA, 75 bp, synthetic construct
  source 1..75: mol_type = other DNA
ccgctatatatagccaagccagtgccggtggtgccagatgctcgtccgactttaaataatggcatagtcggtttt

SEQ ID NO: 537323 - DNA, 75 bp, synthetic construct
  source 1..75: mol_type = other DNA
tatgttcaggcgtcattagatcaggtggattccgcgcgggcgctgttctacccgagctttgatatcaaagcgttt

SEQ ID NO: 537324 - DNA, 75 bp, synthetic construct
  source 1..75: mol_type = other DNA
tgagagaggaattcatcgagttaactagctttgaacctgtcacaatgtttagcttatttaaatcaataaagaaaa

SEQ ID NO: 537325 - DNA, 75 bp, synthetic construct
  source 1..75: mol_type = other DNA
cgaccacctcttcccgttccctctactgtgccaccagccgcgatatgatcaagttctccctgagcgttcggctga

SEQ ID NO: 537326 - DNA, 75 bp, synthetic construct
  source 1..75: mol_type = other DNA
ccatttcagagtggcttatttctccccaacccagcatcaccgctttgcatttcctgctcatctggtcacggcatc

SEQ ID NO: 537327 - DNA, 75 bp, synthetic construct
  source 1..75: mol_type = other DNA
ctatggccgaagcagacgctctgcgttccgctatcggtaaaaagaacatggataagatgaaagcgatcggcagcg

SEQ ID NO: 537328 - DNA, 75 bp, synthetic construct
  source 1..75: mol_type = other DNA
tgcgcatcagtacgatgaaatcagtcgtcttaatgttcaccatgctctacattcctcaggtctaatgccacagga

SEQ ID NO: 537329 - DNA, 75 bp, synthetic construct
  source 1..75: mol_type = other DNA
acattttgacaaatcgaaaatcatcatggttgataatccgcaattcgcactttcactggctatcgcagatactgt

SEQ ID NO: 537330 - DNA, 75 bp, synthetic construct
  source 1..75: mol_type = other DNA
gtttgtatggcttccattcctcatggctgatttaggatgccttgccagtggatttgttgcaaaattcttcaatga

SEQ ID NO: 537331 - DNA, 75 bp, synthetic construct
  source 1..75: mol_type = other DNA
gtcagtgcattccagttggcctatacattgggtcaaccggtaatgggattctttattgacactgttggtctgaaa

SEQ ID NO: 537332 - DNA, 75 bp, synthetic construct
  source 1..75: mol_type = other DNA
tatcactgtaatcaattatctggacagaacggcattaggtattgcggctccaacgattatggagacaaccggaat

SEQ ID NO: 537333 - DNA, 75 bp, synthetic construct
  source 1..75: mol_type = other DNA
cgcttttttccatattagcgggcgcgtcctcgattatggctgcacagtctcatcggattcgcttaattttaccgt

SEQ ID NO: 537334 - DNA, 75 bp, synthetic construct
  source 1..75: mol_type = other DNA
gaaacgtcaaccaactctccggtaattcctggtgaggtgttgtccgcaatcctgaaatttgccagagttcgtgct

SEQ ID NO: 537335 - DNA, 75 bp, synthetic construct
  source 1..75: mol_type = other DNA
tccgcaagttccggtaactccggatggttggataagctgtagtgagctaatgccgaacgacgcacagtggtgcgt

SEQ ID NO: 537336 - DNA, 75 bp, synthetic construct
  source 1..75: mol_type = other DNA
agtatccggaaaacaggttaacgaattaacaatgttggttaagcgattggccagttcgttaaaaagcgtcaataa

SEQ ID NO: 537337 - DNA, 75 bp, synthetic construct
  source 1..75: mol_type = other DNA
gacatcatttggtgccatgttagccccgcctttgattgcatggtgcattatgttccacagctggcaatttgcttt

SEQ ID NO: 537338 - DNA, 75 bp, synthetic construct
  source 1..75: mol_type = other DNA
aacatctgtaatcaacatcctgaaacaaagaaacttttggggaatcggtatttcccgctttttagctgacccggc

SEQ ID NO: 537339 - DNA, 75 bp, synthetic construct
  source 1..75: mol_type = other DNA
acggggagaggctggcggaggctatccgtcagaactgtaacatctggtatccactgaagccaggagacgtgcgtc

SEQ ID NO: 537340 - DNA, 75 bp, synthetic construct
  source 1..75: mol_type = other DNA
ttacgcggtgaaagcgcaccagagtaaagtggcgcacggtctggaagcgcaagtgcctttccacggcgcgcgggc

SEQ ID NO: 537341 - DNA, 75 bp, synthetic construct
  source 1..75: mol_type = other DNA
atttggccgtattttgtgggagcgtagtcagggtattgacgagcgcgacgttaacagcgaacgattgcgaaaatc

SEQ ID NO: 537342 - DNA, 75 bp, synthetic construct
  source 1..75: mol_type = other DNA
ggacgcggtgtacggttggtggggttgcatgtgacgttgcttgatccgcaaatggaaagacaactggtgttggga

SEQ ID NO: 537343 - DNA, 75 bp, synthetic construct
  source 1..75: mol_type = other DNA
cagcaggcggtgaatttactgccggaagaaaacgtaaattgctggtgcaactctgaaaggaaaaggccgctcaga

SEQ ID NO: 537344 - DNA, 75 bp, synthetic construct
  source 1..75: mol_type = other DNA
aacacatattttaaagaatatgaatggttggccacacgatggaaggattgtccattgaaggataaatccccgtgg

SEQ ID NO: 537345 - DNA, 75 bp, synthetic construct
  source 1..75: mol_type = other DNA
taaaacctgggatgaacgtcgcggcggacgcggtgtacggttggtggggctgcatgtgacgttgcttgatccgca

SEQ ID NO: 537346 - DNA, 75 bp, synthetic construct
  source 1..75: mol_type = other DNA
ggtgtgcggctggtggggctgcatgtgacgttgcttgacccgcaaatggaaagacaactggtgttgggattatga

SEQ ID NO: 537347 - DNA, 75 bp, synthetic construct
  source 1..75: mol_type = other DNA
gcagaacttgcaggcgcccggcgtttcgaccattaccgcagatgaaatccgcaaaaacccggttgcccgcgatgt

SEQ ID NO: 537348 - DNA, 75 bp, synthetic construct
  source 1..75: mol_type = other DNA
gctgaacatatcgcaaggtttaggcgatgacttcacgctgaaaatgggcattgcccgtgcttataaagcgccgag

SEQ ID NO: 537349 - DNA, 75 bp, synthetic construct
  source 1..75: mol_type = other DNA
cacggctcctgggatgcttatttcaatgcgccagaacataaagaggaaggtgccaccaaacgcaccaacttcagc

SEQ ID NO: 537350 - DNA, 75 bp, synthetic construct
  source 1..75: mol_type = other DNA
tcgctgccagattcgcaaatctattatctggtggatgcgtcttatcagcaggcggtgaatttactgccggaagaa

SEQ ID NO: 537351 - DNA, 75 bp, synthetic construct
  source 1..75: mol_type = other DNA
tcagcttccgcttatatggcaacctcgacaaaacccaggccgatgcgtgggatattaaccagggacatcagtccg

SEQ ID NO: 537352 - DNA, 75 bp, synthetic construct
  source 1..75: mol_type = other DNA
ccagcggtcagcgcggcaacaaccgccagattgatattcgcggaatgggtccagaaaacaccctgattttgattg

SEQ ID NO: 537353 - DNA, 75 bp, synthetic construct
  source 1..75: mol_type = other DNA
cgtttttttattccttaggtattcgcctggatgcctcaaccattgaaacacttaatggtctgaaaggtattggcg

SEQ ID NO: 537354 - DNA, 75 bp, synthetic construct
  source 1..75: mol_type = other DNA
gcatctgcgtttcgctcagcgactgtatctgaaaaaacaccaggcaggatttttattcggcaaaacgacggtatg

SEQ ID NO: 537355 - DNA, 75 bp, synthetic construct
  source 1..75: mol_type = other DNA
cttaaattctggctggatggtgtaaatcgaaaggaattgctccgcttaacgctgaagcaagcagcaggagatgaa

SEQ ID NO: 537356 - DNA, 75 bp, synthetic construct
  source 1..75: mol_type = other DNA
agaggcgttactgaaccgccccggttttcctggagagtgttttatctgtgaactcaggctgccagatcatcgttt

SEQ ID NO: 537357 - DNA, 75 bp, synthetic construct
  source 1..75: mol_type = other DNA
cagcgcgccgccgacgccgcctacagacgtggattaaccagccgcttacaggcaaccgaagcccagttgccggta

SEQ ID NO: 537358 - DNA, 75 bp, synthetic construct
  source 1..75: mol_type = other DNA
aacgcagtcgcaagctgatttgttagatgccggttcacaattacaggttgcggcgttagggatgcttaaccgcca

SEQ ID NO: 537359 - DNA, 75 bp, synthetic construct
  source 1..75: mol_type = other DNA
gatgccggttcacaattacaggtcgcagcgttagggatgctcaaccgccaacgcgtctcggcgaacggcttttta

SEQ ID NO: 537360 - DNA, 75 bp, synthetic construct
  source 1..75: mol_type = other DNA
tgtgtctaatgtccgcggtggtggtaggcgcaattatggtgcccgttgctggttggctgacagaccgcttcggca

SEQ ID NO: 537361 - DNA, 75 bp, synthetic construct
  source 1..75: mol_type = other DNA
ccaactccatccgtactctgtccgtgaaagaagtgaagcgtgggatgcgcctggcacgcctggctcaaaccgacg

SEQ ID NO: 537362 - DNA, 75 bp, synthetic construct
  source 1..75: mol_type = other DNA
agcgtaaagtcgatgcgctggcggctgggttgttatccgttgcagcatttatgaccgtcaccccatatagtgtcg

SEQ ID NO: 537363 - DNA, 75 bp, synthetic construct
  source 1..75: mol_type = other DNA
caacaggtttcttattacgacaccttaagatcgcttgatcctgaaaataaagaggcgttacagatttcccgtttc

SEQ ID NO: 537364 - DNA, 75 bp, synthetic construct
  source 1..75: mol_type = other DNA
aggcgagcgagcgtttatttattgcggttgaggaagatgatgttattgatgagtgggtcagtttaccatcgacaa

SEQ ID NO: 537365 - DNA, 75 bp, synthetic construct
  source 1..75: mol_type = other DNA
agcgtcgcccgcgccaggtaaccaggttagcgaattaacaatgtgggttaagcgtctggctcactccttaaagta

SEQ ID NO: 537366 - DNA, 75 bp, synthetic construct
  source 1..75: mol_type = other DNA
ttattcctgccgactatggggaacaggttcaccgtgtaggggcaaggttcgccattctggaggctgctttactgc

SEQ ID NO: 537367 - DNA, 75 bp, synthetic construct
  source 1..75: mol_type = other DNA
tatcgcgtaaaaggaactactgaaagctggcgcgagaatgttgcaaaattggcatataaaaacccgtttcagatg

SEQ ID NO: 537368 - DNA, 75 bp, synthetic construct
  source 1..75: mol_type = other DNA
atcgcggtctataccttaaaggatatgccgaaggacaaaagaaaacttgccagaccgattttacttatgcccggg

SEQ ID NO: 537369 - DNA, 75 bp, synthetic construct
  source 1..75: mol_type = other DNA
tagctttatagggataattattactgactctttgatattcagtgtttccttaaaagctgaagaagaactaaaagt

SEQ ID NO: 537370 - DNA, 75 bp, synthetic construct
  source 1..75: mol_type = other DNA
tcagcgtgtcggcaaaatggtgctcaatcgcaacccggataacttctttgctgaaaacgaacaggcggctttcca

SEQ ID NO: 537371 - DNA, 75 bp, synthetic construct
  source 1..75: mol_type = other DNA
atggctgattttggttcaactaaatacagcgtcagttttgaagaatggcatgaactgttaatggactatgcagag

SEQ ID NO: 537372 - DNA, 75 bp, synthetic construct
  source 1..75: mol_type = other DNA
ggggcaaaggacggcggcaacagagagctgaaaaactggcgggccgttgctatcagcaccggagaggtggacatt

SEQ ID NO: 537373 - DNA, 75 bp, synthetic construct
  source 1..75: mol_type = other DNA
ggctaaggacacggtaagggcgtgccgtgaacggtggcgcaacctgataccggatagctacggcgaacaggttca

SEQ ID NO: 537374 - DNA, 75 bp, synthetic construct
  source 1..75: mol_type = other DNA
acgcagtttcacgaatacagcaccggaaaggcgcacgcagacgcgttaaaagatgcctggacagaaaatcacggg

SEQ ID NO: 537375 - DNA, 75 bp, synthetic construct
  source 1..75: mol_type = other DNA
ctgcaacaatgttgaaaatgccaaccaactacatgaagcatggcaaaaaggggcagatgaaaatgccagcacgat

SEQ ID NO: 537376 - DNA, 75 bp, synthetic construct
  source 1..75: mol_type = other DNA
gaaaataccagccaactgcatgaagtatggcaaaaaggggctgatgaaaatgccagcacaatacgattaaattaa

SEQ ID NO: 537377 - DNA, 75 bp, synthetic construct
  source 1..75: mol_type = other DNA
tttaatgcctgggtgaaggagttcggcacgggtaacagggagtttaaacagatggttgaacaggcagaggctttt

SEQ ID NO: 537378 - DNA, 75 bp, synthetic construct
  source 1..75: mol_type = other DNA
aaagagagttttatatgacaatgatataagaaaattcgatattgtcacatctttaaacgccaaggaagctgtgga

SEQ ID NO: 537379 - DNA, 75 bp, synthetic construct
  source 1..75: mol_type = other DNA
ttctttgatgcccttaaacaagctgaacctgctggcgaggcgctcccaacatttgatgatactgagcttgaccct

SEQ ID NO: 537380 - DNA, 75 bp, synthetic construct
  source 1..75: mol_type = other DNA
ggtcggagattatcgtaagcttttatcagtgggtgctgtcgaggtaaaagacatgcttgatgggggcgaacttac

SEQ ID NO: 537381 - DNA, 75 bp, synthetic construct
  source 1..75: mol_type = other DNA
taaaatatcccgtgatatgcaggatgctatgtcgggagagcgagtgaacctggacgagttttattcgcgctccag

SEQ ID NO: 537382 - DNA, 75 bp, synthetic construct
  source 1..75: mol_type = other DNA
ccgattggtgatctcgtatcgaagacattctatgacaggaagcttctgaatggagaacgggcaattccggatgtc

SEQ ID NO: 537383 - DNA, 75 bp, synthetic construct
  source 1..75: mol_type = other DNA
catcgggcccaccaccttggagaccgtggaacaagtatttacaaccgaagtgaagctgacgagattatttctgta

SEQ ID NO: 537384 - DNA, 75 bp, synthetic construct
  source 1..75: mol_type = other DNA
aatgatgaaaaaatcgacctcattgataagtttgtcgccgccgttgagcacttacacagtctgggggtttctcac

SEQ ID NO: 537385 - DNA, 75 bp, synthetic construct
  source 1..75: mol_type = other DNA
ctggattatcaggagtggtgcgcggcgcatccgggcgaacgtttcccggtttctgtggcgctgggtgctgatccc

SEQ ID NO: 537386 - DNA, 75 bp, synthetic construct
  source 1..75: mol_type = other DNA
attacaatatcacttgctaatgtcctattggtgtttatatcttcaaatatcatcttcggcaggctgtttttcagc

SEQ ID NO: 537387 - DNA, 75 bp, synthetic construct
  source 1..75: mol_type = other DNA
atggaaaaattcattacagttagtaaagttctttctttttcaaagaatgcattcctctatgtcagcgatacacct

SEQ ID NO: 537388 - DNA, 75 bp, synthetic construct
  source 1..75: mol_type = other DNA
caggagtatgggattaacttggacaatggcgtgaaggtctcagcagcaaaagacattctgatttccaagctatgt

SEQ ID NO: 537389 - DNA, 75 bp, synthetic construct
  source 1..75: mol_type = other DNA
agcatttctgaaagaaccagagccgccaaaaggttttcgcgatctgtttgataagctgccgcagtttaagcaggt

SEQ ID NO: 537390 - DNA, 75 bp, synthetic construct
  source 1..75: mol_type = other DNA
gccacgattctcggtgcagtcacccccgttccggatacgctttcagagtatgcgtttgccggattgctacgcggc

SEQ ID NO: 537391 - DNA, 75 bp, synthetic construct
  source 1..75: mol_type = other DNA
tggtacggtacagcgttaggtatcgccaacgaggcagaggcacacaacgacgggctgttacccctggatgaaata

SEQ ID NO: 537392 - DNA, 75 bp, synthetic construct
  source 1..75: mol_type = other DNA
gtttattaaagatatgcgtgacccacgggatatcaataatgaacaaaataaacgggcactggctgctatattctt

SEQ ID NO: 537393 - DNA, 75 bp, synthetic construct
  source 1..75: mol_type = other DNA
gtttataaaagatatgcgtgatccacgggatatcaataacgaacaaaataaacgagcactggctgccatattctt

SEQ ID NO: 537394 - DNA, 75 bp, synthetic construct
  source 1..75: mol_type = other DNA
cctgaatggacttaatcacattgcggaattaagagcgaaagtttttggtcttaatattgagtcagagcttgagcg

SEQ ID NO: 537395 - DNA, 75 bp, synthetic construct
  source 1..75: mol_type = other DNA
ctgctctgctcggcagggtggaaaacggccgactgctggacactgccggcagagcgctttccgtcacacttccgt

SEQ ID NO: 537396 - DNA, 75 bp, synthetic construct
  source 1..75: mol_type = other DNA
ttacgtgaggttgaaacacttgctagatatgttgaaatataccaactactatcaggcgacaaaattagcaacaaa

SEQ ID NO: 537397 - DNA, 75 bp, synthetic construct
  source 1..75: mol_type = other DNA
ctgacgctgatgctgcaggcgatgggacaagctgacgcgggccgcgtgatgttaaagatggaaaacagcttgcgc

SEQ ID NO: 537398 - DNA, 75 bp, synthetic construct
  source 1..75: mol_type = other DNA
gctgatgccagacgcatccaccgcagtgattgacccgttcttcgccgactctaccctgattatccgttgcgacat

SEQ ID NO: 537399 - DNA, 75 bp, synthetic construct
  source 1..75: mol_type = other DNA
ctttattgccctggctttctttgacattattggcgccattgcgctgtggacgcttatcaaagttaagacgaagaa

SEQ ID NO: 537400 - DNA, 75 bp, synthetic construct
  source 1..75: mol_type = other DNA
caactattatggagacaaccggaataaccaaagagcaatattcatggattgtcagtgcattccagttggcctata

SEQ ID NO: 537401 - DNA, 75 bp, synthetic construct
  source 1..75: mol_type = other DNA
ggggcgattgggtctcaaggggaaaaactctggactgtttttcccatttatcaatctgattgaagctaaaaggcc

SEQ ID NO: 537402 - DNA, 75 bp, synthetic construct
  source 1..75: mol_type = other DNA
agggacgttaacaataaacagaatgagagggcactggcagccatattttatatggcaaaaattccggcagaacgt

SEQ ID NO: 537403 - DNA, 75 bp, synthetic construct
  source 1..75: mol_type = other DNA
gaattaagagcgaaagtttttggtcttaatattgagtcagagcttgagcagtttattaaagatatgcgtgatcca

SEQ ID NO: 537404 - DNA, 75 bp, synthetic construct
  source 1..75: mol_type = other DNA
cgtcacttctcaagctttgcttttgaatggtatagagatcatcaagatgatccggtattagtaaactcaatggct

SEQ ID NO: 537405 - DNA, 75 bp, synthetic construct
  source 1..75: mol_type = other DNA
cggagagctacggcgagcaggtccaccgcgtgggtgagcgtttcgccatactggaggccgcgcttgtgctttccg

SEQ ID NO: 537406 - DNA, 75 bp, synthetic construct
  source 1..75: mol_type = other DNA
ggcgtgccgcgatgccatacagcataattttaatgcctgggtgaaggagttcggcacgggtaacagggaatttaa

SEQ ID NO: 537407 - DNA, 75 bp, synthetic construct
  source 1..75: mol_type = other DNA
agagccggacgcacaacggctgacctggtacggcacggcgttaggtatcgccaacgaggccgaagcacataatga

SEQ ID NO: 537408 - DNA, 75 bp, synthetic construct
  source 1..75: mol_type = other DNA
cgggcttttacccctggatgaaataggccaggccggaaacgcgcgggaggtgtccacgtcagcctatacgctgtt

SEQ ID NO: 537409 - DNA, 75 bp, synthetic construct
  source 1..75: mol_type = other DNA
gacggttcggtcattggtgattgcgaaaagccagtcctgtttaccggaaaaacggctgctgttaatggctattcc

SEQ ID NO: 537410 - DNA, 75 bp, synthetic construct
  source 1..75: mol_type = other DNA
tggtaatccgtccatgatgctgggtgtggcggtatcgttatccgcaccattaatcgggctggtgggtgctgacgg

SEQ ID NO: 537411 - DNA, 75 bp, synthetic construct
  source 1..75: mol_type = other DNA
tggtacggcacagcgttaggtatcgctaacgaggcagaggcgcacaacgacgggctgttacccctggatgaaata

SEQ ID NO: 537412 - DNA, 75 bp, synthetic construct
  source 1..75: mol_type = other DNA
cggttgtattaatatcggacatgtatctacctaaagaagttatttcgaatatgctggctcacgtaagtcctttat

SEQ ID NO: 537413 - DNA, 75 bp, synthetic construct
  source 1..75: mol_type = other DNA
atccattgataatgatattagaataaattatagcactaataatatatcactcattcctgtcgaggctatatttgc

SEQ ID NO: 537414 - DNA, 75 bp, synthetic construct
  source 1..75: mol_type = other DNA
gataccttccttacccaaacagtgatgaacgtgatttaccgattaaagaccttgccggatacagaaaggggagta

SEQ ID NO: 537415 - DNA, 75 bp, synthetic construct
  source 1..75: mol_type = other DNA
taagcagtcaggcgaaattatccggcctgagacgtggttatgttccccgcttgaactactgggaacggggacaat

SEQ ID NO: 537416 - DNA, 75 bp, synthetic construct
  source 1..75: mol_type = other DNA
aatacagcaccggaaaggcgcacgcagacgcgttaaaagatgcctggacagaaaatcacggggcggcggggcgtg

SEQ ID NO: 537417 - DNA, 75 bp, synthetic construct
  source 1..75: mol_type = other DNA
tgttggaacaaccgaattacatgttgcacgcccttttagcgatataattaatcgaaaatatcttcttttaaactt

SEQ ID NO: 537418 - DNA, 75 bp, synthetic construct
  source 1..75: mol_type = other DNA
gcaatccaaaaatagaacaacgacaacatatccagaatggtatggagctgttaataaggctctcgaagctatcaa

SEQ ID NO: 537419 - DNA, 75 bp, synthetic construct
  source 1..75: mol_type = other DNA
tgagattaaaatcatccaggcagactcacttgaaaatggcgcaggctggcgttcgtatattgcaatctgtgagga

SEQ ID NO: 537420 - DNA, 75 bp, synthetic construct
  source 1..75: mol_type = other DNA
tgcaaacgctgaatttattgctgcttttaatccaaatgttgcgctggcactactggatgaaattaagcggctgga

SEQ ID NO: 537421 - DNA, 75 bp, synthetic construct
  source 1..75: mol_type = other DNA
gcagagcgaatcaaccgggtactttccaccaatgtgacgggatattttctctgttgccgcgaggcggtaaaacgc

SEQ ID NO: 537422 - DNA, 75 bp, synthetic construct
  source 1..75: mol_type = other DNA
aaaactggaatgaccattatcctgatgaagtatcgaaagcacagtcagcaatcagcaaagcccttggagatgagt

SEQ ID NO: 537423 - DNA, 75 bp, synthetic construct
  source 1..75: mol_type = other DNA
gcgatgctaaacaaggcatacaagcaaaactggaatgaccattatcctgatgaagtatcgaaagcacagtcagca

SEQ ID NO: 537424 - DNA, 75 bp, synthetic construct
  source 1..75: mol_type = other DNA
atctattcaggtggctgttattcagcttgccaatacctgcggcgcggcaattggtggttatgcactggataacat

SEQ ID NO: 537425 - DNA, 75 bp, synthetic construct
  source 1..75: mol_type = other DNA
agttttggtatcgccagctttattggtacgtcgctttcgtcgttcattcttaaacgttcggtaaaactggcctta

SEQ ID NO: 537426 - DNA, 75 bp, synthetic construct
  source 1..75: mol_type = other DNA
tgagttttggtctcgccagctttgtcggtacatcgctttcgtcgatcattcttaaacgttcggtaaaactggcct

SEQ ID NO: 537427 - DNA, 75 bp, synthetic construct
  source 1..75: mol_type = other DNA
tataaggatttcaaagcggcgcagagtgattgctgtatgcaccctggttcagacctggtagggaaggttgaaatg

SEQ ID NO: 537428 - DNA, 75 bp, synthetic construct
  source 1..75: mol_type = other DNA
tttttgcatatcaattatttgcatgatgaagggaatctcatgtcagttctgtatatccaaattcgtcgtaatcaa

SEQ ID NO: 537429 - DNA, 75 bp, synthetic construct
  source 1..75: mol_type = other DNA
ttgaagacatgagcacgatcgcggaatacatgcgcggcgatgatcctgatcgccctgtagtcattgatatgaaaa

SEQ ID NO: 537430 - DNA, 75 bp, synthetic construct
  source 1..75: mol_type = other DNA
ggcggaagaggtcgcgcaggccatcgtctggctgttaagtgataaagcctcttatgtcacgggaagttttatcga

SEQ ID NO: 537431 - DNA, 75 bp, synthetic construct
  source 1..75: mol_type = other DNA
gcccctgaaccggattacctctgggcagcggcggtctgtgccacctgtgcaccctctctgggagcagatcctgcg

SEQ ID NO: 537432 - DNA, 75 bp, synthetic construct
  source 1..75: mol_type = other DNA
gccgtggcggctgggcttcgtgctggacgcacacgttctattggtcttgttatccccgatcttgagaacacaagt

SEQ ID NO: 537433 - DNA, 75 bp, synthetic construct
  source 1..75: mol_type = other DNA
tctggcgatagccacttttggcgataacgaactgctcgacttcttacaatgcccggtactggctgtggcccagcg

SEQ ID NO: 537434 - DNA, 75 bp, synthetic construct
  source 1..75: mol_type = other DNA
acaacatccgtactcttcgtgcacaggcaagagaatgtacgcttgaaacgctggaagaaatgctggaaaaattag

SEQ ID NO: 537435 - DNA, 75 bp, synthetic construct
  source 1..75: mol_type = other DNA
gtcagtacaactacatcgtcatgccctataaggatgcggcaaatctcaaaattctggcggatgaactgctgaaac

SEQ ID NO: 537436 - DNA, 75 bp, synthetic construct
  source 1..75: mol_type = other DNA
ttaccggtgaatgttccgtacatgatatccgtgttaattatcatgacggagaaaccacaccgggtggactgacca

SEQ ID NO: 537437 - DNA, 75 bp, synthetic construct
  source 1..75: mol_type = other DNA
atcttggcgcattgccggagctttcggtcagcttcctgcgtgagcagggcttccgtacagcctggaaggatgatc

SEQ ID NO: 537438 - DNA, 75 bp, synthetic construct
  source 1..75: mol_type = other DNA
ctgcggtgggcgatcgtttcacctggtcagaacgtaatgcgctgctgtttgacggcatctccacgtttaacgtga

SEQ ID NO: 537439 - DNA, 75 bp, synthetic construct
  source 1..75: mol_type = other DNA
ttcacccgctgcgtgctcggcatggtcgtcacgctggaagcgccgtctgccccgatttattgttcacagcgatag

SEQ ID NO: 537440 - DNA, 75 bp, synthetic construct
  source 1..75: mol_type = other DNA
gttcaccacctcgtttgctttgttgcaaggggtaatggatgtcacactgcgtcgtgacggtaagttaccttccga

SEQ ID NO: 537441 - DNA, 75 bp, synthetic construct
  source 1..75: mol_type = other DNA
agcctggacgaaccgcgtaagccaaaacctggtttaacgcgcattaaacgtaatctctatcgccgcggcgtgctc

SEQ ID NO: 537442 - DNA, 75 bp, synthetic construct
  source 1..75: mol_type = other DNA
gcccagctattcgaaaaatggctggaaacgcatccgatgccgcaggcgctgttcactacttcgtttgcgctgttg

SEQ ID NO: 537443 - DNA, 75 bp, synthetic construct
  source 1..75: mol_type = other DNA
gtcaacgtggatcactcgctcattggccgatcaggcagaaaaggctggatctattcaggtggccgttattcagct

SEQ ID NO: 537444 - DNA, 75 bp, synthetic construct
  source 1..75: mol_type = other DNA
gcgcagcagcggcagtggcatgactatcgctacacctttaagatctacattccctcgcagattgcgaccgccgcg

SEQ ID NO: 537445 - DNA, 75 bp, synthetic construct
  source 1..75: mol_type = other DNA
ctgttttgcgtagactggcaggcaactctccggtaactccggatggttggataagctgtagtgagcgaatgccgg

SEQ ID NO: 537446 - DNA, 75 bp, synthetic construct
  source 1..75: mol_type = other DNA
ccatacggaaaccatcggtaacgaccagaagataacggtggtgaagggtcagacggttcaggtcggtacaaaaaa

SEQ ID NO: 537447 - DNA, 75 bp, synthetic construct
  source 1..75: mol_type = other DNA
cgaagggtattacgattggtcgagaaacaaatggtgggcagttactgacgatgtggaagaaccggcatcgaaagt

SEQ ID NO: 537448 - DNA, 75 bp, synthetic construct
  source 1..75: mol_type = other DNA
ggcaatcctgatattgataacgccatcatcatgctcgatcgcatagatacgctggaaagttgcgatgatgaccgt

SEQ ID NO: 537449 - DNA, 75 bp, synthetic construct
  source 1..75: mol_type = other DNA
gcgcaacagcggcagtggcatgactatcgctacacctttaaggtctacattccctcgcagattgcgaccgccgcg

SEQ ID NO: 537450 - DNA, 75 bp, synthetic construct
  source 1..75: mol_type = other DNA
cctatgtacaggtgagctgggaacaagcattaaaactgattcatgaacaacacgatcgcattcgcaaagctaacg

SEQ ID NO: 537451 - DNA, 75 bp, synthetic construct
  source 1..75: mol_type = other DNA
tctttggcgataatgccacctggatcgcaccgaatatgggcaccgatgtggcactgatgttaggattgcgcatac

SEQ ID NO: 537452 - DNA, 75 bp, synthetic construct
  source 1..75: mol_type = other DNA
gggacggctgaatcccttgaattggggcggctggcgaatgtgaatccgccagagttgttacgctacgacgcccag

SEQ ID NO: 537453 - DNA, 75 bp, synthetic construct
  source 1..75: mol_type = other DNA
acggattggcggccatcagaccataaaagttgatatccgcatcattgctgccaccaaccgcgacttgcaggcaat

SEQ ID NO: 537454 - DNA, 75 bp, synthetic construct
  source 1..75: mol_type = other DNA
aactgcgcggcgctgccggaatcgttgctcgaaagtgaactgtttggtcatgaaaaaggtgcatttactggtgca

SEQ ID NO: 537455 - DNA, 75 bp, synthetic construct
  source 1..75: mol_type = other DNA
ttacggctggcgctcttctggcgtgttgcataaagcgcaaaccttactgcaacgttatatgaacctggcgggcgg

SEQ ID NO: 537456 - DNA, 75 bp, synthetic construct
  source 1..75: mol_type = other DNA
gaattaatcgagggcatggaagtttccattgatgtaagcacttgtgatgctgatttaggtaatcgctatttcggc

SEQ ID NO: 537457 - DNA, 75 bp, synthetic construct
  source 1..75: mol_type = other DNA
accaattgaatattattctaacaatgttacacaaacattatctctgttagagtcgatgatagataataatatcaa

SEQ ID NO: 537458 - DNA, 75 bp, synthetic construct
  source 1..75: mol_type = other DNA
gattgtgcagcaccgcagagtcgccctgttggagttgatccaaaagcatattcgccagcgcgatctgatggggct

SEQ ID NO: 537459 - DNA, 75 bp, synthetic construct
  source 1..75: mol_type = other DNA
ctgtgacgggagcggacgtattgaaattaaagtgccagtcacgtggtcgaccataaaatctatctgggataaagg

SEQ ID NO: 537460 - DNA, 75 bp, synthetic construct
  source 1..75: mol_type = other DNA
gtttattacccagacaattcaggccactgaccgccgctacgttgttattttgtttgccgttttgctgacgctctc

SEQ ID NO: 537461 - DNA, 75 bp, synthetic construct
  source 1..75: mol_type = other DNA
ctattcgcgtttttggtacggtggggttcatcattgcgatgtgggcagtaagcttactgcatctggaattgagca

SEQ ID NO: 537462 - DNA, 75 bp, synthetic construct
  source 1..75: mol_type = other DNA
ggatacgatgttttgggtgatgttagtcaatgcaatggcatttatgccgaccatcgcgttatcaaacagcgtctc

SEQ ID NO: 537463 - DNA, 75 bp, synthetic construct
  source 1..75: mol_type = other DNA
gtcgtattcagttttctgtttcacttccagcagcatgtggtggagataaatattttattgatggtgtatttcaac

SEQ ID NO: 537464 - DNA, 75 bp, synthetic construct
  source 1..75: mol_type = other DNA
agtatcccagcgagcaatatcttaatgagctggtcaccaacatggagtttgctgcaagggcaccagttgaagtcg

SEQ ID NO: 537465 - DNA, 75 bp, synthetic construct
  source 1..75: mol_type = other DNA
cacgtggtcgaccataaaatctatctgggataaaggtatcgagtattttgcagcaaaaccatcacaagaggtgaa

SEQ ID NO: 537466 - DNA, 75 bp, synthetic construct
  source 1..75: mol_type = other DNA
gaacgagcagcctatgaattatttatggagaagcgtttcggggaatctgtagatcgtcgcagagcaaaaaatggc

SEQ ID NO: 537467 - DNA, 75 bp, synthetic construct
  source 1..75: mol_type = other DNA
gccagtcacgtggtcgaccataaaatctatctgggataaaggtatcgagtattttgcagcaaaaccatcacaaga

SEQ ID NO: 537468 - DNA, 75 bp, synthetic construct
  source 1..75: mol_type = other DNA
tataagctgcctggaatgctttggcgatgatgattgcgatacctgtgacgggagcggacgtattgaaattaaagt

SEQ ID NO: 537469 - DNA, 75 bp, synthetic construct
  source 1..75: mol_type = other DNA
atgcaaaaatataaaatcaatcgttcaagacatgcagccttccttttgcatgttcatcttgtctttgtaacaaaa

SEQ ID NO: 537470 - DNA, 75 bp, synthetic construct
  source 1..75: mol_type = other DNA
acttgaggtctggcccggaagtgaattccagtcggaaacccagcagacccgcataagtcttcgttcactgattaa

SEQ ID NO: 537471 - DNA, 75 bp, synthetic construct
  source 1..75: mol_type = other DNA
cagaaggatacaaagctatctcagatctgtcacatcactattttcgtgcagaaggctctagggaaggtgcgaaca

SEQ ID NO: 537472 - DNA, 75 bp, synthetic construct
  source 1..75: mol_type = other DNA
ccgaagcatggcgcgatgactatgaagctggaaaaacgcctgtcgaagcatattgcgatgagtggggtgatgaat

SEQ ID NO: 537473 - DNA, 75 bp, synthetic construct
  source 1..75: mol_type = other DNA
cgtgaatgctgccataaaaaaaatgaatatcacccgggtgattattgcacacagagaaactacgttgagaactgt

SEQ ID NO: 537474 - DNA, 75 bp, synthetic construct
  source 1..75: mol_type = other DNA
tctcggcccgtggagcaaaccttgcaggaatcaatggaatagcggagcagctggggatggtcacccgggctcttt

SEQ ID NO: 537475 - DNA, 75 bp, synthetic construct
  source 1..75: mol_type = other DNA
cccaaaaagaggcaagcgaaatttttgggggaggtgtaaatgcgttttcgcgttacgaaaaaggcaatgcccaac

SEQ ID NO: 537476 - DNA, 75 bp, synthetic construct
  source 1..75: mol_type = other DNA
tattgataaggttgttgttcaacttgagctgaatggtgaggcaacatttgaatgtgttctttattcagagggcga

SEQ ID NO: 537477 - DNA, 75 bp, synthetic construct
  source 1..75: mol_type = other DNA
accaccagaaaaatggcggcgcgttgctgtgaaagatattgatgagttcgttacttgctgtttcaccgaacaggg

SEQ ID NO: 537478 - DNA, 75 bp, synthetic construct
  source 1..75: mol_type = other DNA
aatgaaagtggtgagtacgtatttatcaataataatcctaatatggaagttgatgacccatttgaaagcacagag

SEQ ID NO: 537479 - DNA, 75 bp, synthetic construct
  source 1..75: mol_type = other DNA
agaaaccttgctgcttacctgtcaagatcaagtggtatcgaagcactgttccaagatgtgaatgcattacaaaaa

SEQ ID NO: 537480 - DNA, 75 bp, synthetic construct
  source 1..75: mol_type = other DNA
tgggggaggtgtaaatgcgttttcgcgttacgaaaaaggcaattgtagattcaatctgtcaatgcaacacccctt

SEQ ID NO: 537481 - DNA, 75 bp, synthetic construct
  source 1..75: mol_type = other DNA
gaaaatatttaggtcaggcggcgaagctgatgattggtatgcctgattacgacaactatgtcgaacatatgcggg

SEQ ID NO: 537482 - DNA, 75 bp, synthetic construct
  source 1..75: mol_type = other DNA
ctttcgcctgatgcgctattccatggcggtgatgcagcgccatatcgagcatgataaacgccggccgctaccgct

SEQ ID NO: 537483 - DNA, 75 bp, synthetic construct
  source 1..75: mol_type = other DNA
cgacagcttaaaactggaatccgccagctttgtcgatgaaaaattgcgggcgctacactccgatattctgtggtc

SEQ ID NO: 537484 - DNA, 75 bp, synthetic construct
  source 1..75: mol_type = other DNA
tcttcccgcgggactctatccattactggcactaagcggcggtatcctgatttttgcgttaacgacggcgctgga

SEQ ID NO: 537485 - DNA, 75 bp, synthetic construct
  source 1..75: mol_type = other DNA
acttacccgtcgaatgccacaacacagggagcgaataatgacgattgcagagcgaattcataatgatggatggct

SEQ ID NO: 537486 - DNA, 75 bp, synthetic construct
  source 1..75: mol_type = other DNA
gattgtgcagcatcgcagagtcgccctgctggagttgatccaaaagcatattcgccagcgcgatctgatggggct

SEQ ID NO: 537487 - DNA, 75 bp, synthetic construct
  source 1..75: mol_type = other DNA
gatacaaaagattaccggacattcatcagagcaaatacaggcattaggtcagtctttgcctgacagttaccgcga

SEQ ID NO: 537488 - DNA, 75 bp, synthetic construct
  source 1..75: mol_type = other DNA
ttttctttttctgccatgagaagtgagcgcagagagggattatcttgcctgactgaactggcgattaagtttccg

SEQ ID NO: 537489 - DNA, 75 bp, synthetic construct
  source 1..75: mol_type = other DNA
gaaatgtcgcactcatagagaagtgcgtcatgagtagtatcggtattgaaagcttattcagaaagtttgcgggta

SEQ ID NO: 537490 - DNA, 75 bp, synthetic construct
  source 1..75: mol_type = other DNA
tgcagatgatgatatcgaagcacgattgataggatcattgtcgccatcgcctttagatggagtgctaagcaaagc

SEQ ID NO: 537491 - DNA, 75 bp, synthetic construct
  source 1..75: mol_type = other DNA
atttgcatatgccaaaagagacgcgtattgcggcactgtttcgtgataaccagttgcttcatcccaccggcagca

SEQ ID NO: 537492 - DNA, 75 bp, synthetic construct
  source 1..75: mol_type = other DNA
gcagcaatttggcctcgggattgtcatcgggcttggcggtggttatttactgctgcaaatgattaatcgcatcgc

SEQ ID NO: 537493 - DNA, 75 bp, synthetic construct
  source 1..75: mol_type = other DNA
acggagagagaaatattgcgctttatgtcgcgtggctactcaatgacacaaattgccgagcagcttaaacgcaat

SEQ ID NO: 537494 - DNA, 75 bp, synthetic construct
  source 1..75: mol_type = other DNA
aagcgcgaaatcgttgttgatgctgattatgactatgaccggattgtctgggttgatgaagatggcaatgaagca

SEQ ID NO: 537495 - DNA, 75 bp, synthetic construct
  source 1..75: mol_type = other DNA
aaaaaatataaccatgccacttttcaaaacaaaagacaggatatcttacgcattcaatggacaaagaacatcccc

SEQ ID NO: 537496 - DNA, 75 bp, synthetic construct
  source 1..75: mol_type = other DNA
gttatagcacgatttactctatgtttaacaagtacattactaaccatgtcaccactgttaatgcttaatggagca

SEQ ID NO: 537497 - DNA, 75 bp, synthetic construct
  source 1..75: mol_type = other DNA
taataattccttttctactgaattcagagcaacagtaatttcactcctcaaaggccgttacgctgattttggacc

SEQ ID NO: 537498 - DNA, 75 bp, synthetic construct
  source 1..75: mol_type = other DNA
atagcagaaagactgggaaagagtaaacaagttgtttataaaaccataaaaagaggagcggttgataagataata

SEQ ID NO: 537499 - DNA, 75 bp, synthetic construct
  source 1..75: mol_type = other DNA
gtgatggcgaacgaatttgcgccggagctggagctgccgacggttcatatcgacaacctgaccgcggcattcgat

SEQ ID NO: 537500 - DNA, 75 bp, synthetic construct
  source 1..75: mol_type = other DNA
tgggttcaaggctgccgtttgatgccagcattgaggaacagcgtaatctgccgccgatggtgatggcgaacgaat

SEQ ID NO: 537501 - DNA, 75 bp, synthetic construct
  source 1..75: mol_type = other DNA
gcgcatgaaagaaaatgccgtggagggtgccggaggactggatgttccggtcaggatcacccgtgcatctcaggc

SEQ ID NO: 537502 - DNA, 75 bp, synthetic construct
  source 1..75: mol_type = other DNA
accggtgaatgttccgtacatgatatccgtgttaattatcatgacggagaaaccacaccgggtggactgaccatt

SEQ ID NO: 537503 - DNA, 75 bp, synthetic construct
  source 1..75: mol_type = other DNA
ctggaagaaatgctggaaaaattagaagttgttgttaacgaacgtcgcgaagaagaaagcgcggctgctgctgaa

SEQ ID NO: 537504 - DNA, 75 bp, synthetic construct
  source 1..75: mol_type = other DNA
aaagtgccgtttgatgagggggtgcggctcgctgccgaatgggtaacgcaacttggtggggagtctcgtaaagat

SEQ ID NO: 537505 - DNA, 75 bp, synthetic construct
  source 1..75: mol_type = other DNA
ctatctggatgtgcttcaaaagaacaaagttccctttgatgaaggtgtgcagctcgctgccgaatgggtgaagca

SEQ ID NO: 537506 - DNA, 75 bp, synthetic construct
  source 1..75: mol_type = other DNA
tgggcagccaccctgtgcgccacctgtgcgccgtctttatcagtcgatccggcgcgacctctgcaatctctggca

SEQ ID NO: 537507 - DNA, 75 bp, synthetic construct
  source 1..75: mol_type = other DNA
aataacaggttcggttatagcacgatttactctatgtttaacaagtacattactaaccatgtcaccactgttaat

SEQ ID NO: 537508 - DNA, 75 bp, synthetic construct
  source 1..75: mol_type = other DNA
acgacaggcacggtgacttttgcagatacttaccctgcggactataccggggatggtacgattgggacttcaaaa

SEQ ID NO: 537509 - DNA, 75 bp, synthetic construct
  source 1..75: mol_type = other DNA
atgaatgtattattgcttacaggtgctactggatttcttggtggcgcggtcttggataagctgctgaataactgt

SEQ ID NO: 537510 - DNA, 75 bp, synthetic construct
  source 1..75: mol_type = other DNA
cctggataagctgctggataactgtaataatataaatttgctacttttagtacgagcacctactccacaagcggg

SEQ ID NO: 537511 - DNA, 75 bp, synthetic construct
  source 1..75: mol_type = other DNA
ttcaaatttctggccggaccagaaaccgtgctggcactgctggatgaacgggaaagaaaccagcaatacataaaa

SEQ ID NO: 537512 - DNA, 75 bp, synthetic construct
  source 1..75: mol_type = other DNA
actttcgggagccaccagaaaaatggcggcgcgttgctgtgaaagatattgatgaattcgttacctgctgtttca

SEQ ID NO: 537513 - DNA, 75 bp, synthetic construct
  source 1..75: mol_type = other DNA
catattcttcgtgaatatctcggcgaacagcctgtaggttctgcatttgtcattgaaacggggcataatcatcac

SEQ ID NO: 537514 - DNA, 75 bp, synthetic construct
  source 1..75: mol_type = other DNA
aaagttcactgactatattgatgtttgtatagcaaccaccaaacatcaatcaattccacaacaaatggaagtaga

SEQ ID NO: 537515 - DNA, 75 bp, synthetic construct
  source 1..75: mol_type = other DNA
gtagctctgggtatgaaggtgtttgtaattcatgttacagtaacagtcgttactatctcgaaggtgcaaaatgta

SEQ ID NO: 537516 - DNA, 75 bp, synthetic construct
  source 1..75: mol_type = other DNA
acaggtctatatccacgcgcagaagaacatggacacggaggtacttaacgaccggacgacggatgtgaaacatga

SEQ ID NO: 537517 - DNA, 75 bp, synthetic construct
  source 1..75: mol_type = other DNA
cgaaggtggctggctactacccggcctgattgagctgcataccgacaacctcgataaattcttcaccccgcgccg

SEQ ID NO: 537518 - DNA, 75 bp, synthetic construct
  source 1..75: mol_type = other DNA
gctagataaactgatgaacaatcacaaaaatatagaattgctacttttagttcgagccgattcgcaacatacagg

SEQ ID NO: 537519 - DNA, 75 bp, synthetic construct
  source 1..75: mol_type = other DNA
aaagtagtgtaacatttgctgatattgataaggctatagccaaatcattacatagacctccggttggtgatgagt

SEQ ID NO: 537520 - DNA, 75 bp, synthetic construct
  source 1..75: mol_type = other DNA
cacgttgcagaaggtgatggagctgccgcaagtgcaggaggcccgcgccgagctagcgaggcaggcgcaaagaaa

SEQ ID NO: 537521 - DNA, 75 bp, synthetic construct
  source 1..75: mol_type = other DNA
ggaataccgggaggcaatagaccatgaacgcaatcgacagagtgaagaaatccagaggcatcaacgagttagcgg

SEQ ID NO: 537522 - DNA, 75 bp, synthetic construct
  source 1..75: mol_type = other DNA
gcaggacgcacaggtaaaggttatggctattttgaaggcgatacggataactatcctatggaacgaatggctggg

SEQ ID NO: 537523 - DNA, 75 bp, synthetic construct
  source 1..75: mol_type = other DNA
cgaaaggcgttcgaccggagacgttgcctcggcaggttaacaccgtctcgttgccggacagtgcgatcccgccag

SEQ ID NO: 537524 - DNA, 75 bp, synthetic construct
  source 1..75: mol_type = other DNA
aggttattacgccggataagccggaaatattcaggcttgctgagattctgaatattgatccagatgccgcattag

SEQ ID NO: 537525 - DNA, 75 bp, synthetic construct
  source 1..75: mol_type = other DNA
ccggggcatccgcaccgagcgggccgacacagccctatccatcgacacggccaacggccagatcatcgacctaca

SEQ ID NO: 537526 - DNA, 75 bp, synthetic construct
  source 1..75: mol_type = other DNA
gtattttcctgtctaataagaagtggtatctttgccaaatttttcataaagataataatcatcgcgcaaacatgt

SEQ ID NO: 537527 - DNA, 75 bp, synthetic construct
  source 1..75: mol_type = other DNA
gataaactagagcaatcatcttcatcagatacaatgatgccgccaacacacttgttttctgatataggacgaatt

SEQ ID NO: 537528 - DNA, 75 bp, synthetic construct
  source 1..75: mol_type = other DNA
agcgacgacagactgggtaaagccgacaatcaaccagtacgcggcaaccaggctgccgaatccaatcgcggtaat

SEQ ID NO: 537529 - DNA, 75 bp, synthetic construct
  source 1..75: mol_type = other DNA
attgtcgagcagggcattaacttctctggtgaagtgtcgctggttggcgcgcgcggttttgatggcagcaccgtg

SEQ ID NO: 537530 - DNA, 75 bp, synthetic construct
  source 1..75: mol_type = other DNA
acgggcagttaggccgtatgctgcgtcaggcaggcgaaccgttaggcattgctgtctggccggtcgggctggacg

SEQ ID NO: 537531 - DNA, 75 bp, synthetic construct
  source 1..75: mol_type = other DNA
atatctaccaaaaaaatgctttcttgcacgattttggaaactactgggttctatatatcgagcttagtggtgatt

SEQ ID NO: 537532 - DNA, 75 bp, synthetic construct
  source 1..75: mol_type = other DNA
atgaatctgaaaaactttcttcacaagataagatcaattatagagaagaacaaagcatcgcctgcatggttactg

SEQ ID NO: 537533 - DNA, 75 bp, synthetic construct
  source 1..75: mol_type = other DNA
ggaagatataaatactgatctccccctaaatccccctcgccaaaaacgagcgtctaaaaaattcgagccggaggc

SEQ ID NO: 537534 - DNA, 75 bp, synthetic construct
  source 1..75: mol_type = other DNA
aatgaataccagggcttgttcgcgccgaaaggtgttcgacctgagacgttactccgacaggttaacaccgtctcg

SEQ ID NO: 537535 - DNA, 75 bp, synthetic construct
  source 1..75: mol_type = other DNA
ggaaggttattcgcttctgggcatgggcagatcaacaaatgatagacggtaatgcagattgtaacgctcgcggcg

SEQ ID NO: 537536 - DNA, 75 bp, synthetic construct
  source 1..75: mol_type = other DNA
ttgaacggtgccgcatggtaagtcggggggattatctaatcagtgccggaattagaaaaaacagccctgacggca

SEQ ID NO: 537537 - DNA, 75 bp, synthetic construct
  source 1..75: mol_type = other DNA
gttggtttacgacttggtgcagtagttgaacggtgccgcatggtaagtagaggggattatctaatcagtgccggg

SEQ ID NO: 537538 - DNA, 75 bp, synthetic construct
  source 1..75: mol_type = other DNA
actctcctgctgccttaattgaaaagcttaaagggttcgactcatttactatggcagactggattgaacgttaca

SEQ ID NO: 537539 - DNA, 75 bp, synthetic construct
  source 1..75: mol_type = other DNA
atgatgacgtgctggactcgctggatgcggggcagccggtgatgacgccgaagctgtgcaccgcagagctgctgg

SEQ ID NO: 537540 - DNA, 75 bp, synthetic construct
  source 1..75: mol_type = other DNA
gacgctggttctgaccggcattctgccgcctgcgcgtaatgttcgctgggatatgccggaacgtaacctgctgct

SEQ ID NO: 537541 - DNA, 75 bp, synthetic construct
  source 1..75: mol_type = other DNA
atgctgatgcaatggagtattgtccaccagctggcgttacgtacaacgcttgctggcatgacatatggacagact

SEQ ID NO: 537542 - DNA, 75 bp, synthetic construct
  source 1..75: mol_type = other DNA
aatattcaggcttgctgagattctgaatattgatccagatgccgcattagggaaagtcattcgcttctgggcatg

SEQ ID NO: 537543 - DNA, 75 bp, synthetic construct
  source 1..75: mol_type = other DNA
acatgaaattcacgaagcagcacaaaaagtttttgatgattttttgaaaggatgtcacgccaaattagctacaat

SEQ ID NO: 537544 - DNA, 75 bp, synthetic construct
  source 1..75: mol_type = other DNA
accacacgaactgaagttcaagagattagtttcgatattgaaattgaagttatgtatgaaatcgaggatggtgaa

SEQ ID NO: 537545 - DNA, 75 bp, synthetic construct
  source 1..75: mol_type = other DNA
gcgctggcggcgggtacctgtcagcaactggcgcgtatcgtgctggcatcgctggaagcagagcctgttctgtat

SEQ ID NO: 537546 - DNA, 75 bp, synthetic construct
  source 1..75: mol_type = other DNA
aatccaatgctcctatcacaacacttgaaaagttgtcaaaggctttatcgatttctgttgaagagcttaaagcta

SEQ ID NO: 537547 - DNA, 75 bp, synthetic construct
  source 1..75: mol_type = other DNA
agcaggtctgatacacctcggtattcgatatgcggatgtcgaagtcatgaaaatagctggagatgcccagctttc

SEQ ID NO: 537548 - DNA, 75 bp, synthetic construct
  source 1..75: mol_type = other DNA
tgcgataatctcatcaatgaaataaaaaccgcccagcaaacccaactgcatcttgcagacgcactcactgacgca

SEQ ID NO: 537549 - DNA, 75 bp, synthetic construct
  source 1..75: mol_type = other DNA
tggctggagcacatcagaaccaatgccagcgcgcgcgtaatgaatgacgtgacgctgacctcccgcaacatggac

SEQ ID NO: 537550 - DNA, 75 bp, synthetic construct
  source 1..75: mol_type = other DNA
cattcttaccattccattcttcctgaagcgttttggcatcaaaaccgtcatgttgatgagtatggtagcgtggac

SEQ ID NO: 537551 - DNA, 75 bp, synthetic construct
  source 1..75: mol_type = other DNA
catggtttaagagttgactatgactcacctcgactaccatccgatgaagtcaaaagaatcagggcatctatacat

SEQ ID NO: 537552 - DNA, 75 bp, synthetic construct
  source 1..75: mol_type = other DNA
tgctaacaacagcgatttcaccgctaccaatatccacgtgacctcgcacggtacggaatttaccctgcaaacccc

SEQ ID NO: 537553 - DNA, 75 bp, synthetic construct
  source 1..75: mol_type = other DNA
gcgaaaggcgaaatctttaccggcctgccggaaaacggtatcgccattatgaatgccgacaataacgactggttg

SEQ ID NO: 537554 - DNA, 75 bp, synthetic construct
  source 1..75: mol_type = other DNA
aatgtccctctgcgaccaactggaacaacaatccctgaccagtctggacgcacaccagcaactggttgaaaccct

SEQ ID NO: 537555 - DNA, 75 bp, synthetic construct
  source 1..75: mol_type = other DNA
aaagctcaactggtgaaagaagggaaaataaaaaaacaaaaaccgttgcccccgattagcgatgaggaaaaaccg

SEQ ID NO: 537556 - DNA, 75 bp, synthetic construct
  source 1..75: mol_type = other DNA
gatgctatcaaagcagggctggcaaatctgaaagctgttcctggccgtctgttccccattcaactggcggaaaac

SEQ ID NO: 537557 - DNA, 75 bp, synthetic construct
  source 1..75: mol_type = other DNA
gtactgaatttacgctgcaaaccccaacaggtagcgtcgatgttctgctgccgctgccggggcgtcacaatatcg

SEQ ID NO: 537558 - DNA, 75 bp, synthetic construct
  source 1..75: mol_type = other DNA
gcatcagcgcacagattgcccgacaggtggcgcttgaccgcatcatgatcggttttaacggcacgtctcacgcgg

SEQ ID NO: 537559 - DNA, 75 bp, synthetic construct
  source 1..75: mol_type = other DNA
ccatcctgatggcggcaatgctgtccggttgtctgcaggccgggacactggatgatattcgtgctcttgaagccg

SEQ ID NO: 537560 - DNA, 75 bp, synthetic construct
  source 1..75: mol_type = other DNA
tggaaacctggcctctgctgcagggtgccgcagaggccggagaggtccgtaaacgtctcgatgacgtgttccgta

SEQ ID NO: 537561 - DNA, 75 bp, synthetic construct
  source 1..75: mol_type = other DNA
cgccgcagaggccggagaggtccgtaagcgtcttgatgacgtactgcgtatggccctggaccgtcaggctttaca

SEQ ID NO: 537562 - DNA, 75 bp, synthetic construct
  source 1..75: mol_type = other DNA
ggatgcgcgctcatccctgctggatgaatggcacaaggaagctgacgacctcgtggtgattatggggcgcaacct

SEQ ID NO: 537563 - DNA, 75 bp, synthetic construct
  source 1..75: mol_type = other DNA
gcagcgttttgaaaacgcctcaaaggatagcaccgaacttacaaaaaaaattaacgtgatcggcgtgaccgacca

SEQ ID NO: 537564 - DNA, 75 bp, synthetic construct
  source 1..75: mol_type = other DNA
cgcagccggctcaatgaggtgctgcgtatggcactggatcggcagtcagggaaaagcactccactcaacacgcag

SEQ ID NO: 537565 - DNA, 75 bp, synthetic construct
  source 1..75: mol_type = other DNA
gccggcatcactccacgagctgacggcacgccagtacgcctgcgagcaaatcaactacgacacgttcatcagcta

SEQ ID NO: 537566 - DNA, 75 bp, synthetic construct
  source 1..75: mol_type = other DNA
taccaggtgggggcattgcgtcgtctgatgcgtgaagagccggactacaaccgcatcgcaacctatcagtcctcc

SEQ ID NO: 537567 - DNA, 75 bp, synthetic construct
  source 1..75: mol_type = other DNA
cccgcggcgctctggcgatgtacatgcagcagcaggcgcgcatgaacaatgtttctcctgctgcgcttgcccagc

SEQ ID NO: 537568 - DNA, 75 bp, synthetic construct
  source 1..75: mol_type = other DNA
aaacgtctcgatgacgtgttccgtatggccctggaccgtcaggccgggaaatcccttcaggctcattctcaggaa

SEQ ID NO: 537569 - DNA, 75 bp, synthetic construct
  source 1..75: mol_type = other DNA
ctacagttcgtcaaatgatgcctacgttgttgaagattacggcttcggctgtctgatcgaaggcattaccgccgc

SEQ ID NO: 537570 - DNA, 75 bp, synthetic construct
  source 1..75: mol_type = other DNA
gaaccgcactgggcaattccacaagggcaaagcgcccacgatactttctgggattatgtttctctgcaacctgaa

SEQ ID NO: 537571 - DNA, 75 bp, synthetic construct
  source 1..75: mol_type = other DNA
aagagcaatttgagatgctacgcaagatccactgtcgcgttattcagggatatttcttttcccgccccctgcccg

SEQ ID NO: 537572 - DNA, 75 bp, synthetic construct
  source 1..75: mol_type = other DNA
acggtttattcctctcgcagaagagattggtgaaatcgaaaatattgggcgctgggtcatcgcggaagcttgccg

SEQ ID NO: 537573 - DNA, 75 bp, synthetic construct
  source 1..75: mol_type = other DNA
atgacattctcggatatcaccgaagaaaggcaaatccgccagcttgaaggcaatattctcgccgccatgtgcagc

SEQ ID NO: 537574 - DNA, 75 bp, synthetic construct
  source 1..75: mol_type = other DNA
agcagcctgaatccacgggccatcaatcataacagaaatgccagcggaaaaattatcagcacagattatggcctg

SEQ ID NO: 537575 - DNA, 75 bp, synthetic construct
  source 1..75: mol_type = other DNA
gccagaaaaaggcggccaccgtctattaccccgcgcaggttgtgcgcggaaatcgcgatgtaacaatgaaagagg

SEQ ID NO: 537576 - DNA, 75 bp, synthetic construct
  source 1..75: mol_type = other DNA
gagggtaaaaaccgcgattacttgctctccactgctcacaatgcaatggattttattcgcaaaaatggcggtaac

SEQ ID NO: 537577 - DNA, 75 bp, synthetic construct
  source 1..75: mol_type = other DNA
ttcttcctcgcttactgaactggctgctcatttcagaaggaatatgaatacagaactaccggatggacggattgc

SEQ ID NO: 537578 - DNA, 75 bp, synthetic construct
  source 1..75: mol_type = other DNA
acgtaaagatggtggcgatattttattttctttcaagattaatcatgattttggagaaataacgaatccccaaac

SEQ ID NO: 537579 - DNA, 75 bp, synthetic construct
  source 1..75: mol_type = other DNA
gtctgtggatagcggagggatacgcgaccgctcttaccgtacatcacctgaccggtgaaacggtgatggtggcgc

SEQ ID NO: 537580 - DNA, 75 bp, synthetic construct
  source 1..75: mol_type = other DNA
cggacacccgttattctgatgacggcctatgctgaagtggaaaccgccgtcgaagcactacgctgcggagccttc

SEQ ID NO: 537581 - DNA, 75 bp, synthetic construct
  source 1..75: mol_type = other DNA
gtggtgttgatggatatccgcatgccagagatggacggcatcaaggcactcaaggagatgcgcagccatgagacc

SEQ ID NO: 537582 - DNA, 75 bp, synthetic construct
  source 1..75: mol_type = other DNA
gtggatcacttttcatccgtcgttgacaatgagacccggacacccgttattctgatgacggcctatgctgaagtg

SEQ ID NO: 537583 - DNA, 75 bp, synthetic construct
  source 1..75: mol_type = other DNA
tgatttgtccgttatttttcgctcttcccgctaaggctgccgccacaaacacattactggacagttgctttattc

SEQ ID NO: 537584 - DNA, 75 bp, synthetic construct
  source 1..75: mol_type = other DNA
atgaagccgtacgttcagtcttaacacaaaagccatcgattgcacaaaatcacaaacctgaaaaaatatcactcc

SEQ ID NO: 537585 - DNA, 75 bp, synthetic construct
  source 1..75: mol_type = other DNA
ttcaaaataatggtcttacaggtgagatgtttttcatcataaacgataatgacaactatatttatcgacgtgtta

SEQ ID NO: 537586 - DNA, 75 bp, synthetic construct
  source 1..75: mol_type = other DNA
ttgcctgttgtggtcgttcgcgtcggtgatgctaccgttgatgtcctcgtagggcagcaaacctggacgctgaca

SEQ ID NO: 537587 - DNA, 75 bp, synthetic construct
  source 1..75: mol_type = other DNA
aagccagctgaagaattggggcgagagattactcatcagctattcctgctgggctgcggtgcgcaaatgttgaaa

SEQ ID NO: 537588 - DNA, 75 bp, synthetic construct
  source 1..75: mol_type = other DNA
tcgcatggcacttcagcttgaagggcaaacggcgttgctgtttcgtcttgcgcgagcgtgggaccggcgtgccga

SEQ ID NO: 537589 - DNA, 75 bp, synthetic construct
  source 1..75: mol_type = other DNA
cacatgtataagcaacatgtgatcgaatggctgacagatgatcagctgtttggggtgatggtggcgctggtaaaa

SEQ ID NO: 537590 - DNA, 75 bp, synthetic construct
  source 1..75: mol_type = other DNA
atcgttaatggttataaaggatgtatacaacctgaagcatatgagcaggttgtgtacccagctatacaaattctt

SEQ ID NO: 537591 - DNA, 75 bp, synthetic construct
  source 1..75: mol_type = other DNA
tggtatgaagcaaaaggtctacgtgtagttataattcatagtgaaatggatgatgaagtaaaagcagacgctttc

SEQ ID NO: 537592 - DNA, 75 bp, synthetic construct
  source 1..75: mol_type = other DNA
atattgcatgttactggcactccatatagaggcgacaatcaagaaataccaggagtaaaaatacatgaaactcct

SEQ ID NO: 537593 - DNA, 75 bp, synthetic construct
  source 1..75: mol_type = other DNA
gacggtgttgttggcttttcaacgttagtacatctctggcaggtggcaggggagagtgcctacttatatcgggat

SEQ ID NO: 537594 - DNA, 75 bp, synthetic construct
  source 1..75: mol_type = other DNA
tgagattgtgccagactacaaaaaatatgtatttcctttctttacagttattaatttcacaaaggaaggggcgta

SEQ ID NO: 537595 - DNA, 75 bp, synthetic construct
  source 1..75: mol_type = other DNA
ttttcatgaccctgtagaacttgaaatagaggaagttattgaggcggaaatcagtcaatctttagtaaacccatt

SEQ ID NO: 537596 - DNA, 75 bp, synthetic construct
  source 1..75: mol_type = other DNA
tccccgtccgacgcggccgcaaaggtggctgccgtgaccggcagcctgccaccggctgaccctgcagtgacgacc

SEQ ID NO: 537597 - DNA, 75 bp, synthetic construct
  source 1..75: mol_type = other DNA
ttactgcgaaaactatcgccgataagcaggcggatacgaatcaggaacaggctaaaacagaagacgcaaagcgcc

SEQ ID NO: 537598 - DNA, 75 bp, synthetic construct
  source 1..75: mol_type = other DNA
tattgattattgccgtcatcgttgtactgctttttggcaccaaaaagctcggctccatcggttccgatcttggtg

SEQ ID NO: 537599 - DNA, 75 bp, synthetic construct
  source 1..75: mol_type = other DNA
actcagtttgcaacaggggaaatataaccagaagcgcgcagctgaattgctggggttaacctatcatcagttccg

SEQ ID NO: 537600 - DNA, 75 bp, synthetic construct
  source 1..75: mol_type = other DNA
gagatccccggcgcaattgccaactatttcatgataaccaggcgtttttatacccgaacagataaggctgtgatc

SEQ ID NO: 537601 - DNA, 75 bp, synthetic construct
  source 1..75: mol_type = other DNA
gaaacacgcaaggaggcacacagaatgaaagctactaacgttaaatccgaaaaaattcatgcaccttcagttcag

SEQ ID NO: 537602 - DNA, 75 bp, synthetic construct
  source 1..75: mol_type = other DNA
ggctaatgacgttcgagagcagcagacagccgttccgccagttccagaaatacaggctgatgtcgcgcaagcaat

SEQ ID NO: 537603 - DNA, 75 bp, synthetic construct
  source 1..75: mol_type = other DNA
cggagatgcaacgattaagcctggtaatggtattgagcaagcaactcactggatgccgctgccagaaccgccgca

SEQ ID NO: 537604 - DNA, 75 bp, synthetic construct
  source 1..75: mol_type = other DNA
ctatagcgcctaatgacgttcgagagcagacagccattccacaagttccggtaactccggatggttggataagct

SEQ ID NO: 537605 - DNA, 75 bp, synthetic construct
  source 1..75: mol_type = other DNA
ttggtgatgatatcagcatacctgaatgcgatgtaatcaattggatgcctctaccagaaccgccgaaggaggtta

SEQ ID NO: 537606 - DNA, 75 bp, synthetic construct
  source 1..75: mol_type = other DNA
gcagccagccattgcaagtgaatgtgcggttggtatgtgcaacgaatgccgatcttccggcaatggtcaatgaag

SEQ ID NO: 537607 - DNA, 75 bp, synthetic construct
  source 1..75: mol_type = other DNA
gaatttttcgaaacacagagccgcaatgtaaccgactggatgccgctaccagaaccgccgcaggaggtgcgccaa

SEQ ID NO: 537608 - DNA, 75 bp, synthetic construct
  source 1..75: mol_type = other DNA
tccgccagtgccggtaactccggatggttggataaactgtagtgatcgaatgccggaagacaccaaaatgttact

SEQ ID NO: 537609 - DNA, 75 bp, synthetic construct
  source 1..75: mol_type = other DNA
cacggtgaaagaagtggtgctggatgatgaaaatggctaccagatacggctgacgccccaattaacgggtaaagg

SEQ ID NO: 537610 - DNA, 75 bp, synthetic construct
  source 1..75: mol_type = other DNA
tgtaatcgaaaatattgaagatattcaagtgtactaccttgaaccatcagtagagtgcaataaagttataactta

SEQ ID NO: 537611 - DNA, 75 bp, synthetic construct
  source 1..75: mol_type = other DNA
cagaccagcagcatcaaagccttaaagcgttggctgccctgcaaggtaaaacgatcaagcaatatgctatcgagc

SEQ ID NO: 537612 - DNA, 75 bp, synthetic construct
  source 1..75: mol_type = other DNA
ggaatttagctggtagagctgggcgatggggtaaagaatttcaagggaatgtgatttgtgttgatactaataatg

SEQ ID NO: 537613 - DNA, 75 bp, synthetic construct
  source 1..75: mol_type = other DNA
aaaaagataacgtcttcctttcagtccttgctggatgaattacaaaatccagataaaattatcagagggagtata

SEQ ID NO: 537614 - DNA, 75 bp, synthetic construct
  source 1..75: mol_type = other DNA
aaaagtggcggaagtagggaatctttcccaggctgcgcgggaattagatattagtatttctgctgtcagtaaatc

SEQ ID NO: 537615 - DNA, 75 bp, synthetic construct
  source 1..75: mol_type = other DNA
aaaaacagcatcgccggattcacagaaatgtacgcaaaatcagacggttgggcttcactcaatggctgcaaccgc

SEQ ID NO: 537616 - DNA, 75 bp, synthetic construct
  source 1..75: mol_type = other DNA
ctggattgctcctttcggggataacggtgccctgtacaaatatatgcgaaaaaaattccctgatgaactattccg

SEQ ID NO: 537617 - DNA, 75 bp, synthetic construct
  source 1..75: mol_type = other DNA
gcattggaacctataaatgttgaaaatcagcctgatgaaattcccgttctggaatggcagggagtacgcgtcgtg

SEQ ID NO: 537618 - DNA, 75 bp, synthetic construct
  source 1..75: mol_type = other DNA
gaaatgagaaaggaggcacatagaatgaccggtaataatttaaatgttgaaaaaacagcacctgttgcttcagct

SEQ ID NO: 537619 - DNA, 75 bp, synthetic construct
  source 1..75: mol_type = other DNA
ctattaacttgtggaagtatcttgtcacaatcaaatgatgaactctgccaagacgctgccttgaggatttctcaa

SEQ ID NO: 537620 - DNA, 75 bp, synthetic construct
  source 1..75: mol_type = other DNA
tgaacgaaatggtaaaagagcgtttggttttaggcgcggcgctgaaagaagcaattagcaataaccaactgaaac

SEQ ID NO: 537621 - DNA, 75 bp, synthetic construct
  source 1..75: mol_type = other DNA
tcagttagcagaatggcgtagccagaatattcatattccagcgttatccgttaacttgtctgcgctgcacttccg

SEQ ID NO: 537622 - DNA, 75 bp, synthetic construct
  source 1..75: mol_type = other DNA
cagccggattacttaaacgccgccgtggcgctggaaacaactctcgcacctgaagagttactcaatcacacacag

SEQ ID NO: 537623 - DNA, 75 bp, synthetic construct
  source 1..75: mol_type = other DNA
aacgccagcctgcagatcactgatatggcgctaagtccagtatccggcgagcaaccgaagtcagcagcgcaaact

SEQ ID NO: 537624 - DNA, 75 bp, synthetic construct
  source 1..75: mol_type = other DNA
gaccggcctgaccgataaatggttttacaagctcatcaaggatggtgcctttcctgcccccatcaaactgggccg

SEQ ID NO: 537625 - DNA, 75 bp, synthetic construct
  source 1..75: mol_type = other DNA
gctgtacgtacctgtccgggatgcagctgatgctcgggttgccatacagtggaagtatgaacttgggcaattcca

SEQ ID NO: 537626 - DNA, 75 bp, synthetic construct
  source 1..75: mol_type = other DNA
aagctgaacagcaaaaaatcccgccattttacgctaataacaagtgtaaccagtccggcaataatcaccgtctgg

SEQ ID NO: 537627 - DNA, 75 bp, synthetic construct
  source 1..75: mol_type = other DNA
gcactgacagctaccaggatgagagcggagaaaccagaactcgcgatgaatacccgtgggggctgtgcatcactc

SEQ ID NO: 537628 - DNA, 75 bp, synthetic construct
  source 1..75: mol_type = other DNA
tggggatgggcatttgaatggtatatggtggtgatgcttttcggctggttctggctggtatttggcccgtatgcc

SEQ ID NO: 537629 - DNA, 75 bp, synthetic construct
  source 1..75: mol_type = other DNA
cagatttgtgatttttcttgttccagcttgtttcacgttgtagccctttgtgcaacgatcggtgtagtcactggt

SEQ ID NO: 537630 - DNA, 75 bp, synthetic construct
  source 1..75: mol_type = other DNA
agcttcctttctgtcgccttcgcttacttcttctttgtccgcaaaatggaagtgattcgccccagctccaccctg

SEQ ID NO: 537631 - DNA, 75 bp, synthetic construct
  source 1..75: mol_type = other DNA
atcgacgtttgcccaacaggagcgtcatggcgtgatatgcaggggatcgtgcgggtagaaaaatcgcagtgcatc

SEQ ID NO: 537632 - DNA, 75 bp, synthetic construct
  source 1..75: mol_type = other DNA
aaccctgtcactaaagtggcagataaatgtgatttctgcgctgagtcccgactggcaaaaggctttccgcccatt

SEQ ID NO: 537633 - DNA, 75 bp, synthetic construct
  source 1..75: mol_type = other DNA
ttgctctttggtcgtgaagatagcccagaaattcaggcatggttacaggaaaataaatactatcaatatcaactg

SEQ ID NO: 537634 - DNA, 75 bp, synthetic construct
  source 1..75: mol_type = other DNA
aaatggatatttttctgaggttggagagatgccacacctttcaactgtccaagatagtggtggtacattatcatt

SEQ ID NO: 537635 - DNA, 75 bp, synthetic construct
  source 1..75: mol_type = other DNA
gccttgggcttaacccgaccgctgccgcgattgcggtggtgatttctggctggaatggcggctatatgcctattg

SEQ ID NO: 537636 - DNA, 75 bp, synthetic construct
  source 1..75: mol_type = other DNA
atgtgcagggaccaatactgcgcgacgcgatgaaaattatcggcgaaatcgatctgcgcttaatgctggcgcagg

SEQ ID NO: 537637 - DNA, 75 bp, synthetic construct
  source 1..75: mol_type = other DNA
cgcagcaggtcatcggcccgatgtttgctggttataagccggaagattcggggctggatatcggcgacagcgcca

SEQ ID NO: 537638 - DNA, 75 bp, synthetic construct
  source 1..75: mol_type = other DNA
ttgtcgtgggctgagcatgacaaggctcctgataaaaaaccgccaaatcattacaagcgattaaagtggatgtgc

SEQ ID NO: 537639 - DNA, 75 bp, synthetic construct
  source 1..75: mol_type = other DNA
aggatgcgcactcccccaaaagaattgcggcagtggtgcatgcgctattcttatctcaaaacccacaataccttc

SEQ ID NO: 537640 - DNA, 75 bp, synthetic construct
  source 1..75: mol_type = other DNA
attgttatgctgggtgccagtcttgcaggcaccggcgcgaccggttattacgtgctgattctgtcgctggtatcc

SEQ ID NO: 537641 - DNA, 75 bp, synthetic construct
  source 1..75: mol_type = other DNA
gatttggtaaggatatggttattcaggcgaaaaattattctggttctgtaggtaactcggcggtgcagcaggtga

SEQ ID NO: 537642 - DNA, 75 bp, synthetic construct
  source 1..75: mol_type = other DNA
cctctctgatggcgctgcacgaccgtgacgttatccgcaccatggcgtgtggtatcgctggtctgtccgttgctg

SEQ ID NO: 537643 - DNA, 75 bp, synthetic construct
  source 1..75: mol_type = other DNA
cgtctattttgaaaagccgcgtaccacggtgggctggaaagggctgattaacgatccgcatatggataatagctt

SEQ ID NO: 537644 - DNA, 75 bp, synthetic construct
  source 1..75: mol_type = other DNA
aagcagcatgtagaagtgactcaactcgactggacgccgccggggcagggcaatatgcaggtggtgcaggcgctg

SEQ ID NO: 537645 - DNA, 75 bp, synthetic construct
  source 1..75: mol_type = other DNA
atctaacggcagaccggatgaaaaggagtttcacgctcacctgcatagctggcaagcgctttgccatattctgcg

SEQ ID NO: 537646 - DNA, 75 bp, synthetic construct
  source 1..75: mol_type = other DNA
caatcctgcgcgtaacacccgtgaaaaattattgctgccgctgggcgatatcaaaccgcttcagcaggcgggcgt

SEQ ID NO: 537647 - DNA, 75 bp, synthetic construct
  source 1..75: mol_type = other DNA
tcatcattacctgctggattatcctcaacgccatttgcgtcgcttgcggtctgcaaaaaggggtcgtatcgccag

SEQ ID NO: 537648 - DNA, 75 bp, synthetic construct
  source 1..75: mol_type = other DNA
atgaactggtgtcgcgtgggcgttttccctggcaaaatttcatacgtcaatggagcgacgccgatgagcaggcgg

SEQ ID NO: 537649 - DNA, 75 bp, synthetic construct
  source 1..75: mol_type = other DNA
ggcttaagtttgatcttcaaactgattagtatgctgcgccctgaagaagtggtgctggacgcagaagacgcggat

SEQ ID NO: 537650 - DNA, 75 bp, synthetic construct
  source 1..75: mol_type = other DNA
atgacgcgccgtgctatcggggtgagtgaaagacccccgccacttttacagacaatcccgcttagtttgcaacat

SEQ ID NO: 537651 - DNA, 75 bp, synthetic construct
  source 1..75: mol_type = other DNA
atgaccagatggtcgacatggcgtttatcactcaactgaccggcctaaccgataagtggttttacaaactcatca

SEQ ID NO: 537652 - DNA, 75 bp, synthetic construct
  source 1..75: mol_type = other DNA
gtttattctttaaatttacaggctggaggatattcgacagcaataagacagtatgaagaagatatgcccagcttt

SEQ ID NO: 537653 - DNA, 75 bp, synthetic construct
  source 1..75: mol_type = other DNA
cgccagcgttgctggattgcgatggtgttggcgcaaaagacgccttatatcctactggatgaacccacaacctgg

SEQ ID NO: 537654 - DNA, 75 bp, synthetic construct
  source 1..75: mol_type = other DNA
tgtaactcattggcaaaagtatcattatcgctgaaaggtacagatattatcgatggcattaataataaaaccaga

SEQ ID NO: 537655 - DNA, 75 bp, synthetic construct
  source 1..75: mol_type = other DNA
tgattttggggttgcatctgtcagtggggtgaatattgaaatagacaggggcactgcatggccgggggtttattc

SEQ ID NO: 537656 - DNA, 75 bp, synthetic construct
  source 1..75: mol_type = other DNA
atgaccagatggtcgacatggcgtttatcactcaactgaccggcctgaccgataagtggttttacaagctcatca

SEQ ID NO: 537657 - DNA, 75 bp, synthetic construct
  source 1..75: mol_type = other DNA
caattctgattggcgtgctggtgggttacgcgctctccttcgcgatgggaattgtcgataccacgccgattatta

SEQ ID NO: 537658 - DNA, 75 bp, synthetic construct
  source 1..75: mol_type = other DNA
cgtgtgttgatcgaatcgaaagtggattacaacaaagcacagaacctgatcctgacttccgtgattttgatcatc

SEQ ID NO: 537659 - DNA, 75 bp, synthetic construct
  source 1..75: mol_type = other DNA
cattacccagagcttctcttaatgccagtcttgatggagattatattggaatattccctatgagtttgcaagcag

SEQ ID NO: 537660 - DNA, 75 bp, synthetic construct
  source 1..75: mol_type = other DNA
gactgtaaaagctataagaggaacaacagatgttcctttatctgtgaattttaaaagcgactcgcctgttgccgg

SEQ ID NO: 537661 - DNA, 75 bp, synthetic construct
  source 1..75: mol_type = other DNA
ttcccgattattttttacgtttctccccggttgttatgccggtgaaggtggtgcgttgttttcatgaccacaccg

SEQ ID NO: 537662 - DNA, 75 bp, synthetic construct
  source 1..75: mol_type = other DNA
gaccggggagtatcagctactccccggtttattgattgcttgtgtgattgcgtcagtaatgtcgcggacgttaca

SEQ ID NO: 537663 - DNA, 75 bp, synthetic construct
  source 1..75: mol_type = other DNA
ttacgccgaccttatttatcggactggcaattggcatgttgtatgcccggagtctggggttatggtttactgaca

SEQ ID NO: 537664 - DNA, 75 bp, synthetic construct
  source 1..75: mol_type = other DNA
gtcagcggtgccagcttcatcatgaactacttcaccgattcggtggggatgttgctgatgtatctgccgcgcatg

SEQ ID NO: 537665 - DNA, 75 bp, synthetic construct
  source 1..75: mol_type = other DNA
cgtgttctactgggcatggtgggtgatttacgctatccagatgagtatcttcctcgcccgcatctcccgtggtcg

SEQ ID NO: 537666 - DNA, 75 bp, synthetic construct
  source 1..75: mol_type = other DNA
tcagccgccgtgctgttctggggatcgattgagatctactactacatctccacgccgccatttgctttagagcca

SEQ ID NO: 537667 - DNA, 75 bp, synthetic construct
  source 1..75: mol_type = other DNA
ctttccggcccccatcaaactcggccgcagctcccgatggctgaaaagtgaagtggaagcctggttgcaggcgcg

SEQ ID NO: 537668 - DNA, 75 bp, synthetic construct
  source 1..75: mol_type = other DNA
gatgtgaatcgcgcaaatgctgcgttgcaacgtcgatcgggaatgcctgtgaatatcaaccgtaacggattttga

SEQ ID NO: 537669 - DNA, 75 bp, synthetic construct
  source 1..75: mol_type = other DNA
gggctccgggtaagtcagggctgtattcgtctgcgcaatgacgatatcaaatatctgtttgataatgttcctgtt

SEQ ID NO: 537670 - DNA, 75 bp, synthetic construct
  source 1..75: mol_type = other DNA
cagtttgattacgcagcaagcctggttaaatcgcttgcctctctgctggtagtaaccagcggcagtgcaattggt

SEQ ID NO: 537671 - DNA, 75 bp, synthetic construct
  source 1..75: mol_type = other DNA
atgaccacgcatcccttacttaccgaagaccagttgattgacatggcatttatcaccagtctgctgaaaatgaca

SEQ ID NO: 537672 - DNA, 75 bp, synthetic construct
  source 1..75: mol_type = other DNA
aagaccagttgattgacatgacatttattaccagcctgctgcagatgacagacaagtggatttacaagcttatta

SEQ ID NO: 537673 - DNA, 75 bp, synthetic construct
  source 1..75: mol_type = other DNA
ggagttaaccagaccccttacccgcctggtttacaccaatcgcaataccggcaggatggagtgtctcccttcagt

SEQ ID NO: 537674 - DNA, 75 bp, synthetic construct
  source 1..75: mol_type = other DNA
tgagctattcaaaattcacttccagtcaggcggcgctaattcggatatcacgatccgcacatttgaagcggtgcg

SEQ ID NO: 537675 - DNA, 75 bp, synthetic construct
  source 1..75: mol_type = other DNA
tggaagagggcgttgatgtggcggcgattgcttcggcgtctccggcgattatcgtcccggaaaccctcgatccga

SEQ ID NO: 537676 - DNA, 75 bp, synthetic construct
  source 1..75: mol_type = other DNA
gatcttatccattctgtagctgatgagattaatatcccaggcgttttcacaatcggggggcatggtacccccaca

SEQ ID NO: 537677 - DNA, 75 bp, synthetic construct
  source 1..75: mol_type = other DNA
gaatggggcaacctgctgagtgatgagaacccgcatcatctgcagcagctcattcgcctgccgggtcagcagtat

SEQ ID NO: 537678 - DNA, 75 bp, synthetic construct
  source 1..75: mol_type = other DNA
tacggctgggacggcgaccgcctgaccacgatacagaacgacagaacccgcatccagacgatttatcagccgggg

SEQ ID NO: 537679 - DNA, 75 bp, synthetic construct
  source 1..75: mol_type = other DNA
cttccagtcaggcggcgctaattcggatatcacgatccgcacatttgaagcggtgcgtaaatcgaaggaagcgtt

SEQ ID NO: 537680 - DNA, 75 bp, synthetic construct
  source 1..75: mol_type = other DNA
tcaggtggcgctaattcagatatcacgatccgcacatttgaagcggtgcgtaaatcgaaggaagcgttagacctg

SEQ ID NO: 537681 - DNA, 75 bp, synthetic construct
  source 1..75: mol_type = other DNA
aacagtctgctgacgatattcaggccggtgcggtggtttatctgaaggacggggctgtgcagctgctgcagacgg

SEQ ID NO: 537682 - DNA, 75 bp, synthetic construct
  source 1..75: mol_type = other DNA
tggggctgctgtcgctgatttcatggatggtcacgctgaccaaaccgctatttaccgttatggatttttccttct

SEQ ID NO: 537683 - DNA, 75 bp, synthetic construct
  source 1..75: mol_type = other DNA
cggtacagatttgcatgccttgcagcaggcgcttgatgttgagcaccttgccgatgacgatgatatcgcgacggt

SEQ ID NO: 537684 - DNA, 75 bp, synthetic construct
  source 1..75: mol_type = other DNA
acgcgatttgttaaccagcatccaacggtggtggtgctctgtctgagcttcctgttaatgattggtctgagtctg

SEQ ID NO: 537685 - DNA, 75 bp, synthetic construct
  source 1..75: mol_type = other DNA
tagctgatgccctgagacaaacatatcccctgacagaattactgcatgttctgggccttgcccgtagcagttatt

SEQ ID NO: 537686 - DNA, 75 bp, synthetic construct
  source 1..75: mol_type = other DNA
ctttcaattcttaaaggaaatgtcagtgattcaggtgaatcattcattaaatattctgctataaaatcagatctc

SEQ ID NO: 537687 - DNA, 75 bp, synthetic construct
  source 1..75: mol_type = other DNA
gtgcaggcttgactcagacattactaaccgcgccactgaaggcatatggggcttatcagatgggcggtggcactt

SEQ ID NO: 537688 - DNA, 75 bp, synthetic construct
  source 1..75: mol_type = other DNA
ggcgctgggctatgcgcactatctcaacaacccgtggttccagctctatccggatatcggcaacctgtcggcgtg

SEQ ID NO: 537689 - DNA, 75 bp, synthetic construct
  source 1..75: mol_type = other DNA
ataagaaaagaccttcacaaactaaatgcaggtaatttagtaaaaccattaaaccatcttgtaaaactgattaaa

SEQ ID NO: 537690 - DNA, 75 bp, synthetic construct
  source 1..75: mol_type = other DNA
ggtgattggcaaaaagtttctgatgaagtgaatagatctggaatatatttatcaaaaattgatttggaaactgat

SEQ ID NO: 537691 - DNA, 75 bp, synthetic construct
  source 1..75: mol_type = other DNA
agagctacaaaagaagtcaacgatgagttgaaaaaacttgcacatcattattcagagtattctgtgcaactagat

SEQ ID NO: 537692 - DNA, 75 bp, synthetic construct
  source 1..75: mol_type = other DNA
acggaaatgtattatgggcgtaaatggtcgggcatcacgccagaaaagttcatgcagcaagtggatgcttacatc

SEQ ID NO: 537693 - DNA, 75 bp, synthetic construct
  source 1..75: mol_type = other DNA
agatggtataacgagcggcgtataaaattatcgccgggtgcagtcagccccaaaatgtaccgccaacaatgcggg

SEQ ID NO: 537694 - DNA, 75 bp, synthetic construct
  source 1..75: mol_type = other DNA
gctccggataaccttatcgccagagattttaaggcggagcaacctaatcagaaatggctgacagatatcacggag

SEQ ID NO: 537695 - DNA, 75 bp, synthetic construct
  source 1..75: mol_type = other DNA
gttgctttgaaacgctcaaacagagtggttattgcgggccgtacctgattgagatgtggagcgaaacggcggaag

SEQ ID NO: 537696 - DNA, 75 bp, synthetic construct
  source 1..75: mol_type = other DNA
gactggagccgcgagcagcgtctggcgctggtgaatgcgattgttgaaaccggcgtgcgcgtgccgtccatgtgc

SEQ ID NO: 537697 - DNA, 75 bp, synthetic construct
  source 1..75: mol_type = other DNA
ttattcgctcaatgtcccgtaaaggatgttcacctgataatgccgcatgcgaaggctttttcggcagactgaaaa

SEQ ID NO: 537698 - DNA, 75 bp, synthetic construct
  source 1..75: mol_type = other DNA
atggcaaagaattttgtagaagaaggaaaaacggtggcgattgttgccagtgcagccatcagcagcggagatctg

SEQ ID NO: 537699 - DNA, 75 bp, synthetic construct
  source 1..75: mol_type = other DNA
ggcctcgatgtttatgcacatcgtgaaaaacaaaacctacggcaacatcgcttataccaacatgagcgagcagat

SEQ ID NO: 537700 - DNA, 75 bp, synthetic construct
  source 1..75: mol_type = other DNA
tttccggtaatagaaagggtgctgtttcagcaaagtgtcaatctcaatgtgttgacagcttggtaatagatattg

SEQ ID NO: 537701 - DNA, 75 bp, synthetic construct
  source 1..75: mol_type = other DNA
tgggcggcgtttcgctgctgctttatggtgtcatcggtgcttccggtattcgtgttttgatcgaatcgaaagtgg

SEQ ID NO: 537702 - DNA, 75 bp, synthetic construct
  source 1..75: mol_type = other DNA
aggggggatatgttttgaaacacaaacgaagttaagtaaagtttgtggctgtagccgtaagacagttaatgaatt

SEQ ID NO: 537703 - DNA, 75 bp, synthetic construct
  source 1..75: mol_type = other DNA
atcgtcgcgctggtgggcggcacggtggaagaggctatcgatttctcccgtcagatgcgtgaaatcacccttggc

SEQ ID NO: 537704 - DNA, 75 bp, synthetic construct
  source 1..75: mol_type = other DNA
cggacaaaatcgcctccgcgaatcagcaggcgctggagcgcattatccagtcgcatccggtgctgattggttttg

SEQ ID NO: 537705 - DNA, 75 bp, synthetic construct
  source 1..75: mol_type = other DNA
atgatgcgtcgtgtaaatattctttgttcatttgctctgctttttgccagtcataatagcctggcggtaacttat

SEQ ID NO: 537706 - DNA, 75 bp, synthetic construct
  source 1..75: mol_type = other DNA
ccattccgcagcaactgattttgcccgccactgttcgtaaagggattgtgattaacgtcgctgagatgcgtcttt

SEQ ID NO: 537707 - DNA, 75 bp, synthetic construct
  source 1..75: mol_type = other DNA
aatgtacgcgggtttggggacgacgatagaaaaacctaactggtattgccgcgtgtgtaaaagtacgttcgaccg

SEQ ID NO: 537708 - DNA, 75 bp, synthetic construct
  source 1..75: mol_type = other DNA
aaacattggcgtgatggcgatcacccgtgtttacagtacctgggttatcggcggggcggcgattttcgctatcct

SEQ ID NO: 537709 - DNA, 75 bp, synthetic construct
  source 1..75: mol_type = other DNA
cggagttggtgtttcctgatggggagacgttgcgtgaaatactcacttcgctagcagtactacaacctgccatct

SEQ ID NO: 537710 - DNA, 75 bp, synthetic construct
  source 1..75: mol_type = other DNA
aaagccaaagagaaatggtttgttattcagctctggtagcaataaataatgatatgccttttgattctgtgataa

SEQ ID NO: 537711 - DNA, 75 bp, synthetic construct
  source 1..75: mol_type = other DNA
gttgccgaagtcgagacattaaagggaaaagatcctgaaaattatcagagaaaagctgccacaaagttattggcg

SEQ ID NO: 537712 - DNA, 75 bp, synthetic construct
  source 1..75: mol_type = other DNA
agcgcatttttcgttggttatgctttatttaacttcattggcggttgggccagtgacaaagttggacccaaaaca

SEQ ID NO: 537713 - DNA, 75 bp, synthetic construct
  source 1..75: mol_type = other DNA
cagtgacaaagttggaccgaaaacagtatttttggttgctgcactgttatggtctgttttttgtggtatgaccgg

SEQ ID NO: 537714 - DNA, 75 bp, synthetic construct
  source 1..75: mol_type = other DNA
attgggctgaaggggggatggaatttttatcagtatccgttgaatccggtcataaatgtagatccgcaaggtttg

SEQ ID NO: 537715 - DNA, 75 bp, synthetic construct
  source 1..75: mol_type = other DNA
ttgaatataccacactacttttgtgagattgaattcatctactcctcaaatattgaggatggaaaagcgaagttt

SEQ ID NO: 537716 - DNA, 75 bp, synthetic construct
  source 1..75: mol_type = other DNA
acattgatattaaagaaattagtattgcaactgttatcccgtggtttattggggcaattggcatggtgttaggtg

SEQ ID NO: 537717 - DNA, 75 bp, synthetic construct
  source 1..75: mol_type = other DNA
ctatcggtatttttagtgctggttcaccacttggtggcgctatttctggtccggtcgttggcttgctggcaatat

SEQ ID NO: 537718 - DNA, 75 bp, synthetic construct
  source 1..75: mol_type = other DNA
gctaaagatctagcatatctaattaaatttgatgggaattataaagatgggatgacagtttggttattttcttgt

SEQ ID NO: 537719 - DNA, 75 bp, synthetic construct
  source 1..75: mol_type = other DNA
actcaggatccgattgggcttaaggggggatggaatttttatcagtatccgttggatccggtcataaatgtagat

SEQ ID NO: 537720 - DNA, 75 bp, synthetic construct
  source 1..75: mol_type = other DNA
gagctggcgaaaacgcagcgccgcagcctggcggatgcccttcagcagtccggcggcgaagacggtggcagtgtg

SEQ ID NO: 537721 - DNA, 75 bp, synthetic construct
  source 1..75: mol_type = other DNA
ggccgtcaactggctactatcaatggtgattctacgttatccgtttctccaaacgaatcagaatcaaatgtctgt

SEQ ID NO: 537722 - DNA, 75 bp, synthetic construct
  source 1..75: mol_type = other DNA
cctgccgctggcgcttatcagtgaagacggcaatacggcgtggagcgcggaatatgatgaatggggcaaccagct

SEQ ID NO: 537723 - DNA, 75 bp, synthetic construct
  source 1..75: mol_type = other DNA
atcaattattatatgatgtttggcatgatgattcatatggaacatcatcaattgatattactggcagtggagatc

SEQ ID NO: 537724 - DNA, 75 bp, synthetic construct
  source 1..75: mol_type = other DNA
aaaagggttaagctgaaatcgtttatggattacatcgacatatgcctggcagagaatgtccggaatgacgaggtt

SEQ ID NO: 537725 - DNA, 75 bp, synthetic construct
  source 1..75: mol_type = other DNA
ttacagcgttcccgaagcgctgtgtggtcagccggtatcgatacgaatatcgctggatgacgagttgcggatcta

SEQ ID NO: 537726 - DNA, 75 bp, synthetic construct
  source 1..75: mol_type = other DNA
gcttcgaaactcagcctggataccagctccagcacgactggggcgaagttgaggtggaggttgccgggcaacggt

SEQ ID NO: 537727 - DNA, 75 bp, synthetic construct
  source 1..75: mol_type = other DNA
taagatgcggccatcgaagaaaacggttcgcttcgaaactcagcccagttaccagctacagcatgactggggaga

SEQ ID NO: 537728 - DNA, 75 bp, synthetic construct
  source 1..75: mol_type = other DNA
tggttcgcgccttccgctacttcggtggttgtgtgaaaacggtgctggttgataaccagaaggctgcggtgctga

SEQ ID NO: 537729 - DNA, 75 bp, synthetic construct
  source 1..75: mol_type = other DNA
ggagcttcgccagttcaaagaaacgccggaacagcgcttcgcgctggagcaggaacatctgcagccgttaccgga

SEQ ID NO: 537730 - DNA, 75 bp, synthetic construct
  source 1..75: mol_type = other DNA
gccgggtggcagactgttccggaacaccatgcaccgctgtggcaacaggtgagcatggtagaacaccggccgctg

SEQ ID NO: 537731 - DNA, 75 bp, synthetic construct
  source 1..75: mol_type = other DNA
gagcaatggatagccgatgtggctgacaaacgggagcttcgccagttcaaagaaacgccggaacagcgcttcgcg

SEQ ID NO: 537732 - DNA, 75 bp, synthetic construct
  source 1..75: mol_type = other DNA
ggcggtcaactccacgctgccgactgaacccgcaacggtggcgcctgtccgtaacggcaacgcgtcgcgtgatac

SEQ ID NO: 537733 - DNA, 75 bp, synthetic construct
  source 1..75: mol_type = other DNA
cacgggcatgccgtccacgaagggccagaaccaaaggtaaggtggagcggatggtgaaatacctcaaggagaact

SEQ ID NO: 537734 - DNA, 75 bp, synthetic construct
  source 1..75: mol_type = other DNA
catcacgccccgctctggcagcaggtcagtcaggtggaacatcggccactgagtgcctatgaggagctgttgtga

SEQ ID NO: 537735 - DNA, 75 bp, synthetic construct
  source 1..75: mol_type = other DNA
caaaatgcggccgggtaaaaagaccgtgcgcttcgaaacccagccaggttaccagttgcagcatgactgggggga

SEQ ID NO: 537736 - DNA, 75 bp, synthetic construct
  source 1..75: mol_type = other DNA
ggcgggaacttcgccagttcaggcagacaccggaacagcgcttcacgcaggaacaggagcatctgcaggcgctgc

SEQ ID NO: 537737 - DNA, 75 bp, synthetic construct
  source 1..75: mol_type = other DNA
gtagatcttgagatcgcaacggaggaagagaaatcgttcctggcctcatggaagaggtatcgtgtgctgctcaac

SEQ ID NO: 537738 - DNA, 75 bp, synthetic construct
  source 1..75: mol_type = other DNA
atggcaaagtacaacgaaaaagagctggcggatacgagcaagtttttaagttttgtcctccgacacaaaccagag

SEQ ID NO: 537739 - DNA, 75 bp, synthetic construct
  source 1..75: mol_type = other DNA
gctgaatgaacgtttagataatcaagcgtcagttgttgcgaacgtgggggcgattgttacctctggttcttcacg

SEQ ID NO: 537740 - DNA, 75 bp, synthetic construct
  source 1..75: mol_type = other DNA
gaagaggtatcgtgtgctgctcaaccgtgttgatacttccatagcgccagatatcgagtggccggtaatacctgc

SEQ ID NO: 537741 - DNA, 75 bp, synthetic construct
  source 1..75: mol_type = other DNA
gatactaaaccgcagctggaaatctatgcagatgatgtgaaatgcagccacggcgcgacggtggggcgtattgat

SEQ ID NO: 537742 - DNA, 75 bp, synthetic construct
  source 1..75: mol_type = other DNA
atgagaaactggtggcctcacatcgcctctgttcggcatcgtctggctggcagacagtgccggagcatcacgccc

SEQ ID NO: 537743 - DNA, 75 bp, synthetic construct
  source 1..75: mol_type = other DNA
ctggctggcagacagtgccggagcatcacgccccgctctggcagcaggtcagtcaggtggaacatcgaccactaa

SEQ ID NO: 537744 - DNA, 75 bp, synthetic construct
  source 1..75: mol_type = other DNA
ctggctggcaaacggtcccaaaacaccatgccccgttgtggcagcaggtcagcatggtggagcatcgtcccctga

SEQ ID NO: 537745 - DNA, 75 bp, synthetic construct
  source 1..75: mol_type = other DNA
ttcgacatccgccatgtgtcctgggacagctatatcgaggttggcggcaatcgttacagtgttcccgaaacgctg

SEQ ID NO: 537746 - DNA, 75 bp, synthetic construct
  source 1..75: mol_type = other DNA
cgttttatgaacgggcgcaaaaagcctttgcgatcgttatcacaggcgaacgagcgaagtacgggaatattcttt

SEQ ID NO: 537747 - DNA, 75 bp, synthetic construct
  source 1..75: mol_type = other DNA
agcaggcggtgattgaaccgaaaaaaccgcaagcaaccgtgaaaacggagccgaagccggtagcacagacgccga

SEQ ID NO: 537748 - DNA, 75 bp, synthetic construct
  source 1..75: mol_type = other DNA
tacgctggggttctcccgccgcttccatgtcttcgcagcaccaaaacaggatgctgagcatacctacgaatcact

SEQ ID NO: 537749 - DNA, 75 bp, synthetic construct
  source 1..75: mol_type = other DNA
ccgaagcccagtttgaaggtcaggaaattgtgccgattacgctaaccaagagcgtgcagacagtgaccggtcagc

SEQ ID NO: 537750 - DNA, 75 bp, synthetic construct
  source 1..75: mol_type = other DNA
gtgaaaacttttaataagtcgcaatctgtttttatattcgctgttatgcttgttgcggcatggtttgcaggttca

SEQ ID NO: 537751 - DNA, 75 bp, synthetic construct
  source 1..75: mol_type = other DNA
cgcaaggacgaaagcggcacggtacatgcgggtaacccgccaggtgagattaaggccgatggtacccaggaatac

SEQ ID NO: 537752 - DNA, 75 bp, synthetic construct
  source 1..75: mol_type = other DNA
cgtgagtatttgcgtgaactgcaaaatgcactgctgtggaccaactttcgtttttatcttgcaccgttgttctgg

SEQ ID NO: 537753 - DNA, 75 bp, synthetic construct
  source 1..75: mol_type = other DNA
gcatgagaaggcgaataatggccagtcttccgttattcatcagcaacaggcggaaaagcatcgcagccagatcac

SEQ ID NO: 537754 - DNA, 75 bp, synthetic construct
  source 1..75: mol_type = other DNA
gcgttactacatccagcccaaacgtaaaatgcatccgtcaaaaagaacagttcgcttcgaaactcagcctggata

SEQ ID NO: 537755 - DNA, 75 bp, synthetic construct
  source 1..75: mol_type = other DNA
agagttcactggtaatggcagcagacaaagcatgcgcagaaaggatcaaacaatcgattcttcagaacttcacgt

SEQ ID NO: 537756 - DNA, 75 bp, synthetic construct
  source 1..75: mol_type = other DNA
tgacaagggcgctcacatcggcgaagtgcaagacctcaatgtggtctacgagatcaaggagcgactggacgagca

SEQ ID NO: 537757 - DNA, 75 bp, synthetic construct
  source 1..75: mol_type = other DNA
agatggtgcggatgctggtagctatcttaataagacggcgggtggtgtttttaaatcttatgctgtcgctttatg

SEQ ID NO: 537758 - DNA, 75 bp, synthetic construct
  source 1..75: mol_type = other DNA
tgataaagcaaatgcgccagcagggcgcgtacattgtcgatattgcggctcagattggttgctctgaacgaacgg

SEQ ID NO: 537759 - DNA, 75 bp, synthetic construct
  source 1..75: mol_type = other DNA
gttgaaatcggcaccgtccagccattacactctgcagctgagcagttcctctaactacgacaacctgaacggttg

SEQ ID NO: 537760 - DNA, 75 bp, synthetic construct
  source 1..75: mol_type = other DNA
atgatattgcctgtttttataacggtaatctcagaccatgacaagccgcagcctccaggctgcctactcggcttc

SEQ ID NO: 537761 - DNA, 75 bp, synthetic construct
  source 1..75: mol_type = other DNA
acgctgaatatcaaaggagagagttaccggtcaaaagagaaacgtaaagcaggagtactgaccaaaaacacaacg

SEQ ID NO: 537762 - DNA, 75 bp, synthetic construct
  source 1..75: mol_type = other DNA
actcaaaagcaactttcttaatggattatcaccgtttgctaaccccaatgtggcaaatgctactgatggaaatga

SEQ ID NO: 537763 - DNA, 75 bp, synthetic construct
  source 1..75: mol_type = other DNA
ggactaaaaacgcttaatattgagcctgtcttctcaatgtctaaaattaatcagctttttgagcgtgcagaaccc

SEQ ID NO: 537764 - DNA, 75 bp, synthetic construct
  source 1..75: mol_type = other DNA
gtctgtattactatccgaaagggaccaacaccgttatcgtgctgccgatcggcattggtcagttaggcaaagata

SEQ ID NO: 537765 - DNA, 75 bp, synthetic construct
  source 1..75: mol_type = other DNA
acttatcctctgccaaccgacgggagtcgcctggttggtcagaatcaggtgatcactattcctgaaggtaacact

SEQ ID NO: 537766 - DNA, 75 bp, synthetic construct
  source 1..75: mol_type = other DNA
caactggcggcacccaaacgaccgtcgggaccaacgccaattgagttgctgaaacaggaatatgagcgccggaaa

SEQ ID NO: 537767 - DNA, 75 bp, synthetic construct
  source 1..75: mol_type = other DNA
ctggcgcaacgagtcctggcgatacgacgggagcgataaatacccgtggtctcagcctgtgctgtatcacatttg

SEQ ID NO: 537768 - DNA, 75 bp, synthetic construct
  source 1..75: mol_type = other DNA
taaatacccgtggccacagcctgtgctgtaccacatctgcctcgaaatgcgtaccagagggattgagcgccagat

SEQ ID NO: 537769 - DNA, 75 bp, synthetic construct
  source 1..75: mol_type = other DNA
atgatttgtccacgttgtgccgatgaacagattgaagtgatggcgaaatcgccggtgaaagatgtctggacggtc

SEQ ID NO: 537770 - DNA, 75 bp, synthetic construct
  source 1..75: mol_type = other DNA
gccggtaaaagatgtctggacggtctaccagtgccagcattgcctctatacctggcgcgataccgaaccgctgcg

SEQ ID NO: 537771 - DNA, 75 bp, synthetic construct
  source 1..75: mol_type = other DNA
tgttccgccagtgcgacgacaactggaaggggcgaaacacccgaaagggccaacgccaattgaatggctgaaaca

SEQ ID NO: 537772 - DNA, 75 bp, synthetic construct
  source 1..75: mol_type = other DNA
ctggcgcaatgagtcatggcgatacgacggaagcgataaatatccgtggtcacagcccgtgctgtatcacatttg

SEQ ID NO: 537773 - DNA, 75 bp, synthetic construct
  source 1..75: mol_type = other DNA
ctgtatcacatttgcctcgagatgcgttcaaaggggattgagcgccagatgaccgaaggggaattaaaacggctt

SEQ ID NO: 537774 - DNA, 75 bp, synthetic construct
  source 1..75: mol_type = other DNA
ctggcgcaacgagtcctggcgatacgacgggagtgataaatacccgtggtctcagcccgtgctgtatcacatttg

SEQ ID NO: 537775 - DNA, 75 bp, synthetic construct
  source 1..75: mol_type = other DNA
catggcctccggacctggctgagtttgtggcgctgatttctgaaagcggagccaatccattcggtctgacggtgg

SEQ ID NO: 537776 - DNA, 75 bp, synthetic construct
  source 1..75: mol_type = other DNA
cgaaatgggcaaagcatgttggtaacgggatgagtgttccgccagtgcgacgacaactggaaggggcgaaacacc

SEQ ID NO: 537777 - DNA, 75 bp, synthetic construct
  source 1..75: mol_type = other DNA
gggggaggtttattcgaaccgctggacccagaagaatggggccgcaccttcgaagctctggattgcacagattgg

SEQ ID NO: 537778 - DNA, 75 bp, synthetic construct
  source 1..75: mol_type = other DNA
cgttgtttatttctgagcccggaccgctaccagagaatgtcacctggttgtcgccagcaggggagtatcagaagt

SEQ ID NO: 537779 - DNA, 75 bp, synthetic construct
  source 1..75: mol_type = other DNA
aagtgaagggagacagcatgtggccacgcatacagtctggagaatatgtcgtcatagagccaaacacccaagttc

SEQ ID NO: 537780 - DNA, 75 bp, synthetic construct
  source 1..75: mol_type = other DNA
aggtggagtatgtggctggtattctgaagcagtctcgccatctggatgacatcgaggcaagggagtggctgaaaa

SEQ ID NO: 537781 - DNA, 75 bp, synthetic construct
  source 1..75: mol_type = other DNA
aggagatttaacccatgtcgatgctgaaaaattggtggccttgcatccacaggtcgtttttgtcaccaattatgc

SEQ ID NO: 537782 - DNA, 75 bp, synthetic construct
  source 1..75: mol_type = other DNA
tagttcgctgtgggttaaccaggaaaaaacccgcattggcaatcaattgcgacgtagcgatgccgacaaccgtgc

SEQ ID NO: 537783 - DNA, 75 bp, synthetic construct
  source 1..75: mol_type = other DNA
tggcgcgccatgctgactgaagtcaatctgtcaccgaaaccaggcctcgtggatcgcattaactgcggtgcgcac

SEQ ID NO: 537784 - DNA, 75 bp, synthetic construct
  source 1..75: mol_type = other DNA
cgtcccggtggaaagctacaacgccctgcgtgatgaactggcacaggcgactgcacaaagcgccacagccagcct

SEQ ID NO: 537785 - DNA, 75 bp, synthetic construct
  source 1..75: mol_type = other DNA
gagaggaattatagtattgatcccaaagttcatgtccactctcatccacaaaggctgaaagacctgcgaacttta

SEQ ID NO: 537786 - DNA, 75 bp, synthetic construct
  source 1..75: mol_type = other DNA
aatgatgttgatatgcataaaatagtcaatggctggtatagaacgttttaccgtactgattatcagggtgaagac

SEQ ID NO: 537787 - DNA, 75 bp, synthetic construct
  source 1..75: mol_type = other DNA
aggttgggatgaaaagtcagtgctttttcattcaaaagcgtcattgattacagaggctagcgatggtgttaatgc

SEQ ID NO: 537788 - DNA, 75 bp, synthetic construct
  source 1..75: mol_type = other DNA
aaaataacaccccatctatcatggaaaaatagtgccagcgctttaggtattattttaatttcatggtctacatta

SEQ ID NO: 537789 - DNA, 75 bp, synthetic construct
  source 1..75: mol_type = other DNA
attacttaacgcctcgattatgttctttgcgccactgatcattaatcgcatcggtgggaaaaacgccctgctgct

SEQ ID NO: 537790 - DNA, 75 bp, synthetic construct
  source 1..75: mol_type = other DNA
accggtgaacagggtacgcgggtatttggctacgtaacgacaatgggcgaattacttaacgcctcgattatgttc

SEQ ID NO: 537791 - DNA, 75 bp, synthetic construct
  source 1..75: mol_type = other DNA
actcgggctgcgcaaatacctgctgtggattattaccggcatgttagtgatgtttgcgccgttctttatttttat

SEQ ID NO: 537792 - DNA, 75 bp, synthetic construct
  source 1..75: mol_type = other DNA
atggcacgtcaaacctatttcacttctgcaactaaacgtcctcgttctttacgtcaaattttggccgaattattt

SEQ ID NO: 537793 - DNA, 75 bp, synthetic construct
  source 1..75: mol_type = other DNA
atgttctttgcgccactgattattaatcgcatcggtgggaaaaatgccctgctgctggctggcactattatgtct

SEQ ID NO: 537794 - DNA, 75 bp, synthetic construct
  source 1..75: mol_type = other DNA
tgtttcggatccgggaggcggaaggaacaaaaaacagcctgatgcaggtagccggtgagcatatcgcgccacttc

SEQ ID NO: 537795 - DNA, 75 bp, synthetic construct
  source 1..75: mol_type = other DNA
ttttgctctttttcgccaaaacggatgcaccctcttccgccacggttgccaatgcggtaggtgccaaccattcgg

SEQ ID NO: 537796 - DNA, 75 bp, synthetic construct
  source 1..75: mol_type = other DNA
ataaagctgcaacctaccgtcgatgtcagaacaatggatgcctttgcaaacgggatgcgttcatataaatccatt

SEQ ID NO: 537797 - DNA, 75 bp, synthetic construct
  source 1..75: mol_type = other DNA
gaagacatatcgggtgttgctgaaccgtgttgattcatcaactgcacctgatattgagtggccggtaatacctgc

SEQ ID NO: 537798 - DNA, 75 bp, synthetic construct
  source 1..75: mol_type = other DNA
gaagaagtatcgggtgttgctgaaccgtattgatacatcaactgcaccggatattgtgtggcctgaaatcccttc

SEQ ID NO: 537799 - DNA, 75 bp, synthetic construct
  source 1..75: mol_type = other DNA
caaacatcattcattccccatttcggtgatggtcagttccagcctcccacctttggtattgcaccgccagatatt

SEQ ID NO: 537800 - DNA, 75 bp, synthetic construct
  source 1..75: mol_type = other DNA
tcctgctcctgtcagggttttggcgtaattcttcagtattcggtaatcggtcaaaacagaaccggggaaacgata

SEQ ID NO: 537801 - DNA, 75 bp, synthetic construct
  source 1..75: mol_type = other DNA
ctggaagcctggaaaaagtatcgggtgttgctgaaccgtgttaatacaacaactgcaccggatattgaatggcca

SEQ ID NO: 537802 - DNA, 75 bp, synthetic construct
  source 1..75: mol_type = other DNA
agcctggaaaaaatatcgggtgttgctgaaccgtgttaatacaacaactgcaccggatattgaatggccaacagt

SEQ ID NO: 537803 - DNA, 75 bp, synthetic construct
  source 1..75: mol_type = other DNA
gaagaagtatcgggtgttgctgaaccgtgttgatacatcaattgcaccggatattgagtggccaacagtacccat

SEQ ID NO: 537804 - DNA, 75 bp, synthetic construct
  source 1..75: mol_type = other DNA
aaagtatcgggtattgctgaaccgtgttgatacatcaactgcacctgatattgagtggccagcagcacctgtagg

SEQ ID NO: 537805 - DNA, 75 bp, synthetic construct
  source 1..75: mol_type = other DNA
acttgtggtgtagatcttttgaactttggtgaatatccaacggggttagtggcatatttacctgtggaggactct

SEQ ID NO: 537806 - DNA, 75 bp, synthetic construct
  source 1..75: mol_type = other DNA
cggggcgcaggtacgctcagtgccgctggtggaaggtgtcgatttcttcaatgaactggagcgcgccattcgtga

SEQ ID NO: 537807 - DNA, 75 bp, synthetic construct
  source 1..75: mol_type = other DNA
gctttacgcgcattgatcgtctcccgccctacgtttttaacattaccgctgaactgaaaatggctgcgcgtcggc

SEQ ID NO: 537808 - DNA, 75 bp, synthetic construct
  source 1..75: mol_type = other DNA
attgctgacgagctgggttttgatctccagcaaatccgtaaacagcgcgacccgttatttcgcaaaaatgtatta

SEQ ID NO: 537809 - DNA, 75 bp, synthetic construct
  source 1..75: mol_type = other DNA
tcagcaatgtgtgcgtgatattgctgaacagtataagcgtcgccgcgatgtgttggtaaaagggctacatgaagc

SEQ ID NO: 537810 - DNA, 75 bp, synthetic construct
  source 1..75: mol_type = other DNA
tcccggaaccatatgcggccatgggctcactggaatttgccaagaaactgcttaacgaagcgaaggtctgtgtct

SEQ ID NO: 537811 - DNA, 75 bp, synthetic construct
  source 1..75: mol_type = other DNA
cttaacgaagcgaaggtttgtgtctcgccggggatcggctttggcgactacggcgacacgcatgttcgctttgca

SEQ ID NO: 537812 - DNA, 75 bp, synthetic construct
  source 1..75: mol_type = other DNA
gccaacgcagctatcatccgaatggggttcggaggcgagcttgtagctcacggtatgcgttctattgcacgaaca

SEQ ID NO: 537813 - DNA, 75 bp, synthetic construct
  source 1..75: mol_type = other DNA
aaaaaattaaagatgaaaaatatgaggatataatgcacagagttgttaaccacgctcaccaacgaaatccaaata

SEQ ID NO: 537814 - DNA, 75 bp, synthetic construct
  source 1..75: mol_type = other DNA
atgttcactactcttatgtattggagaagatgaattacacgttgttaactcgcattgataaattaataacgttga

SEQ ID NO: 537815 - DNA, 75 bp, synthetic construct
  source 1..75: mol_type = other DNA
tgacaactcaatgtggaacattccggcggagttcatgaaaatgaagaagcctcacaaagttccactaagtaaaga

SEQ ID NO: 537816 - DNA, 75 bp, synthetic construct
  source 1..75: mol_type = other DNA
tttgacggcgatggtttgctgttgcgaatcgctcccctggcgaagggagggaagaaaaattggtatttcagatat

SEQ ID NO: 537817 - DNA, 75 bp, synthetic construct
  source 1..75: mol_type = other DNA
gcgcaagatggtctgatatagatatggataacaacatgtggaacatcccggctgaatttatgaagatgaaaaaac

SEQ ID NO: 537818 - DNA, 75 bp, synthetic construct
  source 1..75: mol_type = other DNA
gcacaatttcttgaatgggtatggacgcaactgatggaagccacgaaattcgcgtatgagggctcagtgaatggg

SEQ ID NO: 537819 - DNA, 75 bp, synthetic construct
  source 1..75: mol_type = other DNA
gaaaatctgtgcgcggtacgaggcgtcagacattgtgaacatgcaggagatgttctgcctgatggtatgtgcgct

SEQ ID NO: 537820 - DNA, 75 bp, synthetic construct
  source 1..75: mol_type = other DNA
tgccgatttgttaccgcttctcgaacgtgcgcttgtgggtaagctaaccgcaacacatagcaccgtgctgtcgcc

SEQ ID NO: 537821 - DNA, 75 bp, synthetic construct
  source 1..75: mol_type = other DNA
caacgcgggtgacattaggacactgcccgcaaggtctctttacggattgccgcaccggctgggaaatagaccccg

SEQ ID NO: 537822 - DNA, 75 bp, synthetic construct
  source 1..75: mol_type = other DNA
cagcattggacgcgcagattacgtgtcaattaccgatgatgaagcactggaagcctttaaaacgctgtgcctgca

SEQ ID NO: 537823 - DNA, 75 bp, synthetic construct
  source 1..75: mol_type = other DNA
tcctcccacgccctggctcatgcgctgaaaatgatgcgcgaaaacccggaaaaagagcagctactggtggttaac

SEQ ID NO: 537824 - DNA, 75 bp, synthetic construct
  source 1..75: mol_type = other DNA
gatcagaaaaatgttgactatattaaatcgttaggtttcaatgcatgccattttaaatcaaaagaaggtgtgcaa

SEQ ID NO: 537825 - DNA, 75 bp, synthetic construct
  source 1..75: mol_type = other DNA
ttaacaacctgaacaaacgcatgggcgatttgagggatattaatggcgaagccggtacgtgggtgcgtctgctga

SEQ ID NO: 537826 - DNA, 75 bp, synthetic construct
  source 1..75: mol_type = other DNA
acctcatttacacaggatgactgggagaacaggacgttcagctttggttcgctcgtgttaaaagatacagacttt

SEQ ID NO: 537827 - DNA, 75 bp, synthetic construct
  source 1..75: mol_type = other DNA
caatgatatattcaatggcggaatacaggcgaacaacagtaccgtgaatatctcctcagacagtgccgttctggg

SEQ ID NO: 537828 - DNA, 75 bp, synthetic construct
  source 1..75: mol_type = other DNA
ctggatgcaggaacatgcggcggaaattgcacagttaattcagcatattcatgataaggggccggtacgttcagc

SEQ ID NO: 537829 - DNA, 75 bp, synthetic construct
  source 1..75: mol_type = other DNA
ctgccgcacctctcccttgctgatgcgcgtaatcttcaccttgccgcacaaggcctgttaaacaaaccccgccgt

SEQ ID NO: 537830 - DNA, 75 bp, synthetic construct
  source 1..75: mol_type = other DNA
aacgcccggcgctggctgcctggcgtgatgtgcgtgctgaacagcagaaaattatccccgtaaatgtggagaggt

SEQ ID NO: 537831 - DNA, 75 bp, synthetic construct
  source 1..75: mol_type = other DNA
gagcgaatccagcgaggtgaacggtctggcggattaggtggctcaaacctcactacgccagaatggatcaacaat

SEQ ID NO: 537832 - DNA, 75 bp, synthetic construct
  source 1..75: mol_type = other DNA
gcaggtcatcggcccgatgtttgccggttataagccggaagattcggggctggatatcggcgacagcgccatcac

SEQ ID NO: 537833 - DNA, 75 bp, synthetic construct
  source 1..75: mol_type = other DNA
atgtgcaggggccaatgctgcgcgacgcgatgaaaattatcggcgaaatcgatctgcgcttaatgctggcgcagg

SEQ ID NO: 537834 - DNA, 75 bp, synthetic construct
  source 1..75: mol_type = other DNA
ccggggcaatggtttaccggcccggcgcagcaggtgatcggcccgatgtttgccggttataagccggaagattcg

SEQ ID NO: 537835 - DNA, 75 bp, synthetic construct
  source 1..75: mol_type = other DNA
gaaaatctgtgcgcggtacgaagcttcagatattgcgaacatgcaggaaatgttttgtctgatggtgagtgcgct

SEQ ID NO: 537836 - DNA, 75 bp, synthetic construct
  source 1..75: mol_type = other DNA
gaaaatctgcgcccggtacggggccaccgacatcgcgaacatgcaggaaatgttctgcctgatggtgtgtgcgct

SEQ ID NO: 537837 - DNA, 75 bp, synthetic construct
  source 1..75: mol_type = other DNA
cgcagcaggtcatcggcccgatgtttgccggttataagccggaagattctgggttggatattggcgacagcgcca

SEQ ID NO: 537838 - DNA, 75 bp, synthetic construct
  source 1..75: mol_type = other DNA
gccatcggtattaatccggttacgggatatggcagtggacttatgcaggtagattcccagcattttaacgaactg

SEQ ID NO: 537839 - DNA, 75 bp, synthetic construct
  source 1..75: mol_type = other DNA
agcggtgcggcgggaatgattgtggcgtatgcggaatatctgctggaggcgggctataacccgtctgaacatatg

SEQ ID NO: 537840 - DNA, 75 bp, synthetic construct
  source 1..75: mol_type = other DNA
tgctgatgtcgtaaagccaaccctgattcttttaagtggagaacccttatttgaaggcgccaatgatgaattcct

SEQ ID NO: 537841 - DNA, 75 bp, synthetic construct
  source 1..75: mol_type = other DNA
ctgctgattcaggcgctgacgccggggattattcaggcgggctattccgtcgagcaacagcgcgaagtgtttgag

SEQ ID NO: 537842 - DNA, 75 bp, synthetic construct
  source 1..75: mol_type = other DNA
tacaaaatagacccggatttactgagagcgatatcatggaaagaatcccgttaccgggttaatgccatcggtatt

SEQ ID NO: 537843 - DNA, 75 bp, synthetic construct
  source 1..75: mol_type = other DNA
tctttgatcaggcgagagaagccgcacccttaacacccgctaaacccgtattgcccaccgtgaatgcgcagccga

SEQ ID NO: 537844 - DNA, 75 bp, synthetic construct
  source 1..75: mol_type = other DNA
ggaatgggcgactggcgattctttattagtgagccgggaattatttcagttgaggatttacctcctggctgggga

SEQ ID NO: 537845 - DNA, 75 bp, synthetic construct
  source 1..75: mol_type = other DNA
caggcgctggttaatgtcggtgcacaaattgcggccatgacgccgggcgaactggcgtcatggctggcggagaaa

SEQ ID NO: 537846 - DNA, 75 bp, synthetic construct
  source 1..75: mol_type = other DNA
atatctcgccgaccaactggtgctaccgatggcgctggcgggcgcgggagaatttacggtcgcccatccctcatg

SEQ ID NO: 537847 - DNA, 75 bp, synthetic construct
  source 1..75: mol_type = other DNA
agttaccgcgccatgttgctgagcgtgaaatcgctacactggcggggagtttttccttgcatgaacagaatattc

SEQ ID NO: 537848 - DNA, 75 bp, synthetic construct
  source 1..75: mol_type = other DNA
aaccaatatcgccagtgccgtggagtatggtcggcaacttattgaacaaccagcaaaaagcgtcattatcctcgt

SEQ ID NO: 537849 - DNA, 75 bp, synthetic construct
  source 1..75: mol_type = other DNA
cgcgccaacctgcaacactggcacccgcaacacggcaagttgtatatcgaatccccccgctttaacagccgcatt

SEQ ID NO: 537850 - DNA, 75 bp, synthetic construct
  source 1..75: mol_type = other DNA
accttgctatgaccacgatacggcccaggcgctggtaaatgtcggcgcacaaatagccgccatgacaccgggcga

SEQ ID NO: 537851 - DNA, 75 bp, synthetic construct
  source 1..75: mol_type = other DNA
atgaaaaaattgatcaatgatgtgcaagacgtactggacgaacaactggcaggactggcgaaagcgcatccatcg

SEQ ID NO: 537852 - DNA, 75 bp, synthetic construct
  source 1..75: mol_type = other DNA
gggttgggatgggcatcgcagagagctgaaaattgatctgctggccgagtcttttcaggcgttggaacaattcca

SEQ ID NO: 537853 - DNA, 75 bp, synthetic construct
  source 1..75: mol_type = other DNA
ttacttcacgttgttaacggaagagtacggaaagtacatgggtggcccaggggtaattgctgttggggtaatcct

SEQ ID NO: 537854 - DNA, 75 bp, synthetic construct
  source 1..75: mol_type = other DNA
gccggtgcgcaggaaaaaacggctttattgtggcatgaagaacaatggtgtttaccagaaggtaataccccaaca

SEQ ID NO: 537855 - DNA, 75 bp, synthetic construct
  source 1..75: mol_type = other DNA
gccacaaagtcattaccaccttacgcctctttacgatgttttatcagcatggccggtaattggtcatggtaataa

SEQ ID NO: 537856 - DNA, 75 bp, synthetic construct
  source 1..75: mol_type = other DNA
ttacaccgccgggcggcgcggcgttgccaacacggtattaattgaaaaactggtgggtgcggcggcggaacgtgg

SEQ ID NO: 537857 - DNA, 75 bp, synthetic construct
  source 1..75: mol_type = other DNA
tgaacctgctggtggtcttcaagtacctgatgcaggagcacagtgtggcaggggcggccaaaaagctctgcgtca

SEQ ID NO: 537858 - DNA, 75 bp, synthetic construct
  source 1..75: mol_type = other DNA
aaggtaaaacctgatttactgattgcccgccagggggtgaaattaaagttcgacgattttcagcaaaccacccag

SEQ ID NO: 537859 - DNA, 75 bp, synthetic construct
  source 1..75: mol_type = other DNA
atcgcctccgacatgaataaacccaacggccagtttgtgattacgccggcagaagttccggcatttttacaaacc

SEQ ID NO: 537860 - DNA, 75 bp, synthetic construct
  source 1..75: mol_type = other DNA
ggtgatgtacaaaagtgtgatctggtgattctgcttaaacgctttggcaaatttggccgcattttgtgggagcgt

SEQ ID NO: 537861 - DNA, 75 bp, synthetic construct
  source 1..75: mol_type = other DNA
atttggccgcattttgtgggagcgtagtcagggcattgacgaacgcgacgttaacagcgaaaggttgcgaaaatc

SEQ ID NO: 537862 - DNA, 75 bp, synthetic construct
  source 1..75: mol_type = other DNA
gtgaagcgattattgagcggctgtatcctgaacttgaacgccgtctggcaaaggtaaaacctgatttactgattg

SEQ ID NO: 537863 - DNA, 75 bp, synthetic construct
  source 1..75: mol_type = other DNA
caacaatactataacaatataaaaaaagttcaggagtttaatggtattgagcacttaaaagataattacgatgct

SEQ ID NO: 537864 - DNA, 75 bp, synthetic construct
  source 1..75: mol_type = other DNA
aggatacacttactcccctgacttcgcttatgttgtaaacacgtcaaagggtgattatctgaaccttattattga

SEQ ID NO: 537865 - DNA, 75 bp, synthetic construct
  source 1..75: mol_type = other DNA
tccatgatttaacactggatgccttaaacaagagcactgctgtattgagtaatggtattgaactaaaaattggta

SEQ ID NO: 537866 - DNA, 75 bp, synthetic construct
  source 1..75: mol_type = other DNA
aatggtattgagttgaagattggtagctcaataaatccctattcttacgatcagacactcgctgataacatgatg

SEQ ID NO: 537867 - DNA, 75 bp, synthetic construct
  source 1..75: mol_type = other DNA
gctactgatggaaaaagacgcactaaaatgcgtgttggtaagttcagtgagctgaaagaactatgggatttgatc

SEQ ID NO: 537868 - DNA, 75 bp, synthetic construct
  source 1..75: mol_type = other DNA
aaggccacgcataaagcctcttactcttttctttattgacgatattgaaggctatcgtgacggtaatgatattgc

SEQ ID NO: 537869 - DNA, 75 bp, synthetic construct
  source 1..75: mol_type = other DNA
tcggcaaagtctcggcggcaaaactggaagcgatgggctgcggacctgcggtgatgtacaaaagtgtgatctggt

SEQ ID NO: 537870 - DNA, 75 bp, synthetic construct
  source 1..75: mol_type = other DNA
accgatgacgataaaagcatcatcgaggaagctgccgcaatgtctaaccagagcattactcagtttatggttagc

SEQ ID NO: 537871 - DNA, 75 bp, synthetic construct
  source 1..75: mol_type = other DNA
gccatcgccatgctgctgatgtttattgtcggctttgccatgagtgccggtccgctgatttgggtactgtgctcc

SEQ ID NO: 537872 - DNA, 75 bp, synthetic construct
  source 1..75: mol_type = other DNA
gccaaacgttgaagtactgattctttcccgcgttctgctggggctggcggtgggtgtggcctcttataccgcacc

SEQ ID NO: 537873 - DNA, 75 bp, synthetic construct
  source 1..75: mol_type = other DNA
atcaacaaagatattaatggcgtggtgcgctgggacttcgcaccattgcaatcgctggaactggaagcgggttac

SEQ ID NO: 537874 - DNA, 75 bp, synthetic construct
  source 1..75: mol_type = other DNA
cctgaccggcgtgcgaattgaagggctcacctattcactattctcatttacccgtaaatgcggtcaggcaatcgg

SEQ ID NO: 537875 - DNA, 75 bp, synthetic construct
  source 1..75: mol_type = other DNA
tctgaatgaagaatcctggaatctggttatggacgctataagcaatcctccggcaccgaacgacaagctgaaacg

SEQ ID NO: 537876 - DNA, 75 bp, synthetic construct
  source 1..75: mol_type = other DNA
cgtctgcttccttgccgctctggcgggattactctttggcctggatatcggtgtaattgctggcgcactgccgtt

SEQ ID NO: 537877 - DNA, 75 bp, synthetic construct
  source 1..75: mol_type = other DNA
tcacatatgacattattagtcaactccatttaccacaaaatggctatttcatggaacgcagtaatttcttagtgg

SEQ ID NO: 537878 - DNA, 75 bp, synthetic construct
  source 1..75: mol_type = other DNA
agaagttccggcatttttacaaaccttaccgctggcaaaaatccccggcgtcggcaaagtctcggcggcaaaact

SEQ ID NO: 537879 - DNA, 75 bp, synthetic construct
  source 1..75: mol_type = other DNA
cggtgcggtgggtagcggctggctctcttttaaactcggacgtaaaaagagcctgatgatcggcgctattctgtt

SEQ ID NO: 537880 - DNA, 75 bp, synthetic construct
  source 1..75: mol_type = other DNA
ggattactctttggcctggatatcggtgtaattgctggcgcactgccgtttattgcagatgaattccagattacc

SEQ ID NO: 537881 - DNA, 75 bp, synthetic construct
  source 1..75: mol_type = other DNA
ttccgccgcgcggtgttccttggcgtactgttgcaggtaatgcagcaattcaccgggatgaacgtcatcatgtat

SEQ ID NO: 537882 - DNA, 75 bp, synthetic construct
  source 1..75: mol_type = other DNA
aaaatttaatgctcaatatatcatccgctatggcgcaacctttagtgaaggctataagaacttagtttatcgtct

SEQ ID NO: 537883 - DNA, 75 bp, synthetic construct
  source 1..75: mol_type = other DNA
ttccggagctgattgcccgcatcaaagcgttgtttcgtcgtcaggaagccatggggcaaaatattctcctggcag

SEQ ID NO: 537884 - DNA, 75 bp, synthetic construct
  source 1..75: mol_type = other DNA
atgggtaaaaccgaaatcattgccgaaaccggtgccggtcagcatggcgtggcgtcggcccttgccagcgccctg

SEQ ID NO: 537885 - DNA, 75 bp, synthetic construct
  source 1..75: mol_type = other DNA
gccgttatcgcctgtgttggcggcggttcgaatgccatcggcatgtttgctgatttcatcaacgaaaccgacgtc

SEQ ID NO: 537886 - DNA, 75 bp, synthetic construct
  source 1..75: mol_type = other DNA
aagccgctgattaaccgactaaattatcgcattcatatccgtaatccattgctggaagatattaaagcagaatta

SEQ ID NO: 537887 - DNA, 75 bp, synthetic construct
  source 1..75: mol_type = other DNA
gttagagtgcagctcaattaaacctaatttaaaaggtgataagtttagtttgattgtgacaactgtcgacgaggc

SEQ ID NO: 537888 - DNA, 75 bp, synthetic construct
  source 1..75: mol_type = other DNA
atatcactctatatatgatattttctcaaaaattgattgtgtatttaaaaaagagtacccgcaattcagtgataa

SEQ ID NO: 537889 - DNA, 75 bp, synthetic construct
  source 1..75: mol_type = other DNA
atgggtaaaaccgaaatcatcgccgaaaccggtgccggtcagcatggcgtggcctctgcccttgccagcgccctg

SEQ ID NO: 537890 - DNA, 75 bp, synthetic construct
  source 1..75: mol_type = other DNA
aaaccggtgccggtcagcatggtgtggcgtctgcccttgccagcgccctgcttggcctgaaatgtcgaatttata

SEQ ID NO: 537891 - DNA, 75 bp, synthetic construct
  source 1..75: mol_type = other DNA
tgggtgccaaagacgttgaacgccagtcgcctaacgtttttcgtatgcgcttaatgggtgcggaagtgatcccgg

SEQ ID NO: 537892 - DNA, 75 bp, synthetic construct
  source 1..75: mol_type = other DNA
tcaattaccgatgatgaagcactggaagccttcaaaacgctctgcctgcacgaagggattatcccggcgctggaa

SEQ ID NO: 537893 - DNA, 75 bp, synthetic construct
  source 1..75: mol_type = other DNA
ggaaagagaaggtcgcctgccggatgcggttatcgcttgtgttggcggcggttcaaatgccatcggcatgtttgc

SEQ ID NO: 537894 - DNA, 75 bp, synthetic construct
  source 1..75: mol_type = other DNA
ggtctgataggtgttgagccaggtggtcatggcatcgaaaccggcgagcacggtgcaccgttgaaacatggtcgc

SEQ ID NO: 537895 - DNA, 75 bp, synthetic construct
  source 1..75: mol_type = other DNA
tcaaccaacgacagcgtctatgggtactgatggaaactcatacgtgccagccacttttatacccgttacaatatc

SEQ ID NO: 537896 - DNA, 75 bp, synthetic construct
  source 1..75: mol_type = other DNA
attttacagaaaaagattttgtcgattctcttgtcaaagagatcaacgatagttctttcaaagagactgttccaa

SEQ ID NO: 537897 - DNA, 75 bp, synthetic construct
  source 1..75: mol_type = other DNA
ctaaacaaatcatttggcattaacaagtttattatcattgttccgactctatcgatcaaagccggaaccgttaac

SEQ ID NO: 537898 - DNA, 75 bp, synthetic construct
  source 1..75: mol_type = other DNA
ctatctgacgcttaccgggctggataaagcggcatgtgttagtcttgcaaccttgaacttaggtacttcagcgaa

SEQ ID NO: 537899 - DNA, 75 bp, synthetic construct
  source 1..75: mol_type = other DNA
taaaacatgcgcaagcattattcagtcaaataagtaaatctgtcaaagtcgagtttagaacacaattttctacag

SEQ ID NO: 537900 - DNA, 75 bp, synthetic construct
  source 1..75: mol_type = other DNA
ttcaaaagcaccattagatacttatctttttgaagaggttttttatgattcagagcttgaaaggcgtaatataac

SEQ ID NO: 537901 - DNA, 75 bp, synthetic construct
  source 1..75: mol_type = other DNA
tatattgtcaaaacaataaaaggtgattatttaaactttattatcgaaacaaaaaatgttgatggaaaggatagc

SEQ ID NO: 537902 - DNA, 75 bp, synthetic construct
  source 1..75: mol_type = other DNA
tattgttacaatacgttctgtctttttaggcttctttatgggaagtgtaagccctgaaggattatcagagagagc

SEQ ID NO: 537903 - DNA, 75 bp, synthetic construct
  source 1..75: mol_type = other DNA
ttttgattctggtcttagatcagttcattgagagcttaccagttatcacactggtaaagaaaaaactagctctca

SEQ ID NO: 537904 - DNA, 75 bp, synthetic construct
  source 1..75: mol_type = other DNA
aaaattaaggccaactcacacttggcagccatagacttttctatcgttggattgatggatgaagccaaggatgaa

SEQ ID NO: 537905 - DNA, 75 bp, synthetic construct
  source 1..75: mol_type = other DNA
attactccatcggaagctgcaaatgctactagtggcggctgtcgagatggcaatgacaaccgtgtaacttatttt

SEQ ID NO: 537906 - DNA, 75 bp, synthetic construct
  source 1..75: mol_type = other DNA
ttacaagaagggtgaagagattatgaatccatttggtggtaaattaaatgtgggagcatctggtgccaataataa

SEQ ID NO: 537907 - DNA, 75 bp, synthetic construct
  source 1..75: mol_type = other DNA
atgccaataaatttaacaccatatctaacagcgagtgggggactgggggactgggggactgggggactgggggaa

SEQ ID NO: 537908 - DNA, 75 bp, synthetic construct
  source 1..75: mol_type = other DNA
actcagtctgttctgaccatcacttctaacgtagtgtatggtaagaaaacgggtaacaccccagacggtcgtcgt

SEQ ID NO: 537909 - DNA, 75 bp, synthetic construct
  source 1..75: mol_type = other DNA
gaagacggtctggctatcgacttcgaaatcgaaggtgaatacccgcagtttggtaacaacgatccgcgtgtagat

SEQ ID NO: 537910 - DNA, 75 bp, synthetic construct
  source 1..75: mol_type = other DNA
cgactcgctggaagcctgcgctgaactgggccgccgtttaaataaccttggtcactcgattggcatcgcgctggg

SEQ ID NO: 537911 - DNA, 75 bp, synthetic construct
  source 1..75: mol_type = other DNA
atcttggcgcaactccgctttctgagctgtacggcgtctataaccgcctgaccacacgttgccagcaagcgggat

SEQ ID NO: 537912 - DNA, 75 bp, synthetic construct
  source 1..75: mol_type = other DNA
acgctgaagtcgatgctggatgttgtgcgtaagtttggcgttgatgtgattgccgaaactaacgtgccgctggac

SEQ ID NO: 537913 - DNA, 75 bp, synthetic construct
  source 1..75: mol_type = other DNA
ggtaaagacgacgaagttcgtaagaccaacctggctggtctgatggatggttatttccaccacgaagcatccatc

SEQ ID NO: 537914 - DNA, 75 bp, synthetic construct
  source 1..75: mol_type = other DNA
acgaaatcgactggaaaatcccgactaaaaacatcattacgcagggacaaggtaaaaagtggtcagaggctgaca

SEQ ID NO: 537915 - DNA, 75 bp, synthetic construct
  source 1..75: mol_type = other DNA
tgtttttcccgaacgtggcgacattcaacacccaaaacatcatgctggacaccctggacattgaagaggttacga

SEQ ID NO: 537916 - DNA, 75 bp, synthetic construct
  source 1..75: mol_type = other DNA
atcctaataagggattatttacactagaatatttatgggagttaacagattttataacccaacaatatgataata

SEQ ID NO: 537917 - DNA, 75 bp, synthetic construct
  source 1..75: mol_type = other DNA
aaattcagtccactgtttacgtcgctgtttttcccgaaagtagcgacattcaacacgcaaaacatcatgctggat

SEQ ID NO: 537918 - DNA, 75 bp, synthetic construct
  source 1..75: mol_type = other DNA
aaatttagtccgctgtttaccacgctgtttttcccgaaagtagcgacattcaacacccaaaacatcatgctggat

SEQ ID NO: 537919 - DNA, 75 bp, synthetic construct
  source 1..75: mol_type = other DNA
ctggattgagggcggcgatccgtcgattgaatacgtgcagacgcacagcgcaccacagccggttccggcagatat

SEQ ID NO: 537920 - DNA, 75 bp, synthetic construct
  source 1..75: mol_type = other DNA
gttccacgccagcattcgagtggcgacaagcatctgcggacactttttattcatggtgcccgcgctgtcgtcagg

SEQ ID NO: 537921 - DNA, 75 bp, synthetic construct
  source 1..75: mol_type = other DNA
agaatacataattgctcaagccaaattccgaggacaacaggttagtcattctatgtgtgaaggttttgttgtcca

SEQ ID NO: 537922 - DNA, 75 bp, synthetic construct
  source 1..75: mol_type = other DNA
tcaatggtggactcggtgatccactccgcagtgatggcggcctgtttatggcagttacccggtattcgtacccat

SEQ ID NO: 537923 - DNA, 75 bp, synthetic construct
  source 1..75: mol_type = other DNA
tctctctggtttaaaattaaatatagaattaagttgacgatgattatttttcgtaaagcattaaccattaataaa

SEQ ID NO: 537924 - DNA, 75 bp, synthetic construct
  source 1..75: mol_type = other DNA
tcggcgctctcctgcccggtaggttttaaaaatggtaccgacggcaacacacggattgccgtggatgctatccgc

SEQ ID NO: 537925 - DNA, 75 bp, synthetic construct
  source 1..75: mol_type = other DNA
acacgcttcggtaaggatatgccaggggcaatggcggaatacggcagggagtatatgaaacggaaaacgaagcat

SEQ ID NO: 537926 - DNA, 75 bp, synthetic construct
  source 1..75: mol_type = other DNA
ggagtaccgctggcgtcgctgatcattgctatcgcgccgttctgtgccttcctagcgtcgattttcctgctgccg

SEQ ID NO: 537927 - DNA, 75 bp, synthetic construct
  source 1..75: mol_type = other DNA
atatccttaataaagactcacaaatcccctgggtaagtaaatatggcgattactattataatttctggcaggatc

SEQ ID NO: 537928 - DNA, 75 bp, synthetic construct
  source 1..75: mol_type = other DNA
atgacagtattatccggcagtatctcccacaattcagtctccgacgatgaattcctgtggctggaagagctgcag

SEQ ID NO: 537929 - DNA, 75 bp, synthetic construct
  source 1..75: mol_type = other DNA
tgtgtcgaaaacctgttttgacttcgcagttacgcttatgacggaaacgcgagcaacacccaagacaaaaacatt

SEQ ID NO: 537930 - DNA, 75 bp, synthetic construct
  source 1..75: mol_type = other DNA
cagcggtgatggcggcctgtttatggcagttacccggcattcgtacccatctggtggcgtttgacaccagcgtgg

SEQ ID NO: 537931 - DNA, 75 bp, synthetic construct
  source 1..75: mol_type = other DNA
tgattgagcggctggaaagcgatgccgtactgcgctacggcattgaagatgtggtgacgaatctcgacgtgctgg

SEQ ID NO: 537932 - DNA, 75 bp, synthetic construct
  source 1..75: mol_type = other DNA
acaaagcggcactgaaacaaaaccggcaccgttcttttgaggattttgctgccgtggcaaaagatctgattgcac

SEQ ID NO: 537933 - DNA, 75 bp, synthetic construct
  source 1..75: mol_type = other DNA
tgacagcgacggcacagaaaaatatttccttgagcctgatttgcttgtcctgggcaacaccaacaataaagggct

SEQ ID NO: 537934 - DNA, 75 bp, synthetic construct
  source 1..75: mol_type = other DNA
tccgattgggctgaaggggggatggaatttttatcagtatccgttgaatccggtcataaatgtagatccgcaagg

SEQ ID NO: 537935 - DNA, 75 bp, synthetic construct
  source 1..75: mol_type = other DNA
atggggtaagccttttagttccacaggctatggggggatatgatgttgtgcttgatatcaaaaaagcaggaaatg

SEQ ID NO: 537936 - DNA, 75 bp, synthetic construct
  source 1..75: mol_type = other DNA
tacgtcaggtaatcgaggcgcgaggggggatttccgaagccgccaggaaatcggggcttgcccgtcagagtattt

SEQ ID NO: 537937 - DNA, 75 bp, synthetic construct
  source 1..75: mol_type = other DNA
aaagaccttggtaattggataacatatgggccatctgggcaccccatttctaatatgcaaggtacgccagaaaaa

SEQ ID NO: 537938 - DNA, 75 bp, synthetic construct
  source 1..75: mol_type = other DNA
cggcgcgaaaaatccacctgtaccactgcgaccatcgcggcctgccgctggcgctcatcagcacggaaggggcaa

SEQ ID NO: 537939 - DNA, 75 bp, synthetic construct
  source 1..75: mol_type = other DNA
gcagtatcatgacagctaaagatctagcatatctaattaaatttgatgggaattataaagatgggatgacagttt

SEQ ID NO: 537940 - DNA, 75 bp, synthetic construct
  source 1..75: mol_type = other DNA
cgtgcagaaaagcctttgaacgagcagtaaagcgagctggcatcgagctgccagagggccaatgcactcacgtgc

SEQ ID NO: 537941 - DNA, 75 bp, synthetic construct
  source 1..75: mol_type = other DNA
tacggtgttgagcaagaaagatttcaccattgaactcaaagagtgcgatgggatatccaaagcgaccgttgagat

SEQ ID NO: 537942 - DNA, 75 bp, synthetic construct
  source 1..75: mol_type = other DNA
gcgagttatgtcgttgtaaacgccaatgcaacgtctggacatgcaaatgccatggtcaatttctccgtggagtat

SEQ ID NO: 537943 - DNA, 75 bp, synthetic construct
  source 1..75: mol_type = other DNA
atcacgtactgtgtgcccggagttcagggcgagcatagacgctcaaatgaaccacgagtctgtctggaatattga

SEQ ID NO: 537944 - DNA, 75 bp, synthetic construct
  source 1..75: mol_type = other DNA
aggccatcagttaactaaataccggatcacctataccaaaactaaaggcaagaaaaaccgtaccataccgatatc

SEQ ID NO: 537945 - DNA, 75 bp, synthetic construct
  source 1..75: mol_type = other DNA
cgtgcagaaaagcctttgagcgtgcagttaaacgggccggtatcgaactgcctgagggtcaatgtacccacgtcc

SEQ ID NO: 537946 - DNA, 75 bp, synthetic construct
  source 1..75: mol_type = other DNA
tgccaccatcggcttctttgtggcgatggcggtcgcggtgcatcgtggaaatctgttccgcaccttaatctcggg

SEQ ID NO: 537947 - DNA, 75 bp, synthetic construct
  source 1..75: mol_type = other DNA
atgagcacgatcagccgtatacggagaactccgacgccgcgctaccgggtcagcaatcttctgtttctcccaaaa

SEQ ID NO: 537948 - DNA, 75 bp, synthetic construct
  source 1..75: mol_type = other DNA
tggtcgctttattgaggctaaacaggcgtcccgcgaatactacggcgagcaggacggcaagctgctggacgatat

SEQ ID NO: 537949 - DNA, 75 bp, synthetic construct
  source 1..75: mol_type = other DNA
gcgtaggcgacatcatcaagatcaccatcaaagaagcaattccgcgtggtaaggtcaaaaaaggggatgtgctga

SEQ ID NO: 537950 - DNA, 75 bp, synthetic construct
  source 1..75: mol_type = other DNA
tgtttttcccgaacgtggcgacattcagcacgcaaaacatcatgctggataccctggacattgaagaagtcacca

SEQ ID NO: 537951 - DNA, 75 bp, synthetic construct
  source 1..75: mol_type = other DNA
agttgcttgtaaggcaaacaagaagacggaaacttgaagatgagcataacgcctttgtgtggtccttaatgagtg

SEQ ID NO: 537952 - DNA, 75 bp, synthetic construct
  source 1..75: mol_type = other DNA
ccgacatggcaggcaggctgatggtacatgctctgaaactggctgcaggatacgacgatatctcagtcgtggcaa

SEQ ID NO: 537953 - DNA, 75 bp, synthetic construct
  source 1..75: mol_type = other DNA
caatgctgctcacgcgtatgacgcgggtagtgaatgtcgatatctggaatatctggcatatgaccttcaccggcg

SEQ ID NO: 537954 - DNA, 75 bp, synthetic construct
  source 1..75: mol_type = other DNA
aagcaggcgcgtagccgtttacaggcgaagttcggcggtcaggagtttttgattgggcttgatccggcgttgttg

SEQ ID NO: 537955 - DNA, 75 bp, synthetic construct
  source 1..75: mol_type = other DNA
gatcccgcattactgctggggcatacggcggtggtatcggcaagcctgatttttatcccgctcaccattttaatt

SEQ ID NO: 537956 - DNA, 75 bp, synthetic construct
  source 1..75: mol_type = other DNA
caacaccgctggattatggagagttgtacacagcattgcagcaaggtgtggttgatatggcggaaaacagtgtga

SEQ ID NO: 537957 - DNA, 75 bp, synthetic construct
  source 1..75: mol_type = other DNA
tatcgggattggctttgttggcattggcctggtgattggcttaatgctggattccattggcccggcggcgaaagc

SEQ ID NO: 537958 - DNA, 75 bp, synthetic construct
  source 1..75: mol_type = other DNA
agctgggcgactggtttgcacgcgatacccgtgatttctttgagctggaaggcattgccattccgcacggcacat

SEQ ID NO: 537959 - DNA, 75 bp, synthetic construct
  source 1..75: mol_type = other DNA
tggcgctcacccaacatctcaccccatctcgttcacaaggtctggaagcgaatgattcgcgcaattcgcgccaaa

SEQ ID NO: 537960 - DNA, 75 bp, synthetic construct
  source 1..75: mol_type = other DNA
acagctttcatccggttggctcacattgccgggtggtcaatgtttacactggcctgcacaggagtgttttggttt

SEQ ID NO: 537961 - DNA, 75 bp, synthetic construct
  source 1..75: mol_type = other DNA
aattgctgcgtaactttttacgctgcgccaactgggaagagaaatatctctacattattgaactgggacagcgtc

SEQ ID NO: 537962 - DNA, 75 bp, synthetic construct
  source 1..75: mol_type = other DNA
cagtttttttgtatcggactgatgcgcaatggggggactgttacacctgatattgtgtgtaaggtggatttgttt

SEQ ID NO: 537963 - DNA, 75 bp, synthetic construct
  source 1..75: mol_type = other DNA
ttatgctacgggagaaggtgtaagggtgtattataaaggtgatgtctggactgatagtgatttctcaagtgcatt

SEQ ID NO: 537964 - DNA, 75 bp, synthetic construct
  source 1..75: mol_type = other DNA
gatgtgcgcccgtggtttgaaaaaatggctctcactcaacatctcaccccatcacgttcgcaaggtctggaagcg

SEQ ID NO: 537965 - DNA, 75 bp, synthetic construct
  source 1..75: mol_type = other DNA
ccggcagttccagcgcctgccgaaccccgatctaaccatgtacgtgtttccgcatctcgcaggcaccgatccggt

SEQ ID NO: 537966 - DNA, 75 bp, synthetic construct
  source 1..75: mol_type = other DNA
gttctgctgcggcagcccgtgacacactgcggcgtccgctgacagaaacggaacagcaggacgctgcgcagacgg

SEQ ID NO: 537967 - DNA, 75 bp, synthetic construct
  source 1..75: mol_type = other DNA
gtgaagcattttttttctgtaatgaccctgattaccgtcacgctgacactgtctggctgtgcgacatcaaaagag

SEQ ID NO: 537968 - DNA, 75 bp, synthetic construct
  source 1..75: mol_type = other DNA
ccatgatggaaatggctaagtattattatgctactggtgaaagtataagggtctattataaggaaaatgtgtgga

SEQ ID NO: 537969 - DNA, 75 bp, synthetic construct
  source 1..75: mol_type = other DNA
atgaaacagaaaatgaaatatttcttaattactctttcattgttatctggtaccagtcatgcagtaatgagtgat

SEQ ID NO: 537970 - DNA, 75 bp, synthetic construct
  source 1..75: mol_type = other DNA
tccattattgcggataataatattcagaccctgcgtcggttcttcgatgcggagctggatgaagaaagtatccgc

SEQ ID NO: 537971 - DNA, 75 bp, synthetic construct
  source 1..75: mol_type = other DNA
ttatgctactggtgaagatgtaaaggtttactataaaggaaatgtatggactgatagtgatttttctaatgcttt

SEQ ID NO: 537972 - DNA, 75 bp, synthetic construct
  source 1..75: mol_type = other DNA
atgaaagtaaaagatggaaaaggagatgaatatgatgcgatatgcaaaaaaccattcagaatcaactctgggaat

SEQ ID NO: 537973 - DNA, 75 bp, synthetic construct
  source 1..75: mol_type = other DNA
catcggtattaacccggttacgggatatggcagtggacttatgcaggtagactcccagcattttaacgaactggc

SEQ ID NO: 537974 - DNA, 75 bp, synthetic construct
  source 1..75: mol_type = other DNA
atgaaaaagtggatgttagcaatctgcctgatgtttataagtgggatctgcgaagccgccgattgttttgatctt

SEQ ID NO: 537975 - DNA, 75 bp, synthetic construct
  source 1..75: mol_type = other DNA
ttatctggcaatagcgtttaaaaaatggggcgtctcctgggaggccgttggtgcatacaatgcgggattcaggaa

SEQ ID NO: 537976 - DNA, 75 bp, synthetic construct
  source 1..75: mol_type = other DNA
ttatctggcaatagcgtttaaaaaatggggcgtcacctgggaggccgttggtgcatacaatgctggattcaggaa

SEQ ID NO: 537977 - DNA, 75 bp, synthetic construct
  source 1..75: mol_type = other DNA
ttatctggcaatagcttttaaaaaatggggcgtcacctgggaggccgttggtgcatacaatgcgggattcaggaa

SEQ ID NO: 537978 - DNA, 75 bp, synthetic construct
  source 1..75: mol_type = other DNA
gctatctaatttgattgagcgtaacagcgaaaaatttaagaaagcaaaagagcgccaggacaaaatgaaggcaga

SEQ ID NO: 537979 - DNA, 75 bp, synthetic construct
  source 1..75: mol_type = other DNA
atgggcaacgaaattttggtaactaccaatgaggcaatgttcgaagctataaccacaacaaaattgcggttagcg

SEQ ID NO: 537980 - DNA, 75 bp, synthetic construct
  source 1..75: mol_type = other DNA
ctaatttcacgtcagcgttttcaggaacagaattaattgctataacgacgtgtcgctcatctgattattgcatgg

SEQ ID NO: 537981 - DNA, 75 bp, synthetic construct
  source 1..75: mol_type = other DNA
tgaagctgatcaggaggcagataaagcgctggagtacctgaaatccgtgccggagcagtttacatcccgcgatct

SEQ ID NO: 537982 - DNA, 75 bp, synthetic construct
  source 1..75: mol_type = other DNA
gatatgctcgtcacggtatcattacgtatgaccgtaaactgacagatgaagaagtcagccagtacgagttgctct

SEQ ID NO: 537983 - DNA, 75 bp, synthetic construct
  source 1..75: mol_type = other DNA
gcaacgtgggctgactgaaaagcgtgctgctcttacggagatgcaaaaaaaacttgatgcccagaaagccatcaa

SEQ ID NO: 537984 - DNA, 75 bp, synthetic construct
  source 1..75: mol_type = other DNA
cgatgctggaaatctggcaggggcagtctggcggcggaagtgcccgttctgctgcggcagcccgtgacacactgc

SEQ ID NO: 537985 - DNA, 75 bp, synthetic construct
  source 1..75: mol_type = other DNA
ttatacaaaggcatcaccgaccgggagccggagaactggcgcgattacctgcaacggatccgcgaacaggcagag

SEQ ID NO: 537986 - DNA, 75 bp, synthetic construct
  source 1..75: mol_type = other DNA
caggcctctgtgtatcgtcaggctctcggaaatgaccaggttggccagtcaccaggtatcttaggcgaaagtacc

SEQ ID NO: 537987 - DNA, 75 bp, synthetic construct
  source 1..75: mol_type = other DNA
gggaacgccgagatcgtaccgttcagcccgcgccgttatctgtatcacgcttatctggcttatatgcgggctaac

SEQ ID NO: 537988 - DNA, 75 bp, synthetic construct
  source 1..75: mol_type = other DNA
tatgagggcgcacgggttcagtaagcccgtaacactgacgcgctttggtgcggatatgccaggtgcaatggcgga

SEQ ID NO: 537989 - DNA, 75 bp, synthetic construct
  source 1..75: mol_type = other DNA
tcacctgattggattcagtaacggggtatttgatacccgtacaggtgatttccgtgaacacgataaaaatgactg

SEQ ID NO: 537990 - DNA, 75 bp, synthetic construct
  source 1..75: mol_type = other DNA
caagccagcgcggcgaagttcttctggcacattatggcggcgaactggcaataaacgccgactctgacacagtgc

SEQ ID NO: 537991 - DNA, 75 bp, synthetic construct
  source 1..75: mol_type = other DNA
tgaaaaaatactgaatggtgaagataagcgactgttggtcattattggcccctgctcgatccacgatctcaccgc

SEQ ID NO: 537992 - DNA, 75 bp, synthetic construct
  source 1..75: mol_type = other DNA
aagcgactgttggtcgttattggtccctgttcgatccacgatcttaccgctgcaatggagtacgccacccgtctg

SEQ ID NO: 537993 - DNA, 75 bp, synthetic construct
  source 1..75: mol_type = other DNA
gcagcccgcgccagccatatgttcctctcaccagacaaaaacggtcagatgaccatctatcagaccagcggcaac

SEQ ID NO: 537994 - DNA, 75 bp, synthetic construct
  source 1..75: mol_type = other DNA
ccaaacagcttttgcatgagcagcagaaatcagaagaggcgctggccatcaaacgtgaaggggattcactggtgg

SEQ ID NO: 537995 - DNA, 75 bp, synthetic construct
  source 1..75: mol_type = other DNA
cgcaatggctgaatatggcaaggagtaccagaagcgcaaaactaaacatggcataagatcgaacgtcaccctgca

SEQ ID NO: 537996 - DNA, 75 bp, synthetic construct
  source 1..75: mol_type = other DNA
cttctcactgatacgcctgccggaccaggaaaaatggagcggcgacggagccggactcaaggccatcaccggcgg

SEQ ID NO: 537997 - DNA, 75 bp, synthetic construct
  source 1..75: mol_type = other DNA
gatcgcgtgctggctgcattattcatggtgctggcgaaccggtacgactggcagttattcattgaggtaacaggt

SEQ ID NO: 537998 - DNA, 75 bp, synthetic construct
  source 1..75: mol_type = other DNA
tggcgctgttggatcatgatgatatgttgccagagcatgctctgctatttatggctcaggctatttgtgagcagc

SEQ ID NO: 537999 - DNA, 75 bp, synthetic construct
  source 1..75: mol_type = other DNA
tgtgcaacgtgtgctgtgcgaatatgaagccaaggatagccgaatcaaggttgtctatcgagagcaaaatggtca

SEQ ID NO: 538000 - DNA, 75 bp, synthetic construct
  source 1..75: mol_type = other DNA
gtgtgatggcggagatttgcaccatgctggcgggtaaggctaatacagtatcagcaagcatgaaggcgctggaag

SEQ ID NO: 538001 - DNA, 75 bp, synthetic construct
  source 1..75: mol_type = other DNA
acggcgttgtatgggagccgattcaggataaagagttacagcgtgctatggcgcagattttcattgatgcggaga

SEQ ID NO: 538002 - DNA, 75 bp, synthetic construct
  source 1..75: mol_type = other DNA
agatcagctattcgcagaacgccattaaatcggcggtcgataccatgaagttaagtttgcctgtaatggggaata

SEQ ID NO: 538003 - DNA, 75 bp, synthetic construct
  source 1..75: mol_type = other DNA
cttctgaggagaagagctataccacggaggctggcatcaaagcgttacgcgactatttttctaaacagcaacctg

SEQ ID NO: 538004 - DNA, 75 bp, synthetic construct
  source 1..75: mol_type = other DNA
ccgaaatcttattggtttcagcaacggggtttttgatacccggttagggcaatttcgaccacatgataaaaagga

SEQ ID NO: 538005 - DNA, 75 bp, synthetic construct
  source 1..75: mol_type = other DNA
gaaatcagaagaggcgctggccatcaaacgtgaaggggattcactggtggacttttgcggctacctgatggcttc

SEQ ID NO: 538006 - DNA, 75 bp, synthetic construct
  source 1..75: mol_type = other DNA
catacccagctggcggaattaccccacctgcgcattgttgataaaggacgccgatttgcccgtgtctgtcaggcc

SEQ ID NO: 538007 - DNA, 75 bp, synthetic construct
  source 1..75: mol_type = other DNA
cgggaattaaggctattacaggcggtgacaaggtggcaatcgacccaaaacataaagccccatattcaacgcgta

SEQ ID NO: 538008 - DNA, 75 bp, synthetic construct
  source 1..75: mol_type = other DNA
caaagtgctcgcatacgacttcccatttaactactcagcgatcaacaactttggtgcgcgacatgccaaagggtc

SEQ ID NO: 538009 - DNA, 75 bp, synthetic construct
  source 1..75: mol_type = other DNA
catttcggcagcgtctaatagcgccctggaaatcgctaaaggtgatttcgtggctttactggatcacgatgatgc

SEQ ID NO: 538010 - DNA, 75 bp, synthetic construct
  source 1..75: mol_type = other DNA
ggtagccgtagtccttacccctggtccctgtgctggctggacgaatttgccgacccgactaccgcacggaaactt

SEQ ID NO: 538011 - DNA, 75 bp, synthetic construct
  source 1..75: mol_type = other DNA
acgcagctctggcagcgcctgagccgtaatcacggcgtaagcagcacggagatccgccataacccggtcgccagc

SEQ ID NO: 538012 - DNA, 75 bp, synthetic construct
  source 1..75: mol_type = other DNA
aacccggttcaccgtaaggcagaaatgatggccaccatgaaggggctggaacttctggccgaagcccgtggcgac

SEQ ID NO: 538013 - DNA, 75 bp, synthetic construct
  source 1..75: mol_type = other DNA
cgccacctacatcggaaaaaacctggacagccgcgccgtggatggcatcgacccgaaaacgggcaagccacgcgt

SEQ ID NO: 538014 - DNA, 75 bp, synthetic construct
  source 1..75: mol_type = other DNA
tacgggaggcatcgcgctgcctgtctcccgtcaccatctggcagactctgctctcccgactgctggaccaacatt

SEQ ID NO: 538015 - DNA, 75 bp, synthetic construct
  source 1..75: mol_type = other DNA
accggcctgatgacccgcagccactacagaacggtaaatgacattatcctgggtaagcatccggaggcgaaacaa

SEQ ID NO: 538016 - DNA, 75 bp, synthetic construct
  source 1..75: mol_type = other DNA
acggcctgcgctggtatggcatccgcacggtggagcctcaccatgacggcaccgtgcactggcatatgatggtct

SEQ ID NO: 538017 - DNA, 75 bp, synthetic construct
  source 1..75: mol_type = other DNA
ccagttccagttctttggcatcccctcccgtcaggtgtggcgtgaactgcgccgccttgccagccagatggcacg

SEQ ID NO: 538018 - DNA, 75 bp, synthetic construct
  source 1..75: mol_type = other DNA
aatcaatggccgagagcgtggaacgcgccatcggctgggcgcgccttcaccgggtccgccagttccagttctttg

SEQ ID NO: 538019 - DNA, 75 bp, synthetic construct
  source 1..75: mol_type = other DNA
cgccacctacatcggaaaaaacctggacagccgcgccgtggatggcatcgacccgaaaacaggcaaaccacgcgt

SEQ ID NO: 538020 - DNA, 75 bp, synthetic construct
  source 1..75: mol_type = other DNA
caacccggaaggtccacaacgtctggaaaatgacgcaatggatgcggtactcgctgccgctgatgccgggtgttt

SEQ ID NO: 538021 - DNA, 75 bp, synthetic construct
  source 1..75: mol_type = other DNA
tttaaggtggagtatgtcgacggctcaaaaggcacgccaaccagctacatcgccacctacatcggaaagaacctg

SEQ ID NO: 538022 - DNA, 75 bp, synthetic construct
  source 1..75: mol_type = other DNA
ggcgcaatccttcgcctgacctgtgcggaatggtggaaacgcaaattgtggctgttacgttgcgagtggagagaa

SEQ ID NO: 538023 - DNA, 75 bp, synthetic construct
  source 1..75: mol_type = other DNA
accggcctgatggcccgcgacaattacagaacggtaaataacattatcttgggtaaacatccgggggcgaaacaa

SEQ ID NO: 538024 - DNA, 75 bp, synthetic construct
  source 1..75: mol_type = other DNA
ggcaggcggtcagttctcgcccgtctcctgttgaaatctggcagatactgctggaccagcactatggcctcacac

SEQ ID NO: 538025 - DNA, 75 bp, synthetic construct
  source 1..75: mol_type = other DNA
gttcgtggatgaacgcgtgattgagcagcatattgaggcaggcatttcactgtgtgatgcagtgaactttctcgt

SEQ ID NO: 538026 - DNA, 75 bp, synthetic construct
  source 1..75: mol_type = other DNA
gcgggagttctgcgtgcagtacggggagagcgacctgacattcctgacccggctgtgggcggaggaaggtatctt

SEQ ID NO: 538027 - DNA, 75 bp, synthetic construct
  source 1..75: mol_type = other DNA
ttgaggcaggcatttcactgtgcgatgcggtgaactttctcgttgaaaaatacgcactggtacgtaccgaccagc

SEQ ID NO: 538028 - DNA, 75 bp, synthetic construct
  source 1..75: mol_type = other DNA
tgtgtgatgcggtgaactttctcgtggaaaaatacgcgctggtgcgtaccgaccagccgggattcagcacttgtc

SEQ ID NO: 538029 - DNA, 75 bp, synthetic construct
  source 1..75: mol_type = other DNA
aacagtctccatatatttccgtagtggatattctgcaagcaaggcgttctaccggcttgctaaaaactaacgtga

SEQ ID NO: 538030 - DNA, 75 bp, synthetic construct
  source 1..75: mol_type = other DNA
ctgctgtcccggttgctggaccagcattacggccttacgctgaatgacacaccgttcgccgatgaacgtgtgatt

SEQ ID NO: 538031 - DNA, 75 bp, synthetic construct
  source 1..75: mol_type = other DNA
tgagcagcatattgaggcaggcatttcactgtgtgatgcggtgaactttctcgtggaaaaatacgcgctggtgct

SEQ ID NO: 538032 - DNA, 75 bp, synthetic construct
  source 1..75: mol_type = other DNA
ccgggctcgccgggcgaccggcctgatgacccgcgacaattacagaacggtaaataacattaccctgggtaagca

SEQ ID NO: 538033 - DNA, 75 bp, synthetic construct
  source 1..75: mol_type = other DNA
cgtgtgattgagcagcatattgaggcaggtatttcactgtgtgatgcggtgaactttctcgttgaaaaatacgcc

SEQ ID NO: 538034 - DNA, 75 bp, synthetic construct
  source 1..75: mol_type = other DNA
tcccgtcaccatctggcagacactgctcatccatctgctgggccagcactatggcctcacactgaatgacacacc

SEQ ID NO: 538035 - DNA, 75 bp, synthetic construct
  source 1..75: mol_type = other DNA
gtcagccacgatgacggtctgtatgtaaaaaacgaccgtaaagtgacagtggagggtaagcaggaacacaaaacg

SEQ ID NO: 538036 - DNA, 75 bp, synthetic construct
  source 1..75: mol_type = other DNA
gccacctctccttcctgcgcaagaagcaggaagccgatcgtcagaaaggcaaaaagagctggcaggcggaacgct

SEQ ID NO: 538037 - DNA, 75 bp, synthetic construct
  source 1..75: mol_type = other DNA
cctccgggctcgcggggccactggcctgatgagcagcgacaattacagaacggtaaataacattaccctgggtaa

SEQ ID NO: 538038 - DNA, 75 bp, synthetic construct
  source 1..75: mol_type = other DNA
cctccgggctcgccgggcgactggcctgatgagcagcgacaattacagaacggtaaataacattaccctgggtaa

SEQ ID NO: 538039 - DNA, 75 bp, synthetic construct
  source 1..75: mol_type = other DNA
cctccgggctcgccgggccactggcctgatgaccagcgacaattacagaacggtaaataacattaccctgggtaa

SEQ ID NO: 538040 - DNA, 75 bp, synthetic construct
  source 1..75: mol_type = other DNA
cagcatattgaggccggcatttcactgtgcgatgcagtgaactttctcgtggaaaaatacgcgctggtgctaccg

SEQ ID NO: 538041 - DNA, 75 bp, synthetic construct
  source 1..75: mol_type = other DNA
ccggacggtcagcatcgggcatgatgaatccctggtggtggcaaatgaccggaaagtgacggttgaaggtaaaca

SEQ ID NO: 538042 - DNA, 75 bp, synthetic construct
  source 1..75: mol_type = other DNA
ccaccacatggggggtgacgttcccgagttcagtaagattgaagttaatggtgaaggacgccatccgctgtatca

SEQ ID NO: 538043 - DNA, 75 bp, synthetic construct
  source 1..75: mol_type = other DNA
atacgcgctggtgcgtaccgaccagccgggattcagcgcctgtacccggtctcagttaataaacagtatggatat

SEQ ID NO: 538044 - DNA, 75 bp, synthetic construct
  source 1..75: mol_type = other DNA
atacgcgctggtgcgtaccgaccagccgggattcagcgcctgtacccgctctcagttaataaacagtatcgatat

SEQ ID NO: 538045 - DNA, 75 bp, synthetic construct
  source 1..75: mol_type = other DNA
atacgcgctggtgcgtaccgaccagccgggattcagcgcctgtacccgttctcagttaataaacagtattgatat

SEQ ID NO: 538046 - DNA, 75 bp, synthetic construct
  source 1..75: mol_type = other DNA
cctccgggctcgccgggcaactggcctgatgaacagcgacaattacagaacggtaaataacattaccctgggtaa

SEQ ID NO: 538047 - DNA, 75 bp, synthetic construct
  source 1..75: mol_type = other DNA
cctccgggctcgctgggccactggcctgatgatcagcgacaattacagaacggtaaataacattaccctgggtaa

SEQ ID NO: 538048 - DNA, 75 bp, synthetic construct
  source 1..75: mol_type = other DNA
cctccgggctcgcagggccactggcctgatgaacagcgacaattacagaacggtaaataacattaccctgggtaa

SEQ ID NO: 538049 - DNA, 75 bp, synthetic construct
  source 1..75: mol_type = other DNA
tgaggatgaatcagaaggtggagaagaagacaaggacgattcagatgaactggtaattcctgtatacgcaaaatc

SEQ ID NO: 538050 - DNA, 75 bp, synthetic construct
  source 1..75: mol_type = other DNA
catggcctcgctgcgcctgctgccgtcctatctgcgcgatccacttattcgccacctctccttcctgcgcaaaaa

SEQ ID NO: 538051 - DNA, 75 bp, synthetic construct
  source 1..75: mol_type = other DNA
tgaccacgaaaccggaaaatcaatggccgagagcgtggagcgcgccatcggctgggcgcgccttcaccgggtccg

SEQ ID NO: 538052 - DNA, 75 bp, synthetic construct
  source 1..75: mol_type = other DNA
ggccagatttacggagcacaggcaggaaactgaaaccgacctgcaacgcgccatccgttactaccttgaggcgga

SEQ ID NO: 538053 - DNA, 75 bp, synthetic construct
  source 1..75: mol_type = other DNA
gcctgagccgtaatcacggcgtaaacagcacggaaatccgccataacccgatttccagctatctgaaacagctcg

SEQ ID NO: 538054 - DNA, 75 bp, synthetic construct
  source 1..75: mol_type = other DNA
gcactttagtaatcaaaatgatgatgagaaaaaacaattacaaagttggatatgccttttccatcatgagggatg

SEQ ID NO: 538055 - DNA, 75 bp, synthetic construct
  source 1..75: mol_type = other DNA
ccggaacagaagctggcggtgtgtgatgacgtggcggggctgacgggaatgggggcgctggcgtttaacccgaat

SEQ ID NO: 538056 - DNA, 75 bp, synthetic construct
  source 1..75: mol_type = other DNA
caggcggggaaaagcttaggagtgccaattccacaacaggtcgcaaataaacttcggagtaagtcatttaacaat

SEQ ID NO: 538057 - DNA, 75 bp, synthetic construct
  source 1..75: mol_type = other DNA
atgaaaacattacccgacacgcatgtacgggaggtatcgtgctgcccgtctcccgtcaccatctggcaggcactg

SEQ ID NO: 538058 - DNA, 75 bp, synthetic construct
  source 1..75: mol_type = other DNA
atgcacattttatctgtaccgaccacggtgccagtttcgtcacgcctgtcgcccgtacaggtctggcagcaactg

SEQ ID NO: 538059 - DNA, 75 bp, synthetic construct
  source 1..75: mol_type = other DNA
cctgaatccgcgctttcctcctggctggatgcctaccgggcagagaacgagcgccgccaggaaatggctgatgcg

SEQ ID NO: 538060 - DNA, 75 bp, synthetic construct
  source 1..75: mol_type = other DNA
ggaagacagtgcccgcgaaaatggttttgaccttcagggcggccctgccgccccttggactcgtggcaataactg

SEQ ID NO: 538061 - DNA, 75 bp, synthetic construct
  source 1..75: mol_type = other DNA
cgttcatcctggatgtggatatcgccagcgggctgtctgacctgacggcggaggattttctggagaagagcgcgg

SEQ ID NO: 538062 - DNA, 75 bp, synthetic construct
  source 1..75: mol_type = other DNA
aagttaccgctgacatgatgattgagtttattggtcaggagggagctaaaacgtgtgaggaactggcgggtaagt

SEQ ID NO: 538063 - DNA, 75 bp, synthetic construct
  source 1..75: mol_type = other DNA
gcgaaaatttcggagtgcgatttaactgcgacgattgaacaacgtggaccacaaacggcggatgagttggctaca

SEQ ID NO: 538064 - DNA, 75 bp, synthetic construct
  source 1..75: mol_type = other DNA
gatattaaaacagaaacggtggcggatattgtgcagtcgctgccatcgttcaccgaaacgcgagcggatgacctg

SEQ ID NO: 538065 - DNA, 75 bp, synthetic construct
  source 1..75: mol_type = other DNA
ctgcaaccggtagtcggctactggacagataaatacccaatgccgtggtcattaccgattggcatgtgctttacc

SEQ ID NO: 538066 - DNA, 75 bp, synthetic construct
  source 1..75: mol_type = other DNA
acgtatcggtatggtttctggactctttttcggttttgctttcggcatgggaggtctgggagcggcagttctggg

SEQ ID NO: 538067 - DNA, 75 bp, synthetic construct
  source 1..75: mol_type = other DNA
cagaagtgggagcgtgtctgcgccgcgctgcgggagctgaacaagtaccgggatattatacggcagatgaattgt

SEQ ID NO: 538068 - DNA, 75 bp, synthetic construct
  source 1..75: mol_type = other DNA
tcccgtggaacccgttcccgggcgcgccgtatggacgcagttcgaacagccgtatcgaccgtttctcaaaagtgc

SEQ ID NO: 538069 - DNA, 75 bp, synthetic construct
  source 1..75: mol_type = other DNA
cttctttgagcggtttgcggcggacagcccggagcagaagctgacgctgtgcgacgatgtggcggggctgtcaca

SEQ ID NO: 538070 - DNA, 75 bp, synthetic construct
  source 1..75: mol_type = other DNA
ggcctttcctcagccagcaggtgctgcgttaccagtccgggaagccgcaacacaggaagaaattaaaacagaaac

SEQ ID NO: 538071 - DNA, 75 bp, synthetic construct
  source 1..75: mol_type = other DNA
cctgccagacactgttcatgaaggaattgtgattaacagcgcagagatgcgtctgtactactatccgaaaggcac

SEQ ID NO: 538072 - DNA, 75 bp, synthetic construct
  source 1..75: mol_type = other DNA
accgcgaactgcgtcgggcgaaaaatcatgtccagaagtgggagcgtgtctgcgccgcgctgcgtgagttgaaca

SEQ ID NO: 538073 - DNA, 75 bp, synthetic construct
  source 1..75: mol_type = other DNA
gaaatccgcgcaccggaagtggttgaagaacagcgttcatccgacggcaccattaaatgggcgatcgccgttggc

SEQ ID NO: 538074 - DNA, 75 bp, synthetic construct
  source 1..75: mol_type = other DNA
gggctctatcctcggcgtagcgccgtttactttggttttaccttacgccagcctgcactggacgggaattttaac

SEQ ID NO: 538075 - DNA, 75 bp, synthetic construct
  source 1..75: mol_type = other DNA
tcgaacaaaaagttaccgcagacatgatgattgagtttatcggtcaggatggggctaaaacgtgtgaggaactgg

SEQ ID NO: 538076 - DNA, 75 bp, synthetic construct
  source 1..75: mol_type = other DNA
acgtttttcggcatcacatcacgcaaagtggcttcaacgctggcaatggcaatcagtaaaggtcgtctgattcgc

SEQ ID NO: 538077 - DNA, 75 bp, synthetic construct
  source 1..75: mol_type = other DNA
aagcaatgggaaaagccacgtcggtggaactggctacgcgacttgatatcagtcgtgaagaagtgctgaacgagc

SEQ ID NO: 538078 - DNA, 75 bp, synthetic construct
  source 1..75: mol_type = other DNA
tgggagcgagtctgcgccgcgctgcgggagctgagcaagcaccgggatattgttcgacagattactgattcttcc

SEQ ID NO: 538079 - DNA, 75 bp, synthetic construct
  source 1..75: mol_type = other DNA
aagttaccgcagacatgatggttgagtttatcggtcaggatggtgctaaaacgtgtgaggaactggcgggtaagt

SEQ ID NO: 538080 - DNA, 75 bp, synthetic construct
  source 1..75: mol_type = other DNA
cgttgataaaacaggtcatacctggtttctggctggcgaaggtgaatccggggtaaccgaagagcagccagtaca

SEQ ID NO: 538081 - DNA, 75 bp, synthetic construct
  source 1..75: mol_type = other DNA
aaagtgggtggttcgtttgtggtcatccattcagggggcgtggacatcgtcgggccgaaaatcaatctcaatagc

SEQ ID NO: 538082 - DNA, 75 bp, synthetic construct
  source 1..75: mol_type = other DNA
tgatccaatcgctgattctggcgatttatccgctgctccagtcagagttttctctgacgtttatgcagataggga

SEQ ID NO: 538083 - DNA, 75 bp, synthetic construct
  source 1..75: mol_type = other DNA
cagttctggggcttatcgccgatcacaccagcatcgagttagtctataaaatctgtgctttcctgccactattgg

SEQ ID NO: 538084 - DNA, 75 bp, synthetic construct
  source 1..75: mol_type = other DNA
ctggcacgcgttaatcagaacggtaaatttcgttactgcatgtcgggggggaatttaccagcagatccgaaagcc

SEQ ID NO: 538085 - DNA, 75 bp, synthetic construct
  source 1..75: mol_type = other DNA
gtcggaagaaaccaccacggcaacagtcgctaaaatttcggagagcgatttaactgcgacgattgaacaacgtgg

SEQ ID NO: 538086 - DNA, 75 bp, synthetic construct
  source 1..75: mol_type = other DNA
gcagcacggcaaggatttcacgctgtaccggatggagagcctgcgcagtgatgcggaaaaggccacagggcagag

SEQ ID NO: 538087 - DNA, 75 bp, synthetic construct
  source 1..75: mol_type = other DNA
ggggaggtcgaacaaaaagttaccgcagacatgatgattgagtttatcggtcaggatggtgctaaaacgtgtgag

SEQ ID NO: 538088 - DNA, 75 bp, synthetic construct
  source 1..75: mol_type = other DNA
gccatgtgtgatgcggtggagattaacagcgggctggtccggtatctgcgggaaaattttaacggtgtcagggta

SEQ ID NO: 538089 - DNA, 75 bp, synthetic construct
  source 1..75: mol_type = other DNA
tccacagtgttgtgacgatgacgcgatgattatatgcgggtgtatggctcgccttaacaggaacaacagcgatct

SEQ ID NO: 538090 - DNA, 75 bp, synthetic construct
  source 1..75: mol_type = other DNA
catggtgacttcatggaatggcagccggcgcagtattacagccggattattatgaatccgccgttcagccacggg

SEQ ID NO: 538091 - DNA, 75 bp, synthetic construct
  source 1..75: mol_type = other DNA
atcatgattgacggctgtgtagcgcgattgcggaagtataagccagaagagtatgagttaataattgctcatttt

SEQ ID NO: 538092 - DNA, 75 bp, synthetic construct
  source 1..75: mol_type = other DNA
ttaattattgaaggttgtcttgcacgtctaaagcaaaaaagacctgatgagcattcgcttcttgtggcacattat

SEQ ID NO: 538093 - DNA, 75 bp, synthetic construct
  source 1..75: mol_type = other DNA
tgaatgcttactgaaaatgaataaggacggtactatcattctcaatggtaaaagtatccagattgaaggaaaaga

SEQ ID NO: 538094 - DNA, 75 bp, synthetic construct
  source 1..75: mol_type = other DNA
cgtgctggttgccgtctgtctcaacgggccgcgccagcaggagaagctgttaccgttttctgacgtccgcgagga

SEQ ID NO: 538095 - DNA, 75 bp, synthetic construct
  source 1..75: mol_type = other DNA
gatggcgacggcggtggtgagcttccgtctgtaccagcaccactgcacaccgttcatcctggatgtggatatcgc

SEQ ID NO: 538096 - DNA, 75 bp, synthetic construct
  source 1..75: mol_type = other DNA
ctccgggcccgccgggcaaccggcctgatggcccgcgacaattacagaacggtaaataacattaccctgggtaaa

SEQ ID NO: 538097 - DNA, 75 bp, synthetic construct
  source 1..75: mol_type = other DNA
gggccgcgccagcaggagaagctgttaccgttttctgatgtccgcgaggtgctgccgtgcggcacatttgcttat

SEQ ID NO: 538098 - DNA, 75 bp, synthetic construct
  source 1..75: mol_type = other DNA
ggccatgtgtgatgcggtggagattaacagcgggctggtccggtatctgcgggaaaattttaacggtgtcagggt

SEQ ID NO: 538099 - DNA, 75 bp, synthetic construct
  source 1..75: mol_type = other DNA
gaatccgccgttcagccacgggcaggatatccggcatatcctgcgggccttttccctgctgcgtccgggtggcgt

SEQ ID NO: 538100 - DNA, 75 bp, synthetic construct
  source 1..75: mol_type = other DNA
agacggtgaatgtggggagcaaaaaggaaggtggtcatgaccagaaagtgacagtggcgaatgaccagaccatta

SEQ ID NO: 538101 - DNA, 75 bp, synthetic construct
  source 1..75: mol_type = other DNA
aaggttacagaaggctgagggcataattgaagggatgttaatggcattagatatccggttagatatggatatcgt

SEQ ID NO: 538102 - DNA, 75 bp, synthetic construct
  source 1..75: mol_type = other DNA
gtctttaccggaacaaccgcgatctgcatgacttgctgattgattactacgtgctggggaaaacgtttatggcgc

SEQ ID NO: 538103 - DNA, 75 bp, synthetic construct
  source 1..75: mol_type = other DNA
agatggatcggtatgttgagcgtgaattgccgggagggagaacctctgtattttatcagcgaaaaaatagtttac

SEQ ID NO: 538104 - DNA, 75 bp, synthetic construct
  source 1..75: mol_type = other DNA
gattacctcccgccgggcgaattcatcgctggccatggcaatcagcaaagggcgtctgattcgcgtaaatcaggg

SEQ ID NO: 538105 - DNA, 75 bp, synthetic construct
  source 1..75: mol_type = other DNA
aacgttggggagcgtgggcggctaataatcatgaagatgtgacctggtcgtccattgccgccggttttaagggat

SEQ ID NO: 538106 - DNA, 75 bp, synthetic construct
  source 1..75: mol_type = other DNA
taattccttcaaaagtaagatctcgtccgcaatgctgtgacgatgacgcgatgatcatttgtgaatgtatggctc

SEQ ID NO: 538107 - DNA, 75 bp, synthetic construct
  source 1..75: mol_type = other DNA
aaggctgaaggaatagtcgaggggatgttgatggcattgggagtgcgccttgagatggatcctgaagttggcagg

SEQ ID NO: 538108 - DNA, 75 bp, synthetic construct
  source 1..75: mol_type = other DNA
tggatatataggaaaaagacttcagaaggctgaaggaatagtcgaggggatgttgatggcattgggagtgcgcct

SEQ ID NO: 538109 - DNA, 75 bp, synthetic construct
  source 1..75: mol_type = other DNA
atgcgtgatattcagatggttcttgaacgctggggggcatgggcggcaaataatcatgaggatgtgacctggtcg

SEQ ID NO: 538110 - DNA, 75 bp, synthetic construct
  source 1..75: mol_type = other DNA
tgttaatggcattagatatccggttagagggtaatgactccaacttactgatagtgttttatgttcagataatgc

SEQ ID NO: 538111 - DNA, 75 bp, synthetic construct
  source 1..75: mol_type = other DNA
atgcgtgatattcagatggttctcgaacgctggggagcgtgggcggctaataatcatgaagatgtgacctggtcg

SEQ ID NO: 538112 - DNA, 75 bp, synthetic construct
  source 1..75: mol_type = other DNA
aacgttggggtgcatgggtggcaaataatcacgaggatgtcacctggtcgtctattgctgcaggatttaaaggac

SEQ ID NO: 538113 - DNA, 75 bp, synthetic construct
  source 1..75: mol_type = other DNA
ggcagcgattttttaatagcgaagaaccaggtaatattgcgccggtctacatgctggaaaaaatagaaaatcaaa

SEQ ID NO: 538114 - DNA, 75 bp, synthetic construct
  source 1..75: mol_type = other DNA
taacgatctcggcgagccagagtggttattttcgcgcgcgctgggtgtcgatatcccgctgacatcacttcatat

SEQ ID NO: 538115 - DNA, 75 bp, synthetic construct
  source 1..75: mol_type = other DNA
gaggaatttacggtagccgctgtcagccacatcgatctgggcggcggtagtcagattttccgctactacacttca

SEQ ID NO: 538116 - DNA, 75 bp, synthetic construct
  source 1..75: mol_type = other DNA
aggcgtatgagcagcagatagcggagagtcgcaggccggtaccggggtttctctttagcatggcagaaatgtgtt

SEQ ID NO: 538117 - DNA, 75 bp, synthetic construct
  source 1..75: mol_type = other DNA
cgggcacgttttgatttttatcaggcgcgatcagcctggtcacgggctgagtggattggtgccggaagaatggcc

SEQ ID NO: 538118 - DNA, 75 bp, synthetic construct
  source 1..75: mol_type = other DNA
ttttaccatgggctatcaacggcaagtgaccgaagatacttacgaatatctgctgttaaatggtgaggaatcttt

SEQ ID NO: 538119 - DNA, 75 bp, synthetic construct
  source 1..75: mol_type = other DNA
atgaagaaaatggcggggatgacagcaatgaaatcagcggcaacggaacggttggggttaacctcggcgcatggc

SEQ ID NO: 538120 - DNA, 75 bp, synthetic construct
  source 1..75: mol_type = other DNA
ctggaaggcatggaaattaaggctgatttaagccagtccgcattagtcatttcactaccgcaggcttacctcgaa

SEQ ID NO: 538121 - DNA, 75 bp, synthetic construct
  source 1..75: mol_type = other DNA
gtcggggttaacctggggccatggcgtatgcgcgctgactggcagaccaactatcaacatacccgcagtaatgat

SEQ ID NO: 538122 - DNA, 75 bp, synthetic construct
  source 1..75: mol_type = other DNA
agaagttctccagctggtatgacacgaataacgtgacactgggcggtgtcaaaaattccgcaccttttccctggt

SEQ ID NO: 538123 - DNA, 75 bp, synthetic construct
  source 1..75: mol_type = other DNA
cgatgcggccctgctatgcgcgggttttcttttgcgcgctcgggcgcgagatgggggcagcaagtctttcggtac

SEQ ID NO: 538124 - DNA, 75 bp, synthetic construct
  source 1..75: mol_type = other DNA
ttgccgtcatcagtggtcaaaaagcgatggcggtgctgcgtttacaagatggcagccatccaccgtttggcgcag

SEQ ID NO: 538125 - DNA, 75 bp, synthetic construct
  source 1..75: mol_type = other DNA
gccacgcagatgtttcctgctggctggaagaggcacttcttcgggggattatccgtccgccacgggcgcgttttg

SEQ ID NO: 538126 - DNA, 75 bp, synthetic construct
  source 1..75: mol_type = other DNA
ggtcaacagattcagacattttgtagttcctttcaccgacgggtacacgaacgtattacggagcataatcacacg

SEQ ID NO: 538127 - DNA, 75 bp, synthetic construct
  source 1..75: mol_type = other DNA
gttgctgctcagccagacgagtatttgtcccccgcgagccagtgtcacagttgatgaacaatgttcgcaagtggt

SEQ ID NO: 538128 - DNA, 75 bp, synthetic construct
  source 1..75: mol_type = other DNA
tgccatccgcgaaccagtgccacggttgatgaagaatgttcgcaagtggtggatttactgcaacagacctggctg

SEQ ID NO: 538129 - DNA, 75 bp, synthetic construct
  source 1..75: mol_type = other DNA
atcagagcaatacgttgcgttaaaaacggctgttcagtctctgatgccactggttattgcaacaatcatccggtg

SEQ ID NO: 538130 - DNA, 75 bp, synthetic construct
  source 1..75: mol_type = other DNA
gccagtgtcacagttgatgaacaatgttcgcaagtggtggatttactgcagcagacctggcgggggatggatacg

SEQ ID NO: 538131 - DNA, 75 bp, synthetic construct
  source 1..75: mol_type = other DNA
tttactgcaacagacctggtcggtgataagtgctggcggacaatgccgggtggaaagatgttttcgggttgcccg

SEQ ID NO: 538132 - DNA, 75 bp, synthetic construct
  source 1..75: mol_type = other DNA
gtcggccattgtgaaagccatgtatgcagcgacgattgaaagtgaacttgataccgaaaaggcctttgaatatat

SEQ ID NO: 538133 - DNA, 75 bp, synthetic construct
  source 1..75: mol_type = other DNA
cgatcgatatggccgtgccgttgcgtaccatatctgtgaggatgattttccgttctctggtagtggacgatggga

SEQ ID NO: 538134 - DNA, 75 bp, synthetic construct
  source 1..75: mol_type = other DNA
aggattatcaggacattttccgccagcaggtcagggaatctgcagagcggcaaaaagccggactctcacgtccgg

SEQ ID NO: 538135 - DNA, 75 bp, synthetic construct
  source 1..75: mol_type = other DNA
atcaacgggcaacagattcatgcattctgtacttcctttttccgacaggtgcacgaacgtattactgagagcaat

SEQ ID NO: 538136 - DNA, 75 bp, synthetic construct
  source 1..75: mol_type = other DNA
gcgttcagcctggtcacgggcagagtggattggctccggaagaatggccattgacgggctcaaggaggtccagga

SEQ ID NO: 538137 - DNA, 75 bp, synthetic construct
  source 1..75: mol_type = other DNA
gcgatcagcctggtcacgggccgagtggattggagccggaagaatggccattgacggctcaaggaagtccaggaa

SEQ ID NO: 538138 - DNA, 75 bp, synthetic construct
  source 1..75: mol_type = other DNA
caccgtacccagaatatgggcggtacgcgtctgctgattgatgccgacggtgtggctggtgttccggtggaagga

SEQ ID NO: 538139 - DNA, 75 bp, synthetic construct
  source 1..75: mol_type = other DNA
ggacacggtatggggaaccgttttctgcgggccggtgtggaggtcgatcgatatggccgtgccgtcgcgtaccat

SEQ ID NO: 538140 - DNA, 75 bp, synthetic construct
  source 1..75: mol_type = other DNA
tccggtgtggatagcccaggcgtatcagcagcagatagcggagagtcgcaggccggaagaggagacaacatcacg

SEQ ID NO: 538141 - DNA, 75 bp, synthetic construct
  source 1..75: mol_type = other DNA
gagctggcgctgatgggcgaggattatcaggacattttccgccagcaggtcagggaatctgcagagcgggaaaaa

SEQ ID NO: 538142 - DNA, 75 bp, synthetic construct
  source 1..75: mol_type = other DNA
aaccgttttctgcgggccggtgtggaggtcgatcgatatggccgtgccgttgcgtaccatatctgtgaggatgat

SEQ ID NO: 538143 - DNA, 75 bp, synthetic construct
  source 1..75: mol_type = other DNA
tcttcgggggattattcgtccgccacgggcacgttttgatttttatcaggcgcgatcagcctggtcacgggcaga

SEQ ID NO: 538144 - DNA, 75 bp, synthetic construct
  source 1..75: mol_type = other DNA
gatagcgcaggcgtatcagcagcagatagcggagagtcgcaggccggaagaggagacaacaccccgtgagacgta

SEQ ID NO: 538145 - DNA, 75 bp, synthetic construct
  source 1..75: mol_type = other DNA
tgcgtattgaaggtggtttaagcacgtacgagaaagagctggccctgatgggcgatgactatcaggagattttcc

SEQ ID NO: 538146 - DNA, 75 bp, synthetic construct
  source 1..75: mol_type = other DNA
ggctggaggaagcccttattcgcggtgtgatccgcccgccgaaatcccgtttttcattctgggaggcccgttccg

SEQ ID NO: 538147 - DNA, 75 bp, synthetic construct
  source 1..75: mol_type = other DNA
agacggtgaatgtggggagcaaaaaggaaggtggtcatgaccagaaagtgacggtagcgaacgatcagcatctca

SEQ ID NO: 538148 - DNA, 75 bp, synthetic construct
  source 1..75: mol_type = other DNA
ggagtctgccggggacgaagacgcagatgacgatacggtcgaagacctataaaggaagcggatttaacgagctgc

SEQ ID NO: 538149 - DNA, 75 bp, synthetic construct
  source 1..75: mol_type = other DNA
tgtgatccgcccgccgaaatcccgtttttcattctgggaggcccgttccggatggtgtcgtgccgagtggattgg

SEQ ID NO: 538150 - DNA, 75 bp, synthetic construct
  source 1..75: mol_type = other DNA
atatcgcgctacaggccgcgcagccactggtgcacggcgtatcgttaaccctgcaacgcgggcgtgtgctggcgc

SEQ ID NO: 538151 - DNA, 75 bp, synthetic construct
  source 1..75: mol_type = other DNA
ttatcagctaccgcccgaactggcgctggttggggatgcgggagaccgcgacaaaaagttttgtcgatgaggggg

SEQ ID NO: 538152 - DNA, 75 bp, synthetic construct
  source 1..75: mol_type = other DNA
cggtgatcagcgggcaaaaagcgatggcggtactgcgtctgcaagatggcagctatccgccgtttggcgcggaag

SEQ ID NO: 538153 - DNA, 75 bp, synthetic construct
  source 1..75: mol_type = other DNA
tgccgttcctgacccgccccggccaggtgcgctataaactgatgatgggccgcccgcaggagtgggggcatcatg

SEQ ID NO: 538154 - DNA, 75 bp, synthetic construct
  source 1..75: mol_type = other DNA
gaatatgacatcaacaccgcctcgatgccgttcctgactcgccccggccaggtgcgctataaactgatgatgggc

SEQ ID NO: 538155 - DNA, 75 bp, synthetic construct
  source 1..75: mol_type = other DNA
tcggtgcccaatgaaattaagccggtgatccaggagcagacccagcaggtgatgccaacggaagcgccggtatcg

SEQ ID NO: 538156 - DNA, 75 bp, synthetic construct
  source 1..75: mol_type = other DNA
ggataaagagaccgcctacggtaaaggttcactggacggtaactcgtttcgcgtgagctattccaaagacttcga

SEQ ID NO: 538157 - DNA, 75 bp, synthetic construct
  source 1..75: mol_type = other DNA
atatcacccactcgcatacccgtctggataaagagaccgcctacggtaaaggttcactggacggtaactcgtttc

SEQ ID NO: 538158 - DNA, 75 bp, synthetic construct
  source 1..75: mol_type = other DNA
ttttaccatgggctaccagcggcaagtgaccgaagatacttacgaatatttgctgttaaatggtgaggaatcttt

SEQ ID NO: 538159 - DNA, 75 bp, synthetic construct
  source 1..75: mol_type = other DNA
gaaggaaaacgcacgtttacggaatttatccgtgaaggtgtgggcgttcatgcgtttaacggcgaaatctttgtg

SEQ ID NO: 538160 - DNA, 75 bp, synthetic construct
  source 1..75: mol_type = other DNA
gggacgccggtgccggcgctgcaaccgacggtgctgaagacactgggggatgagaagagtggtgatggcagtgat

SEQ ID NO: 538161 - DNA, 75 bp, synthetic construct
  source 1..75: mol_type = other DNA
ggttcgctggacggtaactccttccgtgtgagttattccaaagactttgaccagctcaacagccgcgttactttt

SEQ ID NO: 538162 - DNA, 75 bp, synthetic construct
  source 1..75: mol_type = other DNA
gtgaaggggtgggcgttcatacgtttaacggtgaaatttttgtccagcccgtatgggatacggaatccacgtcat

SEQ ID NO: 538163 - DNA, 75 bp, synthetic construct
  source 1..75: mol_type = other DNA
tgcctgcaccggaaagtgccgacgtggcgctcttaccttccattcagctgggtaacgcccgtgcggatgatctgg

SEQ ID NO: 538164 - DNA, 75 bp, synthetic construct
  source 1..75: mol_type = other DNA
gcatccggataactggaagctggtaagacgcaaaccggaagcggaagacagcgcccgcgaaaatggttttgacct

SEQ ID NO: 538165 - DNA, 75 bp, synthetic construct
  source 1..75: mol_type = other DNA
gccggcagagtgtcacgtaaacaatccccctatatcagccatgagtcactactggagttccgcgagaagcgccag

SEQ ID NO: 538166 - DNA, 75 bp, synthetic construct
  source 1..75: mol_type = other DNA
cagacgcagggagcaacgacttatcctgccggaaggtgatttaaccgaatggctgaggtcgctgacaccggtaca

SEQ ID NO: 538167 - DNA, 75 bp, synthetic construct
  source 1..75: mol_type = other DNA
tggcatcccctcccgtcaggtgtggcgtgaactgcgccgccttgccagccagatggcacgcaacccggaaggccc

SEQ ID NO: 538168 - DNA, 75 bp, synthetic construct
  source 1..75: mol_type = other DNA
catcgccacctacatcggaaagaacctggacagccgcgccgtggatggcatcgacccgaaaacgggcaagccacg

SEQ ID NO: 538169 - DNA, 75 bp, synthetic construct
  source 1..75: mol_type = other DNA
cgagctgggcaatgatattactccgcgctttaaggtggagtatgtcgacggctcaaaaggcacgccaaccagcta

SEQ ID NO: 538170 - DNA, 75 bp, synthetic construct
  source 1..75: mol_type = other DNA
gccacctcgctgatctctggcgggaggaattactgcgtgccgccggaagagtatcgcgcaaggcatccccctaca

SEQ ID NO: 538171 - DNA, 75 bp, synthetic construct
  source 1..75: mol_type = other DNA
ggcgttgtcaccatcagcgttgcagagtgcggcaatcgggtacgcattgcggtgcgggataccgggcatcgatcc

SEQ ID NO: 538172 - DNA, 75 bp, synthetic construct
  source 1..75: mol_type = other DNA
cagagcttcgcgccctgcaaagcaaaattaatccccattttctgtttaacgctttgaacgctatttcatcgtcaa

SEQ ID NO: 538173 - DNA, 75 bp, synthetic construct
  source 1..75: mol_type = other DNA
gttcagccttgaggatatctactgggccggactcgccaatccgcgcaaccgtcgcaacgagatgatggcctgcgt

SEQ ID NO: 538174 - DNA, 75 bp, synthetic construct
  source 1..75: mol_type = other DNA
cggctggatgaagaaaccgtcgtcttcctgacatgcacagaaaaaggcaggcagattaattcgcaccttcatcac

SEQ ID NO: 538175 - DNA, 75 bp, synthetic construct
  source 1..75: mol_type = other DNA
caccgcatccgccagttccagttcttcggtatcccgccccgccaggtatggcgcgaactccgccgtcttgccggg

SEQ ID NO: 538176 - DNA, 75 bp, synthetic construct
  source 1..75: mol_type = other DNA
tggcagcgcctgagccgtaatcacggcgtaagcagcacggagatccgccataacccggtcgccagctatctggaa

SEQ ID NO: 538177 - DNA, 75 bp, synthetic construct
  source 1..75: mol_type = other DNA
ttcggtggcgaaggcattgaaacgttcctgtatgtgatctctggaaatatcactgccaaagccgaaggcaaaaca

SEQ ID NO: 538178 - DNA, 75 bp, synthetic construct
  source 1..75: mol_type = other DNA
tgaaaaatacgcgctggtgcgcaccgaccagccgggattcagcgcctgtacccactctcagttaatcaacagtat

SEQ ID NO: 538179 - DNA, 75 bp, synthetic construct
  source 1..75: mol_type = other DNA
ccttacaagctggttatggcgtaggccgtggcgaagcatttagttatatttattctaaggattgtaaccgcgacg

SEQ ID NO: 538180 - DNA, 75 bp, synthetic construct
  source 1..75: mol_type = other DNA
atacgcgctggtgcgtaccgaccagccgggattcagcgcctgtacccgatctcagttaataaacagtatagatat

SEQ ID NO: 538181 - DNA, 75 bp, synthetic construct
  source 1..75: mol_type = other DNA
ttcaccacgccacttttccatttttcatctctgcatatcaggaaaatcttcagtatgaaaacattacctgtatta

SEQ ID NO: 538182 - DNA, 75 bp, synthetic construct
  source 1..75: mol_type = other DNA
acggcctcacactgaatgacacaccgtttgcggatgaacgtgtgattgagcagcatattgaagcagggatttcac

SEQ ID NO: 538183 - DNA, 75 bp, synthetic construct
  source 1..75: mol_type = other DNA
tcatgcagaacccgcgcagcgcctttaatccgctgcacaccatgcacacccacgcgcgggaaacctgcctggcgt

SEQ ID NO: 538184 - DNA, 75 bp, synthetic construct
  source 1..75: mol_type = other DNA
ggcattctgcccgcaggcgttcgccagacggcgggggaaattttagccgatggcaaaccggtttctccctgcgcc

SEQ ID NO: 538185 - DNA, 75 bp, synthetic construct
  source 1..75: mol_type = other DNA
atgccgcaacagattgaactacgtaatatcgcgctacaggccgcgcagccgctggtacacggtgtatcgttaacc

SEQ ID NO: 538186 - DNA, 75 bp, synthetic construct
  source 1..75: mol_type = other DNA
ccgccaggctccttaatgacgtttgttaacgcccaggccgaagacagccaaatctttttatataagcgccgctat

SEQ ID NO: 538187 - DNA, 75 bp, synthetic construct
  source 1..75: mol_type = other DNA
tctcttttgcgccaggtgccagccacggttatatcgaaacccacgttcaggaacacggtgcctatattctttccg

SEQ ID NO: 538188 - DNA, 75 bp, synthetic construct
  source 1..75: mol_type = other DNA
tgatattctccgggcacgccgggcaacaggtctgatgacccgcgacaattacagaacggtaaataacattaccct

SEQ ID NO: 538189 - DNA, 75 bp, synthetic construct
  source 1..75: mol_type = other DNA
tgacggcgatcccctgctttatcaccagcattctggcgggttgtatatcgggctggatcaacctgaaaatcccca

SEQ ID NO: 538190 - DNA, 75 bp, synthetic construct
  source 1..75: mol_type = other DNA
tcagggaatctgcagagccggaatgctggctgaaacggacgagtacatggccggaggtaaacgaccggcccgtgt

SEQ ID NO: 538191 - DNA, 75 bp, synthetic construct
  source 1..75: mol_type = other DNA
aaagttttgtcgatgaggtggaggcggcctggtcggaatacgccgaagggatgtctggcgagatcgacgtggaag

SEQ ID NO: 538192 - DNA, 75 bp, synthetic construct
  source 1..75: mol_type = other DNA
caccggctgggcggtatgcggccattttccggaatgacaggctatgacggcattgtcgcctgtcttcagcaggca

SEQ ID NO: 538193 - DNA, 75 bp, synthetic construct
  source 1..75: mol_type = other DNA
tccggtcagtatgttgcgttaaaaacagtcgcattgtctctggggttaccggttgtgacaacaatcagttggtaa

SEQ ID NO: 538194 - DNA, 75 bp, synthetic construct
  source 1..75: mol_type = other DNA
ttgatgaagaatgttcacaactggtggatttactacaacagacctggcaggtgataagcgctggcggacaatgcc

SEQ ID NO: 538195 - DNA, 75 bp, synthetic construct
  source 1..75: mol_type = other DNA
gacgggcagacccgtggagccaatcagttttacagcgttatggaacggctgaagatgctggattccctgcaggca

SEQ ID NO: 538196 - DNA, 75 bp, synthetic construct
  source 1..75: mol_type = other DNA
gtctctggggttaccggttgtgaccgccattacccatcgtccggtacagcgctgtacattgattacagctcagtg

SEQ ID NO: 538197 - DNA, 75 bp, synthetic construct
  source 1..75: mol_type = other DNA
atcagggcaatacgtggcgttaaaaacggctgttcagtcctttatgtcgcaggttattgcaacaatcatccggtg

SEQ ID NO: 538198 - DNA, 75 bp, synthetic construct
  source 1..75: mol_type = other DNA
tgtacttccttttaccgacaggtgcacgaacgtattactgagcgtaatcacatggccagtccggcatcgccgctg

SEQ ID NO: 538199 - DNA, 75 bp, synthetic construct
  source 1..75: mol_type = other DNA
gaatagcgtgacgctgggcggtgtcaaaattccgcaccttttccccggtgatgatctgaaacttcagaccgcgca

SEQ ID NO: 538200 - DNA, 75 bp, synthetic construct
  source 1..75: mol_type = other DNA
gcttattaatattctggagaagttcacccgctggtatgacacgaataacgtgacgctgggcggtgttaaaattcc

SEQ ID NO: 538201 - DNA, 75 bp, synthetic construct
  source 1..75: mol_type = other DNA
caacgggcaacgggttcagacattctgtacttccttttaccggcaggtacacgaacgtattgctgaacgtaatca

SEQ ID NO: 538202 - DNA, 75 bp, synthetic construct
  source 1..75: mol_type = other DNA
atgacggcattactgacactggaagaaatcaaggcacatttgcgtgttgaccatgacgcggatgatgacatgctg

SEQ ID NO: 538203 - DNA, 75 bp, synthetic construct
  source 1..75: mol_type = other DNA
ctgcgctggtatggcatccgcacggtggagcctcaccatgacggcacggtgcactggcatatgatggtctttgca

SEQ ID NO: 538204 - DNA, 75 bp, synthetic construct
  source 1..75: mol_type = other DNA
cagttctttggcatcccctcccgtcaggtatggcgtgaactgcgccgccttgccagccagatggcacgcaaccca

SEQ ID NO: 538205 - DNA, 75 bp, synthetic construct
  source 1..75: mol_type = other DNA
acgaaccacggcaggccattgacccagccacatttgcgaagtatcagcctacgcctgaaaccccgttgcaacagg

SEQ ID NO: 538206 - DNA, 75 bp, synthetic construct
  source 1..75: mol_type = other DNA
ggctgcatatccgccgcctggaaccaggaacggaaattgcgttttacattcctaaccaacgcaccccagtcgcct

SEQ ID NO: 538207 - DNA, 75 bp, synthetic construct
  source 1..75: mol_type = other DNA
tcatatcagggacttgttcgcaccttccttaatccttattcagagtcacccgtgcacgaaatattcaacatgctg

SEQ ID NO: 538208 - DNA, 75 bp, synthetic construct
  source 1..75: mol_type = other DNA
gtgcacgaaatattcaacatgctgctggcggtcttcgatcgggcagcgttaatgcttatctgcctgttctttctc

SEQ ID NO: 538209 - DNA, 75 bp, synthetic construct
  source 1..75: mol_type = other DNA
tcacgacaatgacccgaaaaccggcaaactttacgccgataaagaatcgggaaaaaccatggcggaaaccgtgga

SEQ ID NO: 538210 - DNA, 75 bp, synthetic construct
  source 1..75: mol_type = other DNA
ggacattcgcattgatgccagactggatgaagaaaccgtcgcctttctgacaaccacagacgaagggaagcgaat

SEQ ID NO: 538211 - DNA, 75 bp, synthetic construct
  source 1..75: mol_type = other DNA
cgcagcgtctggaccatgacgacattgacgccatactggccgccgccgacgtgggatgttttgctacctatatca

SEQ ID NO: 538212 - DNA, 75 bp, synthetic construct
  source 1..75: mol_type = other DNA
ctttgcctgataaccacgaattactcgctaaagaatggcgggagtctgccgaatctctcggcctgcatatcggtg

SEQ ID NO: 538213 - DNA, 75 bp, synthetic construct
  source 1..75: mol_type = other DNA
gcgttctccgccacgccgctgggcagcctgattaataaaagcctggatgcacaggaaaaacaggacaaaaccatc

SEQ ID NO: 538214 - DNA, 75 bp, synthetic construct
  source 1..75: mol_type = other DNA
gatgaagagaccgtcgacttcctgacaaacacagacgaaggcaagcgaattaattcgcattttcaccacgacgaa

SEQ ID NO: 538215 - DNA, 75 bp, synthetic construct
  source 1..75: mol_type = other DNA
gagctgatttttccgtccctgcgcagggcaaacctggcgctgcgcagggcgaaaagtgatgttcagaagtgggag

SEQ ID NO: 538216 - DNA, 75 bp, synthetic construct
  source 1..75: mol_type = other DNA
ctgctgaaagccgaaagcctgatgcagtggctggatcttaatgtgctggcggaactgaacggcccggaggcgaaa

SEQ ID NO: 538217 - DNA, 75 bp, synthetic construct
  source 1..75: mol_type = other DNA
atcaccgccagaaccggcctgacgccggatatcgcggacaccggcacagacgccacgctgccgtttccggatgcc

SEQ ID NO: 538218 - DNA, 75 bp, synthetic construct
  source 1..75: mol_type = other DNA
tcgcagcttgccgtggcgtataccgtcatgcccggcatgtaccgggatgcggcggttctgaccggacaactgcga

SEQ ID NO: 538219 - DNA, 75 bp, synthetic construct
  source 1..75: mol_type = other DNA
atccgccagccggtattacgcgccattcgcgactggcgtccgcctgagcaaaaaatggaagtgacggcttcgctt

SEQ ID NO: 538220 - DNA, 75 bp, synthetic construct
  source 1..75: mol_type = other DNA
tccggctcgccgttgccggagaaggcacattcaccgtggcttatctgtaccggcggcgaaattcaggtagcgacg

SEQ ID NO: 538221 - DNA, 75 bp, synthetic construct
  source 1..75: mol_type = other DNA
gttattacggcatatcggtgatgatctgcaccagttttatgccgttccggcggaggaatttatcaccaaagcccg

SEQ ID NO: 538222 - DNA, 75 bp, synthetic construct
  source 1..75: mol_type = other DNA
tgcgctggggtatcttagcgaagccgagtttgacagctgggtacggccagaacagatggtcggcagtatgaaagc

SEQ ID NO: 538223 - DNA, 75 bp, synthetic construct
  source 1..75: mol_type = other DNA
caaagcaacatgaatatgaacgaagtgctggccaatcgggcgagcgaactgctcggtggcgtgcgcggaatggaa

SEQ ID NO: 538224 - DNA, 75 bp, synthetic construct
  source 1..75: mol_type = other DNA
cagcctgccgcatgtggcggaactggcgctgggcggtacagcggtagggacggggctgaatacccatccggaata

SEQ ID NO: 538225 - DNA, 75 bp, synthetic construct
  source 1..75: mol_type = other DNA
cgcaggcaggcgtggacggagatgaccggcgatgccgggttgtcatcgctgccgccggaaacgtaccgacaaccg

SEQ ID NO: 538226 - DNA, 75 bp, synthetic construct
  source 1..75: mol_type = other DNA
tcgtgctgtggggaatggtgttactgctggtgctgtggtcggtgtttatcagtccgtctggcgtactgagatggg

SEQ ID NO: 538227 - DNA, 75 bp, synthetic construct
  source 1..75: mol_type = other DNA
tcaggcgcgtaaggactggcaaaatgcccgcaaaaaactctcgagagcaaaggcaaagaaaccggttgtcgttga

SEQ ID NO: 538228 - DNA, 75 bp, synthetic construct
  source 1..75: mol_type = other DNA
ccagacggcgaaatacgtcgctacgacagtcgcctaaacataatctgtcgcgagtgccggaagagcgaagttatg

SEQ ID NO: 538229 - DNA, 75 bp, synthetic construct
  source 1..75: mol_type = other DNA
gtggcaaaagtttttacacaagaagagcgggaaaaaattaaaggacaggttcttgaactcgtacgccagagtggg

SEQ ID NO: 538230 - DNA, 75 bp, synthetic construct
  source 1..75: mol_type = other DNA
gacggagaaatacgccgctacgacaggcgtctgaacataatctgtcgcgagtgccgtaaaagcgaagttatgcag

SEQ ID NO: 538231 - DNA, 75 bp, synthetic construct
  source 1..75: mol_type = other DNA
cgcgagacattacgacagttggaagctaaaacaggtgcgacaagatatctgatgagcattcttgccagagagctg

SEQ ID NO: 538232 - DNA, 75 bp, synthetic construct
  source 1..75: mol_type = other DNA
cgtgcttttgccgatatcgtcaaaattggtcgtactcacttgcaggatgccacgccgttaacgctggggcaggag

SEQ ID NO: 538233 - DNA, 75 bp, synthetic construct
  source 1..75: mol_type = other DNA
cgtgtactggcattttaccagaatggttttcgagagacattcggtgaacaggttgtgcatgagggaaatcatggc

SEQ ID NO: 538234 - DNA, 75 bp, synthetic construct
  source 1..75: mol_type = other DNA
agaacataatttgtcgcgagtgccgccagagcgaagctatgcaacgggtgctggctttctggaagggaagtttgc

SEQ ID NO: 538235 - DNA, 75 bp, synthetic construct
  source 1..75: mol_type = other DNA
ctggctacgggttattcccgtctgaacaggctcgtaaggactggcaaaatgcccgcaaaaaactatctagggcaa

SEQ ID NO: 538236 - DNA, 75 bp, synthetic construct
  source 1..75: mol_type = other DNA
aaaaaagcgcacaaagaagggctgacattaaaagctgcggcccttgcgttgggatatcttagcgcaaccgagttt

SEQ ID NO: 538237 - DNA, 75 bp, synthetic construct
  source 1..75: mol_type = other DNA
acaggcgcgtaaggactggcaaaacgcccgcaaaaaactctcaagggcaaagctgaagaaaaaaacatctgtggt

SEQ ID NO: 538238 - DNA, 75 bp, synthetic construct
  source 1..75: mol_type = other DNA
gacggcgaaatacgccgctacgacaggcgcctaaacataatctgtcgcgagtgccggaagagtgaagctatgcag

SEQ ID NO: 538239 - DNA, 75 bp, synthetic construct
  source 1..75: mol_type = other DNA
acaggctcgtaaggactggcaaaatgcccgcaaaaaattatcgagggcaaagctgaagaaaccggttgtggttga

SEQ ID NO: 538240 - DNA, 75 bp, synthetic construct
  source 1..75: mol_type = other DNA
gcccgcaaaaaactatcaagggcaaaggtgaagaaaccggttgtggttgatcctgaccttatctggtcattacca

SEQ ID NO: 538241 - DNA, 75 bp, synthetic construct
  source 1..75: mol_type = other DNA
ctggctatgggttattcccgtctgaacaggctcgtaaggattggaaaaacgcccgcaaaaaactatccagggcaa

SEQ ID NO: 538242 - DNA, 75 bp, synthetic construct
  source 1..75: mol_type = other DNA
ctggcttgtggcgatttatacatgtccggggaatacggtgtttttgcatcagagcaggcgtatcgcgtatggcgt

SEQ ID NO: 538243 - DNA, 75 bp, synthetic construct
  source 1..75: mol_type = other DNA
tgttgaacttgtacgtctgagcggtcgcgagacgttacgacaactggaagctaaaactggggcaacaagatatct

SEQ ID NO: 538244 - DNA, 75 bp, synthetic construct
  source 1..75: mol_type = other DNA
agtcgaaggaaccggttatggttgatcctgaccttatctgctcgttacctgacggagaaatacgtcggtacgaca

SEQ ID NO: 538245 - DNA, 75 bp, synthetic construct
  source 1..75: mol_type = other DNA
ggagattgaacataatttgtagcgagtgccggaagagcgaagttgtgcagcgtgtactggggttttatcagggaa

SEQ ID NO: 538246 - DNA, 75 bp, synthetic construct
  source 1..75: mol_type = other DNA
gttattcccgtctgaacaggcgcgtaaggactggcaaaacgcccgcaaaaaactctcgagggcaaaggtgaagaa

SEQ ID NO: 538247 - DNA, 75 bp, synthetic construct
  source 1..75: mol_type = other DNA
tgatattccaggtaaaatttataaactatccgtggctaaggaaggtgcgaataagcggggaaattcttctcggct

SEQ ID NO: 538248 - DNA, 75 bp, synthetic construct
  source 1..75: mol_type = other DNA
tttattgttacagttgcattctctgtattattaattttattagttggttttgatattccaggtaaaatctataaa

SEQ ID NO: 538249 - DNA, 75 bp, synthetic construct
  source 1..75: mol_type = other DNA
ggatcagaaaaagtgctccagaaagtcaggagtggattgaagataaatataaggataaatcaacatttttgtctg

SEQ ID NO: 538250 - DNA, 75 bp, synthetic construct
  source 1..75: mol_type = other DNA
atggcaaaagtatttacaccagaagagcgagaaaaaattaaaggacaggttgttgaacttgtacgtctgagcggt

SEQ ID NO: 538251 - DNA, 75 bp, synthetic construct
  source 1..75: mol_type = other DNA
gccagtaaaaagctctcaagggcaaagctgaagaaaccatctgcggttgatccggaccttatctggtcattacct

SEQ ID NO: 538252 - DNA, 75 bp, synthetic construct
  source 1..75: mol_type = other DNA
tcagaaaaaagagtttcttctgaagcaaacaaagaaaagagtgacattactgaattgctcagaaaacaggtcaga

SEQ ID NO: 538253 - DNA, 75 bp, synthetic construct
  source 1..75: mol_type = other DNA
gtagccagtggcgatgtatacaactccggctgcggattattcccgtctgaacaggcccgtaaggactggcaaaac

SEQ ID NO: 538254 - DNA, 75 bp, synthetic construct
  source 1..75: mol_type = other DNA
ctggctatgggttattcccgtcagaacaggctcgtaaggactggcaaaacgcccgcaaaaaactatcgagggcaa

SEQ ID NO: 538255 - DNA, 75 bp, synthetic construct
  source 1..75: mol_type = other DNA
ctggcagatggcatggaaagtttcaacaaacactgcgcagtggcattgaaccgaatcgtgagcgaatcaatcaat

SEQ ID NO: 538256 - DNA, 75 bp, synthetic construct
  source 1..75: mol_type = other DNA
gtgccggaatagtgaagttatgcagcgagtgctggcgttttatcagggggtggggtcaggaggtggtgctgtgag

SEQ ID NO: 538257 - DNA, 75 bp, synthetic construct
  source 1..75: mol_type = other DNA
ggcgtcagaacataatctgtcgcgagtgccggaagagtgaggttatgcagcgagtgctggcgttttatcaggggg

SEQ ID NO: 538258 - DNA, 75 bp, synthetic construct
  source 1..75: mol_type = other DNA
cgcttcgtcatgcggttgagcagcaacagctgccgcaagtggcctggctggcggaacatctggcggcacaactgg

SEQ ID NO: 538259 - DNA, 75 bp, synthetic construct
  source 1..75: mol_type = other DNA
aactggaaggacagctcgctacgctgcgtcagcgttgtgccccggtgtcacagttcgccacgctaagtgctcgtt

SEQ ID NO: 538260 - DNA, 75 bp, synthetic construct
  source 1..75: mol_type = other DNA
gtggcaaaagtttttacacaagaagagcgggaaaaaattaaagggcaggttgttgacctagtacgccggagtggg

SEQ ID NO: 538261 - DNA, 75 bp, synthetic construct
  source 1..75: mol_type = other DNA
gtggcaaaagtttttacacaagaagagcgggaaaaaattaaagggcaggttgttgaactcgtacgccggagtggg

SEQ ID NO: 538262 - DNA, 75 bp, synthetic construct
  source 1..75: mol_type = other DNA
gagaaaattaaagggcaggttgttgaactcgtacgccagagtgggcgcgagacgttacgacaactggaaactaaa

SEQ ID NO: 538263 - DNA, 75 bp, synthetic construct
  source 1..75: mol_type = other DNA
gacggagaaatacgtcgttacaacagacgacagaacataatctgttgcgagtgcaggaatagtgaagttatgcag

SEQ ID NO: 538264 - DNA, 75 bp, synthetic construct
  source 1..75: mol_type = other DNA
agcgagaaaaaattaaagggcaggttgttgaacttgtacgtctgagcggtcgcgagacgttacgggcactggagg

SEQ ID NO: 538265 - DNA, 75 bp, synthetic construct
  source 1..75: mol_type = other DNA
aagaaaccggttgtggttgatcctgaccttatctggtcattacctgacggagaaatccgtcgccttagtctttga

SEQ ID NO: 538266 - DNA, 75 bp, synthetic construct
  source 1..75: mol_type = other DNA
tccgggtgctgtatctgaataaccagaatcagctgattgccggtgaacccctcttcactggcaccatcaaccgca

SEQ ID NO: 538267 - DNA, 75 bp, synthetic construct
  source 1..75: mol_type = other DNA
ctttcctttctgcccggagagatgacgcccggcgagcgcagcctcattcaacgggccctgaaaaccctggaccgc

SEQ ID NO: 538268 - DNA, 75 bp, synthetic construct
  source 1..75: mol_type = other DNA
tggatatccgcgtccctgaccacctgattgtcggtggcaggcaaatctattcgttcgcagaacacggtctgcttt

SEQ ID NO: 538269 - DNA, 75 bp, synthetic construct
  source 1..75: mol_type = other DNA
ttgatatccgggtaccggaccatctgataatcggtggcagccaggttttctcctttgcggaacacggtctgcttt

SEQ ID NO: 538270 - DNA, 75 bp, synthetic construct
  source 1..75: mol_type = other DNA
tggccttcacctccacccgtgcagcacgggaatggctgattctgaacatggcgggactggagcgtgaagaattcc

SEQ ID NO: 538271 - DNA, 75 bp, synthetic construct
  source 1..75: mol_type = other DNA
aatcacccgtccggtgaagtcacacccagcaaggcagaccgccttatcacggaacgtctggtacaggcactgggc

SEQ ID NO: 538272 - DNA, 75 bp, synthetic construct
  source 1..75: mol_type = other DNA
ccgaggtacatccccgcgaggtggtcaagcgcgctctgtacttcaacgcggcagcggtaatactggcgcataacc

SEQ ID NO: 538273 - DNA, 75 bp, synthetic construct
  source 1..75: mol_type = other DNA
ctcttcaccggcaccatcaaccgcacggaggtccatccccgggaagtgattaaacgtgccctgtaccacaatgcc

SEQ ID NO: 538274 - DNA, 75 bp, synthetic construct
  source 1..75: mol_type = other DNA
atgcaacagatttcctttctgcccggagagatgacgcccggcgagcgcagcctcattcagcgagccctgaaaacc

SEQ ID NO: 538275 - DNA, 75 bp, synthetic construct
  source 1..75: mol_type = other DNA
tggatatccgggtgccggaccatctgatagtcggtggcagccaggtattctcctttgccgaacacggtctgcttt

SEQ ID NO: 538276 - DNA, 75 bp, synthetic construct
  source 1..75: mol_type = other DNA
taaacgcgccctgtaccacaatgccgcagccgtggtgctggcacacaatcacccgtccggtgaagtcacacccag

SEQ ID NO: 538277 - DNA, 75 bp, synthetic construct
  source 1..75: mol_type = other DNA
taaacgcgccctgtatcacaatgccgcagctgtggtgctggcacacaatcacccgtccggtgaagtcccccccag

SEQ ID NO: 538278 - DNA, 75 bp, synthetic construct
  source 1..75: mol_type = other DNA
cgttcgggagtggttgcgactgcatatggccgcacttgagcgggaagagttccgggtgctgtatctggataatca

SEQ ID NO: 538279 - DNA, 75 bp, synthetic construct
  source 1..75: mol_type = other DNA
tcgccttcgaagcatttaaagccggagcctttgatctgcgcatggaaaatgacgctaaaaactgggccacgcgtt

SEQ ID NO: 538280 - DNA, 75 bp, synthetic construct
  source 1..75: mol_type = other DNA
ctggaaaatggggcagaatattgtctattcccgcgtaaaagattattgggcggcaaacctgccggtaaaccgtgg

SEQ ID NO: 538281 - DNA, 75 bp, synthetic construct
  source 1..75: mol_type = other DNA
gcgacgttgagtttacttttcaaaaatttatgactgaaggcgtaccacagtttcgtctggtgtataaaggcacca

SEQ ID NO: 538282 - DNA, 75 bp, synthetic construct
  source 1..75: mol_type = other DNA
agcctgggtatcgatacctggtggtatgacgttaataaagcggccaaactgccgtcagccagacaacagggagag

SEQ ID NO: 538283 - DNA, 75 bp, synthetic construct
  source 1..75: mol_type = other DNA
caaccgctatgcactgcgcggcaacccaggcgcacgcaccgagcagttgtacgacacgctatttactacttccga

SEQ ID NO: 538284 - DNA, 75 bp, synthetic construct
  source 1..75: mol_type = other DNA
accagccgccggtatctaaaggcgatggctacgatcgtgacaacctgttaaaagccgacaaacttctcaacgaag

SEQ ID NO: 538285 - DNA, 75 bp, synthetic construct
  source 1..75: mol_type = other DNA
gaatcagttgattgccggtgaaacccttttcaccggcaccatcaaccgcacggaagtccatccccgggaagtgat

SEQ ID NO: 538286 - DNA, 75 bp, synthetic construct
  source 1..75: mol_type = other DNA
gcaccatcaaccgcacggaagtccatccccgggaagtgattaaacgcgccctgtatcacaatgccgcagccgtgg

SEQ ID NO: 538287 - DNA, 75 bp, synthetic construct
  source 1..75: mol_type = other DNA
tggatatccgggtaccggaccatctgatagttggtggcagccaggttttctcctttgcggaacacggtctgcttt

SEQ ID NO: 538288 - DNA, 75 bp, synthetic construct
  source 1..75: mol_type = other DNA
atctaaaggcgatggctacgatcgtgacaacctgttaaaagccgacaaacttctcaacgaagcgggctgggtgct

SEQ ID NO: 538289 - DNA, 75 bp, synthetic construct
  source 1..75: mol_type = other DNA
ttgaatggatgaacaaggcgttgttttacaatacctggagtcgcacgaacagttattttcagaataccgaatacg

SEQ ID NO: 538290 - DNA, 75 bp, synthetic construct
  source 1..75: mol_type = other DNA
actggcacacaatcacccgtccggtgaagtcacacccagcaaggcagaccgccttatcacggaacgtctggtaca

SEQ ID NO: 538291 - DNA, 75 bp, synthetic construct
  source 1..75: mol_type = other DNA
gagaaatgacaaccagagagcgcagcctcattctgcgggccctgaaaaccctggaccgccatcttcatgaacccg

SEQ ID NO: 538292 - DNA, 75 bp, synthetic construct
  source 1..75: mol_type = other DNA
atctgatgagtgttctcgccagagagctggttgccagtggcgatgtatacaattctggctacgggttattcccgt

SEQ ID NO: 538293 - DNA, 75 bp, synthetic construct
  source 1..75: mol_type = other DNA
atgagtcaggttagcctgtcgcaacaactgaaagagggaaatctctttgcggaacagtgcccgtcgcgcgaggtg

SEQ ID NO: 538294 - DNA, 75 bp, synthetic construct
  source 1..75: mol_type = other DNA
gaaaaggttgctgcactggcggactggattgagttgaatttgcctgaggtgttggcagtgcgggatgaacgtgcg

SEQ ID NO: 538295 - DNA, 75 bp, synthetic construct
  source 1..75: mol_type = other DNA
gaatattgtgcaggagattggacatccggcgacgctgttcccgatggtagccgcaggcatcggcattagtattct

SEQ ID NO: 538296 - DNA, 75 bp, synthetic construct
  source 1..75: mol_type = other DNA
acgtttttacgatgagatgctcccgatcgcagaccgggaattcacgaactggctgaacacattaaaagagaagga

SEQ ID NO: 538297 - DNA, 75 bp, synthetic construct
  source 1..75: mol_type = other DNA
aaaaaggttgctaccagcacaagcgattctgatccggttaatgcttcaacttatcgtgttaaagcattaaatcca

SEQ ID NO: 538298 - DNA, 75 bp, synthetic construct
  source 1..75: mol_type = other DNA
gacggagaaatacgtcgttacgacaggcgtctgaacataatctgtcgcgagtgccggaagagtgaggttatgcag

SEQ ID NO: 538299 - DNA, 75 bp, synthetic construct
  source 1..75: mol_type = other DNA
gttgccagtggcgatgtatacaactctggctatgggttatttccctctgaacaggctcgtaaggactggcaaaat

SEQ ID NO: 538300 - DNA, 75 bp, synthetic construct
  source 1..75: mol_type = other DNA
agccgaagaaaccatctgcggttgatccggaccttatctggtcattaccagatggcgaaatacgccgctacgaca

SEQ ID NO: 538301 - DNA, 75 bp, synthetic construct
  source 1..75: mol_type = other DNA
tccgggctttatctggtcgttaccagatggagaaatacgtcgttatgacaggcgtctaaacataatctgtcgcga

SEQ ID NO: 538302 - DNA, 75 bp, synthetic construct
  source 1..75: mol_type = other DNA
gattagcgttcttgcctgggagctggttgccagtggcgatgtatacaactctggctatgggttattcccgtcaga

SEQ ID NO: 538303 - DNA, 75 bp, synthetic construct
  source 1..75: mol_type = other DNA
gcccgcaaaaagatgtcgaaagcagcagtgaaaaaaaaagagcgacccggacctggtttattcattaccagacgg

SEQ ID NO: 538304 - DNA, 75 bp, synthetic construct
  source 1..75: mol_type = other DNA
gttgataataatcagataattttatttccctgtggatatgaattttatattgcgaattacccagaagcaggtctt

SEQ ID NO: 538305 - DNA, 75 bp, synthetic construct
  source 1..75: mol_type = other DNA
agcgagggagtaagttttcaaagtatattggacgacgtgaggttaatagactggccccctgaatctccagacaac

SEQ ID NO: 538306 - DNA, 75 bp, synthetic construct
  source 1..75: mol_type = other DNA
tctactttcgttaggagtgaatcatgttaatcatttacttttatcatatagtaaacaatcattgataagtcgttg

SEQ ID NO: 538307 - DNA, 75 bp, synthetic construct
  source 1..75: mol_type = other DNA
ttgagtctgtataacttcctcaacatcctcaatattaatcagatttggttgtacggtcgcagttgtgcctttggt

SEQ ID NO: 538308 - DNA, 75 bp, synthetic construct
  source 1..75: mol_type = other DNA
gctgattgccggtgaaaccctcttcaccggcaccatcaaccgcacggaagtccatccccgggaagtgattaaacg

SEQ ID NO: 538309 - DNA, 75 bp, synthetic construct
  source 1..75: mol_type = other DNA
caaggcagaccgccttatcacggaacgtctggtacaggcactggccctggttgatatccgggtaccggaccatct

SEQ ID NO: 538310 - DNA, 75 bp, synthetic construct
  source 1..75: mol_type = other DNA
tcgtaaataactcctaccttcatctggggatattttcagaacgggagctggttggcgtaatgcaatggggttatg

SEQ ID NO: 538311 - DNA, 75 bp, synthetic construct
  source 1..75: mol_type = other DNA
ctgaaattccagaaccgccgtccggactacatcaaagagttctggaatgtggtgaactgggacgaagcagcggca

SEQ ID NO: 538312 - DNA, 75 bp, synthetic construct
  source 1..75: mol_type = other DNA
ttgccaaccattatcgaaataaaagaagaagcagttaagcttcgtagattaattgaaagttgtgataaaaagaac

SEQ ID NO: 538313 - DNA, 75 bp, synthetic construct
  source 1..75: mol_type = other DNA
ttcaggagcacttagcaatgggcgttctactttcgttaggagtgaatcatgttaatcatttacttttatcatata

SEQ ID NO: 538314 - DNA, 75 bp, synthetic construct
  source 1..75: mol_type = other DNA
agcaaattcgcgacgttgcgccagaaaaagccgacctgccgcgcccgtatcgcctggcgattattcagctgggaa

SEQ ID NO: 538315 - DNA, 75 bp, synthetic construct
  source 1..75: mol_type = other DNA
caaatcaaaacgccagaggaggtggagaaaatccgcctcgcctgtgggattgccgatcgcggtgcagagcatatt

SEQ ID NO: 538316 - DNA, 75 bp, synthetic construct
  source 1..75: mol_type = other DNA
agtccgaactcaatgcgaaactggttagcgccacgccggatgtgctgcggcaaatcaaaacgccagaagaggtgg

SEQ ID NO: 538317 - DNA, 75 bp, synthetic construct
  source 1..75: mol_type = other DNA
caccgtgccggacagcaacgactggccgccgtgcaccgggccatgcagcagggggccgcgaatgattactggttt

SEQ ID NO: 538318 - DNA, 75 bp, synthetic construct
  source 1..75: mol_type = other DNA
caccgtgccggacagcaacgactggccgccgtccagcgggccatgcagcagggggccgcgaatgattactggttt

SEQ ID NO: 538319 - DNA, 75 bp, synthetic construct
  source 1..75: mol_type = other DNA
gacgtcgtgcaactggcgttgaactggagactgaacgttttgagcagacggtgcgggaagtacaggatttaatca

SEQ ID NO: 538320 - DNA, 75 bp, synthetic construct
  source 1..75: mol_type = other DNA
caccgtgccggacagcaacgcctggccgccgtgcaacgggccatgcagcagggggccgcgaatgattactggttt

SEQ ID NO: 538321 - DNA, 75 bp, synthetic construct
  source 1..75: mol_type = other DNA
caccgtgccggacagcaacgcctggccgccgtacagcgggccatgcagcagggggccgcgaatgattactggttt

SEQ ID NO: 538322 - DNA, 75 bp, synthetic construct
  source 1..75: mol_type = other DNA
caccgtgccggacagcaacgtctggccgccgttcaccgggccatgcagcagggggccgcgaatgattactggttt

SEQ ID NO: 538323 - DNA, 75 bp, synthetic construct
  source 1..75: mol_type = other DNA
cttatgaatcgccatttacaggactatctaactgattggattcgcattaaaatttctcaaaccagagttttctat

SEQ ID NO: 538324 - DNA, 75 bp, synthetic construct
  source 1..75: mol_type = other DNA
taaattaggcaacggcatgtcaatgaatcagtttaaagagagcgtaaaaaacattattgcagatgatgcgcttga

SEQ ID NO: 538325 - DNA, 75 bp, synthetic construct
  source 1..75: mol_type = other DNA
gaaaaatatcattgagggcgatggtattgaacgttatgagctggactggaatataaaaccacaaaatattatcac

SEQ ID NO: 538326 - DNA, 75 bp, synthetic construct
  source 1..75: mol_type = other DNA
ctgaacggacagcttgaacagtatgaaatatttgattatccgggaaggtacaaggatgaacagcacggcaaggat

SEQ ID NO: 538327 - DNA, 75 bp, synthetic construct
  source 1..75: mol_type = other DNA
cgggccctgcaaaccctggaccgccatcttcatgaacccggcgtggccttcacctccacccgtgcggcacgggaa

SEQ ID NO: 538328 - DNA, 75 bp, synthetic construct
  source 1..75: mol_type = other DNA
aactggcgttgagctggagactgagcgttttgagcagacggtcagggaagttcagaatttagtcagtcagaacgg

SEQ ID NO: 538329 - DNA, 75 bp, synthetic construct
  source 1..75: mol_type = other DNA
caccgtgccggacagcaacggctggccgccgtacaccgggccatgcagcagggggccgcgaatgattactggttt

SEQ ID NO: 538330 - DNA, 75 bp, synthetic construct
  source 1..75: mol_type = other DNA
cgcgatggacagttcaacaggaaaaggcaaacagaaacaaacgttgaactttaaagcctggttagtaggtgaaac

SEQ ID NO: 538331 - DNA, 75 bp, synthetic construct
  source 1..75: mol_type = other DNA
gcaggcaacaacggtactgcacgtttctatggcaccattgaagactccccgtgctctatcgttccagacgatcac

SEQ ID NO: 538332 - DNA, 75 bp, synthetic construct
  source 1..75: mol_type = other DNA
aaactggaagtcgatatgggtgacatcggtgcggctaaactgaccggcggtggcaccaccacaccgaaagatttc

SEQ ID NO: 538333 - DNA, 75 bp, synthetic construct
  source 1..75: mol_type = other DNA
ttgcgtgtaccctgataacagctatctatcattttcctgcatattcttcattagaatataaaggaacctttggtt

SEQ ID NO: 538334 - DNA, 75 bp, synthetic construct
  source 1..75: mol_type = other DNA
gcctaatcactcaaattttcggctgcggggaatcgcctgctatattgcgctggcaatctctggtggatcagtcaa

SEQ ID NO: 538335 - DNA, 75 bp, synthetic construct
  source 1..75: mol_type = other DNA
gagaaatgacaaccagagagcgcagtctcattctgcgggctctgaaaaccctggaccgccatcttcatgaacccg

SEQ ID NO: 538336 - DNA, 75 bp, synthetic construct
  source 1..75: mol_type = other DNA
aactggtgttgagctggagactgaacgttttgagcagacggtcagggaagttcaggatttagtcagccagaacgg

SEQ ID NO: 538337 - DNA, 75 bp, synthetic construct
  source 1..75: mol_type = other DNA
cagtccggacgccggtatatcggtatcgagctgcttgaacagtatcaccgtgccggacagcaacggctggcagcc

SEQ ID NO: 538338 - DNA, 75 bp, synthetic construct
  source 1..75: mol_type = other DNA
caccgtgccggacagcaacggctggccgccgtccaacgggccatgcagcagggggccgcgaatgattactggttt

SEQ ID NO: 538339 - DNA, 75 bp, synthetic construct
  source 1..75: mol_type = other DNA
acagttgcccatgatcagaccgtcacggttcagaacaaccagacgctgaatgtcacagaaaagcgcgagaagaat

SEQ ID NO: 538340 - DNA, 75 bp, synthetic construct
  source 1..75: mol_type = other DNA
tgaacctgaaaaatatactctccagttccattttacagacgatgacgggataccgtattcagaaacccgctacat

SEQ ID NO: 538341 - DNA, 75 bp, synthetic construct
  source 1..75: mol_type = other DNA
gcttgggcgtcgtgcgattggcgttgaactggagaccggacgttttgagcagacagtcagggaagttcaggattt

SEQ ID NO: 538342 - DNA, 75 bp, synthetic construct
  source 1..75: mol_type = other DNA
cgccgaaaaattacatcgtaccaggtgatccggctattgaatatgtgcagacgcacagcgcaccgcaaccaatac

SEQ ID NO: 538343 - DNA, 75 bp, synthetic construct
  source 1..75: mol_type = other DNA
aagctgcatccgtagcggaaaccgatggtaaagcctttcctcagccagcaggtgttgcgttaccagtccaggaaa

SEQ ID NO: 538344 - DNA, 75 bp, synthetic construct
  source 1..75: mol_type = other DNA
gtgggagcgtgtctgcgccgcgctgcgtgagttgaacaagcacagggatattgtacgacagattactgattcttc

SEQ ID NO: 538345 - DNA, 75 bp, synthetic construct
  source 1..75: mol_type = other DNA
gccatcgtttactgcaacgcgatctgatgatttgattttgtcatcgctgcatatggcaaaccgtgaactgcgtcg

SEQ ID NO: 538346 - DNA, 75 bp, synthetic construct
  source 1..75: mol_type = other DNA
acacaggaagatattaaaacagaaacggcggcggacattgtgcagtcgctaccaccgtttaccgaaacgcaagcg

SEQ ID NO: 538347 - DNA, 75 bp, synthetic construct
  source 1..75: mol_type = other DNA
aagtggcttcaacgctggcaatggcaatcagcaaaggtcgtctgcttcgcgtaaatcagggcggtaaatttcgtt

SEQ ID NO: 538348 - DNA, 75 bp, synthetic construct
  source 1..75: mol_type = other DNA
cgtgtggcttataacaacgttcagcaggaacagccagcgccggcagaactgtcggaagaaaccaccacggcaaca

SEQ ID NO: 538349 - DNA, 75 bp, synthetic construct
  source 1..75: mol_type = other DNA
tactgcaacgcgatctgatgatttgattttgccatcgctgcatttggcaaaccgcgaactgcgtcgggcgaaaaa

SEQ ID NO: 538350 - DNA, 75 bp, synthetic construct
  source 1..75: mol_type = other DNA
ggcggacattgtgcagtcgttgccatcgtttactgaaacgcaagcggataacctgattttaccatcgctgcatat

SEQ ID NO: 538351 - DNA, 75 bp, synthetic construct
  source 1..75: mol_type = other DNA
agcagagccgaaagctgcatcggtaacggaaactgatggtaaagcctttcctcaaccagcaggtgttgcgttacc

SEQ ID NO: 538352 - DNA, 75 bp, synthetic construct
  source 1..75: mol_type = other DNA
gcgccggtaacgaaaaatgatggtaaggcctttcctcagccagcaggtgctgcgttaccagtccgggaagccgca

SEQ ID NO: 538353 - DNA, 75 bp, synthetic construct
  source 1..75: mol_type = other DNA
taagttaccagcagagccgaaatccgtgccggtaacggaaaatgatggtaaggcctttcctcagccagcaggtgt

SEQ ID NO: 538354 - DNA, 75 bp, synthetic construct
  source 1..75: mol_type = other DNA
agcagagccgaaagctgtatcggtaacggaaactgatggtaaagcctttcctcaactagcaggtgttgcgttacc

SEQ ID NO: 538355 - DNA, 75 bp, synthetic construct
  source 1..75: mol_type = other DNA
aggcaatgggtaaagcgtcatcacaggaagttgctgcacgtctggggatgacacgggatgaggcgattaacgagc

SEQ ID NO: 538356 - DNA, 75 bp, synthetic construct
  source 1..75: mol_type = other DNA
caactgtcggaggacaaacattttatctcagccttacctcatttccgttttattcaacagtcgctgaattcattt

SEQ ID NO: 538357 - DNA, 75 bp, synthetic construct
  source 1..75: mol_type = other DNA
atttattcgcagtgagcttctctatcagctgtcggaggactgtagtggtcaagtaatattggccacggttttaca

SEQ ID NO: 538358 - DNA, 75 bp, synthetic construct
  source 1..75: mol_type = other DNA
atttattcgcagtgagcttctctatcagctgtcggaggacaaacattttatctctgccttagtaagcgactcgtc

SEQ ID NO: 538359 - DNA, 75 bp, synthetic construct
  source 1..75: mol_type = other DNA
gtatcaccggaacaattcaatgcatattcatcacgcaatttcaaaataaagcgagcgatggtaagacaagcgcag

SEQ ID NO: 538360 - DNA, 75 bp, synthetic construct
  source 1..75: mol_type = other DNA
ccccaaaaactaaagaagaaaaggagcttttagatcaaagcatagttgaaatgcaaaaaatcactgaccatgaaa

SEQ ID NO: 538361 - DNA, 75 bp, synthetic construct
  source 1..75: mol_type = other DNA
ataaccatttttgcactgcatactgttcactctgtaatgtttcacccggaaaccttcacaccagacgaacatttc

SEQ ID NO: 538362 - DNA, 75 bp, synthetic construct
  source 1..75: mol_type = other DNA
tgttgataaaacgggtcacacctggtttctggctggcgaaggtgaatcccgggtaaccgaagagcggccagtaaa

SEQ ID NO: 538363 - DNA, 75 bp, synthetic construct
  source 1..75: mol_type = other DNA
tatccggaaatgggagcgagtctgtgtcgcgctgcgggagctgaataaatatcgcgatattgtcgcccagctttg

SEQ ID NO: 538364 - DNA, 75 bp, synthetic construct
  source 1..75: mol_type = other DNA
gaagtggcggataagttcggtgttagcattcgcaaggttgcttccacgttggcggtcgtaacagcaacggggcgc

SEQ ID NO: 538365 - DNA, 75 bp, synthetic construct
  source 1..75: mol_type = other DNA
tggcctatgtgctgttgctctcctgcggtcagattgccggagccattgccggtgccaaaggtatctcgctgcata

SEQ ID NO: 538366 - DNA, 75 bp, synthetic construct
  source 1..75: mol_type = other DNA
acaccagtaaagcaaaagccgcattacctgataatgactctcttatgatgtttctcactatttccagtttttctt

SEQ ID NO: 538367 - DNA, 75 bp, synthetic construct
  source 1..75: mol_type = other DNA
gtactggagtgcatggatgccataccggaagaacagcggattgagtccggggtgtctgccggtgcggtgatggcg

SEQ ID NO: 538368 - DNA, 75 bp, synthetic construct
  source 1..75: mol_type = other DNA
taaacgcgccctgtatcacaatgccgcagccgtggtgctggcacacaatcacccgtcaggtgaagttacccccag

SEQ ID NO: 538369 - DNA, 75 bp, synthetic construct
  source 1..75: mol_type = other DNA
aaacaggcgtggcattcacctctactcaggctgcccgtgactggctgaaactgaaaatggcgggactggagcgcg

SEQ ID NO: 538370 - DNA, 75 bp, synthetic construct
  source 1..75: mol_type = other DNA
tcaggctgcccgtgactggctgaaactgaaaatggcgggactggagcgcgaagagtttatggtgctgtatctgaa

SEQ ID NO: 538371 - DNA, 75 bp, synthetic construct
  source 1..75: mol_type = other DNA
gcgtgggttattgaagcctgcagaagaagattaattaatgaaaaatattctcaatttgtacccaacaaagacaaa

SEQ ID NO: 538372 - DNA, 75 bp, synthetic construct
  source 1..75: mol_type = other DNA
gatccgaagtccgttaaactgggaacatcatcagccctgtgtgcgtggcgaagcgtggcaatggcaaggattgcg

SEQ ID NO: 538373 - DNA, 75 bp, synthetic construct
  source 1..75: mol_type = other DNA
ctggcccgaaggggatagtgggcaacaactgattatcccctggctccactggcataatcttgaaccggaaggcgt

SEQ ID NO: 538374 - DNA, 75 bp, synthetic construct
  source 1..75: mol_type = other DNA
gcctggtttacctcatccttgtttaactcctatgtggcagaaggtgccgatttcttcggtatgttacaacacatt

SEQ ID NO: 538375 - DNA, 75 bp, synthetic construct
  source 1..75: mol_type = other DNA
atgaaaaaccgtaaagcaaagatgctgatagcaaagcccgggcagcgtatccgtatctcaaatcggcttgttatt

SEQ ID NO: 538376 - DNA, 75 bp, synthetic construct
  source 1..75: mol_type = other DNA
cgttaagccgtggcgaagacagccgccatcagttcaaagagagcttcactaatgcagacgcactggcggcggaga

SEQ ID NO: 538377 - DNA, 75 bp, synthetic construct
  source 1..75: mol_type = other DNA
actttaaagcctggctggtcggcgcagctgatgcgccagacttaggtaatttcgaagcaaataccaccttccaga

SEQ ID NO: 538378 - DNA, 75 bp, synthetic construct
  source 1..75: mol_type = other DNA
atggcgatgaaaaaagagaccctggctgattacgtatacaggttcggtcagaagaaagccgctaaggactttggc

SEQ ID NO: 538379 - DNA, 75 bp, synthetic construct
  source 1..75: mol_type = other DNA
tgtgagattattatacagcaaagaaaagctatcgatttttctgcaaaacaaaaccttcttacatatggtgaaggt

SEQ ID NO: 538380 - DNA, 75 bp, synthetic construct
  source 1..75: mol_type = other DNA
agattgctgcaggagctgatatctctaaagctgcggctggccgtgcgttagatgctattattgcttccgtaactg

SEQ ID NO: 538381 - DNA, 75 bp, synthetic construct
  source 1..75: mol_type = other DNA
ctcgaacaattgattaacgtcaactttttctcttctgacaggatgtcattttgtgaatgcaatcgttttccataa

SEQ ID NO: 538382 - DNA, 75 bp, synthetic construct
  source 1..75: mol_type = other DNA
atgacggggataaccatattttatggcgataacatcattcgttatgtggttaatacaaaaaaggggctgagacta

SEQ ID NO: 538383 - DNA, 75 bp, synthetic construct
  source 1..75: mol_type = other DNA
tttggatttgattcacatgatgacggactggacctggcattatttcatgacggcattaaagggaagttcgaattt

SEQ ID NO: 538384 - DNA, 75 bp, synthetic construct
  source 1..75: mol_type = other DNA
agcctgcggcacagaaagatacaaccagagaacagaccacgacgccgaaggcgaaagcgaaggcgaaacgtggtt

SEQ ID NO: 538385 - DNA, 75 bp, synthetic construct
  source 1..75: mol_type = other DNA
cgataaagagttgctcgtgttggtgatagctattggtaagagagagaactcagccgtttatgaagacgcgactaa

SEQ ID NO: 538386 - DNA, 75 bp, synthetic construct
  source 1..75: mol_type = other DNA
acacgaaaatcgctgtgcgagattcgttacagagacggacacagggaggtggcggctttcatggcttacgaatcc

SEQ ID NO: 538387 - DNA, 75 bp, synthetic construct
  source 1..75: mol_type = other DNA
tgattcaggctgcggctaacgtggcgaaagccctgaaaggtcgcggcgctgacgtcggtatcaccatgattgccc

SEQ ID NO: 538388 - DNA, 75 bp, synthetic construct
  source 1..75: mol_type = other DNA
tggctgcactcgctgcacagtaccctgctgagtcgagaagtggactggacgcagctcgaccatgtgattgacgcc

SEQ ID NO: 538389 - DNA, 75 bp, synthetic construct
  source 1..75: mol_type = other DNA
cggataagttcgcacaggtgagcatcaaccatgctgattacatgcgccatatcgtgagccatttcgccgctgagc

SEQ ID NO: 538390 - DNA, 75 bp, synthetic construct
  source 1..75: mol_type = other DNA
cgcttcgtcatgcggttgagcagcaacagctgccgcaagtggcctggctggcagaacatctggcggcgcaactgg

SEQ ID NO: 538391 - DNA, 75 bp, synthetic construct
  source 1..75: mol_type = other DNA
cgcttcgtcatgccgttgagcaacagcaactgccgcaagtcgcctggctggcggaacatctggcggcgcaactgg

SEQ ID NO: 538392 - DNA, 75 bp, synthetic construct
  source 1..75: mol_type = other DNA
cgcgctcaacgtttcttccaggtttacgacccgtcctattacgacagcaaaacggtcatgctggaaagctggcgc

SEQ ID NO: 538393 - DNA, 75 bp, synthetic construct
  source 1..75: mol_type = other DNA
tttattgaacgagagcttccgctactgaatcttgctcgatcacagtataaaagagcaataagtaaaaaagtggcg

SEQ ID NO: 538394 - DNA, 75 bp, synthetic construct
  source 1..75: mol_type = other DNA
ttggcgcgaccgatggtgagctgaccatggaggtggcactgaaggcgtatcagatgctggcccgcatggcgttac

SEQ ID NO: 538395 - DNA, 75 bp, synthetic construct
  source 1..75: mol_type = other DNA
acctgattaataaaagcctggacgcacaggaaaaacaggacaaaaccatcgcactggcaggagacgccagaaaac

SEQ ID NO: 538396 - DNA, 75 bp, synthetic construct
  source 1..75: mol_type = other DNA
aacgggacagaacagccggaagaacggccagcaccgtggccgcagcttcctgacggcgttgaagtaaatgaatgg

SEQ ID NO: 538397 - DNA, 75 bp, synthetic construct
  source 1..75: mol_type = other DNA
ggtgcagcaagtgcgcaacgcggtgctgtttagcgaaggtgcggcgcaactgttggtacaacccacgctgtttat

SEQ ID NO: 538398 - DNA, 75 bp, synthetic construct
  source 1..75: mol_type = other DNA
cgcgaaaaactgataaaaaacatcatcagtaagcgccaggaaataaagcaagacccggtggcccgtgcctttgcc

SEQ ID NO: 538399 - DNA, 75 bp, synthetic construct
  source 1..75: mol_type = other DNA
ccatccgttactaccttgaggcggacaaaaaggcccgggaagaacaggaagcgaaggaggaagcctttttcgcac

SEQ ID NO: 538400 - DNA, 75 bp, synthetic construct
  source 1..75: mol_type = other DNA
taaatggcggtttaacagttgcctggaagttctatcctcgctggaaagccagtgtgacgtggcgttatttcgata

SEQ ID NO: 538401 - DNA, 75 bp, synthetic construct
  source 1..75: mol_type = other DNA
ttttatctaactggaatgaaatagaactggacagaaatgatgcctatacggagcaacaatttggccgtaatgggc

SEQ ID NO: 538402 - DNA, 75 bp, synthetic construct
  source 1..75: mol_type = other DNA
tttatggccaatgggataactcatggggtgacgatctggacatgttttatggattcggttacctcggctggaacg

SEQ ID NO: 538403 - DNA, 75 bp, synthetic construct
  source 1..75: mol_type = other DNA
cacaccaaccagctatatcgcgacctacatcggaaaaaacctggacagccgcgccgtggatggcatcgacccgaa

SEQ ID NO: 538404 - DNA, 75 bp, synthetic construct
  source 1..75: mol_type = other DNA
ggcctttgcctgataaccacgaattactcgctaaagaatggcgggagtctgctgaatctctcggcctgcatatcg

SEQ ID NO: 538405 - DNA, 75 bp, synthetic construct
  source 1..75: mol_type = other DNA
ggcgtacttgttccacgcaaggactacctgattcgcaccgcctacgacctcgcagatgagctgaacgattacggc

SEQ ID NO: 538406 - DNA, 75 bp, synthetic construct
  source 1..75: mol_type = other DNA
aggacatggatttatgagcttataaaggctggaagatttccaaagcaagtaaagataagtgaaaggtctattgcc

SEQ ID NO: 538407 - DNA, 75 bp, synthetic construct
  source 1..75: mol_type = other DNA
ttggcgcatcggttcaggcttgcccttccctacttaaaatgcgcgatctgtatcttctccaatacagcgagaaga

SEQ ID NO: 538408 - DNA, 75 bp, synthetic construct
  source 1..75: mol_type = other DNA
tggaccgggagatattttatagagtaagagatgctgcaaaaaataaaacgggaaagagaattattgaggacgcaa

SEQ ID NO: 538409 - DNA, 75 bp, synthetic construct
  source 1..75: mol_type = other DNA
gtgggatgtataactgcgcccgagccgttatccagcgcccatcaactggcagagttcgtcagtggggaaacggta

SEQ ID NO: 538410 - DNA, 75 bp, synthetic construct
  source 1..75: mol_type = other DNA
gatcaccgcaggcgtgcaaaataatataccggtggtgatcggaacggccggcggttctggtgccgcaccacacct

SEQ ID NO: 538411 - DNA, 75 bp, synthetic construct
  source 1..75: mol_type = other DNA
gggcgttttgtgctttgagatcaccgaggggaagaccaagagcgcggcacgaatcgtcccagtacacagcaagct

SEQ ID NO: 538412 - DNA, 75 bp, synthetic construct
  source 1..75: mol_type = other DNA
gagctggcaaaggtctataccttgcttgatgacgagatgaaggcggtaacggctattggtgcttacagcggtatg

SEQ ID NO: 538413 - DNA, 75 bp, synthetic construct
  source 1..75: mol_type = other DNA
atgaaaaagttcgaaaacataactgttctccatgttgataactttgattatacaaaccaggaacttctcccggag

SEQ ID NO: 538414 - DNA, 75 bp, synthetic construct
  source 1..75: mol_type = other DNA
atatagtgattagaggaaagagtattgtcaaaaacaggttcgcatgtacttcgggaacaatgacagaaacaacct

SEQ ID NO: 538415 - DNA, 75 bp, synthetic construct
  source 1..75: mol_type = other DNA
gatattagctcgaaaaacatcgataaaataaaatcaacacttttaggtacgcaaactgaaacattgttaataaaa

SEQ ID NO: 538416 - DNA, 75 bp, synthetic construct
  source 1..75: mol_type = other DNA
acccgtccggtgaagtcacccccagtaaggcagacctccttatcacggaacgtctggtacaggcactgggcctgg

SEQ ID NO: 538417 - DNA, 75 bp, synthetic construct
  source 1..75: mol_type = other DNA
atgtttcgccagcacatggatcgctgctttgctgcattccaacgctattcgacggtcgatctcaaggcgttgttg

SEQ ID NO: 538418 - DNA, 75 bp, synthetic construct
  source 1..75: mol_type = other DNA
ctgcttaatgttacgctgtgttatccggacaataaccgtcagccgttcttcgatatgttaagcggtaaactgacg

SEQ ID NO: 538419 - DNA, 75 bp, synthetic construct
  source 1..75: mol_type = other DNA
agagaaattttctgagaatatgaaggacatatatacgaagtataatgttggaattttaggtccttcattttatga

SEQ ID NO: 538420 - DNA, 75 bp, synthetic construct
  source 1..75: mol_type = other DNA
gatttttatcttattcaatttgatgataattatggtctcgcatatgcacaaaatagtggtatagaatatgccata

SEQ ID NO: 538421 - DNA, 75 bp, synthetic construct
  source 1..75: mol_type = other DNA
aggtaagacaggaggtaatacaagaggttagacaggaagtaagacaggaattcgccctgcgttttctgagtaaag

SEQ ID NO: 538422 - DNA, 75 bp, synthetic construct
  source 1..75: mol_type = other DNA
tctttctacattgttcgtcaaatcgatgccaaccagggcggcaaccagcgtattactgcattcatctataaaaaa

SEQ ID NO: 538423 - DNA, 75 bp, synthetic construct
  source 1..75: mol_type = other DNA
tgctgaaaaagcagaagaaacaagtaatcgcgtaattaacggtgttgtcgaactgccgaaagatcaggctgttct

SEQ ID NO: 538424 - DNA, 75 bp, synthetic construct
  source 1..75: mol_type = other DNA
aaaatatgggatacagagtgtgtatgactaacagggctttaatggctcatacaattggtgattccagaattacaa

SEQ ID NO: 538425 - DNA, 75 bp, synthetic construct
  source 1..75: mol_type = other DNA
ctttcccgctggtggatatcaccatcacaccggatgacgaaatcatgcaacatcggcggattgcgattctcgaac

SEQ ID NO: 538426 - DNA, 75 bp, synthetic construct
  source 1..75: mol_type = other DNA
gcagctgtgccgcatgaaaatccaggtggcggcaggctcgattttctcagcttccggcaaataccgtaattgtct

SEQ ID NO: 538427 - DNA, 75 bp, synthetic construct
  source 1..75: mol_type = other DNA
gcccgcctgatgctcgacagcggctcggtggtcaccgccgatgacatcatcatcaccagcggctgccataactcg

SEQ ID NO: 538428 - DNA, 75 bp, synthetic construct
  source 1..75: mol_type = other DNA
gagtaaagggatgtctcgggaagacgttgcagagatgacaaatttatctcttgctgagattgataggctgattaa

SEQ ID NO: 538429 - DNA, 75 bp, synthetic construct
  source 1..75: mol_type = other DNA
cggttatctgcatgttgtgattgaacaccaaagcaagccggataagaaaatggcctttcgcatgatgcgttattc

SEQ ID NO: 538430 - DNA, 75 bp, synthetic construct
  source 1..75: mol_type = other DNA
atagcacggacgtgctctattccgtgcaaatgcagggcaatcccggctatctgcatgttgtgattgagcatcaaa

SEQ ID NO: 538431 - DNA, 75 bp, synthetic construct
  source 1..75: mol_type = other DNA
ctgaacaaagcgacagcagcgatgatggtcccgttcgacagcatcaaattctctggcaactacggcaacatgacc

SEQ ID NO: 538432 - DNA, 75 bp, synthetic construct
  source 1..75: mol_type = other DNA
caccggtaaccctgacgctcattgcggtcttgaccgttatgtgaatgtcaaaatcaccagcgccaccggcacgca

SEQ ID NO: 538433 - DNA, 75 bp, synthetic construct
  source 1..75: mol_type = other DNA
agatggcagcgaattttacggaaaaaaagtaactttaccggtgcttggcgaaggcaggtcggttgtgcaggtcag

SEQ ID NO: 538434 - DNA, 75 bp, synthetic construct
  source 1..75: mol_type = other DNA
aaagcatctgatgtggattgtcaccgtgctgctggtgctgatcgcgccctttttcctctacgtctttgcgccttt

SEQ ID NO: 538435 - DNA, 75 bp, synthetic construct
  source 1..75: mol_type = other DNA
cagcaattgaaattgagtcattcgaaacagcatataaagcatcaccggaagaaaaacacgagttcacatcatact

SEQ ID NO: 538436 - DNA, 75 bp, synthetic construct
  source 1..75: mol_type = other DNA
aaatgttgatatctgctcatggctcaaaaaatatattcaggaaaagacgaatatttccctgaactatgtgcgtat

SEQ ID NO: 538437 - DNA, 75 bp, synthetic construct
  source 1..75: mol_type = other DNA
agactcagtagaactgtttacccggaagtttaaaagcgcctgggctacccaaaaaaacagaataaaaaacagggt

SEQ ID NO: 538438 - DNA, 75 bp, synthetic construct
  source 1..75: mol_type = other DNA
atgattatcacgcaggagaaaatatcactattcattttgatatggcgaaatgccatttctttgatgctgaaactg

SEQ ID NO: 538439 - DNA, 75 bp, synthetic construct
  source 1..75: mol_type = other DNA
tactggacagttgtgctgaactgcttcaaaagctgggaagcccggatgtagttctgatgcaaaaacacggtacac

SEQ ID NO: 538440 - DNA, 75 bp, synthetic construct
  source 1..75: mol_type = other DNA
cgaagccggacgtgcagccctggctgccggtggcgaagccgcgaagaaagttgaaatcccgggtgttgccactac

SEQ ID NO: 538441 - DNA, 75 bp, synthetic construct
  source 1..75: mol_type = other DNA
gcgcgtctccggattacgcctcaacctgtttgctgttctgatcgtcagagtctgcttaacctcatggaggccacc

SEQ ID NO: 538442 - DNA, 75 bp, synthetic construct
  source 1..75: mol_type = other DNA
agagtgaactgaatatcatcatgaattttattgatgaacagcagttaacgaatagtgatattccgaagaaaagta

SEQ ID NO: 538443 - DNA, 75 bp, synthetic construct
  source 1..75: mol_type = other DNA
cctgattatatacatatcaggcaataattacgtacttacagcttttctctgttttgcatggacagtattctgggt

SEQ ID NO: 538444 - DNA, 75 bp, synthetic construct
  source 1..75: mol_type = other DNA
cgttaatggcggtgtgtaaaccgggcgatattgtcgcggtcgaatccccctgttattacggttcaatgcagatgc

SEQ ID NO: 538445 - DNA, 75 bp, synthetic construct
  source 1..75: mol_type = other DNA
actatcgtgacggcgtaaaacttgcgaagcatgaaacagaaacatggtgcggacataagcctcaattttctgact

SEQ ID NO: 538446 - DNA, 75 bp, synthetic construct
  source 1..75: mol_type = other DNA
accgctccattgtccgtaaaggccctctgttcccgctgaactcgctgatgtaccacgggatagtcagcgctgaga

SEQ ID NO: 538447 - DNA, 75 bp, synthetic construct
  source 1..75: mol_type = other DNA
cattaataaaaccttgcccgttgagtataaaaacgcaacagtgattacgttgcaggcactggaaacgctggtgtt

SEQ ID NO: 538448 - DNA, 75 bp, synthetic construct
  source 1..75: mol_type = other DNA
attctgctcctaaagtcattgagaatctgcaaacagccacacagaaactggctgactttatgcaatcacagggac

SEQ ID NO: 538449 - DNA, 75 bp, synthetic construct
  source 1..75: mol_type = other DNA
atgagtacaaccgaaaatcaaattgagcaggatcttattgcccggctggctgaactaaaatacacactgcggccc

SEQ ID NO: 538450 - DNA, 75 bp, synthetic construct
  source 1..75: mol_type = other DNA
taagtacaacatgcaaaagttgtggagtagctgttttaccacctgacgattattgtaaaggttgtgctgataaaa

SEQ ID NO: 538451 - DNA, 75 bp, synthetic construct
  source 1..75: mol_type = other DNA
gttttggcttaagtatggcatttgattttgattattatttagttgatgaagtcacagctgtcggcgatgctcgat

SEQ ID NO: 538452 - DNA, 75 bp, synthetic construct
  source 1..75: mol_type = other DNA
attaccgcggttggtgatgctcgatttagagaaaaatgtgcaaaaatatttaaagctaggcgttctgaatctaat

SEQ ID NO: 538453 - DNA, 75 bp, synthetic construct
  source 1..75: mol_type = other DNA
tgaatctcactgcgatatcagcctgccagacccgttaccgaatgacctgttcaatggcttgttgttgccatgcca

SEQ ID NO: 538454 - DNA, 75 bp, synthetic construct
  source 1..75: mol_type = other DNA
taacaaagtcatacagaacgccactcggacgacactatatatttaaagatttaaatattgcatttccatcagata

SEQ ID NO: 538455 - DNA, 75 bp, synthetic construct
  source 1..75: mol_type = other DNA
tgcgatttttttaggcagaaataatgaagtttattattatgatgatatctcatgtgcgataaaggattatctgaa

SEQ ID NO: 538456 - DNA, 75 bp, synthetic construct
  source 1..75: mol_type = other DNA
agtcatatcgcacaccaacaggtcgacactatgtgtttaaggatttaaatatcgaactcccttcaggaaaaagtg

SEQ ID NO: 538457 - DNA, 75 bp, synthetic construct
  source 1..75: mol_type = other DNA
cgaaaatcacaaagctataaaagaatttttccctaatgcccagctttttggcttcacgggaacacctatcttcga

SEQ ID NO: 538458 - DNA, 75 bp, synthetic construct
  source 1..75: mol_type = other DNA
cggaattgcgcaacagagccaaagaattggctttatccgtacttaaaactcacccagatgcccaaaaaaacggca

SEQ ID NO: 538459 - DNA, 75 bp, synthetic construct
  source 1..75: mol_type = other DNA
aggagcacggcgtcagcatcagcaccgtgcagcaggcgtaccagacgctggaaacgatgaagctcatcactccgc

SEQ ID NO: 538460 - DNA, 75 bp, synthetic construct
  source 1..75: mol_type = other DNA
tggatattcatccggaaaatccgtgggagcagtttgtttatcaattgagtgccgataaatggtgcgtgggcgcgg

SEQ ID NO: 538461 - DNA, 75 bp, synthetic construct
  source 1..75: mol_type = other DNA
accatttgaactggaagcagagggtctgttagccatctgtattcagcatgagatggatcacctggtcggcaaact

SEQ ID NO: 538462 - DNA, 75 bp, synthetic construct
  source 1..75: mol_type = other DNA
gtcgatccctgaacaacgagctttagtgccacgcgcagagaaagttaaaattcgcgccctggaccgcgacggtaa

SEQ ID NO: 538463 - DNA, 75 bp, synthetic construct
  source 1..75: mol_type = other DNA
ataatctgcaaaccgtgctcggttatgacttgttagccggtcagcgggtattgagagagcagattgcccgcctga

SEQ ID NO: 538464 - DNA, 75 bp, synthetic construct
  source 1..75: mol_type = other DNA
cacgcagcaaaaatatgcgcgcaattgccacgcgcgatacggcgattgagaagcgcctcgccagtttgttaaccg

SEQ ID NO: 538465 - DNA, 75 bp, synthetic construct
  source 1..75: mol_type = other DNA
atttttggctggagaagataggtaaaaatgtcgagcgcgatcgtcgtgatatcagccatttgcaggaactcggtt

SEQ ID NO: 538466 - DNA, 75 bp, synthetic construct
  source 1..75: mol_type = other DNA
aaatgttgagcgcgatcgccgcgatatcagtcgcttgcaggaactcggctggcgcgtattgattgtctgggagtg

SEQ ID NO: 538467 - DNA, 75 bp, synthetic construct
  source 1..75: mol_type = other DNA
ggttaacccaagcgatctgctgcctattgccattccggcgctcattttgtccgcatggatgatattcttcgcccg

SEQ ID NO: 538468 - DNA, 75 bp, synthetic construct
  source 1..75: mol_type = other DNA
ggctcgacgctggagatagagtccggcagtaatgacccaatggcggtctttctgacgataaccctgattgcgatg

SEQ ID NO: 538469 - DNA, 75 bp, synthetic construct
  source 1..75: mol_type = other DNA
tgtttaccaattgagtgccgataaatggtgcgtaggcgcggcgctgcgcgacctgcatatgccaaaagagacgcg

SEQ ID NO: 538470 - DNA, 75 bp, synthetic construct
  source 1..75: mol_type = other DNA
gcatcaactgaactatatcgccagctacgtgccgctgcgtgctgatgcaaccattggccgcgcagatgcgacggt

SEQ ID NO: 538471 - DNA, 75 bp, synthetic construct
  source 1..75: mol_type = other DNA
ttgagctatgggcgctgtgggtgcgcaatggctgcaacgcccgtagcggtttcgcgtcgatgttagaaatgatga

SEQ ID NO: 538472 - DNA, 75 bp, synthetic construct
  source 1..75: mol_type = other DNA
tcagcgcattttatcggttcggttgtttatatagagcaggggttgtatcaggtttctggtatttctccgttgctg

SEQ ID NO: 538473 - DNA, 75 bp, synthetic construct
  source 1..75: mol_type = other DNA
aacccaccgtatgacggagatgttgcgagacggcaagaaaatctactcaagcatcgagcttgaacccaacattga

SEQ ID NO: 538474 - DNA, 75 bp, synthetic construct
  source 1..75: mol_type = other DNA
atggttgagaaatctgatgtaataattgcagaatgtagttttccatcaacagggctaggaatagagttgcagatt

SEQ ID NO: 538475 - DNA, 75 bp, synthetic construct
  source 1..75: mol_type = other DNA
ctgggttgccacacaacagggcagcatggccgcaggagtatcaaatactggaacattacgatttgcgcgccgccg

SEQ ID NO: 538476 - DNA, 75 bp, synthetic construct
  source 1..75: mol_type = other DNA
gctggaattcatacggtaattaaagcgggagtctctgcggatacacaatctgatttcggcgcgggtgtcggcgtg

SEQ ID NO: 538477 - DNA, 75 bp, synthetic construct
  source 1..75: mol_type = other DNA
gcacatgcccagtcaacggctgaccatgccaacgctaacgccaacaccgctctgatcaacggcgtcaaactctcc

SEQ ID NO: 538478 - DNA, 75 bp, synthetic construct
  source 1..75: mol_type = other DNA
cacgccatcacggtggcgcagacggatattgatgccaataaagccgccatcgccgacacccgtaatgatgtctcc

SEQ ID NO: 538479 - DNA, 75 bp, synthetic construct
  source 1..75: mol_type = other DNA
acaggtgattttatgatggtgtctgccggggcgggtacattcaacaatgaatctgcggtatctgtcggtgcttcg

SEQ ID NO: 538480 - DNA, 75 bp, synthetic construct
  source 1..75: mol_type = other DNA
gccagcaaatcaattcgctcaataacaacttcagttcgttgaaacacgaagtggaagataaccgtaaagaggcta

SEQ ID NO: 538481 - DNA, 75 bp, synthetic construct
  source 1..75: mol_type = other DNA
tattgccgaaatgaccgccgcgaaagcagaacaactgattgagcagggcattattactgacggcatgatagtgaa

SEQ ID NO: 538482 - DNA, 75 bp, synthetic construct
  source 1..75: mol_type = other DNA
agccgccgtttttcaccgatgccattgaggctggcgtcattgccctgaaccagcgccagaacgacgaaggcgttc

SEQ ID NO: 538483 - DNA, 75 bp, synthetic construct
  source 1..75: mol_type = other DNA
gaatatttcccgctatatcgaaaaaggcgaaaaaccgctggcggcagcactcaagggggcaggtgaaatcggctt

SEQ ID NO: 538484 - DNA, 75 bp, synthetic construct
  source 1..75: mol_type = other DNA
atgctcagccaggagtcgctgcgtaaacagaaccgcttctcccgtgcctcggagaaaatgttcgacaggataatc

SEQ ID NO: 538485 - DNA, 75 bp, synthetic construct
  source 1..75: mol_type = other DNA
ctggtcatcactcaccgtgacctgaccgaacgcgctatgcgccaggttccgcaggcacagcatatttcgctgacc

SEQ ID NO: 538486 - DNA, 75 bp, synthetic construct
  source 1..75: mol_type = other DNA
gcagcgacggtggcgtggtgccgttaagctcaattgccaaaattgagcagcgttttgcgccgctctccatcaacc

SEQ ID NO: 538487 - DNA, 75 bp, synthetic construct
  source 1..75: mol_type = other DNA
gtgccgggcgtcgatctcttcctgcaaccaacgcaggatctgactatcgatactcaggtcagccgcacccagtac

SEQ ID NO: 538488 - DNA, 75 bp, synthetic construct
  source 1..75: mol_type = other DNA
tgggtgttgatggcactaacccatcgctgaacagtgcacgtttgcagatcaacctcaaaccactggatgaacgtg

SEQ ID NO: 538489 - DNA, 75 bp, synthetic construct
  source 1..75: mol_type = other DNA
caaacaattattaccgtggctgctggcgctgtttgctgtcagtgtcgtggcgacctgggctgctggcttcattag

SEQ ID NO: 538490 - DNA, 75 bp, synthetic construct
  source 1..75: mol_type = other DNA
atggcaaaaaaagtctcaaaattctttcgcatcggcgtcgagggtgacacctgcgatggccgcattatcagcggt

SEQ ID NO: 538491 - DNA, 75 bp, synthetic construct
  source 1..75: mol_type = other DNA
tagccctgatttatcttgccgtcaccctgtgcctgagctttctgctgaagcaactggagaaaaggatccatattt

SEQ ID NO: 538492 - DNA, 75 bp, synthetic construct
  source 1..75: mol_type = other DNA
gcgccgcggcggttatctggcaagcgttagtgacggattattatccttcacagaaagtcaaccgtatttttgcga

SEQ ID NO: 538493 - DNA, 75 bp, synthetic construct
  source 1..75: mol_type = other DNA
tctgtgcttcctcgcaagtctggtagtttcctggctgatcagtatcagcacgccattgctcaccaccaccagcgt

SEQ ID NO: 538494 - DNA, 75 bp, synthetic construct
  source 1..75: mol_type = other DNA
gtttcctggcttatcagcgttagcacaccactgctcaccaccacctgcgtgatgttatcgaccgtggtactggct

SEQ ID NO: 538495 - DNA, 75 bp, synthetic construct
  source 1..75: mol_type = other DNA
ttgctgaccagcagcaacaactcgacgaaacccggaaaaccgttgccgccaccggggatgtgcagactgccgccc

SEQ ID NO: 538496 - DNA, 75 bp, synthetic construct
  source 1..75: mol_type = other DNA
acacttacgggcatcctgctggggatcgttgtctaatacaagttgccgacgctctacagcgttcaactcgccagt

SEQ ID NO: 538497 - DNA, 75 bp, synthetic construct
  source 1..75: mol_type = other DNA
ttcatcgtcacttttaagagcgatgtggcgcgtgccgaaaaggtctctaattctacgtcactggttaaaccgttg

SEQ ID NO: 538498 - DNA, 75 bp, synthetic construct
  source 1..75: mol_type = other DNA
atgacttatgcagctttcaatcttagcaccgccgtagctggtggacaaggctatcagccaggcggtcggttttta

SEQ ID NO: 538499 - DNA, 75 bp, synthetic construct
  source 1..75: mol_type = other DNA
gtgccgcgctttttgcctgacgggcaacgcaacgcgattcgcctcgagcggctgaaagataagctgggtaatcgc

SEQ ID NO: 538500 - DNA, 75 bp, synthetic construct
  source 1..75: mol_type = other DNA
ctggggccgctggccaggaaagaatgctaaaaggaggagaaactgtacttgcagatggctctaccatccttactg

SEQ ID NO: 538501 - DNA, 75 bp, synthetic construct
  source 1..75: mol_type = other DNA
ttgttacggttagtcaggggattacctgttctgctcccgcaaaaacggctgaacaaattatttcagatgccgacg

SEQ ID NO: 538502 - DNA, 75 bp, synthetic construct
  source 1..75: mol_type = other DNA
aactgttcaggagattcgcgcttcggttcatcggacccattcaatgagcggatataagaccccattactcaatga

SEQ ID NO: 538503 - DNA, 75 bp, synthetic construct
  source 1..75: mol_type = other DNA
aggcctgcgcgtgggctgggtcgcgccggggcgatatcacgataaactgctgcatatgaaatatgccaccagcag

SEQ ID NO: 538504 - DNA, 75 bp, synthetic construct
  source 1..75: mol_type = other DNA
tttaccggaaatatgatggggtataaacgtccgttgttgaatgatttcagaggagagccactaaaacgtcgagtt

SEQ ID NO: 538505 - DNA, 75 bp, synthetic construct
  source 1..75: mol_type = other DNA
ccgctgccactgagcgcgaagcacgcgcgcagctgccgcacgcacatctgatttttgtcgcccgaatccgtcagg

SEQ ID NO: 538506 - DNA, 75 bp, synthetic construct
  source 1..75: mol_type = other DNA
aatacaaaagtgaataccaaaaaagacttgaaatggtattcacttaaatgtaatgtgaataccacaagtgctgat

SEQ ID NO: 538507 - DNA, 75 bp, synthetic construct
  source 1..75: mol_type = other DNA
ctgcacaagaaaaaacggaatcgttaatggcaagttttcagaatgggttaaacttagtgatcttagcagtgaaag

SEQ ID NO: 538508 - DNA, 75 bp, synthetic construct
  source 1..75: mol_type = other DNA
ggttctggcaacatcatgtgtctggatgtgctgcgcgttctcaataagcaggcgggcgtatacgacttactgtcg

SEQ ID NO: 538509 - DNA, 75 bp, synthetic construct
  source 1..75: mol_type = other DNA
atatctgtctcaacttgctcagttgccggagtatcgcaagattactggcacgatagcagaagagatgacgcgaaa

SEQ ID NO: 538510 - DNA, 75 bp, synthetic construct
  source 1..75: mol_type = other DNA
aattgcacccttaacaacaggtgaggttgtgctgcaaagtgccggcaatgtggctgccggaattatgctgggtat

SEQ ID NO: 538511 - DNA, 75 bp, synthetic construct
  source 1..75: mol_type = other DNA
ttaccaaagccctgcttcgaggtttatttgaaccatggcttgaaagatggggactgggatatcgaaatgtatgtt

SEQ ID NO: 538512 - DNA, 75 bp, synthetic construct
  source 1..75: mol_type = other DNA
tcgccgcgcctgagccggcaaaagaacctgaagcaccgaaggtcgggatcaggccagaggccgtggccgaagtcc

SEQ ID NO: 538513 - DNA, 75 bp, synthetic construct
  source 1..75: mol_type = other DNA
ttgacgacactgaaattgacaacaccgaagaaaatccgccgcaaggcccgaatgcagaccctgaggcggatttca

SEQ ID NO: 538514 - DNA, 75 bp, synthetic construct
  source 1..75: mol_type = other DNA
gaaaggttccctgctggggcttcgtgttattgaacccgtctggacgtatccgggtatatataacgcggataatcc

SEQ ID NO: 538515 - DNA, 75 bp, synthetic construct
  source 1..75: mol_type = other DNA
gggacgatgttaaaacctggacttctgacgcatgggcatggataggtgatcatacactgggggcactcagtctga

SEQ ID NO: 538516 - DNA, 75 bp, synthetic construct
  source 1..75: mol_type = other DNA
gccgcactggctttacagcgtgccgctgccgggaaacccacccaccctcataactacgcaacagaggccaatatg

SEQ ID NO: 538517 - DNA, 75 bp, synthetic construct
  source 1..75: mol_type = other DNA
ggcggtattggttattgcgaggagagcgagctgccgcggctttaccgggagatgccggtaaacagtatttgggaa

SEQ ID NO: 538518 - DNA, 75 bp, synthetic construct
  source 1..75: mol_type = other DNA
ctggcggtccccgtcggcgcgctggcaacagctctctataccctttactggttaatcaccgatataaagcaaccc

SEQ ID NO: 538519 - DNA, 75 bp, synthetic construct
  source 1..75: mol_type = other DNA
cggaacgtgacagggcgcacctgaccattcccttcctgatggagatgcttccaggcaaactcaggcgtgttattg

SEQ ID NO: 538520 - DNA, 75 bp, synthetic construct
  source 1..75: mol_type = other DNA
atgagaaaatcagccggcagcgccgtgatttatggaaggcggaaagtcagtatgcggtcctgaaagaggctgcca

SEQ ID NO: 538521 - DNA, 75 bp, synthetic construct
  source 1..75: mol_type = other DNA
acccggcgaggcggtaacgatatccgcacgctgggctttatgaccgaaagcattgcgcaggcggtggaaagccgg

SEQ ID NO: 538522 - DNA, 75 bp, synthetic construct
  source 1..75: mol_type = other DNA
tgtatatcgtggaaagtaaggatggcagtgtgcagattgccgttaatgcgccgtacagcctgaagcgtcagccgg

SEQ ID NO: 538523 - DNA, 75 bp, synthetic construct
  source 1..75: mol_type = other DNA
gtgacggcacggcccggattgtggtcagaacatcacagacagtcggcaggcagaatgaccgggcggatgtgctgg

SEQ ID NO: 538524 - DNA, 75 bp, synthetic construct
  source 1..75: mol_type = other DNA
accgtacagatcggcggcaatatcggtcgcatggtgcttgatattttccgcctgaaaggtgatgaagctcgccat

SEQ ID NO: 538525 - DNA, 75 bp, synthetic construct
  source 1..75: mol_type = other DNA
gctggtacatactgctgataattatccgctactgttaaccgtcgcttttctctgttcggcggtgctggcgatgtt

SEQ ID NO: 538526 - DNA, 75 bp, synthetic construct
  source 1..75: mol_type = other DNA
tgcaaaagctgggatggtggggaaagcagattgtggtggacagcgacggtaacgcggaagaagtgcagctgggca

SEQ ID NO: 538527 - DNA, 75 bp, synthetic construct
  source 1..75: mol_type = other DNA
aaccgatgttgtacaatctgaagctgacgctaacaggaatatgactgaaggtggtcgtgatttgatgaaaagcgt

SEQ ID NO: 538528 - DNA, 75 bp, synthetic construct
  source 1..75: mol_type = other DNA
ccaggttgttgtcgctgacagccgtaatgcacgcaacggtcgtttcatcgagcgcgttggtttcttcaacccaat

SEQ ID NO: 538529 - DNA, 75 bp, synthetic construct
  source 1..75: mol_type = other DNA
atctccgcgatgcagaagaaattaccaccggattacgcgtggaattttgccggataaatggtctgcgtggccctt

SEQ ID NO: 538530 - DNA, 75 bp, synthetic construct
  source 1..75: mol_type = other DNA
ggctaccgctgctgatgctgccctgaaagcagaggatttacagcgtctgccgtctctgatggcagaaccacaggc

SEQ ID NO: 538531 - DNA, 75 bp, synthetic construct
  source 1..75: mol_type = other DNA
cgcggctgcacaatatggttttccggtatgacgacattttctggcagacgcattacccgcccaatggctggaact

SEQ ID NO: 538532 - DNA, 75 bp, synthetic construct
  source 1..75: mol_type = other DNA
ttgcgccatcttagcctccttaagctatccggctatcgcctcatcattgcactctctgctgtcgcagaagcggaa

SEQ ID NO: 538533 - DNA, 75 bp, synthetic construct
  source 1..75: mol_type = other DNA
tcattctggttctggagatgaccgataactaccagctcattttgccaatgattattaccggtcttggcgcaacac

SEQ ID NO: 538534 - DNA, 75 bp, synthetic construct
  source 1..75: mol_type = other DNA
attatgaccatccgcatcacagggtcggcctttgccaccacggctactgaagtggtgagcctgaaaatgctgcat

SEQ ID NO: 538535 - DNA, 75 bp, synthetic construct
  source 1..75: mol_type = other DNA
gtcattaaacgtgtatataccgaagaagagttgcgcctacagacggaaaaccagaaaaaaatattattacagcag

SEQ ID NO: 538536 - DNA, 75 bp, synthetic construct
  source 1..75: mol_type = other DNA
gctcttgaagttccatttttgctggttggggcgttcaaatatattacggcagtgtttgacacccgactgtcagcg

SEQ ID NO: 538537 - DNA, 75 bp, synthetic construct
  source 1..75: mol_type = other DNA
gaagtggaagtcagttcttatctggtcggtcagattgacgcggaagtggacaccgacgatttgagtaacttccag

SEQ ID NO: 538538 - DNA, 75 bp, synthetic construct
  source 1..75: mol_type = other DNA
caggtaatccaaaaaccgttgaacaatatcagctaacaaagaattttaatgttatctggttatggtctgaagacg

SEQ ID NO: 538539 - DNA, 75 bp, synthetic construct
  source 1..75: mol_type = other DNA
gtgctgacgactcaggtaaatggatgtttaaagatggcgcagtcattaaacgtgtatataccgaagaagagttgc

SEQ ID NO: 538540 - DNA, 75 bp, synthetic construct
  source 1..75: mol_type = other DNA
gaaatggatgttcaaagatggcgtggtgataaagcgaacttataccgaggaagagcagagacaacaagcggaaaa

SEQ ID NO: 538541 - DNA, 75 bp, synthetic construct
  source 1..75: mol_type = other DNA
gcacggctggatgtggtgaccacattacaggccgaagtgcagcgggccattgatgaggggatttcacagaaagaa

SEQ ID NO: 538542 - DNA, 75 bp, synthetic construct
  source 1..75: mol_type = other DNA
accgtgcagatcggcggtaacattggccgtatggtgcttgatattttccgcatgaaaggtgatgaagctcgccac

SEQ ID NO: 538543 - DNA, 75 bp, synthetic construct
  source 1..75: mol_type = other DNA
tgccaaaacgggcgaggtgaaaggccgtctggtgctggatgatcgtaagcgcacggaagaggtgcgcccgctgca

SEQ ID NO: 538544 - DNA, 75 bp, synthetic construct
  source 1..75: mol_type = other DNA
tatgatcgtatgggattccagaatacgtattttgtgctcgggatgattgctctgactgttaccgtgatatcagct

SEQ ID NO: 538545 - DNA, 75 bp, synthetic construct
  source 1..75: mol_type = other DNA
ctggcaatcctaaaacaaaagagcaataccagctaacgaaacaatttaacatcaaatggctttatacagaggatg

SEQ ID NO: 538546 - DNA, 75 bp, synthetic construct
  source 1..75: mol_type = other DNA
ttgcagagtcaaatcacggaatcaagacgcttcaaggtggatggttacaccgtaaccttcgctgctggtgttaag

SEQ ID NO: 538547 - DNA, 75 bp, synthetic construct
  source 1..75: mol_type = other DNA
cgaccaataattagggcaagaagatgttctaatgctgatggttatggaaatattagtcaattactttcacctcca

SEQ ID NO: 538548 - DNA, 75 bp, synthetic construct
  source 1..75: mol_type = other DNA
accactaacgctgacggcgaattgattaccatcgacaccgccgacaataaaatcctcagccgtaaaaagctgctg

SEQ ID NO: 538549 - DNA, 75 bp, synthetic construct
  source 1..75: mol_type = other DNA
taaatagtgcggtcacggcgatagatgccaaaacgggcgaagtgaaaggtcgtctggtgctggatgatcgtaagc

SEQ ID NO: 538550 - DNA, 75 bp, synthetic construct
  source 1..75: mol_type = other DNA
gttatccagagcgtgaaaaatgttttgacgatgcactaaaaattattgatgaactgcgtaaagctgagaaagaag

SEQ ID NO: 538551 - DNA, 75 bp, synthetic construct
  source 1..75: mol_type = other DNA
tcgtccaggcatttaaaaaaggtgagcttacacgccaccaagtagtaatgaaccgtaatatggcaaggagtcgag

SEQ ID NO: 538552 - DNA, 75 bp, synthetic construct
  source 1..75: mol_type = other DNA
tcgtagaggcatttaaaaaaggtgagttaacacgacatcaagtagtaatgaatcgtaatatggcaaggagtcgag

SEQ ID NO: 538553 - DNA, 75 bp, synthetic construct
  source 1..75: mol_type = other DNA
gagccgaagcgggcgcaataaaagacagccagaaacggtgacagtgtcacggaatatcacacctgttccctgcat

SEQ ID NO: 538554 - DNA, 75 bp, synthetic construct
  source 1..75: mol_type = other DNA
tttctccccgcagtggacctttccgatgggggcccgtttaccgcctcacgggacagctgtccgggggcggacgca

SEQ ID NO: 538555 - DNA, 75 bp, synthetic construct
  source 1..75: mol_type = other DNA
gagctatgaagaattcttccgcgaacgccagaatgcgcgctacggcggcgatggtaaaggcggtatgcgctgttg

SEQ ID NO: 538556 - DNA, 75 bp, synthetic construct
  source 1..75: mol_type = other DNA
cgcgcctgcgtggttcattactgttaggttcattgcttgttgcttcatcattcagtacgcaggccgcagaagaaa

SEQ ID NO: 538557 - DNA, 75 bp, synthetic construct
  source 1..75: mol_type = other DNA
gtgtgcagggagcgcaggtcacggcgcgacaggggcagcgcgaccggaacggtcgctgcaagcccgggttttcac

SEQ ID NO: 538558 - DNA, 75 bp, synthetic construct
  source 1..75: mol_type = other DNA
cagctgcctgtcggagtcgggcctgacgaccggatgccgccaggcagccgggagccgaaggagcgtccggcagac

SEQ ID NO: 538559 - DNA, 75 bp, synthetic construct
  source 1..75: mol_type = other DNA
aatcgtaatatggcaaggagtagaggttatccagagcgtgaaaaatgttttgacgatgcactgaaaattattgat

SEQ ID NO: 538560 - DNA, 75 bp, synthetic construct
  source 1..75: mol_type = other DNA
atgatgcggtgtttaaacaatttttaatgcatgcggaaacggctcgcgactttctggatatccatttgccagcgg

SEQ ID NO: 538561 - DNA, 75 bp, synthetic construct
  source 1..75: mol_type = other DNA
cagggtgtgctttaccagatcatctgggatccaaagactccgttcgctgcggtaatcgaagctgcaccttctgtt

SEQ ID NO: 538562 - DNA, 75 bp, synthetic construct
  source 1..75: mol_type = other DNA
agtggtaattctgaaaatgcttcacgctcttgaagttccattcctgctggttggggcgttcaaatatattacggg

SEQ ID NO: 538563 - DNA, 75 bp, synthetic construct
  source 1..75: mol_type = other DNA
ggagctggcgcgacgcgtttacaacaaccctttcccgctggtggatatcaccatcacaccggatgacgaaatcat

SEQ ID NO: 538564 - DNA, 75 bp, synthetic construct
  source 1..75: mol_type = other DNA
ggaggataaacatatacaggagcccgcaggatgttttgatgcagtacaaacgccgaattcattctgtcggtttga

SEQ ID NO: 538565 - DNA, 75 bp, synthetic construct
  source 1..75: mol_type = other DNA
tttgatctttctaatcctgcagcgaacagaacttcaacagtaactacagaggacattttagaaaaatataagaat

SEQ ID NO: 538566 - DNA, 75 bp, synthetic construct
  source 1..75: mol_type = other DNA
ggaacaagttaaggcactgtatactaacgtccgcagtgaattaatcggtttggttgctcaagcgtcattgatgca

SEQ ID NO: 538567 - DNA, 75 bp, synthetic construct
  source 1..75: mol_type = other DNA
gcttacacgccaccaaatagtaatgaatcgtaatatggcaaggagtcgaggttatccagagcgagcagcttgctt

SEQ ID NO: 538568 - DNA, 75 bp, synthetic construct
  source 1..75: mol_type = other DNA
atgaaatggtttacaccggagcacgtcgtagaggcatttaaaaaaggtgagctaacacgccaccaagtagtaatg

SEQ ID NO: 538569 - DNA, 75 bp, synthetic construct
  source 1..75: mol_type = other DNA
ggggaaagtattcctgaatccgagatatggagtgaacatccggatcgaagtaagcatggggttgttcttgtcgca

SEQ ID NO: 538570 - DNA, 75 bp, synthetic construct
  source 1..75: mol_type = other DNA
gttaatggcggggccgttaattccactgtcacagagtttattattaaggaattatccgccagaaaaaagaacatt

SEQ ID NO: 538571 - DNA, 75 bp, synthetic construct
  source 1..75: mol_type = other DNA
attctgaaatgtatcgaagatgaaagcggtaaaccagttttcactaatattaaacaagttaaagccctttacaca

SEQ ID NO: 538572 - DNA, 75 bp, synthetic construct
  source 1..75: mol_type = other DNA
tgacaacagcgccgataaaggcgtctatatctccttaagtatgccgtggggtgataacagcaccgtgagttacaa

SEQ ID NO: 538573 - DNA, 75 bp, synthetic construct
  source 1..75: mol_type = other DNA
ctgcctgctttcgccgccatacaggccgacctgcaaacgcctgcgtctgctgtcagtgccagccttagtctgttc

SEQ ID NO: 538574 - DNA, 75 bp, synthetic construct
  source 1..75: mol_type = other DNA
actggcgcagaccagcaatatgacgatccgcgggcagagaatggggtaatttgttcagatttctctcttttctga

SEQ ID NO: 538575 - DNA, 75 bp, synthetic construct
  source 1..75: mol_type = other DNA
cgccgaacctgcgcggctatgctccggatatttccggcgtggcccatacggcggcgaaagtcaccgttagccagg

SEQ ID NO: 538576 - DNA, 75 bp, synthetic construct
  source 1..75: mol_type = other DNA
tcagcgggcaaaaggcgatggctgtcctgcgcatgagtgatggtagttatccgccatttggtgcagaagtgaaaa

SEQ ID NO: 538577 - DNA, 75 bp, synthetic construct
  source 1..75: mol_type = other DNA
acgccgaagccacgcagtcagtggtgcaggcgacgctgaccgaaggggctattggctaccgtaaatttgcggtca

SEQ ID NO: 538578 - DNA, 75 bp, synthetic construct
  source 1..75: mol_type = other DNA
gctttgccatgatgacgctggcgctggcggttttggggctgatcccggatatggggatctggctggtagtgatgg

SEQ ID NO: 538579 - DNA, 75 bp, synthetic construct
  source 1..75: mol_type = other DNA
ttggggctgatcccggatatggggatctggctggtagtgatggcctttgcggtgtatgcctttttctctggcggg

SEQ ID NO: 538580 - DNA, 75 bp, synthetic construct
  source 1..75: mol_type = other DNA
tcgcgcctcagccgtgggcgtcattatgtctctgagtcgtatcggtacaattatctcaacctgggcgctgccgat

SEQ ID NO: 538581 - DNA, 75 bp, synthetic construct
  source 1..75: mol_type = other DNA
tgtggcgtttgccccggaaacgcgcggaatgtcactggcgcagaccagtaatatgacgattcgcaggcagcgagc

SEQ ID NO: 538582 - DNA, 75 bp, synthetic construct
  source 1..75: mol_type = other DNA
ccgggtaatttgcagtggctctatcctaatgaactcttcccgacggatatccgcgcctctgccgtgggcgtgatt

SEQ ID NO: 538583 - DNA, 75 bp, synthetic construct
  source 1..75: mol_type = other DNA
gaaaagaatttcagttctgttcaccagatcccacgttatcccactccaattcgttatttatctcacggatcacca

SEQ ID NO: 538584 - DNA, 75 bp, synthetic construct
  source 1..75: mol_type = other DNA
ctggtggcactgcttggtttcaaagaagacattgcgaaaaatttgcaatgggttcacgacggtaaatgcctgaag

SEQ ID NO: 538585 - DNA, 75 bp, synthetic construct
  source 1..75: mol_type = other DNA
ggccattgtgtttaaagacgataatgcggttagttttcatgaggatattcaggaggggatagaggagtataaaaa

SEQ ID NO: 538586 - DNA, 75 bp, synthetic construct
  source 1..75: mol_type = other DNA
gatttggactcagcatggcatttgattttgattattatcttgttgatgaagttatggctgtaggagatgccagat

SEQ ID NO: 538587 - DNA, 75 bp, synthetic construct
  source 1..75: mol_type = other DNA
catcgctggaagaagccgttgaaatcaaaaacggcgtcagagagcctgcccgcgtcacccgttacgagctggcag

SEQ ID NO: 538588 - DNA, 75 bp, synthetic construct
  source 1..75: mol_type = other DNA
aatcatataaaacccaaaacggtcgacattatgttttaaaagatgtgaatttgctttttcctgaaggaaaaagta

SEQ ID NO: 538589 - DNA, 75 bp, synthetic construct
  source 1..75: mol_type = other DNA
ggccattgtgtttaaggatgataatgcggttggtttttatgaggatgttcaggagggaatagacgagtattatag

SEQ ID NO: 538590 - DNA, 75 bp, synthetic construct
  source 1..75: mol_type = other DNA
gttttggtttaagcatggcatttaagtttgattattatatcgtcgatgaagtaacggcggtcggtgatgccaggt

SEQ ID NO: 538591 - DNA, 75 bp, synthetic construct
  source 1..75: mol_type = other DNA
tacgaatattaagtctggcaatcatgatgacgctgaccggtctctccgggaaaagcaatgcagaagaggctgttg

SEQ ID NO: 538592 - DNA, 75 bp, synthetic construct
  source 1..75: mol_type = other DNA
agtattaacgcgcaaacccgccacgatgaaaatggcggtgatgacagtaacgatatcagcgggaacggcacggta

SEQ ID NO: 538593 - DNA, 75 bp, synthetic construct
  source 1..75: mol_type = other DNA
aacttatgcctgcctgtcgccggagctggtggcgcagcttggttttaaagaagacattgcacaaaaattgcaatg

SEQ ID NO: 538594 - DNA, 75 bp, synthetic construct
  source 1..75: mol_type = other DNA
atggaggccgtatgggttgccggatgcagcagttatgaaacaaccggcgtaatacatctgttaagtgggtgtggt

SEQ ID NO: 538595 - DNA, 75 bp, synthetic construct
  source 1..75: mol_type = other DNA
gttatgcggacgtggacgtcagcgcaaactatcaggaaggcgattacacctctgcgggtctgacgatgcgtggcg

SEQ ID NO: 538596 - DNA, 75 bp, synthetic construct
  source 1..75: mol_type = other DNA
ggtgcaggaatatgacgtcagtaccgcctccattccctttttaacccgccagggcatggtgcgttacaaaggcac

SEQ ID NO: 538597 - DNA, 75 bp, synthetic construct
  source 1..75: mol_type = other DNA
ttggggctgatcccggatatggggatctggctggtggtcatggcgtttgcggtgtacgcgtttttctccggcggg

SEQ ID NO: 538598 - DNA, 75 bp, synthetic construct
  source 1..75: mol_type = other DNA
atgaactggatgcgatacgtgcaacaggttgagacaactgatacctctgtactgcctgtgacattcccggaacaa

SEQ ID NO: 538599 - DNA, 75 bp, synthetic construct
  source 1..75: mol_type = other DNA
gaatcatgggaacgctacagcgttctggtcagccgtgtggatacaacaaagcccgaatggccacaaaaaccagaa

SEQ ID NO: 538600 - DNA, 75 bp, synthetic construct
  source 1..75: mol_type = other DNA
tagaaacctgggcgttctcagaaacgattcattcccgctcctatacccatatcatccgtaatatcgttaacgatc

SEQ ID NO: 538601 - DNA, 75 bp, synthetic construct
  source 1..75: mol_type = other DNA
gatgtttcagcaattaatccagaaggcgcaagcgtcgttgaattacctaatattacagcaaatcgccgtgctgac

SEQ ID NO: 538602 - DNA, 75 bp, synthetic construct
  source 1..75: mol_type = other DNA
actcacagctacggctgggtatcatttccgccgagaataagcagaaattaaccgagtggatgctctttgcgcaga

SEQ ID NO: 538603 - DNA, 75 bp, synthetic construct
  source 1..75: mol_type = other DNA
gtcagggataaaactcagctatgggactcacagctacggctgggcatcatttccgacgagaataaacaaaaatta

SEQ ID NO: 538604 - DNA, 75 bp, synthetic construct
  source 1..75: mol_type = other DNA
agagtgtaagcaggagtgctatgacctgtttgttcaggcagctcaacaggagaaagactgggcggattatctgtt

SEQ ID NO: 538605 - DNA, 75 bp, synthetic construct
  source 1..75: mol_type = other DNA
tctacgtcagcttcgcttgctcttttgcgtttgcagaacgtgaactgatggaaggcaacgccaagattattcgtc

SEQ ID NO: 538606 - DNA, 75 bp, synthetic construct
  source 1..75: mol_type = other DNA
ccggaagaagttgacgtctcccgcgaccgtatcgattatcaggcgctgccggagcacgaaaaacacatctttatc

SEQ ID NO: 538607 - DNA, 75 bp, synthetic construct
  source 1..75: mol_type = other DNA
agaatgtaagcaggagtgctatgacctgtttgtccaggcggcacagcaagagaaagactgggcggattatctgtt

SEQ ID NO: 538608 - DNA, 75 bp, synthetic construct
  source 1..75: mol_type = other DNA
atcatccgtaatatcgttaacgatccgtcggttgtgtttgacgatatcgtcactaacgagcagatccagaaacgt

SEQ ID NO: 538609 - DNA, 75 bp, synthetic construct
  source 1..75: mol_type = other DNA
aatctgctgcgcagcggcgcggacgatcctgagatggcggaaattgccgaagaatgtaagcaggagtgctatgac

SEQ ID NO: 538610 - DNA, 75 bp, synthetic construct
  source 1..75: mol_type = other DNA
accgagtggatgctctatgcgcagaaggtcgaatccacagacacctccagcctgccagtaacgtttcccgaacaa

SEQ ID NO: 538611 - DNA, 75 bp, synthetic construct
  source 1..75: mol_type = other DNA
tggagtacaccgcccaatgttgcgccaaggatatttgatgttggagggcacagtattgatgataattatttatcg

SEQ ID NO: 538612 - DNA, 75 bp, synthetic construct
  source 1..75: mol_type = other DNA
caaaaacagccgcacaaaatgcagcaacagcggcagaacgttcagagacaaatgcccgtgcgtcagaggaagcct

SEQ ID NO: 538613 - DNA, 75 bp, synthetic construct
  source 1..75: mol_type = other DNA
atgcagagtcagccgctgaaaatgccggagtcgccaccacaaaagcgcgggaggccgcagcagacgcaacaaagg

SEQ ID NO: 538614 - DNA, 75 bp, synthetic construct
  source 1..75: mol_type = other DNA
tgttgattttgattggtcgattcgaactgcctgaatctccccgctggttgttacgcaaagggcgagtaaaagagt

SEQ ID NO: 538615 - DNA, 75 bp, synthetic construct
  source 1..75: mol_type = other DNA
actgcctgaatctccccgctggttattacgcaaagggcgagtaaaagagtgcgaagagatgatgatcaaactgtt

SEQ ID NO: 538616 - DNA, 75 bp, synthetic construct
  source 1..75: mol_type = other DNA
tctccagtacccgtcagcgggcgttttccatcagctttatcgccgccatgtggtatgtcggcgcgacctgcgccg

SEQ ID NO: 538617 - DNA, 75 bp, synthetic construct
  source 1..75: mol_type = other DNA
gaaatggatgttcaaagatggcgtagtgataaagcgaacttataccgaggaagagcagaggcaacaagcggaaaa

SEQ ID NO: 538618 - DNA, 75 bp, synthetic construct
  source 1..75: mol_type = other DNA
ctgcacaacgtgggttattttgctctggacggtattattcttgccatgggcatcttctacggcggcatcgcgcaa

SEQ ID NO: 538619 - DNA, 75 bp, synthetic construct
  source 1..75: mol_type = other DNA
tctgcggtgccagcgcaatctatctggcaatgggtgaagtactgaacgagcagtttggtcgcaccgctctgccga

SEQ ID NO: 538620 - DNA, 75 bp, synthetic construct
  source 1..75: mol_type = other DNA
acaccgtgtcaaaatttgcggttcaggccttcgtccacacaactcgccgccaggtttcacaatatggcatccgcg

SEQ ID NO: 538621 - DNA, 75 bp, synthetic construct
  source 1..75: mol_type = other DNA
ggtgaatatttattcttcccgccagcatgactctatagtcattgctacgacaatgacttataaagctggttactg

SEQ ID NO: 538622 - DNA, 75 bp, synthetic construct
  source 1..75: mol_type = other DNA
taaaaagttattcggctgctctccccgtgaataccgccaccgtgattattgggatctcgcaaatatcttcccttc

SEQ ID NO: 538623 - DNA, 75 bp, synthetic construct
  source 1..75: mol_type = other DNA
acggcgcgccgattcgtcttggtgatgtcgcaaccgttgaacaaggcgcagaaaacagttggcttggcgcatggg

SEQ ID NO: 538624 - DNA, 75 bp, synthetic construct
  source 1..75: mol_type = other DNA
cttattcctggtgaagtgttgtccgcaatccgggaggttgccaggattcgtgccgatttcgatgattttgacggt

SEQ ID NO: 538625 - DNA, 75 bp, synthetic construct
  source 1..75: mol_type = other DNA
atggcaactctccgggaactccggatagttggataagctgtagtgatcgaatgcctgaaaagggccagaacgtgc

SEQ ID NO: 538626 - DNA, 75 bp, synthetic construct
  source 1..75: mol_type = other DNA
ctcgaaaacgtagaagctatggttgatgaagcctgccacgctgccatgcttcagggtagccaacctgtaagccaa

SEQ ID NO: 538627 - DNA, 75 bp, synthetic construct
  source 1..75: mol_type = other DNA
ggttgtgctggataatgcatcagagcctcttgcttatgcttacaaagagcttacgcctgagattatgcgcaacca

SEQ ID NO: 538628 - DNA, 75 bp, synthetic construct
  source 1..75: mol_type = other DNA
aggggaagcagtgggtcatgaccactattaccaaagaacgtattgaattgttcattaaaaacccgcttgaaaacg

SEQ ID NO: 538629 - DNA, 75 bp, synthetic construct
  source 1..75: mol_type = other DNA
tcgcggaaacgtcaaccaactatccggtaattcctagtgaggtgttgtccgcaatcctgaaggttgccaagattc

SEQ ID NO: 538630 - DNA, 75 bp, synthetic construct
  source 1..75: mol_type = other DNA
tagttggataagctgtagtgagcgaatgccgaaaaagaatcagaacgtacttatttcggtgaatttcgatagtga

SEQ ID NO: 538631 - DNA, 75 bp, synthetic construct
  source 1..75: mol_type = other DNA
cgctaatatgctccgcacgctataccggaagcacttttcggcgcggagatgcaacgattaagtcgggtaatggta

SEQ ID NO: 538632 - DNA, 75 bp, synthetic construct
  source 1..75: mol_type = other DNA
ttaagaaggggatagtaaaacaaagcggctggaagagtctgtcagcataccttaaggtttatgcagggatgtgca

SEQ ID NO: 538633 - DNA, 75 bp, synthetic construct
  source 1..75: mol_type = other DNA
tgccaaatgatggtcagcacgtcattattttatgtgatggcgcattcgttctttatgcgcaatatcgggacggtg

SEQ ID NO: 538634 - DNA, 75 bp, synthetic construct
  source 1..75: mol_type = other DNA
ggtgccccttgcgaagaggcactggaacaattacacgctgatttcagaagtgccggtctgaatgaggtgttgccg

SEQ ID NO: 538635 - DNA, 75 bp, synthetic construct
  source 1..75: mol_type = other DNA
tacacagttgatgctgttgcagctattgcagaggtgagaggctggaacgcctgccgtgcagccatgcttaaggga

SEQ ID NO: 538636 - DNA, 75 bp, synthetic construct
  source 1..75: mol_type = other DNA
gttaattccggtaatggtcatgtatgaagacggtgagatgtggtctgcaatgtggaatggcaatcgctgggatga

SEQ ID NO: 538637 - DNA, 75 bp, synthetic construct
  source 1..75: mol_type = other DNA
ccggatattccggatagttcggtgcctgcgccaggaaagggcgtcaccggtgaacgtatccgcattaagccgcat

SEQ ID NO: 538638 - DNA, 75 bp, synthetic construct
  source 1..75: mol_type = other DNA
tgattaaagaaatcaaagagcgcataggcagcttggacgttcgagacaatattgagcgtcgggcttatgaaatcg

SEQ ID NO: 538639 - DNA, 75 bp, synthetic construct
  source 1..75: mol_type = other DNA
caaaatgttactggcatttagtcaaggtgaaatcgtggccgcatattggaactgggttgtaaatccaattgatta

SEQ ID NO: 538640 - DNA, 75 bp, synthetic construct
  source 1..75: mol_type = other DNA
catgtacgcggtcgatgctgttgccgctattgcagaggtgagaggctggaatgcctgccgcgccgccatgcttca

SEQ ID NO: 538641 - DNA, 75 bp, synthetic construct
  source 1..75: mol_type = other DNA
gactggcgaatgaaatgggcgacttacatcccggggcatcctgacgctaatgatgggtggataattcctggtgcg

SEQ ID NO: 538642 - DNA, 75 bp, synthetic construct
  source 1..75: mol_type = other DNA
agaaaaaccaatgcccaaccctcttaaaatgtacgcggttgatgctgttgccgctattgcagaggtgagaggatg

SEQ ID NO: 538643 - DNA, 75 bp, synthetic construct
  source 1..75: mol_type = other DNA
tagctctaccacaattcaggcactgcgaatcgcgctggatggcatagagcggagcgacgccatgcttcatggtgc

SEQ ID NO: 538644 - DNA, 75 bp, synthetic construct
  source 1..75: mol_type = other DNA
atgaccactttcaccgacaaagaactgattaaagaaatcaaagagcgcataggcagcttggacgtgcgagacaat

SEQ ID NO: 538645 - DNA, 75 bp, synthetic construct
  source 1..75: mol_type = other DNA
tggcaccgaatatccggatccgcactcagttacgcactggcgtgaaatgccagcagcaccacagcaggaggtgaa

SEQ ID NO: 538646 - DNA, 75 bp, synthetic construct
  source 1..75: mol_type = other DNA
ggtgaatttcgatagctctctggttgaaccgctaatatgctccgcacgctataccggaagcacctttcggcgcgg

SEQ ID NO: 538647 - DNA, 75 bp, synthetic construct
  source 1..75: mol_type = other DNA
tacaaaacacgattaccggaattgagtcggtaatagacgataaatcgtttgtatgtgatgaaatagtattcaaaa

SEQ ID NO: 538648 - DNA, 75 bp, synthetic construct
  source 1..75: mol_type = other DNA
gagaagcaacgattaagccgggtaatggtattgagcaggcaactcactggatgccgctaccggaaccgccgcagg

SEQ ID NO: 538649 - DNA, 75 bp, synthetic construct
  source 1..75: mol_type = other DNA
gtgatcaaatccgcgtgatggtgccatctgccagccagttcacgccgatggggcgtattccaagtcagcgcctgt

SEQ ID NO: 538650 - DNA, 75 bp, synthetic construct
  source 1..75: mol_type = other DNA
cgtaggcgataaagataccggaccaaacacgggcgggatgggcgcttactcccctgcgccagtagtgaccgatga

SEQ ID NO: 538651 - DNA, 75 bp, synthetic construct
  source 1..75: mol_type = other DNA
ttatcgaatttaactgccgctttggcgatccagaaacccagccgattatgctgcgcatgaagtccgatctggttg

SEQ ID NO: 538652 - DNA, 75 bp, synthetic construct
  source 1..75: mol_type = other DNA
tgcaaagcaaaccgaaggtggacgggccacagagcgccattgtcaccggtcctgcgggagaggaaatcttctgcg

SEQ ID NO: 538653 - DNA, 75 bp, synthetic construct
  source 1..75: mol_type = other DNA
atcgacaagcagggcaacccgaaggtaatcgagttcaactgtcgctttggcgatccggaaacccagccgatcatg

SEQ ID NO: 538654 - DNA, 75 bp, synthetic construct
  source 1..75: mol_type = other DNA
ctcgaaggatctaaagcgtttaccaaggatttcctggcacgccaccacatccctacggcggaataccagaacttc

SEQ ID NO: 538655 - DNA, 75 bp, synthetic construct
  source 1..75: mol_type = other DNA
atctgcgtgagaaaggcgcgccaatcgtcattaaagctgacggtctggctgccgggaaaggcgttatcgtggcga

SEQ ID NO: 538656 - DNA, 75 bp, synthetic construct
  source 1..75: mol_type = other DNA
tacggatttgggtacgaaaaccacatcttcgtttgattacggcactaaaccaacgaataacacaggtgcacatac

SEQ ID NO: 538657 - DNA, 75 bp, synthetic construct
  source 1..75: mol_type = other DNA
gatatccggcttggtggtgccgccacatacaaacctgcgaacaatggcatgacatggacacatcaggcaccgtcc

SEQ ID NO: 538658 - DNA, 75 bp, synthetic construct
  source 1..75: mol_type = other DNA
cttgcaggttgcgtgattgaggttatgggcgttaaagctgcaatgaccattcgtgtgaccactccgagtacatca

SEQ ID NO: 538659 - DNA, 75 bp, synthetic construct
  source 1..75: mol_type = other DNA
atgtccttaaaaggcctgcgctttacgctggaggttgacggccaggagccggacacctttgcggtggtgaatttc

SEQ ID NO: 538660 - DNA, 75 bp, synthetic construct
  source 1..75: mol_type = other DNA
ttaaacagcccgacgctgaccggaacgccaacaacaccaactgcgcgacagggaacgaataatacccaaatcgca

SEQ ID NO: 538661 - DNA, 75 bp, synthetic construct
  source 1..75: mol_type = other DNA
ggacgccgctgttttatgaagaccatccggcgcgggagttctgtgtccagtacggagagagcgacctggcgtttc

SEQ ID NO: 538662 - DNA, 75 bp, synthetic construct
  source 1..75: mol_type = other DNA
aggatttcctggcccgccataacattcctacggcggaataccagaacttcaccgaggtagaacctgcgctggcgt

SEQ ID NO: 538663 - DNA, 75 bp, synthetic construct
  source 1..75: mol_type = other DNA
atgctggtgaatattgaggatgcctcgcgtctgatgcgttatccggcaggtaatatcaccggctggcgtctgtgg

SEQ ID NO: 538664 - DNA, 75 bp, synthetic construct
  source 1..75: mol_type = other DNA
gatgaaaaagaaagatcgcgatgctgatttgcgctggattcatggcgttatagttcaggcagcgtggtttgtaaa

SEQ ID NO: 538665 - DNA, 75 bp, synthetic construct
  source 1..75: mol_type = other DNA
tatcaaagttgaggacatgcttgcagacgatctcattcgagaacttgctgagcgcaaaagaaattcaagaatgag

SEQ ID NO: 538666 - DNA, 75 bp, synthetic construct
  source 1..75: mol_type = other DNA
tttgagcgcgaactgcaaaacaacatccttggcctgatgccacaggcaattctctcttcggagcatggctccctt

SEQ ID NO: 538667 - DNA, 75 bp, synthetic construct
  source 1..75: mol_type = other DNA
aaactgacctcgagccggggaaatataatgtcatcctcggtgaacagctggcctcacagttgggcgtcaatcgcg

SEQ ID NO: 538668 - DNA, 75 bp, synthetic construct
  source 1..75: mol_type = other DNA
aaatcatgatggtctttatggtgcaaggggccagcgccgggattatcggtgcgatcctcggagcggcgcttggcg

SEQ ID NO: 538669 - DNA, 75 bp, synthetic construct
  source 1..75: mol_type = other DNA
tgggatgaacgtgcttctctcggcgtggtgatggctgcgggtggatatccgggcgattatcgcaccggcgatgtg

SEQ ID NO: 538670 - DNA, 75 bp, synthetic construct
  source 1..75: mol_type = other DNA
actgcaaaacgtcgctatcggcgtaaccgatatcccggcgctgctggatttcgcgcaaaacgaaaaggtagatct

SEQ ID NO: 538671 - DNA, 75 bp, synthetic construct
  source 1..75: mol_type = other DNA
tatccgggcgattaccgcaccggcgatgtgatccacggcctgccgctggaagaagtggcagacggcaaagtgttc

SEQ ID NO: 538672 - DNA, 75 bp, synthetic construct
  source 1..75: mol_type = other DNA
cgtcccggaatggcacgtcactggacctgcaggccggactggaagcccgtgtccgggaaaatatcaccctgggcg

SEQ ID NO: 538673 - DNA, 75 bp, synthetic construct
  source 1..75: mol_type = other DNA
gcgggcgcgagcacgcgttggcctggaaagcggcgcagtcgccgctggttgaaactgtttttgttgctccgggta

SEQ ID NO: 538674 - DNA, 75 bp, synthetic construct
  source 1..75: mol_type = other DNA
tccgcgccgccgggctgaaaatcttcggcccaaccgcaggtgccgcgcaactggaaggctcaaaagcgtttacca

SEQ ID NO: 538675 - DNA, 75 bp, synthetic construct
  source 1..75: mol_type = other DNA
gaaaacagcagactggggctggtctttgatactgaccccgtcaacgacaaaggaggcaacagtgccggaactgaa

SEQ ID NO: 538676 - DNA, 75 bp, synthetic construct
  source 1..75: mol_type = other DNA
tggctgcaggcagtcgtctgagcttttccagtaccgcacgcaactacaacggcacctacagtgcccagcggcagg

SEQ ID NO: 538677 - DNA, 75 bp, synthetic construct
  source 1..75: mol_type = other DNA
ggtaatgcaggctgatgtcgcgcaggcaattgaaaatctcaagcagaagttagtggaatgcaatcgctataacta

SEQ ID NO: 538678 - DNA, 75 bp, synthetic construct
  source 1..75: mol_type = other DNA
caatcatgacctcgtaatcggcgttttcgacaagcttgaggagcgggtgattggtgcaaaagggattattgttga

SEQ ID NO: 538679 - DNA, 75 bp, synthetic construct
  source 1..75: mol_type = other DNA
atatcaccccgggtattatttatgacgatttgcgcaagggcgaggatatcggcatggtcaaatctgaccgtccca

SEQ ID NO: 538680 - DNA, 75 bp, synthetic construct
  source 1..75: mol_type = other DNA
gctgaagcctggcggatacagatccggggtggtgccgcgacggaatcagactgggtacgtgccggtggacgtcat

SEQ ID NO: 538681 - DNA, 75 bp, synthetic construct
  source 1..75: mol_type = other DNA
cctgctggagcaagaaccggaagcgttcctgcaaagcggcgcgcaggcagacgacagcgaagtggctgagattga

SEQ ID NO: 538682 - DNA, 75 bp, synthetic construct
  source 1..75: mol_type = other DNA
gtggcgaagcgtttgaagcgcgctttattgaagcgatggacgacgatttcaacaccccggaagcctattccgtac

SEQ ID NO: 538683 - DNA, 75 bp, synthetic construct
  source 1..75: mol_type = other DNA
gatgttcgacgtcccgaccgatccgacttatggcgtgctgtcgcgtcaggatctcgaccagctgcaggcaggcgc

SEQ ID NO: 538684 - DNA, 75 bp, synthetic construct
  source 1..75: mol_type = other DNA
ggcggttctgacctgatgttcccgcatcacgagaacgaaattgcccagtccacctgtgcgcatgatggtcagtac

SEQ ID NO: 538685 - DNA, 75 bp, synthetic construct
  source 1..75: mol_type = other DNA
atggttgaccgcgagaagatgtccaaatcgctgggtaacttctttaccgtgcgcgatgtgctgaaatactacgac

SEQ ID NO: 538686 - DNA, 75 bp, synthetic construct
  source 1..75: mol_type = other DNA
accacgaaaacgaaatcgctcagtccacctgtgcgcatgatggtcagtatgtgaactactggatgcactccggga

SEQ ID NO: 538687 - DNA, 75 bp, synthetic construct
  source 1..75: mol_type = other DNA
gtgcaaataaccgaagcattattttcagagccgggagacatccggcgttttcttcagcaggcggtggaccactgg

SEQ ID NO: 538688 - DNA, 75 bp, synthetic construct
  source 1..75: mol_type = other DNA
aatgagttgcgctttgaggatgcgacggataaggaacaggtctatatccacgcgcagaagaacatggacacggag

SEQ ID NO: 538689 - DNA, 75 bp, synthetic construct
  source 1..75: mol_type = other DNA
aatttatccgtgaaggtgtgggcgttcatgcgtttaacggcgaaatctttgtgcagccggtctgggatacggaaa

SEQ ID NO: 538690 - DNA, 75 bp, synthetic construct
  source 1..75: mol_type = other DNA
cggcgcataacggtacgcaacgaccagacgctgaaggtgacgaacgaccggacggtgagcgtgagtcatgatgac

SEQ ID NO: 538691 - DNA, 75 bp, synthetic construct
  source 1..75: mol_type = other DNA
aacatggatacggaggtgcttaacgaccggaccacggatgtgaagcatgaccatacggagaccatcggtaacgac

SEQ ID NO: 538692 - DNA, 75 bp, synthetic construct
  source 1..75: mol_type = other DNA
tgccggactggccggggatatacgaacagcagggtgagaggctgaacggacagcacgcgcagtacgagatatttg

SEQ ID NO: 538693 - DNA, 75 bp, synthetic construct
  source 1..75: mol_type = other DNA
gaagggaaacgcacgtttacagaatttatgcgtgaaggtgtgggcgttcatgcgtttaacggcgaaatctttgtg

SEQ ID NO: 538694 - DNA, 75 bp, synthetic construct
  source 1..75: mol_type = other DNA
accttaaactggcaggaaaaacgctggctgcgattttttaacagcgaagaaccgggaaatatcgaacccgtctac

SEQ ID NO: 538695 - DNA, 75 bp, synthetic construct
  source 1..75: mol_type = other DNA
atgaaacgtgttgtaatgccagtacgctggcaatgtgcgaaatgccggcgctggtattgtggaaatcagccctgt

SEQ ID NO: 538696 - DNA, 75 bp, synthetic construct
  source 1..75: mol_type = other DNA
gtacgagaaagagctggccctgatgggcgatgactatcaggagattttccgccagcaactgcgtgaaagccagga

SEQ ID NO: 538697 - DNA, 75 bp, synthetic construct
  source 1..75: mol_type = other DNA
gaagggaaacgcacgtttacggaatttatacgtgaaggtgtgggggttcatgcgtttaacggcgaaatctttgtg

SEQ ID NO: 538698 - DNA, 75 bp, synthetic construct
  source 1..75: mol_type = other DNA
gaagggaaacgcacgtttaccgaatttatgcgtgaaggtgtgggagttcatgcgtttaacggcgaaatctttgtg

SEQ ID NO: 538699 - DNA, 75 bp, synthetic construct
  source 1..75: mol_type = other DNA
tggtgatggttgaccgcgagaagatgtccaaatcgctgggtaacttctttaccgtgcgcgatgtgctgaaatact

SEQ ID NO: 538700 - DNA, 75 bp, synthetic construct
  source 1..75: mol_type = other DNA
atggctgcgcaagggttcttactgattgccacgtttttactggtattaatggtgctggcgcgtcctttaggcagc

SEQ ID NO: 538701 - DNA, 75 bp, synthetic construct
  source 1..75: mol_type = other DNA
cgaatgccggataccaaaacagccgttcttgttgccagggagtttgacaggaaaggtgactggcgaatgaaatgg

SEQ ID NO: 538702 - DNA, 75 bp, synthetic construct
  source 1..75: mol_type = other DNA
aatggttacatcctcctggttcaggacgcagagccaaacttcgatgtaaatggcaactctccggtcattccggat

SEQ ID NO: 538703 - DNA, 75 bp, synthetic construct
  source 1..75: mol_type = other DNA
tgaacgcgtactctttagcgcgcttggcgtctctgaccgtgagatgaactggaagcagtatctctcagccattct

SEQ ID NO: 538704 - DNA, 75 bp, synthetic construct
  source 1..75: mol_type = other DNA
ggcccgctgtttgttggcctgttaatcggcaccgtgttgctggttggcgcactgacctttatccctgccctggcg

SEQ ID NO: 538705 - DNA, 75 bp, synthetic construct
  source 1..75: mol_type = other DNA
ttatagcggtgaaaccacgttgagctatttcagccagatggcgggcttaacggtgcaaaactttctttctgccgc

SEQ ID NO: 538706 - DNA, 75 bp, synthetic construct
  source 1..75: mol_type = other DNA
acaggccattggagagcttcctgactttggcggatatctatttgccgcccctccagcgccgatagtgccggaaga

SEQ ID NO: 538707 - DNA, 75 bp, synthetic construct
  source 1..75: mol_type = other DNA
ggtggtttcaccattgaggaggcgaaggaattacatgaagacctggtacgcagccacataagcaaggccttaagt

SEQ ID NO: 538708 - DNA, 75 bp, synthetic construct
  source 1..75: mol_type = other DNA
gctggagtatggccagaagatggcgagttaagcgaattaacgtggtgcagccacaatcagcaccatgatgacacg

SEQ ID NO: 538709 - DNA, 75 bp, synthetic construct
  source 1..75: mol_type = other DNA
tcgcggatggaagtaagcgcatagcagaactgtctgctagccacagcaaattgcgcgacacaatggctggcatcc

SEQ ID NO: 538710 - DNA, 75 bp, synthetic construct
  source 1..75: mol_type = other DNA
attgcggaatgtcatgttaactgcctgattgaatcagatgatcaggcttatgcaaacgctgaattcatagcagag

SEQ ID NO: 538711 - DNA, 75 bp, synthetic construct
  source 1..75: mol_type = other DNA
ggtgctggcgcgtcccttaggtagcgggctggcgtggctgattaatgatattcctcttcctggtacgacgggcgt

SEQ ID NO: 538712 - DNA, 75 bp, synthetic construct
  source 1..75: mol_type = other DNA
atgctccgcacgctatacaggaagcacattccggcgaggagaagcaacgattaagccgggtaatggtattgagca

SEQ ID NO: 538713 - DNA, 75 bp, synthetic construct
  source 1..75: mol_type = other DNA
ttgcgctggatggcatagagcggagcgacgccatgcttcatggacgtcagccatgccatcaaattaccgcctcaa

SEQ ID NO: 538714 - DNA, 75 bp, synthetic construct
  source 1..75: mol_type = other DNA
gcatggaaggcaaccttcacgcaaattgacaatgaatataatacattcaccactatgtattctgacaaagcagaa

SEQ ID NO: 538715 - DNA, 75 bp, synthetic construct
  source 1..75: mol_type = other DNA
ttgatgtaagcacttgtgatgcggatttaggtaatcgctatttcggcaccgtcaccgaggcgttagaacttgata

SEQ ID NO: 538716 - DNA, 75 bp, synthetic construct
  source 1..75: mol_type = other DNA
actaatgaggatgttcaccctggtagcgataacatgctacgtctgtgggatgacctgaatgaccgtcacgcgccc

SEQ ID NO: 538717 - DNA, 75 bp, synthetic construct
  source 1..75: mol_type = other DNA
cagccaagaatggttacatcctcctggttcaggacgcagagccaaacttcgatgtaaatggcaactctccgggaa

SEQ ID NO: 538718 - DNA, 75 bp, synthetic construct
  source 1..75: mol_type = other DNA
caatgacctggcctgaagcattcacaacggtaggaattgcgatggcggtggcgctggtggtgtattcgatttgcc

SEQ ID NO: 538719 - DNA, 75 bp, synthetic construct
  source 1..75: mol_type = other DNA
acacatttggcattgatcataatgctcagcacattgtatgtgccgaagacgaacaacaattactcaatgcctggc

SEQ ID NO: 538720 - DNA, 75 bp, synthetic construct
  source 1..75: mol_type = other DNA
atttagctgtattcgagcgatatggaatagccccaaacgatagctctaccacaattcaggcactgcgaatcgcgc

SEQ ID NO: 538721 - DNA, 75 bp, synthetic construct
  source 1..75: mol_type = other DNA
agcgtggtttgtaaaagcatcactggagcagaatgcgctatcgggtacccctccggtaactccggctggctggat

SEQ ID NO: 538722 - DNA, 75 bp, synthetic construct
  source 1..75: mol_type = other DNA
gatgcgaaggcgttacatgaagacttggtacgcagccacataagccaggctttaagtggcgagaagatgaaaaag

SEQ ID NO: 538723 - DNA, 75 bp, synthetic construct
  source 1..75: mol_type = other DNA
tgcctgcctggtggtttcaccattgaggatgcgaaggaattacatgaaaacctggttcgcagccacataagccag

SEQ ID NO: 538724 - DNA, 75 bp, synthetic construct
  source 1..75: mol_type = other DNA
cacagaaatcgacggtctgtattgccagacaaagaatttgtttgaatacaaaggtaacagatatgttttcgttgt

SEQ ID NO: 538725 - DNA, 75 bp, synthetic construct
  source 1..75: mol_type = other DNA
gcatgaccactatgaaaaaactgtgaaagaagctgtagcaatcgtagaggcacgtttggaggtgtttcgaaaatg

SEQ ID NO: 538726 - DNA, 75 bp, synthetic construct
  source 1..75: mol_type = other DNA
gcacgatcaatacgtacagaaggtaactgacgctttacagctcgtggaggctcgactggagaaccttaaaaaatg

SEQ ID NO: 538727 - DNA, 75 bp, synthetic construct
  source 1..75: mol_type = other DNA
tgtaataaaactgtcagacgatgacattggtaattatcagaaaacaattaacgacaataaagatagagtaaaaaa

SEQ ID NO: 538728 - DNA, 75 bp, synthetic construct
  source 1..75: mol_type = other DNA
ttcatcagaccagtaatcgcgataagttgccactgtccaaagatgataattccttaatgacaagaacttatagtc

SEQ ID NO: 538729 - DNA, 75 bp, synthetic construct
  source 1..75: mol_type = other DNA
tgcgaaattaccactagcatatgattacattttaaataaaaaagaatcaagctctattcctgttgaaattttgaa

SEQ ID NO: 538730 - DNA, 75 bp, synthetic construct
  source 1..75: mol_type = other DNA
tgttgccaattacagacagcagtatgaagcgtcttattattgaggaaactaaccgatacagcgttagccctgaaa

SEQ ID NO: 538731 - DNA, 75 bp, synthetic construct
  source 1..75: mol_type = other DNA
cgccgtgaattttggctgcacatcaacagcatggtagagaaaggcgtcacggtgatggtcaccacccactttatg

SEQ ID NO: 538732 - DNA, 75 bp, synthetic construct
  source 1..75: mol_type = other DNA
acatcaacagcatggtagagaaaggcgtcacggtgatggtcaccacccactttatggatgaagcggaatattgcg

SEQ ID NO: 538733 - DNA, 75 bp, synthetic construct
  source 1..75: mol_type = other DNA
aactgattcttgtcaccaaagagcagggcatggaaggtgcgcgcgatctggcgctggagatggcgaatcgtggtg

SEQ ID NO: 538734 - DNA, 75 bp, synthetic construct
  source 1..75: mol_type = other DNA
ataatccggcaggttcggtgaaagatcgtgcggcgctatcgatgattgttgaggcggaaaaacgcggtgagatta

SEQ ID NO: 538735 - DNA, 75 bp, synthetic construct
  source 1..75: mol_type = other DNA
aacaaatacagtatttccccagagcaatttttgaaaggtgctgtgacaatcctgtacagcgataatattttggtg

SEQ ID NO: 538736 - DNA, 75 bp, synthetic construct
  source 1..75: mol_type = other DNA
catggtggtatttatacagacacagacatgatgcctgcatactctaaacaagtaatttttaaaattatgatgcag

SEQ ID NO: 538737 - DNA, 75 bp, synthetic construct
  source 1..75: mol_type = other DNA
tactgacggcagtgtgtcgagtgttgaagctgtagcggaacccgatgaacctgaagaaatgtggacggtgaaacg

SEQ ID NO: 538738 - DNA, 75 bp, synthetic construct
  source 1..75: mol_type = other DNA
caggctgacattatgacgaccgatgaagggcgtaaaaagggattcacctattttgccgatatcaacgacaacgac

SEQ ID NO: 538739 - DNA, 75 bp, synthetic construct
  source 1..75: mol_type = other DNA
aactgacggaacgtgtgctggtcagcactaacggcagtgtgtcgagcgttgaagctatagcggaacctgatgaac

SEQ ID NO: 538740 - DNA, 75 bp, synthetic construct
  source 1..75: mol_type = other DNA
tgtcagtaataacccggacaaactgcatctgtttgtggataacggttcgctggttgccacgggggccagctccat

SEQ ID NO: 538741 - DNA, 75 bp, synthetic construct
  source 1..75: mol_type = other DNA
cgttacgggaaaagctattcacctttgaggtggatattctgcgcaacgatgtctgtgatatcagcctcaacctgc

SEQ ID NO: 538742 - DNA, 75 bp, synthetic construct
  source 1..75: mol_type = other DNA
tgctgaccgagcgcacgctggtcagtgaggtggacggcgcgctgcatgtgaagaatatcccggaacccacgccgc

SEQ ID NO: 538743 - DNA, 75 bp, synthetic construct
  source 1..75: mol_type = other DNA
taatcagtgaacagtctatccagtacgtttgggggcgaattctagcggaagaaataaacacacctcaaactgtaa

SEQ ID NO: 538744 - DNA, 75 bp, synthetic construct
  source 1..75: mol_type = other DNA
caggtgatggagcgcatacaaaaacgttatcccagtgaaatcttttattgcgaagaggtattacgaaatgaataa

SEQ ID NO: 538745 - DNA, 75 bp, synthetic construct
  source 1..75: mol_type = other DNA
caaaacacatggcaggatctgtccacaaaagaacaaaaattacagcttattaaagcattgaaagaaatttcagga

SEQ ID NO: 538746 - DNA, 75 bp, synthetic construct
  source 1..75: mol_type = other DNA
ccgacatcatcgccgccctacacaagcgcggcaccagtatggcagcggtctcgcgggaagcgggactggcctctt

SEQ ID NO: 538747 - DNA, 75 bp, synthetic construct
  source 1..75: mol_type = other DNA
ggcgagcaggaaaatgtcggctggatcgatttcgttccaggtgaaaatgccgaaacgttgatcgaaaaatacaac

SEQ ID NO: 538748 - DNA, 75 bp, synthetic construct
  source 1..75: mol_type = other DNA
agggaaaagcaccttttgcaaggaagaaagaccaagtaggtggtagggaacgctttgaattacatcatgataaac

SEQ ID NO: 538749 - DNA, 75 bp, synthetic construct
  source 1..75: mol_type = other DNA
gtgctgttttttatgttgctcggtcagcactatctgccgcttaatccacagcagttgccagggctgtcgtgggat

SEQ ID NO: 538750 - DNA, 75 bp, synthetic construct
  source 1..75: mol_type = other DNA
cgggtggcaaatacgagcctgcggggattgttcaccgcggtgagtttgtcttcacgaaggaggcgaccagccgta

SEQ ID NO: 538751 - DNA, 75 bp, synthetic construct
  source 1..75: mol_type = other DNA
atgctggaaaaacacagcggtgcgaatgagaaaatcagccagcagcgccgggcgctgtggaaggcggaaagccag

SEQ ID NO: 538752 - DNA, 75 bp, synthetic construct
  source 1..75: mol_type = other DNA
cggggtgatcagcgatgaagccggtggtggtatcagacaggcggcagaaaatctggcccgtctggcagaaagcgg

SEQ ID NO: 538753 - DNA, 75 bp, synthetic construct
  source 1..75: mol_type = other DNA
tcgatgacgccatcgtggtgatcgagaacatttcgcgctatatcgaaaaaggcgaaaaaccgctggcggcggcgc

SEQ ID NO: 538754 - DNA, 75 bp, synthetic construct
  source 1..75: mol_type = other DNA
tacccagtttgagctgatgatggctatcgcgctggtggtgatgattatctacctgtttctacgaaatattccggc

SEQ ID NO: 538755 - DNA, 75 bp, synthetic construct
  source 1..75: mol_type = other DNA
gcgatgtatatcgtgctcggcattctgtacgagagctttattcacccgatcaccattctctcgacgctacccacg

SEQ ID NO: 538756 - DNA, 75 bp, synthetic construct
  source 1..75: mol_type = other DNA
aaagtgcgacggacagtttttcgcaggtaaaaagtgtggccacgcagacctttgacggtattgcacagaatatgg

SEQ ID NO: 538757 - DNA, 75 bp, synthetic construct
  source 1..75: mol_type = other DNA
gaatctgccggtggatatcaccacgcagttccagggcagcaccctcgccttccagtcggcattgggcagcactgt

SEQ ID NO: 538758 - DNA, 75 bp, synthetic construct
  source 1..75: mol_type = other DNA
catgacctctgccgttaccgcgcctctcgaacgccagtttgggcagatgtctggcctgaaacagatgtcgtcgca

SEQ ID NO: 538759 - DNA, 75 bp, synthetic construct
  source 1..75: mol_type = other DNA
gtttgagcagcagcagggcgcgaagcaggcggcaatcagtgcccaggcgcggggcctcaccgaccgtcaggcgca

SEQ ID NO: 538760 - DNA, 75 bp, synthetic construct
  source 1..75: mol_type = other DNA
gaaaatgtctttaccgccctgagcgacaaagtgaaagcgatcttcagccgcaaaccggccagcgatgacgctcgt

SEQ ID NO: 538761 - DNA, 75 bp, synthetic construct
  source 1..75: mol_type = other DNA
acggacgaagggcaactgatgaacgtcaatgctgaccaggccgcgacggcactggcggcaacgctgggtgcggat

SEQ ID NO: 538762 - DNA, 75 bp, synthetic construct
  source 1..75: mol_type = other DNA
atgaatccattaattatcaaactgggcggcgtactgctggatagtgaagaggcgctggaacgtctgtttagcgca

SEQ ID NO: 538763 - DNA, 75 bp, synthetic construct
  source 1..75: mol_type = other DNA
ctttgcctttggcgaagtggcgggcgatcgccgtcaggggcgcatgttgctgtgggcgatgtcagtgatttttgt

SEQ ID NO: 538764 - DNA, 75 bp, synthetic construct
  source 1..75: mol_type = other DNA
gcatggtgccgatgtggctgatgcaaattggtgaagtggtattcggcggtgtcggttctggtctttacggcatga

SEQ ID NO: 538765 - DNA, 75 bp, synthetic construct
  source 1..75: mol_type = other DNA
actatctcactcgcatttaccttaagctggctggcagcgttaagcgtgctgctacttctgttgtgcacaccttat

SEQ ID NO: 538766 - DNA, 75 bp, synthetic construct
  source 1..75: mol_type = other DNA
gcgtgcaacaggcgtcagcaaaggtccggggcagcagtaagccgtcaggagcgctgcgtcggctgaagagctgac

SEQ ID NO: 538767 - DNA, 75 bp, synthetic construct
  source 1..75: mol_type = other DNA
gcgtgcaacaggcgtcagcaaaggtccggggcagcagtaagccgtcaggatcgcggcgtcggctgaagagctgac

SEQ ID NO: 538768 - DNA, 75 bp, synthetic construct
  source 1..75: mol_type = other DNA
gcgtgcaacaggcgtcagcaaaggtccggggcagcagaaagccgtcaggaccgccgcgtcggctgaagagctgac

SEQ ID NO: 538769 - DNA, 75 bp, synthetic construct
  source 1..75: mol_type = other DNA
ttacggatggcatgattgtgaaagtgaacgcggcgctggatgccgcgcgcgcgctgggccgtccggtggatatcg

SEQ ID NO: 538770 - DNA, 75 bp, synthetic construct
  source 1..75: mol_type = other DNA
gcgtgcaacaggcgtcagcaaaggtccggggcagcagcaagccgtcaggaccgcagcgtcggctgaagagctgac

SEQ ID NO: 538771 - DNA, 75 bp, synthetic construct
  source 1..75: mol_type = other DNA
gcgtgcaacaggcgtcagcaaaggtccggggcagcagcaagccgtcaggaacgccgcgtcggctgaagagctgac

SEQ ID NO: 538772 - DNA, 75 bp, synthetic construct
  source 1..75: mol_type = other DNA
accattaaacagcccggcactgaccggaacgccaacaacaccaacagcgccacaggggactaatagtacccagat

SEQ ID NO: 538773 - DNA, 75 bp, synthetic construct
  source 1..75: mol_type = other DNA
cctcgctgaccgcaaaaggttttactcagttaagcagtgcaattaacagtgaatcagaaacactggccgcaacac

SEQ ID NO: 538774 - DNA, 75 bp, synthetic construct
  source 1..75: mol_type = other DNA
gcagacaggaaacagggttgcaaatgataaagctgttggctggaactggaatagcggtgtttatgatgcagacct

SEQ ID NO: 538775 - DNA, 75 bp, synthetic construct
  source 1..75: mol_type = other DNA
agatcgcaagcacggcttatgtgatggccgcgattgccgcacttgtagattcgtcacctgatgcactgaacacgc

SEQ ID NO: 538776 - DNA, 75 bp, synthetic construct
  source 1..75: mol_type = other DNA
gcagcttcctcggcaacggcggcaggaaattccgcgaaggcggcaaaaacgtccgagacgaacgctaagtcttct

SEQ ID NO: 538777 - DNA, 75 bp, synthetic construct
  source 1..75: mol_type = other DNA
ttgcaaatgataaagctgttggctggaactggaatagcggtgtttatgatgcagatatcaaaggcgcaacagcat

SEQ ID NO: 538778 - DNA, 75 bp, synthetic construct
  source 1..75: mol_type = other DNA
tcgcctgggcacacgtgttgttcagactatgcaaaaaggtgtgatgtatgaaaaatcaggccatgtaattacagg

SEQ ID NO: 538779 - DNA, 75 bp, synthetic construct
  source 1..75: mol_type = other DNA
aggccttgtccagctcagtagcgccaccaacagcacgtctgaaacgcaggctgcaacgccgaaagcagtaaaggc

SEQ ID NO: 538780 - DNA, 75 bp, synthetic construct
  source 1..75: mol_type = other DNA
attcgactgggcacacgtgttgttcagactatgcaaaaaggcgtgatgtatgaaaagtcaggtcatgcaattacg

SEQ ID NO: 538781 - DNA, 75 bp, synthetic construct
  source 1..75: mol_type = other DNA
ttacaccacaacacgcaaaccctctgcgggggatgttggtgcatatacgcaggcagaatgtaactcaaggtttat

SEQ ID NO: 538782 - DNA, 75 bp, synthetic construct
  source 1..75: mol_type = other DNA
tgggcgatggtggcggaacattgccgacgccggacgcaaagcagagtgcactagtaaatgagaaacgtcgggctg

SEQ ID NO: 538783 - DNA, 75 bp, synthetic construct
  source 1..75: mol_type = other DNA
taaccaatgtgggcgcggcgaaactggcaaatgccacggcattgggtgcgcaggttgagatcacccagatggctg

SEQ ID NO: 538784 - DNA, 75 bp, synthetic construct
  source 1..75: mol_type = other DNA
gaaaaaccagaacggcgcagatattccaggaaaagataccttcaccaaaaatattggtgcctgccgcgcatatag

SEQ ID NO: 538785 - DNA, 75 bp, synthetic construct
  source 1..75: mol_type = other DNA
gcacaggatgccactacagcgcgaaaaggtcttgtccagctcagtagcgccaccaacagtgattctgaaacgctg

SEQ ID NO: 538786 - DNA, 75 bp, synthetic construct
  source 1..75: mol_type = other DNA
tggcctgtacgatgatgcgggaacgttaattgctgtggcgaacatggctgaaagttataagcctgcccttgccga

SEQ ID NO: 538787 - DNA, 75 bp, synthetic construct
  source 1..75: mol_type = other DNA
agtccggagcagaagctgacgctgtgcgacgatgtggcggggctgtcacaggcgggagagcttccgtttaacccg

SEQ ID NO: 538788 - DNA, 75 bp, synthetic construct
  source 1..75: mol_type = other DNA
cggtgaagtctgcctatgacaatgctgaaaaacgtcttcagaaagatcagaacggtgcggatattccgggaaagg

SEQ ID NO: 538789 - DNA, 75 bp, synthetic construct
  source 1..75: mol_type = other DNA
tggcgaagggactataactccagaaataagccaacggcatcagagatcggggcgttaccgtcaggtggaacagca

SEQ ID NO: 538790 - DNA, 75 bp, synthetic construct
  source 1..75: mol_type = other DNA
aaggccgcgtatgaccttgctaacgggaaatataccgcacaggacgccaccatagcgcgaaaaggccttgtccag

SEQ ID NO: 538791 - DNA, 75 bp, synthetic construct
  source 1..75: mol_type = other DNA
gcctggcaaccctgacaaaagtcgggcgggatattcttgcgaaatcgaccgttgccgctgttatcgaatacctcg

SEQ ID NO: 538792 - DNA, 75 bp, synthetic construct
  source 1..75: mol_type = other DNA
aacgggcagaggatattgctgatgccgtatctctggaagatgcgagcacgacgaaaaaaggtgtggttcagctca

SEQ ID NO: 538793 - DNA, 75 bp, synthetic construct
  source 1..75: mol_type = other DNA
cggtaatggatgaaacgaacaagaaagcgcccttaaacagtcctgcactgaccggaacgccaacaacgccaactg

SEQ ID NO: 538794 - DNA, 75 bp, synthetic construct
  source 1..75: mol_type = other DNA
cgctgttttatgaagaccatccggcgcgggagttctgtgtccagtacggtgagagcgacctggcgtttctggcgc

SEQ ID NO: 538795 - DNA, 75 bp, synthetic construct
  source 1..75: mol_type = other DNA
tgaacagtcacgacgtcacccggacgcctcgctgaccgcaaaaggctttgttcaactcagtagcgccactaacag

SEQ ID NO: 538796 - DNA, 75 bp, synthetic construct
  source 1..75: mol_type = other DNA
gcagatattcctgatcctgcgctgtttgtcaaaaaccttggtttacaggaagcgataaatcaggcttctggcgca

SEQ ID NO: 538797 - DNA, 75 bp, synthetic construct
  source 1..75: mol_type = other DNA
gcacgtctgaagcactggccgcaacgccgaaagcggtcaaggcagcctatgaccttgctaacgggaaatataccg

SEQ ID NO: 538798 - DNA, 75 bp, synthetic construct
  source 1..75: mol_type = other DNA
aagaatatcccggaacccacgccgccggagccggccacccgcccgatggagctttatatcaatggcgaactggtg

SEQ ID NO: 538799 - DNA, 75 bp, synthetic construct
  source 1..75: mol_type = other DNA
cgaaaatcctgttccttaacaacgccattaaccacggtatcttctcgccgctgggtattcagcagtcccatgaac

SEQ ID NO: 538800 - DNA, 75 bp, synthetic construct
  source 1..75: mol_type = other DNA
acagctttgacgattctaacgccaacctgtttaagctcggtgcggagaacatcttcctcggtcgcaaagcagcca

SEQ ID NO: 538801 - DNA, 75 bp, synthetic construct
  source 1..75: mol_type = other DNA
atgtcacaggctgttattacaaaagcatttacagagtggaaagcccagcaggctattaataatcagcccgtcacg

SEQ ID NO: 538802 - DNA, 75 bp, synthetic construct
  source 1..75: mol_type = other DNA
tatcaggcgacatcaacggggggctcatcaggatcactacaggcattgaatcccctgaagacatcaccagacctc

SEQ ID NO: 538803 - DNA, 75 bp, synthetic construct
  source 1..75: mol_type = other DNA
tttgatgacgggtggctggttaagaaaggcgaaacctggacagtcaacaaaggggtgggttacgtggaggggcta

SEQ ID NO: 538804 - DNA, 75 bp, synthetic construct
  source 1..75: mol_type = other DNA
gggtgtgtgtgcggcgatggcagtctccttcgttgtctctgctattttgctgaaaaccagcaaagtgaaagaaga

SEQ ID NO: 538805 - DNA, 75 bp, synthetic construct
  source 1..75: mol_type = other DNA
tgaaagacagctttgacgattccagtgctaacctgttcaaactgggcgcggagaacatcttcctcggtcgcaaag

SEQ ID NO: 538806 - DNA, 75 bp, synthetic construct
  source 1..75: mol_type = other DNA
cgttacgggaaaaactattcacctttgaggtagatattttgcgcaacgatgtctgtgatatcagccttaacctgc

SEQ ID NO: 538807 - DNA, 75 bp, synthetic construct
  source 1..75: mol_type = other DNA
cccgacttatctgggggagtccatcgcagtgccgcacggtacggttgaagcgaaagatcgcgtactgaaaacggg

SEQ ID NO: 538808 - DNA, 75 bp, synthetic construct
  source 1..75: mol_type = other DNA
tatgttgagccggaatacgtacaggcgatgctggatcgtgaaaaactgaccccgacttatctgggggagtccatc

SEQ ID NO: 538809 - DNA, 75 bp, synthetic construct
  source 1..75: mol_type = other DNA
atcttcctcggtcgcaaagcggcaaccaaagaagaagcgattcgttttgctggcgagcagctggtgaaaggcggt

SEQ ID NO: 538810 - DNA, 75 bp, synthetic construct
  source 1..75: mol_type = other DNA
aacaggatggtgttatatcgcatacccacggagccagtatttccgataccgatttggggacgaaatacaccagct

SEQ ID NO: 538811 - DNA, 75 bp, synthetic construct
  source 1..75: mol_type = other DNA
ccttcagatgctctgttgcggttacaatgcaggcccatcaaaagtatcggcagccaggatgaaaggcactatcat

SEQ ID NO: 538812 - DNA, 75 bp, synthetic construct
  source 1..75: mol_type = other DNA
tctatggaatatcccctgactattccctgcacaacagcatcatttttggtaaaaaaaataacattattcttaata

SEQ ID NO: 538813 - DNA, 75 bp, synthetic construct
  source 1..75: mol_type = other DNA
aggaactcgataagctggataacttcagggctatacctgatgacgatgaggacgggttggaggtcaggggggtca

SEQ ID NO: 538814 - DNA, 75 bp, synthetic construct
  source 1..75: mol_type = other DNA
attcttgcgaaatcgaccgttgccgctgttatcgaatacctcggtttacaggaaacggtaaacagggccaggaac

SEQ ID NO: 538815 - DNA, 75 bp, synthetic construct
  source 1..75: mol_type = other DNA
gtttatccgtggatgggacgacgggcgcaaagttgatacgaggcgttcattgctaagtggtcaggctgcaacatt

SEQ ID NO: 538816 - DNA, 75 bp, synthetic construct
  source 1..75: mol_type = other DNA
gacctggctaacgggaaatataccgctcaggatgcgactacggcacgaaaaggccttgttcaactcagtagcgcc

SEQ ID NO: 538817 - DNA, 75 bp, synthetic construct
  source 1..75: mol_type = other DNA
cgccaacgtggccggaacgctcgaatgttcggtatcgcaatattccaatacgacagcaaggcttaacgcaaacca

SEQ ID NO: 538818 - DNA, 75 bp, synthetic construct
  source 1..75: mol_type = other DNA
ggcctgaccattaaccccaccggtaatgcggaaaacaccgtcaaaaacatcgcatttaactacatcgtgaggctt

SEQ ID NO: 538819 - DNA, 75 bp, synthetic construct
  source 1..75: mol_type = other DNA
agcacgatatcccctgctggcaaaagcctatccggatggtcgtatcccggatatgcgtggctggacaatcaaggg

SEQ ID NO: 538820 - DNA, 75 bp, synthetic construct
  source 1..75: mol_type = other DNA
acgaccagcgcgaagggattcacccagttaagcagcgcgacagacagcgccagtgaagaactggccgcgacgtcg

SEQ ID NO: 538821 - DNA, 75 bp, synthetic construct
  source 1..75: mol_type = other DNA
tttggtgacgggtatctggtcgctaaatcgggtagtcagttctttgtgaccaaaggcaccggatatgtgggcggg

SEQ ID NO: 538822 - DNA, 75 bp, synthetic construct
  source 1..75: mol_type = other DNA
ctcagacagaaaccgcgatcacgactccggcagaaacctggcagattgacttcactgcgcgtatgactggaatgg

SEQ ID NO: 538823 - DNA, 75 bp, synthetic construct
  source 1..75: mol_type = other DNA
gctgattcgccgtagccgctctactgcactgggcttatgcggtgcgacgtcgatggatttcaccctgcccgttct

SEQ ID NO: 538824 - DNA, 75 bp, synthetic construct
  source 1..75: mol_type = other DNA
ggatccgatgattaatctcaacctgaatgctgcattcgatatgagccaggccgcattgaatatatttgtcccgca

SEQ ID NO: 538825 - DNA, 75 bp, synthetic construct
  source 1..75: mol_type = other DNA
ataaatatagtgaagcacaggatttaagagacaaaattgtcaaggcattaggtgatgatgctgtttactataaag

SEQ ID NO: 538826 - DNA, 75 bp, synthetic construct
  source 1..75: mol_type = other DNA
ttaatcaatgctaccggacattacgtccgcgattgctgatgtgcatgattattggctacgccgcattttatctga

SEQ ID NO: 538827 - DNA, 75 bp, synthetic construct
  source 1..75: mol_type = other DNA
gaaatgacctgttaccttctgcttcacaaccggaacggagaatatacgctctgggggaacgagctggagaaatac

SEQ ID NO: 538828 - DNA, 75 bp, synthetic construct
  source 1..75: mol_type = other DNA
aaatcatctccagaaacagcggctacagcgccgttgcttctgctgcctatcgttccggttcactgatgcttgatg

SEQ ID NO: 538829 - DNA, 75 bp, synthetic construct
  source 1..75: mol_type = other DNA
ggtatttatccggttgatataattttaaatggttcgcgtattgattcaagggatatattcttttacacaaaaaaa

SEQ ID NO: 538830 - DNA, 75 bp, synthetic construct
  source 1..75: mol_type = other DNA
gatggaacacctttaccatttggtacagtcgttaccttagaaggaaaaacggaagtatcaaattctacaggggta

SEQ ID NO: 538831 - DNA, 75 bp, synthetic construct
  source 1..75: mol_type = other DNA
atggtgggatcagtaaccaatttgaagcaaagctttaagcttgatgaatttttttttgtgaataaaatgatgaat

SEQ ID NO: 538832 - DNA, 75 bp, synthetic construct
  source 1..75: mol_type = other DNA
caaatgctgattggacttgcggcggtggagtgtgggcacaaagctgcggcgggttcaatcaccggatttctcggc

SEQ ID NO: 538833 - DNA, 75 bp, synthetic construct
  source 1..75: mol_type = other DNA
aggatacccggtatgaggccgggctgaacggacgggcatttgaccgccggctgtactgggatgtccgtgagcaga

SEQ ID NO: 538834 - DNA, 75 bp, synthetic construct
  source 1..75: mol_type = other DNA
aaggtgcggtggttagtgcgaagtttaccacccgcgtgggcagcagggcattactgtctctgaaccgtgctgacg

SEQ ID NO: 538835 - DNA, 75 bp, synthetic construct
  source 1..75: mol_type = other DNA
ctgtggcatgacagccacggacaacgcggttttatgggcgtcggcttgttcgccaccgggttattgaacgtggtg

SEQ ID NO: 538836 - DNA, 75 bp, synthetic construct
  source 1..75: mol_type = other DNA
ccggcggcgcggtggaccgccagttgcagccagtgttgcagggtgaagcgcgggtgacctttcactcgccggatc

SEQ ID NO: 538837 - DNA, 75 bp, synthetic construct
  source 1..75: mol_type = other DNA
ctgaccaacgccctgcgccgcgtgggcgtgcaggtacatcagcaagcggatggcatcagtttctccaccactgaa

SEQ ID NO: 538838 - DNA, 75 bp, synthetic construct
  source 1..75: mol_type = other DNA
cggtacaggcgtcggaaaatctcggcggtgtgctcgacagcgctaatcataattatcagattttattgcaggcgg

SEQ ID NO: 538839 - DNA, 75 bp, synthetic construct
  source 1..75: mol_type = other DNA
cgaagtgcgcacttatacaaatctcacccttcggttcgattgtgtgcgccctgcggggctgaaagaaaactgcaa

SEQ ID NO: 538840 - DNA, 75 bp, synthetic construct
  source 1..75: mol_type = other DNA
cgaagcgaaatcggtcaacatccaccactgcaacgtgtttattcctctgcgacctttgagcaactgctgacgcag

SEQ ID NO: 538841 - DNA, 75 bp, synthetic construct
  source 1..75: mol_type = other DNA
acgccagaaaaacagccggatcatctgttccgctcgctgggctttgagcgcacctgggatgaatggcaacgtgat

SEQ ID NO: 538842 - DNA, 75 bp, synthetic construct
  source 1..75: mol_type = other DNA
aactatcaagttttattgcaggcggtgaacggtcaggcacggatttccagccagacggtgaggagtttattgggg

SEQ ID NO: 538843 - DNA, 75 bp, synthetic construct
  source 1..75: mol_type = other DNA
gcgcccactcaggcggtgcggcaaaaactcccggcgacggcgagtgaatatccggcctcgccgctgattaccact

SEQ ID NO: 538844 - DNA, 75 bp, synthetic construct
  source 1..75: mol_type = other DNA
tggaatgtggacacaaagctgcggcgggttcaattaccggatttctcggcctgttcgcctatctcggtgcggcgc

SEQ ID NO: 538845 - DNA, 75 bp, synthetic construct
  source 1..75: mol_type = other DNA
atgcaggtcggacttacatcttcgtcactcgccaccggcggcgcggtggaccgccagttgcagccagtgttgcag

SEQ ID NO: 538846 - DNA, 75 bp, synthetic construct
  source 1..75: mol_type = other DNA
aactatcaggttttattgcaggcggtgaacggtcaggcgcgaatttccagccagacggtgaggaatttattgggg

SEQ ID NO: 538847 - DNA, 75 bp, synthetic construct
  source 1..75: mol_type = other DNA
cagcgccgcgcagtatcagacgcggctgaccaacgccctgcgccgcgtgggtgtgcaactgcatcagcaagcgga

SEQ ID NO: 538848 - DNA, 75 bp, synthetic construct
  source 1..75: mol_type = other DNA
aggagcagttgtccgggctgaatttaagacccgagtgggaaaacgtgctgtgctgaatctgatccgtaaagatgg

SEQ ID NO: 538849 - DNA, 75 bp, synthetic construct
  source 1..75: mol_type = other DNA
gaaaaatttgggcagttctctgctacggttaaaactatatccaggactcctgcatcaacacaggaaatgttgacc

SEQ ID NO: 538850 - DNA, 75 bp, synthetic construct
  source 1..75: mol_type = other DNA
attttatgctgactccgacgcggcagtacccgcaacccgtggtgatcctgaaaacactcaagcaacgtctaaaag

SEQ ID NO: 538851 - DNA, 75 bp, synthetic construct
  source 1..75: mol_type = other DNA
caccctgatccgcgatacagaaaaccaccggagcctgctgtaaggctggttcctgttctggatgccggatacgca

SEQ ID NO: 538852 - DNA, 75 bp, synthetic construct
  source 1..75: mol_type = other DNA
tcatcatcaccatgcagtcgattgacggctctattgccctgatcggcctgaaagtggcggcagcgctggtgggga

SEQ ID NO: 538853 - DNA, 75 bp, synthetic construct
  source 1..75: mol_type = other DNA
cgtcagctattaatgtgcctgtatgagttgctcgaaatggtgcaaaacggcggcctgcgcatgctggatcaacat

SEQ ID NO: 538854 - DNA, 75 bp, synthetic construct
  source 1..75: mol_type = other DNA
cgctggattgaaatgttcgggcatggcaagcggattaacatgccgtggtggggcggttttgatccacgtgcatgg

SEQ ID NO: 538855 - DNA, 75 bp, synthetic construct
  source 1..75: mol_type = other DNA
ttgctggcttacaacctgatacggcgtgaggcaacaaaagcggctgagaaacacaaaaaagcggcgtcagaaatc

SEQ ID NO: 538856 - DNA, 75 bp, synthetic construct
  source 1..75: mol_type = other DNA
attatcagatatgacgaaaaatacctccctctggaaaatggaatgaaagccgaaagtacactatttctggaaaaa

SEQ ID NO: 538857 - DNA, 75 bp, synthetic construct
  source 1..75: mol_type = other DNA
aaaagcagcctgctgaacaatgccctggtgctgagaagccgtaaggttgagctgctggaacaggaggtgtggggc

SEQ ID NO: 538858 - DNA, 75 bp, synthetic construct
  source 1..75: mol_type = other DNA
ttgagtcacttacccgccaaaattttccagatttcacgtagcgacgcctggaatttaaccatctctcccgatgca

SEQ ID NO: 538859 - DNA, 75 bp, synthetic construct
  source 1..75: mol_type = other DNA
acgaaaccgcggtaacgtctataacttgctgaaacagatcgctggcggcaagtttatgatggtgggcgcagggac

SEQ ID NO: 538860 - DNA, 75 bp, synthetic construct
  source 1..75: mol_type = other DNA
cgccatacgggctgatttatgacgagctgggccagtatttcaccagcggtatggatacgctgagtgcgcagatgc

SEQ ID NO: 538861 - DNA, 75 bp, synthetic construct
  source 1..75: mol_type = other DNA
aagttggagcacgagatcagggtgaactgatggacttcattctggacagaggcgaagatggaatgtctgattcgg

SEQ ID NO: 538862 - DNA, 75 bp, synthetic construct
  source 1..75: mol_type = other DNA
agtctgggggcggtgtctgtggacggtattcattcccgcggtcagaaaaaggggcgtgtgcaggaaagcggggat

SEQ ID NO: 538863 - DNA, 75 bp, synthetic construct
  source 1..75: mol_type = other DNA
gataaggggatcacttttgggcagaagcaaggagatacaattgctctaattgaggcttcagaggcgagaggaatt

SEQ ID NO: 538864 - DNA, 75 bp, synthetic construct
  source 1..75: mol_type = other DNA
ccattgcgcttcgtgagggatatatgaagtacagcattgccgggggggagtaccgttcttcagatgatgctgttg

SEQ ID NO: 538865 - DNA, 75 bp, synthetic construct
  source 1..75: mol_type = other DNA
ggaaaaagcatacttggcgcaatcgactgttatgtatggtttaccatggggggtgacggcatttgctggagttca

SEQ ID NO: 538866 - DNA, 75 bp, synthetic construct
  source 1..75: mol_type = other DNA
agaacagtcagtgtcatgcggattaccgtctgccggaagagaaaggcccggcggggatattcctgacccgcagtg

SEQ ID NO: 538867 - DNA, 75 bp, synthetic construct
  source 1..75: mol_type = other DNA
tactgcggcgagttatcagtattcttcagacggttattacacgctctctgatgtactggacacataccgtcatca

SEQ ID NO: 538868 - DNA, 75 bp, synthetic construct
  source 1..75: mol_type = other DNA
ctccagcgcgatgcccgtgcccttaaacggggattatgggcagatgaaaatccggtgccaccatgggcctggagg

SEQ ID NO: 538869 - DNA, 75 bp, synthetic construct
  source 1..75: mol_type = other DNA
accaacagacggcagaaatctttgcggtgctatgggataactttcctgtaccacaagtcatcacctacaaaaaat

SEQ ID NO: 538870 - DNA, 75 bp, synthetic construct
  source 1..75: mol_type = other DNA
ctcttggctcccaaacaaagtgcaagttaacgttcagaaatttatcgtacttatcatctcccgcaaaacaagaac

SEQ ID NO: 538871 - DNA, 75 bp, synthetic construct
  source 1..75: mol_type = other DNA
taataagcgcgttgtagggattgtaaatgagtcaggtgaagtgtatatgtcaggcctgtctttccagacacctgt

SEQ ID NO: 538872 - DNA, 75 bp, synthetic construct
  source 1..75: mol_type = other DNA
atgtcaggaagcatggttgctcacggtgagggggtcacatttggtcagagagccggagacacagtgactctgatt

SEQ ID NO: 538873 - DNA, 75 bp, synthetic construct
  source 1..75: mol_type = other DNA
agatggtgtcgggcagtgaatataatacaggcaccagtcgtctgaacctgcgctggtcggggacttatggtgagc

SEQ ID NO: 538874 - DNA, 75 bp, synthetic construct
  source 1..75: mol_type = other DNA
ctattcgtattcgccagaatcaccacgaaaacaaaggtcgtttcattgaggaaaaacacttcttcaaacttgaag

SEQ ID NO: 538875 - DNA, 75 bp, synthetic construct
  source 1..75: mol_type = other DNA
actcagataacatcaaaaagaattattcgcgcaacgcagatcgcttttgtgaaggtaagcacttttacaaggtga

SEQ ID NO: 538876 - DNA, 75 bp, synthetic construct
  source 1..75: mol_type = other DNA
ttttttaatgatctggcacgagagctgatcgccatcatgctaatccccggccttatccgtcgcagtcgctcaacg

SEQ ID NO: 538877 - DNA, 75 bp, synthetic construct
  source 1..75: mol_type = other DNA
cgaagcagcaaaacttgatcccgccaactatatggtgcatagggccagaagcatgctggcgcaactacgggcaag

SEQ ID NO: 538878 - DNA, 75 bp, synthetic construct
  source 1..75: mol_type = other DNA
tatcgcattaccggctggggggcgctggaaggacataaagttttctatcacgaaacatatattaatcctgaagtt

SEQ ID NO: 538879 - DNA, 75 bp, synthetic construct
  source 1..75: mol_type = other DNA
atgacgggaaatcaatccaccgtagaaaatgcaaaagagaaactggatcggtggttaaaagatggcatcactacg

SEQ ID NO: 538880 - DNA, 75 bp, synthetic construct
  source 1..75: mol_type = other DNA
tgatgaggtcatcgataccctgcctgatggcaaaaacgcggttactgatactgtcggtaaaggtctgaaggcaac

SEQ ID NO: 538881 - DNA, 75 bp, synthetic construct
  source 1..75: mol_type = other DNA
acggcgtcccgtgctgccggtaatgttgttggtggtgtgcttggtgcattcagcccgattggcagtgagacgtcg

SEQ ID NO: 538882 - DNA, 75 bp, synthetic construct
  source 1..75: mol_type = other DNA
atggcttattccgatgaacagcgccctgaagcgcaatttggtaaccagaaccgcagcagtctgaacattcagcag

SEQ ID NO: 538883 - DNA, 75 bp, synthetic construct
  source 1..75: mol_type = other DNA
ttgcccgcgatctgttttgcagtgagcgtaatgcgcgggaagatcgcctgtttggcgatggttttgcttttatct

SEQ ID NO: 538884 - DNA, 75 bp, synthetic construct
  source 1..75: mol_type = other DNA
taccgtgcgcggaggtgaagtcaggggcaaaaaaattgaagactttggcgaggaaattaaaggggcagccaaaca

SEQ ID NO: 538885 - DNA, 75 bp, synthetic construct
  source 1..75: mol_type = other DNA
aggcagaagtacgccgacaggccggaggaaatcgtgacatcccgcagcctgagacaatcgcacctgaatctgaaa

SEQ ID NO: 538886 - DNA, 75 bp, synthetic construct
  source 1..75: mol_type = other DNA
cattggcgcaggatatgatcctcgccgccattcctgcggtcggctttgcgatggtgttcaacgttcccgttcggg

SEQ ID NO: 538887 - DNA, 75 bp, synthetic construct
  source 1..75: mol_type = other DNA
gagcgtttcttgccggtgcggtttactctggctgaaacagatggcgtaacgcgggtgatgataaccaaactcact

SEQ ID NO: 538888 - DNA, 75 bp, synthetic construct
  source 1..75: mol_type = other DNA
gtgaaagaggtgaaacgctacctggcaagcacggcggcggtgggggaatatcttgctgaccaactggtgctaccg

SEQ ID NO: 538889 - DNA, 75 bp, synthetic construct
  source 1..75: mol_type = other DNA
ccaggtgattcgaaagccgctaagcgatatagccagtaaaaaacgctctgagtaccgaaaacgatacgctttgct

SEQ ID NO: 538890 - DNA, 75 bp, synthetic construct
  source 1..75: mol_type = other DNA
ccagcggcctggggcgaaatgccgtgcaatatttgttgcaatcgggtgtgtcggtagtggcgacagggcgaaatt

SEQ ID NO: 538891 - DNA, 75 bp, synthetic construct
  source 1..75: mol_type = other DNA
gaaaaatttaaggatgatttttttatagctgatgattggctgtatcttaagaggaaaaaagtttttaaacatatt

SEQ ID NO: 538892 - DNA, 75 bp, synthetic construct
  source 1..75: mol_type = other DNA
ctcgttccgtcttgtcggaactggatatgatggtcgggaaaatcctctgttatctttatctcagcccggaacggc

SEQ ID NO: 538893 - DNA, 75 bp, synthetic construct
  source 1..75: mol_type = other DNA
ggattatatccatgaaactactatccgctctttggatgcatatcctgtacactcagaatatcaggatttaaatta

SEQ ID NO: 538894 - DNA, 75 bp, synthetic construct
  source 1..75: mol_type = other DNA
ttatcgttttgtacagaatcttccggaaaaatatttgccgttttttcttcccaaaaaaagcacttctctgattaa

SEQ ID NO: 538895 - DNA, 75 bp, synthetic construct
  source 1..75: mol_type = other DNA
ccgaccgatcctcagtccggtcagcctgcgggtcacgggagatggcggctgccggaaacttcggcggtaaccgca

SEQ ID NO: 538896 - DNA, 75 bp, synthetic construct
  source 1..75: mol_type = other DNA
gtgcgttgatgaaagcttgcaatatctctgagtgtctggcagtcagtgagcacagtcatgttttccggcaattga

SEQ ID NO: 538897 - DNA, 75 bp, synthetic construct
  source 1..75: mol_type = other DNA
ctcccagtggttttgaccgggaaggagagttgatgttgtcattgttttacaataaaatagtgattgcccggttaa

SEQ ID NO: 538898 - DNA, 75 bp, synthetic construct
  source 1..75: mol_type = other DNA
tattacgaactgcgttccttgcagtgcattgaggatattctggcaatacaacccacgttgccagcaagaattcat

SEQ ID NO: 538899 - DNA, 75 bp, synthetic construct
  source 1..75: mol_type = other DNA
accggcgaaacccgtcgcgaagttgttgaacgtccggtgcctatggcaatgatggcggatcgctacttcaccacc

SEQ ID NO: 538900 - DNA, 75 bp, synthetic construct
  source 1..75: mol_type = other DNA
ccttaacagcctggcactgtttgatgccggtaaatggacgctgaagccgggcgccacaaaatggctggtgaatgc

SEQ ID NO: 538901 - DNA, 75 bp, synthetic construct
  source 1..75: mol_type = other DNA
gtcctggtacaaccgggttactgatgccctgacagatatttgccggcaggagcacttttatttccggccggttgc

SEQ ID NO: 538902 - DNA, 75 bp, synthetic construct
  source 1..75: mol_type = other DNA
tggcctggggctgggtattttcctgatggattacttcactctggttgtgctttgggcattgctgggcgtcggata

SEQ ID NO: 538903 - DNA, 75 bp, synthetic construct
  source 1..75: mol_type = other DNA
cccagtgtaacaacgcctttattttcccgggcatgggctgggtgttattgcttccggcgcgtcacgtatcaccga

SEQ ID NO: 538904 - DNA, 75 bp, synthetic construct
  source 1..75: mol_type = other DNA
ttcgttgatgaatttatccaggctgtgaaacaacgctggccggacgtactgttgcagtttgaagacttcgcacaa

SEQ ID NO: 538905 - DNA, 75 bp, synthetic construct
  source 1..75: mol_type = other DNA
gctgggacattgatgatctgagcgtggcgctggagaaagagaaaatctttctgcgcaatccggtcacggtaccgt

SEQ ID NO: 538906 - DNA, 75 bp, synthetic construct
  source 1..75: mol_type = other DNA
gttcctggagcagtttattgttgccgtggaaaaacgttggcccggtgtattattacagtttgaagattttgcact

SEQ ID NO: 538907 - DNA, 75 bp, synthetic construct
  source 1..75: mol_type = other DNA
ttatcgctgcctgctgtgagcgcttcggtaccgtcgatattctggttaacaatgccggtatttgtaagctgaata

SEQ ID NO: 538908 - DNA, 75 bp, synthetic construct
  source 1..75: mol_type = other DNA
aagatctttacgaaaaagtagatggcagaatttctcatgtatcttttatcacctcagatggcaatacaagttctt

SEQ ID NO: 538909 - DNA, 75 bp, synthetic construct
  source 1..75: mol_type = other DNA
aattacgtgctaatggtggagaaataaaatgcaaaacacgccaagtcacgcaatgctttaataccatcatgctaa

SEQ ID NO: 538910 - DNA, 75 bp, synthetic construct
  source 1..75: mol_type = other DNA
gttgaggctgaaaagtatcggattgcaggggaattctgcgagcagcaatacgactcattgaagaagcaaaaatag

SEQ ID NO: 538911 - DNA, 75 bp, synthetic construct
  source 1..75: mol_type = other DNA
gtcgtggtctgccgtcaccggatgagcagaacgccacagcaccagtgcgtgaaggacttcctgcacctgaaagtc

SEQ ID NO: 538912 - DNA, 75 bp, synthetic construct
  source 1..75: mol_type = other DNA
cggaatggatgtatcaccatgggagggggtagctgacgcaacgatcgaaggagccgctcttggtgcagcgatggg

SEQ ID NO: 538913 - DNA, 75 bp, synthetic construct
  source 1..75: mol_type = other DNA
agcgccgaccattctgcgtccgtttgcgaaccttgccatgaatgaaaacttcatgggggcgcagatttaccagga

SEQ ID NO: 538914 - DNA, 75 bp, synthetic construct
  source 1..75: mol_type = other DNA
tttcatgacggatgtttacatgccgccttcctccacgcaaaaggaactgggcgcgccaccttctgttggagatgc

SEQ ID NO: 538915 - DNA, 75 bp, synthetic construct
  source 1..75: mol_type = other DNA
aaggccagagtatcggtgcatggcattcgttcctgaacctggtcgaggatgccaacggcgcggttgaaaacgctc

SEQ ID NO: 538916 - DNA, 75 bp, synthetic construct
  source 1..75: mol_type = other DNA
aaccttgtcgaggatgccaacggcgcggttgaaaacgctctgcgtctttctgcctataaacacgcccgtgatgcc

SEQ ID NO: 538917 - DNA, 75 bp, synthetic construct
  source 1..75: mol_type = other DNA
agacaattgcatcgcgttttgtgcgccagatgcaggataaattccaggtgctgaaagctgttcaggagaatatcc

SEQ ID NO: 538918 - DNA, 75 bp, synthetic construct
  source 1..75: mol_type = other DNA
aaagaacggcgttcattgacgagaacaacggaaaattgttgatgaacgggcttatgcaggatacccggaagagac

SEQ ID NO: 538919 - DNA, 75 bp, synthetic construct
  source 1..75: mol_type = other DNA
gcggttgaaaacgctctgcgtctttctgcctataaacacgcccgtgatgccggtttgtcacgccagcaggcggcg

SEQ ID NO: 538920 - DNA, 75 bp, synthetic construct
  source 1..75: mol_type = other DNA
ggcaaaacttactacattaaacttcatgatccgcgcctgatgcgtgcgatgaagaacatggggccggaaaccagt

SEQ ID NO: 538921 - DNA, 75 bp, synthetic construct
  source 1..75: mol_type = other DNA
cccggcgaaactgacagctatgaagcatttttctctgattcaaatcgctggaaggataacagtacgtcgttcagc

SEQ ID NO: 538922 - DNA, 75 bp, synthetic construct
  source 1..75: mol_type = other DNA
tcctgggggcattcagtcctgtgggcagtgaaacgtcggaaacactgtccggggcattgctgaaaaatgcagcgc

SEQ ID NO: 538923 - DNA, 75 bp, synthetic construct
  source 1..75: mol_type = other DNA
ggtcaaaggggtactgcgtcgtacggggttactgaagccgacggaactgaacgatatcagacttgttcgcgagac

SEQ ID NO: 538924 - DNA, 75 bp, synthetic construct
  source 1..75: mol_type = other DNA
ttggagtatttggttggacttaaaaattatttttctaaccatttttaaagggtttgttaataaatctgcttatta

SEQ ID NO: 538925 - DNA, 75 bp, synthetic construct
  source 1..75: mol_type = other DNA
cagggttgctcagaaagtttggatataacacacgacgagttgctgttgttgggtctacccccgcagggattagtt

SEQ ID NO: 538926 - DNA, 75 bp, synthetic construct
  source 1..75: mol_type = other DNA
gaaaaaatgcaaaagcgcgttgaatatgatcttgagtatatccgtgagtggagtgtatggttagatttaaagatt

SEQ ID NO: 538927 - DNA, 75 bp, synthetic construct
  source 1..75: mol_type = other DNA
ataatttaggactgaatgattttgatttgaatgcaattaatgtactaaaaaaaataaagagagaaggtaaaatta

SEQ ID NO: 538928 - DNA, 75 bp, synthetic construct
  source 1..75: mol_type = other DNA
gcatgggattgtttgttgaacaggttaaagaatggcaggctatctcaattcaggcgcatgaaaaaaaattgacgg

SEQ ID NO: 538929 - DNA, 75 bp, synthetic construct
  source 1..75: mol_type = other DNA
atgctgtcgctcataatgaacaatacagatctcttattcaaggatatatgttaaggcacaaggtgaaaccaggaa

SEQ ID NO: 538930 - DNA, 75 bp, synthetic construct
  source 1..75: mol_type = other DNA
attgacagatacaacatgttctgtattgttaattcctgatatcttcacctttaatatcttgcaagcaagaactga

SEQ ID NO: 538931 - DNA, 75 bp, synthetic construct
  source 1..75: mol_type = other DNA
atgctaatgcctcgcttatatcgatggttcaaagattttctgatatagttcttatttttacaagtctatatgcaa

SEQ ID NO: 538932 - DNA, 75 bp, synthetic construct
  source 1..75: mol_type = other DNA
ttattgtatatcagaagttggagcatttggctagatcttaagataatattccttacagtttttaaaggatttata

SEQ ID NO: 538933 - DNA, 75 bp, synthetic construct
  source 1..75: mol_type = other DNA
cccattcgaataccaacatgccctcatgtctttactatcgttggtcattttccagatgataggtggtataactga

SEQ ID NO: 538934 - DNA, 75 bp, synthetic construct
  source 1..75: mol_type = other DNA
aaaatggaaaagcggggggagttcgatctggaatatatccgcgaatggagcgtctggtttgatatcaggatcgtt

SEQ ID NO: 538935 - DNA, 75 bp, synthetic construct
  source 1..75: mol_type = other DNA
gaaaaaatggaaaaacgtatcgagtatgatcttatgtacattagaagctggagcgtatggttagatctcaaaatt

SEQ ID NO: 538936 - DNA, 75 bp, synthetic construct
  source 1..75: mol_type = other DNA
cccttttggtgactattataggaatatattaatatatactcgatatttactaattccattttatttctggatggg

SEQ ID NO: 538937 - DNA, 75 bp, synthetic construct
  source 1..75: mol_type = other DNA
gtaccgcgactaaaactccggaacgtgacctgtatcagcttgtgaccgacagggttgttacggccattgaaaatg

SEQ ID NO: 538938 - DNA, 75 bp, synthetic construct
  source 1..75: mol_type = other DNA
ggattagatgaagccattgattttgtgaataataatataaagccttggctcagaactccaggggctataaaatgg

SEQ ID NO: 538939 - DNA, 75 bp, synthetic construct
  source 1..75: mol_type = other DNA
ctcactgccgcgaaatgctgaagctcaacccgaacgataaccaggggattcgtcatttattagcgaactattacc

SEQ ID NO: 538940 - DNA, 75 bp, synthetic construct
  source 1..75: mol_type = other DNA
gacggggaccagggaatggaaactgaatttgttgatcctgctcagccgcagagtgtcatgctgtttcgcccgcac

SEQ ID NO: 538941 - DNA, 75 bp, synthetic construct
  source 1..75: mol_type = other DNA
atctgctgacggcaaatggaaactcttaggtgaatttggacggctagtcaaagaatcttcaccagacttgataac

SEQ ID NO: 538942 - DNA, 75 bp, synthetic construct
  source 1..75: mol_type = other DNA
tgacctgtatcagttggtgacggacagggtgattgaggccatcgaaaagggcgtagccccctggaaacgtccatg

SEQ ID NO: 538943 - DNA, 75 bp, synthetic construct
  source 1..75: mol_type = other DNA
tggaagatattgatcttattgaagccaacgaggctttcgcagcgcaggcgctggccgttggcgacgaactgaact

SEQ ID NO: 538944 - DNA, 75 bp, synthetic construct
  source 1..75: mol_type = other DNA
aaagtaaagataacaatatcaagtcattttatttaggtacgcccagtggtaattttaaagcaatagataaccacg

SEQ ID NO: 538945 - DNA, 75 bp, synthetic construct
  source 1..75: mol_type = other DNA
gctggctggcatcgtgcggcctgactgtggagcagatgcaaaaccagatggacccggtgtacacgccggcgcgaa

SEQ ID NO: 538946 - DNA, 75 bp, synthetic construct
  source 1..75: mol_type = other DNA
acacgtccatatatgagagcaaaagcagctttggctgatgccttatgggagtccggtaatttctacccagccatg

SEQ ID NO: 538947 - DNA, 75 bp, synthetic construct
  source 1..75: mol_type = other DNA
ataattcacccagtgtcgaaaggaaagctctgcatgaacatattttatttgaaaatgaattgagaaagatttatg

SEQ ID NO: 538948 - DNA, 75 bp, synthetic construct
  source 1..75: mol_type = other DNA
aagttccgttccatgaaagtgatggagaacgacaaagtggtgacccaggcgacgcagaacgatccgcgcgtcacc

SEQ ID NO: 538949 - DNA, 75 bp, synthetic construct
  source 1..75: mol_type = other DNA
tacttaaaagcttcaacgaagaaccttggctaggttttgtagttaaaggtatatatcatgatgagccttataatg

SEQ ID NO: 538950 - DNA, 75 bp, synthetic construct
  source 1..75: mol_type = other DNA
aggttgtcgtgcagggtaagaatattctgctggacaagggcagcaacatcacagcaaccggtggtcagggcggcg

SEQ ID NO: 538951 - DNA, 75 bp, synthetic construct
  source 1..75: mol_type = other DNA
cgctgacggccaccaacaacatcaacctgacggctaagacgaacagtgcgagctctggtgtttacctgaaagatg

SEQ ID NO: 538952 - DNA, 75 bp, synthetic construct
  source 1..75: mol_type = other DNA
ttgacaaacgccgcaacgaactggtggtggtgagtgaaatcaccaccggcgtgagtaatgcaaaagccacgggca

SEQ ID NO: 538953 - DNA, 75 bp, synthetic construct
  source 1..75: mol_type = other DNA
gccctccctggccgggtatatatccgttacactgttctgatattactggtactgaactttaaaggtggcgtcggc

SEQ ID NO: 538954 - DNA, 75 bp, synthetic construct
  source 1..75: mol_type = other DNA
ttaaaggcaacaacacgctgacggccagtaacattactcttaccggggaaagtacgagtggggaatgccatcaac

SEQ ID NO: 538955 - DNA, 75 bp, synthetic construct
  source 1..75: mol_type = other DNA
tagcaatgttagcaaaactgagacgactcaatcgccgccgcacacgcaatttgcacccaccgctgcgggctctgc

SEQ ID NO: 538956 - DNA, 75 bp, synthetic construct
  source 1..75: mol_type = other DNA
atctaacccaccttcacagatttatgaagttttaactaataatatctggggtatggggcttgatccggcattaat

SEQ ID NO: 538957 - DNA, 75 bp, synthetic construct
  source 1..75: mol_type = other DNA
atgaaaggtttgattattcgtgatttagcggaccttactatgaaatgttcatctaacccaccttcacagatttat

SEQ ID NO: 538958 - DNA, 75 bp, synthetic construct
  source 1..75: mol_type = other DNA
gctttccatggccattactgactggcgatgctctccgagcatacaaccaaattaaatcactttcaaagttccact

SEQ ID NO: 538959 - DNA, 75 bp, synthetic construct
  source 1..75: mol_type = other DNA
agatgttcaatttgttaaaaactgccgtgtaccgtttatgtcgcgcccgcgtaataagcgccgctggttttcccg

SEQ ID NO: 538960 - DNA, 75 bp, synthetic construct
  source 1..75: mol_type = other DNA
aaagtgattcaggtgccaatcgatctctataccaaaacggaagacggtaaacagtggctggcaacgcacgttgat

SEQ ID NO: 538961 - DNA, 75 bp, synthetic construct
  source 1..75: mol_type = other DNA
gtgttgaaggggatatttatagctataataatcaagtgagaaccaatgtaacacttaacgctacagatatttcta

SEQ ID NO: 538962 - DNA, 75 bp, synthetic construct
  source 1..75: mol_type = other DNA
aagaagaacgttttatcgtggcggacaaagcccttgcccgctatgaccaactgcttgctgcctggaaagatgatc

SEQ ID NO: 538963 - DNA, 75 bp, synthetic construct
  source 1..75: mol_type = other DNA
gcccgtctttcctgttacagcagtctgacctatgtgctgttgctctcctgtggccagattgccggagccattgcc

SEQ ID NO: 538964 - DNA, 75 bp, synthetic construct
  source 1..75: mol_type = other DNA
tctttctcatgctgccggattaattagcagttccttgcgtgcgcaggacgttgccgggcgggtcggtggtgagga

SEQ ID NO: 538965 - DNA, 75 bp, synthetic construct
  source 1..75: mol_type = other DNA
gaaaaagcccgtccgctcgctaaattgtgtcagacgcaccaacatcctttttctgtcattcaggtcgatcttgac

SEQ ID NO: 538966 - DNA, 75 bp, synthetic construct
  source 1..75: mol_type = other DNA
gaaagatgaggtgaaaataaataatattgttagtcaattagctgatactacgtgttcggttcttttaattcctga

SEQ ID NO: 538967 - DNA, 75 bp, synthetic construct
  source 1..75: mol_type = other DNA
cggcagtcctgtttgcggtggccaaaaaaggtcatggtattaacaccggtaaagtgctgcgcggcgcgccctggc

SEQ ID NO: 538968 - DNA, 75 bp, synthetic construct
  source 1..75: mol_type = other DNA
aggtaatgatgtgatggcagacgagtttgttgccggccatgttatttttggcgttggtatgattgccgcatgtgt

SEQ ID NO: 538969 - DNA, 75 bp, synthetic construct
  source 1..75: mol_type = other DNA
cagagggctagggagaatgtttggtgtaacacatcaaacagtgctttcagccttaaatggcgaaacctggaaata

SEQ ID NO: 538970 - DNA, 75 bp, synthetic construct
  source 1..75: mol_type = other DNA
gcgccactattgcgctaccttgaagatcagggaaagaaaagcgcgctcacgcccaatcaggttgccgactggctg

SEQ ID NO: 538971 - DNA, 75 bp, synthetic construct
  source 1..75: mol_type = other DNA
caggtgggatatggacaacggctcaaatggaacaacgtcgtagatggcggggtgatgctggtttgggataaacgc

SEQ ID NO: 538972 - DNA, 75 bp, synthetic construct
  source 1..75: mol_type = other DNA
acgtccaggccaaccccatggctgacgagtgcgtcggctacatccagaacatgggcgcaattcccgcgccggtgc

SEQ ID NO: 538973 - DNA, 75 bp, synthetic construct
  source 1..75: mol_type = other DNA
caggccaaacggtggttcgaatatccgcactgatcttggctctgagtaccacgtccttgtcgacgttgtcggcgc

SEQ ID NO: 538974 - DNA, 75 bp, synthetic construct
  source 1..75: mol_type = other DNA
ccattggcaacaatcagatgattgcggttaccaacaatcagatacagacggtgggtgttaaccagatagagacgg

SEQ ID NO: 538975 - DNA, 75 bp, synthetic construct
  source 1..75: mol_type = other DNA
tctggataaattcgacaccctgacaaactccatcaccgaaggtcttccgcgtgaaatcgagttgcgccagaaaca

SEQ ID NO: 538976 - DNA, 75 bp, synthetic construct
  source 1..75: mol_type = other DNA
cgcacgcgatcgccgtcgcaagctcagcgccctggcatttgcagcaaccattattgttatggcggttattggcgt

SEQ ID NO: 538977 - DNA, 75 bp, synthetic construct
  source 1..75: mol_type = other DNA
cggtggcggcactgatgatgacggcggggtctgtgggattgtttaccgggccttttacccccagcacagtgacga

SEQ ID NO: 538978 - DNA, 75 bp, synthetic construct
  source 1..75: mol_type = other DNA
tttttacccgttacctgtatcatcatttaccaatgacgggtggaagaaattgaaaggtggatatttaacaaaaaa

SEQ ID NO: 538979 - DNA, 75 bp, synthetic construct
  source 1..75: mol_type = other DNA
cctgattgttgatattagaatgaactatgcatttaacatgttaatggcaacggaaaaaaacataaatataatatc

SEQ ID NO: 538980 - DNA, 75 bp, synthetic construct
  source 1..75: mol_type = other DNA
aaaagcgacattttgccactagttgtgccacaggaaacagatacagtcacgtataatgtgttcgtcaaacaggag

SEQ ID NO: 538981 - DNA, 75 bp, synthetic construct
  source 1..75: mol_type = other DNA
aacggatttatacggctgacgaacagcaacaacaggccgaatcacaaaaggccgcgttactttccgaagcagaaa

SEQ ID NO: 538982 - DNA, 75 bp, synthetic construct
  source 1..75: mol_type = other DNA
aaagcatggggagtaacacaggaagatgagctggacctgctgatgagggtagccgaaaagcccgggggattgcgt

SEQ ID NO: 538983 - DNA, 75 bp, synthetic construct
  source 1..75: mol_type = other DNA
atcgggtatggcagaaagggcagaatttgtcaggtgcccccggcgttgtgaagacccagacattttgtgatttgc

SEQ ID NO: 538984 - DNA, 75 bp, synthetic construct
  source 1..75: mol_type = other DNA
aaaaatatgttaggaggagatgatttatcctccaagtcaattaaagtgttaaataatcttgttttacaagaagat

SEQ ID NO: 538985 - DNA, 75 bp, synthetic construct
  source 1..75: mol_type = other DNA
ctcagcaatacccagcccaacctgctggttgtgcctggcgatcgcattgtggctgtggacagtgcgcaggggacg

SEQ ID NO: 538986 - DNA, 75 bp, synthetic construct
  source 1..75: mol_type = other DNA
caaaagcttccctgaaaagcatcacgctgagcggcggacccacttctgacaaagtcagtgtgggctggtacagcc

SEQ ID NO: 538987 - DNA, 75 bp, synthetic construct
  source 1..75: mol_type = other DNA
cacgcgtaaatggaatgaagttcagaacctgtcgaaagatatatcgctggttactgattaccttgtaaccaatta

SEQ ID NO: 538988 - DNA, 75 bp, synthetic construct
  source 1..75: mol_type = other DNA
ttcagtttataccttatgttcaacgaactcaccctgaggtattaacttttcaggaatggattagccccgttgatt

SEQ ID NO: 538989 - DNA, 75 bp, synthetic construct
  source 1..75: mol_type = other DNA
atgatctgggtctcggtttcatttgtaaaaatgcaagaacatcgtcaaagccaacgttaagaaaagttacttttc

SEQ ID NO: 538990 - DNA, 75 bp, synthetic construct
  source 1..75: mol_type = other DNA
actttgagcagcaagacgatagaggggttacgtcattaaccatcaataaacaaaccagaaaaggttctgtgacga

SEQ ID NO: 538991 - DNA, 75 bp, synthetic construct
  source 1..75: mol_type = other DNA
tggttttgccattggccttagcggattaggtttcttacaacacgccactgaagccagcgaatacaccttaattct

SEQ ID NO: 538992 - DNA, 75 bp, synthetic construct
  source 1..75: mol_type = other DNA
ataccaaacaattagaagggcaaagcgatctcggctttgccggttttcgcgtgtttaaaggccccgaactggcgc

SEQ ID NO: 538993 - DNA, 75 bp, synthetic construct
  source 1..75: mol_type = other DNA
attattttataatgctaatatttgtatgggaggcttatggagaaattagttatttgactggtgcaattatacaat

SEQ ID NO: 538994 - DNA, 75 bp, synthetic construct
  source 1..75: mol_type = other DNA
gtacggatattgatggtcagcccattgttcgtaaatggaatgaactgcagaacctgtcgaaagatatctcattag

SEQ ID NO: 538995 - DNA, 75 bp, synthetic construct
  source 1..75: mol_type = other DNA
aactaaatttccagttggttcaatataatcaagggaaagaaacacctccccagcttaataaaagcattcaggtgt

SEQ ID NO: 538996 - DNA, 75 bp, synthetic construct
  source 1..75: mol_type = other DNA
cgatatgggccatttggtcatcccttattctgaagaaagtaactttgaaaaaccggggtttatcgttgatgggca

SEQ ID NO: 538997 - DNA, 75 bp, synthetic construct
  source 1..75: mol_type = other DNA
ttaaggaagggagctcttcttcccttcgcattgatgatgaggatatgcttcagtatgtcagggaagctgttaatt

SEQ ID NO: 538998 - DNA, 75 bp, synthetic construct
  source 1..75: mol_type = other DNA
tcttttcagtatcaatgctcgtggcaatcacgcgggaaagatcaaactttctcacaaccaactgcttaactggct

SEQ ID NO: 538999 - DNA, 75 bp, synthetic construct
  source 1..75: mol_type = other DNA
atgatgaagacatgcttcagttcgtcagggaggcggttaattcatcctctccaaaagtaatttttgttcatatga

SEQ ID NO: 539000 - DNA, 75 bp, synthetic construct
  source 1..75: mol_type = other DNA
acactattaatacgttgatcaacgagggcgacaagccccaggaagatattgctgatgaggccggaatgtctccgg

SEQ ID NO: 539001 - DNA, 75 bp, synthetic construct
  source 1..75: mol_type = other DNA
cggcacttcccgaacaaggaagccatttggcaggcggtcatggagtgggtagcagagcgcctattagccagaatc

SEQ ID NO: 539002 - DNA, 75 bp, synthetic construct
  source 1..75: mol_type = other DNA
ccagcggatgtgaagttcggcaatcattcacgacgcgggaggacggacgtgagatcaggtgctggcgggcgctgt

SEQ ID NO: 539003 - DNA, 75 bp, synthetic construct
  source 1..75: mol_type = other DNA
cgggctgacttatgtgctgatttcacacaatgtctcggtgattcgtcatatgagcgatcgggtagcggtgatgta

SEQ ID NO: 539004 - DNA, 75 bp, synthetic construct
  source 1..75: mol_type = other DNA
atggcactgtgcctgatctcagccttcgctggcggtcatgtgggcttaatagccctgactttatgcagcgccttt

SEQ ID NO: 539005 - DNA, 75 bp, synthetic construct
  source 1..75: mol_type = other DNA
ttaacgcctttattcttgatctccccatcaacaccgcactggcaatggcctccggtttcggctggtattcacttt

SEQ ID NO: 539006 - DNA, 75 bp, synthetic construct
  source 1..75: mol_type = other DNA
cctgccgttcaccagccgctggcggaagataaatcactactgccatttttcagcgatgagcgggtgagccgtgct

SEQ ID NO: 539007 - DNA, 75 bp, synthetic construct
  source 1..75: mol_type = other DNA
tacagagaaaaaacaggcagggaggccgacaaaatacagtgaaaaaatggcattgagggtggcaatgcttgtagg

SEQ ID NO: 539008 - DNA, 75 bp, synthetic construct
  source 1..75: mol_type = other DNA
gatgcctatggttcgcaatattccatgcgtatctggctggccccggcgaaactcaacagtttccagatgacggct

SEQ ID NO: 539009 - DNA, 75 bp, synthetic construct
  source 1..75: mol_type = other DNA
cggattgacgaatgcattgtcagaaaatacctggaaagtgccgacaggatccagtactccgatactccggttcct

SEQ ID NO: 539010 - DNA, 75 bp, synthetic construct
  source 1..75: mol_type = other DNA
ccgcacgttgccgcaaggctgttttttctacgaacgttgcccgctggcaacccacggacgtgagctccggtgctg

SEQ ID NO: 539011 - DNA, 75 bp, synthetic construct
  source 1..75: mol_type = other DNA
ctggtatgtacctgcaggaagtgattatctttatcttaactatgcaattctcatttttctggggttagctatcta

SEQ ID NO: 539012 - DNA, 75 bp, synthetic construct
  source 1..75: mol_type = other DNA
ggcgcttatagacacggcaaaactattagatctgaaatcgtcaccgtttggaggtaaagaccatgttcaagcaga

SEQ ID NO: 539013 - DNA, 75 bp, synthetic construct
  source 1..75: mol_type = other DNA
gcccaaagtgctgcaaatataaaaagcatgggtgaagccatgaaagcccgtatattagcaaaacaaggaaaaaaa

SEQ ID NO: 539014 - DNA, 75 bp, synthetic construct
  source 1..75: mol_type = other DNA
accaggactggaagaccatgagctggcggaaagtttacgtattacccgtgaactggttacagagttgaacaaagc

SEQ ID NO: 539015 - DNA, 75 bp, synthetic construct
  source 1..75: mol_type = other DNA
agcggcgtctgctgccgcgcatcattgacgttctgttaacgatttttgcctgggttggatttttatacttaatct

SEQ ID NO: 539016 - DNA, 75 bp, synthetic construct
  source 1..75: mol_type = other DNA
gcggggaacacaacgtcaggttgtcgccgctctgcgtggtcgccggtttatccccgctggcgcggggaacaccgc

SEQ ID NO: 539017 - DNA, 75 bp, synthetic construct
  source 1..75: mol_type = other DNA
aaactcagtcgaatttaactaccttccaaacaatctcgtcaggctagagaatctgaaaaccttagctgtcaatgc

SEQ ID NO: 539018 - DNA, 75 bp, synthetic construct
  source 1..75: mol_type = other DNA
gccagagaggcgggaatttccgacggcacattatcggctttccgcaaggggaaatataaaggcgataacgccgct

SEQ ID NO: 539019 - DNA, 75 bp, synthetic construct
  source 1..75: mol_type = other DNA
ataaaaattcaattagaggagcgtataaccatgcacaatatatcattggtagaaaaagaatgatgcaatggtact

SEQ ID NO: 539020 - DNA, 75 bp, synthetic construct
  source 1..75: mol_type = other DNA
atgttttctgggctgttaatcattctggttcccctgattgtgggttacctcattccgcttcgccaaaaagctgcg

SEQ ID NO: 539021 - DNA, 75 bp, synthetic construct
  source 1..75: mol_type = other DNA
ctgttattgttcaggcgacgcggctcgatacatcaatacttccacgcaatatcttctcgcagtcgtatctgcttt

SEQ ID NO: 539022 - DNA, 75 bp, synthetic construct
  source 1..75: mol_type = other DNA
ataaaggcgtattcaatgctgacctgacattcaccgttagcgatacttacacgcaatctgaaatccaggctatag

SEQ ID NO: 539023 - DNA, 75 bp, synthetic construct
  source 1..75: mol_type = other DNA
atcacctgggcggcattgtcgcgctgagttatgcatcggtgaagaaaagtgacacgatgaagacgggtgaaaata

SEQ ID NO: 539024 - DNA, 75 bp, synthetic construct
  source 1..75: mol_type = other DNA
atccactaagacagaatgttaccccatcactgtcagagcacattgatggagttcagtcatacagcttgatatcag

SEQ ID NO: 539025 - DNA, 75 bp, synthetic construct
  source 1..75: mol_type = other DNA
ccgtcgttgttcgagcgataggtattaacgcatcttctttacctcgcggtcttaaccccgcttatgagcaataca

SEQ ID NO: 539026 - DNA, 75 bp, synthetic construct
  source 1..75: mol_type = other DNA
gcaggcgggctgaatattccccggtttatccatatctccacgcctgcggtttactttgattttcaacatcactat

SEQ ID NO: 539027 - DNA, 75 bp, synthetic construct
  source 1..75: mol_type = other DNA
caaactcatttctgcggcttttactttaggatttgcttatgccgcctggaatgtcggtattttacatggcaatgt

SEQ ID NO: 539028 - DNA, 75 bp, synthetic construct
  source 1..75: mol_type = other DNA
tgcggcggcgatctattcattaagcgggctgctgttaatcttcaccgttggattcccgcgtatccggcagatccc

SEQ ID NO: 539029 - DNA, 75 bp, synthetic construct
  source 1..75: mol_type = other DNA
ccacttccgggttaacgccgtcagtcaactgtggtgccaaagtttagataaaacatggcaacggaggcgttatga

SEQ ID NO: 539030 - DNA, 75 bp, synthetic construct
  source 1..75: mol_type = other DNA
gccgtcacaaatataaagcccctaatgaaataaaaatacccattgcttttagaataaacaattatacctttatcg

SEQ ID NO: 539031 - DNA, 75 bp, synthetic construct
  source 1..75: mol_type = other DNA
gcatcatatgtattttacatgctaatacctatattactaacttgggttagtttgcttttaagttctaaactggga

SEQ ID NO: 539032 - DNA, 75 bp, synthetic construct
  source 1..75: mol_type = other DNA
tcaggaaatgtaataaaactcagtcagttatcaattcgttacttacccaatatcaactcaatctcattaatagag

SEQ ID NO: 539033 - DNA, 75 bp, synthetic construct
  source 1..75: mol_type = other DNA
aaaggtttactcgactcacttatccacgccggatttgcggaagacgacgagcaattcgatgacattcgcgtaatt

SEQ ID NO: 539034 - DNA, 75 bp, synthetic construct
  source 1..75: mol_type = other DNA
aaaaatgcgatgccgttgcttaaccgctatcgccatgaaatttgttcttttaacgatgacattcagggcaccgca

SEQ ID NO: 539035 - DNA, 75 bp, synthetic construct
  source 1..75: mol_type = other DNA
gtggtgactgacggcgaacgtattctggggcttggtgaccagggcatcggcggggggggggttccgatcggtaaa

SEQ ID NO: 539036 - DNA, 75 bp, synthetic construct
  source 1..75: mol_type = other DNA
gtggtgaatatcattgggaaaagcatacgaccagatgaccttttagcgcgcgtcggcggcgaagagtttggcgtc

SEQ ID NO: 539037 - DNA, 75 bp, synthetic construct
  source 1..75: mol_type = other DNA
gcaattcgatgacattcgcgtaattcgcggtgtgaaagtaccaggtgggaggcttggaataaaaatcaccgaact

SEQ ID NO: 539038 - DNA, 75 bp, synthetic construct
  source 1..75: mol_type = other DNA
ggaaataggagtagaacttaagggcggtgatgccattgagttaagcaacggtgcgatcctgtattttctcggcac

SEQ ID NO: 539039 - DNA, 75 bp, synthetic construct
  source 1..75: mol_type = other DNA
ggttggtacaaccactatggacgggtttgggtgctgaaaacggctccgggcgcaggtaacgtctttagcggctga

SEQ ID NO: 539040 - DNA, 75 bp, synthetic construct
  source 1..75: mol_type = other DNA
ttatcggccactggcaagacaccctgcccgctgcagaagcctaccgcaatatgtggctgatgggcatggcggcgc

SEQ ID NO: 539041 - DNA, 75 bp, synthetic construct
  source 1..75: mol_type = other DNA
gatccaaatcctttccgtactcggcctgctggcgttaactgccctgctcgtcacgaactctaacccgcaatcggt

SEQ ID NO: 539042 - DNA, 75 bp, synthetic construct
  source 1..75: mol_type = other DNA
ccctacccgcgtgatccaaatcctttccgtactcggcctgctgacgttaactgccctgctcgtcacgaactctaa

SEQ ID NO: 539043 - DNA, 75 bp, synthetic construct
  source 1..75: mol_type = other DNA
ttattctttatgcgcccagcggggttattgccgataaattttcacatcgcaaaatgattacttccgcgatggtaa

SEQ ID NO: 539044 - DNA, 75 bp, synthetic construct
  source 1..75: mol_type = other DNA
ttattctttatgcccccagcggcgttattgccgataaattttcacatcgcaaaatgattacttccgcgatgatca

SEQ ID NO: 539045 - DNA, 75 bp, synthetic construct
  source 1..75: mol_type = other DNA
tagcgataacaacaacctgcgcaataccaataacgaagaaaaacagtcattccagcttagcgacatcctggccgt

SEQ ID NO: 539046 - DNA, 75 bp, synthetic construct
  source 1..75: mol_type = other DNA
aatcttttgcgccggtgaaaggtgcaagtgctgtgccgctggttggtcgtgcttctgttgcctccgatcgctcgc

SEQ ID NO: 539047 - DNA, 75 bp, synthetic construct
  source 1..75: mol_type = other DNA
agagtaatgtttataacgcggtgcaagagtggctgcgcgcaggcggtgatacccgcaatatgcgccagttcggca

SEQ ID NO: 539048 - DNA, 75 bp, synthetic construct
  source 1..75: mol_type = other DNA
atcaaaggccaacacttcgatatctatcaagggatcgggccggaagccggacaccgcgcaggttggtacaaccac

SEQ ID NO: 539049 - DNA, 75 bp, synthetic construct
  source 1..75: mol_type = other DNA
tgtactgggcctgccctggcgaagcgagaacaccgtcttacattatgggcaccacggtaggtatttgttcggtga

SEQ ID NO: 539050 - DNA, 75 bp, synthetic construct
  source 1..75: mol_type = other DNA
ccttactcaagtgggggccggagaaacaactggcgaagctggccgaggaagcagccgaactcagcgccgcagccg

SEQ ID NO: 539051 - DNA, 75 bp, synthetic construct
  source 1..75: mol_type = other DNA
agtgacctcgcggcagagctggcagacgtggaaatcatgacagagcagctgcgccttcaggggatggaccggctg

SEQ ID NO: 539052 - DNA, 75 bp, synthetic construct
  source 1..75: mol_type = other DNA
atggaaccaaaaaccaaaaaacagcgttcgctttatattccttacgctggccctgtactactggaatttccattg

SEQ ID NO: 539053 - DNA, 75 bp, synthetic construct
  source 1..75: mol_type = other DNA
ggatgccggagtccctcttgaggacgttctgcgatttaccgggctgtcagaagaagagttggctgcggcgagtca

SEQ ID NO: 539054 - DNA, 75 bp, synthetic construct
  source 1..75: mol_type = other DNA
gcaaggcagctttatgcctctgcatttccgctgattgatgtcaccgtcatgcctgatgatgaaatcatgcagcac

SEQ ID NO: 539055 - DNA, 75 bp, synthetic construct
  source 1..75: mol_type = other DNA
gaaaaccctcaagctggagtcgagcagctttattgatgacgatctgcgtgaaagctattccgacgtgctgtggtc

SEQ ID NO: 539056 - DNA, 75 bp, synthetic construct
  source 1..75: mol_type = other DNA
aagttgatgaatctgccagcgccgaatcctgaagcgccgcgtgaaggcgtagtggtaccccccggtaccggatca

SEQ ID NO: 539057 - DNA, 75 bp, synthetic construct
  source 1..75: mol_type = other DNA
gcactatacacccggtataaaaaaatgtcgtggtggttatcatgatcgggtatggggagaaaaaatggaacaaat

SEQ ID NO: 539058 - DNA, 75 bp, synthetic construct
  source 1..75: mol_type = other DNA
cacacgatgcgctgttcaaactctttttacgccaaccggacacggcacgcgattttcttgcgttccatttaccgg

SEQ ID NO: 539059 - DNA, 75 bp, synthetic construct
  source 1..75: mol_type = other DNA
cgcgccatgttctcgtgtacgacgcatcttcaagcgccaatggtccgcaatggtgtgtgttgaaaacaggcctgt

SEQ ID NO: 539060 - DNA, 75 bp, synthetic construct
  source 1..75: mol_type = other DNA
cggacatcacaggcggtaggcgttaacgggaaactggtcgagtatcgctatgatggcacggttaaaaccgtctca

SEQ ID NO: 539061 - DNA, 75 bp, synthetic construct
  source 1..75: mol_type = other DNA
catgagctgctgattatccaccttccgcgccatgttctcgtgtacgacgcatcttcaagcgccaatggtccgcaa

SEQ ID NO: 539062 - DNA, 75 bp, synthetic construct
  source 1..75: mol_type = other DNA
tgacattacgcgcttacgtgggcgttatgcgtggtcaaaagacggtactgattcatggtttatcactgaccttga

SEQ ID NO: 539063 - DNA, 75 bp, synthetic construct
  source 1..75: mol_type = other DNA
cacatggcgagacttcatagtctgctttggttcgtcgacgattgaatatttctccctgactggtgcaaccacagt

SEQ ID NO: 539064 - DNA, 75 bp, synthetic construct
  source 1..75: mol_type = other DNA
tcttcgctcattcccgggcattgccaaacgttctgatgtgaacggtgtatcgcgcggcgtcgagtacaacatggc

SEQ ID NO: 539065 - DNA, 75 bp, synthetic construct
  source 1..75: mol_type = other DNA
agagatcaccgattacgtgctgatgatgaaaatcgatgagcaaaacatgcagggcggaaattcgctgctgctgca

SEQ ID NO: 539066 - DNA, 75 bp, synthetic construct
  source 1..75: mol_type = other DNA
gagcgcgattccggtagaaaaggagaatcgtcttcctctgccaataaaaacactataccggcagctcctgctccg

SEQ ID NO: 539067 - DNA, 75 bp, synthetic construct
  source 1..75: mol_type = other DNA
cagcgtcagcaagaagagttattagccgagttttatgccagtgatgcacgttatctgcatccttcctggttgctg

SEQ ID NO: 539068 - DNA, 75 bp, synthetic construct
  source 1..75: mol_type = other DNA
cccgcgatagctggattgcacttctggaagaagctggcatgaacggcttcccacatgcggtttacctggatgcag

SEQ ID NO: 539069 - DNA, 75 bp, synthetic construct
  source 1..75: mol_type = other DNA
tgggcctgggtgatcagggtatcggcgggatgggcattccaatcggtaaactgtcgctctataccgcttgtggcg

SEQ ID NO: 539070 - DNA, 75 bp, synthetic construct
  source 1..75: mol_type = other DNA
cagtcatggcgacttagcttgggcaaatatgctggcaatcatcaacgagccacttggacgcgagaacggcagcgg

SEQ ID NO: 539071 - DNA, 75 bp, synthetic construct
  source 1..75: mol_type = other DNA
ggaatttgatcctgtagatgttatcattttacttgccgcaccagacaaacacagtcatatcgaaatgatatctgc

SEQ ID NO: 539072 - DNA, 75 bp, synthetic construct
  source 1..75: mol_type = other DNA
ggcactgtgaccacaattcactccgccatgcacgatcaacaggttattgatgcataccatcctgacctgcgtcgc

SEQ ID NO: 539073 - DNA, 75 bp, synthetic construct
  source 1..75: mol_type = other DNA
aattaactgaaatgcagggcggattttgtgcctattgcgagtgccggttgaacagatgtcatattgagcatttca

SEQ ID NO: 539074 - DNA, 75 bp, synthetic construct
  source 1..75: mol_type = other DNA
gctgcgtatgacatagaagcagaaagtgacccatataagaggcagctgataaatcagcatttttcgagcgcatat

SEQ ID NO: 539075 - DNA, 75 bp, synthetic construct
  source 1..75: mol_type = other DNA
tcagcaaccggtgtgattcgtcgccatccggatattaaatggttacgccgcgatcgcgatatcccagaactcgcg

SEQ ID NO: 539076 - DNA, 75 bp, synthetic construct
  source 1..75: mol_type = other DNA
acaggaacaccagagcaaccgggtaaacaaaatctgcccgacgccgaagaaggtgacggcttcttttacgctaag

SEQ ID NO: 539077 - DNA, 75 bp, synthetic construct
  source 1..75: mol_type = other DNA
gcgactgcgttacggtgaaagaggcgactgacgccctgctgcattgtgcggaacagcttcacaagggagtgcatt

SEQ ID NO: 539078 - DNA, 75 bp, synthetic construct
  source 1..75: mol_type = other DNA
tgtttatcgtgttcagattgtttggtcgtgaatggtcgtttgacctcaaggacagaggccgtgaagacaatcaca

SEQ ID NO: 539079 - DNA, 75 bp, synthetic construct
  source 1..75: mol_type = other DNA
atgatcacttatgtgacctgtgatgacgttgataatgcgcttgggaatgcctgggcgagcgagaacgctaaaaat

SEQ ID NO: 539080 - DNA, 75 bp, synthetic construct
  source 1..75: mol_type = other DNA
gtaaagctcgctggagcatatgcagccagagtcgcttctgtaggtaagttatttcagcagaaaaatgattctggt

SEQ ID NO: 539081 - DNA, 75 bp, synthetic construct
  source 1..75: mol_type = other DNA
gcagactcaccggctggttccgctctccgacacctggtacgtcagccagctgcagacgatggtggccacactgaa

SEQ ID NO: 539082 - DNA, 75 bp, synthetic construct
  source 1..75: mol_type = other DNA
cggatcagcgtcaccatatgctgttcgcccccctctggaataccggaatgcgtattggcgaagcctggatggagt

SEQ ID NO: 539083 - DNA, 75 bp, synthetic construct
  source 1..75: mol_type = other DNA
tgcttgttgtctttaaactgttcggtcgtacatggacgcttgaccttaaggataacgaccacacagaaccccgct

SEQ ID NO: 539084 - DNA, 75 bp, synthetic construct
  source 1..75: mol_type = other DNA
atttaaaccctggccggggcgtttgcagtgtttgattggccatctggcggagaatgaagtcagaggggagttaac

SEQ ID NO: 539085 - DNA, 75 bp, synthetic construct
  source 1..75: mol_type = other DNA
atgaaaacagatttacagcataaactcagtcaggcgcttctcagaggaaatcctgtcagttccccgttatccgat

SEQ ID NO: 539086 - DNA, 75 bp, synthetic construct
  source 1..75: mol_type = other DNA
aaatacgcgctatcagatcctctctgagttgtggcaggagacacaggatgagcgttttttccgtatccatgtgtt

SEQ ID NO: 539087 - DNA, 75 bp, synthetic construct
  source 1..75: mol_type = other DNA
cagagaagctagaaaaaattcttgaagaaaaagcaaaggaagagtgtcgctcattcagcgcagaagtaattaaac

SEQ ID NO: 539088 - DNA, 75 bp, synthetic construct
  source 1..75: mol_type = other DNA
ctgacggggggatatcagcccggtatgtcgccggtattgaatgatacccagtttatgacatggatgaaactgatg

SEQ ID NO: 539089 - DNA, 75 bp, synthetic construct
  source 1..75: mol_type = other DNA
ggtcaataaaggcagacgcagcacaaagccggaattgcctgcgccggtggagagtgagggtgatacaacaaccgc

SEQ ID NO: 539090 - DNA, 75 bp, synthetic construct
  source 1..75: mol_type = other DNA
atggcacaggttgcgattattaccgcctccgattcggggatcggcaaagagtgcgcgttattactggcgcagcag

SEQ ID NO: 539091 - DNA, 75 bp, synthetic construct
  source 1..75: mol_type = other DNA
atgcctcaacctggcggcggcgaatcacaagcgtccggtttgacgctggtttcggtcgcagtgctggcccgcgcc

SEQ ID NO: 539092 - DNA, 75 bp, synthetic construct
  source 1..75: mol_type = other DNA
ttcagcgtgacatcattctgtgggccgtacgctggtactgcaaatttgcagcacacgcagcaactggtgctcggt

SEQ ID NO: 539093 - DNA, 75 bp, synthetic construct
  source 1..75: mol_type = other DNA
tgacgaaagagctattttcgatatactcgtcgatggtagacagaatgtagaggcagatagatatatattatcctt

SEQ ID NO: 539094 - DNA, 75 bp, synthetic construct
  source 1..75: mol_type = other DNA
ccaggctactacacctggtctgattttttgcaacggcgcattgccccagccatgcgaacctgccgttctgtgaaa

SEQ ID NO: 539095 - DNA, 75 bp, synthetic construct
  source 1..75: mol_type = other DNA
tcttcaacatacgggatgaggttcccgatgacattctcaagagtccttgctgtcacagttacattgaacgttact

SEQ ID NO: 539096 - DNA, 75 bp, synthetic construct
  source 1..75: mol_type = other DNA
atttaatattacggtgtcgcccggttcaggatatggttcatctgctgatgcgtattacattgcaatgggatatta

SEQ ID NO: 539097 - DNA, 75 bp, synthetic construct
  source 1..75: mol_type = other DNA
gtggacgtgctgacttttacgggccgggaacaactcagcgcgcccttccgctacgacattgaatttaccagtacc

SEQ ID NO: 539098 - DNA, 75 bp, synthetic construct
  source 1..75: mol_type = other DNA
gcgcctggggcgatcgccacgccaatgaatggcatggatgacagcgacgtgaagcccgacgcggagccttcgatt

SEQ ID NO: 539099 - DNA, 75 bp, synthetic construct
  source 1..75: mol_type = other DNA
tccgaaggcgccaattacaccaccgggcagtcgctgattgtcgatggcggttttatgctggcaaatccgcagttt

SEQ ID NO: 539100 - DNA, 75 bp, synthetic construct
  source 1..75: mol_type = other DNA
aaatcatcctgaatattttattcctgttaatgaatggaaagttattccaaccaaaaacggaaatattattgaggt

SEQ ID NO: 539101 - DNA, 75 bp, synthetic construct
  source 1..75: mol_type = other DNA
ttggtattttgtatcagattgatggtgacgatgtttattacctggacgacaaggctatggaatggcgaatatgtt

SEQ ID NO: 539102 - DNA, 75 bp, synthetic construct
  source 1..75: mol_type = other DNA
gctctgacacctgtataggtaaacgccttcacaaagcggaggggattgttgaaggcatgctgatgatgctgggag

SEQ ID NO: 539103 - DNA, 75 bp, synthetic construct
  source 1..75: mol_type = other DNA
cagcctgaaacctcatctgagattaattcttcatcagaaatggatggcgatcaagagagtaaagatgctttttcg

SEQ ID NO: 539104 - DNA, 75 bp, synthetic construct
  source 1..75: mol_type = other DNA
atgcgcagtaagtatatcgtcattgaagggctggaaggtgcaggcaaaactaccgcgcgtaacgtggtggtcgag

SEQ ID NO: 539105 - DNA, 75 bp, synthetic construct
  source 1..75: mol_type = other DNA
gaactggcagcacaagataaaagcattcataccattgatgccacccagccgctggaggccgtgatggatgcaatc

SEQ ID NO: 539106 - DNA, 75 bp, synthetic construct
  source 1..75: mol_type = other DNA
agaagcctggtgctggatatcaaatcggtaggcgacgaagttattactgataaagccgaagtgctgatgttttat

SEQ ID NO: 539107 - DNA, 75 bp, synthetic construct
  source 1..75: mol_type = other DNA
ggctgaagttgatgagcaggccatgaaagaaggcgtgccccagtttgtgatggcgtatatcgacattcgcctggg

SEQ ID NO: 539108 - DNA, 75 bp, synthetic construct
  source 1..75: mol_type = other DNA
ttcacactattgatgcaacacaatcgctggaagccgtcatggacgcgattcgcaccaccgtgactcactgggtta

SEQ ID NO: 539109 - DNA, 75 bp, synthetic construct
  source 1..75: mol_type = other DNA
cccagaagtcggccttaagcgcgcacgtgcgcgtggcgagctggatcgcattgagcaagagtcttttgatttctt

SEQ ID NO: 539110 - DNA, 75 bp, synthetic construct
  source 1..75: mol_type = other DNA
agcttacaaggagaacttgagttctggtgggagagtatctggtctccgttctggcacagtctatcacctgatgaa

SEQ ID NO: 539111 - DNA, 75 bp, synthetic construct
  source 1..75: mol_type = other DNA
gccctgaaactgacagaagaggccgcagaactggcggccagtgctgcccgcaatctgaacggacagggcagcgaa

SEQ ID NO: 539112 - DNA, 75 bp, synthetic construct
  source 1..75: mol_type = other DNA
atgaagtgaaaattgaaactcagggcgcggacggtatccagaatcgcctgacggcgcaggatatcgccgaagcga

SEQ ID NO: 539113 - DNA, 75 bp, synthetic construct
  source 1..75: mol_type = other DNA
ggcaataacccattgctggtccagagttggttagataccggagatgataacgccgaacctggcagtatcaatgtc

SEQ ID NO: 539114 - DNA, 75 bp, synthetic construct
  source 1..75: mol_type = other DNA
cctgtaacatcgtaacaggcatcatgatcggcttcgcgactctggtgattggtcgtctggtttccggcgaatggc

SEQ ID NO: 539115 - DNA, 75 bp, synthetic construct
  source 1..75: mol_type = other DNA
tggggcaacatattagcgtacctgtcgcgctgggtgccgtgttcctgatgggtgtgctgtttacgataatttctg

SEQ ID NO: 539116 - DNA, 75 bp, synthetic construct
  source 1..75: mol_type = other DNA
tgtaatatcactgaacatgttctgcgctacctgattgttgaccggacggcagcgcctgccggggtatctgcggag

SEQ ID NO: 539117 - DNA, 75 bp, synthetic construct
  source 1..75: mol_type = other DNA
gggttaaaaactggctgcgtttttctggccgtctgaccagccgttctctggcagaaaaaatgaatatgccgctat

SEQ ID NO: 539118 - DNA, 75 bp, synthetic construct
  source 1..75: mol_type = other DNA
cgcgcccgcgtccgacgccgcctgtaagacgaaacgcaactgagcagcctgctgttgatgatgcggtgtggtgca

SEQ ID NO: 539119 - DNA, 75 bp, synthetic construct
  source 1..75: mol_type = other DNA
acaacgtgtctataacgaaaacggcaaacgggttgatgccatcgtgatgatggatggtaacgttggtcagcagta

SEQ ID NO: 539120 - DNA, 75 bp, synthetic construct
  source 1..75: mol_type = other DNA
aaatatgtaagggattttttttttgtttctcctggcgagtttcgtcagattggaacgaatgcatcccgcacaata

SEQ ID NO: 539121 - DNA, 75 bp, synthetic construct
  source 1..75: mol_type = other DNA
gcgaagcactccttgatgcactgcgtgatgatgtctccgccgggtaccagcgcaaccagatatttttgtccgcat

SEQ ID NO: 539122 - DNA, 75 bp, synthetic construct
  source 1..75: mol_type = other DNA
tgtcatcatctgcggtttaagcggctggaatatcaccgcgcgtgttctgcgctacctgattgttgaccggacggc

SEQ ID NO: 539123 - DNA, 75 bp, synthetic construct
  source 1..75: mol_type = other DNA
cagcattatgcttcgcaacctgtgtagcttttagctcgtcagctatagcagatatcgtaatttccggtacacgcg

SEQ ID NO: 539124 - DNA, 75 bp, synthetic construct
  source 1..75: mol_type = other DNA
aaacctgatttctgtaaactcgcctattgctcgtggcctgatcggcaaagaagaagatgatgttgtggtcatcaa

SEQ ID NO: 539125 - DNA, 75 bp, synthetic construct
  source 1..75: mol_type = other DNA
gctgttgatgatgcggtgtggtgcaactggcgtcgctcattaccctgggtggaaggtaataccatccccgcactg

SEQ ID NO: 539126 - DNA, 75 bp, synthetic construct
  source 1..75: mol_type = other DNA
tatcgccagtaactttggccgttatgctggcgcaagtccatttactacctttaatggtcgttattatggtgatca

SEQ ID NO: 539127 - DNA, 75 bp, synthetic construct
  source 1..75: mol_type = other DNA
cgcacactctgatttcgaatctattcgtgcggttgttcgcccggcctatatttgggaccaatataaccagacagg

SEQ ID NO: 539128 - DNA, 75 bp, synthetic construct
  source 1..75: mol_type = other DNA
ctctgccgcgacggcacagagctacaccggcgatctgtacatggatgaagccttctggatcagcaacttcatcaa

SEQ ID NO: 539129 - DNA, 75 bp, synthetic construct
  source 1..75: mol_type = other DNA
atgatgccctcaaagaatggctaaaactggataagtctgttcagcagcagttcgcaaaaaaactaaaaaaatgca

SEQ ID NO: 539130 - DNA, 75 bp, synthetic construct
  source 1..75: mol_type = other DNA
actggataaatccattcagcagcagttcgcgaaaaaactaaagaaatgcagcgaaaatcctcatattccttctgc

SEQ ID NO: 539131 - DNA, 75 bp, synthetic construct
  source 1..75: mol_type = other DNA
gctacagacttgtataccaagtcattgatgagaaagtcgttttactcgttattgccgttggaagaagggaaagca

SEQ ID NO: 539132 - DNA, 75 bp, synthetic construct
  source 1..75: mol_type = other DNA
ctaccgcgctggtggtgaataaagacaataaagtagagcagcgcacgctcgaaacgggagaaacctacggtgata

SEQ ID NO: 539133 - DNA, 75 bp, synthetic construct
  source 1..75: mol_type = other DNA
tctgcgcaaacagtcgctggcaaccaacagcgataccatgagcgtctcacttatcctggaagatggtacaacgta

SEQ ID NO: 539134 - DNA, 75 bp, synthetic construct
  source 1..75: mol_type = other DNA
atgacttacacagtcaaattcagggatgatgcgctgaaagagtggcaaaaactggataaggctattcagcagcag

SEQ ID NO: 539135 - DNA, 75 bp, synthetic construct
  source 1..75: mol_type = other DNA
aaaaaagaagatatgtcgatgcaggcgattcgtcactggggcgaaacacacagtgaagctgaggttcgcgagctg

SEQ ID NO: 539136 - DNA, 75 bp, synthetic construct
  source 1..75: mol_type = other DNA
ggggtacttccgctcaggctggggtactggtaatcacggctcaccacaaacttatgcagcgggttctctgggacg

SEQ ID NO: 539137 - DNA, 75 bp, synthetic construct
  source 1..75: mol_type = other DNA
catactataaatggatcgcagcaagttgccgttattgaaagtaaaggcgacaaaaccactatcgaaagcgtgacc

SEQ ID NO: 539138 - DNA, 75 bp, synthetic construct
  source 1..75: mol_type = other DNA
ctttaactacaacgccatgatcggctgctgcgttgacggcttcaacgatgatgtatggcccgactggaacccatt

SEQ ID NO: 539139 - DNA, 75 bp, synthetic construct
  source 1..75: mol_type = other DNA
gtgaaaatcctcatatagcttctgcaaaactacgtggattaaaggactgctataaaatcaaacttcgcgcatcag

SEQ ID NO: 539140 - DNA, 75 bp, synthetic construct
  source 1..75: mol_type = other DNA
ccagatctgcgtcgtgaactgatgcgtcagcgtggctacttcgcctacgccactcaccactaccagacgcatcag

SEQ ID NO: 539141 - DNA, 75 bp, synthetic construct
  source 1..75: mol_type = other DNA
atgacttatacgataaaattcagggatgatgcgcttaaagaatggctgaaactggataagaccattcaacaacag

SEQ ID NO: 539142 - DNA, 75 bp, synthetic construct
  source 1..75: mol_type = other DNA
cagcagccagtatgggcttcaacaggaacacctgctgtttactccactgttcaaagcggataacgccagatgctt

SEQ ID NO: 539143 - DNA, 75 bp, synthetic construct
  source 1..75: mol_type = other DNA
aatgtcggcttcaaattgcgcgttatcactaagtcacctgtcactctctcaggctgccagataaggattgagtaa

SEQ ID NO: 539144 - DNA, 75 bp, synthetic construct
  source 1..75: mol_type = other DNA
ttggtgctgctttgtatgtcgcacagccatcactgatggtgcagaaaggcattgccgggacttactgcaaaacgc

SEQ ID NO: 539145 - DNA, 75 bp, synthetic construct
  source 1..75: mol_type = other DNA
cgcgccatgttctcgtgtacgacgcatcttcaagcgccaatggtccgcaatggtgtgtgctgaaaacaggcttgt

SEQ ID NO: 539146 - DNA, 75 bp, synthetic construct
  source 1..75: mol_type = other DNA
acgtgcggcgataagctggaatccgtgaccgggaaattgcagttcgacatcagcagccagtacgacaagcaacag

SEQ ID NO: 539147 - DNA, 75 bp, synthetic construct
  source 1..75: mol_type = other DNA
tgatggcacggttaaaaccgtctcaaactggcctacagacagtggattcacgcagtatgagttaggttcagttcg

SEQ ID NO: 539148 - DNA, 75 bp, synthetic construct
  source 1..75: mol_type = other DNA
tcagacggtaccgctgggtattgcggtggcgctggagttcaccggaccactggcggtggcactgttctcttctcg

SEQ ID NO: 539149 - DNA, 75 bp, synthetic construct
  source 1..75: mol_type = other DNA
gctgcattttcttggcacgtcagcggctaccgctcagtcatacacgggcaacctgtatttcgacgaattcttttg

SEQ ID NO: 539150 - DNA, 75 bp, synthetic construct
  source 1..75: mol_type = other DNA
ctgaaagcgccaaataccctcactggcgataaccagacctccgtgcgtccaaacaatattgaatacatgcactat

SEQ ID NO: 539151 - DNA, 75 bp, synthetic construct
  source 1..75: mol_type = other DNA
ctggctgattgtaccgcgcaggaccttaaccgtaccgaactgttcctcgtggaaggtgactccgcaggcggatct

SEQ ID NO: 539152 - DNA, 75 bp, synthetic construct
  source 1..75: mol_type = other DNA
tcacgtttacgtcgcactgccaccgctctaccgtattgatctcgggaaagaggtttattacgcgctgacggaaga

SEQ ID NO: 539153 - DNA, 75 bp, synthetic construct
  source 1..75: mol_type = other DNA
ttctcgttctggcaaggcgcaactaatggtctgcggcggttctctgctctgctggctggcgacacgtcgtggcta

SEQ ID NO: 539154 - DNA, 75 bp, synthetic construct
  source 1..75: mol_type = other DNA
aagagcgtctctcttcgcgtcagtgcgcggcattcgtttcgggcgtggtgaaagatgccttcatcctgtggctga

SEQ ID NO: 539155 - DNA, 75 bp, synthetic construct
  source 1..75: mol_type = other DNA
taagcattcagataaagttaacagtcatcaacaccatggcaaggttgataaaaaacatcgtgcaaagatagttga

SEQ ID NO: 539156 - DNA, 75 bp, synthetic construct
  source 1..75: mol_type = other DNA
acactcaaaggtgaagaccccagcaaatacattagacaaaaatatgggcatcatgggcccggggtagatcataat

SEQ ID NO: 539157 - DNA, 75 bp, synthetic construct
  source 1..75: mol_type = other DNA
caaagggtggaaatttactgtcagcgttcgaactttaccaacgtaatactgataatatgcctggtctgggtgaaa

SEQ ID NO: 539158 - DNA, 75 bp, synthetic construct
  source 1..75: mol_type = other DNA
tgatacccgcaatatgcgccagtttggcattgatgcctggcagatggaaggtgccgacaactatggtaacgtgca

SEQ ID NO: 539159 - DNA, 75 bp, synthetic construct
  source 1..75: mol_type = other DNA
atgacccagatgaatgaaattcttgaaggaacgcgacagccttcacggacttttgaaattgatgctatgaaaatc

SEQ ID NO: 539160 - DNA, 75 bp, synthetic construct
  source 1..75: mol_type = other DNA
taaatcagacataatttataaagttaatgggctttctatcatacctgaaaatttctttactcttcttagcggtaa

SEQ ID NO: 539161 - DNA, 75 bp, synthetic construct
  source 1..75: mol_type = other DNA
cgaaatgctgccaaccactgaacttcactggtggcgtacctctgtggaaggcaaacaggagcattatttcactac

SEQ ID NO: 539162 - DNA, 75 bp, synthetic construct
  source 1..75: mol_type = other DNA
ttcgacgattgtcgatatgaaactgcatatgccgcattgccaggacccggcgaaacgcgagttcacccagttgct

SEQ ID NO: 539163 - DNA, 75 bp, synthetic construct
  source 1..75: mol_type = other DNA
gagcattctccagccattacgcccgcagtaaatacgccgctgagcaggctattgccagggcagtagctcaatatc

SEQ ID NO: 539164 - DNA, 75 bp, synthetic construct
  source 1..75: mol_type = other DNA
gacgtggtgcctggcgatgaagtggtggtggaagtagaaggcgtgggccgcctggtgaaccgaattgtgagtgag

SEQ ID NO: 539165 - DNA, 75 bp, synthetic construct
  source 1..75: mol_type = other DNA
gaagcggagctggtggtagttattggcaaacaggcgcgtaacgtcagcgaagccgatgccatggattatgtcgcg

SEQ ID NO: 539166 - DNA, 75 bp, synthetic construct
  source 1..75: mol_type = other DNA
cgaggtttcactggcctaccgcaaaattgagtgggaacacgtcaaatcaggcacctccggcgccgatgactggcg

SEQ ID NO: 539167 - DNA, 75 bp, synthetic construct
  source 1..75: mol_type = other DNA
cctgcaggcccgtcggtggtgctatgcgcggcactgttatttattatcagtatgatgaaaaaacaggccagctaa

SEQ ID NO: 539168 - DNA, 75 bp, synthetic construct
  source 1..75: mol_type = other DNA
tggtttgccagcctttcgacttaattatctgtaagaaacctgtatcattcaggaaaaatacggttttacttctgg

SEQ ID NO: 539169 - DNA, 75 bp, synthetic construct
  source 1..75: mol_type = other DNA
agtgtggctacaacagtacgtcatatttcatctcagcgtttaaggattattatgggatgacaccattacactatt

SEQ ID NO: 539170 - DNA, 75 bp, synthetic construct
  source 1..75: mol_type = other DNA
gtcagatctataacattgcctttgaaaatggtgaaaaggtacaggatctgcaggttgtcggtacttgcggtaaac

SEQ ID NO: 539171 - DNA, 75 bp, synthetic construct
  source 1..75: mol_type = other DNA
ccgaacagcgctggtgctatcaggacggtctgaatgattacctggcggaagcggtaaatggtctgccgacgctgc

SEQ ID NO: 539172 - DNA, 75 bp, synthetic construct
  source 1..75: mol_type = other DNA
ggcggtacccatgttaatggcctgcgtcagggcctgttggacgcgatgcgtgagttctgtgaataccgcaacatt

SEQ ID NO: 539173 - DNA, 75 bp, synthetic construct
  source 1..75: mol_type = other DNA
ctattggggcttgtggttcggctatcgcgtctttgggggcgttgtgttatgcacgcaaggcgttaaacacatgga

SEQ ID NO: 539174 - DNA, 75 bp, synthetic construct
  source 1..75: mol_type = other DNA
gccgtgtttctcgcaagtcaggcatcgaattatgtcaacgggcatttattagtggtcgatggcggttatttagtg

SEQ ID NO: 539175 - DNA, 75 bp, synthetic construct
  source 1..75: mol_type = other DNA
cggtgattgcggttacgctgctgcttgcgggtggtctggtatggctggaaaagcgcccacaactagcgatcgaca

SEQ ID NO: 539176 - DNA, 75 bp, synthetic construct
  source 1..75: mol_type = other DNA
ttgctggacgttaatccattctatgcggtgattgcggttacgctgctgcttgcgggtggtctggtatggctggaa

SEQ ID NO: 539177 - DNA, 75 bp, synthetic construct
  source 1..75: mol_type = other DNA
accagaacgttcaggcggcggagctgctggcggagatggcgatttccagcgcccagcgtcgtatgcgtgcggcta

SEQ ID NO: 539178 - DNA, 75 bp, synthetic construct
  source 1..75: mol_type = other DNA
ctgaccgccgcattcgagttaagctatgaagctgcaaaaattatgatcccgcagaaaagcggcaaattattaata

SEQ ID NO: 539179 - DNA, 75 bp, synthetic construct
  source 1..75: mol_type = other DNA
cgcaaatatctttattccaagcttcgtcaaagataacggcgaaacaaaggaaatgattgaaaaacagggtgttga

SEQ ID NO: 539180 - DNA, 75 bp, synthetic construct
  source 1..75: mol_type = other DNA
ggtgcaaaaaggcatcgccgggacttactgcaaaacgccgtttgctgattcgtatgcgttcatcagcaatccggc

SEQ ID NO: 539181 - DNA, 75 bp, synthetic construct
  source 1..75: mol_type = other DNA
aacatggcgagacttcatcgtctgctttggctcatcgacgattgaatatttctccctgacgggtgcaaccaccgt

SEQ ID NO: 539182 - DNA, 75 bp, synthetic construct
  source 1..75: mol_type = other DNA
ggtggcaagctgtacaaaggagaaagcgaagtcggtaatgttgccggaagtggtcgcgtatcaatggcgcatggt

SEQ ID NO: 539183 - DNA, 75 bp, synthetic construct
  source 1..75: mol_type = other DNA
ttgcagttcgatatcagcagccagtatgggcttcaacaggaacacctgctgtttactccgttgttcaaagcggat

SEQ ID NO: 539184 - DNA, 75 bp, synthetic construct
  source 1..75: mol_type = other DNA
acgggaaactggtcgagtatcgctatgatggcacggttaaaacagtctcaaactggcctgcggacagcggattca

SEQ ID NO: 539185 - DNA, 75 bp, synthetic construct
  source 1..75: mol_type = other DNA
atgcctattcagcaacttccgcttatgaaaggtgtcggcaaagacttccgaaacgccgactatatcgactatctg

SEQ ID NO: 539186 - DNA, 75 bp, synthetic construct
  source 1..75: mol_type = other DNA
tgaccgggaaattgcaattcgacatcagcagccagtacgacaagcaacaggaacacctgctgtttactccactgt

SEQ ID NO: 539187 - DNA, 75 bp, synthetic construct
  source 1..75: mol_type = other DNA
aggaaaaatgtcggcttcaaattgcgcgttatcacgaagtcacctgtcactctgtctggctgccagataaggatc

SEQ ID NO: 539188 - DNA, 75 bp, synthetic construct
  source 1..75: mol_type = other DNA
cagtcatggcgatctcgcatgggcgacgatgcttgccaccattaacgaaccgctgggacaagaaggcggcagcag

SEQ ID NO: 539189 - DNA, 75 bp, synthetic construct
  source 1..75: mol_type = other DNA
cgcaatacgaccttggttctgttcgtgacatcactcgcttgcgtggtcggtacgcgtggtcgaaagatggttcag

SEQ ID NO: 539190 - DNA, 75 bp, synthetic construct
  source 1..75: mol_type = other DNA
cgcgcggcgtcgagtacaacatggcgcagaatgctgtttatcgcgtgtgtggtggcaagctgtacaaaggagaaa

SEQ ID NO: 539191 - DNA, 75 bp, synthetic construct
  source 1..75: mol_type = other DNA
ctgctgatgaactggctgatggcgtgatggaatcgttgcggtttgatgcgcatgagttgctgattatccatcttc

SEQ ID NO: 539192 - DNA, 75 bp, synthetic construct
  source 1..75: mol_type = other DNA
cacagtacgagttaggctcagtccgcgacattacgcgcttacgtggccgttatgcgtggtcaaaagacggcaccg

SEQ ID NO: 539193 - DNA, 75 bp, synthetic construct
  source 1..75: mol_type = other DNA
tattctccagtacggtaaaacaaaaacatagtgttgttcgactctttttaattaaagcaaccccgataaaatctg

SEQ ID NO: 539194 - DNA, 75 bp, synthetic construct
  source 1..75: mol_type = other DNA
ttacatctttatctgaaagtcttgacaaagaggcacagtctaaagccaaaaataaagatgtcgttaaagttttta

SEQ ID NO: 539195 - DNA, 75 bp, synthetic construct
  source 1..75: mol_type = other DNA
ttacatctttatcagaaagtcttgataaagaggcacagtctaaagccaaaaataaagatgttgttaaggtcttta

SEQ ID NO: 539196 - DNA, 75 bp, synthetic construct
  source 1..75: mol_type = other DNA
tggtggcaagctgtataagggcgaaagcgaagtcggtgacgtcgccggaagtggccgcgtatcaatggcgcatgg

SEQ ID NO: 539197 - DNA, 75 bp, synthetic construct
  source 1..75: mol_type = other DNA
taaagaagcacagtctaaagcaaaaaataaagatgtcgttagagtatttaaattaaactatgcatcagcgacaga

SEQ ID NO: 539198 - DNA, 75 bp, synthetic construct
  source 1..75: mol_type = other DNA
tccggtacgtgcaatcctcaatgattttgccgctaattatagcatccctgttttcatcagtaattctgtgaatga

SEQ ID NO: 539199 - DNA, 75 bp, synthetic construct
  source 1..75: mol_type = other DNA
atgctgatacccagcgtacaggcggcaaagccgcaaaaagtgacgctgatggtggatgacgttccggtagctcag

SEQ ID NO: 539200 - DNA, 75 bp, synthetic construct
  source 1..75: mol_type = other DNA
gacgctggccgatgcgcaacacgctggtggcgttgggcaagtcaccacgcttggtagcgacctctccgtagcgac

SEQ ID NO: 539201 - DNA, 75 bp, synthetic construct
  source 1..75: mol_type = other DNA
atcttcagccagccagtatcaaacaagggagtgaaattccgtatcaggtctccagtggcgaaagcggtgcaacgt

SEQ ID NO: 539202 - DNA, 75 bp, synthetic construct
  source 1..75: mol_type = other DNA
tattctccagtacaacaaaacaaaaacacagcgttgttcgactctttttgattaaagcgaccccgataaaatcag

SEQ ID NO: 539203 - DNA, 75 bp, synthetic construct
  source 1..75: mol_type = other DNA
gccggggatcgcggtggcgctgacgttaatggatgatattgcgcacctgaagcaggaaaaccgcctgctgcgcca

SEQ ID NO: 539204 - DNA, 75 bp, synthetic construct
  source 1..75: mol_type = other DNA
gtcgaggtcaaaagcggagaaacgttggcgctgggcggcatttttacccgtaaaaataaatcgggtcaggatagc

SEQ ID NO: 539205 - DNA, 75 bp, synthetic construct
  source 1..75: mol_type = other DNA
tggcaagtgatggcgctaacgctactgctgggaacgcctacgcttggctttctcggtgcaccgggcgtggcgctg

SEQ ID NO: 539206 - DNA, 75 bp, synthetic construct
  source 1..75: mol_type = other DNA
gggcatgaatcgcgagcagcttctggagcagtatgctgatgcggatatggcaacagagggtgacgcatccgcagc

SEQ ID NO: 539207 - DNA, 75 bp, synthetic construct
  source 1..75: mol_type = other DNA
cggaatggatgtgtcaccgtgggagggcgtggctgacgcaacgatcgaaggtgcagcctttggtgctgcgatggg

SEQ ID NO: 539208 - DNA, 75 bp, synthetic construct
  source 1..75: mol_type = other DNA
gagcagggaaggagcgacggcaaactgaaagggctggataacttatccgcactggctgtggtgaaagacagccgt

SEQ ID NO: 539209 - DNA, 75 bp, synthetic construct
  source 1..75: mol_type = other DNA
cgcatgctgaaacaacagctcatgagtctgaaacagttgctgctactgatggtgaaggtgccgcacgcggaggtg

SEQ ID NO: 539210 - DNA, 75 bp, synthetic construct
  source 1..75: mol_type = other DNA
tgcgcccggacaaccgttatttcacggatgagaaaagcgccatggggagtgatgttttccgtaatgccgccgcta

SEQ ID NO: 539211 - DNA, 75 bp, synthetic construct
  source 1..75: mol_type = other DNA
ttatgactcgctgcatgaccttgctgaagtactgaatgtaccgacaaaagcgctttccctgaacggtcgtcttgg

SEQ ID NO: 539212 - DNA, 75 bp, synthetic construct
  source 1..75: mol_type = other DNA
gtccattgacgccgacccgcagcacgcacagcttactgatcgccagaaaatggatctggcaaaagagcgtgttgc

SEQ ID NO: 539213 - DNA, 75 bp, synthetic construct
  source 1..75: mol_type = other DNA
cggacgtggtggtcgttttaccacaaccggtgaggttaagggccagagtttccagaaaggacgtgctccggcacc

SEQ ID NO: 539214 - DNA, 75 bp, synthetic construct
  source 1..75: mol_type = other DNA
caacgccagaagcgtacaaggcgtttgcatcctggctgaatgcgttctctggtggcagccagtaccgtcccggcg

SEQ ID NO: 539215 - DNA, 75 bp, synthetic construct
  source 1..75: mol_type = other DNA
tcagggaacggcaaatctggtgagaacgctcggacatcttaatggtgagggacctttactggagcgccttcgctg

SEQ ID NO: 539216 - DNA, 75 bp, synthetic construct
  source 1..75: mol_type = other DNA
aaacatcgggcgtacgccgccggtattgcgtcaccttggcgcaccggatttgccgctggttatctcccgcgatac

SEQ ID NO: 539217 - DNA, 75 bp, synthetic construct
  source 1..75: mol_type = other DNA
tgtttaatctcagagacagaaatggtgatccagtaataagtgcagtgcacttaaaggccattaaaaatgggctgg

SEQ ID NO: 539218 - DNA, 75 bp, synthetic construct
  source 1..75: mol_type = other DNA
ggcggaaatcatgcagcgtgtgcgtaacagcggcaaacaggcacagtatgaccgtctggcagggattattgacga

SEQ ID NO: 539219 - DNA, 75 bp, synthetic construct
  source 1..75: mol_type = other DNA
acagggggcgattaatgcggcgcagggcggctattcacgctatcaggaaaacacggcattgcgtgagaccgccgg

SEQ ID NO: 539220 - DNA, 75 bp, synthetic construct
  source 1..75: mol_type = other DNA
aacgccaccaaccgcgaccgtaccggaccagaacgccgcaagggggatgtttcaccggagcagttcagtgatgcg

SEQ ID NO: 539221 - DNA, 75 bp, synthetic construct
  source 1..75: mol_type = other DNA
ggcaatcaacctgacaaaaggtaacggaccgggtgcgctggcgcacgaatggttccattcactggataattattt

SEQ ID NO: 539222 - DNA, 75 bp, synthetic construct
  source 1..75: mol_type = other DNA
gacggcagtcttgaacaattgatgttgttgccgttacccttgcccgtcgttgtgctggcgaaggtgatggcgcac

SEQ ID NO: 539223 - DNA, 75 bp, synthetic construct
  source 1..75: mol_type = other DNA
tgctgctcagcattctggtgctaccgctgaccatcccattactcatctttgccactgcggcaatggacgcggctt

SEQ ID NO: 539224 - DNA, 75 bp, synthetic construct
  source 1..75: mol_type = other DNA
ctgaagcgcaatttggtaaccagaaccgtaacagcctgaacattcagcagcctggcgagacagacagctatgatg

SEQ ID NO: 539225 - DNA, 75 bp, synthetic construct
  source 1..75: mol_type = other DNA
aagacggcaggtatgttgatgctgaatatccggtacgtcaggaggtttacgacgcttttaaaggtgtgattcagg

SEQ ID NO: 539226 - DNA, 75 bp, synthetic construct
  source 1..75: mol_type = other DNA
gatgtgcttcgccctcagcaggaggccagaccggaggcacagtcacagcctgaaagtgcggaggatggcaacggg

SEQ ID NO: 539227 - DNA, 75 bp, synthetic construct
  source 1..75: mol_type = other DNA
ggcagccagtaccgctcaggcgcggtggatgtcacgccggaatcactgaaatactggattgactatatctctggt

SEQ ID NO: 539228 - DNA, 75 bp, synthetic construct
  source 1..75: mol_type = other DNA
tgaagagcagcagttacaggctatccgtgatgtgcttcgccctcagcaggaggccagaccggaggcacagccaca

SEQ ID NO: 539229 - DNA, 75 bp, synthetic construct
  source 1..75: mol_type = other DNA
aaaattgaagactttggtgaagaaattaagggcgcggcaaaacaccgttatgcacagcttgccgaaacactgggt

SEQ ID NO: 539230 - DNA, 75 bp, synthetic construct
  source 1..75: mol_type = other DNA
aagggcggatggaaaggccagagtatcggtgcatggcattcgttcctgaacctggtcgaggatgccaacggcgcg

SEQ ID NO: 539231 - DNA, 75 bp, synthetic construct
  source 1..75: mol_type = other DNA
aacaaatggtgggcagttactgacgatagggaagaaccggcatcgaaagtaacccactggatgccgctaccggag

SEQ ID NO: 539232 - DNA, 75 bp, synthetic construct
  source 1..75: mol_type = other DNA
gaacagataacccgctgcgccgtttgtgtgtgtgatcccaaacataagaacggcaatgatagtcgctatcaggct

SEQ ID NO: 539233 - DNA, 75 bp, synthetic construct
  source 1..75: mol_type = other DNA
atgcaactttgcgcatctgttgggttaatatacaacccatcattaaaagacagtgctggatgggatttcattgtt

SEQ ID NO: 539234 - DNA, 75 bp, synthetic construct
  source 1..75: mol_type = other DNA
tacgggtattacgtgcaatgctggtctgaaggtcaagggtggcttggtgatgatatcagcatccctgaatgcgat

SEQ ID NO: 539235 - DNA, 75 bp, synthetic construct
  source 1..75: mol_type = other DNA
ttgcggttgcagatattatccgtgcgctggcgtcaactgtcgggcttggatttgaaaaccagggggtcagccgca

SEQ ID NO: 539236 - DNA, 75 bp, synthetic construct
  source 1..75: mol_type = other DNA
aggtgatattactgatgcatacgccgactacaaccaggcaccggatattccgctcattctgacaggacagattca

SEQ ID NO: 539237 - DNA, 75 bp, synthetic construct
  source 1..75: mol_type = other DNA
aggggcaagaaagccccgttaccgtcatcgacgaagatgcattgaagcgagccattcagaaagcaaaggagattg

SEQ ID NO: 539238 - DNA, 75 bp, synthetic construct
  source 1..75: mol_type = other DNA
agcgtcgcatcaggcaacggcaccgcacttattgtcggatgcggcgcgaccgccttattcgacctacacaccaca

SEQ ID NO: 539239 - DNA, 75 bp, synthetic construct
  source 1..75: mol_type = other DNA
catgaagataacccgcccgcgctggcggtgagaatgcaagagatgtttggcgaggccaccaatccgacgatcgcc

SEQ ID NO: 539240 - DNA, 75 bp, synthetic construct
  source 1..75: mol_type = other DNA
ctgtcttgaagaccggaatgacaacgccatcagggacttgctgaaaggtgttgaaatggcagcggtagtggcctt

SEQ ID NO: 539241 - DNA, 75 bp, synthetic construct
  source 1..75: mol_type = other DNA
tctcaaaatgtttttaatgatggatatgctcggagttggagatgcaattaatattaatacaaataaaaatatccg

SEQ ID NO: 539242 - DNA, 75 bp, synthetic construct
  source 1..75: mol_type = other DNA
tatcgacgaagccgcattgaaacgagccattcaaaaagcaaagaaaattgcagatgctcacccggaaaaataccg

SEQ ID NO: 539243 - DNA, 75 bp, synthetic construct
  source 1..75: mol_type = other DNA
ttgggttgacggtgatggcgaagacctgtatctcaaagaggtaacccactggattccgctaccagaaccgccgca

SEQ ID NO: 539244 - DNA, 75 bp, synthetic construct
  source 1..75: mol_type = other DNA
aaattagacaaacagttattggatggaatggatatgcagttagacaatgcgtgtatacaaggaatgaatatgcca

SEQ ID NO: 539245 - DNA, 75 bp, synthetic construct
  source 1..75: mol_type = other DNA
cctttgcctggtggtttcaccattgaggatgcgaaggagttacatgaagacctggtacgcagccacataagccag

SEQ ID NO: 539246 - DNA, 75 bp, synthetic construct
  source 1..75: mol_type = other DNA
attttcaaacatccggctgggaaattattctgggctttaacggatgaaagcaataaagagcaatcggacgttatt

SEQ ID NO: 539247 - DNA, 75 bp, synthetic construct
  source 1..75: mol_type = other DNA
ttcagcactccatacgccacctgtgccagcttgcgcatcatcgcgccgagaatcacctttcctttcttgccatta

SEQ ID NO: 539248 - DNA, 75 bp, synthetic construct
  source 1..75: mol_type = other DNA
ctgtggcagcatgagacgaaacacgcctacaacgaacaggggctggcaaaccgcgtcacgccggacagcctgccg

SEQ ID NO: 539249 - DNA, 75 bp, synthetic construct
  source 1..75: mol_type = other DNA
cgacggatgcgcagaactggttacaggcgcgcgggagtcatgtaaatgaatcatatctcggcgtggctcgtccga

SEQ ID NO: 539250 - DNA, 75 bp, synthetic construct
  source 1..75: mol_type = other DNA
tcaggcatgcgacggaaacagggttcaggaatacgtgaatctggagcgattgcgtaatgcgctatcgggcaacta

SEQ ID NO: 539251 - DNA, 75 bp, synthetic construct
  source 1..75: mol_type = other DNA
attgaacgccgggcttatgaaattgcactggcatcgctggaagcagatccagttgcttatattttcaaacatccg

SEQ ID NO: 539252 - DNA, 75 bp, synthetic construct
  source 1..75: mol_type = other DNA
tacttttcttcgatgtgtggggttatatcaggattggctggttcagtgcggacgactggtcgtggtttacgtcgg

SEQ ID NO: 539253 - DNA, 75 bp, synthetic construct
  source 1..75: mol_type = other DNA
cgcagccatgcttcagtccggaaactttcgggaaaacaagaattcgtcaaccaataattttcgtgaaatcgcgga

SEQ ID NO: 539254 - DNA, 75 bp, synthetic construct
  source 1..75: mol_type = other DNA
ggacccggatattcgatatatgccaaacggcggcgctgtggccagcattgcgctggccacctccgaaacctggcg

SEQ ID NO: 539255 - DNA, 75 bp, synthetic construct
  source 1..75: mol_type = other DNA
acgcgcagtggtgcgtagttgacgccgcagacgggtattacgtgcaatgctggtctgaaggtcaaggatggcttg

SEQ ID NO: 539256 - DNA, 75 bp, synthetic construct
  source 1..75: mol_type = other DNA
tacacaccacacatttccctgccaaatttgcgccccatatctcactatccattaacggatttgtgacagaaacca

SEQ ID NO: 539257 - DNA, 75 bp, synthetic construct
  source 1..75: mol_type = other DNA
atttttaatgatgtagatggtaaacaaaaagcaacttgcactatcagggtgttaatactaaaaacatttcacgat

SEQ ID NO: 539258 - DNA, 75 bp, synthetic construct
  source 1..75: mol_type = other DNA
atgcgcttcagcagtccggcggcgaagacggtggcagtgtggtgttcccgccggtgctggtgcagatgctcgacc

SEQ ID NO: 539259 - DNA, 75 bp, synthetic construct
  source 1..75: mol_type = other DNA
cgacggccaacaacagcggcaataccaccgttgatggtcagggttcgaccggtaccgaaatcgcgggtaataacg

SEQ ID NO: 539260 - DNA, 75 bp, synthetic construct
  source 1..75: mol_type = other DNA
ggaaaatcctgcaatatggtcgtggtgcggttacgccgacattatcgacgcaaacaatgaggattacatttccta

SEQ ID NO: 539261 - DNA, 75 bp, synthetic construct
  source 1..75: mol_type = other DNA
aatggccgattgaaccctttaaggtctacggggtgtattcgagccgcagacaattagccaccaatatcagcgcct

SEQ ID NO: 539262 - DNA, 75 bp, synthetic construct
  source 1..75: mol_type = other DNA
gtgggcgatatgtttattatgatctgctggcttcttccttttttattttgttcccttgagcttttgtttgcccgc

SEQ ID NO: 539263 - DNA, 75 bp, synthetic construct
  source 1..75: mol_type = other DNA
caaacttccccgctatgtcgtgaagcttcacgaagatgatttttttgatgaagaagacgcagaagttctcctgac

SEQ ID NO: 539264 - DNA, 75 bp, synthetic construct
  source 1..75: mol_type = other DNA
cgttaatcatggaaatagatgaaggttttgcggtaggcatgtcaccagccgaactcagcgccgagcaactcttaa

SEQ ID NO: 539265 - DNA, 75 bp, synthetic construct
  source 1..75: mol_type = other DNA
aaccgcaatccgtaatattcacgagctgacgccggatccaaaaacaggcatcagctgggcagagctggaagcagt

SEQ ID NO: 539266 - DNA, 75 bp, synthetic construct
  source 1..75: mol_type = other DNA
accgggctgagttaccgtacccggcttgaccgggccgcgcgttccagaggtgaaaaccggacggcaaccgacccg

SEQ ID NO: 539267 - DNA, 75 bp, synthetic construct
  source 1..75: mol_type = other DNA
ggtataaacgatacaacgcttatgcttctagccttgttatccagtactgataatttctgcttatcttcgactgaa

SEQ ID NO: 539268 - DNA, 75 bp, synthetic construct
  source 1..75: mol_type = other DNA
cagccagccgcagcttgaaagctatcagcgccacctgcatggctaccgcaaagcaacggacacccgctggcggtc

SEQ ID NO: 539269 - DNA, 75 bp, synthetic construct
  source 1..75: mol_type = other DNA
ggccgcctgtcgaaaagatatgattgacagaaaaacggttgacgatacgttaccggtgatcacgattacccgttc

SEQ ID NO: 539270 - DNA, 75 bp, synthetic construct
  source 1..75: mol_type = other DNA
aataaattaggcgaagtggccaatcttcgcgtgacattcagcattcgtcgcccatccggtaaggagattaaccaa

SEQ ID NO: 539271 - DNA, 75 bp, synthetic construct
  source 1..75: mol_type = other DNA
gtggattatgccaaagcgtatgcactatttaatcaggccgcgcaatacggtgtgaatttagcatggtccaggttg

SEQ ID NO: 539272 - DNA, 75 bp, synthetic construct
  source 1..75: mol_type = other DNA
caggcctgggaagaggccgtattgccgtcgatagacaccgtgattaatgagcgtcgtgaagaaatggactgggta

SEQ ID NO: 539273 - DNA, 75 bp, synthetic construct
  source 1..75: mol_type = other DNA
atcgcaattgactggggatcgaccaatctgcgcgcctggctttatcagggcgaccactgcctggagagcaggtaa

SEQ ID NO: 539274 - DNA, 75 bp, synthetic construct
  source 1..75: mol_type = other DNA
atattaatgtattccgaaaaaacatgacttcttttgatggctgtcgttcattgatatatttgcctagcggtgatg

SEQ ID NO: 539275 - DNA, 75 bp, synthetic construct
  source 1..75: mol_type = other DNA
gtttctaatgataaatataaatcgttatcaattgcacagcaagaaagacatgctaccaagagaaatgagatttta

SEQ ID NO: 539276 - DNA, 75 bp, synthetic construct
  source 1..75: mol_type = other DNA
aggggtattcggtcaacgagatgtggtctttatgagtgctaaacaagctaaaatttgccgtgtaaaaaacggcga

SEQ ID NO: 539277 - DNA, 75 bp, synthetic construct
  source 1..75: mol_type = other DNA
cattaggtgcaacatgtaaaaattatagttggagttggtcgtttattgatgaaacgaacaaaagaattatatttg

SEQ ID NO: 539278 - DNA, 75 bp, synthetic construct
  source 1..75: mol_type = other DNA
atgccagaaggccatgcccagttctgcgagcgtcatatagccgcctgtgttgtaatgacaacgtttcgcggctat

SEQ ID NO: 539279 - DNA, 75 bp, synthetic construct
  source 1..75: mol_type = other DNA
tttcacagttccgcaattactttctgcaccagaaacggatagcgcgacgcagccccggcgcggcatggctgcaat

SEQ ID NO: 539280 - DNA, 75 bp, synthetic construct
  source 1..75: mol_type = other DNA
cacgccgtgcacatggctggtggccgatgctgctttcacagcttgacgtcaccgtaccgggcaagggaaaacacg

SEQ ID NO: 539281 - DNA, 75 bp, synthetic construct
  source 1..75: mol_type = other DNA
ccgctttttacgggtatttcccggcagatacgcgcgcgaatgcactcccgccgcggaccggggatctggcaggat

SEQ ID NO: 539282 - DNA, 75 bp, synthetic construct
  source 1..75: mol_type = other DNA
cagtcgcgagttgacgctcggcattctggtcgaacccatgctcattctctcactgctggtattggcgctgatagc

SEQ ID NO: 539283 - DNA, 75 bp, synthetic construct
  source 1..75: mol_type = other DNA
gcggcgatctgatcacccttatctatcttcttgccctgtttcgttttttctttgctctttccgggctggataccg

SEQ ID NO: 539284 - DNA, 75 bp, synthetic construct
  source 1..75: mol_type = other DNA
tagatcgaatggttacagttacgtatggaaacccgaaggaagcacaaaaactatagggctaggaagagtgcggga

SEQ ID NO: 539285 - DNA, 75 bp, synthetic construct
  source 1..75: mol_type = other DNA
aaaaagattatctgcaacatcaaaaaaaactgctggccgtattcggtaaggtgctggccgattctgtaaaaccag

SEQ ID NO: 539286 - DNA, 75 bp, synthetic construct
  source 1..75: mol_type = other DNA
gaagtggtggtgcatgccggcggcaccatgcagatgctgggctcccgacagaatagtgcacagggtggccgggga

SEQ ID NO: 539287 - DNA, 75 bp, synthetic construct
  source 1..75: mol_type = other DNA
ccggcggtgacggatcaggacggtaacggcaaggcggatgcagcagaagcggcagtggcattttacgaacgggca

SEQ ID NO: 539288 - DNA, 75 bp, synthetic construct
  source 1..75: mol_type = other DNA
ctttagggtatgagggtaatagtgcggatgctattattaatacgaatatagacttgggggcaggtaatgacttca

SEQ ID NO: 539289 - DNA, 75 bp, synthetic construct
  source 1..75: mol_type = other DNA
ctggaggataatcttgatgattttcactggcgccgttctggcaaactgattattcatcgccgccagcaagattta

SEQ ID NO: 539290 - DNA, 75 bp, synthetic construct
  source 1..75: mol_type = other DNA
cttcagccttgctgcgcttgcatgggtcttctggttaaccggtctgtaaggagcactgacggaatatggaaaatc

SEQ ID NO: 539291 - DNA, 75 bp, synthetic construct
  source 1..75: mol_type = other DNA
atgatggtgatgttaaatatttcacctatcagtccactgatattcctggtttaactctttggatacaggagggta

SEQ ID NO: 539292 - DNA, 75 bp, synthetic construct
  source 1..75: mol_type = other DNA
acttcatttacgctaatggagagatttcaactaacaatggtactcaggtaaatattataggtggagagggctttg

SEQ ID NO: 539293 - DNA, 75 bp, synthetic construct
  source 1..75: mol_type = other DNA
atcaaggaatggtcaccgcgattacgtacagcgatccagttagcccgaaatgtatcttcctgtacatgcgaatat

SEQ ID NO: 539294 - DNA, 75 bp, synthetic construct
  source 1..75: mol_type = other DNA
acgtagcggtggatatatcaatatacacaaatgtagaagatgattattttttttcttatttttccctaacaaatg

SEQ ID NO: 539295 - DNA, 75 bp, synthetic construct
  source 1..75: mol_type = other DNA
cattacaggctttacccgaagatgagcggtggttgattgaagagtccgaccttaaccggcgtccccagcagtctc

SEQ ID NO: 539296 - DNA, 75 bp, synthetic construct
  source 1..75: mol_type = other DNA
atgagtgatgtaacggcattcaacaactgcataaatgtgttctggcggcaacatgaagcagaactatctcgtttt

SEQ ID NO: 539297 - DNA, 75 bp, synthetic construct
  source 1..75: mol_type = other DNA
gaacgataaaggcctggtgctactgatccccgtcattgttgatgtgatggctcgggataacgagcaggtggcccg

SEQ ID NO: 539298 - DNA, 75 bp, synthetic construct
  source 1..75: mol_type = other DNA
aagatgttgccggactggttgccttcctcgcctctgacgatgcgcgttatctcaccggtcaaaccatcaacatcg

SEQ ID NO: 539299 - DNA, 75 bp, synthetic construct
  source 1..75: mol_type = other DNA
ctgataataattgcgtaactcgctcgaaatctttccaccaggttattgacatcattccaccgggcattaaattgc

SEQ ID NO: 539300 - DNA, 75 bp, synthetic construct
  source 1..75: mol_type = other DNA
catcgttcgcgccgatcgtggttcattattgttagtcggtcagcgttcatcacagggttggcaaggcgatatcat

SEQ ID NO: 539301 - DNA, 75 bp, synthetic construct
  source 1..75: mol_type = other DNA
ctccgacgctctctcacgatttcttttctaagttaccggccgtactgcaaccgttgctgcatagcggcattatgc

SEQ ID NO: 539302 - DNA, 75 bp, synthetic construct
  source 1..75: mol_type = other DNA
cggtgctgggctggtgatgttcggcatggtactggcgacagggattcgaattctgtcgcgctgtaactacaccac

SEQ ID NO: 539303 - DNA, 75 bp, synthetic construct
  source 1..75: mol_type = other DNA
gagacgatgacagaactttgtcagattgaggcggatgacacttctcccgtctgctgccacaaaaaaatgaattaa

SEQ ID NO: 539304 - DNA, 75 bp, synthetic construct
  source 1..75: mol_type = other DNA
aaatcgtatcaaagaatgatccagatacaaaaaagtgtggtgtaaatatggtaagataccagggcaaggggatgg

SEQ ID NO: 539305 - DNA, 75 bp, synthetic construct
  source 1..75: mol_type = other DNA
agcctcattggactcatgaatttactcacaattgcgtggaaaaagttaagtctctgtttccccatcttcgcgcag

SEQ ID NO: 539306 - DNA, 75 bp, synthetic construct
  source 1..75: mol_type = other DNA
tgtcaccgactatggtcataaaattgtctatgcccgactcggtgatcggttgcgcatcgccgccatggtcgatat

SEQ ID NO: 539307 - DNA, 75 bp, synthetic construct
  source 1..75: mol_type = other DNA
aatacatcaacgacttctgcaagcaccgataccatcacgtcaggatttctgatgaatctgctgccaaggattatg

SEQ ID NO: 539308 - DNA, 75 bp, synthetic construct
  source 1..75: mol_type = other DNA
aagtagcggtacatcagaacaaaccttagatatggaagtttcattagatttttggaaagatgttgattctgaatt

SEQ ID NO: 539309 - DNA, 75 bp, synthetic construct
  source 1..75: mol_type = other DNA
aagtatgttaaaaaatggaagtactttggttttagctggatttgagaaaaaaaggaatgaagttgttgatcaagg

SEQ ID NO: 539310 - DNA, 75 bp, synthetic construct
  source 1..75: mol_type = other DNA
actgcctgaataccgatgaatggccagctattaaaacgttatcactgccccgctgggctaaggagtatgcaaatg

SEQ ID NO: 539311 - DNA, 75 bp, synthetic construct
  source 1..75: mol_type = other DNA
tgagacgccgtcttgaaggtacgcaggggctggtcattatcgacgaagctgatcatcttggcgctgaggttctgg

SEQ ID NO: 539312 - DNA, 75 bp, synthetic construct
  source 1..75: mol_type = other DNA
gatatgaacaaaaacgaaatgaagtttcagatcaaggggttggtactccaggttttaagttacttggaggtagtc

SEQ ID NO: 539313 - DNA, 75 bp, synthetic construct
  source 1..75: mol_type = other DNA
gggaagcttgaagaaggtttctccaacgccgcaatgatgcgcggaacagaactcgagccggtagcgcgcgaaatg

SEQ ID NO: 539314 - DNA, 75 bp, synthetic construct
  source 1..75: mol_type = other DNA
gaaatcgtaatattgttgaacaatatatgaacacttatgggcaagcccgtttatctaggcacgaactgtttgatg

SEQ ID NO: 539315 - DNA, 75 bp, synthetic construct
  source 1..75: mol_type = other DNA
acatcagcatggcagaggcggcgcagaactggcttcgctcccgtggtagccgtgtcactgacgttcgggttttca

SEQ ID NO: 539316 - DNA, 75 bp, synthetic construct
  source 1..75: mol_type = other DNA
ttgacaatcgcctgtgcacggttgctcggtgcggaacagatttttgttgttgatcatcatccctaccgcttgcgt

SEQ ID NO: 539317 - DNA, 75 bp, synthetic construct
  source 1..75: mol_type = other DNA
tccaacaaggttcaagcgttgcagtctatggtgccggtcctgtgggattgttgacaatcgcctgtgcacggttgc

SEQ ID NO: 539318 - DNA, 75 bp, synthetic construct
  source 1..75: mol_type = other DNA
gaagagctggcgcgcgaaatcgaatctgaggttaagagcttccttgcagatctggaatctgaaattcagaaaatc

SEQ ID NO: 539319 - DNA, 75 bp, synthetic construct
  source 1..75: mol_type = other DNA
caaacttcccaactacaccaccgtaaccacagattgggtggatatgatgaatggactagacatccccgattacaa

SEQ ID NO: 539320 - DNA, 75 bp, synthetic construct
  source 1..75: mol_type = other DNA
ctgcaaaactggctaacctgcttggggacactgtacgacttcgcccggcgtaaatacgacaacatcactcccgat

SEQ ID NO: 539321 - DNA, 75 bp, synthetic construct
  source 1..75: mol_type = other DNA
gatgtgaccacgctctgctccacagagcaggagaaacatcaacggtctgggggcgtcgtccgagatttccatgtc

SEQ ID NO: 539322 - DNA, 75 bp, synthetic construct
  source 1..75: mol_type = other DNA
agaattgttagaaaaggttctaacattgaggaaacaagatcagaacgattaaaactcattatttttactgactat

SEQ ID NO: 539323 - DNA, 75 bp, synthetic construct
  source 1..75: mol_type = other DNA
tctccattaccaccagtacaggaacgctgattgctgatgattatgtcgttgccgccggaaatggcagcacacatt

SEQ ID NO: 539324 - DNA, 75 bp, synthetic construct
  source 1..75: mol_type = other DNA
ctacaccagctacaggcattaataaaagaggcaggtagcgagatacgagacgtaatcataatcggtttgtattcc

SEQ ID NO: 539325 - DNA, 75 bp, synthetic construct
  source 1..75: mol_type = other DNA
gcaactattccagcagagcggggaaaaccagcatcaccaaaattgacagatgtcagtaaagaatatgcagagcaa

SEQ ID NO: 539326 - DNA, 75 bp, synthetic construct
  source 1..75: mol_type = other DNA
ttgcagacgcacatggacgaattaccccagtggcgggaggcgcttttagcgcaaagtgagcaatatcagctgatg

SEQ ID NO: 539327 - DNA, 75 bp, synthetic construct
  source 1..75: mol_type = other DNA
aatgattttattcagtctattgtaaccagtgctacaggagataatccatataactggattatatgtgagggtacg

SEQ ID NO: 539328 - DNA, 75 bp, synthetic construct
  source 1..75: mol_type = other DNA
gcaatgctattgcatccgttggaaacgccgcactggtccagtttgttgttggtcacagcagaacacaatcgctag

SEQ ID NO: 539329 - DNA, 75 bp, synthetic construct
  source 1..75: mol_type = other DNA
cctactcgaaaaaagggatttcagggccaatattttatgagttttgtagccttatatcttatattctggttgcat

SEQ ID NO: 539330 - DNA, 75 bp, synthetic construct
  source 1..75: mol_type = other DNA
tcactgcaacaaaaccgtttattcaacgcaatgaaggcgggattatctggcatacccaaggcagcggtaaaagtc

SEQ ID NO: 539331 - DNA, 75 bp, synthetic construct
  source 1..75: mol_type = other DNA
ggctgtctgtgggtttggtcggtactttgtttctggtggcgaggatctgggatgctattaacgatccgattatgg

SEQ ID NO: 539332 - DNA, 75 bp, synthetic construct
  source 1..75: mol_type = other DNA
cattagctttgtctgtgatgcgaaatgctactgaaaatgagatcaatgatgtttttgatagaattaactcgtatg

SEQ ID NO: 539333 - DNA, 75 bp, synthetic construct
  source 1..75: mol_type = other DNA
tcggcatatcaatggaagaatattatagacgtttttgcgatgagttgaaaaaatctgctttgagtgagcctctta

SEQ ID NO: 539334 - DNA, 75 bp, synthetic construct
  source 1..75: mol_type = other DNA
ttttcaaatatggttagggatattgcctgttctatcaggggggatgtatctgacgacatattgcttttagagcaa

SEQ ID NO: 539335 - DNA, 75 bp, synthetic construct
  source 1..75: mol_type = other DNA
cgtgaaagcggcaccggtcattgtcagcaagaccacgacgaccaaaaaagaaagcaccgaaggtcatgcctcgct

SEQ ID NO: 539336 - DNA, 75 bp, synthetic construct
  source 1..75: mol_type = other DNA
agcagtttgccgaccaggaaagtgtacgcgtactggattatcagcagtgtctgcgtgcaacgcaaaccggaaatg

SEQ ID NO: 539337 - DNA, 75 bp, synthetic construct
  source 1..75: mol_type = other DNA
aaaacgcgttacgatcggtggcggttggaagaaaaaattatctctttttcggctcagacaagggaggagaaagtg

SEQ ID NO: 539338 - DNA, 75 bp, synthetic construct
  source 1..75: mol_type = other DNA
gattatgcatcagcgggagaagactgactttgttaaagaagctggaatgcttctgaagaatcgtttcggtaccgt

SEQ ID NO: 539339 - DNA, 75 bp, synthetic construct
  source 1..75: mol_type = other DNA
gtggcgtgtgctaaaagcgggcatggcgtaacccccattcgtgatggcattagcaactcttttgatgatgaccca

SEQ ID NO: 539340 - DNA, 75 bp, synthetic construct
  source 1..75: mol_type = other DNA
atcggcaaagttggctcgttaaattcaggcgagcgaagtgtcaggacactttagacacgatgcgggatgcggcca

SEQ ID NO: 539341 - DNA, 75 bp, synthetic construct
  source 1..75: mol_type = other DNA
aacctcgatacgcaccgcaccagacgggaaaatgaagccgctgcgctatgctgccgccgtggagaacgcgctacg

SEQ ID NO: 539342 - DNA, 75 bp, synthetic construct
  source 1..75: mol_type = other DNA
attgcgaagagacgcagatgctcagatggaacaatccggaagcaattgcagactgcgttaggtttcattaatggg

SEQ ID NO: 539343 - DNA, 75 bp, synthetic construct
  source 1..75: mol_type = other DNA
ctcatcaatgtcgaccttccctggaacccatctcgtttagagcagcgcctcgggcgaatcaaacgttttggtcag

SEQ ID NO: 539344 - DNA, 75 bp, synthetic construct
  source 1..75: mol_type = other DNA
gtcttcctttgcctgatacctatgatcgacctgatccacgtattaaacagctggctcgccgtaacacggttacac

SEQ ID NO: 539345 - DNA, 75 bp, synthetic construct
  source 1..75: mol_type = other DNA
catgcctcggcacaactggtggagtggcttaactttttctctccgggaaatcacgatgatcgcacaatcattgtg

SEQ ID NO: 539346 - DNA, 75 bp, synthetic construct
  source 1..75: mol_type = other DNA
gtaagttcacagagatattgcaattgcctccggataagtaaggggagattgcactatgcaaatgcagcatctgat

SEQ ID NO: 539347 - DNA, 75 bp, synthetic construct
  source 1..75: mol_type = other DNA
aactgcgctttgccgctcagcgaaacctatcgcgaagcactaaagcaaattggcgatgccgtgtatcgggcaatg

SEQ ID NO: 539348 - DNA, 75 bp, synthetic construct
  source 1..75: mol_type = other DNA
tttcccgacaggccattgccattctgaagcagatacaggaaatttccggccatctggaactggtatttcccggcg

SEQ ID NO: 539349 - DNA, 75 bp, synthetic construct
  source 1..75: mol_type = other DNA
ccaatatttgaagaatacctgatggaaattttacctcaacgctcagacgctcttgataaacaaaaattaaatcta

SEQ ID NO: 539350 - DNA, 75 bp, synthetic construct
  source 1..75: mol_type = other DNA
gctacagcgcacaaatccgcccttcttccgtggtgaccaaggactacacctttaaacgacccggctggccagggc

SEQ ID NO: 539351 - DNA, 75 bp, synthetic construct
  source 1..75: mol_type = other DNA
ttgccaggcaaaaaatcgtgccgaatctctttcgccacgcctgccaccagcctcgacgagagtaactggccagag

SEQ ID NO: 539352 - DNA, 75 bp, synthetic construct
  source 1..75: mol_type = other DNA
acaattaatggaaggataagatattttgtatggactcatttattgaaaggtaagtcaagaatttcattcaaaatg

SEQ ID NO: 539353 - DNA, 75 bp, synthetic construct
  source 1..75: mol_type = other DNA
tgaaatgccgtattgaaaatgattatcaagaattgttgaacgaagcaatagtacaattggttctacagcttctaa

SEQ ID NO: 539354 - DNA, 75 bp, synthetic construct
  source 1..75: mol_type = other DNA
ctgaatttctggagtgcgaaagcctagatgaagtgcaaatcaatcagagccgcacccagcgagtgatgatggtgg

SEQ ID NO: 539355 - DNA, 75 bp, synthetic construct
  source 1..75: mol_type = other DNA
ccttcatgatcggcatggcgcagaaagaagccgaagagcagtccaccagcggcgagctgaaaacccgccatctgc

SEQ ID NO: 539356 - DNA, 75 bp, synthetic construct
  source 1..75: mol_type = other DNA
atagcctgcactcgttgcaggaggtgtcttttagcagcctcggttataccgagcgctatcacctgcaggagtggc

SEQ ID NO: 539357 - DNA, 75 bp, synthetic construct
  source 1..75: mol_type = other DNA
gatttttatgatgaatttatcgccgccgcccatcataggatcaccacgctgtcagctgaagagtacctattctct

SEQ ID NO: 539358 - DNA, 75 bp, synthetic construct
  source 1..75: mol_type = other DNA
ggaattcaccgttaagaagctgcaactgcatccgcgggttcagcttaacccaatgaaccctgcatattcgccaat

SEQ ID NO: 539359 - DNA, 75 bp, synthetic construct
  source 1..75: mol_type = other DNA
aactttgccgcctggcccatcaaggttgacgggaaaacctggcccacctcagaacactattttcaggcacaataa

SEQ ID NO: 539360 - DNA, 75 bp, synthetic construct
  source 1..75: mol_type = other DNA
tgaaggtcgcttcacagaccgctttgggcaggttcattacctgttgctggagccggaggccgggaaagaattcag

SEQ ID NO: 539361 - DNA, 75 bp, synthetic construct
  source 1..75: mol_type = other DNA
tcacaacagccaccttttttgctcaaaactttgggaaagttactgggcttgtgaacgacaccttcactcaactca

SEQ ID NO: 539362 - DNA, 75 bp, synthetic construct
  source 1..75: mol_type = other DNA
ccggtctcagcgtgaccttaaagtcacaacagacaggccggtgcttctctatagcgggtataagatacgggacca

SEQ ID NO: 539363 - DNA, 75 bp, synthetic construct
  source 1..75: mol_type = other DNA
gttgaaattactttttatagaatgcaatcctattaaagaggcatttttaatgccatggactttgacagacattac

SEQ ID NO: 539364 - DNA, 75 bp, synthetic construct
  source 1..75: mol_type = other DNA
gggagggcttttattggttatctttcaccttaccaaaataatgatatatcccttgacccatcatcattaccatta

SEQ ID NO: 539365 - DNA, 75 bp, synthetic construct
  source 1..75: mol_type = other DNA
aggatttacctattatgaaatcgctatgggagagactcagcagtcgaatgattattttacacagttatcatttac

SEQ ID NO: 539366 - DNA, 75 bp, synthetic construct
  source 1..75: mol_type = other DNA
ctgagtcattaaactttgaagaaaaatcaacagttattaaaataaaacaagatatcgataattttattttctaca

SEQ ID NO: 539367 - DNA, 75 bp, synthetic construct
  source 1..75: mol_type = other DNA
gtctgctgacggtcgatgacgtataccgccagcctgtcggcccggctcatgacccgaaaagcctgtatgcgctgc

SEQ ID NO: 539368 - DNA, 75 bp, synthetic construct
  source 1..75: mol_type = other DNA
ctgagtagggaaaatatagatgtatcgatgattgtaccaagagagtcatgttattttgaacatcaatcaggaaac

SEQ ID NO: 539369 - DNA, 75 bp, synthetic construct
  source 1..75: mol_type = other DNA
atggcgaagataaaaaatgtgttgttgactacatagtaggtgacaataaaaatatagcgggtatttatataggca

SEQ ID NO: 539370 - DNA, 75 bp, synthetic construct
  source 1..75: mol_type = other DNA
ggtcgggatgaggaaacgcctgaagaattcaggcaacgccggaaccggtcgcttgagaacccggcaacaggtagc

SEQ ID NO: 539371 - DNA, 75 bp, synthetic construct
  source 1..75: mol_type = other DNA
gaaaaagaacgattaataagaactgagatctctacagttgcaggattaatgttaaagtctgaaatcaataccaat

SEQ ID NO: 539372 - DNA, 75 bp, synthetic construct
  source 1..75: mol_type = other DNA
atgacggcattactgggtggtctgcgggtaatggatattaatacaaataattcttcgttgggagtgtttaccgat

SEQ ID NO: 539373 - DNA, 75 bp, synthetic construct
  source 1..75: mol_type = other DNA
ttttgcgactctttttggtagcattaatgtgacagtgaacgagaattatttaaaatattatccattcgttaaaag

SEQ ID NO: 539374 - DNA, 75 bp, synthetic construct
  source 1..75: mol_type = other DNA
ggtgtcgaggagaaggacatccagataactctcgacaacgacgtgctgatggtgcgtggcgagaagcgccaggaa

SEQ ID NO: 539375 - DNA, 75 bp, synthetic construct
  source 1..75: mol_type = other DNA
tggctaacgaactggccaaaaatctcaaaaaccctgaagatctcagtcagttcgatcgcctgctcaagaaaatca

SEQ ID NO: 539376 - DNA, 75 bp, synthetic construct
  source 1..75: mol_type = other DNA
gttttcgtcaggtggaaattcaaatgaaacctttcagtctgtgagtgactttaatatctttaatgctagacccat

SEQ ID NO: 539377 - DNA, 75 bp, synthetic construct
  source 1..75: mol_type = other DNA
acatccgcgtcggcaaatacccgatgcgcgaactggatgaaaaaatcccgctgcgccacggcgttgttggtcagg

SEQ ID NO: 539378 - DNA, 75 bp, synthetic construct
  source 1..75: mol_type = other DNA
atgaacaccataatccttaatgaaatatgtccgtcatctcaatatatccccgtaaccccttacgccccggaccta

SEQ ID NO: 539379 - DNA, 75 bp, synthetic construct
  source 1..75: mol_type = other DNA
ggatactgcaagaattgcaaaatatgcaaaattgttcaatgaacaaccggaagaatataccagtctggttaacaa

SEQ ID NO: 539380 - DNA, 75 bp, synthetic construct
  source 1..75: mol_type = other DNA
gctaaaaaatatgtcttaaagcatttcaccaaagacatcatggttgaaaaatattcaaaactgtatgatttataa

SEQ ID NO: 539381 - DNA, 75 bp, synthetic construct
  source 1..75: mol_type = other DNA
tatgaccttcaaagacagcgagggcaccgactacgttgtcgggcaggtatgggggaaaaaaggcgccaatgctta

SEQ ID NO: 539382 - DNA, 75 bp, synthetic construct
  source 1..75: mol_type = other DNA
acatcttttatctaatgtgaaatttactttagctggtgatggagaattggctgaacagtgccgttttctgatagt

SEQ ID NO: 539383 - DNA, 75 bp, synthetic construct
  source 1..75: mol_type = other DNA
caaatagccccggctctcgcacacattgggcaagactcaacaaccttgcaccactcagaccaaaagactggctga

SEQ ID NO: 539384 - DNA, 75 bp, synthetic construct
  source 1..75: mol_type = other DNA
tacagttaatccgagattcagaacgccttaaatctaagcaagttgctgatttgattggtgtaaattatggtacgt

SEQ ID NO: 539385 - DNA, 75 bp, synthetic construct
  source 1..75: mol_type = other DNA
gttcgccgtaaacggacaggtaattccgttaaattacggaaacttcgatgcccgctataaatatcgaacagaggg

SEQ ID NO: 539386 - DNA, 75 bp, synthetic construct
  source 1..75: mol_type = other DNA
ttcagccagacgcgtttcactgccaagggagtacgctggattggtggtttgtgggctgaacatattgcagggggg

SEQ ID NO: 539387 - DNA, 75 bp, synthetic construct
  source 1..75: mol_type = other DNA
tctggaaaccatctgcattattccggaggaatttgtacgtcgtattaacggcgttaatgttctgtcggatctgaa

SEQ ID NO: 539388 - DNA, 75 bp, synthetic construct
  source 1..75: mol_type = other DNA
ctgcaggggatgatcaccagtatcacgccggatgcgcgcccggcaacgtcacaggcggaggcttcggtgacggtg

SEQ ID NO: 539389 - DNA, 75 bp, synthetic construct
  source 1..75: mol_type = other DNA
acgctattatgagggtaataaaaaaacaatatatatctttagattatttgtatctgttgttgtcactttttgtgt

SEQ ID NO: 539390 - DNA, 75 bp, synthetic construct
  source 1..75: mol_type = other DNA
ataaaaggttctggtgtaggttgggttaataagaataatgtttccggtattgttgtgcaaccaaaatttccatat

SEQ ID NO: 539391 - DNA, 75 bp, synthetic construct
  source 1..75: mol_type = other DNA
cacaaacctttcatgatttaaaactcctttcagaatgttttatagacttagttgaacgtgcaacagaggaaaatg

SEQ ID NO: 539392 - DNA, 75 bp, synthetic construct
  source 1..75: mol_type = other DNA
cagcggataacgtcaacggtgtgtattaccgaccgctgcaaaaactgattaatggtacctggtataacgtggcga

SEQ ID NO: 539393 - DNA, 75 bp, synthetic construct
  source 1..75: mol_type = other DNA
agtacgttaagcgggcatctcgggatggggtatagccatggtgccggtgtggaatccccgtggaatgcggtggct

SEQ ID NO: 539394 - DNA, 75 bp, synthetic construct
  source 1..75: mol_type = other DNA
gcgtggctggccgtacatgctgatcagccctatgttcgcaaagagctggtgtttgcccaagcgaaaaccagcagc

SEQ ID NO: 539395 - DNA, 75 bp, synthetic construct
  source 1..75: mol_type = other DNA
gtgcgccagtgttgtatctgtctgaattttttgtatgaagccggactggtggattacgacgaaaataataacagg

SEQ ID NO: 539396 - DNA, 75 bp, synthetic construct
  source 1..75: mol_type = other DNA
ggttgaccgccagggtgtttatatgcggcttttgttcgcggtggcgaataaacttggtcatggcgctggctggct

SEQ ID NO: 539397 - DNA, 75 bp, synthetic construct
  source 1..75: mol_type = other DNA
gcaatcgtgcctgatgtattgcgtgaagaagacagagttacccacgataaggttgaccgccagggtgtttatatg

SEQ ID NO: 539398 - DNA, 75 bp, synthetic construct
  source 1..75: mol_type = other DNA
tttaaagaaacccatttcgacggacaagatcacgaccgcatcaaagcacaaaaagatctgaaagctgcaatggat

SEQ ID NO: 539399 - DNA, 75 bp, synthetic construct
  source 1..75: mol_type = other DNA
tcaggatccattccaaaaattaaacattgctaaagctgaaattattccctttgaagccagtatgaaagttcctct

SEQ ID NO: 539400 - DNA, 75 bp, synthetic construct
  source 1..75: mol_type = other DNA
tgctgcttgatgaaattgatacccgtatttcacaaaacacgcactggaatgaggattttgaaatgttattaaaac

SEQ ID NO: 539401 - DNA, 75 bp, synthetic construct
  source 1..75: mol_type = other DNA
acgatgctgacagatatctttaatagtaactaccagtgttatggctatcgtcgcttacatgcgatgctcaggcat

SEQ ID NO: 539402 - DNA, 75 bp, synthetic construct
  source 1..75: mol_type = other DNA
aacgacgcaggtccgatgcagtacctgatccccggctggacctttgaccgtaaacgtcccgttttcggccgtcat

SEQ ID NO: 539403 - DNA, 75 bp, synthetic construct
  source 1..75: mol_type = other DNA
caactgctgcatttctggaatgcggagattccgctcgcccaaggggccgctgtgccgctggtacgcgcaccgcgt

SEQ ID NO: 539404 - DNA, 75 bp, synthetic construct
  source 1..75: mol_type = other DNA
tcaatgacgcgattatttttgatccgaacaaatgctcgctctcgaatgtaaatacccaggatgagataaattttc

SEQ ID NO: 539405 - DNA, 75 bp, synthetic construct
  source 1..75: mol_type = other DNA
atgatcagcaatgtgaagtttaacgaactggctaaccgcgttgatctgctggttgagaaggtcttgcgccttgag

SEQ ID NO: 539406 - DNA, 75 bp, synthetic construct
  source 1..75: mol_type = other DNA
gtcactaatcccggctcccgcccatggctgatgcagacctggcttgaggatgaaaatggtgtcaggaaggggcat

SEQ ID NO: 539407 - DNA, 75 bp, synthetic construct
  source 1..75: mol_type = other DNA
cttcgtaagtatatgattgaaccggcggtaaaggagttaacagagaaagatcactggatgatcgactggaaacct

SEQ ID NO: 539408 - DNA, 75 bp, synthetic construct
  source 1..75: mol_type = other DNA
gccattattaatacaaatatagatttgggtcagggaaacgactttatctatatcaatggtaatgtttcatcaaaa

SEQ ID NO: 539409 - DNA, 75 bp, synthetic construct
  source 1..75: mol_type = other DNA
attcctccttgctcaaatatcaacgctgataagtaccttaactggcggtgtgggtattaacggtctgaccagcgc

SEQ ID NO: 539410 - DNA, 75 bp, synthetic construct
  source 1..75: mol_type = other DNA
tagggatccaacaatttcaggtttttaaagatacagagggctggtttgattcaatgggagcatggataattttta

SEQ ID NO: 539411 - DNA, 75 bp, synthetic construct
  source 1..75: mol_type = other DNA
ttggcaacacaaagccccacaaaaatactctgcctttgagttggcttttgaatttggtcaccgggttattgctga

SEQ ID NO: 539412 - DNA, 75 bp, synthetic construct
  source 1..75: mol_type = other DNA
aaacattttataatgatttaataactgcttatacagttagttcatcaaaattatatgatatatactcatcaatag

SEQ ID NO: 539413 - DNA, 75 bp, synthetic construct
  source 1..75: mol_type = other DNA
ccacagactcccctgaaaaacaggagacagaagaaaccatctccgaaattcatgtttttctattcctggatatat

SEQ ID NO: 539414 - DNA, 75 bp, synthetic construct
  source 1..75: mol_type = other DNA
gtcattctctacggtgtcttctttgcgtgggaaatcatgtacacacgcaaagatgatgtgatgatggagtccgta

SEQ ID NO: 539415 - DNA, 75 bp, synthetic construct
  source 1..75: mol_type = other DNA
tttatatttttgttgggtttatggttttgggatatttcgcaagtaaaaatgaaccgtcttcatcaacaacttctt

SEQ ID NO: 539416 - DNA, 75 bp, synthetic construct
  source 1..75: mol_type = other DNA
ggtatcatgacaacaccacgaccgatttagtttggccgtatgacaccgacaatgatggaattgccgatgctggcg

SEQ ID NO: 539417 - DNA, 75 bp, synthetic construct
  source 1..75: mol_type = other DNA
aagctgacggctgcaaatgcagccactgacaaaaatctggtgggtaaaacaactggctctgccacaggcgtggct

SEQ ID NO: 539418 - DNA, 75 bp, synthetic construct
  source 1..75: mol_type = other DNA
tgattttttattacggttctttataagtattggtgtgataggagcattggtttatcattctatattttttgtttt

SEQ ID NO: 539419 - DNA, 75 bp, synthetic construct
  source 1..75: mol_type = other DNA
aacgccaaaatgcatgaaggtgtcagcggtcgtaatatgtggatggattgtgtggtaaatggcattaatgcccgc

SEQ ID NO: 539420 - DNA, 75 bp, synthetic construct
  source 1..75: mol_type = other DNA
atatactcatctgagagatgcacatttttatagatgtaaactcatagaacatacagttcaattttattttttaaa

SEQ ID NO: 539421 - DNA, 75 bp, synthetic construct
  source 1..75: mol_type = other DNA
attgcgcgtaggttgggctggtaattctaaatgggcgggagaagtagaggattttaaaggttaccattctttatt

SEQ ID NO: 539422 - DNA, 75 bp, synthetic construct
  source 1..75: mol_type = other DNA
ctccagccagaccacagcgcctctggcaggttgccgggttaaataatgctgatggcgtagcgcttctgggccaaa

SEQ ID NO: 539423 - DNA, 75 bp, synthetic construct
  source 1..75: mol_type = other DNA
atgacgtcgcgtgaatatgacgccgttgtttttgttcactgccgtacaggcagcttagaaatcattctgtacaga

SEQ ID NO: 539424 - DNA, 75 bp, synthetic construct
  source 1..75: mol_type = other DNA
cagcttagaaacggggaatgacacgccgttaatagtggaacttgttcactgccgtacaggcagcttagaaagctt

SEQ ID NO: 539425 - DNA, 75 bp, synthetic construct
  source 1..75: mol_type = other DNA
tttggattagacagaacacaagtcgacagacaacctgttggtttattcacaggagaagggaatgatataattgtt

SEQ ID NO: 539426 - DNA, 75 bp, synthetic construct
  source 1..75: mol_type = other DNA
taaaccaagtctggttggggatttttgaggggatggaaaagttcagaaaagtaaatttaataaaatcaattaaca

SEQ ID NO: 539427 - DNA, 75 bp, synthetic construct
  source 1..75: mol_type = other DNA
ggaatataagtgggtatattataccatcattaatagcaattcctgcgttaggtatactgtctagaattctagggg

SEQ ID NO: 539428 - DNA, 75 bp, synthetic construct
  source 1..75: mol_type = other DNA
tcaccactgccggacgtagtaaataacgcacttcaccttgtagcagctcatgaacggcgtccatggcgtggtctg

SEQ ID NO: 539429 - DNA, 75 bp, synthetic construct
  source 1..75: mol_type = other DNA
atacactttcgaccagtacatcatctgtaatcgttcgaacttccgcgcagaatatgaagcgcgttagtgagtata

SEQ ID NO: 539430 - DNA, 75 bp, synthetic construct
  source 1..75: mol_type = other DNA
ttgggaagaaatgacctgcttattcgcaccttccctagttctaataaagataaggattatgagaaaattcgcttc

SEQ ID NO: 539431 - DNA, 75 bp, synthetic construct
  source 1..75: mol_type = other DNA
tagaaacagacggtttccggttgtgctcaaggcactgcgttcactgccgtacaggcagcttagaaacattccgga

SEQ ID NO: 539432 - DNA, 75 bp, synthetic construct
  source 1..75: mol_type = other DNA
aggcagcttagaaaagcacggctgcggggaatggctcaatctctgcgttcactgccgtacaggcagcttagaaat

SEQ ID NO: 539433 - DNA, 75 bp, synthetic construct
  source 1..75: mol_type = other DNA
aaggataaagtatttagtgaggcaatgcaggagaagtatctagataactattttctctggttgggtgagcaatat

SEQ ID NO: 539434 - DNA, 75 bp, synthetic construct
  source 1..75: mol_type = other DNA
gagaagctgctgaagcactgctgcgcttcctgccaactgaatcaatcgctgcggtggtgacaagtctggccgcca

SEQ ID NO: 539435 - DNA, 75 bp, synthetic construct
  source 1..75: mol_type = other DNA
cgggatacagaccgtacaggttggcaaggttacccatcgcctcagcacggaggaagacggcattgcgtatgtcac

SEQ ID NO: 539436 - DNA, 75 bp, synthetic construct
  source 1..75: mol_type = other DNA
aatttcgtgagctagacacaaaattcttcccttactctgccgtagaagagttgtattctctttgtgagcgtcgaa

SEQ ID NO: 539437 - DNA, 75 bp, synthetic construct
  source 1..75: mol_type = other DNA
tgaatacaaaactaatattgtaatatcagagatgaacacagaagttgtatatcaaagtgttgattcagaaacaat

SEQ ID NO: 539438 - DNA, 75 bp, synthetic construct
  source 1..75: mol_type = other DNA
caagtctgatattacttgctctcagtttagaaacaccaaagtgctatgccggtgataaactcatgagtgcaagct

SEQ ID NO: 539439 - DNA, 75 bp, synthetic construct
  source 1..75: mol_type = other DNA
gttgatcttaactgactacggtaatgctgatagctcgaattgtcctgggataaatacggcgacatttcagtgtgc

SEQ ID NO: 539440 - DNA, 75 bp, synthetic construct
  source 1..75: mol_type = other DNA
gataaagatacagataaagatacagataaagatacagataaagatacagatcaagaagatcaaaacactatggtc

SEQ ID NO: 539441 - DNA, 75 bp, synthetic construct
  source 1..75: mol_type = other DNA
ttctcggttacagtcaggaagagctgcgcggactcaccttccagcaactgacctggccggaggatctcaataaag

SEQ ID NO: 539442 - DNA, 75 bp, synthetic construct
  source 1..75: mol_type = other DNA
cctgccgtagcacatcgaatttatcttatgcccagcattaaacctaacaatagaagaataaagtttagtagcatt

SEQ ID NO: 539443 - DNA, 75 bp, synthetic construct
  source 1..75: mol_type = other DNA
tttcaattaaaagcattcgaaattcttttacacgttgctccagataatgcacttaatttattaaaaagacgctat

SEQ ID NO: 539444 - DNA, 75 bp, synthetic construct
  source 1..75: mol_type = other DNA
atcttcccaaaaacaggcagtttgattatgtgaatgaaagtaatgcagggaagattgtgatcgactcgattaagt

SEQ ID NO: 539445 - DNA, 75 bp, synthetic construct
  source 1..75: mol_type = other DNA
ggtggactgactttcagtaatgatagttttagcgactccgatacactggcggtagttcaggctccaggtgctcaa

SEQ ID NO: 539446 - DNA, 75 bp, synthetic construct
  source 1..75: mol_type = other DNA
tctggcactggtgccgctgggattgttatttaaaccacactatctgctgcgccatcgcaacccacggttgctttt

SEQ ID NO: 539447 - DNA, 75 bp, synthetic construct
  source 1..75: mol_type = other DNA
agtttatatttctatgtcacggtagtgacgccgggagaagtaagctacggacaatacaactccaatgcaagaaaa

SEQ ID NO: 539448 - DNA, 75 bp, synthetic construct
  source 1..75: mol_type = other DNA
tatcgcctcaatggtgacacgctgcgcaggatccagatccatctgctggataaatatcgcaaagtaccgcccgag

SEQ ID NO: 539449 - DNA, 75 bp, synthetic construct
  source 1..75: mol_type = other DNA
ggcgcaaggtgctccggaagcagtgatgaaaccagagcttctaaagatggtgttcagcgtagaagcggaaatcca

SEQ ID NO: 539450 - DNA, 75 bp, synthetic construct
  source 1..75: mol_type = other DNA
ccacgaagttataatctctgatgccgcaaaaataagagcggcagagcgggctatcgctaagaaggcaccgttcca

SEQ ID NO: 539451 - DNA, 75 bp, synthetic construct
  source 1..75: mol_type = other DNA
ctgaatctgaggcaacaactggcaggggcgggcaggaagtcactgtcgttctcaaaatcggtggaacagcatgac

SEQ ID NO: 539452 - DNA, 75 bp, synthetic construct
  source 1..75: mol_type = other DNA
taattctaaactaactaagtttaataacacgatagaggagaagatacattctcttttaaaaaatgggccgatgaa

SEQ ID NO: 539453 - DNA, 75 bp, synthetic construct
  source 1..75: mol_type = other DNA
tcgtcctcattgtgattgcgggtattttgctgaatgtgggaacggcgcttttctgggtattacaggtcatcatgg

SEQ ID NO: 539454 - DNA, 75 bp, synthetic construct
  source 1..75: mol_type = other DNA
ctgccgcgtggtttctgagttgttaaccttcacttcttacggttgtgacgaatcaacggtgactgtcacaccgac

SEQ ID NO: 539455 - DNA, 75 bp, synthetic construct
  source 1..75: mol_type = other DNA
accagtccaacggtacatgattccgcttgccccacgattccggttgcttcttttgatatatcatggagtgagaat

SEQ ID NO: 539456 - DNA, 75 bp, synthetic construct
  source 1..75: mol_type = other DNA
ggattgcctcattttattcagtatctgaggcatttggatttggtacgtatacaagcccaacagttcatgattcta

SEQ ID NO: 539457 - DNA, 75 bp, synthetic construct
  source 1..75: mol_type = other DNA
agtcacaggtaaattctgttgatgagaaatatcaggaactacgggcagaactccatgaagcccggaaaaacattc

SEQ ID NO: 539458 - DNA, 75 bp, synthetic construct
  source 1..75: mol_type = other DNA
ccggtcaggaactgcccattcgctggcttgcgcaacacggcagcgaaaaaccagtaacgcacgtttcacgcgacg

SEQ ID NO: 539459 - DNA, 75 bp, synthetic construct
  source 1..75: mol_type = other DNA
gcaggctacgatgaagatgactttaaaaaacctgttcgcgtcaatttgcccgttgttgatgacctcccgccagaa

SEQ ID NO: 539460 - DNA, 75 bp, synthetic construct
  source 1..75: mol_type = other DNA
cgaagggtctcgaataatgaccataaatgatcttgaacgttttaaagcatctatcctcagttttatcacggccat

SEQ ID NO: 539461 - DNA, 75 bp, synthetic construct
  source 1..75: mol_type = other DNA
ctgacaccacacgtatccagacggtctaccagccggggagcttcacgccgctcatccgtatcgagacagagaacg

SEQ ID NO: 539462 - DNA, 75 bp, synthetic construct
  source 1..75: mol_type = other DNA
ctgccgcacgcggtgcgccgttttgagtttatggttatgccgggggaaaccgaagcgcagcttagcgagccgcag

SEQ ID NO: 539463 - DNA, 75 bp, synthetic construct
  source 1..75: mol_type = other DNA
acgcagatacataccgatcaggataaccacgacggcgttacccgcataggcgatacgcaaaaccgcctgcgcgcg

SEQ ID NO: 539464 - DNA, 75 bp, synthetic construct
  source 1..75: mol_type = other DNA
agacggaccgtatcccggaaggggttatccggatgcacgacgagcgcacccaccactatcactacgacagccagc

SEQ ID NO: 539465 - DNA, 75 bp, synthetic construct
  source 1..75: mol_type = other DNA
acaagtgctcggtgagctttatggatatcaaagatatattatgcctaaaggtcctttcactggattcccatttga

SEQ ID NO: 539466 - DNA, 75 bp, synthetic construct
  source 1..75: mol_type = other DNA
tagccgaacgaacatgatttttgaggcgtgcgggtttaacaacccctctatgaatacaaatgcgcctataagcct

SEQ ID NO: 539467 - DNA, 75 bp, synthetic construct
  source 1..75: mol_type = other DNA
taaccactttgcggtaataccggcagaccggacatggcgaccacagccgttgctgaaaccgctggtggatggccc

SEQ ID NO: 539468 - DNA, 75 bp, synthetic construct
  source 1..75: mol_type = other DNA
tgctggatccgtgtggcacaggcgtgggcaggcaccggttttggcaacctggcgataccgcgtgtgggtcaggag

SEQ ID NO: 539469 - DNA, 75 bp, synthetic construct
  source 1..75: mol_type = other DNA
atgaacgagtggataatgcccgtattgatttacgctcaaaatactatgttaaacctaaggaaggtgcgaacaagt

SEQ ID NO: 539470 - DNA, 75 bp, synthetic construct
  source 1..75: mol_type = other DNA
tgagtattaccgcctgaatgctgctactgacgtcggctttacgaccaccggaaccgatgcgaccagctttgcgaa

SEQ ID NO: 539471 - DNA, 75 bp, synthetic construct
  source 1..75: mol_type = other DNA
atgtattccgggatattgtttttgatggccgagataaaacaacgtaccttttttattcgccaaatactgcaaccc

SEQ ID NO: 539472 - DNA, 75 bp, synthetic construct
  source 1..75: mol_type = other DNA
caccatcaactatctggtgaagttcgacttccatttcctctatgtgctggcctgtacgttctgcatcaacgtggt

SEQ ID NO: 539473 - DNA, 75 bp, synthetic construct
  source 1..75: mol_type = other DNA
ggtatccatccacaaaatcacctggccggttacagcggtgtgcttcaggccgatgcttacggtggttaccgggcg

SEQ ID NO: 539474 - DNA, 75 bp, synthetic construct
  source 1..75: mol_type = other DNA
tcgtcgtttctgaccgcgtgtattggcaatattagtgacaggcttagtgcattgtttcgtacggacattgcagca

SEQ ID NO: 539475 - DNA, 75 bp, synthetic construct
  source 1..75: mol_type = other DNA
ctggttattcagcgcgaagggcagaaggttatgtgcctgcactccactgtttgggtgaatgaaaaagaccggacc

SEQ ID NO: 539476 - DNA, 75 bp, synthetic construct
  source 1..75: mol_type = other DNA
tgggcacggttgtcgcgttcccgacgaagaataacgacctacaggacgggctggttattcagcgcgaagggcaga

SEQ ID NO: 539477 - DNA, 75 bp, synthetic construct
  source 1..75: mol_type = other DNA
ttacattgcgaaataattaccgggactgtggtaaaggtctgggccttgatttgcttaataaccccgacctgttgc

SEQ ID NO: 539478 - DNA, 75 bp, synthetic construct
  source 1..75: mol_type = other DNA
atttgcccgcgcttacacccgtaatcccgaaaaattagccaaccgtgcttatgccggtcgtggtggtaatggtaa

SEQ ID NO: 539479 - DNA, 75 bp, synthetic construct
  source 1..75: mol_type = other DNA
gtcaaacagtatattcaaattcattcatcttgaatgctcctgcggtcgtctttccatttaaaaatgatttagcaa

SEQ ID NO: 539480 - DNA, 75 bp, synthetic construct
  source 1..75: mol_type = other DNA
aggcgaatcagccattaactaaatccgtgattgcggaaagctgtgcccgtgcattgcatgagggccggacagtcg

SEQ ID NO: 539481 - DNA, 75 bp, synthetic construct
  source 1..75: mol_type = other DNA
attcaagttgctcaaggcttgcctggacgctgggcatgaccccgttgatgtgatcaacaccagtatcgccaacgg

SEQ ID NO: 539482 - DNA, 75 bp, synthetic construct
  source 1..75: mol_type = other DNA
tgactgcatcgttgaagcaccggcaccatcccgtccgatagagcgtggtatcgcgggcccggggttacttgcccg

SEQ ID NO: 539483 - DNA, 75 bp, synthetic construct
  source 1..75: mol_type = other DNA
tctgtagatctggtcctaaattgcgatagtgtctataacgtcacgactaatccagtgacttttaaagttgagcgt

SEQ ID NO: 539484 - DNA, 75 bp, synthetic construct
  source 1..75: mol_type = other DNA
tgggcggatgggagtccatagaaatggttcgtaggtatgctcaccttgcgcctaatcatttgacagagcatgcaa

SEQ ID NO: 539485 - DNA, 75 bp, synthetic construct
  source 1..75: mol_type = other DNA
ggacagacctgtctaaaattcacaagtatctactccctcgtcttggcgataaaaaaatcgccgatatgacggagg

SEQ ID NO: 539486 - DNA, 75 bp, synthetic construct
  source 1..75: mol_type = other DNA
cgcacattagaaataataaaagccattgttccatccgaaaaactatgtattattaaaaatacaacagataggaat

SEQ ID NO: 539487 - DNA, 75 bp, synthetic construct
  source 1..75: mol_type = other DNA
ggcaccgcgacaattacggctacaacctcagatggtgacttcaccgatacctgtgctgttaccgtgactgctgca

SEQ ID NO: 539488 - DNA, 75 bp, synthetic construct
  source 1..75: mol_type = other DNA
gcaactgcttctctggtcgttggtgcaacccagcaactgagcggtgcagttcagccaaccgatgcgactaacaaa

SEQ ID NO: 539489 - DNA, 75 bp, synthetic construct
  source 1..75: mol_type = other DNA
tcttccttggggatcatacaggcgatagatttagtactatttttggtgataaatatatccttactttgctaaatt

SEQ ID NO: 539490 - DNA, 75 bp, synthetic construct
  source 1..75: mol_type = other DNA
accaaagtgaccgcccctattgacggccgcgccagccgggcgctgatcaccagcggtaacctggtcaccgcgggc

SEQ ID NO: 539491 - DNA, 75 bp, synthetic construct
  source 1..75: mol_type = other DNA
agggcggctggcagacggtttacgcatcgttcagaaggggttgaatcctggggatagcgtcatcgtcgacggctt

SEQ ID NO: 539492 - DNA, 75 bp, synthetic construct
  source 1..75: mol_type = other DNA
tacagcctgtggcatattcgtgatgatgaggccgatgattatgctttcctcggcatttataccactgcaaaactg

SEQ ID NO: 539493 - DNA, 75 bp, synthetic construct
  source 1..75: mol_type = other DNA
aggtatcggcatttacacccgttatgaactggccttgcaggccaaaaaagacgtggaaaataagccaggatttgt

SEQ ID NO: 539494 - DNA, 75 bp, synthetic construct
  source 1..75: mol_type = other DNA
atgagcaaaaatcagcgacaaaccctggtaagccagcatagatcagaccacacgcatatggcaccacttgcgaat

SEQ ID NO: 539495 - DNA, 75 bp, synthetic construct
  source 1..75: mol_type = other DNA
ttgatggccattgtccaggccgaccccaatcagttggcacaatttcgccgtgttaactgccgttattgctggggc

SEQ ID NO: 539496 - DNA, 75 bp, synthetic construct
  source 1..75: mol_type = other DNA
atggcgacgaaaggaagttctgctggtggtgcaactgacagtcgcaatgatctggagcttgaaggactgaggctt

SEQ ID NO: 539497 - DNA, 75 bp, synthetic construct
  source 1..75: mol_type = other DNA
tcatcaatgcttacccgatgacccgtctggcatataacgactttcgtggttgggagttaccaagtgacgaaaacg

SEQ ID NO: 539498 - DNA, 75 bp, synthetic construct
  source 1..75: mol_type = other DNA
gacaagtcgctgaattcaccgaaacaacctgttgatatcgcaaccgatcttaacgcgccggttctcggcttatat

SEQ ID NO: 539499 - DNA, 75 bp, synthetic construct
  source 1..75: mol_type = other DNA
ataaaaacaacttcaacagcgtcatggctgagttttcgcctgcggttaatttaacagtagaagatacgctaaacg

SEQ ID NO: 539500 - DNA, 75 bp, synthetic construct
  source 1..75: mol_type = other DNA
gcttgatctgcatacaggcaatgcaaaaaagaaagttgaactccccctcaagcttcttgccgtaggcgattacag

SEQ ID NO: 539501 - DNA, 75 bp, synthetic construct
  source 1..75: mol_type = other DNA
ggttaacaacgccggtggcggtggacctaaaccgtttgatatgccaatggcggattttcgccgtgctatgaactg

SEQ ID NO: 539502 - DNA, 75 bp, synthetic construct
  source 1..75: mol_type = other DNA
cgtggcgcggggagtatgatgaatggggcaaccagcttaatgaggagaacccgcatcacctgcaccagccgtacc

SEQ ID NO: 539503 - DNA, 75 bp, synthetic construct
  source 1..75: mol_type = other DNA
ggcgctgcgggctgctaatgcgaaagcagagattatcgtgtacccggatgccgggcatgcattcaatgctgatta

SEQ ID NO: 539504 - DNA, 75 bp, synthetic construct
  source 1..75: mol_type = other DNA
gccagtgccgacacgctgatccgtcgtgagtttcctgacaacatcgatctgctgatcatcgatgaagcacacatg

SEQ ID NO: 539505 - DNA, 75 bp, synthetic construct
  source 1..75: mol_type = other DNA
tgggataagaaaggccgtccccctcgtgaaagctggggcgagaagaaacatgacccgatgaagttcggcccggta

SEQ ID NO: 539506 - DNA, 75 bp, synthetic construct
  source 1..75: mol_type = other DNA
ccgttggcgcttcattggctggaagttggtattttatttgtaattcatttataatttcttcgttaccatctatat

SEQ ID NO: 539507 - DNA, 75 bp, synthetic construct
  source 1..75: mol_type = other DNA
gctacaatgattaactgtgccatggatggatcaaatatttcgttaaacgcaggttcgcttggtggggctggcgtt

SEQ ID NO: 539508 - DNA, 75 bp, synthetic construct
  source 1..75: mol_type = other DNA
atgagaaatttgggtttcgtaaaaaaaattcaagaatatttatatattgaacccacttgttcagaaatgatgagt

SEQ ID NO: 539509 - DNA, 75 bp, synthetic construct
  source 1..75: mol_type = other DNA
aaaaaatgacgttcacacaagcgtgtgatttatcaaaagatttattcgattcacgagaagaacgcttaaagagtg

SEQ ID NO: 539510 - DNA, 75 bp, synthetic construct
  source 1..75: mol_type = other DNA
tggtcagccagaatagatcagactacacgcatatggcaccacttgcgagtaactcattactgtatctactactgg

SEQ ID NO: 539511 - DNA, 75 bp, synthetic construct
  source 1..75: mol_type = other DNA
cccaccgattcactggcgccggtcactgacgtgtacgcggcactcattgaagaagcaaccaaagaaaacacatga

SEQ ID NO: 539512 - DNA, 75 bp, synthetic construct
  source 1..75: mol_type = other DNA
tgtcaaaaatcccctctatttcaggaaataatggttattcacttcgttgtgaggaagtaaagataaacggtgagt

SEQ ID NO: 539513 - DNA, 75 bp, synthetic construct
  source 1..75: mol_type = other DNA
aaaacaaaaaatgtataggtgttttatgtgaaagttctttgtccaagctttgtcctagagggttaatttattctc

SEQ ID NO: 539514 - DNA, 75 bp, synthetic construct
  source 1..75: mol_type = other DNA
gcgtatcgtagccatggcaaccgccggggtggaaccgcgcctgatggggcttggtccggtgcctgcaactcgccg

SEQ ID NO: 539515 - DNA, 75 bp, synthetic construct
  source 1..75: mol_type = other DNA
gcacgggcgattaaagcgggcgatggcgatttgctgatcgccggtggcgtggagtcaatgtctcgggcaccgttt

SEQ ID NO: 539516 - DNA, 75 bp, synthetic construct
  source 1..75: mol_type = other DNA
ccatagttctgggacgataatgtgccttggcgcgaacaacttggttatgaccaagcaggcaaccttagggccaat

SEQ ID NO: 539517 - DNA, 75 bp, synthetic construct
  source 1..75: mol_type = other DNA
agaatgtgctctcacaatgacgcggagcacaaatatgagaagcaaaatcagaccgcagaaaattttgttctggaa

SEQ ID NO: 539518 - DNA, 75 bp, synthetic construct
  source 1..75: mol_type = other DNA
cttgccgaaggcgaagaagctctcagcttcagtgagtttaaacaggcactcagaataagaatgtgctctcacaat

SEQ ID NO: 539519 - DNA, 75 bp, synthetic construct
  source 1..75: mol_type = other DNA
agtcgccacccgctactgtatcgtgaaagtgatattcgaagctgtcatgatcctgcgcgacagcggcggagcccc

SEQ ID NO: 539520 - DNA, 75 bp, synthetic construct
  source 1..75: mol_type = other DNA
atgaaaaaatggaccataattttcgcgagcctaatgctgctcgttctgagtgttgtcggcgcatctaaaagttat

SEQ ID NO: 539521 - DNA, 75 bp, synthetic construct
  source 1..75: mol_type = other DNA
cattgaatgaatggagatttacccaaaaacatttcgggcgggatcgagtatacacaactaaagcatgcgaattac

SEQ ID NO: 539522 - DNA, 75 bp, synthetic construct
  source 1..75: mol_type = other DNA
atggtaaatcccttcatacttcaagccacagatgcaatgactcgaattattttggggatacatactttattactg

SEQ ID NO: 539523 - DNA, 75 bp, synthetic construct
  source 1..75: mol_type = other DNA
gtgacattttcggaaaccacgaagcgctggtccctgacggccgcgcagggccagatgtactggtcgcagattcat

SEQ ID NO: 539524 - DNA, 75 bp, synthetic construct
  source 1..75: mol_type = other DNA
aaaacctccatgcattaaaagaaaagcgtttaaatggaatgcctaaaacaacacccaaaagtgaccaggttatta

SEQ ID NO: 539525 - DNA, 75 bp, synthetic construct
  source 1..75: mol_type = other DNA
aaggatttaatacatttgtagaaaattctaatagagttattccagtcataatacctaggtgggattcaaccgttc

SEQ ID NO: 539526 - DNA, 75 bp, synthetic construct
  source 1..75: mol_type = other DNA
ggggcgcaatgtccgggcaaaatcaggtttaaaccgttcgatactggatcagggctggtatgaaatgcgccgcca

SEQ ID NO: 539527 - DNA, 75 bp, synthetic construct
  source 1..75: mol_type = other DNA
atgaacgaaaatcagaggaaagccttggtcagccagaatagatcagactacacgcatatggcaccacttgcgagt

SEQ ID NO: 539528 - DNA, 75 bp, synthetic construct
  source 1..75: mol_type = other DNA
aacgaatggtatgttcagcctcaggcccagcttgtctggatgggggttaaagctgatgaactctatgaaagtaac

SEQ ID NO: 539529 - DNA, 75 bp, synthetic construct
  source 1..75: mol_type = other DNA
tctggtaacttgtcagttggatgaacaacaaatgtcatcactgctttatgaaagagatgatttaagcgccattga

SEQ ID NO: 539530 - DNA, 75 bp, synthetic construct
  source 1..75: mol_type = other DNA
cgagataaatactgatatagatttaactaacttcttagatgcaatgaagaaatatgcaaaggataatgttaaaga

SEQ ID NO: 539531 - DNA, 75 bp, synthetic construct
  source 1..75: mol_type = other DNA
ggtggaacgctttaccgaggaatgagcagggaggacgcaaaaaaactgttcccaggcggagatattaaaaaggga

SEQ ID NO: 539532 - DNA, 75 bp, synthetic construct
  source 1..75: mol_type = other DNA
gcgttcatccttcagccttccctaagatggtcaaaatggctatcgagcagcagaacaacaaacgccctgtcattg

SEQ ID NO: 539533 - DNA, 75 bp, synthetic construct
  source 1..75: mol_type = other DNA
ttgatgacatgacggactatgctcgcatcagagttggctcgaggggaggtgcttacataccctctgaggaaattg

SEQ ID NO: 539534 - DNA, 75 bp, synthetic construct
  source 1..75: mol_type = other DNA
agcaacttgttttttgtctctcttgctgaagaagcatttttcagaggatatcttcagcagcgtctttctatgatt

SEQ ID NO: 539535 - DNA, 75 bp, synthetic construct
  source 1..75: mol_type = other DNA
gtctcatccagaattaatgaaggagcgttcattctattcagctccattcgacctaacaattaggtatggttccag

SEQ ID NO: 539536 - DNA, 75 bp, synthetic construct
  source 1..75: mol_type = other DNA
atgagcgtatcggggaaagattttattgtttttgctggtaaatgcatttctcacaacgatgaaatcggttacaga

SEQ ID NO: 539537 - DNA, 75 bp, synthetic construct
  source 1..75: mol_type = other DNA
tggctgccgctcgctagcgcgttgaacaggcgcgttttcggcctgcaagcaaaatcgccgcagcgctttgccacg

SEQ ID NO: 539538 - DNA, 75 bp, synthetic construct
  source 1..75: mol_type = other DNA
tccgtcgtcagcagcctcacggcccttatgtgctggcgggttggtcgtatggcgcgtttcttgcggcgggcgccg

SEQ ID NO: 539539 - DNA, 75 bp, synthetic construct
  source 1..75: mol_type = other DNA
gcccttcgcgaggcccgtcgcctcttttatgtaggcgtcacccgtcctcgaaaagaactgcacatggtttatgaa

SEQ ID NO: 539540 - DNA, 75 bp, synthetic construct
  source 1..75: mol_type = other DNA
ccgtggtgaaggctgatttggcgacacttctggatgtcgagatcggcactaacctggttgccgctgttaaagaca

SEQ ID NO: 539541 - DNA, 75 bp, synthetic construct
  source 1..75: mol_type = other DNA
tggcaatgctgtctgaatttatgggtagacaacttactactgaagagagtaaagatgtgccactttttatttcaa

SEQ ID NO: 539542 - DNA, 75 bp, synthetic construct
  source 1..75: mol_type = other DNA
acactaatgaagtgaccattgatttatcttacaacctggccatcacaaatatcgataccagtgatgaacatcttg

SEQ ID NO: 539543 - DNA, 75 bp, synthetic construct
  source 1..75: mol_type = other DNA
ttgtctaactttccttgactttaccgacaatgctagtcttatcaatatcaacctcaccttgaataatattgaaac

SEQ ID NO: 539544 - DNA, 75 bp, synthetic construct
  source 1..75: mol_type = other DNA
taaaaaataatgccagttatcaagtgaataacgcattacctaacagagaaaccatcgccagcaatttttttgaac

SEQ ID NO: 539545 - DNA, 75 bp, synthetic construct
  source 1..75: mol_type = other DNA
catctctgctgctttctttatttgtttcgacagcagaaggtgctgtcgaaacactcaatttttccgtgaccatcg

SEQ ID NO: 539546 - DNA, 75 bp, synthetic construct
  source 1..75: mol_type = other DNA
tttgggtcggacttacaagagtatctgattatgctcaagtacgtgcgggaacagtcagtgctgatattatttttt

SEQ ID NO: 539547 - DNA, 75 bp, synthetic construct
  source 1..75: mol_type = other DNA
agagttgtatcctgtatcagtcctgcaaaattttacgagtgctttattaactggatgcgtgactgccattcttca

SEQ ID NO: 539548 - DNA, 75 bp, synthetic construct
  source 1..75: mol_type = other DNA
tggtaccgtgcatagctttgcattaaatcaggttttaatcccctactcacgatgtatacctggtttgctgccgga

SEQ ID NO: 539549 - DNA, 75 bp, synthetic construct
  source 1..75: mol_type = other DNA
atgaaaaatattataagtttctacaaaaaaaaacatccacctaatgagctacagcattttcaccccgagttaaaa

SEQ ID NO: 539550 - DNA, 75 bp, synthetic construct
  source 1..75: mol_type = other DNA
ttttccatattcccaaatcaatcaccagtagatgtcacaaatgatatttcattagaagtaattatagagatatcc

SEQ ID NO: 539551 - DNA, 75 bp, synthetic construct
  source 1..75: mol_type = other DNA
ttgtatatgattttaataggttatacgaaagacaaaaaaaacgaaaagaaaagagacctaatcgatgatattatt

SEQ ID NO: 539552 - DNA, 75 bp, synthetic construct
  source 1..75: mol_type = other DNA
taatatcggattatcaaactacataaaagaactatatctaccgcccttagatgacctattagtgcgcgcaacaga

SEQ ID NO: 539553 - DNA, 75 bp, synthetic construct
  source 1..75: mol_type = other DNA
tcttccaggtattcctctgataatcaacttacaaatcgtgagtcagaaatattacaactcatagctgatggtaaa

SEQ ID NO: 539554 - DNA, 75 bp, synthetic construct
  source 1..75: mol_type = other DNA
tttccttgtatcgccctgtttcttgttctgtctcctcgggccgtcgggtcctgcctcccctggccctcgggagcc

SEQ ID NO: 539555 - DNA, 75 bp, synthetic construct
  source 1..75: mol_type = other DNA
gagatatgtttattgaggcaacacctgcctttagcctgtctaaagatagtgagctcttaacatcctggggccagg

SEQ ID NO: 539556 - DNA, 75 bp, synthetic construct
  source 1..75: mol_type = other DNA
cagtaattgagaagatctcaggtctggtatttaatatagatttttttgccggttacagcccggaacgcattaatc

SEQ ID NO: 539557 - DNA, 75 bp, synthetic construct
  source 1..75: mol_type = other DNA
tttacgcttgaatgtagttctgatgaactggctcaagcttactatcttcaatattcatgtgattataaagaatta

SEQ ID NO: 539558 - DNA, 75 bp, synthetic construct
  source 1..75: mol_type = other DNA
ccagaagcagcaacgtttgtggataaaatttactcctcaattataacagccgggacatacaaggcatcatctatt

SEQ ID NO: 539559 - DNA, 75 bp, synthetic construct
  source 1..75: mol_type = other DNA
aggcgttcttaaagaagggagaagttatactaaaataaatgataaatatattccaaagactattgctcctgagat

SEQ ID NO: 539560 - DNA, 75 bp, synthetic construct
  source 1..75: mol_type = other DNA
gtctggttgatgaggcagttatacgcttataagcaaagcgcacgatacagaaaacgcttgtcaaaatacctccag

SEQ ID NO: 539561 - DNA, 75 bp, synthetic construct
  source 1..75: mol_type = other DNA
aaagacgaaattaatcatgcggataaagtgattacactgcaaccgcatgccggagaaatgcaggaagcacgctat

SEQ ID NO: 539562 - DNA, 75 bp, synthetic construct
  source 1..75: mol_type = other DNA
gaaagtaataagcgtgacaatgcacttgcctcacttagattgagctctcagcaaatagaatctgctttcgaaaag

SEQ ID NO: 539563 - DNA, 75 bp, synthetic construct
  source 1..75: mol_type = other DNA
gcaaatagatttctctatccactacaacaaattcagcctgcgtgatcccatcctgcacggggtaatagatgttat

SEQ ID NO: 539564 - DNA, 75 bp, synthetic construct
  source 1..75: mol_type = other DNA
tgaacctatgtgtaccgttggacataacttaggttactttaataagaaaataaaaaaaataaatgcaagattaaa

SEQ ID NO: 539565 - DNA, 75 bp, synthetic construct
  source 1..75: mol_type = other DNA
acgtatctgttctatatgggctacatcaggttaattcacttcagcgccgggatggtttttaccgtggtcttgctg

SEQ ID NO: 539566 - DNA, 75 bp, synthetic construct
  source 1..75: mol_type = other DNA
catattattcctatatttataattcttattttatcgtctattgtattcaagtggattgttacagactatcatcaa

SEQ ID NO: 539567 - DNA, 75 bp, synthetic construct
  source 1..75: mol_type = other DNA
ctgtcgctacaccttgctccgacaactgcgaaccccagggcagcgtattcgcagcctggcggtcgtcgtactggc

SEQ ID NO: 539568 - DNA, 75 bp, synthetic construct
  source 1..75: mol_type = other DNA
gtatccgctgcccgcccgcgtcttccacctcccgcagcaggtcgaacgccccgtgacggtagcgcgtggtctgcc

SEQ ID NO: 539569 - DNA, 75 bp, synthetic construct
  source 1..75: mol_type = other DNA
ggttctgcgccccgaccagtcctcctccccggccatctggcccgccgcatcgtagtgcagccgccactgctggtt

SEQ ID NO: 539570 - DNA, 75 bp, synthetic construct
  source 1..75: mol_type = other DNA
tattacgggctacaggaagtatccatcctctggatgtgaactttatcaacgaagaagacctgggctacaacatgt

SEQ ID NO: 539571 - DNA, 75 bp, synthetic construct
  source 1..75: mol_type = other DNA
aagggacatatctggagccagatgaaaaaaataaatactcgtatttagaagaattaaaaaaagtcattgaaaaat

SEQ ID NO: 539572 - DNA, 75 bp, synthetic construct
  source 1..75: mol_type = other DNA
gatgtgagcacacctgttgtggtgaagccgtcggatggagaaggcacagtaatcagcgccaccagagacccggag

SEQ ID NO: 539573 - DNA, 75 bp, synthetic construct
  source 1..75: mol_type = other DNA
atttttttaaattcatgcgagcaatgattacaacaaattattctttaaataaatatcaatcttatgaaaaaaaag

SEQ ID NO: 539574 - DNA, 75 bp, synthetic construct
  source 1..75: mol_type = other DNA
gctacaactgggcacgatcagtgatgaagacagagcagcacttacccaatggatggcatacatcagtcaggtgaa

SEQ ID NO: 539575 - DNA, 75 bp, synthetic construct
  source 1..75: mol_type = other DNA
aaagtagattgtgttcctggctctttattcttgataaaaaaagaacttatgttgaatcttatgtttgacgaaaat

SEQ ID NO: 539576 - DNA, 75 bp, synthetic construct
  source 1..75: mol_type = other DNA
tgcgaatgtttatggaaatggtactgccggaaagttaagtgaaacaacggcacctaatccggcaaatgactatgc

SEQ ID NO: 539577 - DNA, 75 bp, synthetic construct
  source 1..75: mol_type = other DNA
tgggcaccggtgaatttgtctgggagccgttcctgctggctgaacgacttgaggcggcaggtgctcaggtcgtgt

SEQ ID NO: 539578 - DNA, 75 bp, synthetic construct
  source 1..75: mol_type = other DNA
aaaaacaaaaccgtaaatgaacttattggggtaatacaataccctgaatgcttgctgaatgattatgacattgct

SEQ ID NO: 539579 - DNA, 75 bp, synthetic construct
  source 1..75: mol_type = other DNA
gggcgtgcagcttatcaaacattgaaaaagatggctgcttctggtgatgggcgtgttttccgctcaagattaaaa

SEQ ID NO: 539580 - DNA, 75 bp, synthetic construct
  source 1..75: mol_type = other DNA
tttccagtgattgagagcggggaatttaatgctaagttcctttttactgatgatgatggtctaccttatgccaac

SEQ ID NO: 539581 - DNA, 75 bp, synthetic construct
  source 1..75: mol_type = other DNA
gaagacagagcagcactggcacgatggatggcatacatcagtcaggtgaaaaaaatggtattacccgccattaaa

SEQ ID NO: 539582 - DNA, 75 bp, synthetic construct
  source 1..75: mol_type = other DNA
atggaactaaaaaatataacccgttattatcctgaaaatatgccatatggtaataatgttcagtattttcagagt

SEQ ID NO: 539583 - DNA, 75 bp, synthetic construct
  source 1..75: mol_type = other DNA
ggatggcatacatcagtcaggtgaagaaaatggaactacccgccattaaaacagaagctgaatttaacgccatta

SEQ ID NO: 539584 - DNA, 75 bp, synthetic construct
  source 1..75: mol_type = other DNA
cacggagacgaatacggcgttttcattgctgccggtgttttccggtcatgcgtcggattcggataaaacggatat

SEQ ID NO: 539585 - DNA, 75 bp, synthetic construct
  source 1..75: mol_type = other DNA
ttgataaatggaataaactggtagataaattaaatcacgaaagaaatacagttccgtttgcgtgtttgaccacca

SEQ ID NO: 539586 - DNA, 75 bp, synthetic construct
  source 1..75: mol_type = other DNA
ggatgaaatacatcagtcaggtgaaaaaaatggaactaccagcgattaaaaacaaagctgaatttgacgccatta

SEQ ID NO: 539587 - DNA, 75 bp, synthetic construct
  source 1..75: mol_type = other DNA
cacaaccggtcccggaatacccggcgtacttcgaaccgggccgctatgaaggcgtgccgaatgacgtttatcacg

SEQ ID NO: 539588 - DNA, 75 bp, synthetic construct
  source 1..75: mol_type = other DNA
cgtttattgatgagtacaacgccagcctgccagcgcaactgagcgcagacgatatcaaagctttgctggatgaat

SEQ ID NO: 539589 - DNA, 75 bp, synthetic construct
  source 1..75: mol_type = other DNA
ggtctgccgaacgaggtttaccacgctgccaacggaatcagttccacccaggtaaaagatgcgcgcgtttcgctg

SEQ ID NO: 539590 - DNA, 75 bp, synthetic construct
  source 1..75: mol_type = other DNA
ggcacgaaggccgatctgattcaggccgtgaaggcagtcaaaccagatgcagtgttcgccgacgagctgctcgat

SEQ ID NO: 539591 - DNA, 75 bp, synthetic construct
  source 1..75: mol_type = other DNA
taaggagtctccacgcaaacccttctgcactcacgaagagaacctgcaacgcgtacgtgaagaagaagtacgccg

SEQ ID NO: 539592 - DNA, 75 bp, synthetic construct
  source 1..75: mol_type = other DNA
tacgccaagcctgtccgcaccgatttcccggtgttcaatgacctgcccgaagaaagcaccatcgattacacctgg

SEQ ID NO: 539593 - DNA, 75 bp, synthetic construct
  source 1..75: mol_type = other DNA
acccaccagcaacttgccaccgcgcaggcaattcagtcagcactgctctcgcacccgaccgcaggcatgctgcta

SEQ ID NO: 539594 - DNA, 75 bp, synthetic construct
  source 1..75: mol_type = other DNA
gcaacgcgtgcgtgaagaaggagcacgccgccgcgcagaggaagcggcagcacaaccgcagaaagtcgaacaaga

SEQ ID NO: 539595 - DNA, 75 bp, synthetic construct
  source 1..75: mol_type = other DNA
ggccgctggcgacgttgtcaccactatccctgccgatgtaaaaaatacagatgaagtagcgacttctgacgagaa

SEQ ID NO: 539596 - DNA, 75 bp, synthetic construct
  source 1..75: mol_type = other DNA
tgagcaccgcactggccattcagaaagccctgctaaagcacccaaccgccgggatgctgcttcagcatccgagcc

SEQ ID NO: 539597 - DNA, 75 bp, synthetic construct
  source 1..75: mol_type = other DNA
taccactggattgccatcattgaggcatccgcagaactgctggaactgggcatgctcgagtaccgcaaaacaatg

SEQ ID NO: 539598 - DNA, 75 bp, synthetic construct
  source 1..75: mol_type = other DNA
atcagcatgtggaacgttaagcaggaaagcctgcgcgccaggctgcaccgggaaatcattgaccgtgactatcac

SEQ ID NO: 539599 - DNA, 75 bp, synthetic construct
  source 1..75: mol_type = other DNA
attaaagagtacaacgccaccctgccgccgccggttaaaaccagcggcagccgtgacgcgctgctggagcagttg

SEQ ID NO: 539600 - DNA, 75 bp, synthetic construct
  source 1..75: mol_type = other DNA
ttgcatgttttagatgcagattatcagtctttaaaaaaatggtctctttatagatgtctgtatgctgagataaag

SEQ ID NO: 539601 - DNA, 75 bp, synthetic construct
  source 1..75: mol_type = other DNA
accagatgctaaaaaatataaactagttttcgccatagcttctaataaaaatcttcccgaagatttacctttgtt

SEQ ID NO: 539602 - DNA, 75 bp, synthetic construct
  source 1..75: mol_type = other DNA
gagcgatgggaaacgagggatcgttggtatatatagacgctgataataattttgtctggggattcttttttaccc

SEQ ID NO: 539603 - DNA, 75 bp, synthetic construct
  source 1..75: mol_type = other DNA
ggatggcagcggaagaaggcatcttcttttatgaagagcatgcttacaaaagtaccgaccagagcctggtgctgt

SEQ ID NO: 539604 - DNA, 75 bp, synthetic construct
  source 1..75: mol_type = other DNA
acagggtgctttaaataatcttgcaatgacaactccggcttataatttatctcctgtgtttaatctgaatcctac

SEQ ID NO: 539605 - DNA, 75 bp, synthetic construct
  source 1..75: mol_type = other DNA
tttcgggacagggcatcacttaattaatgataatagtattgtcaaaggttttggtcttaaaactacacttaattg

SEQ ID NO: 539606 - DNA, 75 bp, synthetic construct
  source 1..75: mol_type = other DNA
cctgacttcacccgcatgacgctggtgctgctctggttctcgttcttttttggcatgtataacggcgcgatggtg

SEQ ID NO: 539607 - DNA, 75 bp, synthetic construct
  source 1..75: mol_type = other DNA
tcacctgcaccagccgtaccgtctgccagggcagcagcatgatgaggagtcggggctgtactataaccgtcaccg

SEQ ID NO: 539608 - DNA, 75 bp, synthetic construct
  source 1..75: mol_type = other DNA
gaaagccgggcgtggcttgcgcagtgcggactgacggtggagcaactggccagacaggtggagccggaatacaca

SEQ ID NO: 539609 - DNA, 75 bp, synthetic construct
  source 1..75: mol_type = other DNA
atgtttaaacgctgggaagagaaaaaagagttaccgggagttgatagcctgacttttgccaatggggctgtcatc

SEQ ID NO: 539610 - DNA, 75 bp, synthetic construct
  source 1..75: mol_type = other DNA
atgtttaaacgctgggaagagaaaaaagagctacccggaatcgatagcctgacctttgctaatgggactgtcatc

SEQ ID NO: 539611 - DNA, 75 bp, synthetic construct
  source 1..75: mol_type = other DNA
gatacagcttgctggcttgctgactttgcttgtcggcaacctgctatggccacacgtctggctatggtcagtact

SEQ ID NO: 539612 - DNA, 75 bp, synthetic construct
  source 1..75: mol_type = other DNA
cgactggctgggtatgaagggcaaggtgcgacagctaacagcaacgccagccgtatgcttagaaatgccagggtt

SEQ ID NO: 539613 - DNA, 75 bp, synthetic construct
  source 1..75: mol_type = other DNA
aatttaccataggggataatattgacgaaatattattacaccctaggtatgaaaaaaaactttccaagcggatta

SEQ ID NO: 539614 - DNA, 75 bp, synthetic construct
  source 1..75: mol_type = other DNA
gaaaatcctaattattcaatgaacattgatctaaaatcatcatcaggtggtaccaagatcggttctgttgacaat

SEQ ID NO: 539615 - DNA, 75 bp, synthetic construct
  source 1..75: mol_type = other DNA
gattgtttcccgttggccagggtggatttagtttaggcggactgaggggaagggatggtagtttgctttacagtt

SEQ ID NO: 539616 - DNA, 75 bp, synthetic construct
  source 1..75: mol_type = other DNA
ccggctcatggatgtggagagcttccagcatatccgggcggtgcgtaacctgcgcggcagtcggctgcccagcgg

SEQ ID NO: 539617 - DNA, 75 bp, synthetic construct
  source 1..75: mol_type = other DNA
gcctcgttcctgaacatcgtcgccgttatgctcggagctgcctccctggagtcctgcagctggggcagcctgcgg

SEQ ID NO: 539618 - DNA, 75 bp, synthetic construct
  source 1..75: mol_type = other DNA
tgcgcggcacccggctgccgtccggccgggccctgccgccggaggagatccgggctctgtttaccgtctgtgagg

SEQ ID NO: 539619 - DNA, 75 bp, synthetic construct
  source 1..75: mol_type = other DNA
ggctgtgctataaccggttccggtactacgagccggaaaccgggatgtacctggtgagtgatccgctggggttgc

SEQ ID NO: 539620 - DNA, 75 bp, synthetic construct
  source 1..75: mol_type = other DNA
actgcgaccatcgcggcctgccgctggcccttatcagcacggaagggacaacagcgtggtacgcagaatacgatg

SEQ ID NO: 539621 - DNA, 75 bp, synthetic construct
  source 1..75: mol_type = other DNA
ttgctaatcatgtttcagagtgggaaatggaaaatttccgtgtatgttatgatgatcaggttattttcttatgtg

SEQ ID NO: 539622 - DNA, 75 bp, synthetic construct
  source 1..75: mol_type = other DNA
ccagagatggcaaacccgagccggaatatggaggcctcggctttgttgataacgccatacccaatccggattgtc

SEQ ID NO: 539623 - DNA, 75 bp, synthetic construct
  source 1..75: mol_type = other DNA
atacccaatattttattaccgctgtgttaaataggaccttcattgctcagaatgatggaatgtattgggtatatc

SEQ ID NO: 539624 - DNA, 75 bp, synthetic construct
  source 1..75: mol_type = other DNA
ccacttgcacaacagtttggtatcccgcagattgacccattaagtgatattattggtgttgtttttcctcaagct

SEQ ID NO: 539625 - DNA, 75 bp, synthetic construct
  source 1..75: mol_type = other DNA
accgcaatgctgattatgcgtctgctaccgacgggcagttattgcgtacatcgggggcagatttcactgctggga

SEQ ID NO: 539626 - DNA, 75 bp, synthetic construct
  source 1..75: mol_type = other DNA
atggatataaatcagctgcgttgctttgtggtgttaggtgatgagcttcactttggtcgggctgcccgtaaactc

SEQ ID NO: 539627 - DNA, 75 bp, synthetic construct
  source 1..75: mol_type = other DNA
tgcccgtgcatggggtatcagtggtgaggcagagttggccgtcatgcaggcgatcgctgaaaagccgggagcgtt

SEQ ID NO: 539628 - DNA, 75 bp, synthetic construct
  source 1..75: mol_type = other DNA
tgccagggcatggggtatcagtggtgaggccgagctggccgtcatgcaggctatcgctgaaaagcccggtgcgtt

SEQ ID NO: 539629 - DNA, 75 bp, synthetic construct
  source 1..75: mol_type = other DNA
tatatgatggctgtcagcacaaccgggcagtggctggtactcggctggccggagcgggtgccgggggtggacgag

SEQ ID NO: 539630 - DNA, 75 bp, synthetic construct
  source 1..75: mol_type = other DNA
acggggtaccggctgcatatggcgtctggaaagctgacttcagtgatactgccggacggcaggacggtgcggtat

SEQ ID NO: 539631 - DNA, 75 bp, synthetic construct
  source 1..75: mol_type = other DNA
ctttctgctcatcgtcgtttcccgctgggcagtgaagatgacgcggtgcgggcgcaggggctggagattatgcgt

SEQ ID NO: 539632 - DNA, 75 bp, synthetic construct
  source 1..75: mol_type = other DNA
cggtagtgcaaaacgcttctgctaaacgagctcttacccaaggtgaacaaaccttcggtggcgcagttacattcg

SEQ ID NO: 539633 - DNA, 75 bp, synthetic construct
  source 1..75: mol_type = other DNA
ctggataattcgccgatggaaaaagtctttcgcagccttaaaagtgaatggcttccgaaaggtggttatggtgat

SEQ ID NO: 539634 - DNA, 75 bp, synthetic construct
  source 1..75: mol_type = other DNA
gtgaacatatatatcgggtggcttttcaaattaatccctttaattatgggcttaatttgtatcgcgttaggtggc

SEQ ID NO: 539635 - DNA, 75 bp, synthetic construct
  source 1..75: mol_type = other DNA
aaaccagttggttatggcgcaaaattgttaaccacctgatcaatgagatttttcgccagaatgacgatgattttc

SEQ ID NO: 539636 - DNA, 75 bp, synthetic construct
  source 1..75: mol_type = other DNA
ccaaaacggtaattcgtatccgcaaaggtagctctaacggtgtggaactgactgggctgcaacaggacgaagaaa

SEQ ID NO: 539637 - DNA, 75 bp, synthetic construct
  source 1..75: mol_type = other DNA
cgccgccaaaaatgcaaggctgtgctgggcatcattgcattacggtgatgatttcaggctgtattcagcaagcta

SEQ ID NO: 539638 - DNA, 75 bp, synthetic construct
  source 1..75: mol_type = other DNA
tagcccatgagctgatcgcctgggcgcttaaaactgccgcgcacgcatcagctgcacaacgtaacaccccggagg

SEQ ID NO: 539639 - DNA, 75 bp, synthetic construct
  source 1..75: mol_type = other DNA
cttccgtaaaaacggttttgagctgatttcaccgcgctttaaccacatgcgcaatttcctgacctgcctgccctt

SEQ ID NO: 539640 - DNA, 75 bp, synthetic construct
  source 1..75: mol_type = other DNA
aaagttggtgagtttattcaaaaaggttaccgcacctgtcgccgtcataccggtgcctatatcaccatcacacag

SEQ ID NO: 539641 - DNA, 75 bp, synthetic construct
  source 1..75: mol_type = other DNA
aacatggcggtcaccggtacctcgggggcaggcaagaccggcctggtgcagcctatcctgcgcagcgtgctggac

SEQ ID NO: 539642 - DNA, 75 bp, synthetic construct
  source 1..75: mol_type = other DNA
agaccggttaccgtaccgtgcgacgtcaccgtggcgcgttcatcaccatcagccagaacatcaaggactttgatg

SEQ ID NO: 539643 - DNA, 75 bp, synthetic construct
  source 1..75: mol_type = other DNA
cgattgagatgtacaaaccaaatgtgcgcatcgtggaagttaatgtgccacgcgtcgctggcattcgcatcaaag

SEQ ID NO: 539644 - DNA, 75 bp, synthetic construct
  source 1..75: mol_type = other DNA
gaggcggtacttcagtcggtacataacccggtgttacagcaacttagcatcgcgattagttcgctgcagcgggca

SEQ ID NO: 539645 - DNA, 75 bp, synthetic construct
  source 1..75: mol_type = other DNA
tgcccgagtgttcagcttcatccgggatatgcttgatgacctggatttgtcccgcattatcggcgagatgacgga

SEQ ID NO: 539646 - DNA, 75 bp, synthetic construct
  source 1..75: mol_type = other DNA
gggcgaactggcggagctctaccctcagatgaacacggacgatctgcaggaacggctggcccgcattctctttgt

SEQ ID NO: 539647 - DNA, 75 bp, synthetic construct
  source 1..75: mol_type = other DNA
ccctcagatgaacacggacgatctgcaggagcggctggcccgcattctctttgtggcaaatatctgggggcgtct

SEQ ID NO: 539648 - DNA, 75 bp, synthetic construct
  source 1..75: mol_type = other DNA
gaactgcatcagcgctgtattgatcagcgtatcggtatcgatgtgcgtcctgacgatgtgcgtatcagcctggct

SEQ ID NO: 539649 - DNA, 75 bp, synthetic construct
  source 1..75: mol_type = other DNA
attgcctcgcgcagtcgcgccatcgacttttacgctctgggaatgtacctgcccaaccctgatcccattctcaag

SEQ ID NO: 539650 - DNA, 75 bp, synthetic construct
  source 1..75: mol_type = other DNA
aaattcgtggtgccggcacaggatgcctcgtatgacaatccttacggtttcccggacctgtccatgtgcttctgg

SEQ ID NO: 539651 - DNA, 75 bp, synthetic construct
  source 1..75: mol_type = other DNA
tggcagtgaaaccattgacatggaccctacccgcccgaaagccatttggggctttaacggcactgaacgcccagg

SEQ ID NO: 539652 - DNA, 75 bp, synthetic construct
  source 1..75: mol_type = other DNA
tccaggtgagatgtaccggaggcctaaaaagctggatccttaccaggagctgaattaccagtgtgttgatgacag

SEQ ID NO: 539653 - DNA, 75 bp, synthetic construct
  source 1..75: mol_type = other DNA
ccatcacgcagaacatcgtcgacttcgactccccgaccgcctccagcgccgcacgtgcagcgtgggggaactcat

SEQ ID NO: 539654 - DNA, 75 bp, synthetic construct
  source 1..75: mol_type = other DNA
gattccgcgaccgggctgtttattaataacaaaaccatcggttttatgtttgaggcgcgtcctttacccggtgcg

SEQ ID NO: 539655 - DNA, 75 bp, synthetic construct
  source 1..75: mol_type = other DNA
gggatgccaaagaccagtggttctcctctttcatgctgcgtatcaacgatacctgcagttttcatcgtctctttg

SEQ ID NO: 539656 - DNA, 75 bp, synthetic construct
  source 1..75: mol_type = other DNA
atggaaagagatccgtgagcgtctcaacagcaaccagacctgtattgtccgctattactacaacatcaccacatt

SEQ ID NO: 539657 - DNA, 75 bp, synthetic construct
  source 1..75: mol_type = other DNA
aaaatggggtggaacgtcatacccgggtgctcaactatcatcttgcacgcgacccggaaattgcgtttttgtgga

SEQ ID NO: 539658 - DNA, 75 bp, synthetic construct
  source 1..75: mol_type = other DNA
tggccaacctgatgccgttagtggcggataaccccctgacaccggcaggtctgctggcacccacctaccgtaacc

SEQ ID NO: 539659 - DNA, 75 bp, synthetic construct
  source 1..75: mol_type = other DNA
gccggagagtgtactgcgtgaaccacaacgggaacgggaagcggtccgcgaggttgcccgggaaaacctgctgca

SEQ ID NO: 539660 - DNA, 75 bp, synthetic construct
  source 1..75: mol_type = other DNA
ttgccgatgtgcgtacctactggtcaccagaagcaattgagcgtgtaacggggcataaactggacggactggcag

SEQ ID NO: 539661 - DNA, 75 bp, synthetic construct
  source 1..75: mol_type = other DNA
tcacccagactgtgaattcactggtatcagcactgaagctgcccgacgaatccgcgaaagccaatgacacgctgg

SEQ ID NO: 539662 - DNA, 75 bp, synthetic construct
  source 1..75: mol_type = other DNA
ctatttcaactcagataaaccaacactccacgatgatgcccggatggtggtactggaactcggtggcctggagtc

SEQ ID NO: 539663 - DNA, 75 bp, synthetic construct
  source 1..75: mol_type = other DNA
ggctggaagatcagcttaacgccggtaacttgccggagggcagcgaccagtttaacagtctgcaagaaaagctaa

SEQ ID NO: 539664 - DNA, 75 bp, synthetic construct
  source 1..75: mol_type = other DNA
ggagggggaactgctgtcaccgtcaaaattcgtggtgcccgcgcaggatgcctcgtatgacaatccctacggttt

SEQ ID NO: 539665 - DNA, 75 bp, synthetic construct
  source 1..75: mol_type = other DNA
gcagaagctggtgatgaccgacaccggcatcgaccggcgctactacgaactgtgcgcgctgtcggagctgaagaa

SEQ ID NO: 539666 - DNA, 75 bp, synthetic construct
  source 1..75: mol_type = other DNA
tcaagctcgtcgttcctgcatgctcgacctgctcgaaagcgtcaggcatgactatgtacacggtggatatacata

SEQ ID NO: 539667 - DNA, 75 bp, synthetic construct
  source 1..75: mol_type = other DNA
aaattcgaacactccagtgcgcgttaaaaaacggtgaatttgaaccattcatacaacatatccgttttccatact

SEQ ID NO: 539668 - DNA, 75 bp, synthetic construct
  source 1..75: mol_type = other DNA
tcacgcgaccaggagaacgaggatattgctcttacggtagggaagctgcgtgttgagcttgaagcagcaaaatca

SEQ ID NO: 539669 - DNA, 75 bp, synthetic construct
  source 1..75: mol_type = other DNA
tacaccgacacggcagggttcacggaccacgtcttcgcgttgatgcacctgctgggcttccgcttcgccccgcgc

SEQ ID NO: 539670 - DNA, 75 bp, synthetic construct
  source 1..75: mol_type = other DNA
aaaaccagccaaaggcgaagttcttgtcgttgtatctggttttactggttgcggaaaaagcgccattgccgggga

SEQ ID NO: 539671 - DNA, 75 bp, synthetic construct
  source 1..75: mol_type = other DNA
tctctttacgggttaggaattgaaagacttgctgatatatcagggaaggctgatggtattgttggggaaggtcag

SEQ ID NO: 539672 - DNA, 75 bp, synthetic construct
  source 1..75: mol_type = other DNA
gaaacgcagaaagaaaaaatggcctctgtatcctccggaatgcagctgccgcctggcttcaagatgccgttctga

SEQ ID NO: 539673 - DNA, 75 bp, synthetic construct
  source 1..75: mol_type = other DNA
gatgctggaagacctggtggctgcagcattcaacgacgcagcacgtcgtatcgaagaaacgcagaaagaaaaaat

SEQ ID NO: 539674 - DNA, 75 bp, synthetic construct
  source 1..75: mol_type = other DNA
atggcagttctcttaaacctagatatatatggatataaaaatgctgatggccgtttagttgaaatactccaagca

SEQ ID NO: 539675 - DNA, 75 bp, synthetic construct
  source 1..75: mol_type = other DNA
cggcattattccgcgtgatgccgatcagtacaatgccattcaggaacgcctgatttcacgctttagcgagcttta

SEQ ID NO: 539676 - DNA, 75 bp, synthetic construct
  source 1..75: mol_type = other DNA
tgtggctggaggatgcccggcgcagcggcgttattccgcgtgataccgatcagtacaatgccattcaggaacgcc

SEQ ID NO: 539677 - DNA, 75 bp, synthetic construct
  source 1..75: mol_type = other DNA
aataatcttaagctgggatccggaaaataccgctcattacgtacagtcgataccgctttgtacaaaaaacagtct

SEQ ID NO: 539678 - DNA, 75 bp, synthetic construct
  source 1..75: mol_type = other DNA
ccaccgagcgcgaaagcctgctggcactgccagatgccaaagacgaactgatacggcactacacgttcaacgaaa

SEQ ID NO: 539679 - DNA, 75 bp, synthetic construct
  source 1..75: mol_type = other DNA
ccagcgggagcagacccggcgcgagcacctgagcgagctgcaaaccgtgttcggtttccggcccttcaccatgag

SEQ ID NO: 539680 - DNA, 75 bp, synthetic construct
  source 1..75: mol_type = other DNA
ccctgatgctccgaaagctcggcagctacccacgccagaacggcctggccgtggcgctccgcgagctgggccgca

SEQ ID NO: 539681 - DNA, 75 bp, synthetic construct
  source 1..75: mol_type = other DNA
gaaagcgcggtgaatcaggccatcaggatggcggtatcaatgaactttggcgacgtggccagccccgtctggaag

SEQ ID NO: 539682 - DNA, 75 bp, synthetic construct
  source 1..75: mol_type = other DNA
aagcggcagcgatccgttcgccgccatcgaggccgttatgccctgggacaccttcgccgccagcgtcaccgaagc

SEQ ID NO: 539683 - DNA, 75 bp, synthetic construct
  source 1..75: mol_type = other DNA
ttcgctgtgcagctttgctacttgcgattccctggcacctttttgggcgtcgatgagcctccgtttccgcccctg

SEQ ID NO: 539684 - DNA, 75 bp, synthetic construct
  source 1..75: mol_type = other DNA
aagagatgctgggggctcaatatctttctatccgtaatagtaataatgaaacgctcttgcgtcgcaaaatcggta

SEQ ID NO: 539685 - DNA, 75 bp, synthetic construct
  source 1..75: mol_type = other DNA
ttcctgtcgccgctgggctgggagcacatcaacctaaccggcgattacgtctggcggcagagccgcagactggaa

SEQ ID NO: 539686 - DNA, 75 bp, synthetic construct
  source 1..75: mol_type = other DNA
tccccaaaagattaaaaaaacatcacaaaacggatgtttcttcaacaccacttttgctcatatgaacggaaccga

SEQ ID NO: 539687 - DNA, 75 bp, synthetic construct
  source 1..75: mol_type = other DNA
ccaaaaaggtgcaccggaggaaacccagaaattactggttactaatatgtttcaacggctggggctcgtgttccc

SEQ ID NO: 539688 - DNA, 75 bp, synthetic construct
  source 1..75: mol_type = other DNA
caggtattgaccaggttgttgagatgcgtattacgggggcgggtgtggtcatggcctggcaaattcgtcgctata

SEQ ID NO: 539689 - DNA, 75 bp, synthetic construct
  source 1..75: mol_type = other DNA
aacggacgtcctctggataaaaacattacgctgcatgatctgctgggttccagagcgtttctgttctccagaaat

SEQ ID NO: 539690 - DNA, 75 bp, synthetic construct
  source 1..75: mol_type = other DNA
cggagtgccgttctgcatccatctgatgtccagtcagctggttggtgacaggattgaatacgggctgcgtgagtt

SEQ ID NO: 539691 - DNA, 75 bp, synthetic construct
  source 1..75: mol_type = other DNA
tctcgtactgttctccctcgaagaaaaaaagccgggctgacattctggaaatggaaaacctggtgaaaatcatcc

SEQ ID NO: 539692 - DNA, 75 bp, synthetic construct
  source 1..75: mol_type = other DNA
atatgctgcgcaccaaactgccgcgcggtattccgttgtgtatccatctgatgtccagtcagctggttggtgaca

SEQ ID NO: 539693 - DNA, 75 bp, synthetic construct
  source 1..75: mol_type = other DNA
cctgaatttccatctggcccgtaacccggaaatcgcttttttgtggaacatggccgacaactacagcaacctgct

SEQ ID NO: 539694 - DNA, 75 bp, synthetic construct
  source 1..75: mol_type = other DNA
atgagtaataacccacttgaggccgtcactcaggcggttaactctcttgtcaccgcactgaaactgcctgacgaa

SEQ ID NO: 539695 - DNA, 75 bp, synthetic construct
  source 1..75: mol_type = other DNA
cggtttaacgccattacccgtgcctattatatgaacgcggcagcgacacagttcccgctgccggaggggattaat

SEQ ID NO: 539696 - DNA, 75 bp, synthetic construct
  source 1..75: mol_type = other DNA
aacgagctgcgtaaacagggggtttttatctccgacagtggtgtccgttctgtctggttactccataaccttgag

SEQ ID NO: 539697 - DNA, 75 bp, synthetic construct
  source 1..75: mol_type = other DNA
gccgccttcacgcagaccgcagagaccgctccccgcctctatgaatacggcaccctcccggcggtggaccgggcg

SEQ ID NO: 539698 - DNA, 75 bp, synthetic construct
  source 1..75: mol_type = other DNA
gcgtgacggctcacaggagctgctgctgagttatatccagcgctcgctgaccagcgcccgcagcgagtacagaat

SEQ ID NO: 539699 - DNA, 75 bp, synthetic construct
  source 1..75: mol_type = other DNA
tggccgttggtgatgcgaatggtgtcttgccgacaccagacccggcacagacaaaactgattaaccagaaacgca

SEQ ID NO: 539700 - DNA, 75 bp, synthetic construct
  source 1..75: mol_type = other DNA
tcagccatctcctcatccttatgaatttagccatcagaaggaaaataggttacgtttatgggttgtacctttctt

SEQ ID NO: 539701 - DNA, 75 bp, synthetic construct
  source 1..75: mol_type = other DNA
gttcaaaaaatctgattagttataacggtaaagctttatttaagctgcggcctgatatttgtttacggcctcgta

SEQ ID NO: 539702 - DNA, 75 bp, synthetic construct
  source 1..75: mol_type = other DNA
cacaggcggttattcaatatcttggtctgagcgatgcaagtggatacgttggacgctggctgaatacccgggttt

SEQ ID NO: 539703 - DNA, 75 bp, synthetic construct
  source 1..75: mol_type = other DNA
ataccacgcaggttgcgaccactgcatttgttcaggcggcactgacggctcttattaatggtgcgccagccacgc

SEQ ID NO: 539704 - DNA, 75 bp, synthetic construct
  source 1..75: mol_type = other DNA
tgaaggtgtatgtggatgaccaaatggcaaaacaccttgccgcagcggacccacattcacagtatgcgcccaaag

SEQ ID NO: 539705 - DNA, 75 bp, synthetic construct
  source 1..75: mol_type = other DNA
tccgcgtcaaagcgcgtatcccaccggaattactccagcagcatctggaatatgtcaaaacgggtttgccgggcg

SEQ ID NO: 539706 - DNA, 75 bp, synthetic construct
  source 1..75: mol_type = other DNA
gaccaacagtatgtcggcatcatttccaaagggatgctgctacgcgctttagatcgtgagggggtaaacaatggc

SEQ ID NO: 539707 - DNA, 75 bp, synthetic construct
  source 1..75: mol_type = other DNA
cacatttgccctcaggggttgcctcagattctcagtatgttagggtagaaaaaagtgactatttccattgggtaa

SEQ ID NO: 539708 - DNA, 75 bp, synthetic construct
  source 1..75: mol_type = other DNA
agtaccaccattaacaatgcgttggcactgaaagcgccgctgtcgagtccggcacttaccggaacgccaacagct

SEQ ID NO: 539709 - DNA, 75 bp, synthetic construct
  source 1..75: mol_type = other DNA
atgctctgcgcgctggtcgtatttgccgtttccttcttatcccggatggaagaatccgctgaacgtcgttcggcg

SEQ ID NO: 539710 - DNA, 75 bp, synthetic construct
  source 1..75: mol_type = other DNA
tcaataatattcgcgagcatctgatgctttatctttttctctggggtctgttggcaattatggacctgatctacg

SEQ ID NO: 539711 - DNA, 75 bp, synthetic construct
  source 1..75: mol_type = other DNA
atggtgctgattaccagcagtacggacaatatcaccctgaaaattgaccctgccgtagtgctggcaacccgcaag

SEQ ID NO: 539712 - DNA, 75 bp, synthetic construct
  source 1..75: mol_type = other DNA
gcaaatcaaagaagcacaaagtgccgttgctgccgcgcaggctttgctggagcaacggcaaagcgaaactcgtgc

SEQ ID NO: 539713 - DNA, 75 bp, synthetic construct
  source 1..75: mol_type = other DNA
ggaatcggcaaaagcccaggtttcggcttctaaagccgctatagaagcggcacgcaccaatatcattcaggcgca

SEQ ID NO: 539714 - DNA, 75 bp, synthetic construct
  source 1..75: mol_type = other DNA
caacaactggatgacgaccgcgccgccgccgaaagcgcccgtgctgcgctggaatcggcaaaagcccaggtttcg

SEQ ID NO: 539715 - DNA, 75 bp, synthetic construct
  source 1..75: mol_type = other DNA
tgatgctgctgcgttcagccctggaaggctggggcatctgcgaggtcaccaccacatttggtgacccgcgccggg

SEQ ID NO: 539716 - DNA, 75 bp, synthetic construct
  source 1..75: mol_type = other DNA
cgaaaacggccagcttgttgccgatacgctacgccacttagctgataacgaaatcgactctgattattttgctat

SEQ ID NO: 539717 - DNA, 75 bp, synthetic construct
  source 1..75: mol_type = other DNA
cggaattcaaacagtacaaccagaaccgccccaaccagttcagcgagctggagcgcagcgttatctctaaattcg

SEQ ID NO: 539718 - DNA, 75 bp, synthetic construct
  source 1..75: mol_type = other DNA
cagttccagccactgcagcgcgacatgattggtaagtttggtgcggccaaagaccagtggttcagttccttcctg

SEQ ID NO: 539719 - DNA, 75 bp, synthetic construct
  source 1..75: mol_type = other DNA
cttctgtacaacgcgaagaaaaagaccgtggtgctgattcgtcagttccgcgttgccacctgggttaatggcaat

SEQ ID NO: 539720 - DNA, 75 bp, synthetic construct
  source 1..75: mol_type = other DNA
gatgatcaaaaccggcgagatacgtgacggtaagacggtgttattgcttaactatttgcaaacgtcacatttaat

SEQ ID NO: 539721 - DNA, 75 bp, synthetic construct
  source 1..75: mol_type = other DNA
gtttcggcaccgaaagcgccgcgtcatctgccgaaaaatatcgacgtcgacgatatgaatcggctgctggatatt

SEQ ID NO: 539722 - DNA, 75 bp, synthetic construct
  source 1..75: mol_type = other DNA
gagctggtggggctggatatcaaacacctcgacctggagtctggtgaagtgtgggttatgggaaaaggcagcaaa

SEQ ID NO: 539723 - DNA, 75 bp, synthetic construct
  source 1..75: mol_type = other DNA
gaatggggcataaaacaagggctgaataatcacgttcacccgcataaattacgtcactcgttcgctacgcatatg

SEQ ID NO: 539724 - DNA, 75 bp, synthetic construct
  source 1..75: mol_type = other DNA
aaaccctgcgttttaacccgtttgcgaacatcaccgatattgaccagtcagcggagcgtgtccgtgaccagttgt

SEQ ID NO: 539725 - DNA, 75 bp, synthetic construct
  source 1..75: mol_type = other DNA
ggactctctgtacccgaaaagacgtcagctggacccgtattctgatctgaattatcagtgtgtggaggacagttt

SEQ ID NO: 539726 - DNA, 75 bp, synthetic construct
  source 1..75: mol_type = other DNA
gcgaccgtgcaatgctggaagtgatgtacggcgcgggtctgcgtctttccgagctggtggggctggatatcaaac

SEQ ID NO: 539727 - DNA, 75 bp, synthetic construct
  source 1..75: mol_type = other DNA
cgtctgctggacttcaaaaatcacaaggtcggtgaatttattgagaaaggctaccgtacggcccgccgtcatacc

SEQ ID NO: 539728 - DNA, 75 bp, synthetic construct
  source 1..75: mol_type = other DNA
gccgtggccctgatgaaaaaagcagccgacgtgctgaccatcggacgcggcatgatccacatcacgcttgtgctg

SEQ ID NO: 539729 - DNA, 75 bp, synthetic construct
  source 1..75: mol_type = other DNA
gattttggtgcccgcgccctgcgcgaatccttctctctggatttcgtccacttccgggagcagacagcggcggtg

SEQ ID NO: 539730 - DNA, 75 bp, synthetic construct
  source 1..75: mol_type = other DNA
cgatgcgccaccgacggacaaccgcgccggcctgctcgacaagatgcgcgatctgctgggcagaaacgacaagac

SEQ ID NO: 539731 - DNA, 75 bp, synthetic construct
  source 1..75: mol_type = other DNA
catggatattgcgcccggcggcatgaaaaagctccagggaaaacgttttctggccagtatgggacgcttcattaa

SEQ ID NO: 539732 - DNA, 75 bp, synthetic construct
  source 1..75: mol_type = other DNA
gctgccaccgcagcaactgcagagcatgaacgacctgattgtccgtattccccggagcgtcccctggcggatacg

SEQ ID NO: 539733 - DNA, 75 bp, synthetic construct
  source 1..75: mol_type = other DNA
gtaaaaaacctgcagaagtatagcgatgagatgatcgcgcttaaacgttcaatggacctggatgcgccagacgat

SEQ ID NO: 539734 - DNA, 75 bp, synthetic construct
  source 1..75: mol_type = other DNA
ccactgaagcgctggtcagcgagacgattcctaagcgcctggccgtgattggctcatcaggtggtggcgctggag

SEQ ID NO: 539735 - DNA, 75 bp, synthetic construct
  source 1..75: mol_type = other DNA
cctgatcgtgcaactcaacgacggcggcgagcgcgtggtggcattcgaccgctgcctgatcgccaccggcgcgag

SEQ ID NO: 539736 - DNA, 75 bp, synthetic construct
  source 1..75: mol_type = other DNA
ctgatgtccagtcagcttgttggtgacagaattgaatacgggctgcgtgagttctcctggtccggtgaacaggct

SEQ ID NO: 539737 - DNA, 75 bp, synthetic construct
  source 1..75: mol_type = other DNA
gaactgcgtcagcggctgggctccggtcagtcctctgtcgtgtcctacttcctcaacatcacagcattctgcaag

SEQ ID NO: 539738 - DNA, 75 bp, synthetic construct
  source 1..75: mol_type = other DNA
gtggtgctggagctgggcggactggaagaccgtccgtcactgctggttgcggtgatgttcagccttatcatttac

SEQ ID NO: 539739 - DNA, 75 bp, synthetic construct
  source 1..75: mol_type = other DNA
taacatcacagcattctgcaaggataacaatgaaacggcgctggaagtggagcaggacattctgaacagctttcg

SEQ ID NO: 539740 - DNA, 75 bp, synthetic construct
  source 1..75: mol_type = other DNA
gcaactcgctttcgagaatatcaactccagcgaagtgaacggttacggcgtcgaccacgtaaaagtagcggaagg

SEQ ID NO: 539741 - DNA, 75 bp, synthetic construct
  source 1..75: mol_type = other DNA
gattgtctctgatgctaaagcggcgctgacactgctggttgaagtggcgcaggaaatgcaaaaagcgggtcgtct

SEQ ID NO: 539742 - DNA, 75 bp, synthetic construct
  source 1..75: mol_type = other DNA
gtgaagcggcgctggtgcctcgtgtgctgcaacaggcatttcacctgatgcgttctggtcgtccgggtccggtac

SEQ ID NO: 539743 - DNA, 75 bp, synthetic construct
  source 1..75: mol_type = other DNA
gcgcaaatgctgcatgtctttaaagaccgtcactggatcaactgtggtcaggcaggcccgctgggctggaccatt

SEQ ID NO: 539744 - DNA, 75 bp, synthetic construct
  source 1..75: mol_type = other DNA
gtcataccggttcggtagagaaatacaccgaagggcgcaaaatcgttcatattgatattgagccgacgcaaattg

SEQ ID NO: 539745 - DNA, 75 bp, synthetic construct
  source 1..75: mol_type = other DNA
tattgtctctgacgctaaagcggcgctgatgctgctggttgaagtggcgcaggagatgcaaaaagccgggcgtct

SEQ ID NO: 539746 - DNA, 75 bp, synthetic construct
  source 1..75: mol_type = other DNA
tgtttgcgcagcatgttgaaagattcgcgcagcgatcagttactggctatggtcgggccggggttaatgctctgg

SEQ ID NO: 539747 - DNA, 75 bp, synthetic construct
  source 1..75: mol_type = other DNA
gaagaacaaaaactaatgaggtgttcattagactaaaagatcatctcgatcgttttcccgacttttataatgcat

SEQ ID NO: 539748 - DNA, 75 bp, synthetic construct
  source 1..75: mol_type = other DNA
gtgcaaaacttctccgttgatacccagttgcagagcaagtttgccactggcgatatcgaccacaccctgctgacc

SEQ ID NO: 539749 - DNA, 75 bp, synthetic construct
  source 1..75: mol_type = other DNA
gccatctgctgggcgaaaaactcagtcgtattgagtgtgttaatgaaaaagcgaatacagcattgtgggctttgt

SEQ ID NO: 539750 - DNA, 75 bp, synthetic construct
  source 1..75: mol_type = other DNA
ttccgtacacgtgaatgtctgccggcgctgtttgaaggatttaacgacaattgcgtgctgatccacggcaatttt

SEQ ID NO: 539751 - DNA, 75 bp, synthetic construct
  source 1..75: mol_type = other DNA
ggagcgaatgcgtggcgtttctgtcgaagcgcccgcacgtacgccagaacgctgggggcatctaaaagatcaaat

SEQ ID NO: 539752 - DNA, 75 bp, synthetic construct
  source 1..75: mol_type = other DNA
tttgacttccagttcctgattgaagagttagctgttggcgcgcagttcaacattccgtacatccatgtgctggtc

SEQ ID NO: 539753 - DNA, 75 bp, synthetic construct
  source 1..75: mol_type = other DNA
aacgtccgtctaactctcgactttctaatgaaaagttccagagtacttttgatgttgttttaccgcactggaagg

SEQ ID NO: 539754 - DNA, 75 bp, synthetic construct
  source 1..75: mol_type = other DNA
ttatcaattataaatgaccaatttggtgcgccgacaggtgccgaattgttagcggattgcaccgcgattgctatt

SEQ ID NO: 539755 - DNA, 75 bp, synthetic construct
  source 1..75: mol_type = other DNA
tggccggtacctatcatctggtggccagcggcgagaccagctggtgcgactacgcccgctatgtgtttgaggtgg

SEQ ID NO: 539756 - DNA, 75 bp, synthetic construct
  source 1..75: mol_type = other DNA
cgcgaatattggcgcatgggtaattcactactctaccgattacgtcttcccaggcaacggtgaaacaccgtggcg

SEQ ID NO: 539757 - DNA, 75 bp, synthetic construct
  source 1..75: mol_type = other DNA
cagggcaggtgggttgggaactacagcgtgcgttggctccactagggaatgtgactgcgctggacttccattcga

SEQ ID NO: 539758 - DNA, 75 bp, synthetic construct
  source 1..75: mol_type = other DNA
accacttctggatttacgtctcaggcgcgtgactttgctcaatccgtcgagggtatggtgttggttgatggggaa

SEQ ID NO: 539759 - DNA, 75 bp, synthetic construct
  source 1..75: mol_type = other DNA
tctcgatgaagatacaaataaccaacttattcgggccaaagatcgtagcggtagaagtaaaactatagaggttca

SEQ ID NO: 539760 - DNA, 75 bp, synthetic construct
  source 1..75: mol_type = other DNA
cacgtaaaagtagcggaaggtttaggttgtaaagcgattcgcgtcttcaaaccggaagatattgcgccagccttt

SEQ ID NO: 539761 - DNA, 75 bp, synthetic construct
  source 1..75: mol_type = other DNA
tttaggttgtaaagcgattcgtgttttcaaaccggaagatattgctccggcatttgaacaggcgaaagcattaat

SEQ ID NO: 539762 - DNA, 75 bp, synthetic construct
  source 1..75: mol_type = other DNA
ggaagatgaggcaaccagcccgctgaacgtctacggcgaaaccaaacgcgccggtgaactggccctggagcaggg

SEQ ID NO: 539763 - DNA, 75 bp, synthetic construct
  source 1..75: mol_type = other DNA
taccgaaaaatttcagcagaactttgcgcttgtcttgcctgactggcaggtgggcgtgaaacgtatgctcaacga

SEQ ID NO: 539764 - DNA, 75 bp, synthetic construct
  source 1..75: mol_type = other DNA
gcttttgagctttatcactcccccattccatctgggaagatggtttgccacaaatgcgataacccatgctgcgtt

SEQ ID NO: 539765 - DNA, 75 bp, synthetic construct
  source 1..75: mol_type = other DNA
taaccagcgttgctgggacgaccgataaacgtgatgacaaacagtttacctggcgtggtggtgttaactacctgt

SEQ ID NO: 539766 - DNA, 75 bp, synthetic construct
  source 1..75: mol_type = other DNA
ttatctcctttacctaaaatcaatgcaagcggttatgaggcacaattaaaaaaatttcaggagctccagagagaa

SEQ ID NO: 539767 - DNA, 75 bp, synthetic construct
  source 1..75: mol_type = other DNA
tgattactctgcgtaatgaaataaattacgtcaacaactatatgtcgatccaaaaagtgcgtatgagagaccgtt

SEQ ID NO: 539768 - DNA, 75 bp, synthetic construct
  source 1..75: mol_type = other DNA
agagctgggtcggccgcattctgactgggcgcggacttccgacctggactaattcttctacccgacagtgctcaa

SEQ ID NO: 539769 - DNA, 75 bp, synthetic construct
  source 1..75: mol_type = other DNA
tcccggaatccattgtccgcaccgtggtacatatgatggaaagcgtggcgctaccaggcggtggcggtgtgaagg

SEQ ID NO: 539770 - DNA, 75 bp, synthetic construct
  source 1..75: mol_type = other DNA
cgagtaacgtcggtgtttccaagctggcgttagcgatgccgtcctcagcgttagtagatacttactcacgttttg

SEQ ID NO: 539771 - DNA, 75 bp, synthetic construct
  source 1..75: mol_type = other DNA
atgaggctattaatagtaatatttcttattttttcggtgagatcattggctgcagatgaagttttagcgaatcac

SEQ ID NO: 539772 - DNA, 75 bp, synthetic construct
  source 1..75: mol_type = other DNA
atgcatcatcaggccacgcaggttctcagccagctcagagcctttattgccgaacaagaactgcctttgaccgtc

SEQ ID NO: 539773 - DNA, 75 bp, synthetic construct
  source 1..75: mol_type = other DNA
cagcacgacagcgatactgccgctgacggctcccgctgcggtgggcgttctgcggattcccgcccgggtggcggt

SEQ ID NO: 539774 - DNA, 75 bp, synthetic construct
  source 1..75: mol_type = other DNA
tcacaaacgaaatcttccgcgttccggcgcgccgccagcgcaagcccgcgattaagccctccgacatcccgacta

SEQ ID NO: 539775 - DNA, 75 bp, synthetic construct
  source 1..75: mol_type = other DNA
acgtcatttgacgggctgtccgatccgtcatccgaaatagcctattttgacggtcgggaggatgagcgagcttcc

SEQ ID NO: 539776 - DNA, 75 bp, synthetic construct
  source 1..75: mol_type = other DNA
cagcccaatgtgttctcgtcgtccctgaccgaaagactgttccatatctgttgcagcctcgattacgtggaggct

SEQ ID NO: 539777 - DNA, 75 bp, synthetic construct
  source 1..75: mol_type = other DNA
ggaatgtatctggacgccggagaaatccactgtccggtcttctgcctgcggcgctcgctatggatgctcgctatg

SEQ ID NO: 539778 - DNA, 75 bp, synthetic construct
  source 1..75: mol_type = other DNA
ttccacaccatgaacttcttcggccttgagattgccatgatcggctatcagggcacggtgttcccggtgctgctg

SEQ ID NO: 539779 - DNA, 75 bp, synthetic construct
  source 1..75: mol_type = other DNA
tgcatacggttgtattaatgaattgggcctattattgctctaaatcagataaggatgttccctctttggatttcc

SEQ ID NO: 539780 - DNA, 75 bp, synthetic construct
  source 1..75: mol_type = other DNA
accattgttcgtcgccatctcgacacccttgagcagcaattcggtcgccgttttagccatgcggcgacctcattt

SEQ ID NO: 539781 - DNA, 75 bp, synthetic construct
  source 1..75: mol_type = other DNA
atggcgcacgacgaacaatggctcaccccgcgtctgcaaacggcggcaacgctgtgtaaccagacgcctgccgca

SEQ ID NO: 539782 - DNA, 75 bp, synthetic construct
  source 1..75: mol_type = other DNA
tgggtcgattcggctactggccaggttcgtcaaagtcggcaaatgttaggcgcaggggttattcccgtagaaatg

SEQ ID NO: 539783 - DNA, 75 bp, synthetic construct
  source 1..75: mol_type = other DNA
atcaggatatcactgtagcggatcagcagatccaggcgttgccttattccacgatgtatttacgccttaatgaag

SEQ ID NO: 539784 - DNA, 75 bp, synthetic construct
  source 1..75: mol_type = other DNA
ccacctgcactcgctatggcagaactggaacgcctgctgaagggatatgacgctgaccacagccggttactggaa

SEQ ID NO: 539785 - DNA, 75 bp, synthetic construct
  source 1..75: mol_type = other DNA
tgcaactggataacgcaggcgtagtggatatcggcggtggcactaccggcattgccatcgtgaaaaagggcaaag

SEQ ID NO: 539786 - DNA, 75 bp, synthetic construct
  source 1..75: mol_type = other DNA
tgacgtactcggcggatgaagccaccggcggacatcacatctctctgactctcgccggaaatcgtcgtatttcgc

SEQ ID NO: 539787 - DNA, 75 bp, synthetic construct
  source 1..75: mol_type = other DNA
atggttcatctggaggcgctggcaccgcgcgttgagcagtactcgattgacgagatgtttctcgacgtgcgaggt

SEQ ID NO: 539788 - DNA, 75 bp, synthetic construct
  source 1..75: mol_type = other DNA
atggcgcacgacgaacaatggctcaccccacgtctgcaaacagcggcaacgttgtgtaaccagacgccagcggcg

SEQ ID NO: 539789 - DNA, 75 bp, synthetic construct
  source 1..75: mol_type = other DNA
caaacaatttccggcgttacaggtgcatttaccgcagcacagtttgtttatgaccccgctggcgatcgccagtag

SEQ ID NO: 539790 - DNA, 75 bp, synthetic construct
  source 1..75: mol_type = other DNA
atggcgcacgacgaacaatggctcaacccacggctgcaaacggcggcaatgctgtgcaaccagacacctgtcgcg

SEQ ID NO: 539791 - DNA, 75 bp, synthetic construct
  source 1..75: mol_type = other DNA
tgtgctgattgaaacacagggcgaggtctgcctccttccccttcccggcgatgcagcagagcggttgtttccgtc

SEQ ID NO: 539792 - DNA, 75 bp, synthetic construct
  source 1..75: mol_type = other DNA
cggaaacagtcggaagctggcatgcacgctggagtgactgggtggcagagcatgacctggaaaccctgttctggc

SEQ ID NO: 539793 - DNA, 75 bp, synthetic construct
  source 1..75: mol_type = other DNA
aagccggaaatgctgatcgaactgttccgtattgaagtgccggaaatcggtgaagaagtgattgaaattaaagca

SEQ ID NO: 539794 - DNA, 75 bp, synthetic construct
  source 1..75: mol_type = other DNA
ggaaaccgtatttacggttgcgatgactgccagcttatctgcccgtggaatcgctattcgcaactcactacagaa

SEQ ID NO: 539795 - DNA, 75 bp, synthetic construct
  source 1..75: mol_type = other DNA
atgcggtaaatgcgtggcctgtatgacgatttgcccgaccggcgccatcgtcgagccatataccgtcgatgctcg

SEQ ID NO: 539796 - DNA, 75 bp, synthetic construct
  source 1..75: mol_type = other DNA
cagcaacattgtgtttcgctgaattttagaccgtttgtcgattctgcgcctattctcgagcgcccgttagctgaa

SEQ ID NO: 539797 - DNA, 75 bp, synthetic construct
  source 1..75: mol_type = other DNA
atgcagatcctgtttaacgaccaaccgatgcagtgcgtcgccggacaaactgttcacgagctgctggaacaactc

SEQ ID NO: 539798 - DNA, 75 bp, synthetic construct
  source 1..75: mol_type = other DNA
cacattcagcctgcagtgaagatggaggcacctggttgtgaagaacgtttctgcccgtggctgcttcgcatcatc

SEQ ID NO: 539799 - DNA, 75 bp, synthetic construct
  source 1..75: mol_type = other DNA
atggattttgaacagatttcccgctcgctacttccgcttctgggaggcaaggaaaatatcgccagcgccgcgcac

SEQ ID NO: 539800 - DNA, 75 bp, synthetic construct
  source 1..75: mol_type = other DNA
tgattaacgcaatggcaccggcagacgttgcttctatcgtggtggatgaagataaacacaccatggatatcgccg

SEQ ID NO: 539801 - DNA, 75 bp, synthetic construct
  source 1..75: mol_type = other DNA
cgttgcttctatcgtggtggatgaagataagcacaccatggatatcgccgttgaagccggtaacctggcgcaggc

SEQ ID NO: 539802 - DNA, 75 bp, synthetic construct
  source 1..75: mol_type = other DNA
aaatgaaacgttatcgcggcgcgtttgtggcaccgcgtaaccagtggaattacctcgacactgacgtactgcaat

SEQ ID NO: 539803 - DNA, 75 bp, synthetic construct
  source 1..75: mol_type = other DNA
gaaggaggaatttcatggcaaccgtctcctgtggctggctgcagtggataaactgattgaaagttttggagatgt

SEQ ID NO: 539804 - DNA, 75 bp, synthetic construct
  source 1..75: mol_type = other DNA
gatctggcggtgcttaaaattaatgccactggtggtttacccactattcctatcaattcacgacgcgtaccgcac

SEQ ID NO: 539805 - DNA, 75 bp, synthetic construct
  source 1..75: mol_type = other DNA
gaagttagtgttgacgatatgctttccgcaattaaacaacattttaaatacgcatcaatatattggaatagcgga

SEQ ID NO: 539806 - DNA, 75 bp, synthetic construct
  source 1..75: mol_type = other DNA
atgaatgactttataaatgaatgtatatccgctccgagaataaatggcatggaagaatttttctcatcaactgca

SEQ ID NO: 539807 - DNA, 75 bp, synthetic construct
  source 1..75: mol_type = other DNA
gatgctggaagatctggttgctgcggcattcaacgatgcggcgcgtcgtatcgaagaaactcagaaagaaaaaat

SEQ ID NO: 539808 - DNA, 75 bp, synthetic construct
  source 1..75: mol_type = other DNA
cgccctggttcggtgatcccggttgtcgtgatgcgtgacgataaacagttaacattgcaggtcaccattcaggaa

SEQ ID NO: 539809 - DNA, 75 bp, synthetic construct
  source 1..75: mol_type = other DNA
gacgatggatcaggttgcggaaatccgacctggctcagtgatcccagttgtagtgatgcgtgacgataagcagct

SEQ ID NO: 539810 - DNA, 75 bp, synthetic construct
  source 1..75: mol_type = other DNA
gatccctacacgcaaaaacgcttcacgttctttaacgatccggacggactgccgttggaactgtatgagcagtaa

SEQ ID NO: 539811 - DNA, 75 bp, synthetic construct
  source 1..75: mol_type = other DNA
gaagcgatacgtgtcgacccgtatacgcaaaaacgctttacgttctttaacgatcctgacgggctgccactggaa

SEQ ID NO: 539812 - DNA, 75 bp, synthetic construct
  source 1..75: mol_type = other DNA
tcgcggaagccagtatggcggcaagggaggccggtcacgctgtccgtgagatggagcggtggatggtgccgaaca

SEQ ID NO: 539813 - DNA, 75 bp, synthetic construct
  source 1..75: mol_type = other DNA
acagatctggtcaaataaaccacgtaaaaagactattaaataatgatggtattttcatatttacagaaaaacata

SEQ ID NO: 539814 - DNA, 75 bp, synthetic construct
  source 1..75: mol_type = other DNA
acaataatccattttggctagataatgatgccgccccagggttaaaaaagaatctgggggacgtcactaaggctg

SEQ ID NO: 539815 - DNA, 75 bp, synthetic construct
  source 1..75: mol_type = other DNA
acatttggtgcgttaccgttagataacaataatccattttggctagataatgatgccgccccagggttaaaaaag

SEQ ID NO: 539816 - DNA, 75 bp, synthetic construct
  source 1..75: mol_type = other DNA
gccagagctggacgctgaggtagtgccgaagaaatcagaggcagaactgccattaacccaaaaagccattctgga

SEQ ID NO: 539817 - DNA, 75 bp, synthetic construct
  source 1..75: mol_type = other DNA
tacagaaaaatttcagcagaactttgcgcttgtcttgcctgactggcaggttggcgtgaaacgtatgattaacga

SEQ ID NO: 539818 - DNA, 75 bp, synthetic construct
  source 1..75: mol_type = other DNA
tacagaaaaatttcagcagaactttgctcttgtcttgcctgaatggcaggtaggcgtgaaacgtatgctcaatga

SEQ ID NO: 539819 - DNA, 75 bp, synthetic construct
  source 1..75: mol_type = other DNA
cattactcgactgattacgtcttccctggaaatggcgatatgccatggctggagacggatgcaaccgcaccacta

SEQ ID NO: 539820 - DNA, 75 bp, synthetic construct
  source 1..75: mol_type = other DNA
accggaaaaagaaggggcattgcaggccatccgccatcttaaacagcaaaacgtaagggtgatgctggggcatag

SEQ ID NO: 539821 - DNA, 75 bp, synthetic construct
  source 1..75: mol_type = other DNA
gggaaacgcgccagcattatcgctctggatagcggattgcatgtgcaacaagtctggattcagggccaattagct

SEQ ID NO: 539822 - DNA, 75 bp, synthetic construct
  source 1..75: mol_type = other DNA
gaaacaattttgccaagacaatgttacgtctggcaaaagagcgcgaagaattagctgttattaatgatcagtttg

SEQ ID NO: 539823 - DNA, 75 bp, synthetic construct
  source 1..75: mol_type = other DNA
ctggaaatggcgacatgccatggctcgagactgatgtaaccgctccgctcaatgtttatggcaaaaccaaattgg

SEQ ID NO: 539824 - DNA, 75 bp, synthetic construct
  source 1..75: mol_type = other DNA
tgtgagaagcacggagatatacagagccttaccagaacgctggtcatgattgcgcactggatgcgacagagcaag

SEQ ID NO: 539825 - DNA, 75 bp, synthetic construct
  source 1..75: mol_type = other DNA
cgaggcgctgggcgcgtggctggtgcactactccaccgactatgtcttcaacggcagcggcgaaaagccgtgggt

SEQ ID NO: 539826 - DNA, 75 bp, synthetic construct
  source 1..75: mol_type = other DNA
cgggctgaagagcggggtatatacgatgacgtctttactgcagatgagtcgcgtcattaccggataaatgaacgg

SEQ ID NO: 539827 - DNA, 75 bp, synthetic construct
  source 1..75: mol_type = other DNA
ttctgccgatcctgattggcttcaccgccgcccgcgagttcggtggtaatccttatcttggcgcgacgcttggcg

SEQ ID NO: 539828 - DNA, 75 bp, synthetic construct
  source 1..75: mol_type = other DNA
aaatggcacaacaacctggcacgattacgccgcgctagtattcgaagaagcccgtaaagcagggattgaccttgc

SEQ ID NO: 539829 - DNA, 75 bp, synthetic construct
  source 1..75: mol_type = other DNA
gaagccatccatatggcgtcgctgcatccggcgcgaatgctgggtgttgatggtgttctgggatcgcttaaaccg

SEQ ID NO: 539830 - DNA, 75 bp, synthetic construct
  source 1..75: mol_type = other DNA
gagcgatgatgacaccggttgcttccgcaagcgcgagcggttttggtttgttgattatcggcgtgttgttgttgc

SEQ ID NO: 539831 - DNA, 75 bp, synthetic construct
  source 1..75: mol_type = other DNA
ttgtttgacgcgcacagtgagatcggcgggcagtttaatatcgccaaacagatccccggcaaagaggagttttac

SEQ ID NO: 539832 - DNA, 75 bp, synthetic construct
  source 1..75: mol_type = other DNA
ggcagtttaatatcgccaaacagatccccggcaaagaggagttttacgaaacgctgcgctattaccgccggatga

SEQ ID NO: 539833 - DNA, 75 bp, synthetic construct
  source 1..75: mol_type = other DNA
ctggctggaacgaacggccaccagcgaaatcattactgccgcttctgaacttgttcgcaatatgcggggagaggc

SEQ ID NO: 539834 - DNA, 75 bp, synthetic construct
  source 1..75: mol_type = other DNA
cccgagtcccgtatctggccgctggaggttagaattgtattcgaccaggtggatggtgctgacatgctggatgag

SEQ ID NO: 539835 - DNA, 75 bp, synthetic construct
  source 1..75: mol_type = other DNA
gatctccctgtgtggtttgttcctgctgatgataagcagaagcccactggtgctttctttgctggtgctattgca

SEQ ID NO: 539836 - DNA, 75 bp, synthetic construct
  source 1..75: mol_type = other DNA
atgccgacggcgaattcgttttcgccgtgcgtaccacaggcatcttttgccgtccgtcttgccgcgccagacatg

SEQ ID NO: 539837 - DNA, 75 bp, synthetic construct
  source 1..75: mol_type = other DNA
taatgacgcgatgttaattagcgagctacagcagatgtttcctgccgccgataacgcgcccgctgacccgacgtt

SEQ ID NO: 539838 - DNA, 75 bp, synthetic construct
  source 1..75: mol_type = other DNA
acgatcaacgctggcaatctgtcttagcccgcgacccgaatgccgacggcgaattcgttttcgccgtgcgcacca

SEQ ID NO: 539839 - DNA, 75 bp, synthetic construct
  source 1..75: mol_type = other DNA
gatgaagggctgcatgtggtgatcaacggcgaaccgcaaattttggcggtagatcatgtggtgatctgcgcgggg

SEQ ID NO: 539840 - DNA, 75 bp, synthetic construct
  source 1..75: mol_type = other DNA
tgctttatgctctgcttctgcatccggttgttctgaaatcgttaatcagacaggagccgctgaatgatactctag

SEQ ID NO: 539841 - DNA, 75 bp, synthetic construct
  source 1..75: mol_type = other DNA
tatcaatttttctatggactcgtctgcgtccggtttatattcctactccatggagagggattgtttgttttattc

SEQ ID NO: 539842 - DNA, 75 bp, synthetic construct
  source 1..75: mol_type = other DNA
tgtagctggtcttctcacataccttggtttgggagaagcggcaaaacgggatgtgggaacaggttcaggtcagat

SEQ ID NO: 539843 - DNA, 75 bp, synthetic construct
  source 1..75: mol_type = other DNA
gtgcattccgaagggaataacgccaacgacgcacattatcaaattgccgattggcgaaatcagacagcccaatgc

SEQ ID NO: 539844 - DNA, 75 bp, synthetic construct
  source 1..75: mol_type = other DNA
gaagttggcttgtccgaaagcgataaaaaacagagtagttttacgtttgtaagtccgggcctcagcgccaagggc

SEQ ID NO: 539845 - DNA, 75 bp, synthetic construct
  source 1..75: mol_type = other DNA
caatgaggcgtttgatactgacaaagaaggcaatatcaataccgggcgcgttctggcacttcgtcgcctggaaat

SEQ ID NO: 539846 - DNA, 75 bp, synthetic construct
  source 1..75: mol_type = other DNA
atgagttttgaggatagcgaaaaaacgtctgtgataaccttacagaagcattacaattttgtaatgaaccaagct

SEQ ID NO: 539847 - DNA, 75 bp, synthetic construct
  source 1..75: mol_type = other DNA
aagcgggttatgtcattgatgccgtttctgatggcagagatgggctttatcttgcgctgaaggatgattatgcat

SEQ ID NO: 539848 - DNA, 75 bp, synthetic construct
  source 1..75: mol_type = other DNA
ccaaccgttatgccagaccgttatcactttcgctgccattgcagagggggaatatcacctctgtttcaaatgtca

SEQ ID NO: 539849 - DNA, 75 bp, synthetic construct
  source 1..75: mol_type = other DNA
tgaagcgttctgttctttaaacggcccgcagttctatggtttaccggtcaacgaatcgtttattgaactggtacg

SEQ ID NO: 539850 - DNA, 75 bp, synthetic construct
  source 1..75: mol_type = other DNA
ccttcacctccgcgatggcgacatgttaaaaactgtcgtgccgtataccagcaaaacttatggccgggccatcgt

SEQ ID NO: 539851 - DNA, 75 bp, synthetic construct
  source 1..75: mol_type = other DNA
cgctggatcctaatgagctggagcgcggatttaacgaaggcgtgttcaccgctgcaaaactttacccggcaaacg

SEQ ID NO: 539852 - DNA, 75 bp, synthetic construct
  source 1..75: mol_type = other DNA
atgacggctgaaaataaagttaagcaatacacgaaaactcaagcgcctgaaggttattgggttgatgcccgtggt

SEQ ID NO: 539853 - DNA, 75 bp, synthetic construct
  source 1..75: mol_type = other DNA
cggctgcgcagcctcgcagtatctggcaagcgccggtgtcggcaacctgacgctgctcgacttcgacacggtttc

SEQ ID NO: 539854 - DNA, 75 bp, synthetic construct
  source 1..75: mol_type = other DNA
ggttcgttgcaagcaatggaagcgatcaaactgctggcaggctatgggaaacctgccagcggaaaaatcgttatg

SEQ ID NO: 539855 - DNA, 75 bp, synthetic construct
  source 1..75: mol_type = other DNA
aggcagcccaatgcgacgctcgatctcagccaaagcgttgataatgagtattactgtctgctgctggcgaaataa

SEQ ID NO: 539856 - DNA, 75 bp, synthetic construct
  source 1..75: mol_type = other DNA
gtggatcactattgcaccgttcgtgacaactacgcccgtcagcgcggtgatatggtggtgatttatgaccgttca

SEQ ID NO: 539857 - DNA, 75 bp, synthetic construct
  source 1..75: mol_type = other DNA
atggagcgccagacgctggtcagttattccgacattcagtctctgccggatctgacctgttatgtcactctgccc

SEQ ID NO: 539858 - DNA, 75 bp, synthetic construct
  source 1..75: mol_type = other DNA
ggcgctgaacatgctcgacattgccgagaagcaaaatattcgcattgaaattgatgctctgtcggcgcgtcttgg

SEQ ID NO: 539859 - DNA, 75 bp, synthetic construct
  source 1..75: mol_type = other DNA
ccgccagatattgagtgaccattacaccgtatattgcgggcagttgctgaagcaggaactgatcattgccggttg

SEQ ID NO: 539860 - DNA, 75 bp, synthetic construct
  source 1..75: mol_type = other DNA
cgtgctgaccaactacgtcaaggcgatgcgttatctgcagggtatcgacaggcccggacgcgaaaaatttaccat

SEQ ID NO: 539861 - DNA, 75 bp, synthetic construct
  source 1..75: mol_type = other DNA
tagtggagatcctgccggaggcccgtaagttcggtggctgttatgtgttcggtatccagtcctatgcccagctgg

SEQ ID NO: 539862 - DNA, 75 bp, synthetic construct
  source 1..75: mol_type = other DNA
cagtgtgaagacgacacttctctacgcgaggcgctaaccctgtgcaaatacgatagcgccgggagccggatgttt

SEQ ID NO: 539863 - DNA, 75 bp, synthetic construct
  source 1..75: mol_type = other DNA
aagaattcgatctctcatcatcctggggaataaataatcgtgatgatttaattcagactatttatcagatgactg

SEQ ID NO: 539864 - DNA, 75 bp, synthetic construct
  source 1..75: mol_type = other DNA
atgaataaggaagaacaatatcttctttttgcgcccatggaaatacttaatcagggttgcaaacccgcgcatgac

SEQ ID NO: 539865 - DNA, 75 bp, synthetic construct
  source 1..75: mol_type = other DNA
atgtcctgcggcgcgcgtctggctatcttcgcagtattcgcggctgccttcttcgggcagaacggtgcgctggcg

SEQ ID NO: 539866 - DNA, 75 bp, synthetic construct
  source 1..75: mol_type = other DNA
aagctagcaaaggcgacggcgaaatgggtaccggggcgatgggcgtgatggatcagaaattcggtagcgcagctg

SEQ ID NO: 539867 - DNA, 75 bp, synthetic construct
  source 1..75: mol_type = other DNA
ctgctgttccttaccttaccgggcacaggctccggtaatttcatcgcattttacgccgtatttatggggctgttt

SEQ ID NO: 539868 - DNA, 75 bp, synthetic construct
  source 1..75: mol_type = other DNA
tatgcccaatctggcaccgcccgtgacgaccgttgaagctgccgtggcttatcgtcaacgtattcttgacgccgt

SEQ ID NO: 539869 - DNA, 75 bp, synthetic construct
  source 1..75: mol_type = other DNA
cgctggattggtaatccgtataagaaaaatgcgctgatcgattacgacactctgccgtatggcgatcaggtaggt

SEQ ID NO: 539870 - DNA, 75 bp, synthetic construct
  source 1..75: mol_type = other DNA
gtttgtacatggtattcagtggattggttacacactccacttcccagactggctgactatcttcctcgcccaggg

SEQ ID NO: 539871 - DNA, 75 bp, synthetic construct
  source 1..75: mol_type = other DNA
aggtttgcacgctcgccagtacgcaatgattcagaattcggccaactcacttaacccaacaatactggctgaagt

SEQ ID NO: 539872 - DNA, 75 bp, synthetic construct
  source 1..75: mol_type = other DNA
attttcgcgccagaccgacaagcagtactacatgaatcaacaacgcacgcagagtgcccgtgaatacgacaccaa

SEQ ID NO: 539873 - DNA, 75 bp, synthetic construct
  source 1..75: mol_type = other DNA
ctgtttgtgatgtttgaaaccaacaccaacgaagccagcgagtatttaagccagtatttcagcctgaagattgtg

SEQ ID NO: 539874 - DNA, 75 bp, synthetic construct
  source 1..75: mol_type = other DNA
gaatccgcagttcaaagaaactacccgctggattggtaacccgtacaagaaaaacgcgctgatcgattacgacac

SEQ ID NO: 539875 - DNA, 75 bp, synthetic construct
  source 1..75: mol_type = other DNA
ccaaccgggtgagtggagaaaagctgccgcaggtgtaccgtgctctggggatggataaaccggaaccagtggcga

SEQ ID NO: 539876 - DNA, 75 bp, synthetic construct
  source 1..75: mol_type = other DNA
ggtatatgccggcccgacacaggctaagtgtgcccgggaatcggtgcaagtataaaaaacagcctgttgcggtat

SEQ ID NO: 539877 - DNA, 75 bp, synthetic construct
  source 1..75: mol_type = other DNA
tggtgaaacagttcctgagtcgtgacccgttcgaatgcgtgctgtgtggcggccggatggtataccgccgggcca

SEQ ID NO: 539878 - DNA, 75 bp, synthetic construct
  source 1..75: mol_type = other DNA
caattcagcagcaacagcagcagctgctggatgaaaaccagcgccagcgtgatgcgctggagcgcagtgcgccgc

SEQ ID NO: 539879 - DNA, 75 bp, synthetic construct
  source 1..75: mol_type = other DNA
tacaaaatcaaacttcgtacatctggttacagacttgtatatcaagtcattgatgaaaaagttgttttactcgtt

SEQ ID NO: 539880 - DNA, 75 bp, synthetic construct
  source 1..75: mol_type = other DNA
agttttttaagatggtgaggtacttcgggttccttgccaaccgtgtgtgtggagagaagctgccgcaggtgtata

SEQ ID NO: 539881 - DNA, 75 bp, synthetic construct
  source 1..75: mol_type = other DNA
caagcagtactacatgaaccagcaacgtacgcagagtgcgcgtgaatacgacaccaacgtgctgaagccgttcca

SEQ ID NO: 539882 - DNA, 75 bp, synthetic construct
  source 1..75: mol_type = other DNA
atggcaccgtttatgtcctgcggcgcgcgtctggctatcttcgcagtatttgcggctgctttcttcgggcagaac

SEQ ID NO: 539883 - DNA, 75 bp, synthetic construct
  source 1..75: mol_type = other DNA
ctcggtctgccgattttcctctttgtgatgtacctgatgttcctgctggctatcaacatcggcggggcgttacag

SEQ ID NO: 539884 - DNA, 75 bp, synthetic construct
  source 1..75: mol_type = other DNA
ggatgtcccttttggtgaattttcaccttccgcatttaaaaataaacgaggtgctatgccagacggtggaacgga

SEQ ID NO: 539885 - DNA, 75 bp, synthetic construct
  source 1..75: mol_type = other DNA
tttgatcgtgaagcgcgctttatagaaagcgtgatggaacctctgcgccagcgcctgactgcgctgaaagtcgtt

SEQ ID NO: 539886 - DNA, 75 bp, synthetic construct
  source 1..75: mol_type = other DNA
cagaacataatttgtcgtgagtgccgccagagcgaagtcatgcagcgtgtgctggcgttctatcggggaaacttt

SEQ ID NO: 539887 - DNA, 75 bp, synthetic construct
  source 1..75: mol_type = other DNA
agaaatacgtcgttacaacagacggcagaacataatttttcgtgagtgccgccagagcgaagttatgcagcgtgt

SEQ ID NO: 539888 - DNA, 75 bp, synthetic construct
  source 1..75: mol_type = other DNA
agttcgacaggttcagaagaatatttgtctgtattatgttgtcatcagcatggtcaggagtaatgtggtttttta

SEQ ID NO: 539889 - DNA, 75 bp, synthetic construct
  source 1..75: mol_type = other DNA
ttctcctgagctcactggttttccttgttattaatatcgcgtgtttatatgtgcttaccgccagtctctggtttc

SEQ ID NO: 539890 - DNA, 75 bp, synthetic construct
  source 1..75: mol_type = other DNA
cgccgcgccgtggcaattcctgacaggttattatcagtatcgccagcaacttaactcactgacgaaactactgaa

SEQ ID NO: 539891 - DNA, 75 bp, synthetic construct
  source 1..75: mol_type = other DNA
gcagcggtgaattcctcacaaatagcgggaaggagttaatcgacgagctcatttctgagctggttgagttcgtca

SEQ ID NO: 539892 - DNA, 75 bp, synthetic construct
  source 1..75: mol_type = other DNA
agaagtggtgatgcactttgtaaaacatggcagttcagttatgacatgggggcaaatgaataagcttgataaccc

SEQ ID NO: 539893 - DNA, 75 bp, synthetic construct
  source 1..75: mol_type = other DNA
tgatcgctcggattttataagtatttcaggtttaaatttcaacgaaattaataattttctattaaaaaataacgc

SEQ ID NO: 539894 - DNA, 75 bp, synthetic construct
  source 1..75: mol_type = other DNA
ggttttactggttgcggaaaaagcgccattgccggggaaatagaaatcgcgatgaaggctattggtgtaccggtt

SEQ ID NO: 539895 - DNA, 75 bp, synthetic construct
  source 1..75: mol_type = other DNA
atgcgaaagttcaaaataattattgaaacgggaatagctggtggggattttgaggatgtattcgaagtggacgat

SEQ ID NO: 539896 - DNA, 75 bp, synthetic construct
  source 1..75: mol_type = other DNA
gatgcgacgcctgatgaaatacatgacgaagcaaaagatattttctttaactactgcaattactcacatcacgaa

SEQ ID NO: 539897 - DNA, 75 bp, synthetic construct
  source 1..75: mol_type = other DNA
atcgagtgggaagcgttgctggtggaaatgctcggcctgctgcaccgcattgcgatggtacagctttcgcctgct

SEQ ID NO: 539898 - DNA, 75 bp, synthetic construct
  source 1..75: mol_type = other DNA
cacagaaattgccggtgacgattttgtcacgctgtctgcaatttcatctcaaggcgctggatgtcgagcaaattc

SEQ ID NO: 539899 - DNA, 75 bp, synthetic construct
  source 1..75: mol_type = other DNA
atgaccataaaagaaaaattctcacaaaaatatccccatgcttccttttgtacttttggcgattcagcagcgttg

SEQ ID NO: 539900 - DNA, 75 bp, synthetic construct
  source 1..75: mol_type = other DNA
ttcaaatttctggccggaccagaaaccgtgctggcgctactggatgagagcaacgcattagaggaaacgcgtatc

SEQ ID NO: 539901 - DNA, 75 bp, synthetic construct
  source 1..75: mol_type = other DNA
aggctacaccttccgctattacgcgacacaaatgaacgctgacaagaatatcaaactgttagcgattaacggtat

SEQ ID NO: 539902 - DNA, 75 bp, synthetic construct
  source 1..75: mol_type = other DNA
ttcatcgtcaatgcggataatccggttaattccctgactgaacaacaagtgcgtgacatttttagtggcgcaatt

SEQ ID NO: 539903 - DNA, 75 bp, synthetic construct
  source 1..75: mol_type = other DNA
atgcgaaagttcaaaattattattgaaacgggaatagctggtggagattttgaggatgtattcgaagtggatgat

SEQ ID NO: 539904 - DNA, 75 bp, synthetic construct
  source 1..75: mol_type = other DNA
ctgtataccgatgaaggcgcgaaaatcgtactgaagcgcggacgggttattgaaaccgaatgtgacgtttatcgc

SEQ ID NO: 539905 - DNA, 75 bp, synthetic construct
  source 1..75: mol_type = other DNA
aaagtatcacccccgatgatgtgcgtccgatgcttgagcagatggtgaaaagaggctgtaagccatatccctgct

SEQ ID NO: 539906 - DNA, 75 bp, synthetic construct
  source 1..75: mol_type = other DNA
ataacgtccagtacgctccggcgcgtggtcgtttcaaagtttatctcatcgacgaagtgcatatgctgtcgcgtc

SEQ ID NO: 539907 - DNA, 75 bp, synthetic construct
  source 1..75: mol_type = other DNA
caatctgtcggcgaagagtactcagacgctggggctggtagtgaccaacacgctttaccacggcatttattttag

SEQ ID NO: 539908 - DNA, 75 bp, synthetic construct
  source 1..75: mol_type = other DNA
cgttgctcgaacgtggggctaaatttagcgcgttagttgccagtaacgacgatatggcgataggggcgatgaaag

SEQ ID NO: 539909 - DNA, 75 bp, synthetic construct
  source 1..75: mol_type = other DNA
taccgggaatatgacggtgactactgttattgataaaaatacttttacagttacgacgcaaaatacccaggatgt

SEQ ID NO: 539910 - DNA, 75 bp, synthetic construct
  source 1..75: mol_type = other DNA
aaatcctgaaaaccagattcaggtttatgtggagaatgaagacggttctcacgttcctgtttcgcaaccaatcat

SEQ ID NO: 539911 - DNA, 75 bp, synthetic construct
  source 1..75: mol_type = other DNA
gcgtttatggtggtataacgaaagcagcaaatcagcaagtcgcttatattcgcattactgatcacggattatttg

SEQ ID NO: 539912 - DNA, 75 bp, synthetic construct
  source 1..75: mol_type = other DNA
tcgatgacatcattgacgcgcacagtcagccgataatggtgcttaatcgccgcctgcgcaaaaatagcagccata

SEQ ID NO: 539913 - DNA, 75 bp, synthetic construct
  source 1..75: mol_type = other DNA
gatgcaacaccagatgaaatacaggatgaagctaaagatattttctttaactactgcaattactcataccacgaa

SEQ ID NO: 539914 - DNA, 75 bp, synthetic construct
  source 1..75: mol_type = other DNA
cgcagaaattgccggtgacgattttgtcgcgctgtctgcaatttcatctcaaggcgctggatgtcgagcaaattc

SEQ ID NO: 539915 - DNA, 75 bp, synthetic construct
  source 1..75: mol_type = other DNA
cggtcgctttaaagtctatctgatcgacgaagtgcatatgctgtcgcgccacagcttcaacgcactgttaaaaac

SEQ ID NO: 539916 - DNA, 75 bp, synthetic construct
  source 1..75: mol_type = other DNA
gtctttgtagaaggttctatgcgtaacacccagtatgaatcaaacggccaaaaagtgtatggcatcgattacatt

SEQ ID NO: 539917 - DNA, 75 bp, synthetic construct
  source 1..75: mol_type = other DNA
gaaacgttacggtactgattacatcgctgaaaaaattcagtacctgaacacaaaagaaccaagtgcatccggtaa

SEQ ID NO: 539918 - DNA, 75 bp, synthetic construct
  source 1..75: mol_type = other DNA
agacgggaatagctggtggcgattttgaggacgtatttgaagtggatgatgatgcgacaccagatgaaatacagg

SEQ ID NO: 539919 - DNA, 75 bp, synthetic construct
  source 1..75: mol_type = other DNA
gaaaggagtagtgtcgataatttttcacatgtggcttcttatgatgaaatacaattaaatgattttaatttaaat

SEQ ID NO: 539920 - DNA, 75 bp, synthetic construct
  source 1..75: mol_type = other DNA
ggagaagacgtgactcaggctgaacagccgcaacagccgcaacagccgcaacagccgcaacagccgcaacagccg

SEQ ID NO: 539921 - DNA, 75 bp, synthetic construct
  source 1..75: mol_type = other DNA
tccggagaggacgtgactcaggttgaacagtcgcaacagccgcaacagccgctacagccggtgtctcctgtcatc

SEQ ID NO: 539922 - DNA, 75 bp, synthetic construct
  source 1..75: mol_type = other DNA
tttataactaatgcggatgggtatttaactgcggctactgatgcgttgcaaggcatgaaagatggtttttctgga

SEQ ID NO: 539923 - DNA, 75 bp, synthetic construct
  source 1..75: mol_type = other DNA
tctctttggtctgctattatgggtaaaaataagctggcagacgtttataaacggctgtatttactggtggtgtac

SEQ ID NO: 539924 - DNA, 75 bp, synthetic construct
  source 1..75: mol_type = other DNA
actcgttggtctgctattatgggtaaaaataagctggcagacgtttataaacggctgtatttactggtggtgtac

SEQ ID NO: 539925 - DNA, 75 bp, synthetic construct
  source 1..75: mol_type = other DNA
aatcatccggacatccagcagcagatgcagcgtcgtgaagaggtgaacattaatgtgcaccgggagcgcggggag

SEQ ID NO: 539926 - DNA, 75 bp, synthetic construct
  source 1..75: mol_type = other DNA
aactggagaatgcggcaacaacattaatccccgccagtagtggtgaagacccgttctggcagggcagtgcgcgta

SEQ ID NO: 539927 - DNA, 75 bp, synthetic construct
  source 1..75: mol_type = other DNA
ggcccggacgcgaaaaatttaccatccgggaatggatgaagggccaggccgataaatcgaaaaacggctggctct

SEQ ID NO: 539928 - DNA, 75 bp, synthetic construct
  source 1..75: mol_type = other DNA
tacaacaaatttctacgtactcttctggccataaaactggaccagctgcggaccttccttgccggtacccctgcc

SEQ ID NO: 539929 - DNA, 75 bp, synthetic construct
  source 1..75: mol_type = other DNA
gccagtaaaactcagactccgatgcaggatttagtttgggatttatcaaaatttgcgatcataatcatgtttata

SEQ ID NO: 539930 - DNA, 75 bp, synthetic construct
  source 1..75: mol_type = other DNA
atgcatttccggaaaatgaaagtcgtttttcttttcattcatatccttgctgttgtgatgatttctgttatgaca

SEQ ID NO: 539931 - DNA, 75 bp, synthetic construct
  source 1..75: mol_type = other DNA
gacaaataacaggggttaataccgcaattagtggtgttcagtcgggtatttctatacgattagccatttttagtg

SEQ ID NO: 539932 - DNA, 75 bp, synthetic construct
  source 1..75: mol_type = other DNA
cctccttggtctgatattatgggtaaaaataagctggcagacgtttataaacggctgtatttactggtggtgtac

SEQ ID NO: 539933 - DNA, 75 bp, synthetic construct
  source 1..75: mol_type = other DNA
gttaaaagttactatgatccctccatcgataagatcctgaatccgctggatgtacgctgtgccgcctgggacttg

SEQ ID NO: 539934 - DNA, 75 bp, synthetic construct
  source 1..75: mol_type = other DNA
acatcgccaaaaaacagccgctgaccctgctctacgcagcaaaaaacaccacgcagaaccatgcgctggtgctgg

SEQ ID NO: 539935 - DNA, 75 bp, synthetic construct
  source 1..75: mol_type = other DNA
tcgattttaaaacctttcgcgaacaatatcttgctgaactggcgcaacacgagccggaagggaaacggctggcgg

SEQ ID NO: 539936 - DNA, 75 bp, synthetic construct
  source 1..75: mol_type = other DNA
tggcgtgtagatatctttttgaaaggattgcatctgactcggcgatgaggggggcagagttttataccccagaag

SEQ ID NO: 539937 - DNA, 75 bp, synthetic construct
  source 1..75: mol_type = other DNA
aatcattgttgcttgcttgtgatttatttagaggaaaagttgactcatcttcttataaagattatatattttcaa

SEQ ID NO: 539938 - DNA, 75 bp, synthetic construct
  source 1..75: mol_type = other DNA
tgagtattttgataaaaatgaagttgataaactcaactttaatataaagcaggtgagcagaaggataatagaaat

SEQ ID NO: 539939 - DNA, 75 bp, synthetic construct
  source 1..75: mol_type = other DNA
gcctgatcaccttctttgttgtctcctggattctggggcgtcagggtaaacaacagagcgaaaatgaagtcacag

SEQ ID NO: 539940 - DNA, 75 bp, synthetic construct
  source 1..75: mol_type = other DNA
aaatggagaaccgtctgagtgccgtacttgccgcaagggaagcagaaggtcgtcagatggccagcctcttcgaac

SEQ ID NO: 539941 - DNA, 75 bp, synthetic construct
  source 1..75: mol_type = other DNA
gctcattggtctgctattatgggtaaaaataagctggcagacgtttataaacggctgtatttactggtggtgtac

SEQ ID NO: 539942 - DNA, 75 bp, synthetic construct
  source 1..75: mol_type = other DNA
agttgagctggaaggcaaagacaagctgattgcagagcttagaaaacaatgcgctgaatgggagcgaaaggcatt

SEQ ID NO: 539943 - DNA, 75 bp, synthetic construct
  source 1..75: mol_type = other DNA
taagcaacaccctgacggcagaacccagccgtttcaccactgcggtagataaaatcgtgctcaaccgtttcctcg

SEQ ID NO: 539944 - DNA, 75 bp, synthetic construct
  source 1..75: mol_type = other DNA
ggattccgaaatccagaacttctgtctgcacggcacggtcggggccggtaagtcggaggttatccgtcgtctggc

SEQ ID NO: 539945 - DNA, 75 bp, synthetic construct
  source 1..75: mol_type = other DNA
ttgaagataatattgtaattttagttaaagccaaggtgaaaaaagaggtaataacaaagtggttaagtgaagtgg

SEQ ID NO: 539946 - DNA, 75 bp, synthetic construct
  source 1..75: mol_type = other DNA
ggttgatactagctgctgcttgggcagcgtactatcttcattttggcatagacggaagcctctcccaaaaaactg

SEQ ID NO: 539947 - DNA, 75 bp, synthetic construct
  source 1..75: mol_type = other DNA
ttctttcgttggttttgttctcaattgcattgagtggttgtggtgaggaaatcaagaccgttgattggtggcgaa

SEQ ID NO: 539948 - DNA, 75 bp, synthetic construct
  source 1..75: mol_type = other DNA
tgcaggaaaagaaagattacggttgcaaattaacgggaccgcagtaccagaaaacgctaatgtaagctctaacga

SEQ ID NO: 539949 - DNA, 75 bp, synthetic construct
  source 1..75: mol_type = other DNA
gtctctgacatgcaaaaaacgtacagcatgtatacttctgaagacgtactaaaatacaaatcacgaggtctgatt

SEQ ID NO: 539950 - DNA, 75 bp, synthetic construct
  source 1..75: mol_type = other DNA
acggatctgatttattatcctagtgataatagagacgatagccccgaagggattgtcaaggaaattaaagaatgg

SEQ ID NO: 539951 - DNA, 75 bp, synthetic construct
  source 1..75: mol_type = other DNA
ttcagaaacatctatttctccacagaactggcagcagagcatggaaatgaagtcagggtttgttacgacattcac

SEQ ID NO: 539952 - DNA, 75 bp, synthetic construct
  source 1..75: mol_type = other DNA
caaagcattcgagtatcacatcgactgcctgcccgctgaagcgcagaaagttttacgtaagcgcctgacccatca

SEQ ID NO: 539953 - DNA, 75 bp, synthetic construct
  source 1..75: mol_type = other DNA
agtcagggtcagttacgatattcatgatgcaaacagcgtcattgtccggcgggctgatggctcttatatctgcga

SEQ ID NO: 539954 - DNA, 75 bp, synthetic construct
  source 1..75: mol_type = other DNA
atgccgatattaccgggattctgccccggctgggtgtggaacatcacacggggataccaggtaacccgcaggggc

SEQ ID NO: 539955 - DNA, 75 bp, synthetic construct
  source 1..75: mol_type = other DNA
aaaagcattcgagtatcacatcgacagcctgcccgctgaagcgcagaaagttttacgtaagcgcctgactcatca

SEQ ID NO: 539956 - DNA, 75 bp, synthetic construct
  source 1..75: mol_type = other DNA
tggatggctggcgtgaatggaaacaccgcgcccgaacaaaggatgcacagacagccatcatccgggctatgaata

SEQ ID NO: 539957 - DNA, 75 bp, synthetic construct
  source 1..75: mol_type = other DNA
atgaaacgttcgttacttcttgcttgtatatacctctcgtcattttccgcaaatgcgttgtcagatatcgtctcc

SEQ ID NO: 539958 - DNA, 75 bp, synthetic construct
  source 1..75: mol_type = other DNA
aaagagctggggccatccatccgccaggtatcccgcatcagcgatttgttattagagaacgagttaaaggaaaaa

SEQ ID NO: 539959 - DNA, 75 bp, synthetic construct
  source 1..75: mol_type = other DNA
tcgccacgtctaccagctgtctcagaaaggcttagtacagcataatagaaatgcctgggagaaggagccggtagt

SEQ ID NO: 539960 - DNA, 75 bp, synthetic construct
  source 1..75: mol_type = other DNA
tcctcaaacagagtgcgaaggagttcgcgaaatacaaccagctgtatccggaccagttcctgccactgcagcgcg

SEQ ID NO: 539961 - DNA, 75 bp, synthetic construct
  source 1..75: mol_type = other DNA
gaacatcaccgatattgaccagtcagcggagcgtgtccgcgaccagttgtcggtgatggccagccccaacggtaa

SEQ ID NO: 539962 - DNA, 75 bp, synthetic construct
  source 1..75: mol_type = other DNA
tggattcagggcgatggcatgcagtgcactgaatgaaagcggactgtggtcagaagatgccattgaacggcagat

SEQ ID NO: 539963 - DNA, 75 bp, synthetic construct
  source 1..75: mol_type = other DNA
atccgatcgtttccatcgaagacggtctggacgaatctgactgggatggtttcgcataccagaccaaagttctgg

SEQ ID NO: 539964 - DNA, 75 bp, synthetic construct
  source 1..75: mol_type = other DNA
cctatgccaaatggtttccgtccgtggagaaagaagcgaaggagtggggggaactgcgtcagcggctgggctccg

SEQ ID NO: 539965 - DNA, 75 bp, synthetic construct
  source 1..75: mol_type = other DNA
tcactcaggcggtgaactcccttgtcaccgcactgaaactgcctgatgaatccgcaaaggccaatgaaatactgg

SEQ ID NO: 539966 - DNA, 75 bp, synthetic construct
  source 1..75: mol_type = other DNA
atagccggtctgatacacctcggtattcgatatgcagatgttgaggtcatgagaattgctggagatgcccagctt

SEQ ID NO: 539967 - DNA, 75 bp, synthetic construct
  source 1..75: mol_type = other DNA
ttctgacctgcctgccctttatggccgggaaagggctgttcagacagctgaaagaggccggagtggtacaacgcg

SEQ ID NO: 539968 - DNA, 75 bp, synthetic construct
  source 1..75: mol_type = other DNA
atgagcttcccgcagttcagccgtctgctgccgtaccgtgattacaaccaggagtccggtctgttcatgaatgac

SEQ ID NO: 539969 - DNA, 75 bp, synthetic construct
  source 1..75: mol_type = other DNA
gacctggagaaaaagtcgaagacctcctatgccaaatggtttccgtcagttgaaaaggaggcgaaggagtggggg

SEQ ID NO: 539970 - DNA, 75 bp, synthetic construct
  source 1..75: mol_type = other DNA
tggaggtcagacgctataacaaccggccacacagcagcctaccccgcaaagaggatggcgaatattacagcccgg

SEQ ID NO: 539971 - DNA, 75 bp, synthetic construct
  source 1..75: mol_type = other DNA
attattcaatatgggaatcagtaggctcgtttaagggggcagtggtgcctttggccccctcaacgaacaatagtt

SEQ ID NO: 539972 - DNA, 75 bp, synthetic construct
  source 1..75: mol_type = other DNA
cgaaaagggatgtgggcacaggagaaaatcagataccggatatgtcagcctggaaaagaaatccgagttctaatc

SEQ ID NO: 539973 - DNA, 75 bp, synthetic construct
  source 1..75: mol_type = other DNA
atcgtcatatttacgctaatttggatgtctcaagagttgttcctacagcgacagaaaacagacctcgtaatattg

SEQ ID NO: 539974 - DNA, 75 bp, synthetic construct
  source 1..75: mol_type = other DNA
acaaaaggctgacggagacaaaatcagtgcacagctcagtctggcataccggtttaaggttcccatgatttatcg

SEQ ID NO: 539975 - DNA, 75 bp, synthetic construct
  source 1..75: mol_type = other DNA
cacaaggttatgttgaatctgatggatacgtcaattttgtagcgccagaggattttcttttattgcgttttttac

SEQ ID NO: 539976 - DNA, 75 bp, synthetic construct
  source 1..75: mol_type = other DNA
cttcaagaattgttccaactgcaaacgaaaaccgtcctcgtaacattgcgtttaattacatcgtaagggcagtat

SEQ ID NO: 539977 - DNA, 75 bp, synthetic construct
  source 1..75: mol_type = other DNA
gagaacaacagcatatgggataaatgaaacccgtccacggaatattgcatttaactatatcgtgagggctgcata

SEQ ID NO: 539978 - DNA, 75 bp, synthetic construct
  source 1..75: mol_type = other DNA
ccggcaggcggaattaatttcccgaatgggttccagatgcgattcgggactatcgctggtactggtggaaaatta

SEQ ID NO: 539979 - DNA, 75 bp, synthetic construct
  source 1..75: mol_type = other DNA
ccgcattcacagtatgcacccaaagaaagtccgacgtttaccgggacacccaaagctccaacgccagcagcaggg

SEQ ID NO: 539980 - DNA, 75 bp, synthetic construct
  source 1..75: mol_type = other DNA
gtggttggtggatacgtgaagtgggtctgtttgatgagtctggggcattgattgccgtgggcaactgcccggaaa

SEQ ID NO: 539981 - DNA, 75 bp, synthetic construct
  source 1..75: mol_type = other DNA
attatgtccgtaccttcttccgtggcgttgatattagtcaggtattcagtgcgaaagatattgcccgccggacac

SEQ ID NO: 539982 - DNA, 75 bp, synthetic construct
  source 1..75: mol_type = other DNA
ggggaacggtggcaacacaaaagggagctgatgttggatatgccttaccatttgcttttccctatgcaggcttgt

SEQ ID NO: 539983 - DNA, 75 bp, synthetic construct
  source 1..75: mol_type = other DNA
ttcttgtaagtgctcttttctgttcatgtgcgggtgcggcttcctttggtccccgtgaaagcatgctaatttttg

SEQ ID NO: 539984 - DNA, 75 bp, synthetic construct
  source 1..75: mol_type = other DNA
agattctggacgtggaaggagtcgacggcgtgtttatcggcccggcggatctgagcgccgatatgggttatgccg

SEQ ID NO: 539985 - DNA, 75 bp, synthetic construct
  source 1..75: mol_type = other DNA
cggtgaacacgcgccgaacaacgtgcaaaccgtgctcacacaacttcaggcgattgcgccctaccccagccagcc

SEQ ID NO: 539986 - DNA, 75 bp, synthetic construct
  source 1..75: mol_type = other DNA
atggaaaacagttttaaagcggcgctgaaagcaggccgcccgcagatcggattatggctggggctgagtagcagc

SEQ ID NO: 539987 - DNA, 75 bp, synthetic construct
  source 1..75: mol_type = other DNA
cctggcgttcgctcaatccctttgtgcggcgcgactggagcacattaccggttaatgcggtatgggtcggggatg

SEQ ID NO: 539988 - DNA, 75 bp, synthetic construct
  source 1..75: mol_type = other DNA
tcatggaagcgcccgaccgttgaatatgcgtatcgcgagttttcagcctggtggcatgaaaaacacgcgaatgat

SEQ ID NO: 539989 - DNA, 75 bp, synthetic construct
  source 1..75: mol_type = other DNA
tgatgccaatcagttactggcgttactggctcccggtcatcataaggggacaccgtgggagcaggtctggtggtt

SEQ ID NO: 539990 - DNA, 75 bp, synthetic construct
  source 1..75: mol_type = other DNA
agtgcgcagctcagtctggcataccggttcaaggtccccatgatttaccgccctgcagcacttgccggtaaacct

SEQ ID NO: 539991 - DNA, 75 bp, synthetic construct
  source 1..75: mol_type = other DNA
acgggcaccagagcagcacctcataccggattgataactccgatgccagactcccatggctcgttcaggcatggg

SEQ ID NO: 539992 - DNA, 75 bp, synthetic construct
  source 1..75: mol_type = other DNA
tgtcttctgcttttattcttgcaggggcactcttctgctcatgtgcaggggctgcctcatttggtccccgtgaaa

SEQ ID NO: 539993 - DNA, 75 bp, synthetic construct
  source 1..75: mol_type = other DNA
gggctggccgtagccagggcaaaagggcgagttggtggtcgcaggcctaagttcacggatgagcaatggcgggaa

SEQ ID NO: 539994 - DNA, 75 bp, synthetic construct
  source 1..75: mol_type = other DNA
caagtaaccatcaggacaccgagcttcagatgcaggcgctcagagctgctggctgtaagttaatttttgaggaga

SEQ ID NO: 539995 - DNA, 75 bp, synthetic construct
  source 1..75: mol_type = other DNA
aatccagacagattattgccagcaggtataatgttggcatgtccacgctgtataagaagtttcccgctggatgct

SEQ ID NO: 539996 - DNA, 75 bp, synthetic construct
  source 1..75: mol_type = other DNA
atgagatggatgccggactggacgccgggcgctataccttcgcgataaatattccgcctaattttcagcgtgatg

SEQ ID NO: 539997 - DNA, 75 bp, synthetic construct
  source 1..75: mol_type = other DNA
ccgatcgccattgccgatatggatcaatcgcagttatcgaaccggatcgttaacagcttctatcgcccgtggttt

SEQ ID NO: 539998 - DNA, 75 bp, synthetic construct
  source 1..75: mol_type = other DNA
ctgcttgttcatcctgattggctcaaaggttcttcaaaagcagacgaaacaggaatatttggcggcacctccctt

SEQ ID NO: 539999 - DNA, 75 bp, synthetic construct
  source 1..75: mol_type = other DNA
ttaccggttcactcgacgaggaagacatcgattccacgctgtcggcaatggtgaaaaccaaaaaaaccgaactgc

SEQ ID NO: 540000 - DNA, 75 bp, synthetic construct
  source 1..75: mol_type = other DNA
ctgaccaaagcggttgaggtgatcaaaaacctgccattggatcgcggcgacaccaaaggcgacctttacgaatac

SEQ ID NO: 540001 - DNA, 75 bp, synthetic construct
  source 1..75: mol_type = other DNA
agtacagctcgctggaatccattcataccgagattggcaccaacgaacgtggcgagctggaagagcaaaaaatct

SEQ ID NO: 540002 - DNA, 75 bp, synthetic construct
  source 1..75: mol_type = other DNA
acagaccgggcagaataatttgcaaagtgcgaaatctgtcgctcagttaactagcgctctgagcgaactggcaaa

SEQ ID NO: 540003 - DNA, 75 bp, synthetic construct
  source 1..75: mol_type = other DNA
gtgtggatcactattgcaccgttcgtgacacaagctgaaacaggcgccatagtaggtcgcataggtgatgcatca

SEQ ID NO: 540004 - DNA, 75 bp, synthetic construct
  source 1..75: mol_type = other DNA
gcggtgaaactggaaggcggttgccaccacacggcggcaatgcactcgcgcaacatcgaaaacatgaaccagatg

SEQ ID NO: 540005 - DNA, 75 bp, synthetic construct
  source 1..75: mol_type = other DNA
tagcggtaaaatccctctcggttaaaacctggcaagatgttgagtgccaacactgcggttcaagctttgatcttg

SEQ ID NO: 540006 - DNA, 75 bp, synthetic construct
  source 1..75: mol_type = other DNA
gacaggcaacgatctcaacccggttgcctggctggttgtaaagaacgaactggctgatgtcgatctggatgaagt

SEQ ID NO: 540007 - DNA, 75 bp, synthetic construct
  source 1..75: mol_type = other DNA
gtagtgccattattcgcctgaatgcggcgaatgctcgtttggtttatcaaccatttacatgcgaccagcgggcga

SEQ ID NO: 540008 - DNA, 75 bp, synthetic construct
  source 1..75: mol_type = other DNA
gcagtacccggaagggattgatgctggcgttgattttaaagatcgcacgcaggcggcatttgtggtgccgaaaga

SEQ ID NO: 540009 - DNA, 75 bp, synthetic construct
  source 1..75: mol_type = other DNA
attggaaaaaattaagcatcttttttctgtgaaaggtatggttttcttattggtaatgaatcgagagcaatttga

SEQ ID NO: 540010 - DNA, 75 bp, synthetic construct
  source 1..75: mol_type = other DNA
atcaaagaacccaggaatgggtaacacaagggctatcggaagcgggatatgtcattgatgctgtttccgatggtc

SEQ ID NO: 540011 - DNA, 75 bp, synthetic construct
  source 1..75: mol_type = other DNA
tacttcggttcgaaagaagatttgtacctcgcctgcgcccagtggattgccgattttattggcgagcagttccgt

SEQ ID NO: 540012 - DNA, 75 bp, synthetic construct
  source 1..75: mol_type = other DNA
caaccctgaagtagtgcaggcgttgctggatgaacgggaaagaaaccagcaatacatcaaacgccgggaccagga

SEQ ID NO: 540013 - DNA, 75 bp, synthetic construct
  source 1..75: mol_type = other DNA
gatgatggccgctgatccctccctgcttgctacgccgcgtacatacctgatgagccatatgccgtggctaccgtt

SEQ ID NO: 540014 - DNA, 75 bp, synthetic construct
  source 1..75: mol_type = other DNA
caaccctgaagtagtgcaggcgttgctggatgaacgggaaagaaaccagcaatacatgaaacgccgcgaccagga

SEQ ID NO: 540015 - DNA, 75 bp, synthetic construct
  source 1..75: mol_type = other DNA
ttccacggttacgactttgacaccacaatgctgcgtatcgccgccatgaacctgattatgcacggcgtggaagcg

SEQ ID NO: 540016 - DNA, 75 bp, synthetic construct
  source 1..75: mol_type = other DNA
ggcgttgattttaaagatcgcacgcaggcggcgtttgttgtaccgaaagcggatattgctgcgcagaaatacgat

SEQ ID NO: 540017 - DNA, 75 bp, synthetic construct
  source 1..75: mol_type = other DNA
ctctctattaatcgttataaagaagtggtgtatcaggcggaggagtatgaagatccgaaggtgatactgaaacga

SEQ ID NO: 540018 - DNA, 75 bp, synthetic construct
  source 1..75: mol_type = other DNA
cccgcgagatagccgcccaggccgggcagaatatcgctgccatcacctactacttcggttcgaaagaagatttgt

SEQ ID NO: 540019 - DNA, 75 bp, synthetic construct
  source 1..75: mol_type = other DNA
agggtgaacaggcgaaaaaacagctgattgctgccgcactggcgcagtttggtgaatatggaatgaacgccacca

SEQ ID NO: 540020 - DNA, 75 bp, synthetic construct
  source 1..75: mol_type = other DNA
atgaaggttacgggcattgttgatttcaacgatgaaaaaatactgacccgcctttttcaactggccgaagccacg

SEQ ID NO: 540021 - DNA, 75 bp, synthetic construct
  source 1..75: mol_type = other DNA
gggtttgaccattgagcaattccgggcaatgcgtctggtgcatagagaggacaaagaagatgataaccatgatta

SEQ ID NO: 540022 - DNA, 75 bp, synthetic construct
  source 1..75: mol_type = other DNA
gtgtgagagtgctgacctgggactctgatactaaaccggagtgccgctcttactacattaatcagggaacgcccg

SEQ ID NO: 540023 - DNA, 75 bp, synthetic construct
  source 1..75: mol_type = other DNA
aagattctcgtcttgtgctgaccaaaagaataggcagcgtggtcagtgttcatattgatcatgaggaagttctgt

SEQ ID NO: 540024 - DNA, 75 bp, synthetic construct
  source 1..75: mol_type = other DNA
aaaaaatgaggtgcttgcagcagatgaaatgaaagaagctattcttgatcgcgcggcgcatctaagctgcgcttc

SEQ ID NO: 540025 - DNA, 75 bp, synthetic construct
  source 1..75: mol_type = other DNA
ttacaaaccgcagaaggaatattaaaagcgtatagcgatctcgacgccattatcgcccccgacgccaacgccctg

SEQ ID NO: 540026 - DNA, 75 bp, synthetic construct
  source 1..75: mol_type = other DNA
gtcgcggatgcattattgaaaaaaggatcaatgaaaacgggcgacaagctggatatccagggcgtaggtcaggtt

SEQ ID NO: 540027 - DNA, 75 bp, synthetic construct
  source 1..75: mol_type = other DNA
tatggcggcgcgtcaggtgaataaagacaaagccaaagtcgcgtttttctactcaagccccaccgttacggacca

SEQ ID NO: 540028 - DNA, 75 bp, synthetic construct
  source 1..75: mol_type = other DNA
cggcccgcatcctgaatttccatctggcccgtaacccggaaatcgccttcctgtggaacgtggccgacaactaca

SEQ ID NO: 540029 - DNA, 75 bp, synthetic construct
  source 1..75: mol_type = other DNA
tttactgcctgtttatttttttctggatactcgttggtctggttttatgggtaaaaataagctggcagacgtttg

SEQ ID NO: 540030 - DNA, 75 bp, synthetic construct
  source 1..75: mol_type = other DNA
ctgcggcattaccgggtattcttctcgtactgttctccctcaaagaaaaaaagccgggccgacattctggaaatg

SEQ ID NO: 540031 - DNA, 75 bp, synthetic construct
  source 1..75: mol_type = other DNA
gcatgacaactggggatttgacgcggaccttttccatgagctggtaacaccatcgattgtgctggcactgctgga

SEQ ID NO: 540032 - DNA, 75 bp, synthetic construct
  source 1..75: mol_type = other DNA
tggctacacatcgtatcaacccattgcggagattgattgtaagccagtccgggattttgttgccaaggctaatcc

SEQ ID NO: 540033 - DNA, 75 bp, synthetic construct
  source 1..75: mol_type = other DNA
ccgtaattttagatgcgcaggatgtattgataacctacaaaggaaagctaccgggaagaattacttgttctctga

SEQ ID NO: 540034 - DNA, 75 bp, synthetic construct
  source 1..75: mol_type = other DNA
ttcagggctatgactacgaagcggatggtaatggcatcgtactgttgccagagcgcgtggtattcaacaaagaga

SEQ ID NO: 540035 - DNA, 75 bp, synthetic construct
  source 1..75: mol_type = other DNA
tctatatactcaaatgccagaaatagtaatgagcttgaggaaatttatcaagagctaagtgcttttgtaagtggg

SEQ ID NO: 540036 - DNA, 75 bp, synthetic construct
  source 1..75: mol_type = other DNA
accagtcggtaatatggggattatgaattattacgcaagtttatcgttaaagcacgatgcggtaaacaaagcgcg

SEQ ID NO: 540037 - DNA, 75 bp, synthetic construct
  source 1..75: mol_type = other DNA
atgaaaagcgctaaatttattgcttgctgttttgttgaagttcctaacgatgatgttttctgtaattatgaattt

SEQ ID NO: 540038 - DNA, 75 bp, synthetic construct
  source 1..75: mol_type = other DNA
tgtccgcgcgggggactatatcgacattggtacgcctctttttggcggatcggttgtgccggtgacggtgaaatc

SEQ ID NO: 540039 - DNA, 75 bp, synthetic construct
  source 1..75: mol_type = other DNA
gttatatcagggatcttttttttctgcattcattgaaagtaaaaattgaggaaagtagacaaggtaaagaaggtt

SEQ ID NO: 540040 - DNA, 75 bp, synthetic construct
  source 1..75: mol_type = other DNA
ctaaatgtaaagtttatggtctgttatgtccgcatcactcttcagagctatatggtgatctacgagcaatgaaat

SEQ ID NO: 540041 - DNA, 75 bp, synthetic construct
  source 1..75: mol_type = other DNA
taatggattcgaaagaatgcattgacgtaattcgtgaagaagtaaagcgatggaatgattcccgcgccgctggca

SEQ ID NO: 540042 - DNA, 75 bp, synthetic construct
  source 1..75: mol_type = other DNA
tatcgccccggacgccaacgccctgcccgctgccgcacaagccgcagaaaacctgaaaaatgacaaagttgcgat

SEQ ID NO: 540043 - DNA, 75 bp, synthetic construct
  source 1..75: mol_type = other DNA
tttctcttcggtgctgaagcacgtgcaaacggtggctacggcttctggcagatggcgtatggctctaccggggag

SEQ ID NO: 540044 - DNA, 75 bp, synthetic construct
  source 1..75: mol_type = other DNA
ctcaaagtccagtatttttatttgttagagcatttgtattctaagggctatatagataataaattaggcctaata

SEQ ID NO: 540045 - DNA, 75 bp, synthetic construct
  source 1..75: mol_type = other DNA
atcgaacagattttcacgatgattaccaaacggtaatggcatacaaagtttctgaagtcatcgctgcaatccgcg

SEQ ID NO: 540046 - DNA, 75 bp, synthetic construct
  source 1..75: mol_type = other DNA
gtctttttgtttttgccccgatgagctgggcacaggactacaacattaaaaatggtttaccagcagaaacttata

SEQ ID NO: 540047 - DNA, 75 bp, synthetic construct
  source 1..75: mol_type = other DNA
atccgtgcggtagccgggcaggctaacttgctggataaagacgggcagatcatcgatggcggcaaggcgttgacc

SEQ ID NO: 540048 - DNA, 75 bp, synthetic construct
  source 1..75: mol_type = other DNA
ccattatcggtatctcgattgttggtctgatcttcgatcctaatgtccacttctccggcattttcgccatgcctt

SEQ ID NO: 540049 - DNA, 75 bp, synthetic construct
  source 1..75: mol_type = other DNA
gcgcgatggccacgctgaatggcctgacgcagacctacttttccacgccgtcatcggagatgcacgaggcgtttc

SEQ ID NO: 540050 - DNA, 75 bp, synthetic construct
  source 1..75: mol_type = other DNA
ctggcggttatcttgttgattgttgtgatgattggcgaaaaacgtcgccatgaacaattactgcaaaaacgcaac

SEQ ID NO: 540051 - DNA, 75 bp, synthetic construct
  source 1..75: mol_type = other DNA
gcggatatcgttgcggtgatgggtaacgccagtgtcgccagccgcgatttaaaaatcgaacaatctccggaattg

SEQ ID NO: 540052 - DNA, 75 bp, synthetic construct
  source 1..75: mol_type = other DNA
gcgtggttaatacactcagccgcgccgccactcgacgctattcgtgagaacctaggcaaagggcactccatttca

SEQ ID NO: 540053 - DNA, 75 bp, synthetic construct
  source 1..75: mol_type = other DNA
cttcagcccgctgttcgcagttctggcagtgttcgacctgttaggtgcgctggttatctggaccgtgttgcagaa

SEQ ID NO: 540054 - DNA, 75 bp, synthetic construct
  source 1..75: mol_type = other DNA
ggcgaagaaaatgtccgttggtcagatcctgcgtaaccgtcagttctggggtatcgcgctgccgcgtttcctggc

SEQ ID NO: 540055 - DNA, 75 bp, synthetic construct
  source 1..75: mol_type = other DNA
tgggtgcagctccggcagcggtatacatcgagtctgcggcgggtacggcggcgggcggtaaaaccggtttgacgg

SEQ ID NO: 540056 - DNA, 75 bp, synthetic construct
  source 1..75: mol_type = other DNA
cggtggtggtattccgccgctgctgttcctgctggggatggcctggttcaatgactggcacgcggcgctctatat

SEQ ID NO: 540057 - DNA, 75 bp, synthetic construct
  source 1..75: mol_type = other DNA
ttgcttgccagcacgctgctcacgggctgtaacaccgctcgcggtttcggcgaagacatcaaacatctcggcaac

SEQ ID NO: 540058 - DNA, 75 bp, synthetic construct
  source 1..75: mol_type = other DNA
gccagagtcattgaagagttcacgcgtcgctacaacgtggaacacatcggcattgatgtgacgggcgggaacggg

SEQ ID NO: 540059 - DNA, 75 bp, synthetic construct
  source 1..75: mol_type = other DNA
attgccagcgcctttaatatgcctctcgatgttctgttctggtgtgccggttcgcagggaagtatgtacccttca

SEQ ID NO: 540060 - DNA, 75 bp, synthetic construct
  source 1..75: mol_type = other DNA
gtgatgcgctgggagacgggaaaaaatccgcccaacacaaagaaaaacttcggctacctgatggtaagcgtacag

SEQ ID NO: 540061 - DNA, 75 bp, synthetic construct
  source 1..75: mol_type = other DNA
tgtaacccgctccccttactgcatggtgaatctggggggctttaatatcaatatcggtaatgtgggtagcggcag

SEQ ID NO: 540062 - DNA, 75 bp, synthetic construct
  source 1..75: mol_type = other DNA
atgaagcgaaggctgtggctgctgatgttattccttttcgccggtcatgtccctgcggcgtctgcggattctgcc

SEQ ID NO: 540063 - DNA, 75 bp, synthetic construct
  source 1..75: mol_type = other DNA
aataacgccgtctgtaatgaatatccgtccccaatcctgcccaaagaacgctggcgttaccagatggtgaatatg

SEQ ID NO: 540064 - DNA, 75 bp, synthetic construct
  source 1..75: mol_type = other DNA
aaagtgagccagggaaaggtgccggatacggcaaacccgtcaatgccgatccagttctgcccggcaccaccgccg

SEQ ID NO: 540065 - DNA, 75 bp, synthetic construct
  source 1..75: mol_type = other DNA
tgttattccttctcaccggtcatgtccctgcggcgtcagcagatgcggcctgtgaggggcgttttgtaaacccga

SEQ ID NO: 540066 - DNA, 75 bp, synthetic construct
  source 1..75: mol_type = other DNA
tcctcctgtttttttcgttagtccctcaggtacatgcagatccgtcgtgtgaaggtcgattcgtcaacccgatca

SEQ ID NO: 540067 - DNA, 75 bp, synthetic construct
  source 1..75: mol_type = other DNA
cttctcgcgctcatttacccggcttttgcagtagtcttttttcgtgaaaaaaccaggaaattgattaatgaaaaa

SEQ ID NO: 540068 - DNA, 75 bp, synthetic construct
  source 1..75: mol_type = other DNA
ctttagtgaagtttcggatacgttagtgacgggaggttatgataaacaagcgatgtctgacgcgattaaacatgc

SEQ ID NO: 540069 - DNA, 75 bp, synthetic construct
  source 1..75: mol_type = other DNA
tgcactggtacaaatacccactgacgtactggctgaacatcatcacatcagcaggttgcctggaaggcggagata

SEQ ID NO: 540070 - DNA, 75 bp, synthetic construct
  source 1..75: mol_type = other DNA
tcggatactgggagccgatggcactgacggacgtcacccggtcgccgggatgtatggttaatctgggaatgacga

SEQ ID NO: 540071 - DNA, 75 bp, synthetic construct
  source 1..75: mol_type = other DNA
agcaccaggtgagcacggcgaagaaaatgtccgttggtcagatcctgcgtaaccgtcagttctggggtatcgcac

SEQ ID NO: 540072 - DNA, 75 bp, synthetic construct
  source 1..75: mol_type = other DNA
ttatcctgactatgcagtgcagcctgtaacaagattctcagttgatgatccaacggtaatgacagttgaaatgtt

SEQ ID NO: 540073 - DNA, 75 bp, synthetic construct
  source 1..75: mol_type = other DNA
ttgaatttgctatcaaatcagacagtgatgtcagaatttaccctgtcccttatggcgctgtagctcttgcctgga

SEQ ID NO: 540074 - DNA, 75 bp, synthetic construct
  source 1..75: mol_type = other DNA
tatccggcgacacgcgcactgaaaactggttcaactcaccagaggtcggcaataccggctccggtaccgccgggc

SEQ ID NO: 540075 - DNA, 75 bp, synthetic construct
  source 1..75: mol_type = other DNA
gtcatcgtgatatgattctcccattattccagattaatgaagatttgctcaatttatgtaatgacttgcatattt

SEQ ID NO: 540076 - DNA, 75 bp, synthetic construct
  source 1..75: mol_type = other DNA
aagatatgagatcaagtagtggtgtgacgacgattgcagtgtcagagccccttgactggacattcaataatcctc

SEQ ID NO: 540077 - DNA, 75 bp, synthetic construct
  source 1..75: mol_type = other DNA
aacaacaaatgatcttccagatacatggactgttggtgcaattgttgagttaattgttcctgattcctatgtggt

SEQ ID NO: 540078 - DNA, 75 bp, synthetic construct
  source 1..75: mol_type = other DNA
atacttcaccagcatattctgctaataagccggaaggattaacggacggttctgtttattcgctgtatatttcgc

SEQ ID NO: 540079 - DNA, 75 bp, synthetic construct
  source 1..75: mol_type = other DNA
gcctgacagatggaactgtatatgtaatttacagttcgcacattaaaccgactgctgctgatgttggggcgttat

SEQ ID NO: 540080 - DNA, 75 bp, synthetic construct
  source 1..75: mol_type = other DNA
gcaaacgggcgtgtgccctctggacgtaaggttaatggcaaatcactagccaatgatgtcaatgttacatcgcag

SEQ ID NO: 540081 - DNA, 75 bp, synthetic construct
  source 1..75: mol_type = other DNA
attccatcaaacataaaatttactggtttctttttaagaacgggaaatataaatctgaatatatgattgaggaac

SEQ ID NO: 540082 - DNA, 75 bp, synthetic construct
  source 1..75: mol_type = other DNA
tgcaaaagtgaatgtttctgcggggggcggcggttcagtgatgattaatggtgttgcgacattatccagtgcttc

SEQ ID NO: 540083 - DNA, 75 bp, synthetic construct
  source 1..75: mol_type = other DNA
aagtgccggagtgactcaggtttatcgcgtgtatggcagttcacgaagctactcacgcagcaagtattccacgca

SEQ ID NO: 540084 - DNA, 75 bp, synthetic construct
  source 1..75: mol_type = other DNA
aaggctacgaggatcgggatgtcccaccgctgaccgttgaggttgaggggctgttaattccgccaggcgagtggg

SEQ ID NO: 540085 - DNA, 75 bp, synthetic construct
  source 1..75: mol_type = other DNA
attttctgttgatgctgccgcgttaaatcatttttcgcttcatctggatagcgtaaacagtgagatagagcgcgg

SEQ ID NO: 540086 - DNA, 75 bp, synthetic construct
  source 1..75: mol_type = other DNA
cgcgatacccggggtgggtggaaatgcggccagcctgaaagcaaatgcctccccatcaacatatgattactccgg

SEQ ID NO: 540087 - DNA, 75 bp, synthetic construct
  source 1..75: mol_type = other DNA
gaaatcgcgccttatgtggggatgccggtaaccctgaattacagcgggacagactacacgctggtgatagcctcg

SEQ ID NO: 540088 - DNA, 75 bp, synthetic construct
  source 1..75: mol_type = other DNA
aatgctacagaaagtcactaacgcaggtaaaagctattttctgctgtctgacggtatggcttcagtgggaaggga

SEQ ID NO: 540089 - DNA, 75 bp, synthetic construct
  source 1..75: mol_type = other DNA
tgcactttgctatagcgtaggtgacagaattgtgtttactgatgacattcctggtagcaaaacaataagcacatt

SEQ ID NO: 540090 - DNA, 75 bp, synthetic construct
  source 1..75: mol_type = other DNA
caacaagcaactatttctgcgttgcttagccatgtgcgaaaagcagatattgttggtgtttcctcattgcgccgc

SEQ ID NO: 540091 - DNA, 75 bp, synthetic construct
  source 1..75: mol_type = other DNA
tggctttgacagtaagggcaaaaaacggatccgccacgtggagtgggagatacagtatcgcgtctacggttccgg

SEQ ID NO: 540092 - DNA, 75 bp, synthetic construct
  source 1..75: mol_type = other DNA
ggcacgacggcgacggtggcgcgcctggttaatggtgccgttgatgagtcatggccgggattcaccgcccggacg

SEQ ID NO: 540093 - DNA, 75 bp, synthetic construct
  source 1..75: mol_type = other DNA
tcgggcatgcctgaaggtgtgcaacggctttcacttgctcaccgcgggaatgagtaccagatcgtctctgccgac

SEQ ID NO: 540094 - DNA, 75 bp, synthetic construct
  source 1..75: mol_type = other DNA
gcctgccgggggagccgctggaaacacatgagcatgatgccacaactctgcaccactggatgaaggagaatgtca

SEQ ID NO: 540095 - DNA, 75 bp, synthetic construct
  source 1..75: mol_type = other DNA
tgccatgactgcagatcgcgcctggcgtatcgggatgcgtcggttaatgaaatatctccaccaacgtcgaaccta

SEQ ID NO: 540096 - DNA, 75 bp, synthetic construct
  source 1..75: mol_type = other DNA
tcaacgggactacctgggcggaggagaccgttaaatgccggacgccggacaatcccacgccggtgaaaatcgaga

SEQ ID NO: 540097 - DNA, 75 bp, synthetic construct
  source 1..75: mol_type = other DNA
ccaacaaagtaaaacccggaatccgcgacaaggttatccagtatcaggaagagtgcgacgatgttctctatgaat

SEQ ID NO: 540098 - DNA, 75 bp, synthetic construct
  source 1..75: mol_type = other DNA
ccaacaaagtaaaacccgaaatccgcggcaaggtaatccagtatcaggaagagtgtgacgatgttctctatgaat

SEQ ID NO: 540099 - DNA, 75 bp, synthetic construct
  source 1..75: mol_type = other DNA
ccatctacgttgccaactggcctgcaccgcgctctctgcactggcaggcattgctgacagcccgcgcgattgaga

SEQ ID NO: 540100 - DNA, 75 bp, synthetic construct
  source 1..75: mol_type = other DNA
ctgaggatgggaaacaacgcaatatggtgtccatgccacttcgaaaacttgccggctggctacaaactattaatc

SEQ ID NO: 540101 - DNA, 75 bp, synthetic construct
  source 1..75: mol_type = other DNA
tcaacagaatgtgatctcagtgttagacggagatcaattaggtcaaaggcatgctcgaggtgaaaatattttatg

SEQ ID NO: 540102 - DNA, 75 bp, synthetic construct
  source 1..75: mol_type = other DNA
gaactcaaccaggcatgcgctgacatgaaacgggataaaaacattgccagtctgtttggtacagggttaaacgaa

SEQ ID NO: 540103 - DNA, 75 bp, synthetic construct
  source 1..75: mol_type = other DNA
caaaagctgaatattggtacggtgatcattactgccgcactggtcgcgttttacgcgggtggttgggcaatctaa

SEQ ID NO: 540104 - DNA, 75 bp, synthetic construct
  source 1..75: mol_type = other DNA
ctgatgattctgtttttatcaccgttatcgtttctgatccccggttatgccacagctcccgcactgatgtacgtg

SEQ ID NO: 540105 - DNA, 75 bp, synthetic construct
  source 1..75: mol_type = other DNA
ggtggtaaagcactgaccagcgactcggtaagttcaatattctccgggttggtgggcgcagcacctgcggcagtt

SEQ ID NO: 540106 - DNA, 75 bp, synthetic construct
  source 1..75: mol_type = other DNA
accgcgctctctgcactggcaggcattgctgacagcccgcgcgattgagaatcaggcgtatgtagcgggatgtaa

SEQ ID NO: 540107 - DNA, 75 bp, synthetic construct
  source 1..75: mol_type = other DNA
gtctttgcacgcgaatggcaaaagctgaatattggtacggttatcattaccgccgcactggtcgcgttttacgca

SEQ ID NO: 540108 - DNA, 75 bp, synthetic construct
  source 1..75: mol_type = other DNA
tggcgaagatggtaagtctctgattttcagcctggatattatgggcgcacttcaaccaactgtacttccgagtgt

SEQ ID NO: 540109 - DNA, 75 bp, synthetic construct
  source 1..75: mol_type = other DNA
gaactcaaccaggcttgcgccgacatgaaacgggataaaaacatcgccagcctgtttggtaccggcctgaatgag

SEQ ID NO: 540110 - DNA, 75 bp, synthetic construct
  source 1..75: mol_type = other DNA
ttacccagcggtcagacaacctctcttacgcgttatcaaaatatcgataataaatccgggcaggcgcaagatgat

SEQ ID NO: 540111 - DNA, 75 bp, synthetic construct
  source 1..75: mol_type = other DNA
agcaatatgatattgctgaacggcaactagagaatgagcggaaagctcaatatgaaacatatgttcgccaaaaga

SEQ ID NO: 540112 - DNA, 75 bp, synthetic construct
  source 1..75: mol_type = other DNA
atagcgcatccagctatatgaaggattctctatcaacaataacaaatagtgcaaaatcagatcttagctctttgc

SEQ ID NO: 540113 - DNA, 75 bp, synthetic construct
  source 1..75: mol_type = other DNA
tttttgctccgcatatctggaataaaagcagtgataacgtaaaatacaagctcggtgtgacgctagacggataca

SEQ ID NO: 540114 - DNA, 75 bp, synthetic construct
  source 1..75: mol_type = other DNA
gccaaccaaacgattctccataaagtacacaacgataagagatatagagatctaactaaaaatcacatcagtttt

SEQ ID NO: 540115 - DNA, 75 bp, synthetic construct
  source 1..75: mol_type = other DNA
aacgactggaaaaagcgaaagagagcggggctgactgggcgattaataacagccagacaccgcttggcgagattt

SEQ ID NO: 540116 - DNA, 75 bp, synthetic construct
  source 1..75: mol_type = other DNA
ccaatttaagaaaggctgttaaccgggggtatccgggggaacaggaagaagaggcgctgcgtaatcacgaaagaa

SEQ ID NO: 540117 - DNA, 75 bp, synthetic construct
  source 1..75: mol_type = other DNA
atggtgtccatgccacttcgaaaacttgccggctggctacaaaccattaatcccaacaaagtaaaacccgaaatc

SEQ ID NO: 540118 - DNA, 75 bp, synthetic construct
  source 1..75: mol_type = other DNA
gagtgcgacgatgttctctatgaatactggacgaagggttttgtcgttaatccccgtcgaatgagcgtgatggaa

SEQ ID NO: 540119 - DNA, 75 bp, synthetic construct
  source 1..75: mol_type = other DNA
atattaaaacaaattgatttctatgaaaaattcaataaatctttactagaaagagctaacaggatgcagaattta

SEQ ID NO: 540120 - DNA, 75 bp, synthetic construct
  source 1..75: mol_type = other DNA
gtatctggaggaagcgagcacaatattttatcccatgtctgaacgatgccagtttgaacaggatagccgtgagct

SEQ ID NO: 540121 - DNA, 75 bp, synthetic construct
  source 1..75: mol_type = other DNA
cattccacatctgacattttcattaatgcctcagcctggcgtgttcagtgagtacataagaaaaaatactgtatc

SEQ ID NO: 540122 - DNA, 75 bp, synthetic construct
  source 1..75: mol_type = other DNA
ggtgattttcggcctggagaagtgccgcgtacctggtgggatcttgttggtcattatcgccatctcgatcatcgg

SEQ ID NO: 540123 - DNA, 75 bp, synthetic construct
  source 1..75: mol_type = other DNA
tatttaatgcacaaggcgggaactttacctttaactttttgccactcggtgcaatcgacgggatgcgtatcgggt

SEQ ID NO: 540124 - DNA, 75 bp, synthetic construct
  source 1..75: mol_type = other DNA
gcgtcgtgagttattcgcaattaccggagtctattcaggttcaggcacagttaaaacagcctaaattacgcggaa

SEQ ID NO: 540125 - DNA, 75 bp, synthetic construct
  source 1..75: mol_type = other DNA
ccgggttccagtcgggttttgtggaagttaacgatagcagccagggcgatcagcaagggacaaccaacatcatta

SEQ ID NO: 540126 - DNA, 75 bp, synthetic construct
  source 1..75: mol_type = other DNA
gcgtcgtgagttattcgcaattgccagagtcgattcaggttcaggcgcagttaaaacagcctaaattacgtgaga

SEQ ID NO: 540127 - DNA, 75 bp, synthetic construct
  source 1..75: mol_type = other DNA
aggggggctgacggacggaaatgcgcagtggttcttacaggccggtaaaaccacctcccaggctgccgatgacga

SEQ ID NO: 540128 - DNA, 75 bp, synthetic construct
  source 1..75: mol_type = other DNA
ggtgcaggatgattaccaatcgttctccattcagggcaatggtgcgctgggtgtcacagagaatagttatattgg

SEQ ID NO: 540129 - DNA, 75 bp, synthetic construct
  source 1..75: mol_type = other DNA
ggcgcaccctgagaagttgtttacgcatgttttatatgctgactggcgggcgcgtcttaaaacactcggtaaggt

SEQ ID NO: 540130 - DNA, 75 bp, synthetic construct
  source 1..75: mol_type = other DNA
ataataatgaacacgagaagctggagttaaataatgatttaagtgatattgaaaaaggtatcactgaagatggcc

SEQ ID NO: 540131 - DNA, 75 bp, synthetic construct
  source 1..75: mol_type = other DNA
atctcaggaatatatttttgagatgctgatgtctggatatttcttcattgagttagcgagagttcaggaagtcag

SEQ ID NO: 540132 - DNA, 75 bp, synthetic construct
  source 1..75: mol_type = other DNA
aatgcaggttttctggctgctgttttacgctccccggatatatgtctgctggaggcacatccagagaagttattt

SEQ ID NO: 540133 - DNA, 75 bp, synthetic construct
  source 1..75: mol_type = other DNA
gtggagggttgttctctaaggactggatctcactttcaaagattgcaactgttctggaaacacaacctgctaccg

SEQ ID NO: 540134 - DNA, 75 bp, synthetic construct
  source 1..75: mol_type = other DNA
ctgaaaatattcgtgaagaagcccgcttacctgagctgtttgccagtgttaacactgcactggcggcaacgggga

SEQ ID NO: 540135 - DNA, 75 bp, synthetic construct
  source 1..75: mol_type = other DNA
ggacagcaggagtatatcgaggtttatttttcagggaaaagtctcggtaaatattatgcaatggttaatcttgat

SEQ ID NO: 540136 - DNA, 75 bp, synthetic construct
  source 1..75: mol_type = other DNA
tacgatcctaacagcacttggggaacaccacttcagttgggcgcgatatggtctagtgcctatccagaagaggct

SEQ ID NO: 540137 - DNA, 75 bp, synthetic construct
  source 1..75: mol_type = other DNA
ctgcgatcgtagtagcgatctctggctgtacagcaatggataaattggcgggaatgggtgttgtttctcagcaaa

SEQ ID NO: 540138 - DNA, 75 bp, synthetic construct
  source 1..75: mol_type = other DNA
ttggctggcccagggcgtggtgtcatcgcctttctgattggtatcacaacatttttcaatcgtgacgaacgtcgc

SEQ ID NO: 540139 - DNA, 75 bp, synthetic construct
  source 1..75: mol_type = other DNA
acaccaatggtacgtctggaaaatttcatcaatgatgcctgtgaggggattaaaaaatacaattttacccgcggc

SEQ ID NO: 540140 - DNA, 75 bp, synthetic construct
  source 1..75: mol_type = other DNA
aaaacatctacatgaatcatcctgcacaccaatggtacgtctggaaaatttcatcaatgatgcctgtgaggggat

SEQ ID NO: 540141 - DNA, 75 bp, synthetic construct
  source 1..75: mol_type = other DNA
cttaggtttgacggggattgatataaatgttgatggtaaaatatccagctataaagcacagcaacaaactaatct

SEQ ID NO: 540142 - DNA, 75 bp, synthetic construct
  source 1..75: mol_type = other DNA
cgtcacctttgtctttcccgcgcctgcgacaacaccgcgctggttgacgggccgctttgattcgcttgctgtacg

SEQ ID NO: 540143 - DNA, 75 bp, synthetic construct
  source 1..75: mol_type = other DNA
ctatcgcagctgcgatagatgtcctcaatgaagaacgtgtcatcgcctatccaacggaagccgttttcggtgtcg

SEQ ID NO: 540144 - DNA, 75 bp, synthetic construct
  source 1..75: mol_type = other DNA
cagcaaggaacaaccaacatcattaacggcgcgggaaatcgcgagttaatgctgttgccgggcaaattacgttat

SEQ ID NO: 540145 - DNA, 75 bp, synthetic construct
  source 1..75: mol_type = other DNA
actgggatgcctgtcgaatcgtagacagcaaggtggatgaaacaaggctctgttgggccaaggctctaccggctg

SEQ ID NO: 540146 - DNA, 75 bp, synthetic construct
  source 1..75: mol_type = other DNA
cactgccagctgaataacacatccccgtcaatacggccctcgctgtacgcttaccgttcagtgggtattatgtca

SEQ ID NO: 540147 - DNA, 75 bp, synthetic construct
  source 1..75: mol_type = other DNA
ggtgaaacgggagggcgcttaaatccttcagaaatccgcgatgccctgacgggtgaactgtttcgacaggggtga

SEQ ID NO: 540148 - DNA, 75 bp, synthetic construct
  source 1..75: mol_type = other DNA
atggatgttcctgttctgaatttcgaccactcacaccacaagctcaaaattcgcggcctgcaaagtccggtggat

SEQ ID NO: 540149 - DNA, 75 bp, synthetic construct
  source 1..75: mol_type = other DNA
cgccatctaccagaagcagacggtgccgcaaatcgtcgaaaaaatcctgcgcgagcgtcatcagatgcgcggtca

SEQ ID NO: 540150 - DNA, 75 bp, synthetic construct
  source 1..75: mol_type = other DNA
cgccatctaccagaatcagacggtgccgcaaatcgtcgaaaaaatcctgcgcgagcgccatcaaatgcgcggtca

SEQ ID NO: 540151 - DNA, 75 bp, synthetic construct
  source 1..75: mol_type = other DNA
ccgatatcggcgtggtgaagaatatgtttattggcgtggggcgggcgctgagcgtgtttgtgcgcaaggcgggta

SEQ ID NO: 540152 - DNA, 75 bp, synthetic construct
  source 1..75: mol_type = other DNA
acgggcgctaccgggtcaacctcgactttgaccgcgatacgtggaaaccgggctatgagagcctgtgggtgcgcc

SEQ ID NO: 540153 - DNA, 75 bp, synthetic construct
  source 1..75: mol_type = other DNA
tggtggtgggagttatatccggatagagggtagcggcattgagccgggaacgccgggggattataacgtcaaagc

SEQ ID NO: 540154 - DNA, 75 bp, synthetic construct
  source 1..75: mol_type = other DNA
gatgcacgccccgaaaggtgtggcggtcgccagcggcgagcacctgcaactggccgcagtgaaaaacctccagat

SEQ ID NO: 540155 - DNA, 75 bp, synthetic construct
  source 1..75: mol_type = other DNA
gatgcacgcaccgaaaggtgtggcggtcgccagcggcgagcacctgcaactggccgccgtgaaaaacctccagat

SEQ ID NO: 540156 - DNA, 75 bp, synthetic construct
  source 1..75: mol_type = other DNA
gggcgctaccgggtcaacctcgactttgaccgcgatacgtggaaaccgggctatgagagcctgtgggtacgccag

SEQ ID NO: 540157 - DNA, 75 bp, synthetic construct
  source 1..75: mol_type = other DNA
cgccatctaccagaaacagacggtgccgcaaatcgtcgaaaaaatcctgcgcgagcgccatcatatgcgcggtca

SEQ ID NO: 540158 - DNA, 75 bp, synthetic construct
  source 1..75: mol_type = other DNA
tggccgccgtgaaaaacctccagataaatgcgggaaacaacgccgatatcggcgtagtgaagaatatgtttatcg

SEQ ID NO: 540159 - DNA, 75 bp, synthetic construct
  source 1..75: mol_type = other DNA
tggccgcagtgaaaaacctccagataaatgcgggaaacaacgccgatatcggcgtcgtgaagaatatgtttatcg

SEQ ID NO: 540160 - DNA, 75 bp, synthetic construct
  source 1..75: mol_type = other DNA
agggggcgatctcggtacaggcacagaacgacctgatggaactgttggcacagaaatcgatagtgatcaccagta

SEQ ID NO: 540161 - DNA, 75 bp, synthetic construct
  source 1..75: mol_type = other DNA
accctcattcgaatgctgaccggtagcgaacgtccggatagcggtgatatctggattggcgagacgcgactggaa

SEQ ID NO: 540162 - DNA, 75 bp, synthetic construct
  source 1..75: mol_type = other DNA
gataaagccatcacgccggagtcggtactgatgcaggatggcgcattcagcctgacggcaccgcccgtgcaggga

SEQ ID NO: 540163 - DNA, 75 bp, synthetic construct
  source 1..75: mol_type = other DNA
taccctactcagaacgctacggctaccgcccggcgcttatcccccgcccggtaatggccggcacgctcccggcgc

SEQ ID NO: 540164 - DNA, 75 bp, synthetic construct
  source 1..75: mol_type = other DNA
gcatgagtatgtagatgccattactagagtgcataataatccattgctaggcgatgggcttggaagaaaagctgc

SEQ ID NO: 540165 - DNA, 75 bp, synthetic construct
  source 1..75: mol_type = other DNA
tctgcctcggtcagtggccccgccgcaacggcatgattgattacctgcaaatggcgcaggatgcccaaggccgcc

SEQ ID NO: 540166 - DNA, 75 bp, synthetic construct
  source 1..75: mol_type = other DNA
actctcattcgaatgcttaccggcagcgaacgcccggatagcggtgatatctggattggcgagacgcgactggaa

SEQ ID NO: 540167 - DNA, 75 bp, synthetic construct
  source 1..75: mol_type = other DNA
gcacccctgcgcaccctgtacggcgtcattaccggttttaaacatctctcatcgtcacaggacgaagcccgttac

SEQ ID NO: 540168 - DNA, 75 bp, synthetic construct
  source 1..75: mol_type = other DNA
gatgagcgcggcaaagagcatatcaaggtcagtaccgagtacggcggcaagagccagctaaacctcggtcatctg

SEQ ID NO: 540169 - DNA, 75 bp, synthetic construct
  source 1..75: mol_type = other DNA
taccgggtcaacctcgactttgaccgcgatacgtggaaaccgggttatgaaagcctgtgggtacgccagtcgcgc

SEQ ID NO: 540170 - DNA, 75 bp, synthetic construct
  source 1..75: mol_type = other DNA
atattgcaggcgtaaaacacgactcggcacacactgaccatgtgactatccagaactacaagcgcaacgtgctgc

SEQ ID NO: 540171 - DNA, 75 bp, synthetic construct
  source 1..75: mol_type = other DNA
ggacttcgtgtttaacctcaaaagtgaatacccgtcccacgaacaggtgatgcagtacggtgaggacgacctgac

SEQ ID NO: 540172 - DNA, 75 bp, synthetic construct
  source 1..75: mol_type = other DNA
gcgtttccggtgattaactctggagaatataacctgaaatatcaggtgaagaatacgattggtaattttattcct

SEQ ID NO: 540173 - DNA, 75 bp, synthetic construct
  source 1..75: mol_type = other DNA
aggtaagcaactggatattggcgtacagaaagactttacgctggcagcaggaaaacagctcagcttgtatagccg

SEQ ID NO: 540174 - DNA, 75 bp, synthetic construct
  source 1..75: mol_type = other DNA
tcatctggtggatgccgggaaacagcagcgcggggaaggctttgaactgcgtaccgatatgtggggtgcggtgcg

SEQ ID NO: 540175 - DNA, 75 bp, synthetic construct
  source 1..75: mol_type = other DNA
cgcttcgccatccttctgggctgtttgatggtgaaacggaagccgtatgggggctgaacaccgcgtacagcgtgg

SEQ ID NO: 540176 - DNA, 75 bp, synthetic construct
  source 1..75: mol_type = other DNA
gactgtttttctgttccggaatccgtcacttcttcactctgtgctgcgcattccgcagaatattatccgcttgca

SEQ ID NO: 540177 - DNA, 75 bp, synthetic construct
  source 1..75: mol_type = other DNA
cagccgtggactcatccgatttttgtcttgaatgcctgctgaatgccatcaaaaacgatgatgctgttgttgaag

SEQ ID NO: 540178 - DNA, 75 bp, synthetic construct
  source 1..75: mol_type = other DNA
acacaaaatatattgcatgtttttctgatggcactcaaaaagaaggtattactgatgagaatgggtatacagaaa

SEQ ID NO: 540179 - DNA, 75 bp, synthetic construct
  source 1..75: mol_type = other DNA
tggggccaccggcgtcttctttatgacactggtgaccatcgcgactatcgtttactggatgaacccggcaggtaa

SEQ ID NO: 540180 - DNA, 75 bp, synthetic construct
  source 1..75: mol_type = other DNA
atgagatcgttagctgatttcgaatttaacaaagcaccgttgtgcgaaggcatgatcctggcttgcgaagcaatt

SEQ ID NO: 540181 - DNA, 75 bp, synthetic construct
  source 1..75: mol_type = other DNA
gccggtgattttccctacgcagctgatattgcgcattgaatgtccggatggcgaaatttggctgattaatccttt

SEQ ID NO: 540182 - DNA, 75 bp, synthetic construct
  source 1..75: mol_type = other DNA
agtggcatggagttgctggatatcagcgatgaaattgaccagatcatgcaacagatggggtacggcgcgtccggc

SEQ ID NO: 540183 - DNA, 75 bp, synthetic construct
  source 1..75: mol_type = other DNA
cgctgattctacgactgtttttctgttccggaatccgtctcatcttcactctgtgctgcgcattccgcacgtaat

SEQ ID NO: 540184 - DNA, 75 bp, synthetic construct
  source 1..75: mol_type = other DNA
caacgatggctacggtgtgaaatctgagaaaatcgacaatgaagaagtgttgatcatgtccgaaagcgacattct

SEQ ID NO: 540185 - DNA, 75 bp, synthetic construct
  source 1..75: mol_type = other DNA
cgcggggtttatcgtctctccgatgcattatggctggaccaggtgcttaaaaatcggcagggcagtgcggtatca

SEQ ID NO: 540186 - DNA, 75 bp, synthetic construct
  source 1..75: mol_type = other DNA
caaggcgggtatcaaactgattgccaataaaggcgcagtatcggtacaggcgcagcacgatctgatggagttact

SEQ ID NO: 540187 - DNA, 75 bp, synthetic construct
  source 1..75: mol_type = other DNA
ggcgcacaccgaccatgtgaccattcagaactacaagcgcaacgtactgcgtaccccggccaacaacaaaatccg

SEQ ID NO: 540188 - DNA, 75 bp, synthetic construct
  source 1..75: mol_type = other DNA
atatcgccggggtaaaacacgactcggcgcacaccgaccatgtgaccatccagaactacaagcgtaacgtcctca

SEQ ID NO: 540189 - DNA, 75 bp, synthetic construct
  source 1..75: mol_type = other DNA
cagctccgacgcgcaggacaaggcgcagggtaaggtgcgcgaaatggctccggcgatggcaatactggatggcgc

SEQ ID NO: 540190 - DNA, 75 bp, synthetic construct
  source 1..75: mol_type = other DNA
aggaaatcacgctgatatcggtgttgtgaagaatatgtttatcggtgtgggtcaggcgctgagcgtgtttgtgcg

SEQ ID NO: 540191 - DNA, 75 bp, synthetic construct
  source 1..75: mol_type = other DNA
cacaccacaagctcaaaattcgcggcctgcaaagtccggtggatgtgctgacctttgaaggccgggagcaactga

SEQ ID NO: 540192 - DNA, 75 bp, synthetic construct
  source 1..75: mol_type = other DNA
ggatttcgtgtttaacctcaaaagcgaatacccgtcccgcgaacaggtgatgcagtatggcgaggacgacctgac

SEQ ID NO: 540193 - DNA, 75 bp, synthetic construct
  source 1..75: mol_type = other DNA
ggcgcacaccgaccatgtgaccatccagaactacaagcgcaacgtgctgcgtaccccggccaacaataaaatccg

SEQ ID NO: 540194 - DNA, 75 bp, synthetic construct
  source 1..75: mol_type = other DNA
cgcaaatgcacagaagatggggccagaaaattataactctccaaagcctgaactccctaaaggatttaatgagta

SEQ ID NO: 540195 - DNA, 75 bp, synthetic construct
  source 1..75: mol_type = other DNA
agtaccgaaggttctgtgacaattactgcggcaaaagaactggtacttaactgtgccggtgcttacgtaaaactg

SEQ ID NO: 540196 - DNA, 75 bp, synthetic construct
  source 1..75: mol_type = other DNA
acagcagcgcggggaaggctttgaactgcgtaccgatctgtggggtacagtacgggcaaagaaaggcatctttat

SEQ ID NO: 540197 - DNA, 75 bp, synthetic construct
  source 1..75: mol_type = other DNA
tttgtcgctggagcttcgggactgggaaggtgcgcccatcagcggtgcgaagtacaaaatcacctttgaatcagg

SEQ ID NO: 540198 - DNA, 75 bp, synthetic construct
  source 1..75: mol_type = other DNA
ggcaggtgctggatatgcaggcagcgatagcgcaactggagaatgcgctgtcgatagcgaaaaatctgtcacagg

SEQ ID NO: 540199 - DNA, 75 bp, synthetic construct
  source 1..75: mol_type = other DNA
gatattgcatccgccgtggcgcttgaggatgcgagcacgacgaaaaaggggatagtacagctcagcagtgcgact

SEQ ID NO: 540200 - DNA, 75 bp, synthetic construct
  source 1..75: mol_type = other DNA
cgccaaagtcggtaaaggcagcctatgaccttgctaacgggaaatataccgctcaggacgctacgacagcacaaa

SEQ ID NO: 540201 - DNA, 75 bp, synthetic construct
  source 1..75: mol_type = other DNA
aaggagaccaaacagtggcggtatgaatttcgactggctggatggtgcatcaagtggcacggtggtagggaatgg

SEQ ID NO: 540202 - DNA, 75 bp, synthetic construct
  source 1..75: mol_type = other DNA
acatacgctcgctattggttcgcacacacacaccattaccattgccgcttatggcaacgcggaaaacaccgtaaa

SEQ ID NO: 540203 - DNA, 75 bp, synthetic construct
  source 1..75: mol_type = other DNA
cagacttttgacaaatctgcatacccgaaacttgcagccgcttatccgtcaggcgtgatccctgatatgcgtggc

SEQ ID NO: 540204 - DNA, 75 bp, synthetic construct
  source 1..75: mol_type = other DNA
aaggccgcgtatgacctggctaacgggaaatacaccgcacaggatgcaacgacagcacagaaagggatagttcag

SEQ ID NO: 540205 - DNA, 75 bp, synthetic construct
  source 1..75: mol_type = other DNA
cgtttagtccagcacgtaacgatgctgtaaacgtagttaccgagaatagccagatggttgtaaaccacggcgtag

SEQ ID NO: 540206 - DNA, 75 bp, synthetic construct
  source 1..75: mol_type = other DNA
atatgattgctaaggcacaaagccaggctgcaaccattgagcgtgttgttgtgttctgtaaacctgcggcattca

SEQ ID NO: 540207 - DNA, 75 bp, synthetic construct
  source 1..75: mol_type = other DNA
taaagaagcggtgatcattatgaacgtcgcggcgcatcacggtagcgagctgaatggtgaactgcttcttaacag

SEQ ID NO: 540208 - DNA, 75 bp, synthetic construct
  source 1..75: mol_type = other DNA
ctcagtagcgccaccaacagcgattctgaaacgctggcggcaacaccaaaggcggtaaaggcagcatatgacctt

SEQ ID NO: 540209 - DNA, 75 bp, synthetic construct
  source 1..75: mol_type = other DNA
ccaaacagtggaggtatgaatttcgactggcttgatggtgcatcaagtggcacggtcgtggggaatggaacagtg

SEQ ID NO: 540210 - DNA, 75 bp, synthetic construct
  source 1..75: mol_type = other DNA
ccccgatatgcgtggctggacaatcaagggcaagcccgcaagtggtcgagccgtattgtctcaggaacaggatgg

SEQ ID NO: 540211 - DNA, 75 bp, synthetic construct
  source 1..75: mol_type = other DNA
gaccttgctaacgcaaaatataccgctcaggacgccacgacggcacgaaaaggcattgtccagctcagtagcgcc

SEQ ID NO: 540212 - DNA, 75 bp, synthetic construct
  source 1..75: mol_type = other DNA
gcctgcggtgttccgcaagggcgtgctgattaccggcgtgacggccagcgcggcgcgtgaccgcagctatgaact

SEQ ID NO: 540213 - DNA, 75 bp, synthetic construct
  source 1..75: mol_type = other DNA
gcctgcatctgccgctgctggcgggaacggaagtcagcatcgcctttgaggaaggcaacccggaccgaccttata

SEQ ID NO: 540214 - DNA, 75 bp, synthetic construct
  source 1..75: mol_type = other DNA
accgggctatgagagcctgtgggtacgccagtcgaggccctatgccggggatacctacggcctgcacctgccgct

SEQ ID NO: 540215 - DNA, 75 bp, synthetic construct
  source 1..75: mol_type = other DNA
aagatctgacgcaggctgcgatcctgctaagcgcacccaaaggcgtggcgatcgccagcggagagcacctgcaac

SEQ ID NO: 540216 - DNA, 75 bp, synthetic construct
  source 1..75: mol_type = other DNA
gtgggtatctggttccgcttcgccaccgatgcccggctgaaaattgaggttatcgagttttacgacgaccagagc

SEQ ID NO: 540217 - DNA, 75 bp, synthetic construct
  source 1..75: mol_type = other DNA
ccgtactcagagcgctacggctaccgtccggcgcttatcccccgccccgtaatggccggaacgctcccggcgcgg

SEQ ID NO: 540218 - DNA, 75 bp, synthetic construct
  source 1..75: mol_type = other DNA
taaaactgatgatgttcttatcgagtggggcaagctgtttaatgtgacacctatgaaagccactgttaacgcttc

SEQ ID NO: 540219 - DNA, 75 bp, synthetic construct
  source 1..75: mol_type = other DNA
tagatccgctacaccttgcacatatgaccgctgacgctgtagccgtgcctaaattcgctaaaggctctaacgtct

SEQ ID NO: 540220 - DNA, 75 bp, synthetic construct
  source 1..75: mol_type = other DNA
tagatccgctacaccttgcacatatgaccgcagacgctgtagctgtgcctaaattcgctaaaggctctaacgtat

SEQ ID NO: 540221 - DNA, 75 bp, synthetic construct
  source 1..75: mol_type = other DNA
gcggcaagagccagctcaacctcggtcatctggtggatgccgggaaacagcagcgcggcgaaggctttgaactgc

SEQ ID NO: 540222 - DNA, 75 bp, synthetic construct
  source 1..75: mol_type = other DNA
atggcgcattcagcctgacggcaccgcccgtgcagggaatgccggtgcagactgccctgcgcaccctgtacgggg

SEQ ID NO: 540223 - DNA, 75 bp, synthetic construct
  source 1..75: mol_type = other DNA
actaacattgatgttattaaactggtagatccgctacaccttgcacatatgaccgcagacgctgtagctgtgcct

SEQ ID NO: 540224 - DNA, 75 bp, synthetic construct
  source 1..75: mol_type = other DNA
gcgcaaagaagcggtgatcattatgaacgtcgcagcgcatcacggtagcgagttgaatggcgaagttctgctcaa

SEQ ID NO: 540225 - DNA, 75 bp, synthetic construct
  source 1..75: mol_type = other DNA
gtacttgataagttacctgtggttgaaaagcttgatgagaacgctgccgatgcaattcttcgccacgcttccggg

SEQ ID NO: 540226 - DNA, 75 bp, synthetic construct
  source 1..75: mol_type = other DNA
tttaaaacctctgattttggctatcgccgtattacggtggaaagaccgcttaagctggcattttatcctcgcgat

SEQ ID NO: 540227 - DNA, 75 bp, synthetic construct
  source 1..75: mol_type = other DNA
atcagtatcagtcgccacgctccttggaagagattgatcgcgacttggatgaagtgagcagagaaattatggtct

SEQ ID NO: 540228 - DNA, 75 bp, synthetic construct
  source 1..75: mol_type = other DNA
attacatgctttctaatccacctttcggcgtggactggaaaaagatagaaaccgacatcaacaacgagcacaaac

SEQ ID NO: 540229 - DNA, 75 bp, synthetic construct
  source 1..75: mol_type = other DNA
actgggtctggaaaaagccgccgagcaaaaatccaaccgtggccgtcagcctgccatggccaaaaccgaagctcc

SEQ ID NO: 540230 - DNA, 75 bp, synthetic construct
  source 1..75: mol_type = other DNA
gagattaacgacgaacatacgcaaaagggctttaacggtcgctttggcccgggcctgccgcgtgtttccgacggc

SEQ ID NO: 540231 - DNA, 75 bp, synthetic construct
  source 1..75: mol_type = other DNA
gcactgagccgtttgatacggtaaaagagggtgaaatcgccgttgaatatccttcgcaaggtgaagttatctggc

SEQ ID NO: 540232 - DNA, 75 bp, synthetic construct
  source 1..75: mol_type = other DNA
ttgtcggcaaaaatcctcccaatgatttattggattcaaaaaatatcatcaggactggttttgttagtgatgtat

SEQ ID NO: 540233 - DNA, 75 bp, synthetic construct
  source 1..75: mol_type = other DNA
ccttaagatatcgacctcaaagtatattgatggttttgatgttgtttatataagctctgtatcaattgatttaga

SEQ ID NO: 540234 - DNA, 75 bp, synthetic construct
  source 1..75: mol_type = other DNA
ccacagagcaatttgcgccgatgcggaaatctcttggtagtaagcgtaaagagttaacggaagcgcagattgacg

SEQ ID NO: 540235 - DNA, 75 bp, synthetic construct
  source 1..75: mol_type = other DNA
tttaagcccttcttctgtcagcaaccacgatatggggcttatatttgaggacttgatccgccggtttgcagaaag

SEQ ID NO: 540236 - DNA, 75 bp, synthetic construct
  source 1..75: mol_type = other DNA
tacattcgttcattcagccatgacgcgcgtgagatcttcgaacactttaaattctatgagtttatacagcagctt

SEQ ID NO: 540237 - DNA, 75 bp, synthetic construct
  source 1..75: mol_type = other DNA
aaagaggcgctcagaaccgcaggcgtgaagctggatgcgaaagagaacaagcagtttatcgatgctatcacccgc

SEQ ID NO: 540238 - DNA, 75 bp, synthetic construct
  source 1..75: mol_type = other DNA
atatgattgctaaagcacaaagccaggctgcaaccattgagcgtgttgttgtgttctgtaagcctgcggcattca

SEQ ID NO: 540239 - DNA, 75 bp, synthetic construct
  source 1..75: mol_type = other DNA
agtttattgaacaggcacagggccatgaaggcccgctcgatggggtatttggaccgctgacggggctgatggagg

SEQ ID NO: 540240 - DNA, 75 bp, synthetic construct
  source 1..75: mol_type = other DNA
gcgattgattctgctttccctgattgtcctgtggggggccggtacactgctgtctctgctcgttaaccgtactca

SEQ ID NO: 540241 - DNA, 75 bp, synthetic construct
  source 1..75: mol_type = other DNA
acaggctgaagcagtggcggcacagtttgaaaatgtcgccatcgaagacgatcagggttcgcattttcgcctggt

SEQ ID NO: 540242 - DNA, 75 bp, synthetic construct
  source 1..75: mol_type = other DNA
ctggcagttatcttgttgattattgtgatgattggcgaaaaacgccgccatcaggaattacgacaaaaacgcaac

SEQ ID NO: 540243 - DNA, 75 bp, synthetic construct
  source 1..75: mol_type = other DNA
accacatatttgcgattgtcgaagagtttggtctgcggcttcatcagtcaccaaccggcaatgatattcgctccc

SEQ ID NO: 540244 - DNA, 75 bp, synthetic construct
  source 1..75: mol_type = other DNA
attcgctggaagcaacgcaatctggcggtgcttaaagataaaaatccggcgaagtatgtggcggcggtgaataag

SEQ ID NO: 540245 - DNA, 75 bp, synthetic construct
  source 1..75: mol_type = other DNA
tcaaaggtgctgatggtcgctttggccccggcctgccccgcgtctccgacggttcgttgctgtttctgctgcacc

SEQ ID NO: 540246 - DNA, 75 bp, synthetic construct
  source 1..75: mol_type = other DNA
aaagaggcgttcaaaaccgcaggcgtgaagctggatgcgaaagagaacaagcagtttattgatgccattacccgc

SEQ ID NO: 540247 - DNA, 75 bp, synthetic construct
  source 1..75: mol_type = other DNA
cggacgaagcgttttccacactggcgttacacctgcaaaaagcaggaatggcacagatactgaatgatcctgctg

SEQ ID NO: 540248 - DNA, 75 bp, synthetic construct
  source 1..75: mol_type = other DNA
catgacctctggcaggaaggcgacggctacgtgctgatttatggcggagacgcgcagtcactcccggacgagatc

SEQ ID NO: 540249 - DNA, 75 bp, synthetic construct
  source 1..75: mol_type = other DNA
cgacaaacaacctgagctcagccagactgaatacatagtccggctggccaaagacgagccagtaaaagcgtacga

SEQ ID NO: 540250 - DNA, 75 bp, synthetic construct
  source 1..75: mol_type = other DNA
tactgattgctctgggctttaacccactaaaagcagcgattgcatcactggttgctaatacagtccctacagcgt

SEQ ID NO: 540251 - DNA, 75 bp, synthetic construct
  source 1..75: mol_type = other DNA
caccattctcaacaaaaatgccgcaccggctaacctgttctgggctgatggttctgttgaactgatgtacggcaa

SEQ ID NO: 540252 - DNA, 75 bp, synthetic construct
  source 1..75: mol_type = other DNA
cattaatggtattaagaatgcggtgaacccttattataaacataatgtgatgaataatgcctataagcatatcaa

SEQ ID NO: 540253 - DNA, 75 bp, synthetic construct
  source 1..75: mol_type = other DNA
tcagagggataaatatatctcaagatgaaaaatttattagtgttgtacagtcatctagtaatccttattttaaag

SEQ ID NO: 540254 - DNA, 75 bp, synthetic construct
  source 1..75: mol_type = other DNA
ctgacaacgcggatgtcgccagccgtccatatgcaaacgttgatgctaatgcggcaagtagcgcagcaatcacca

SEQ ID NO: 540255 - DNA, 75 bp, synthetic construct
  source 1..75: mol_type = other DNA
ccgggcagccgcaggtattccgcgttctggcagttagcggaacgacagtaactatctccccgaaaattctgccgc

SEQ ID NO: 540256 - DNA, 75 bp, synthetic construct
  source 1..75: mol_type = other DNA
ccggctaacctgttctgggctgatggttctgttgaactgatgtacggcaaactggcgttcccgactggtcagggt

SEQ ID NO: 540257 - DNA, 75 bp, synthetic construct
  source 1..75: mol_type = other DNA
agacgaaatacgtgcgtagtcgaagtgcaattgccgaaaaaacagcgtctggtgagagtgattgaaaaggggttg

SEQ ID NO: 540258 - DNA, 75 bp, synthetic construct
  source 1..75: mol_type = other DNA
agatcatggattacctgaaaagccataatctggtcaccgttgatgagctggtggcggtaaccaatgcgtcgccgg

SEQ ID NO: 540259 - DNA, 75 bp, synthetic construct
  source 1..75: mol_type = other DNA
taaaaaagagtacatcgataagctgatggttgagcgtgaagcagcagcaaaaaaagcccgccagttgaagaaaaa

SEQ ID NO: 540260 - DNA, 75 bp, synthetic construct
  source 1..75: mol_type = other DNA
ggttttgttcggaatttgtcactgatgcatttgccaaagccgggcatccgcttacgctggcgcaatcaggctgga

SEQ ID NO: 540261 - DNA, 75 bp, synthetic construct
  source 1..75: mol_type = other DNA
atcagcgtgcggatgaattacctgcctgccaacgccgcatttgccagcacgctgaaaaatcccaaactcggctat

SEQ ID NO: 540262 - DNA, 75 bp, synthetic construct
  source 1..75: mol_type = other DNA
agttagcgcaaaaaattaaacagtggggactggaactgggctttcagcaggtaggtattaccgataccgatctca

SEQ ID NO: 540263 - DNA, 75 bp, synthetic construct
  source 1..75: mol_type = other DNA
aactacaaagaccttgctggcgagcttggtcaccgtgcctatgctcagggcgcaaccctgacagcatacgaaaaa

SEQ ID NO: 540264 - DNA, 75 bp, synthetic construct
  source 1..75: mol_type = other DNA
aaccttggtctgacctgcgatccggttgccggacaggtgcaaatcccatgtattgaacgtaatgccattaatgcc

SEQ ID NO: 540265 - DNA, 75 bp, synthetic construct
  source 1..75: mol_type = other DNA
caccgactaacggtgcgtgcggcattattccggcagtgctggcttattacgataagttccgtcgtccggtaaacg

SEQ ID NO: 540266 - DNA, 75 bp, synthetic construct
  source 1..75: mol_type = other DNA
ggtgcgcatattgttgattttcctgtagcaaagaacattatcttccatcccgaaatgttgcctcgccatgagaac

SEQ ID NO: 540267 - DNA, 75 bp, synthetic construct
  source 1..75: mol_type = other DNA
gggcggggtgtatatctggctgcctttttcacaaattcgctcgctgaaatcgccgcggcctgcgcatctgaccga

SEQ ID NO: 540268 - DNA, 75 bp, synthetic construct
  source 1..75: mol_type = other DNA
aatattattgacgatggtttcgaagttaaagagttatttgatataaatatagagtcatcaacaaacagtggtatc

SEQ ID NO: 540269 - DNA, 75 bp, synthetic construct
  source 1..75: mol_type = other DNA
atcacgcggaggactggccattaaagtggtctgcggccgacattgctgtcagctttcatccttgggtgcacaaat

SEQ ID NO: 540270 - DNA, 75 bp, synthetic construct
  source 1..75: mol_type = other DNA
taataaattcgatgctgttatgttgcttggtgatcgctatgaaatatttgctgttgcagttgctgcagcgattca

SEQ ID NO: 540271 - DNA, 75 bp, synthetic construct
  source 1..75: mol_type = other DNA
aaggcctcgacctcagcagcaaaacgccaacagcactggttcagcgccttgttccttctgtgttcaaggagccga

SEQ ID NO: 540272 - DNA, 75 bp, synthetic construct
  source 1..75: mol_type = other DNA
ctgaacacaaggttgaagcgaaagattcaaatggtatgccagttgataaccgacaggggactattacggtatctg

SEQ ID NO: 540273 - DNA, 75 bp, synthetic construct
  source 1..75: mol_type = other DNA
cagttgcagttgctgctgcgattcataatctacctataattcacattcatggcggtgaaaaaacattaggcaatt

SEQ ID NO: 540274 - DNA, 75 bp, synthetic construct
  source 1..75: mol_type = other DNA
caaattgaaaaggatggttttgttattgaacagctaattaatattaatattaatacgctaacgaactccgatata

SEQ ID NO: 540275 - DNA, 75 bp, synthetic construct
  source 1..75: mol_type = other DNA
gttcacgagctgaatatgggattgtgaaacgattgttagcggctttaaaaaatgatcaggatatagagcttacaa

SEQ ID NO: 540276 - DNA, 75 bp, synthetic construct
  source 1..75: mol_type = other DNA
aagagatgactgagcgcgaacaacgcgaactgaagacgctactggatcgggcgcgtattgcgcatggtcgcctgt

SEQ ID NO: 540277 - DNA, 75 bp, synthetic construct
  source 1..75: mol_type = other DNA
ccggtacgcctgcaacgcagatcaacgatgaactgacacaggcagctaatgaattgtctctgccactgacaggca

SEQ ID NO: 540278 - DNA, 75 bp, synthetic construct
  source 1..75: mol_type = other DNA
gagacgcttaaagctttatttggttcatcctgcattattaaaaacaatgtcacgctcgatgatcttgttttctct

SEQ ID NO: 540279 - DNA, 75 bp, synthetic construct
  source 1..75: mol_type = other DNA
actatcagtgccgttcgggtggcgcagaaaatgaagggtaaccccgttgtcgcgctgacccgtgtgccgggactg

SEQ ID NO: 540280 - DNA, 75 bp, synthetic construct
  source 1..75: mol_type = other DNA
atgagcgtcgccgcgattgagacgcgccgcagcatactgctcaccggctggtgtgtactggcagcgatcgtgctg

SEQ ID NO: 540281 - DNA, 75 bp, synthetic construct
  source 1..75: mol_type = other DNA
gcgcaatatagctggtttaaaaactcggtgaaaggggatgaattagcctatgaatcctatagtgcgaaaggcgca

SEQ ID NO: 540282 - DNA, 75 bp, synthetic construct
  source 1..75: mol_type = other DNA
atggcaaaagcaggatctacgcgctatcttgatgcgccgccgattccgcgaacaaaagagcaagttctaaaagaa

SEQ ID NO: 540283 - DNA, 75 bp, synthetic construct
  source 1..75: mol_type = other DNA
attcagaaagtgcagacagcaatcaatgacgcagagaaggaaatgttcatcaacaatctccgcgccatctgtcat

SEQ ID NO: 540284 - DNA, 75 bp, synthetic construct
  source 1..75: mol_type = other DNA
tgtctaacccggttgttcgtctgtatgaacaagacgcgctgcggatgggtaaaaaagagcagttcccgtatgtgg

SEQ ID NO: 540285 - DNA, 75 bp, synthetic construct
  source 1..75: mol_type = other DNA
aactgcgctttaccggctctatccagcgtgacgataccggggaagtgcaggctgtggagcttgtggtgcgtggac

SEQ ID NO: 540286 - DNA, 75 bp, synthetic construct
  source 1..75: mol_type = other DNA
acatcgcttttggtgatgtgaagcgaggcgctgcgccatattgcagtaagcatcatgttgaagagtgggacacta

SEQ ID NO: 540287 - DNA, 75 bp, synthetic construct
  source 1..75: mol_type = other DNA
actggacgtatttattaatactgaacttgcatctgcggttaatggcaatagtaattctaaacccctttttcattt

SEQ ID NO: 540288 - DNA, 75 bp, synthetic construct
  source 1..75: mol_type = other DNA
cagttacggaacaatcaggtcaagtagcaatgcttgatttcagcgcaaaaatgcatgaatatactgttgaaatca

SEQ ID NO: 540289 - DNA, 75 bp, synthetic construct
  source 1..75: mol_type = other DNA
gccccgcaaagtctgcccgttggggtagtaaccgccctggttggggtgcctttctttgccgtgattatctaccgc

SEQ ID NO: 540290 - DNA, 75 bp, synthetic construct
  source 1..75: mol_type = other DNA
ctactgctggcgtgctggctgttggtgatgcattcactatcgcaggcgttaatagtgtccacatgatcaagaagg

SEQ ID NO: 540291 - DNA, 75 bp, synthetic construct
  source 1..75: mol_type = other DNA
ttgaaatcctatttgaaaacgtcattgatggattcgaggcatcaaacgtagtatcccgtgagtgcagcaagttcc

SEQ ID NO: 540292 - DNA, 75 bp, synthetic construct
  source 1..75: mol_type = other DNA
caaaacgtggactcgcttcaccacgctggctggcgcaagcgtactggtcccggaattcaccggcctggtattggc

SEQ ID NO: 540293 - DNA, 75 bp, synthetic construct
  source 1..75: mol_type = other DNA
gcgcgtattgcgcatggtcgtgtgttgaccaatgccgaaaccaacagcattaaaaaagagtacattgataagctg

SEQ ID NO: 540294 - DNA, 75 bp, synthetic construct
  source 1..75: mol_type = other DNA
attattgcccggtacgctgcgcgtgatcagcgtgcggatgaattaccttcctgctaacgccgcatttgccagcac

SEQ ID NO: 540295 - DNA, 75 bp, synthetic construct
  source 1..75: mol_type = other DNA
agtacaaaaaacaaacagattcaccgcctgtttatccgacagatctgactgtgccagatactgatgcactccctg

SEQ ID NO: 540296 - DNA, 75 bp, synthetic construct
  source 1..75: mol_type = other DNA
tctgacaaacctacttttgaggtgttcgaaagtggcggcagtaaagcacaaacaccgaatgtggatttgaaaaca

SEQ ID NO: 540297 - DNA, 75 bp, synthetic construct
  source 1..75: mol_type = other DNA
atggctcacgtattgagaatgacgcaaataacaacattcagatccgacttggttttccgcacctttattcgtact

SEQ ID NO: 540298 - DNA, 75 bp, synthetic construct
  source 1..75: mol_type = other DNA
cagataatccggaattgatcctgcgtttgctacaactgaaatttgacgagacactgtcgtacccgcgcatttctg

SEQ ID NO: 540299 - DNA, 75 bp, synthetic construct
  source 1..75: mol_type = other DNA
tcgaaatcctctttgagagcgtcattgatagttttgaggcgtccaatgtcgtttcccgcgagtgcagcaagttcc

SEQ ID NO: 540300 - DNA, 75 bp, synthetic construct
  source 1..75: mol_type = other DNA
acagaatcaatgattatgagaaaagacgaatgtcactttgattcaaaaaaagaatcctttgttgcaagtgatgct

SEQ ID NO: 540301 - DNA, 75 bp, synthetic construct
  source 1..75: mol_type = other DNA
ttttttaagtagtgttaataactattttcagagtgtcatggcagaacacagagaaaataaaacaagtaataaaat

SEQ ID NO: 540302 - DNA, 75 bp, synthetic construct
  source 1..75: mol_type = other DNA
gtaccttttccccggagttcaagcttgaagctatcgaacaggtggttaaatacccgcgtgatgtcagagaagtcg

SEQ ID NO: 540303 - DNA, 75 bp, synthetic construct
  source 1..75: mol_type = other DNA
aaataccagcgtgatgtcagagaagtcgcgctggcactcgagctcaaccctgaccatttgcgtaaatggatacgg

SEQ ID NO: 540304 - DNA, 75 bp, synthetic construct
  source 1..75: mol_type = other DNA
ttttcagaaaagaatcaaagcgagggaatgctgaatgttcccacatctgccgacatagaaaatggtcatcatagc

SEQ ID NO: 540305 - DNA, 75 bp, synthetic construct
  source 1..75: mol_type = other DNA
ctggcactatggacccattggcctttgctgacttcatatataacgaatgtacgccggaaaaatacccgaatataa

SEQ ID NO: 540306 - DNA, 75 bp, synthetic construct
  source 1..75: mol_type = other DNA
attaaagcgcagataaagcgtcttgagatggaaaaagaaatcctgaagcaagttgccgtgctgatgagcgaaatc

SEQ ID NO: 540307 - DNA, 75 bp, synthetic construct
  source 1..75: mol_type = other DNA
aaagcgcagataaagcgcgttgagatggcaaaagaaatactaaagcaggctgccgtgctgatgagcgaaatcccc

SEQ ID NO: 540308 - DNA, 75 bp, synthetic construct
  source 1..75: mol_type = other DNA
ctgaacgtcttcgttaacctgttaggttcatttgccatgaccgcgctggctttctggcttttttcggcgtcaaca

SEQ ID NO: 540309 - DNA, 75 bp, synthetic construct
  source 1..75: mol_type = other DNA
gatcggcgcattcatcataggtatgggatttgcctggttcagtcggatgacaaacattgatccagtgtggaaagt

SEQ ID NO: 540310 - DNA, 75 bp, synthetic construct
  source 1..75: mol_type = other DNA
caatttccacataccttttacaaattacagtacagttcagcttgttgcttcatatgataacgctggcgcttcagg

SEQ ID NO: 540311 - DNA, 75 bp, synthetic construct
  source 1..75: mol_type = other DNA
aaaagtggcaggagttggcatctttctgcgatttttctatttttattcatgcacctgctcaaattctgcgggagc

SEQ ID NO: 540312 - DNA, 75 bp, synthetic construct
  source 1..75: mol_type = other DNA
atgtctggaaatataggggcaaatccaggttctgtaaaagtatccgatctgtccaatagcctcaatgtaacgaaa

SEQ ID NO: 540313 - DNA, 75 bp, synthetic construct
  source 1..75: mol_type = other DNA
aatagcctcaatgtaacgaaagaaactattcgttcagatcttaatgaacttgccaggcttggctatctgactcga

SEQ ID NO: 540314 - DNA, 75 bp, synthetic construct
  source 1..75: mol_type = other DNA
atgcacagtctgctcgctaaggtcatggatcgcggcatcttccgcgtgccggcgagccgcaagcgcaaggtcgaa

SEQ ID NO: 540315 - DNA, 75 bp, synthetic construct
  source 1..75: mol_type = other DNA
caggaaatcagtttttccgacgaggatatcgacaacatggcagcagcctataacggctatcatcgcgcgggttat

SEQ ID NO: 540316 - DNA, 75 bp, synthetic construct
  source 1..75: mol_type = other DNA
gtatctgcgtcattctataagcccggcgaggccagcaacccggcaggcaccggagcttggtatctacgccatatc

SEQ ID NO: 540317 - DNA, 75 bp, synthetic construct
  source 1..75: mol_type = other DNA
cggccagtaacagcccggcctatggcgaaaccaccggactgataagcaagaacggcaggcttttcgcactggtaa

SEQ ID NO: 540318 - DNA, 75 bp, synthetic construct
  source 1..75: mol_type = other DNA
cgaatgttcgtcgggtgctggaacagagtcggcctgcaaatttgaccttaatgatgacgcctaacggtgaatact

SEQ ID NO: 540319 - DNA, 75 bp, synthetic construct
  source 1..75: mol_type = other DNA
acactgctcggatataccgccagcctggttgataaaaaatggttgcgactggcagcaaggaggaatcatggctga

SEQ ID NO: 540320 - DNA, 75 bp, synthetic construct
  source 1..75: mol_type = other DNA
gtctgaaggtacaggcacagtaccatgatgatgagatagaaaatgtacataaaccgttgctgcgcatgttggcgg

SEQ ID NO: 540321 - DNA, 75 bp, synthetic construct
  source 1..75: mol_type = other DNA
ttgatccgctgcaaactgaaattggcagcatggtatatgcggtgaaaccaggcgatggttctgcgcgtgaacagg

SEQ ID NO: 540322 - DNA, 75 bp, synthetic construct
  source 1..75: mol_type = other DNA
aagataaactgggctacggccaccagccgttttccatggcttgctgattattttgttctgacagaaaccgctttc

SEQ ID NO: 540323 - DNA, 75 bp, synthetic construct
  source 1..75: mol_type = other DNA
gttaagccttccgacatcccgaccatgaaagactacaccgcccgcctggtcgataagaagtggctacgcctgaga

SEQ ID NO: 540324 - DNA, 75 bp, synthetic construct
  source 1..75: mol_type = other DNA
atgacaaatcttaatttgggcaactggaaaacgattgagatattccgggcgggaacgcataccgcgatggcggga

SEQ ID NO: 540325 - DNA, 75 bp, synthetic construct
  source 1..75: mol_type = other DNA
gcgcgcattaagcagattgctggtcaggaacatgttgatccgctgcaaactgaaattggcagcatggtttatgcg

SEQ ID NO: 540326 - DNA, 75 bp, synthetic construct
  source 1..75: mol_type = other DNA
gggattacatttacatccctggcattaaagcggcgctggataatcctggaacgacgtttaaaggttatgtgatcc

SEQ ID NO: 540327 - DNA, 75 bp, synthetic construct
  source 1..75: mol_type = other DNA
acgaccgcagcacttaacgcgggtgtggcgattatttaccaggaactgcatctcgtgccggaaatgaccgtcgcg

SEQ ID NO: 540328 - DNA, 75 bp, synthetic construct
  source 1..75: mol_type = other DNA
ggcggcatacagcttaccgccagcgtgattggcgaaagcgacgtgttgaaggtgattgaccagggcgcggatgac

SEQ ID NO: 540329 - DNA, 75 bp, synthetic construct
  source 1..75: mol_type = other DNA
tgaaatttttggacatttagtctggttctggtctattgaaattattcgcagagatttacgaaacagaattaccca

SEQ ID NO: 540330 - DNA, 75 bp, synthetic construct
  source 1..75: mol_type = other DNA
cctggtttttgcgatagggtattgtgttgtcgcggaaattttcccgaaagtgaaattatggcaggggatattagc

SEQ ID NO: 540331 - DNA, 75 bp, synthetic construct
  source 1..75: mol_type = other DNA
taacccgaaaatggacatgatgcccgccctgcaactgttcggcgcggggcgtgagaagcgtatttatgcggtgcc

SEQ ID NO: 540332 - DNA, 75 bp, synthetic construct
  source 1..75: mol_type = other DNA
atggctaatctgagcggctacaactttgcctacctcgacgagcagaccaaacgcatgatccgccgcgccatctta

SEQ ID NO: 540333 - DNA, 75 bp, synthetic construct
  source 1..75: mol_type = other DNA
caccatgcacgcgctggaggagtacggcgtgatgcaggtgaaactgtatgaagatattgcccgcttcggtcatat

SEQ ID NO: 540334 - DNA, 75 bp, synthetic construct
  source 1..75: mol_type = other DNA
aggcactaccacctggttcgactatgcccagcgggtattcgcgaccgctcgcgcggcgggcgttgagctggctgt

SEQ ID NO: 540335 - DNA, 75 bp, synthetic construct
  source 1..75: mol_type = other DNA
gcaggcgcgcttgcggctacgggcggtgagcagacccatgtcaacgcgctggttagcccgacggggacgccgggc

SEQ ID NO: 540336 - DNA, 75 bp, synthetic construct
  source 1..75: mol_type = other DNA
ttattccgtggtggagggcattcagatagcggaacggcaggtgagaatacaccctgcgcaggcctcctgccgcta

SEQ ID NO: 540337 - DNA, 75 bp, synthetic construct
  source 1..75: mol_type = other DNA
gtcctcataattcccgacttgatactaaaaaatttcagcgtacatttgatctggttttgccggactggtcagtcg

SEQ ID NO: 540338 - DNA, 75 bp, synthetic construct
  source 1..75: mol_type = other DNA
ccgggctgtatcacctgatcgcctccggcaccaccacctggttcgactatgcccagcgggtgttcgctaccgcgc

SEQ ID NO: 540339 - DNA, 75 bp, synthetic construct
  source 1..75: mol_type = other DNA
ctcccgtcacctgatcttccgcaccagctgggtctatgccgctcgtggcgctaacttcgccaaaaccatgctgcg

SEQ ID NO: 540340 - DNA, 75 bp, synthetic construct
  source 1..75: mol_type = other DNA
aggtgggttattcctgtttatcctttttttgttttctattgaaattaaccctgtttatatagaaggtattcttaa

SEQ ID NO: 540341 - DNA, 75 bp, synthetic construct
  source 1..75: mol_type = other DNA
tacctttgccgggcatgtctttaactgggttggtgttacgcacattatcttttcgatagtgtttgctgtcggtta

SEQ ID NO: 540342 - DNA, 75 bp, synthetic construct
  source 1..75: mol_type = other DNA
gcggcgcagggcgtggcggtgctgtttgcctccagcgacttacctgaagtcctcggcgttgccgaccggattgtg

SEQ ID NO: 540343 - DNA, 75 bp, synthetic construct
  source 1..75: mol_type = other DNA
catcgttacacgccgacaaaagtgacgccgcgcagcttcaaactccacatacgcacgcaagcggccagatttcag

SEQ ID NO: 540344 - DNA, 75 bp, synthetic construct
  source 1..75: mol_type = other DNA
ccatttgcttttccctatgcaggcttgtttgcgaccggaaaccgtggaacatctggctacaatgccgcgatgaat

SEQ ID NO: 540345 - DNA, 75 bp, synthetic construct
  source 1..75: mol_type = other DNA
cttcacgtatgaccagtgggcagccaatgacgtcgattggttacgagctgattgttatctccgcctgcgttttag

SEQ ID NO: 540346 - DNA, 75 bp, synthetic construct
  source 1..75: mol_type = other DNA
ttgtgtaatcaacaacggttgggaagaaaacaatgccgatcacacattcgttcgctcaacatcaaaacgccgggc

SEQ ID NO: 540347 - DNA, 75 bp, synthetic construct
  source 1..75: mol_type = other DNA
ccgtgaaggtcaggaagatcaactgggtgctctgggcctggtgaccaatgcggttgtgctgtggaatacacttta

SEQ ID NO: 540348 - DNA, 75 bp, synthetic construct
  source 1..75: mol_type = other DNA
ccggattgtggtgatgcgcgaaggcgaaatcgccggtgaattgttacacgagcaggcagatgagcgtcaggcatt

SEQ ID NO: 540349 - DNA, 75 bp, synthetic construct
  source 1..75: mol_type = other DNA
atgaaagcaaaagagctgcgtgagaagagcgttgaagagctgaacaccgagctgctgaacctgctgcgtgagcag

SEQ ID NO: 540350 - DNA, 75 bp, synthetic construct
  source 1..75: mol_type = other DNA
gatgccggcatcgtggccacttttgtgctgaataacgatgacagtaatgacgtgcagtgcgaccgttcggtactg

SEQ ID NO: 540351 - DNA, 75 bp, synthetic construct
  source 1..75: mol_type = other DNA
ttgggtgctggtggattgtttcctgttccaccatatcaaacccaaaaagaaggcgaaaaacaaaaccaaagcggg

SEQ ID NO: 540352 - DNA, 75 bp, synthetic construct
  source 1..75: mol_type = other DNA
ggtatgagctggaataacgccctgcgttatgatgtgcataatctcgatagcagtcgctcgatagcttacggcgac

SEQ ID NO: 540353 - DNA, 75 bp, synthetic construct
  source 1..75: mol_type = other DNA
ggatggcgtgctgaaaggcactgagtgttcagatccggggggtacgaaaacaggtgtgacggaaggtaaaccctg

SEQ ID NO: 540354 - DNA, 75 bp, synthetic construct
  source 1..75: mol_type = other DNA
atgaacggactcactgcaacgggtataaccgtcggtgtttgtgcagggctttggcagttagtatcttcacatgtt

SEQ ID NO: 540355 - DNA, 75 bp, synthetic construct
  source 1..75: mol_type = other DNA
ggtaaatcggggtttatcaagagccttgccgtcaattattccgggatggtttgggcatttttcgccgcactgacc

SEQ ID NO: 540356 - DNA, 75 bp, synthetic construct
  source 1..75: mol_type = other DNA
atttacaccagtacagaaaacactgactgccggtgttgcttttacgtcatctcaccccgtccgggtcgggaatac

SEQ ID NO: 540357 - DNA, 75 bp, synthetic construct
  source 1..75: mol_type = other DNA
tcaccgcgctctattccgcttctgctgattccattcctattctgtgtattaccggccaggctccgcgcgcccgtc

SEQ ID NO: 540358 - DNA, 75 bp, synthetic construct
  source 1..75: mol_type = other DNA
ctggcctcacgtcagtgcgcgttttattccgatgagggaacctgtctgcatgagtacgccacgtactcctgcgag

SEQ ID NO: 540359 - DNA, 75 bp, synthetic construct
  source 1..75: mol_type = other DNA
gaaatacacggatgaatatcgtgaggtgacgataccgcactcacagttccggttcagtatgaacggtctgaaact

SEQ ID NO: 540360 - DNA, 75 bp, synthetic construct
  source 1..75: mol_type = other DNA
tcaggtctctgaatgttaatgactccggaaggccgcgcaatatttgtgcaattgtttttttcctgagcttttctg

SEQ ID NO: 540361 - DNA, 75 bp, synthetic construct
  source 1..75: mol_type = other DNA
gcctggatggcgaatgcgataaggcacagagcggtaagagcagtgactttggtgcggccgtatcacaactggccg

SEQ ID NO: 540362 - DNA, 75 bp, synthetic construct
  source 1..75: mol_type = other DNA
ggatttccgggttctgggcgagcgtgattactaccgtgcctttctcagcggtagtggtctggcaaggacgtttct

SEQ ID NO: 540363 - DNA, 75 bp, synthetic construct
  source 1..75: mol_type = other DNA
cgctactgggttttctggcgggtaattgcgtggggataatttcagaatatagcggacaaaaattaagcgaagcga

SEQ ID NO: 540364 - DNA, 75 bp, synthetic construct
  source 1..75: mol_type = other DNA
gggctctctcagggatgggaattattaggaaccattggcttcgtcgccttttgcagtttttatgccgcaggcggc

SEQ ID NO: 540365 - DNA, 75 bp, synthetic construct
  source 1..75: mol_type = other DNA
attccgatgagggaacctgtctgcatgagtatgccacgtattcctgcgagtcaaaaacatccgggaaagtgatgg

SEQ ID NO: 540366 - DNA, 75 bp, synthetic construct
  source 1..75: mol_type = other DNA
atgagcgtattaacattgaaccaaaagatgtaatggtaaaaggttcaaataaaaagcaaggcgtaaacgctcaaa

SEQ ID NO: 540367 - DNA, 75 bp, synthetic construct
  source 1..75: mol_type = other DNA
ccttttgtttcccgttccaagttggtgctgcgcgcctggtatcaatacaaaaacgagccaagcagttacggcgag

SEQ ID NO: 540368 - DNA, 75 bp, synthetic construct
  source 1..75: mol_type = other DNA
ttgccgctgctatgggtctgtcttctgccgcctttgctgcagagactacgaccacacctgctccgactgcgacga

SEQ ID NO: 540369 - DNA, 75 bp, synthetic construct
  source 1..75: mol_type = other DNA
ccggttagcgattacaacgtaatggcgcacaatattattcgaagtctcaacatgtatatcgaacgggttaagaaa

SEQ ID NO: 540370 - DNA, 75 bp, synthetic construct
  source 1..75: mol_type = other DNA
gcgagcataaggtacctgacgtaaatacccgctcccctcgtgcgtccgataatagccgtagggtcgtgcaaagta

SEQ ID NO: 540371 - DNA, 75 bp, synthetic construct
  source 1..75: mol_type = other DNA
aaccccggcaccccagactttaaccggtttttaactgccagaaatggagcagtcatcagaggttttgatgatgtg

SEQ ID NO: 540372 - DNA, 75 bp, synthetic construct
  source 1..75: mol_type = other DNA
gcgatatctttgggataagcatctaattataaaaccgttatcacggagagctggagtcaacagaaaattaaataa

SEQ ID NO: 540373 - DNA, 75 bp, synthetic construct
  source 1..75: mol_type = other DNA
aaacagtcggcgtcagacattgctggttcagatgcgggataaattaacgggtgtacgtgctgacattacgacagc

SEQ ID NO: 540374 - DNA, 75 bp, synthetic construct
  source 1..75: mol_type = other DNA
ggctgacagcaacagtgattaccgggccggttctgattttgctcaccagatcaaagggcagggaagcagcagtat

SEQ ID NO: 540375 - DNA, 75 bp, synthetic construct
  source 1..75: mol_type = other DNA
ccgactgcgacgaccaccaaagcagcgcctgcgaaaaccacacaccataaaaaacagcataaagcagcacctgcc

SEQ ID NO: 540376 - DNA, 75 bp, synthetic construct
  source 1..75: mol_type = other DNA
aaaccacacatcataaaaaacagcataaagcagcacctgcccagaaagcgcaggcggctaaaaagcatcataaaa

SEQ ID NO: 540377 - DNA, 75 bp, synthetic construct
  source 1..75: mol_type = other DNA
tgcatcttcagttttttggtcagtaattagtggagctttagatctacataataatgtagcaaaaattattggaat

SEQ ID NO: 540378 - DNA, 75 bp, synthetic construct
  source 1..75: mol_type = other DNA
gtgaacgtcacctggacggcatcggtaccgctgaatgctgcaggtatggtgctgaaggcgggtgaggaagttaaa

SEQ ID NO: 540379 - DNA, 75 bp, synthetic construct
  source 1..75: mol_type = other DNA
ggtgccgggttgtgcgccaccatctgggcggtgattatccccgcggtactggctatcaaagcccgcaagaaattt

SEQ ID NO: 540380 - DNA, 75 bp, synthetic construct
  source 1..75: mol_type = other DNA
cgattatctcttcaggcggcaacgtcgattcgctggtgaaatcgttcctcggcaccaaacagcgtggcattatcg

SEQ ID NO: 540381 - DNA, 75 bp, synthetic construct
  source 1..75: mol_type = other DNA
attacctcgttgtttctcggcctgaaaattatctcctttgtgattgtgtttggttctttcttcttccaggtcgat

SEQ ID NO: 540382 - DNA, 75 bp, synthetic construct
  source 1..75: mol_type = other DNA
gaatgtgccgagcgtaaacgcacaatgcttcgtcgttcagactttgactgcaatccaatggtaatgactccaact

SEQ ID NO: 540383 - DNA, 75 bp, synthetic construct
  source 1..75: mol_type = other DNA
atcttattccggcgattgtcattctctttggcataaccgtaattttatgctggttcggtaacgtctttaacgtgt

SEQ ID NO: 540384 - DNA, 75 bp, synthetic construct
  source 1..75: mol_type = other DNA
ctgcgttgttgtatctgatcttcccgaacggctttatttacgggatcggcggtgccggactgtgcgccaccatct

SEQ ID NO: 540385 - DNA, 75 bp, synthetic construct
  source 1..75: mol_type = other DNA
tctgtttatttttgtgtttatcctgctgtgttcgccgctgtttccgacaataaaaggcgcggcatcccaactggc

SEQ ID NO: 540386 - DNA, 75 bp, synthetic construct
  source 1..75: mol_type = other DNA
ctggggggcatgacacacgcatctctgttattgcttctgatgcggagcatgccactttcctcaagaaaggcagct

SEQ ID NO: 540387 - DNA, 75 bp, synthetic construct
  source 1..75: mol_type = other DNA
caccatgaaatactgctgcgcctacattgtgatcctcggcctgaaagtcggtctgttttattactggtttatggc

SEQ ID NO: 540388 - DNA, 75 bp, synthetic construct
  source 1..75: mol_type = other DNA
ccactgcgggaacgtcttacttcccgtatatctttatggctttgccggtgtgtctggcgtcatttggtttccacg

SEQ ID NO: 540389 - DNA, 75 bp, synthetic construct
  source 1..75: mol_type = other DNA
cgtgctggagaaaaaattgttttaccagatatcgaaccagagccggttaaaaaagaaacgcaattatgggattga

SEQ ID NO: 540390 - DNA, 75 bp, synthetic construct
  source 1..75: mol_type = other DNA
atgcccatacattatgccgtgcttagcactctctttatcacgctgattctgggcggttttttctggaacactcct

SEQ ID NO: 540391 - DNA, 75 bp, synthetic construct
  source 1..75: mol_type = other DNA
gtgcctggtttgaagattacgcttttgcagcaaccactggtgtggatggatggccctgccaacctgcgtcatttt

SEQ ID NO: 540392 - DNA, 75 bp, synthetic construct
  source 1..75: mol_type = other DNA
acccgctttaccacacgtttaacactcttcacggattggttgagcgctttaaccgcctgccggacttcacgccgg

SEQ ID NO: 540393 - DNA, 75 bp, synthetic construct
  source 1..75: mol_type = other DNA
accgatgatgacattgccggcgatcaacactgacgccaacaagcatgagaatgaacagataagccgtactgttca

SEQ ID NO: 540394 - DNA, 75 bp, synthetic construct
  source 1..75: mol_type = other DNA
tcgccgctacgcagccgctatgagcagctggcagaggctatccacacaaggatggatggcctctgcgataaaatg

SEQ ID NO: 540395 - DNA, 75 bp, synthetic construct
  source 1..75: mol_type = other DNA
ctggagttcccgtgtcagttttatgaataccacatttaatctgggctggaatgacaccattacgctggggggggc

SEQ ID NO: 540396 - DNA, 75 bp, synthetic construct
  source 1..75: mol_type = other DNA
cagctgtgatgtgtatatgaaggatccggcctgtacggtatcgcgcgtgaactgccaggaaaagagcggcagtgc

SEQ ID NO: 540397 - DNA, 75 bp, synthetic construct
  source 1..75: mol_type = other DNA
gtggcaacggacaaggcagttccatgatcatgaagatgaaaggggaccagtttttaacccaatcaaacattgacc

SEQ ID NO: 540398 - DNA, 75 bp, synthetic construct
  source 1..75: mol_type = other DNA
aatattttctatggcctgctgttatggttgagtaaaggtgtgtggctgtacgactttccgccgtggtttgagcag

SEQ ID NO: 540399 - DNA, 75 bp, synthetic construct
  source 1..75: mol_type = other DNA
tggttaatcgcctacgggtgccgtctatcatcatcactatctcgacgctgaatattttctatggcctgctgttat

SEQ ID NO: 540400 - DNA, 75 bp, synthetic construct
  source 1..75: mol_type = other DNA
tcgcgtcggcagcgatggcaacggctgccattatgtcaacgccaagattattggccgtttttcgccatttttaat

SEQ ID NO: 540401 - DNA, 75 bp, synthetic construct
  source 1..75: mol_type = other DNA
cgcgatggggttgtttatctgccgtgcattaagccggaaccacgccgcactattggcctggtttatcgtcctggc

SEQ ID NO: 540402 - DNA, 75 bp, synthetic construct
  source 1..75: mol_type = other DNA
gatgctggaagatggtcactgtttgcgcgatcaggcgatgggtttctgctttgaagccggggcggatgaagatac

SEQ ID NO: 540403 - DNA, 75 bp, synthetic construct
  source 1..75: mol_type = other DNA
tgtggacgcccagatctatttgttccacatacggttgttcacggcactgatcctgaacttgatgattatgatggt

SEQ ID NO: 540404 - DNA, 75 bp, synthetic construct
  source 1..75: mol_type = other DNA
ccccaatatgaataaggcgctgtatgttgatagcgtcagttcggtggcgggtgcgtttatcggtacctcgtctgt

SEQ ID NO: 540405 - DNA, 75 bp, synthetic construct
  source 1..75: mol_type = other DNA
catgaaagtatgcaccgggcgctggcgcgatctgaacctgtgtgtggtggtggtcgcagctctgtttgcactgaa

SEQ ID NO: 540406 - DNA, 75 bp, synthetic construct
  source 1..75: mol_type = other DNA
tattaccacggtgatgatgccctttactttctcgatcaccgaagggattgcactcggctttatgtcgtactgcat

SEQ ID NO: 540407 - DNA, 75 bp, synthetic construct
  source 1..75: mol_type = other DNA
gtttcaatattcccgccctgaccggtgcttacgggattatagaaaatagcagcagccgtgatgcctatttatcgg

SEQ ID NO: 540408 - DNA, 75 bp, synthetic construct
  source 1..75: mol_type = other DNA
atggcattaccacgcaagttaaaacatctgaacctgttcaacgacgggaacaactggcaggggatcgttgagtcc

SEQ ID NO: 540409 - DNA, 75 bp, synthetic construct
  source 1..75: mol_type = other DNA
catgaaagtgtgcaccgggcgctggcgcgatctgaacctgtgtgtggtggtggtcgcaactctgtttgcactgaa

SEQ ID NO: 540410 - DNA, 75 bp, synthetic construct
  source 1..75: mol_type = other DNA
cactggatatgtaccgactggataacgggcgttatccgaccaccgaacagggactggaggcgttgatccagcaac

SEQ ID NO: 540411 - DNA, 75 bp, synthetic construct
  source 1..75: mol_type = other DNA
accgtaagatcaatatcagcaccatgaacaaagacactgcctttgatgaatggaaagctgaagctaaaaaacaac

SEQ ID NO: 540412 - DNA, 75 bp, synthetic construct
  source 1..75: mol_type = other DNA
ttcagactctgaacgctaaagttgaccagctgagcaacgacgtgaacgccagtgcgccgaggtggatagtttctt

SEQ ID NO: 540413 - DNA, 75 bp, synthetic construct
  source 1..75: mol_type = other DNA
gtgttgtcatcacgtcattttcatgccgcggtgctggtttctattgtggtgacgtcttgctgtggattatttttc

SEQ ID NO: 540414 - DNA, 75 bp, synthetic construct
  source 1..75: mol_type = other DNA
cgggcgttatccgaccaccgagcaggggcttgaggcgctgatccagcaaccggccaatatggcggattcccgcaa

SEQ ID NO: 540415 - DNA, 75 bp, synthetic construct
  source 1..75: mol_type = other DNA
ctaccgtactggtggatacattaaacgactgccaaaggatccgtggggcaatgattatcagtatctcagcccggg

SEQ ID NO: 540416 - DNA, 75 bp, synthetic construct
  source 1..75: mol_type = other DNA
aatgccgggtgcccgcgttcgaaactggaaaaaggtgttgctggattaattaacgccatccgcgctgttcgttaa

SEQ ID NO: 540417 - DNA, 75 bp, synthetic construct
  source 1..75: mol_type = other DNA
cgccaggcgcgccaggtgggctttaacctggaagagagcggcgagctggtgaatctgtttaacgacccgcagcgt

SEQ ID NO: 540418 - DNA, 75 bp, synthetic construct
  source 1..75: mol_type = other DNA
cgaatgcctgccctggcgatgaaagcgccgactgcccaattatcgaaaatctctccggctgctgccatcatcggg

SEQ ID NO: 540419 - DNA, 75 bp, synthetic construct
  source 1..75: mol_type = other DNA
ggtcaggtgtaaatacttcattcagttcgatgatgattatcatgagttccagtttcgggtggatcacaactatga

SEQ ID NO: 540420 - DNA, 75 bp, synthetic construct
  source 1..75: mol_type = other DNA
taaggagctggtcgaaatcgacaccatcaacatgattgagaaggtgaacggcgtcgacaggctggagcaacaccg

SEQ ID NO: 540421 - DNA, 75 bp, synthetic construct
  source 1..75: mol_type = other DNA
taaggagctggtcgaaatcgacaccatcaacatgattgagaaggtgaacggcgtcgaccggctggagcaaccccg

SEQ ID NO: 540422 - DNA, 75 bp, synthetic construct
  source 1..75: mol_type = other DNA
cgagggtaaacagggagaagacaccgagtcgaaaatctccgtagtctgcacctatttccggctgacgatggacgg

SEQ ID NO: 540423 - DNA, 75 bp, synthetic construct
  source 1..75: mol_type = other DNA
taccgattcgttttgcaggctcttaccagcgcgacgataccggcgaaacggtggccgtcgaagtggtcatgcgtg

SEQ ID NO: 540424 - DNA, 75 bp, synthetic construct
  source 1..75: mol_type = other DNA
tgccggctgcccacgttcgaaactggaaaaaggtgtggctggattaataaacgccatcccgtccgggtgcatgtt

SEQ ID NO: 540425 - DNA, 75 bp, synthetic construct
  source 1..75: mol_type = other DNA
atgttcgatttttcaaaggtcgtggatcgtcatggcacatggtgtacgcagtgggattatgtcgctgaccgtttc

SEQ ID NO: 540426 - DNA, 75 bp, synthetic construct
  source 1..75: mol_type = other DNA
cggcgctggtgatcattgattatcagcaggctattgaaaatggatttgtccggatgacgcagcgcatggtggaga

SEQ ID NO: 540427 - DNA, 75 bp, synthetic construct
  source 1..75: mol_type = other DNA
ccgtaatgagcaggcaggtatcgactggaacgcagtcttcagcgacagaacgctgggactgagcctcggcagcac

SEQ ID NO: 540428 - DNA, 75 bp, synthetic construct
  source 1..75: mol_type = other DNA
gtggccgtcgaagtggtcatgcgtgggcgtcagaaagaagtcgataccggagagggtaaacagggagaggatacc

SEQ ID NO: 540429 - DNA, 75 bp, synthetic construct
  source 1..75: mol_type = other DNA
gcaactggcgcaactgcaaatgcaggcccatgagcaaggttatcaggcgggtattgccgaaggtcgccagcaagg

SEQ ID NO: 540430 - DNA, 75 bp, synthetic construct
  source 1..75: mol_type = other DNA
atggtgacctgagcgcagatatccgccgccttgagggcgcgctgatcgcctgcgcgctacaggtcaaaaccgtca

SEQ ID NO: 540431 - DNA, 75 bp, synthetic construct
  source 1..75: mol_type = other DNA
tagcccgcgtgagtctcaaaaatacctgaataccatttggcagcgtatccgcgctgagctggcgcgccaggaaat

SEQ ID NO: 540432 - DNA, 75 bp, synthetic construct
  source 1..75: mol_type = other DNA
ggcgaaattctgccgtaaggccgcagccggcttcagtaactgctgtaaggatggcggctggggtcaggatgtggg

SEQ ID NO: 540433 - DNA, 75 bp, synthetic construct
  source 1..75: mol_type = other DNA
tgaatgcggccaccatcaccaccggttttaatatgacccttctgccgttcattctcccggactcacagacactgc

SEQ ID NO: 540434 - DNA, 75 bp, synthetic construct
  source 1..75: mol_type = other DNA
atgccgggcagtgacccgcagacgaacggcgatttaagtgccgatatccggcagcttgagaacgcgctggcacgc

SEQ ID NO: 540435 - DNA, 75 bp, synthetic construct
  source 1..75: mol_type = other DNA
acaacgaagccggattcctgcaagaagccgcccacatcaaacagctgggctttgacggcaaatcgctgatcaacc

SEQ ID NO: 540436 - DNA, 75 bp, synthetic construct
  source 1..75: mol_type = other DNA
gcagagcggaaaaagcagtgattttggtgaagccgtctcacaactggctgcgcttgccgccgcaggtaaggatgt

SEQ ID NO: 540437 - DNA, 75 bp, synthetic construct
  source 1..75: mol_type = other DNA
gccgaaagacattctgtcaccggatgcgccgtttattcagaccggcagggatgtggtgaaccgggctgacagcat

SEQ ID NO: 540438 - DNA, 75 bp, synthetic construct
  source 1..75: mol_type = other DNA
tattcctcattacactttcggcgtggttcgctgctttaagtaagttttattcacttaaactgtataaaaatagtt

SEQ ID NO: 540439 - DNA, 75 bp, synthetic construct
  source 1..75: mol_type = other DNA
ggctgacagcattgtaggaaacacaggccagcagtgtagtgcacagcagataaaccgcagtgaatttacaaacta

SEQ ID NO: 540440 - DNA, 75 bp, synthetic construct
  source 1..75: mol_type = other DNA
ccgggcgggttctgattttgcacgtcagatccaggggcagggtattggcagtctccagaattttaatccgcagga

SEQ ID NO: 540441 - DNA, 75 bp, synthetic construct
  source 1..75: mol_type = other DNA
atgaaagaaaagataaatacctttttcaggtctctgaattttaatgactccggaagtcagcgcaatatttgtgca

SEQ ID NO: 540442 - DNA, 75 bp, synthetic construct
  source 1..75: mol_type = other DNA
gtgaacgcatggcgttcaagctgcaccgtcagggcatgattatggaaaccatcgggaaaaataacgccgtctgta

SEQ ID NO: 540443 - DNA, 75 bp, synthetic construct
  source 1..75: mol_type = other DNA
cggggatggcggcctgaaaaatgacggcaccacggaatgggcgaccggtgaaaccggaaaaaccatcacagagtc

SEQ ID NO: 540444 - DNA, 75 bp, synthetic construct
  source 1..75: mol_type = other DNA
aaacggagaaagtccaaatgtatgcggcagaaaatgaagtggtttatcactttcgttacagaggggagaattatt

SEQ ID NO: 540445 - DNA, 75 bp, synthetic construct
  source 1..75: mol_type = other DNA
atcatgggtgaggatggtaaacgctggcatccgtgccgttcacaagatgaattgctgtctgaattgatcacgagg

SEQ ID NO: 540446 - DNA, 75 bp, synthetic construct
  source 1..75: mol_type = other DNA
ctggtcagcgaatttcaaactacccttgatgcgcttgatagtgtgattgaagtggtcaacaaaaactggccaccg

SEQ ID NO: 540447 - DNA, 75 bp, synthetic construct
  source 1..75: mol_type = other DNA
gaggcggcacgtcaggtgatcggtcagacgccaacggtggacaactcggcactgatcaaacagatccaacagttg

SEQ ID NO: 540448 - DNA, 75 bp, synthetic construct
  source 1..75: mol_type = other DNA
caagaactctgccgtctggcagcaccaggagtggtgtaatgaccacgcgcctgactcgctggctaaccacgctgg

SEQ ID NO: 540449 - DNA, 75 bp, synthetic construct
  source 1..75: mol_type = other DNA
gtatgcaatacctgagaaagaaagggcttgttgcaaatgtgcgtgggaagggttgggtgaaaattaacctgtcat

SEQ ID NO: 540450 - DNA, 75 bp, synthetic construct
  source 1..75: mol_type = other DNA
tgtctgtagtggcggagataatgtttttatcttaagttttttacaaaatgcaacattactcatatgctgtatata

SEQ ID NO: 540451 - DNA, 75 bp, synthetic construct
  source 1..75: mol_type = other DNA
gcgcagcgtgacccgctgggaaaccgggaaaaatccgcccaacacaaagaaaaacttcggctacctgatgtggcg

SEQ ID NO: 540452 - DNA, 75 bp, synthetic construct
  source 1..75: mol_type = other DNA
attcagtacctgaagatgatttgctctgttgctatccgtcgttgtcgggcgatggtagctactttttcacgctaa

SEQ ID NO: 540453 - DNA, 75 bp, synthetic construct
  source 1..75: mol_type = other DNA
agcgatatcgtggcgctggagaacgcgctggatatgtaccgactggataacgggcgttatccgaccaccgaacag

SEQ ID NO: 540454 - DNA, 75 bp, synthetic construct
  source 1..75: mol_type = other DNA
ctaccgtaccggtggatacattaaacgactgccaaaggatccgtggggcaatgattatcagtatctcagtccggg

SEQ ID NO: 540455 - DNA, 75 bp, synthetic construct
  source 1..75: mol_type = other DNA
gattgtcacagagtgtcgtatgcgttacgccgtacagatgttattgatggtggatttgcccctatatttccagac

SEQ ID NO: 540456 - DNA, 75 bp, synthetic construct
  source 1..75: mol_type = other DNA
ttactgggacgccagcagtaatgtgaattattcattatcacttagccgcgattttgatatcggcccattaaaaaa

SEQ ID NO: 540457 - DNA, 75 bp, synthetic construct
  source 1..75: mol_type = other DNA
caataagcgaattgattaaaaatatttattgttcattatccgttatcatcattggttgtgcgtcagcttatgccg

SEQ ID NO: 540458 - DNA, 75 bp, synthetic construct
  source 1..75: mol_type = other DNA
tatttcattcaataaatcacttgttgctcttggtggaatatcatattcactttatctgattcatgttcctgttat

SEQ ID NO: 540459 - DNA, 75 bp, synthetic construct
  source 1..75: mol_type = other DNA
gtgttgtatcctgatggaactatcgagaatgggccatatttccctaattacaaaaaacttcagttccttgagaga

SEQ ID NO: 540460 - DNA, 75 bp, synthetic construct
  source 1..75: mol_type = other DNA
tgtacatcttttctttttttttgttagggtgtgataaaaatgagtcattgaatcctccatccaatggtgaaatgg

SEQ ID NO: 540461 - DNA, 75 bp, synthetic construct
  source 1..75: mol_type = other DNA
acatcgccaataaatttatctcatggttcattgtctgggcgagctgctgatggcaatcagacaacaccttacaat

SEQ ID NO: 540462 - DNA, 75 bp, synthetic construct
  source 1..75: mol_type = other DNA
aggagatattgtgggctttactccatcacgaactattccggtatttcgagtgaatatcgaacttcaaaggagttc

SEQ ID NO: 540463 - DNA, 75 bp, synthetic construct
  source 1..75: mol_type = other DNA
cctgtcggcaatggaagcggtggatcgcgccaacggccaggtcttcgcccagacggtcgcggcggatggatcgcc

SEQ ID NO: 540464 - DNA, 75 bp, synthetic construct
  source 1..75: mol_type = other DNA
gctgacggtcagtgttcgtcgctcgctggagcatctggccgggtcgtttgaactggggctgatgctgcccggtga

SEQ ID NO: 540465 - DNA, 75 bp, synthetic construct
  source 1..75: mol_type = other DNA
tatgatgaatggggcaaccagcttaatgaggagaacccgcatcatgtgtatcagccgtaccgtctgccagggcag

SEQ ID NO: 540466 - DNA, 75 bp, synthetic construct
  source 1..75: mol_type = other DNA
cccctgggtttatctatgtgggaggatgcaaaatcgggggcatgtactaatggtctttgcggcacactatccgct

SEQ ID NO: 540467 - DNA, 75 bp, synthetic construct
  source 1..75: mol_type = other DNA
attgatgatgagtccccactttccattcatttagaccactttaaaaaaattacgtcagcacttttgaagaaaaaa

SEQ ID NO: 540468 - DNA, 75 bp, synthetic construct
  source 1..75: mol_type = other DNA
acaagattgcagccgaacctacggtggcgcattgcagatgctgacactagacccacaacgtttattaactccaga

SEQ ID NO: 540469 - DNA, 75 bp, synthetic construct
  source 1..75: mol_type = other DNA
tataaaggcaagggattatatgagaaatggcgttactcgcctgtatgagatatgtggggaattatctgtggaagg

SEQ ID NO: 540470 - DNA, 75 bp, synthetic construct
  source 1..75: mol_type = other DNA
gttaagcccgcatctttacctggcgaccaacagcgcacaggggccgtggtggatactggggtggtctgagcgggt

SEQ ID NO: 540471 - DNA, 75 bp, synthetic construct
  source 1..75: mol_type = other DNA
taccaaaaagcgtattccaggagttgcaaagtaaattccccaacacaggggaactggatcgctatgctaatgcaa

SEQ ID NO: 540472 - DNA, 75 bp, synthetic construct
  source 1..75: mol_type = other DNA
taccagcaatgattctggctggctactatgtcaaacgttatggtaagcggcgaatgatggtcatagcagtggcgg

SEQ ID NO: 540473 - DNA, 75 bp, synthetic construct
  source 1..75: mol_type = other DNA
ttctaccggggtaattctggctggcgttattcagggagcaattgcacaaagttgggggcactttgctgtctactg

SEQ ID NO: 540474 - DNA, 75 bp, synthetic construct
  source 1..75: mol_type = other DNA
ataacaaaaatatcactcaggtggcgcaattatgtggctatagcagcacgtcgtactttatctctgttttaaggc

SEQ ID NO: 540475 - DNA, 75 bp, synthetic construct
  source 1..75: mol_type = other DNA
ggtgcaggtagtcatggagaatattgggacgaaatattttcaggtaaagatgagaaaatagttaaaagtaaagat

SEQ ID NO: 540476 - DNA, 75 bp, synthetic construct
  source 1..75: mol_type = other DNA
ctgtcctgaacactttagtcactaatgatacggatagtaatactgatgatgatatcggtaatgatgagaccagag

SEQ ID NO: 540477 - DNA, 75 bp, synthetic construct
  source 1..75: mol_type = other DNA
aaagaaaattgagttaaagatcagttatgacaccaatggaagaacggtgcagacgaaggtaatggatgatgaatg

SEQ ID NO: 540478 - DNA, 75 bp, synthetic construct
  source 1..75: mol_type = other DNA
gcccagggttcatattgaatatcagacctttaaaaacataattgcggctcttgtagataaacaaatattcttccg

SEQ ID NO: 540479 - DNA, 75 bp, synthetic construct
  source 1..75: mol_type = other DNA
tttgtactatagcgatgttacgcaaactgggctaattgattatgcttccaaatataagaaaggcgtaatagtttc

SEQ ID NO: 540480 - DNA, 75 bp, synthetic construct
  source 1..75: mol_type = other DNA
gctttattgccttactgatgtatatcctgcgcagcagtatacgcgatagcgtatacctgattatccaaagcgata

SEQ ID NO: 540481 - DNA, 75 bp, synthetic construct
  source 1..75: mol_type = other DNA
agctatccgtcccacacatgatctggctgcagcgggttttaacatgatgaataacctgccggttaccagtacatc

SEQ ID NO: 540482 - DNA, 75 bp, synthetic construct
  source 1..75: mol_type = other DNA
cggacacaggcgaaccctgccacccagaccccagataatacggatgtgcgtgtacagggactggagcaaaacagt

SEQ ID NO: 540483 - DNA, 75 bp, synthetic construct
  source 1..75: mol_type = other DNA
gtcacacaggtgctgggcagcaaatcggtccgcacctgcaccaatccggcggattgtcagagcggcggtgaggcg

SEQ ID NO: 540484 - DNA, 75 bp, synthetic construct
  source 1..75: mol_type = other DNA
accagcggccgggtacaggagatgtcgcagttgctgaatattggccgtaccacgctgtggcgcaagatgaagcag

SEQ ID NO: 540485 - DNA, 75 bp, synthetic construct
  source 1..75: mol_type = other DNA
accaactattgaaggtgatttatgtgctggtgattgtacaactgtttcactatcaggtaacaaattcactgtttc

SEQ ID NO: 540486 - DNA, 75 bp, synthetic construct
  source 1..75: mol_type = other DNA
gcaaggcagaaaattttatcaaccgtaagctttatgaggagacggtgccggagggggatccagaaggggtgctta

SEQ ID NO: 540487 - DNA, 75 bp, synthetic construct
  source 1..75: mol_type = other DNA
tggaagatctttataaaaccctgtatcagcggacccaggaactgtctctgtccggcattaatgcggatgcagtgc

SEQ ID NO: 540488 - DNA, 75 bp, synthetic construct
  source 1..75: mol_type = other DNA
gtatttaataaattgcaagatcggctcgatacggcattaatcaatgctaaaagagtcgaagatgccgccaaaaaa

SEQ ID NO: 540489 - DNA, 75 bp, synthetic construct
  source 1..75: mol_type = other DNA
tctttttaatggcgatgtccgctggcgtgtttatggcgatcggatttactttttacctttccgttatcgccgatg

SEQ ID NO: 540490 - DNA, 75 bp, synthetic construct
  source 1..75: mol_type = other DNA
ttatttcccagccggcgacgcgcagtaacatgcagaagctcgggctggacctgggctggagcagcgatctgatgt

SEQ ID NO: 540491 - DNA, 75 bp, synthetic construct
  source 1..75: mol_type = other DNA
tacgccggtcatggcagacagcattctctcgctgccaaaactgaatgacagcacgtttggttacggaaaatcggt

SEQ ID NO: 540492 - DNA, 75 bp, synthetic construct
  source 1..75: mol_type = other DNA
tgctgccaatatgggcgttggcgattcatggacagcgcataaatctacagacctcctgactttctgcgtactggt

SEQ ID NO: 540493 - DNA, 75 bp, synthetic construct
  source 1..75: mol_type = other DNA
cacgctgtggcgcaagatgaagcagtacgacatcgacgccgggcagtttaagcgccgggggcaggataagagtta

SEQ ID NO: 540494 - DNA, 75 bp, synthetic construct
  source 1..75: mol_type = other DNA
ccaaatgtttgggaagggatcgaaatgctatctacttgagaaaggaatggatcgaattggtccgtttttacctat

SEQ ID NO: 540495 - DNA, 75 bp, synthetic construct
  source 1..75: mol_type = other DNA
atctgcaaaaccgtaaagtggttgcctgggctaaacagcacggtattcatatcacttcctatatgacgctggctt

SEQ ID NO: 540496 - DNA, 75 bp, synthetic construct
  source 1..75: mol_type = other DNA
gattgaactctctccttatctgcaaaaccgtaaagtggttgcctgggctaaacagcacggcatccatattacttc

SEQ ID NO: 540497 - DNA, 75 bp, synthetic construct
  source 1..75: mol_type = other DNA
taattatatattcgctgtttttattttgcagttgaaatataattttaatgctcatggatatgtttacattcctct

SEQ ID NO: 540498 - DNA, 75 bp, synthetic construct
  source 1..75: mol_type = other DNA
aaaagagacgcaactggtcctgaattcagcagccagctggcttaacgacagcggtgagtgggtttaccggcaggg

SEQ ID NO: 540499 - DNA, 75 bp, synthetic construct
  source 1..75: mol_type = other DNA
acgcggtccagcatggatagcgttgattacctggctgttggacactgcggaaatagctccaattgaagctattcc

SEQ ID NO: 540500 - DNA, 75 bp, synthetic construct
  source 1..75: mol_type = other DNA
atgacacgctgtcagaaaaggttcttcccttgttagaaaactttctggcagaaagagggcttaccctctcaccag

SEQ ID NO: 540501 - DNA, 75 bp, synthetic construct
  source 1..75: mol_type = other DNA
aaggaaatactttcgttcagttaacttccgacactgggtattcggcacagagacagggaagatcctgccgtcagg

SEQ ID NO: 540502 - DNA, 75 bp, synthetic construct
  source 1..75: mol_type = other DNA
tccattataatgataagggttctatgtatgtatcgctggcctacacgcggcggcttaaggaagccggattactgg

SEQ ID NO: 540503 - DNA, 75 bp, synthetic construct
  source 1..75: mol_type = other DNA
tgtatcaatctctcagagttgctgacttttcggataaaatttccggggtcattgggttatataatataatcgagc

SEQ ID NO: 540504 - DNA, 75 bp, synthetic construct
  source 1..75: mol_type = other DNA
ttggaatgatatatggtgttagaacagaaatatggattttccaaaaaatatatttacaacaatttcttattacaa

SEQ ID NO: 540505 - DNA, 75 bp, synthetic construct
  source 1..75: mol_type = other DNA
ttgcagatgggtcgcaggttgcttccttgcgcacaggatatagttataccagcgttattgtcgttagtggtgagt

SEQ ID NO: 540506 - DNA, 75 bp, synthetic construct
  source 1..75: mol_type = other DNA
aattgatactattaccctcacgtaccttctagatcgcttcgatgaaaactttcttatcgaacagttgccaaatgt

SEQ ID NO: 540507 - DNA, 75 bp, synthetic construct
  source 1..75: mol_type = other DNA
tcagcggcacatcggtgacgaatggtaatgatgtacagttaggaaataagctacctaaagatattaaggctggac

SEQ ID NO: 540508 - DNA, 75 bp, synthetic construct
  source 1..75: mol_type = other DNA
gtactgatcattgcagagctatcaatacctcagtgtcgtaagtatcgtgttgatcagaaagttgagttatttaaa

SEQ ID NO: 540509 - DNA, 75 bp, synthetic construct
  source 1..75: mol_type = other DNA
aaggcgggacatatcgatgtcggtctctttcgggcggccagtgaaggtgtaccacagggcggtgttatatcgccg

SEQ ID NO: 540510 - DNA, 75 bp, synthetic construct
  source 1..75: mol_type = other DNA
tccctgctcagtactccaatgtcaacttcatcctgactggtgcgcagcagatgaacgccggtaattaccgcacaa

SEQ ID NO: 540511 - DNA, 75 bp, synthetic construct
  source 1..75: mol_type = other DNA
tgctgcccactatattttccgaaacactgatggctccttcgtcaaagctcacgtaagcatcagtgactatcctga

SEQ ID NO: 540512 - DNA, 75 bp, synthetic construct
  source 1..75: mol_type = other DNA
caatgaatttaatgattttaatcgtggttttccccagcataataaaaaaacttctgatggaaaggtttattatca

SEQ ID NO: 540513 - DNA, 75 bp, synthetic construct
  source 1..75: mol_type = other DNA
gcgcccacgttttttggttgagttggctcgcgagcttaactgcgaaccggaatggcttcttttcggagacgccaa

SEQ ID NO: 540514 - DNA, 75 bp, synthetic construct
  source 1..75: mol_type = other DNA
aaggttggactactacagtcttgtttatgtccactttgtttatgctgcaatttattatgttggccttctttgggg

SEQ ID NO: 540515 - DNA, 75 bp, synthetic construct
  source 1..75: mol_type = other DNA
caataattcaaattgagattgcaaaaataaaatttcttaacccacgaacaagaaataaggtagtgcatgaagaaa

SEQ ID NO: 540516 - DNA, 75 bp, synthetic construct
  source 1..75: mol_type = other DNA
gatactaaatcagaagctttgaagagcatagagaatgggattaatgaactgaaatggccatctgcacgtgatcag

SEQ ID NO: 540517 - DNA, 75 bp, synthetic construct
  source 1..75: mol_type = other DNA
gcgcaagaagggaacgtcaatggcggcggaatctcgcagaaatggtttgagttcctcaacgctggcgaatgcatt

SEQ ID NO: 540518 - DNA, 75 bp, synthetic construct
  source 1..75: mol_type = other DNA
cgtgcagttgagtcttggggggaaaaatcatttattccagtccttgaaagaatgaggaaatttgatgctgattgg

SEQ ID NO: 540519 - DNA, 75 bp, synthetic construct
  source 1..75: mol_type = other DNA
cgttgatgaatgggagttccgggacgctttccctgcaatgaagcacaccctgcaaaatgccttcccggatgctca

SEQ ID NO: 540520 - DNA, 75 bp, synthetic construct
  source 1..75: mol_type = other DNA
tgccgaccgggtacggaaagacggctgcattcacctatgccctgcaatttgagtctgatgctggcgaaggtatga

SEQ ID NO: 540521 - DNA, 75 bp, synthetic construct
  source 1..75: mol_type = other DNA
acaggatatcgctggcaaaaaactgacccagcgagaggttaggaaaattattaacaacgctgaaaagatgaaggt

SEQ ID NO: 540522 - DNA, 75 bp, synthetic construct
  source 1..75: mol_type = other DNA
cggtggtcgccgagggtgattatggattccgcctcacgaccgcaccaggtgatggtttgtacgttaactatgggc

SEQ ID NO: 540523 - DNA, 75 bp, synthetic construct
  source 1..75: mol_type = other DNA
gcattgtgacattgggggcgctgacctgccgccgtccatcccgccgttgattactgcgccgtacaggttccgcga

SEQ ID NO: 540524 - DNA, 75 bp, synthetic construct
  source 1..75: mol_type = other DNA
ctgccgccgtccatcccgccgctggttacagcgccgtacaggttccgcgagctggagcaatgcgaccgcccggca

SEQ ID NO: 540525 - DNA, 75 bp, synthetic construct
  source 1..75: mol_type = other DNA
agatggtaaaggggactatacttgtggtggccaagaccaacggggagaatcaaaaggagatggtctatgggggcc

SEQ ID NO: 540526 - DNA, 75 bp, synthetic construct
  source 1..75: mol_type = other DNA
ctggtgtcgctggcgagagctatcagttttatcccactggtgggaatgacagcaattgctacaggagtctatagt

SEQ ID NO: 540527 - DNA, 75 bp, synthetic construct
  source 1..75: mol_type = other DNA
tatgacagttttgtgccggttgaatttggtcgcttcaatggcggggtaattgatgcaaagatcaaacgcttcaac

SEQ ID NO: 540528 - DNA, 75 bp, synthetic construct
  source 1..75: mol_type = other DNA
acgggcagaataataaagtaagttcaactttgtcggaaacaatcaagcctaataatacaggagagagaggacaga

SEQ ID NO: 540529 - DNA, 75 bp, synthetic construct
  source 1..75: mol_type = other DNA
cgctcattgatgacggccgcacatggtgtcgctcagttttctggtaatgctgatattactaaagctgttgagaca

SEQ ID NO: 540530 - DNA, 75 bp, synthetic construct
  source 1..75: mol_type = other DNA
tggccatttacagccttatgttcaccattgtgggggcgctgccttttgggttttactttctcggccctaaagatg

SEQ ID NO: 540531 - DNA, 75 bp, synthetic construct
  source 1..75: mol_type = other DNA
tatttagttggcagttacactctgatgccagctatagcaaacccgatgatatgaaaggcacatggcaaagtaata

SEQ ID NO: 540532 - DNA, 75 bp, synthetic construct
  source 1..75: mol_type = other DNA
ggctctacttcgctacatttcatcgccaaatatcgtgctaccgggcgtcgggttactggcggcatcgccaatgcc

SEQ ID NO: 540533 - DNA, 75 bp, synthetic construct
  source 1..75: mol_type = other DNA
aatttccagtgcgctgcatatcgccactattgatacgcttcccaagaatttacttaagaagttttcgataacgga

SEQ ID NO: 540534 - DNA, 75 bp, synthetic construct
  source 1..75: mol_type = other DNA
attatttaacccgtcatattcagcccggtggaaaaatgcgtacggtcattgccgataaacagtttggttatcact

SEQ ID NO: 540535 - DNA, 75 bp, synthetic construct
  source 1..75: mol_type = other DNA
tagtctggcatgccggaaaagtgtggtgtacatctgattacggtctatggtgtctggatggtgatacattaattc

SEQ ID NO: 540536 - DNA, 75 bp, synthetic construct
  source 1..75: mol_type = other DNA
aacagtgtgttgtgcaggggatggttatgtctacattggtggtcaatctggtatattatttaaaggccgtgggaa

SEQ ID NO: 540537 - DNA, 75 bp, synthetic construct
  source 1..75: mol_type = other DNA
gcacgacggccaggaatggcacttactttttaactctgttgaatggcagtcagatgatgagactgataatgaggc

SEQ ID NO: 540538 - DNA, 75 bp, synthetic construct
  source 1..75: mol_type = other DNA
tcctgtgcttgcctgggatgtggtcgcacccggtcagagtgggtttattgctcccgatggaacagttgataagca

SEQ ID NO: 540539 - DNA, 75 bp, synthetic construct
  source 1..75: mol_type = other DNA
aaacctggcagcagccaggctctgccatcctgaacgtttggctgaccagtatgttgaagcgtaccgtagtggctg

SEQ ID NO: 540540 - DNA, 75 bp, synthetic construct
  source 1..75: mol_type = other DNA
agagcgatccgcgccgtcagttggtggatacattaacacgttgggatggcatcaatttgcttaatgatgatggta

SEQ ID NO: 540541 - DNA, 75 bp, synthetic construct
  source 1..75: mol_type = other DNA
tctcctcgatgaaaaagtaccgattcgcgatatgcgcaccattctcgaaacgctggcggaacatgcgcccatcca

SEQ ID NO: 540542 - DNA, 75 bp, synthetic construct
  source 1..75: mol_type = other DNA
tggttggaccatgtcaagttgacgttgttaaaaataaagatttatgggttgcatattttgaatttctgattatct

SEQ ID NO: 540543 - DNA, 75 bp, synthetic construct
  source 1..75: mol_type = other DNA
caatttggcaacggccttagagtgcttggcgtgttggtggggcaggaagagcattgtgactgtgctgtaattcaa

SEQ ID NO: 540544 - DNA, 75 bp, synthetic construct
  source 1..75: mol_type = other DNA
cgttctataagactgccagcgatcctgatggcaccatcgcagggctggcagcaactactgacggccagtctttct

SEQ ID NO: 540545 - DNA, 75 bp, synthetic construct
  source 1..75: mol_type = other DNA
accacttctagaatcaaccatggattatggttttttcagtataagggagttcttgaactatatacaaatttctgg

SEQ ID NO: 540546 - DNA, 75 bp, synthetic construct
  source 1..75: mol_type = other DNA
aaaacaaatacatcattaaagcagagtgagcattttgcgaaatattattttaagtttaaggaacgttttgctcct

SEQ ID NO: 540547 - DNA, 75 bp, synthetic construct
  source 1..75: mol_type = other DNA
gcgctttgtctccggcagcattcaaagtaataaaaccataaatattacagggcgtgttaacccctcggattacgg

SEQ ID NO: 540548 - DNA, 75 bp, synthetic construct
  source 1..75: mol_type = other DNA
tttactgggctttggcgtttctttaatgattggtttccgcgtagttaaatccctctttaaaacggcatcttcctg

SEQ ID NO: 540549 - DNA, 75 bp, synthetic construct
  source 1..75: mol_type = other DNA
gcgtggtgggaaccgcagcatttcttttactgggctttggcgtttctttaatgattggtttccgcgtagttaaat

SEQ ID NO: 540550 - DNA, 75 bp, synthetic construct
  source 1..75: mol_type = other DNA
gacacgcgagtggtcagcgacaaaaagaccatcgatatttttgccgccacccgcccgcaggcaaaatggctgaaa

SEQ ID NO: 540551 - DNA, 75 bp, synthetic construct
  source 1..75: mol_type = other DNA
tccgtcccgacggattgaacggttgctgcgtctgataacacagccagaatggctggctgaagctgcacggatcac

SEQ ID NO: 540552 - DNA, 75 bp, synthetic construct
  source 1..75: mol_type = other DNA
agaaatatgtacagaatctaacataataaattatacagtaaataaaataaaaagatcagacattatgtctatact

SEQ ID NO: 540553 - DNA, 75 bp, synthetic construct
  source 1..75: mol_type = other DNA
tctaaattattcactacattatattttaggcacgataaagtaaagaactacaaacgagaaaggaaaagtgatatt

SEQ ID NO: 540554 - DNA, 75 bp, synthetic construct
  source 1..75: mol_type = other DNA
tatcaacggcgtctcgtttgatggttctaaagatattgaacttaacccacggtctataggcacgatcaactccac

SEQ ID NO: 540555 - DNA, 75 bp, synthetic construct
  source 1..75: mol_type = other DNA
atacggtagctcagactgatttaacgtcagtcggtcgcgatattctggctaaaacaagcacactggccgttatcc

SEQ ID NO: 540556 - DNA, 75 bp, synthetic construct
  source 1..75: mol_type = other DNA
gtggggggccacagatccagtagcagaaagtacaaatactcaaaccattctggattttaaaaatggacgtggtta

SEQ ID NO: 540557 - DNA, 75 bp, synthetic construct
  source 1..75: mol_type = other DNA
ggcgcagaaatataaaccagaatatgtctttattcgtaataagcctctggcaatgaccgtcgggatttggtgttt

SEQ ID NO: 540558 - DNA, 75 bp, synthetic construct
  source 1..75: mol_type = other DNA
acgttgatgcgtggctgcacagcaaaccactggcaccaataattattcaggtcgcaatgatacgtccaggaaagg

SEQ ID NO: 540559 - DNA, 75 bp, synthetic construct
  source 1..75: mol_type = other DNA
ggagctgactctgcgggctggtgatgacattgagtcccgttacagtattgacagcacggtaagggaactcatgaa

SEQ ID NO: 540560 - DNA, 75 bp, synthetic construct
  source 1..75: mol_type = other DNA
gacgacccggactgtgggaaacaggtcaacttcgcggacgtcccggactgtgggacggaggtcaacttcgcggac

SEQ ID NO: 540561 - DNA, 75 bp, synthetic construct
  source 1..75: mol_type = other DNA
ttggcgttgacagacagcaaatatattccagccagtttatgtcgtaccaacgcttctggtacgcccgttaatggc

SEQ ID NO: 540562 - DNA, 75 bp, synthetic construct
  source 1..75: mol_type = other DNA
ccttcactgcagagtggaccttccagttggcgctgaatgttgcaacgccgtttgtgctggtaggattaggactga

SEQ ID NO: 540563 - DNA, 75 bp, synthetic construct
  source 1..75: mol_type = other DNA
aaagaatgattctctgaatttttataactcttatgtagaacgagatatcgtgttcttacgttctaccttgcgtgc

SEQ ID NO: 540564 - DNA, 75 bp, synthetic construct
  source 1..75: mol_type = other DNA
ggtggtattgaaggtgagcgagaagttagtatttacgtgaatgatactttctatgaacgtagttcattaaaattt

SEQ ID NO: 540565 - DNA, 75 bp, synthetic construct
  source 1..75: mol_type = other DNA
tgatccacaggatttacccgatgatgttactattggcgagttatcaaaatctttcattcctgaaaaaggggcggt

SEQ ID NO: 540566 - DNA, 75 bp, synthetic construct
  source 1..75: mol_type = other DNA
ctggccatgaactggctggcgaaatatatggcgacaatgcctccggttgtgttgcctgcgcctgcgggcgcatgg

SEQ ID NO: 540567 - DNA, 75 bp, synthetic construct
  source 1..75: mol_type = other DNA
aagaccgcacgagccatagcggagagctaccgtcaggcggcaaatcctttaccgtcaatttcgctaaacctggca

SEQ ID NO: 540568 - DNA, 75 bp, synthetic construct
  source 1..75: mol_type = other DNA
gcctggtgaactggtcaatgtcgaattaacctcgtcgctgaaaggtaaacctgtttctgcgcagctaacggtagg

SEQ ID NO: 540569 - DNA, 75 bp, synthetic construct
  source 1..75: mol_type = other DNA
caggtcaacttcacggacggcccggactatgggaaacaggtcaacttcacggatggccgggagtgtgggaaacaa

SEQ ID NO: 540570 - DNA, 75 bp, synthetic construct
  source 1..75: mol_type = other DNA
aaaaccctggaacaaatgtcccaaacccttttcaaatcctggtttgtggattttgatccagtgattgataacgct

SEQ ID NO: 540571 - DNA, 75 bp, synthetic construct
  source 1..75: mol_type = other DNA
aagtttcaagttgacaatcggtagaatagcgatagccgaagatatattaactaccaatgaagcaattgctcattt

SEQ ID NO: 540572 - DNA, 75 bp, synthetic construct
  source 1..75: mol_type = other DNA
attgagcttaatgtcggtatcaatgctgtgaatggtgcgtattttcatgaaaggagatcactcaataacttccat

SEQ ID NO: 540573 - DNA, 75 bp, synthetic construct
  source 1..75: mol_type = other DNA
gcgcattaatcgctggctggttgatgattaccgcgtgcagtagcgcgcacaatacaacgcctcgctatgttcctc

SEQ ID NO: 540574 - DNA, 75 bp, synthetic construct
  source 1..75: mol_type = other DNA
tggaagatcctgtgactggcaatgccaatggcccgatgggtgcatggttggtacatcacaacgtattgccccacg

SEQ ID NO: 540575 - DNA, 75 bp, synthetic construct
  source 1..75: mol_type = other DNA
atggacgctccggaatatgggaaacaggtcaacttctcggacgacccggactgtgggaaacaggtcaacttcgcg

SEQ ID NO: 540576 - DNA, 75 bp, synthetic construct
  source 1..75: mol_type = other DNA
ctatgggaaacaggtcaacttcacgggcggccgggagtgtggggaacaggtcaacttcgcggacggcccggacta

SEQ ID NO: 540577 - DNA, 75 bp, synthetic construct
  source 1..75: mol_type = other DNA
tgtgggaaacaggtcaactttgtagacagcccggaatgtgggaaacaggtcaacttcacagacagcctggactgt

SEQ ID NO: 540578 - DNA, 75 bp, synthetic construct
  source 1..75: mol_type = other DNA
ttcatcgtccacacccggaaaaagaagcgaaagcctatcaggttcgcgatgccagaacattccttgaagctgtag

SEQ ID NO: 540579 - DNA, 75 bp, synthetic construct
  source 1..75: mol_type = other DNA
ctggagtaaaggtcatcaacgttcgcggtgatagcatggcctcaacgattgagcctggcgacctaatctttgtgg

SEQ ID NO: 540580 - DNA, 75 bp, synthetic construct
  source 1..75: mol_type = other DNA
tttgagcgccaggaaggaaaatgctttgatgccgcagagtttattcaactgattggagaaccgtttgtctttccg

SEQ ID NO: 540581 - DNA, 75 bp, synthetic construct
  source 1..75: mol_type = other DNA
ggtgctgcagtagtcgatgttcagggaatttctggagttaaagtacgtcagggagggaatacttcacttttgggt

SEQ ID NO: 540582 - DNA, 75 bp, synthetic construct
  source 1..75: mol_type = other DNA
ctcgatagtggcgcgttaatcgagaagaaagtggtcgcccaaactctctttgaacccgtctggattggctggaat

SEQ ID NO: 540583 - DNA, 75 bp, synthetic construct
  source 1..75: mol_type = other DNA
ctatctggaacatgtatctgtacagttgaatgcaataattccggatactcatttttccctcatgagcgtaaatgg

SEQ ID NO: 540584 - DNA, 75 bp, synthetic construct
  source 1..75: mol_type = other DNA
ggcgaggatgctgatggtttaatgaatattggtgcagaacttcgaccacgctatctggaacatgtatctgtacag

SEQ ID NO: 540585 - DNA, 75 bp, synthetic construct
  source 1..75: mol_type = other DNA
aaacaacacaaaggccatccgcttgcgcggctctggcgggcgttgccggaagcggtccgtctgagtccacacacc

SEQ ID NO: 540586 - DNA, 75 bp, synthetic construct
  source 1..75: mol_type = other DNA
gttacctggcgggcatgaagctgggcgggacgccgctggtcgagtatacgcgggacaggctgcaccgtgagacgg

SEQ ID NO: 540587 - DNA, 75 bp, synthetic construct
  source 1..75: mol_type = other DNA
agcagtatgatgaggagtcgggactgtattacaaccgtcaccggtactacgatccgttgcaggggcggtatatca

SEQ ID NO: 540588 - DNA, 75 bp, synthetic construct
  source 1..75: mol_type = other DNA
tttttgggtaaaccgatctcattggatggtgtaggggaagattacaaggtctgtcgtttgcgagctcgatatatg

SEQ ID NO: 540589 - DNA, 75 bp, synthetic construct
  source 1..75: mol_type = other DNA
tataacgggcagattgccaaattcgttactgtacagggccattctatggctgtttatgatgcgtacggtgtgcag

SEQ ID NO: 540590 - DNA, 75 bp, synthetic construct
  source 1..75: mol_type = other DNA
tatgtaaggagcgaagacggttctcatattgccgtctcacagccaatagttatcaatgcggctggatatcctgta

SEQ ID NO: 540591 - DNA, 75 bp, synthetic construct
  source 1..75: mol_type = other DNA
aatggagttaacgtctcaggaaacggaaaaccaatcaagagtattaccgtgtttaaacctaacacatggagtact

SEQ ID NO: 540592 - DNA, 75 bp, synthetic construct
  source 1..75: mol_type = other DNA
tctatatgttaacacaaccatatgatcaaaaggtaacactaccagccgcaaccacattagtagttaactatctaa

SEQ ID NO: 540593 - DNA, 75 bp, synthetic construct
  source 1..75: mol_type = other DNA
aatggcggtactttctctaatggcggtaaaccaatcaagagtattacggttttcaggcctaagccagggagtaca

SEQ ID NO: 540594 - DNA, 75 bp, synthetic construct
  source 1..75: mol_type = other DNA
cagtggcagtatgatgagcacgggtggttaaccaccctcagccataccagtgaaggccaccgcgtgtcggtccac

SEQ ID NO: 540595 - DNA, 75 bp, synthetic construct
  source 1..75: mol_type = other DNA
gcatctttaccactgtgaccaccggggactgccgcaggcgctcatcagcccggaaggggaaacggcgtggtgcgg

SEQ ID NO: 540596 - DNA, 75 bp, synthetic construct
  source 1..75: mol_type = other DNA
gacggtcacggtgtggtgtcccggctgaactggtggggctgctggacaggctggagggggaaatccgggcaaact

SEQ ID NO: 540597 - DNA, 75 bp, synthetic construct
  source 1..75: mol_type = other DNA
ggggcttatcaccctctggcattacgatgcgtcagaccgtatcacccggcgcacggtgaacggtgaaccggcgga

SEQ ID NO: 540598 - DNA, 75 bp, synthetic construct
  source 1..75: mol_type = other DNA
acgggcaatgaaaaatggtgttacaggcaacagtgctcaggcttatgttcgctggtatcaaaatgagcggcgtaa

SEQ ID NO: 540599 - DNA, 75 bp, synthetic construct
  source 1..75: mol_type = other DNA
aaaatttcatttaccatacaaacggatcattcagaaaaatatagtatgctatcgggcatgcgtgctcatattcta

SEQ ID NO: 540600 - DNA, 75 bp, synthetic construct
  source 1..75: mol_type = other DNA
ggcatggataaaaatacaaaagtcgtcattcctgccgatggaaagtatgtttggacgattcaaattggtcctgat

SEQ ID NO: 540601 - DNA, 75 bp, synthetic construct
  source 1..75: mol_type = other DNA
tgtaccagaggagctcatagtggactgcctttttatcgggtggatggaccgttgcagacgatgaaaataacgggt

SEQ ID NO: 540602 - DNA, 75 bp, synthetic construct
  source 1..75: mol_type = other DNA
atgagacaagaatgggatgataaatggtggcctggcaaacatgcggatgaaataaaaaatgtgaaagcatcgttg

SEQ ID NO: 540603 - DNA, 75 bp, synthetic construct
  source 1..75: mol_type = other DNA
catcagcccggaaggggaaacggcgtggcaaggggagtatgacgagtggggaaacctgctgggcgaaaccagcgc

SEQ ID NO: 540604 - DNA, 75 bp, synthetic construct
  source 1..75: mol_type = other DNA
tggggcaaccagcttaatgaggagaacccgcatcacctgcaccagccgtaccggctgccggggcagcagtatgat

SEQ ID NO: 540605 - DNA, 75 bp, synthetic construct
  source 1..75: mol_type = other DNA
tgcgccgctggcgcgctacacgtacacggccggtggtgaactgcgggcggtgtatgaccgcagcggaacgcaggt

SEQ ID NO: 540606 - DNA, 75 bp, synthetic construct
  source 1..75: mol_type = other DNA
gctggtcgagtatacgcgggacaggctgcaccgtgagacggtgcgcagcttcggcagcagggcaggcagtaatgc

SEQ ID NO: 540607 - DNA, 75 bp, synthetic construct
  source 1..75: mol_type = other DNA
cgggtgcattaacaaacatatcccgagatttgtatgaggctagtgaggtcgatggcgcaactaaatggcaacagt

SEQ ID NO: 540608 - DNA, 75 bp, synthetic construct
  source 1..75: mol_type = other DNA
agtcatctcgggggctgccaccgtgacatcaccttggcatgtcacggtgaacgggcggcagttaagtgcccgctc

SEQ ID NO: 540609 - DNA, 75 bp, synthetic construct
  source 1..75: mol_type = other DNA
tcccgcatggcacgtcactggcgtttgccctcttcattgaggctgctcgccgcgatttaccgacgctaatcagag

SEQ ID NO: 540610 - DNA, 75 bp, synthetic construct
  source 1..75: mol_type = other DNA
gatcattgaaaccttcgaagaacgtggcaggagtccggcacaaatcccggcggtgctggtgcattctcatggccc

SEQ ID NO: 540611 - DNA, 75 bp, synthetic construct
  source 1..75: mol_type = other DNA
ttattttattcataatattactggttaattttaagcaagaagcatttaataatgcaatgttaatgtatggtgctt

SEQ ID NO: 540612 - DNA, 75 bp, synthetic construct
  source 1..75: mol_type = other DNA
tttacttggctatttttataggcatgtttgatttaactatttttagcacaggtaatagcttagggcaagcactta

SEQ ID NO: 540613 - DNA, 75 bp, synthetic construct
  source 1..75: mol_type = other DNA
tttaattcgttagggtggccctcatcccctaaaaacttcccttacttttcaaccgatcgagccggggtattatat

SEQ ID NO: 540614 - DNA, 75 bp, synthetic construct
  source 1..75: mol_type = other DNA
tcggtgagtctctataccggagccgttgaacctcagagaactcgtgcaatgcaggcttgcctgctgaaccctaac

SEQ ID NO: 540615 - DNA, 75 bp, synthetic construct
  source 1..75: mol_type = other DNA
acgacggatgatttggtggccgatacgttcaacccagcacaaaccatacaaagcgccagcatgaatggtcgaagt

SEQ ID NO: 540616 - DNA, 75 bp, synthetic construct
  source 1..75: mol_type = other DNA
tgataaagagcttcaccccgttgccaccggagaatgacatccaaacgaccagccgcgctgacataaacgagggat

SEQ ID NO: 540617 - DNA, 75 bp, synthetic construct
  source 1..75: mol_type = other DNA
aaacctaatgtaaccgatggacgtatcgtttcaatggggtgcgttcagttccttttcgataccgcccctgaacaa

SEQ ID NO: 540618 - DNA, 75 bp, synthetic construct
  source 1..75: mol_type = other DNA
gagggcgaagaaggtatcaactttacagcagagcgtcagcctgagcgcgatataacgccgcttagcgaaaccacg

SEQ ID NO: 540619 - DNA, 75 bp, synthetic construct
  source 1..75: mol_type = other DNA
atgatccaagtccgtttcgcgatatggtgctggcgacgcttaataaagcagatattccatggcgactggcttatg

SEQ ID NO: 540620 - DNA, 75 bp, synthetic construct
  source 1..75: mol_type = other DNA
cattgatcgtcagctgcattttgtacgtcggaacggacatttcgaaggaatatacccaggcggcggttaactcca

SEQ ID NO: 540621 - DNA, 75 bp, synthetic construct
  source 1..75: mol_type = other DNA
ttacggctttacggtgatgttttcgattgccgccgggatattcacactcagtctggtattgattgcatttatgct

SEQ ID NO: 540622 - DNA, 75 bp, synthetic construct
  source 1..75: mol_type = other DNA
actttgctgtctactgggtaattgcggttatttctgttgtcgcattatttttaaccgcaaaggttaaagacgttt

SEQ ID NO: 540623 - DNA, 75 bp, synthetic construct
  source 1..75: mol_type = other DNA
atgcccggtcaggcaggttcagccaccacgctctataccaacacgtcgcgcgtgggctggatcatcgcaggatca

SEQ ID NO: 540624 - DNA, 75 bp, synthetic construct
  source 1..75: mol_type = other DNA
atgcttgggaagatattcaaatctgacaataacaattaccaacatagaaaacgaccagtagtatctgacattaat

SEQ ID NO: 540625 - DNA, 75 bp, synthetic construct
  source 1..75: mol_type = other DNA
agaattgacggcgaaacacgttcgcttagcccatgccatctctggatggaaagcggaaaagattcgcagcaactt

SEQ ID NO: 540626 - DNA, 75 bp, synthetic construct
  source 1..75: mol_type = other DNA
ctgaaataccggatgccgataaattactgactgcttcccgtggtgaatatgttgatgggatcagtgaccctaatg

SEQ ID NO: 540627 - DNA, 75 bp, synthetic construct
  source 1..75: mol_type = other DNA
gacacgggaaataagcgatgccattgttcagggctctgcctgcgatacgaacctggcgaaggaaaaagcaaacca

SEQ ID NO: 540628 - DNA, 75 bp, synthetic construct
  source 1..75: mol_type = other DNA
gcgatcctcgctccttcctctgcactatcgccaaacgcgtgatggtggacctgtttcgccgaaacacgctggaaa

SEQ ID NO: 540629 - DNA, 75 bp, synthetic construct
  source 1..75: mol_type = other DNA
gtgttagtcgatgagaacaatagcgcagcaggctatggagatggtccttcctctgcggcgggtggctttatgtat

SEQ ID NO: 540630 - DNA, 75 bp, synthetic construct
  source 1..75: mol_type = other DNA
ctttagagaggttcatgacctgcataaaagatactcaaaaatcctgcgttatgctgaagagtcgaatcgagtatt

SEQ ID NO: 540631 - DNA, 75 bp, synthetic construct
  source 1..75: mol_type = other DNA
gttttggccacctggcgataccgcgtgtgggtcaggaggtgattgtagacttcctcaacggcgatccggaccagc

SEQ ID NO: 540632 - DNA, 75 bp, synthetic construct
  source 1..75: mol_type = other DNA
tgactcaacggtacaggcgatgaaggttaaggtgggtgaagatgcctctatgcgactgacaatcaccgataacaa

SEQ ID NO: 540633 - DNA, 75 bp, synthetic construct
  source 1..75: mol_type = other DNA
acgcgcccgcgtagatgcctatttacccgcagactcagggcgttgcgtggtgacagtcaaagacaccgaacacat

SEQ ID NO: 540634 - DNA, 75 bp, synthetic construct
  source 1..75: mol_type = other DNA
gcagcctgccgcgctggcgacgctgaccgaggcgttaaagaaagagtatgaagccaggcacaatgtggtggcgct

SEQ ID NO: 540635 - DNA, 75 bp, synthetic construct
  source 1..75: mol_type = other DNA
cgttaactgaaacactcgaaacgttgcgcaagactggggagactcaggtcagatataccgagttcagcaaacagc

SEQ ID NO: 540636 - DNA, 75 bp, synthetic construct
  source 1..75: mol_type = other DNA
tgattatttgcttaaaatggattttaaaaacttttttatgagtatcaaaccccataatcttttatctgtcttaaa

SEQ ID NO: 540637 - DNA, 75 bp, synthetic construct
  source 1..75: mol_type = other DNA
gttgctggatgatttcgccagtgtgcagaacattattaacaacagtgaagaatttgccgctgccgtgaagaaacg

SEQ ID NO: 540638 - DNA, 75 bp, synthetic construct
  source 1..75: mol_type = other DNA
tggctcacaatgaaattgacgaagtggcggagcctttcggtaaaggtcaggttggttcttccacaatgccacata

SEQ ID NO: 540639 - DNA, 75 bp, synthetic construct
  source 1..75: mol_type = other DNA
cactgcgaccatcgcggcctgccgctggcgcttgtcagcacggaagggacaacagcgtggtacgcagaatacgat

SEQ ID NO: 540640 - DNA, 75 bp, synthetic construct
  source 1..75: mol_type = other DNA
ccggaaaacaaacaatctgatgtatcacagatatggcatgcttttgaacatgaagagcacgccaacaccttttcc

SEQ ID NO: 540641 - DNA, 75 bp, synthetic construct
  source 1..75: mol_type = other DNA
tgaaaacgccaggagtgcttcagcgtggtttgaaagcagcaaagctatcatggcagaatcatttgcaacaggttc

SEQ ID NO: 540642 - DNA, 75 bp, synthetic construct
  source 1..75: mol_type = other DNA
ctgtagataaagcggatgatttaaatagcgtgttccgcgctggggctgaatctgcgaagcaaggcagcgaaggac

SEQ ID NO: 540643 - DNA, 75 bp, synthetic construct
  source 1..75: mol_type = other DNA
atataacacattactaattcgaggctatatgaacagcatactgataatcacttctctccttatcatattcagcat

SEQ ID NO: 540644 - DNA, 75 bp, synthetic construct
  source 1..75: mol_type = other DNA
tcgcagagaaacttcagctctccactgccgtgaaggaaatgcgtttctatggcgtgtcgggagtgacagcaaatg

SEQ ID NO: 540645 - DNA, 75 bp, synthetic construct
  source 1..75: mol_type = other DNA
cttcagctcatacgtcacttttacgtcagttccatcctctgtgccatttgtacatccgccccccttcctgaacgt

SEQ ID NO: 540646 - DNA, 75 bp, synthetic construct
  source 1..75: mol_type = other DNA
cctgttccgctgtgtttccatccgggaaaacacggacggcacctttgccatcacggcggtgcagcacgtaccgga

SEQ ID NO: 540647 - DNA, 75 bp, synthetic construct
  source 1..75: mol_type = other DNA
aaataaacctttcatcatggaatgatattaaaacaggatttccttacacagggattaatgagtatgagttactca

SEQ ID NO: 540648 - DNA, 75 bp, synthetic construct
  source 1..75: mol_type = other DNA
gccgtttagcctgaatcacgccgcgacggtggcgcgtaccggcaacaacggcttcgcgttgaccaaccaaaccag

SEQ ID NO: 540649 - DNA, 75 bp, synthetic construct
  source 1..75: mol_type = other DNA
ggcgcgggcggctgcggcgccaatatgctaccgcgccggacgcaactgacggacttgtataacgccaacagcggc

SEQ ID NO: 540650 - DNA, 75 bp, synthetic construct
  source 1..75: mol_type = other DNA
gcagtacaccttcagccgaccaaaactggcggcggaagtcagcaatgaggatggcaccgcagacgatcacaatga

SEQ ID NO: 540651 - DNA, 75 bp, synthetic construct
  source 1..75: mol_type = other DNA
attgatgatttaactttcccatactttgaggttaaagaggttaacagtaatatagtttatacgtcagagagtatg

SEQ ID NO: 540652 - DNA, 75 bp, synthetic construct
  source 1..75: mol_type = other DNA
caaaattagctgattattggaatcatgtggcaaacaggaaaaagtttaatattaaaatatgtagtttatccatta

SEQ ID NO: 540653 - DNA, 75 bp, synthetic construct
  source 1..75: mol_type = other DNA
gtatgtcaattgttggcccccgaccccatgcggttgcacataacgagctgtaccgtaagcaggttgagaactaca

SEQ ID NO: 540654 - DNA, 75 bp, synthetic construct
  source 1..75: mol_type = other DNA
gatgagctgttgcagtttgagcgcctcatcacagaaacagaaattgagtggatgtcgcgttatggagcgcgggcg

SEQ ID NO: 540655 - DNA, 75 bp, synthetic construct
  source 1..75: mol_type = other DNA
tcaccgcgtggaatatcgcgtggcgggtgccgatgccaacccatatctggtgatggcagcgatttttgccggtat

SEQ ID NO: 540656 - DNA, 75 bp, synthetic construct
  source 1..75: mol_type = other DNA
taattttttccaaaagaaacaatggaatgaaatagccaacaattttaaaataaaggatgactcttatgctttaga

SEQ ID NO: 540657 - DNA, 75 bp, synthetic construct
  source 1..75: mol_type = other DNA
tagagatgtggctcaacaagaagccagctcggtatgctgacccgctgccgccagattttcccggcattcgcgttg

SEQ ID NO: 540658 - DNA, 75 bp, synthetic construct
  source 1..75: mol_type = other DNA
ggtctctttcatctgtgttccaagaaaaagcatttcgttgcgagttccggaacgatagtggatcaccgcaatagg

SEQ ID NO: 540659 - DNA, 75 bp, synthetic construct
  source 1..75: mol_type = other DNA
tactcaagccattccttgatgaattaattgcggatgtagagcaaagagcgaaaaaagttgctattcatcaagccg

SEQ ID NO: 540660 - DNA, 75 bp, synthetic construct
  source 1..75: mol_type = other DNA
atctgatatgcctgctgttgcaggaaaagcatttactgaagatagtgatagttatgatacaaccccaaatgtagg

SEQ ID NO: 540661 - DNA, 75 bp, synthetic construct
  source 1..75: mol_type = other DNA
cgaacaaacctcaagctgggacagggaaaataccgtttgttacgctcagtagatagcagtctgtataaaaaacag

SEQ ID NO: 540662 - DNA, 75 bp, synthetic construct
  source 1..75: mol_type = other DNA
gttgacgctgccaaacagcacgaattgccgccagagcgagccccgccactgactcccagcctgttcgacccatcg

SEQ ID NO: 540663 - DNA, 75 bp, synthetic construct
  source 1..75: mol_type = other DNA
gcagaagtcacgaggggttattgcaggtatgaatgctataccaccacgaagccgtagaggcaggcccaggaagga

SEQ ID NO: 540664 - DNA, 75 bp, synthetic construct
  source 1..75: mol_type = other DNA
tcaattgcgttagagaaaaagctggtgacaatcagtgccgatttatctccggacagacgcgcaacctctattctg

SEQ ID NO: 540665 - DNA, 75 bp, synthetic construct
  source 1..75: mol_type = other DNA
aagaaagagacgccattattcagtcactgaagtcaggcgttacgcctaaaattggcattcagcatattcaggttg

SEQ ID NO: 540666 - DNA, 75 bp, synthetic construct
  source 1..75: mol_type = other DNA
gtagttgaatccatcggttaccttggcttcacctttatgatccccatcatgggcgcttatattgcctcgtcgatt

SEQ ID NO: 540667 - DNA, 75 bp, synthetic construct
  source 1..75: mol_type = other DNA
tgaagatgatggtgaaaaagaaaaaacaaaaacacatctaaaaaaacaaaatttgatgaaactaatgggagataa

SEQ ID NO: 540668 - DNA, 75 bp, synthetic construct
  source 1..75: mol_type = other DNA
tcaacgatgaaggacggaaccataaccgtattcatatgcaattcgatggtgactaaagaagatatttcctttttt

SEQ ID NO: 540669 - DNA, 75 bp, synthetic construct
  source 1..75: mol_type = other DNA
ggtgctacggctgctggcgttggagcagttgtaaccgagacaattgcaacaatatggaacgtctgtgatgcaatt

SEQ ID NO: 540670 - DNA, 75 bp, synthetic construct
  source 1..75: mol_type = other DNA
atggcgggcgaggctgccgtgtccgaccccaagggcctggcatgggcagcctccctggcctcgatcgcggtggcg

SEQ ID NO: 540671 - DNA, 75 bp, synthetic construct
  source 1..75: mol_type = other DNA
cagaaaacgcccggcagcaggccatcgccgcaggaacgaaaggatcggatatcccggattcactgccggactata

SEQ ID NO: 540672 - DNA, 75 bp, synthetic construct
  source 1..75: mol_type = other DNA
ttacctgagcggaaaagcccggaaagaccgctggtactggaataacagtatccagcggggtcgaagcacagcagt

SEQ ID NO: 540673 - DNA, 75 bp, synthetic construct
  source 1..75: mol_type = other DNA
attgtcgaaacggttggcgtcgggcagtcggaaacggaagtcgcccgcatggtggactgttttatctcgttgcaa

SEQ ID NO: 540674 - DNA, 75 bp, synthetic construct
  source 1..75: mol_type = other DNA
gccgggataacggcatccgcctgtcagcggtgtggctgacgcatgacccggaatacccggagaatttacctgccg

SEQ ID NO: 540675 - DNA, 75 bp, synthetic construct
  source 1..75: mol_type = other DNA
tggcctgttcagtgtgccccggcggattcacttccggtaacccggtgaatccgctgctcggtgcaaaagtacagc

SEQ ID NO: 540676 - DNA, 75 bp, synthetic construct
  source 1..75: mol_type = other DNA
agatagagccggtttatttgcctgagcgaaaaatacatctttatcactgcgaccaccggggactgccgctggcgc

SEQ ID NO: 540677 - DNA, 75 bp, synthetic construct
  source 1..75: mol_type = other DNA
aaacgcccgcgccggtgggggcctcggccccggctggaaaatgcctgcggatatccgcttacagctgcgcgataa

SEQ ID NO: 540678 - DNA, 75 bp, synthetic construct
  source 1..75: mol_type = other DNA
cgggtaaatccgcacaccaggcgattgcgcaggcgaggaaacgctgctggaagtttgactgggtggtggaagtcg

SEQ ID NO: 540679 - DNA, 75 bp, synthetic construct
  source 1..75: mol_type = other DNA
tctacaagcgtgatccgcggtcgaccacgccgtgggggctgctcatcagcggcggcactgccctcccgctcgctg

SEQ ID NO: 540680 - DNA, 75 bp, synthetic construct
  source 1..75: mol_type = other DNA
actcatccgcatcagcagcccgcgccagacccggagttacagctacagcaccaccggcaggctgaccggcgttca

SEQ ID NO: 540681 - DNA, 75 bp, synthetic construct
  source 1..75: mol_type = other DNA
gaaacgctgcgccgcttcggccgttatgaactcaccaccgcttatacccctgccgggcagttacagagccagcac

SEQ ID NO: 540682 - DNA, 75 bp, synthetic construct
  source 1..75: mol_type = other DNA
agacgcacagggccgtgaaacgcggtatgaatacaacgccgcaggcgacctgactgccgttatcaccccggacgg

SEQ ID NO: 540683 - DNA, 75 bp, synthetic construct
  source 1..75: mol_type = other DNA
acagctattgattcctgtctgcgccttgaatacctgatggaacgccgcttcagcagaacgcctttgttccgtgca

SEQ ID NO: 540684 - DNA, 75 bp, synthetic construct
  source 1..75: mol_type = other DNA
tgtataatatcctccaattgattgggcgtaataaagaattattcagtgatgatgtttctgaaaatgaaaaagaat

SEQ ID NO: 540685 - DNA, 75 bp, synthetic construct
  source 1..75: mol_type = other DNA
aagcgtataatggaaatgtttttgatgcgaaaaagtgaatatatttctatttctacagctcgctttgcaaacgtt

SEQ ID NO: 540686 - DNA, 75 bp, synthetic construct
  source 1..75: mol_type = other DNA
aagcgtattatggaaatgttcctgatgcgcaagagcgaagagatcgctatttctactgctcgttttgcaaatgta

SEQ ID NO: 540687 - DNA, 75 bp, synthetic construct
  source 1..75: mol_type = other DNA
taccctcaattagcgagatcgctattgattgtataaatcgaaattcgttactgccagtcattcctagtatactgc

SEQ ID NO: 540688 - DNA, 75 bp, synthetic construct
  source 1..75: mol_type = other DNA
aatgcctgggctgaagatgaaattcagtttgattcccgttttctggagttaaaaggcgacacaaaaatcgatctg

SEQ ID NO: 540689 - DNA, 75 bp, synthetic construct
  source 1..75: mol_type = other DNA
tagtgtggtgacttattcacaattaccggagtcgattcaggttcaggcacagttgaaacagcctaaattacgtgg

SEQ ID NO: 540690 - DNA, 75 bp, synthetic construct
  source 1..75: mol_type = other DNA
tgcgaatacctatgctgaccagaaagaaaccgacatcaataaccgtactgacggattactgatgaccgaacgcca

SEQ ID NO: 540691 - DNA, 75 bp, synthetic construct
  source 1..75: mol_type = other DNA
tgcaattaatgttaaaaacaggcgagttaaaaaaaagtagcataaaactctccagagaagaatgtttttttattt

SEQ ID NO: 540692 - DNA, 75 bp, synthetic construct
  source 1..75: mol_type = other DNA
cgatgctgattttcctaaaccagttcggttagggggtgcatccgtcggttggcgctctacttctatagacgagtg

SEQ ID NO: 540693 - DNA, 75 bp, synthetic construct
  source 1..75: mol_type = other DNA
gacgcaataaagcattattcggtgatgatgtatctgaaaatgaagaagaattacaaagaattgtcgctacatccc

SEQ ID NO: 540694 - DNA, 75 bp, synthetic construct
  source 1..75: mol_type = other DNA
tttgatcagaaaagtgggcgaagatattgtgctggatggttacagcgtcagcctcggtaatgccaccagaattaa

SEQ ID NO: 540695 - DNA, 75 bp, synthetic construct
  source 1..75: mol_type = other DNA
atgccactcaataaaatgaagcgtcatgccatactccacacgctctctatacctgaacgtaaactacgcccctta

SEQ ID NO: 540696 - DNA, 75 bp, synthetic construct
  source 1..75: mol_type = other DNA
tatgtctctgctttgtctggttgtgccgctgttccacgcacgcccggtattggtgatgattgccagccaggcctt

SEQ ID NO: 540697 - DNA, 75 bp, synthetic construct
  source 1..75: mol_type = other DNA
ggtggtggagaaattaacgatcaggctccggcattcagcgcactgacagaggatattaaggggctcagcacaaac

SEQ ID NO: 540698 - DNA, 75 bp, synthetic construct
  source 1..75: mol_type = other DNA
attaaggaaagccaagatcttgctaatgctgttcaggcaaagagtatccagctaaatgttctctcgcaacagtgg

SEQ ID NO: 540699 - DNA, 75 bp, synthetic construct
  source 1..75: mol_type = other DNA
accgggatagctgcaaacagatgctcctcaatcaggcggtgtccgtcgaggacacttctgacatccaggaaaaaa

SEQ ID NO: 540700 - DNA, 75 bp, synthetic construct
  source 1..75: mol_type = other DNA
ttatgtaaattacgctttataagcacggctggtcatgatgtaccagaattcaaatcaagtttttatcctacaaga

SEQ ID NO: 540701 - DNA, 75 bp, synthetic construct
  source 1..75: mol_type = other DNA
aaacggtaaaacgacacaagcaaaatccttcctgccaccagaaaaaatttatcctgttagtgcagttgcgagaaa

SEQ ID NO: 540702 - DNA, 75 bp, synthetic construct
  source 1..75: mol_type = other DNA
ggatgaaatggggcgcacacgcgtaacgctcgggcgtggacgggggacatcattaccgaccatcgaatggagtaa

SEQ ID NO: 540703 - DNA, 75 bp, synthetic construct
  source 1..75: mol_type = other DNA
ttgtctgagcttgtgccgcctcgcgtacagcaggatacttctctggcaatagatcttggacagaaaggacaaggt

SEQ ID NO: 540704 - DNA, 75 bp, synthetic construct
  source 1..75: mol_type = other DNA
gtgcggcggtgatggctgcggctgcgggtacgttgtaccaaactggcacaggtttaaataatgcctcgcaaatgg

SEQ ID NO: 540705 - DNA, 75 bp, synthetic construct
  source 1..75: mol_type = other DNA
acaagccttcgttaatgggcaaatatcgttgctcacgctgggaaaacgtcatgtttattgccataagcgtattta

SEQ ID NO: 540706 - DNA, 75 bp, synthetic construct
  source 1..75: mol_type = other DNA
aatccagacaatcttggagggctgaaagagtatcctctgaaaaatataatggaagatataactggtttaaatgga

SEQ ID NO: 540707 - DNA, 75 bp, synthetic construct
  source 1..75: mol_type = other DNA
caaaaatatgacgctcgataccgggttccagaccgaccagccagcggtcggcccggctatcttccagaaccttac

SEQ ID NO: 540708 - DNA, 75 bp, synthetic construct
  source 1..75: mol_type = other DNA
gtgccgcctcgcgtacagcaggatacttctctggcaatagatctaggacaaaaaggacaaggccacgaagaaatt

SEQ ID NO: 540709 - DNA, 75 bp, synthetic construct
  source 1..75: mol_type = other DNA
agccaccagcgggagttacacgatgtgcgcgtcatggcttacacagcagcgccgcccgtgatactcccttccgac

SEQ ID NO: 540710 - DNA, 75 bp, synthetic construct
  source 1..75: mol_type = other DNA
atattgccaccattagaatgcctgaagaattgatgcttaaattggcggacttcattcgcgaccaacattataagg

SEQ ID NO: 540711 - DNA, 75 bp, synthetic construct
  source 1..75: mol_type = other DNA
gtccgaatagataatattaatggaaagaaaagcaactctaatttgtcagatgtttttattccctatgtaaataca

SEQ ID NO: 540712 - DNA, 75 bp, synthetic construct
  source 1..75: mol_type = other DNA
gggtctattacttatgaccgctacgctaaagaggttgaggtagaccgattggttaacgttctggctgatgtttat

SEQ ID NO: 540713 - DNA, 75 bp, synthetic construct
  source 1..75: mol_type = other DNA
tcaaggatgccacgttgattgatcttctgaaccgtgaagataagaccgattgtctggatgtggttactatcaata

SEQ ID NO: 540714 - DNA, 75 bp, synthetic construct
  source 1..75: mol_type = other DNA
gtaagcagcgctttaaggatgccccacttgctgacctgttgagccgtgaagataagacagattgtctggatgtcg

SEQ ID NO: 540715 - DNA, 75 bp, synthetic construct
  source 1..75: mol_type = other DNA
gaaaaacagactttgtgccagaatcggataatcaatcgacagaatttaaatcattattttcctctttgatgaccg

SEQ ID NO: 540716 - DNA, 75 bp, synthetic construct
  source 1..75: mol_type = other DNA
cttgtcgcgcttttatgtctgagcactggaggaagatggacggaagttgccacgctaaaaccagcacagattaca

SEQ ID NO: 540717 - DNA, 75 bp, synthetic construct
  source 1..75: mol_type = other DNA
tgccacgatcctcgccctgctggcgaagatcgaagagaagcaggacgagcttggcaaggtcatgatgggcgtggt

SEQ ID NO: 540718 - DNA, 75 bp, synthetic construct
  source 1..75: mol_type = other DNA
gggcaatccagacatgaaaatgttatctctataaatatgaatgatgcaattcctcgtgatgagaaagggatcacc

SEQ ID NO: 540719 - DNA, 75 bp, synthetic construct
  source 1..75: mol_type = other DNA
attcagaccaatggcaacagtatactctgaaagataaacattacgctagtctattaacgatgctggatctcaacg

SEQ ID NO: 540720 - DNA, 75 bp, synthetic construct
  source 1..75: mol_type = other DNA
aacttttaatacatacaaagcggtattgcttgatttcaataatctgtctaatgaagaggccaaccagctgcgtat

SEQ ID NO: 540721 - DNA, 75 bp, synthetic construct
  source 1..75: mol_type = other DNA
ctggagcaagacttaacgaggttgctcagcttcaggtcaaagacgtcagggtcactgaggccgggaccgtgtata

SEQ ID NO: 540722 - DNA, 75 bp, synthetic construct
  source 1..75: mol_type = other DNA
taccgtggtgtgcactaccgttatgacgaatttggccgtgcggtggaaaaggaggggcctcaaggaaccgttgtc

SEQ ID NO: 540723 - DNA, 75 bp, synthetic construct
  source 1..75: mol_type = other DNA
aggcgttaaatatatattggggacagtatctgaatgaatcattgcttattaaaaatgtacagaactctaaaaata

SEQ ID NO: 540724 - DNA, 75 bp, synthetic construct
  source 1..75: mol_type = other DNA
ttgagcctgagaccagtagtctaagaccgtctgtctccttatctgtatcatcggagcctgaagtccctgaaccta

SEQ ID NO: 540725 - DNA, 75 bp, synthetic construct
  source 1..75: mol_type = other DNA
tgcgttactcttatcgtggcatgaaaatgaaagaggagcatattgttcctctcagtcggaaggctatggttttat

SEQ ID NO: 540726 - DNA, 75 bp, synthetic construct
  source 1..75: mol_type = other DNA
atggatacgctaaaggaaaaagttcttgctgcgaatttatcactaccccttcatcagttagtgacgtttacctgg

SEQ ID NO: 540727 - DNA, 75 bp, synthetic construct
  source 1..75: mol_type = other DNA
gatgtcctggacgacttagaagatgaaaaacggcctgtggatgaaaagccgtatcagcgtttgctgatacggcct

SEQ ID NO: 540728 - DNA, 75 bp, synthetic construct
  source 1..75: mol_type = other DNA
ctgactgtagaccagcatcgctatatcaatgacgttatcggtgtgcttaaagcctgtcaggatagactcaagggc

SEQ ID NO: 540729 - DNA, 75 bp, synthetic construct
  source 1..75: mol_type = other DNA
catagctctgggtctataacttacgaccgttacgctaaagaggtcgaggtagataggctggttaatgtgatggct

SEQ ID NO: 540730 - DNA, 75 bp, synthetic construct
  source 1..75: mol_type = other DNA
ttaatcgagatattcgactatctggatattcaggatgtcggcaaggcgacccgtgcagatatgcttagggtccgt

SEQ ID NO: 540731 - DNA, 75 bp, synthetic construct
  source 1..75: mol_type = other DNA
ctggagcaagacttaacgaggtggcccaacttcaggtcaaagacgtcagggtcactgaggccgggaccgtgtata

SEQ ID NO: 540732 - DNA, 75 bp, synthetic construct
  source 1..75: mol_type = other DNA
accgtccgtctccctatctgtattggcagaacctgaagtccctgaacctaaagcactgaccctcgcgtctctcat

SEQ ID NO: 540733 - DNA, 75 bp, synthetic construct
  source 1..75: mol_type = other DNA
tggtcgatggcgcttatggttttgtattggctgactttgtgtcgcttgtggaagaccgtagaaaggctgagggtg

SEQ ID NO: 540734 - DNA, 75 bp, synthetic construct
  source 1..75: mol_type = other DNA
ggaagggcagcccacctatcaaggtgtactgccttccagacgaacgaagagcgattgaggaaaaggcggcggcgg

SEQ ID NO: 540735 - DNA, 75 bp, synthetic construct
  source 1..75: mol_type = other DNA
ttttgtttatacagcgagtttggtcgccgccctaaaaatgcctggaccctcgaaagtctgggtctggtagccatt

SEQ ID NO: 540736 - DNA, 75 bp, synthetic construct
  source 1..75: mol_type = other DNA
gaatgaggagcttagcccgacggacattcaggcacttaaaattattgagccgatggtgagttccttaagcacgga

SEQ ID NO: 540737 - DNA, 75 bp, synthetic construct
  source 1..75: mol_type = other DNA
cgtttaatggtcgacgcttgctcacctttacggattcgcgtcagggtaccgctcgcatttcagcccgcttacagc

SEQ ID NO: 540738 - DNA, 75 bp, synthetic construct
  source 1..75: mol_type = other DNA
atggactttaaatatacagaagaaaaagagttaataaaaataaataatgtaatgattcataagtatactatatta

SEQ ID NO: 540739 - DNA, 75 bp, synthetic construct
  source 1..75: mol_type = other DNA
tcaatataaaacaggaaatatgattcttgtaaaaaaagcaggtggacgctacggaattcgttatgacgaattggc

SEQ ID NO: 540740 - DNA, 75 bp, synthetic construct
  source 1..75: mol_type = other DNA
tgatcttcagagcagcgttaacacaagcgagtttaaaccaagagacgcatttgtagacaatagacaaataaaaac

SEQ ID NO: 540741 - DNA, 75 bp, synthetic construct
  source 1..75: mol_type = other DNA
aaggcgggcatgtatcgcgagcaggaagaacgggcagcacaccgtaacgactggatgtatggcgatgatgactga

SEQ ID NO: 540742 - DNA, 75 bp, synthetic construct
  source 1..75: mol_type = other DNA
cgtctggtgcaagtctggaagttgataatgatcagattaccaatattgatactgatgttgcttatgatgcctacc

SEQ ID NO: 540743 - DNA, 75 bp, synthetic construct
  source 1..75: mol_type = other DNA
gacctgaccgccattatcacgccagacgacaacagaagcgagacacagtacgatgcgtggggaaaggccgtcagt

SEQ ID NO: 540744 - DNA, 75 bp, synthetic construct
  source 1..75: mol_type = other DNA
cgctgaagaaaattaatgagaagacgcccttaaaggtaagttatacaaccgaagaagatggtcgcttattgttta

SEQ ID NO: 540745 - DNA, 75 bp, synthetic construct
  source 1..75: mol_type = other DNA
ttacgtcaaatacttcaatgtcgctacgtctgtcgccagtcgtgatgtgaaggctggggtaaatgctctgggcga

SEQ ID NO: 540746 - DNA, 75 bp, synthetic construct
  source 1..75: mol_type = other DNA
cagcaactggatttgcccctatatttccagacacctgttatcacttaacccattactggcttgctgccgtagata

SEQ ID NO: 540747 - DNA, 75 bp, synthetic construct
  source 1..75: mol_type = other DNA
gttattggatgtgttaaaagagatgatggggcatcataatgatgattcatcttttatatctgcactaatatatct

SEQ ID NO: 540748 - DNA, 75 bp, synthetic construct
  source 1..75: mol_type = other DNA
attgatgctcaccttctgtggcttgaagcagagctgaagcgtcttgagaagcagataaaagacctgacagacgat

SEQ ID NO: 540749 - DNA, 75 bp, synthetic construct
  source 1..75: mol_type = other DNA
agtccagagaccgagcattaatgctcaccttctgtggcttgaagcagagctgaagcggcttgagaagcagataaa

SEQ ID NO: 540750 - DNA, 75 bp, synthetic construct
  source 1..75: mol_type = other DNA
gatattggtgctatctcctgggaacgctgctcgagctaagtattttacatattggtatgacaaacccatggtgga

SEQ ID NO: 540751 - DNA, 75 bp, synthetic construct
  source 1..75: mol_type = other DNA
gggtatgacatgcgggtcagaatacccgggatggcagcagcattacccttttaccaggtggacaatattgtaagc

SEQ ID NO: 540752 - DNA, 75 bp, synthetic construct
  source 1..75: mol_type = other DNA
ctctgacactctgctggtggcagcaaataccagcggcggcgtaactggcaagatgatctccccgcaatctatcgc

SEQ ID NO: 540753 - DNA, 75 bp, synthetic construct
  source 1..75: mol_type = other DNA
tggtgaagatgctcgaccggctggaaagtgaaatcctggctgaccgggtgagtgaggaaagccgccgctggctgg

SEQ ID NO: 540754 - DNA, 75 bp, synthetic construct
  source 1..75: mol_type = other DNA
ataaaccttacgaaacaggctactcatggcgagcatatctagcctggaaaacaaaatggccttcactgacagcat

SEQ ID NO: 540755 - DNA, 75 bp, synthetic construct
  source 1..75: mol_type = other DNA
atcggaaatggcgtcgatacgacgcttgccgacctgacggctgccagtcggggcagtgtctggcttaacagcaat

SEQ ID NO: 540756 - DNA, 75 bp, synthetic construct
  source 1..75: mol_type = other DNA
aagaaataataaaaattaataatgttatgattcataaatacactgtattatatacatcaaattgtattatggata

SEQ ID NO: 540757 - DNA, 75 bp, synthetic construct
  source 1..75: mol_type = other DNA
tttttgccgcagatagcggcgtgaagctcggcaaacaggaagtacaaagcggcagcgtgatgagccacctgatgg

SEQ ID NO: 540758 - DNA, 75 bp, synthetic construct
  source 1..75: mol_type = other DNA
ggaaactcaagggtccagtggcgttgaaaaccgcttatccagcgaagagattgccgctgccgattacgtcattct

SEQ ID NO: 540759 - DNA, 75 bp, synthetic construct
  source 1..75: mol_type = other DNA
cctccatttcatcatctggatatagctggaatgatgaaaaggtattaaatgttttttgtgatataatagataaaa

SEQ ID NO: 540760 - DNA, 75 bp, synthetic construct
  source 1..75: mol_type = other DNA
ggcggggcagcctccgggctggccggtttccgataacgccggtatttccacccccgtctgggctatcgccatcga

SEQ ID NO: 540761 - DNA, 75 bp, synthetic construct
  source 1..75: mol_type = other DNA
ggatggatttcgtagtgacatgaacattaaaaagttagttaagctgatgaaaaaaaatataaatagcttaagtaa

SEQ ID NO: 540762 - DNA, 75 bp, synthetic construct
  source 1..75: mol_type = other DNA
cagttgggtgaaacagaattaccttcgtgcagaaacgctagtcagcgccaatacccgcctggttgattttcagtc

SEQ ID NO: 540763 - DNA, 75 bp, synthetic construct
  source 1..75: mol_type = other DNA
gaagctgtattgatagactacgcaatggaaaacaataggttgcgtgtagagataagagctgcgttcgctggatat

SEQ ID NO: 540764 - DNA, 75 bp, synthetic construct
  source 1..75: mol_type = other DNA
atgaaaagagttttgttctttttgctgatgatatttgttagttttggtgttatagctgattgcgaaatcaagcta

SEQ ID NO: 540765 - DNA, 75 bp, synthetic construct
  source 1..75: mol_type = other DNA
gcttcgcgaacagtgtatggaatgtttttctaagacaacggttaaaaccagatcggacgattatttttgatgatt

SEQ ID NO: 540766 - DNA, 75 bp, synthetic construct
  source 1..75: mol_type = other DNA
gcacaggcaattatggaagtagggcgtgtaaacaaaacgctatatctcctcaattatattgatgatgaagattat

SEQ ID NO: 540767 - DNA, 75 bp, synthetic construct
  source 1..75: mol_type = other DNA
aaacagcgatcgttggggtgatccgcgccaaaaacttcttcagggggaggaatggcaggcgcagcgggttccagt

SEQ ID NO: 540768 - DNA, 75 bp, synthetic construct
  source 1..75: mol_type = other DNA
atccttgatgatgcgcctgaacatattatcaccggtccctggaaacgcctcgtatacgatgcggagggacggata

SEQ ID NO: 540769 - DNA, 75 bp, synthetic construct
  source 1..75: mol_type = other DNA
cccatcagggctggcacaggcgatcatggaagtggggcgcgtcaacaagacgctgtaccttcttaattatattga

SEQ ID NO: 540770 - DNA, 75 bp, synthetic construct
  source 1..75: mol_type = other DNA
tacgcatgtcagtgaatccggggcccgggcacaggatctgcacatcagcctgtgcgcggtcctgatggcagaggc

SEQ ID NO: 540771 - DNA, 75 bp, synthetic construct
  source 1..75: mol_type = other DNA
catttcagtctgaatagttcacttatttactacataaacaattggaaattatttccattgatctgtttactcagt

SEQ ID NO: 540772 - DNA, 75 bp, synthetic construct
  source 1..75: mol_type = other DNA
tattttaaagatgagaaaccaacttatgctcgaatgacagcacactcccgaacaaaaatgagtcttacgaatgtt

SEQ ID NO: 540773 - DNA, 75 bp, synthetic construct
  source 1..75: mol_type = other DNA
aagagaaaattcaaaaatggaatagtgatgaggacgaagcaataagaaaagaagcagttatttctttaaaaagac

SEQ ID NO: 540774 - DNA, 75 bp, synthetic construct
  source 1..75: mol_type = other DNA
aaagaatgtagtggtgttgatgaacttgaatttattgattgtgttaaaaactcatttattatgagcactattaca

SEQ ID NO: 540775 - DNA, 75 bp, synthetic construct
  source 1..75: mol_type = other DNA
cccggccgattttatggattacggattctgcgctgtcatcgccgaggaaacccggctcccgctactggtgccaac

SEQ ID NO: 540776 - DNA, 75 bp, synthetic construct
  source 1..75: mol_type = other DNA
gaggcaaggactacaaagtcgtgtccccggccgattttatggattacggattctgcgctgtcatcgccgaggaaa

SEQ ID NO: 540777 - DNA, 75 bp, synthetic construct
  source 1..75: mol_type = other DNA
aatacagcagaaaaaacggcgtttctcggcgatcggtttagaagttatataagagcgggtatctatcaaaaaaag

SEQ ID NO: 540778 - DNA, 75 bp, synthetic construct
  source 1..75: mol_type = other DNA
aacgagcagactgtacacgacagccagatcaggtcagttgacacccggcagaatgtcagacttttcacggtaacc

SEQ ID NO: 540779 - DNA, 75 bp, synthetic construct
  source 1..75: mol_type = other DNA
gtaaaactagcatctgataccaacaaggacagtaagggtatttatataaccgattctacaggaaaaaccagattc

SEQ ID NO: 540780 - DNA, 75 bp, synthetic construct
  source 1..75: mol_type = other DNA
ggatcctgacgcttaacaaagattccgcggcgtataagggtacgacggatatcgtgggtggtgaaattgctttcg

SEQ ID NO: 540781 - DNA, 75 bp, synthetic construct
  source 1..75: mol_type = other DNA
agcgttgtccgtgaggcttttacccggtcaaaacagcgttacggtgcaccacgcctgacggatgaacagtgtgct

SEQ ID NO: 540782 - DNA, 75 bp, synthetic construct
  source 1..75: mol_type = other DNA
atcaggcggagttcagcatcaaatcaatgtgccgtgtgctccgggtggcccgcagcggctggtatacatggtgtc

SEQ ID NO: 540783 - DNA, 75 bp, synthetic construct
  source 1..75: mol_type = other DNA
ttatctgcgggatatgtaccgtccggggatggtgatggagcagtggaacccggagacacgcagtcatgaccgcta

SEQ ID NO: 540784 - DNA, 75 bp, synthetic construct
  source 1..75: mol_type = other DNA
ttggccttcaaaccccttaaagagctgcacagcagcgaaaaatggcccgcattcctgcaaaccgccgttgagaag

SEQ ID NO: 540785 - DNA, 75 bp, synthetic construct
  source 1..75: mol_type = other DNA
catccacttcagagcaggatgccagccgcgcaaaaaatgcgctgaaggcatttgcaaaccaaaatggccaccgta

SEQ ID NO: 540786 - DNA, 75 bp, synthetic construct
  source 1..75: mol_type = other DNA
cgctgattatgagcgcaggaatggcctgcgcgcaggctgctgaaaagaatgactggcactttaatataggtgcta

SEQ ID NO: 540787 - DNA, 75 bp, synthetic construct
  source 1..75: mol_type = other DNA
atagtggcttaccgatggcagttattggacatagtgttgcagaggaagcgggtatgcgacgtcttgcaagctatt

SEQ ID NO: 540788 - DNA, 75 bp, synthetic construct
  source 1..75: mol_type = other DNA
caattgcaatcagaaaagcggttacgccctgtaattgaaaatctatttaaccgaaaacaggtcggcttcctttat

SEQ ID NO: 540789 - DNA, 75 bp, synthetic construct
  source 1..75: mol_type = other DNA
ccaaaaacatgaccgcagacgcccgtaacggcaggcttgacccggtactgtgccgcgaccacgaaatcgacctga

SEQ ID NO: 540790 - DNA, 75 bp, synthetic construct
  source 1..75: mol_type = other DNA
atgctacaggccagactggctgttgagctgcaaatcctcagggatgaattactctcaggccactaccagcccttg

SEQ ID NO: 540791 - DNA, 75 bp, synthetic construct
  source 1..75: mol_type = other DNA
ggggcgctgacggtaaataaaggtgggatcagtcagggtgaactgacaggtggcggaaacctgaatgttacaggg

SEQ ID NO: 540792 - DNA, 75 bp, synthetic construct
  source 1..75: mol_type = other DNA
ggcggtaattctgcaggtaacttcgcgctgaccaccggaactgtcgaagctggggcttacgtctacacgctggct

SEQ ID NO: 540793 - DNA, 75 bp, synthetic construct
  source 1..75: mol_type = other DNA
gtgtgcgcgttactgcatcccaggatcatcaagcaatagtgcagggcgttttagggaagcctgatagcgataacc

SEQ ID NO: 540794 - DNA, 75 bp, synthetic construct
  source 1..75: mol_type = other DNA
gctgtatgcggggcagtggcgggatgcggaatcggggctgtgctataaccggttccggtattacgagccggagag

SEQ ID NO: 540795 - DNA, 75 bp, synthetic construct
  source 1..75: mol_type = other DNA
cctattaagttactcggattggttttatcttttatatgtgcaactttgtacactcctaaaatttcaaggttagaa

SEQ ID NO: 540796 - DNA, 75 bp, synthetic construct
  source 1..75: mol_type = other DNA
cattagcccaaatgcggaagtcagcctcgataatacgcaggggttaggcagaggaaatattgccaatgacggtct

SEQ ID NO: 540797 - DNA, 75 bp, synthetic construct
  source 1..75: mol_type = other DNA
tttgatacgctttcttcatttttggcatactacacaaaaaaaagcattgatggaaaaaccattttggatatggaa

SEQ ID NO: 540798 - DNA, 75 bp, synthetic construct
  source 1..75: mol_type = other DNA
caagagctgattcatttctggctaggacaagatataaatatccaaactttaatttggattgtgacttttccatta

SEQ ID NO: 540799 - DNA, 75 bp, synthetic construct
  source 1..75: mol_type = other DNA
ccaacgactgggtgacagagcaaaaactgatcgaaattacaggtttacgcccaggaaccatagagagagcacgta

SEQ ID NO: 540800 - DNA, 75 bp, synthetic construct
  source 1..75: mol_type = other DNA
ccgggtgaaaacggacaaaacccattaccagcctggtgaactggtcaatgtcgaattaacctcgttgctgaaagg

SEQ ID NO: 540801 - DNA, 75 bp, synthetic construct
  source 1..75: mol_type = other DNA
cgagcctgtatgcgcctgacgccgggccgtatcatcatgaccgagcttagggatgatgccgcctgggattacctt

SEQ ID NO: 540802 - DNA, 75 bp, synthetic construct
  source 1..75: mol_type = other DNA
cgtcgagaagatgttaaagagtggatagataattctgttgaatcagagctggaaaaccgcgatttaatgcagcgt

SEQ ID NO: 540803 - DNA, 75 bp, synthetic construct
  source 1..75: mol_type = other DNA
taaccgtcgaagagttagcttttgctttgaagaaaacagtgaaaagtatccgtagtgatgcaactcggaacccta

SEQ ID NO: 540804 - DNA, 75 bp, synthetic construct
  source 1..75: mol_type = other DNA
gaaatatatggcgacaatgcctccagttgttttgcctgcgcctgcgggcgcatgggctaaacataagttaactgg

SEQ ID NO: 540805 - DNA, 75 bp, synthetic construct
  source 1..75: mol_type = other DNA
tcggaaaaaaatctctacatgaagtggagtatgccaacggtgtatcgcgtgggcgacaaaccggcggcaggactg

SEQ ID NO: 540806 - DNA, 75 bp, synthetic construct
  source 1..75: mol_type = other DNA
acattccggtgaccgttgaacgccagttgtatcggcttatccctggtgaaagaagagatgagctttattctgcaa

SEQ ID NO: 540807 - DNA, 75 bp, synthetic construct
  source 1..75: mol_type = other DNA
cgaagcggtcagcggcaaactgcaactgctttacccggatggtgagccggtaaaagatgcccgcgtgcagttaag

SEQ ID NO: 540808 - DNA, 75 bp, synthetic construct
  source 1..75: mol_type = other DNA
ggagtatgccaacggtgtatcgcatgggcgacaaaccagcggcagggctgtttatcttcagtcagcaggataacg

SEQ ID NO: 540809 - DNA, 75 bp, synthetic construct
  source 1..75: mol_type = other DNA
caactggcggggcccggagcgcgctttacctggtggggtgaagatggcaatggtgacgccttccttacggcatag

SEQ ID NO: 540810 - DNA, 75 bp, synthetic construct
  source 1..75: mol_type = other DNA
gggcagctcagttctgagtacgcgttgacggcaaagcgtattggttttaatgctgagtcagcggctaaacagtcc

SEQ ID NO: 540811 - DNA, 75 bp, synthetic construct
  source 1..75: mol_type = other DNA
gcgggacaagatcggctcaaacctcgctggtggtcttgctggttcgctggacagcctgcggcggcgcatcctcga

SEQ ID NO: 540812 - DNA, 75 bp, synthetic construct
  source 1..75: mol_type = other DNA
agggcagaattccggggtgtgctcgaagacagcctgaagctcaggctgaacatggacaagaccagaatcacccat

SEQ ID NO: 540813 - DNA, 75 bp, synthetic construct
  source 1..75: mol_type = other DNA
aagagtatccggaaatcgcccgctgcacggagcgggaatttgcgaccattcttgccggtatcagcgtcggcggta

SEQ ID NO: 540814 - DNA, 75 bp, synthetic construct
  source 1..75: mol_type = other DNA
ccgattttgtgatattagatgtctctagttgtggagagattctgatggataagttgcttgatgtctctttttctc

SEQ ID NO: 540815 - DNA, 75 bp, synthetic construct
  source 1..75: mol_type = other DNA
taactgagtggctgaaacgtgctgttgatgacggggtggtgaaaaagctcaatcgccctgcacgttttcaagtca

SEQ ID NO: 540816 - DNA, 75 bp, synthetic construct
  source 1..75: mol_type = other DNA
atagttcaacagcaagcacaaagaaaacactggtggctaaaaggagaaaaatacgaccgactaaaaaagcgcatc

SEQ ID NO: 540817 - DNA, 75 bp, synthetic construct
  source 1..75: mol_type = other DNA
atcaaaaatccctaattacacgatgctgctttccggagtgatcacaaaaattgttgcactaaaattaaaagaaaa

SEQ ID NO: 540818 - DNA, 75 bp, synthetic construct
  source 1..75: mol_type = other DNA
cgccagtcaaacggccgaccaatgaccgaggcttacgaggattttgtcgctgaatggcagcaccggcacgctgat

SEQ ID NO: 540819 - DNA, 75 bp, synthetic construct
  source 1..75: mol_type = other DNA
atcccggagcagaaggctttctgaatcgcctgggcgtacagacccgtgatgccagcggcaacatgcgtgacatgg

SEQ ID NO: 540820 - DNA, 75 bp, synthetic construct
  source 1..75: mol_type = other DNA
aaatgcactggaaatccttggtacattcatcgcgggtgtctgggtatccagggttctgggggctttcgggaaaat

SEQ ID NO: 540821 - DNA, 75 bp, synthetic construct
  source 1..75: mol_type = other DNA
ggcctggataatctttactgggcgtcacagcgcaccggcgcgacggtccagggaattcagtctattggctatgcg

SEQ ID NO: 540822 - DNA, 75 bp, synthetic construct
  source 1..75: mol_type = other DNA
tgccgacatttttcagcagggaaaccgcttcgtcagagggggaagtcgcagtggtcacccgactcagtactttag

SEQ ID NO: 540823 - DNA, 75 bp, synthetic construct
  source 1..75: mol_type = other DNA
cgaatcactgacaaccattcacattaacaatccagtcgcaatgcttgtgaaacatgccaaaagcgaatcagaact

SEQ ID NO: 540824 - DNA, 75 bp, synthetic construct
  source 1..75: mol_type = other DNA
gagttcttaattctgcaaaaaaaacatatcaaccgaaacaggatgattcgtctaagtatttccttgatgaaacgg

SEQ ID NO: 540825 - DNA, 75 bp, synthetic construct
  source 1..75: mol_type = other DNA
atattgaggcgataaaatcaggacctctttttttattgagtgaggatcaaaaaaataccagaatctcggattttt

SEQ ID NO: 540826 - DNA, 75 bp, synthetic construct
  source 1..75: mol_type = other DNA
ctcaggataaacatgcgcttttccccatttttactgcgagttggcgagctcatcgtataatgaataagggtgttt

SEQ ID NO: 540827 - DNA, 75 bp, synthetic construct
  source 1..75: mol_type = other DNA
ttattgttttcccaagaagaaaagaaagaggcggcaggtatgacagtaaataacattaataatttcaacggaaat

SEQ ID NO: 540828 - DNA, 75 bp, synthetic construct
  source 1..75: mol_type = other DNA
gttgtcagtatcgtatggcatggagaatttatcccgctcagataataaatatcctctcagcagttaggtatagaa

SEQ ID NO: 540829 - DNA, 75 bp, synthetic construct
  source 1..75: mol_type = other DNA
atgctgccaaccactgaacttcactggtggcgtacctctgtggaaggcaaacaggagcattatttcactacccgc

SEQ ID NO: 540830 - DNA, 75 bp, synthetic construct
  source 1..75: mol_type = other DNA
tttttcttttttgcgcgttataataagaatgctaatatcgaatcagcttaccttgtccacattaatagtgatatc

SEQ ID NO: 540831 - DNA, 75 bp, synthetic construct
  source 1..75: mol_type = other DNA
caccttcctgtatcttcactttgtgccgtgatatccgcctcctgccgttgtgcattgaaacaatacagagtcgca

SEQ ID NO: 540832 - DNA, 75 bp, synthetic construct
  source 1..75: mol_type = other DNA
aaaaagtgctatttgatatttcagcagttgcttcggtagctatcatcggtacttattatgagtcagatcaccctt

SEQ ID NO: 540833 - DNA, 75 bp, synthetic construct
  source 1..75: mol_type = other DNA
cgctcatcagcgaagacggcaatacggcgtggcgcggggagtatgatgaatggggcaaccagcttaatgaagaga

SEQ ID NO: 540834 - DNA, 75 bp, synthetic construct
  source 1..75: mol_type = other DNA
ggccgccgaatggcaaaacgggtctggcggcgggagcgtgacctgacggggtggatgtcgctgtcgcgtaaaccg

SEQ ID NO: 540835 - DNA, 75 bp, synthetic construct
  source 1..75: mol_type = other DNA
tttagagcctcatacccaaaatgtcaaatattgtcatcttgacattgtttcattctttcatagcatagacgtaaa

SEQ ID NO: 540836 - DNA, 75 bp, synthetic construct
  source 1..75: mol_type = other DNA
aagttgagctgataaaatctcttgctgcagaatggaatttaactaatttcactcatctaccttcagtgaaccagg

SEQ ID NO: 540837 - DNA, 75 bp, synthetic construct
  source 1..75: mol_type = other DNA
ggtaatcgatatcgaaagcaatggcttaccacatcataatccatcaaatcatgttgatatctttgatataatcca

SEQ ID NO: 540838 - DNA, 75 bp, synthetic construct
  source 1..75: mol_type = other DNA
ttattttttacagatattccctctgcatgatgaaataggttttaattttaaagaccttcctggcccgttaaaaaa

SEQ ID NO: 540839 - DNA, 75 bp, synthetic construct
  source 1..75: mol_type = other DNA
caggcattacaggagagtttcacttctcgtcaggctgaaaagcgctattttttatcctggacccaaatgtgcaac

SEQ ID NO: 540840 - DNA, 75 bp, synthetic construct
  source 1..75: mol_type = other DNA
catacggcgcacaattttccagggaaaatattgggctatatggttaactcaataccaatattaggcagcgtaaac

SEQ ID NO: 540841 - DNA, 75 bp, synthetic construct
  source 1..75: mol_type = other DNA
gttgagcaacttgatggcgttgatatcttacgttttcgtaacggaagaatcaaagatgtgtccaaacttaaacgt

SEQ ID NO: 540842 - DNA, 75 bp, synthetic construct
  source 1..75: mol_type = other DNA
tcgcctgtttttaccaaagccagtacatgccgaggtcattcaacacctgcgtgcaatgggactaactggagacaa

SEQ ID NO: 540843 - DNA, 75 bp, synthetic construct
  source 1..75: mol_type = other DNA
taaccgtgaggctttgttacgtcaagcaagtacgcctctacagcggtattgcctgctcaataactgtgagccttg

SEQ ID NO: 540844 - DNA, 75 bp, synthetic construct
  source 1..75: mol_type = other DNA
cccggctgattacatggattatggattctgcgccgtcatagctgaggaaacccggctcccgctactggtgccaac

SEQ ID NO: 540845 - DNA, 75 bp, synthetic construct
  source 1..75: mol_type = other DNA
ttctggtattactttgccggctttccctggtatgaggggaatatcctgtttgcctttgcagttgcggcacaggtg

SEQ ID NO: 540846 - DNA, 75 bp, synthetic construct
  source 1..75: mol_type = other DNA
gaaacttcgccgcgtcactaacggctttgttatcaggtaattacagtgaaagcaaaatcgatatggttgagatat

SEQ ID NO: 540847 - DNA, 75 bp, synthetic construct
  source 1..75: mol_type = other DNA
atgaacagagcctctccagttgatttgaggaaaagcctcgaaatagccaaccatctggcgcacatcgggattcgc

SEQ ID NO: 540848 - DNA, 75 bp, synthetic construct
  source 1..75: mol_type = other DNA
atgactgcacaatacaactggaaagatctaccgatgatgaacacaataaagcattcttgggacttttggatggtg

SEQ ID NO: 540849 - DNA, 75 bp, synthetic construct
  source 1..75: mol_type = other DNA
cccgctgcaggggcgatatatcactcaggatccgattggactgaaggggggatggaacctgtatggatatcaatt

SEQ ID NO: 540850 - DNA, 75 bp, synthetic construct
  source 1..75: mol_type = other DNA
ccatcgtgcaacagcaaatactccgcttaaccgccaccgttattgttgacaaaaattgtgacgcgttaaacgcac

SEQ ID NO: 540851 - DNA, 75 bp, synthetic construct
  source 1..75: mol_type = other DNA
aagaatcctgcctccaggcaagagacgagcaaaaaatttctggtgaatgcctcccgctaaaaaaagtatcgctgt

SEQ ID NO: 540852 - DNA, 75 bp, synthetic construct
  source 1..75: mol_type = other DNA
aatttcgctgcatgacatccggctgcaggcattgcgccatcacctccttggggcgcggcaatttttgatgcacgc

SEQ ID NO: 540853 - DNA, 75 bp, synthetic construct
  source 1..75: mol_type = other DNA
gtttaatgcctcctatgtaaaagcaccgaacagccaggatgtgacttctggtcacgttaccactaacgcactgta

SEQ ID NO: 540854 - DNA, 75 bp, synthetic construct
  source 1..75: mol_type = other DNA
ccaacaaatctggcgcagctgagattaaacaggtacacatgaacaactctgcagaaaaacatctgctgactttgg

SEQ ID NO: 540855 - DNA, 75 bp, synthetic construct
  source 1..75: mol_type = other DNA
cttaatgaattaaaaaaatctaaggttattgtttatagaaaacatatagaatcatggtctgtatttgaaggtagt

SEQ ID NO: 540856 - DNA, 75 bp, synthetic construct
  source 1..75: mol_type = other DNA
tatttgcgcatgaaaaaatacggtatcgataaaatggattttcgcgatgaaagaaaagataaaaaaacacaaact

SEQ ID NO: 540857 - DNA, 75 bp, synthetic construct
  source 1..75: mol_type = other DNA
aaaatattattcccggtgtgcctgttaaggcagataaaattgtcgagaatggatatgagcttatggctttatata

SEQ ID NO: 540858 - DNA, 75 bp, synthetic construct
  source 1..75: mol_type = other DNA
cgacaccgcttgacagacgagtggaggacgctgagcgacagataatcacagaggcgcttaatatccatcaggggc

SEQ ID NO: 540859 - DNA, 75 bp, synthetic construct
  source 1..75: mol_type = other DNA
cctgtaacaatccttttgaggcgcaggcgtggatacaaccagactggccaggcattgtgctaagtgatgtgtgta

SEQ ID NO: 540860 - DNA, 75 bp, synthetic construct
  source 1..75: mol_type = other DNA
gtatgcctttcgtgcggaacgcaaacacatttccgaaagcgaaacccgttttcggaacgccatggaatattccgc

SEQ ID NO: 540861 - DNA, 75 bp, synthetic construct
  source 1..75: mol_type = other DNA
ggctggttagataaagccctggctgacccgtgtgtgccatgtaacccgcgtaccgccagccgcgacgaggtgcgc

SEQ ID NO: 540862 - DNA, 75 bp, synthetic construct
  source 1..75: mol_type = other DNA
gaactgcccgtatggagctgcaggggagtaccacatgggaaacccggacgctggagtatgaaatgagtcagctat

SEQ ID NO: 540863 - DNA, 75 bp, synthetic construct
  source 1..75: mol_type = other DNA
tgaaaaataacggcaccacacaatgggcaaccagtgaaaccggcaaaaccatcacagagtcattcatgaacaagc

SEQ ID NO: 540864 - DNA, 75 bp, synthetic construct
  source 1..75: mol_type = other DNA
actttcctacatttttgatgatatttctggtatcgttagttcttattagtgcaaaaataaagtcgaatggcctgt

SEQ ID NO: 540865 - DNA, 75 bp, synthetic construct
  source 1..75: mol_type = other DNA
tcgcctgccgacacagaagaacaacgccatcgacgagctattgccccacaactggaaaccggccatacctaacaa

SEQ ID NO: 540866 - DNA, 75 bp, synthetic construct
  source 1..75: mol_type = other DNA
tgatcgttaccgatgggcaactggttaagttgggattgctggacagtctgttcaccgcgctggatcaacacgaaa

SEQ ID NO: 540867 - DNA, 75 bp, synthetic construct
  source 1..75: mol_type = other DNA
taccgcacttcgtgcgctgctgttaagccgcaagaatccgtttggcgatatcaaatcggatggcacagtgcaaac

SEQ ID NO: 540868 - DNA, 75 bp, synthetic construct
  source 1..75: mol_type = other DNA
gcattcattaacaaagcctggtctggcgttccgggggtaggttctcaggacgctggtgaatcagttttttatatt

SEQ ID NO: 540869 - DNA, 75 bp, synthetic construct
  source 1..75: mol_type = other DNA
tgatcccctgtgcctggctgacattgctcggctggccaaaagtacaaatggggattgaatctctgcaagcgttcc

SEQ ID NO: 540870 - DNA, 75 bp, synthetic construct
  source 1..75: mol_type = other DNA
gagcattagttaatgatattcatggtaaattagtatcggattatttttctaaaatttatttggagatggatggta

SEQ ID NO: 540871 - DNA, 75 bp, synthetic construct
  source 1..75: mol_type = other DNA
tgatgcatggtatgcggaaaatacgcgtgagccaatacgtgatgaaactataaaaaatggcctaataccttgcaa

SEQ ID NO: 540872 - DNA, 75 bp, synthetic construct
  source 1..75: mol_type = other DNA
cgtcgggcttatctatctggaacggcagcgtcgtaaagcacaggcaaaaaatgaaagttacggcacagagttact

SEQ ID NO: 540873 - DNA, 75 bp, synthetic construct
  source 1..75: mol_type = other DNA
gctcggcggcaatggtgccggtaaatcgacgttaatgaagattattgccggtattacccctgctgatagcggtac

SEQ ID NO: 540874 - DNA, 75 bp, synthetic construct
  source 1..75: mol_type = other DNA
tgtgatcctcgcccaacccgcaacctcagcaaaatttgaacgcaaacccatctactggatgctgagtgaagtcgc

SEQ ID NO: 540875 - DNA, 75 bp, synthetic construct
  source 1..75: mol_type = other DNA
aatggcggtaatgcacaggctgcggtggatgaatattatgctgcgactggttcacaaccgcatcaacagaaaatt

SEQ ID NO: 540876 - DNA, 75 bp, synthetic construct
  source 1..75: mol_type = other DNA
aatgggtttgtggattcagggatgaattaaaagtatcacaaaatactatacgctcagggattattttttttacta

SEQ ID NO: 540877 - DNA, 75 bp, synthetic construct
  source 1..75: mol_type = other DNA
gatgccagcatagaaggtgttgaatttgagtatgatggtaagcgtgcagcaagaaccgtattgacggggatgtgt

SEQ ID NO: 540878 - DNA, 75 bp, synthetic construct
  source 1..75: mol_type = other DNA
agtgttatgccatgacggttcattattaccgtctgcgggactacgccctgcggcatccggaatgcaacgccatta

SEQ ID NO: 540879 - DNA, 75 bp, synthetic construct
  source 1..75: mol_type = other DNA
tcatccactgccagcgtataccccaggtttcgacggttggaacgatcccctacgggggacctatccactgcagtt

SEQ ID NO: 540880 - DNA, 75 bp, synthetic construct
  source 1..75: mol_type = other DNA
ttgcttattcttatatcccggaagtaatgtttattgttgcctataaaaaagataagtatatttatatgtgcttgt

SEQ ID NO: 540881 - DNA, 75 bp, synthetic construct
  source 1..75: mol_type = other DNA
atgttcaaatataaaaaaaaggcggcagtgatctgttttttgtattttttgtgcgtcgctgtagtaacttgttat

SEQ ID NO: 540882 - DNA, 75 bp, synthetic construct
  source 1..75: mol_type = other DNA
ggtcagtttcagcagcaaggcatttcgcagaaccggcgatccaacgtttcgtgtcggggtgatgggcggcgccag

SEQ ID NO: 540883 - DNA, 75 bp, synthetic construct
  source 1..75: mol_type = other DNA
tatattaagaatgtgcataacgaattaaaaatattccatgatattgataaagccatgaatatagcctcagatatg

SEQ ID NO: 540884 - DNA, 75 bp, synthetic construct
  source 1..75: mol_type = other DNA
ctgtatactatttacgttaaagatcgagtcaattcggtaaaggtatcgatcatagatagtgggcttgctatagct

SEQ ID NO: 540885 - DNA, 75 bp, synthetic construct
  source 1..75: mol_type = other DNA
ttaaaaccattaatgacaagtttggtcatttatttggtgatgaagtactaataagacttgttaatcttattaagg

SEQ ID NO: 540886 - DNA, 75 bp, synthetic construct
  source 1..75: mol_type = other DNA
aaaccctcgataccagcattatcggcgcgattatcatttctggcattgtgacggcgctgcataaccgtctgttcg

SEQ ID NO: 540887 - DNA, 75 bp, synthetic construct
  source 1..75: mol_type = other DNA
ggcgtaatctttctgctgaggctgaacgactggaaaaccgggcgtcatttatcctggcgaatggggttactcacc

SEQ ID NO: 540888 - DNA, 75 bp, synthetic construct
  source 1..75: mol_type = other DNA
tggcaaaactgattatcatcggtgccgccatcgggctggggcgtctcatggtgagccgcgatcgcatcacagccc

SEQ ID NO: 540889 - DNA, 75 bp, synthetic construct
  source 1..75: mol_type = other DNA
ttttgcacttccggtaatacaacctgaaagtgaagcctggtttgcacagaattatgctgatttcctaaaaagcta

SEQ ID NO: 540890 - DNA, 75 bp, synthetic construct
  source 1..75: mol_type = other DNA
ttcgttaagcgggcatctcggggtggggtatagccatggtgccggtgtggaatccccgtggaacgcagtggctgg

SEQ ID NO: 540891 - DNA, 75 bp, synthetic construct
  source 1..75: mol_type = other DNA
cggatgttattgaagtttattccggtggcgtgcttgatgttagtggtggtacggcaacaaatgttacccagcacg

SEQ ID NO: 540892 - DNA, 75 bp, synthetic construct
  source 1..75: mol_type = other DNA
caccagacttaataatggtggcgttctggaggttcaggacggtggtgaggctaagcatgttgagcaacaatccgg

SEQ ID NO: 540893 - DNA, 75 bp, synthetic construct
  source 1..75: mol_type = other DNA
gttgttctgggtttgctcaaccgtgaaccgctctctgtcgaaataatgacgcgaatgagtcatctacctgatgat

SEQ ID NO: 540894 - DNA, 75 bp, synthetic construct
  source 1..75: mol_type = other DNA
cgtgggatatttatcaatgacataattgcacctgttgttgcgtcttcgacaaatagtgaattcatggtccgtgcg

SEQ ID NO: 540895 - DNA, 75 bp, synthetic construct
  source 1..75: mol_type = other DNA
aacgatcctgaggggtggagtaatctggcgaaaaatcagtatctgagtacggcgatgaaacaaaaaatttggcaa

SEQ ID NO: 540896 - DNA, 75 bp, synthetic construct
  source 1..75: mol_type = other DNA
cgatatcaaagcaggtcatgttactgcagagcagcgcgaacagattaaacgtcgcggttgtgcggtgataaaagg

SEQ ID NO: 540897 - DNA, 75 bp, synthetic construct
  source 1..75: mol_type = other DNA
cgggtacggtcagccagccggggcgcaatgtccgggcaaagcagccccggttgggtagttatgtgggatggctgg

SEQ ID NO: 540898 - DNA, 75 bp, synthetic construct
  source 1..75: mol_type = other DNA
aatattattcatcttcgaaaaaaaatcgaagttgataataatcaaacacttagcaatcactctaaggtcagaggt

SEQ ID NO: 540899 - DNA, 75 bp, synthetic construct
  source 1..75: mol_type = other DNA
gtattgccacgggcaccaatatcaacagcggaacacaaaatatcaagagcggcgggaaagctgacacgacaaata

SEQ ID NO: 540900 - DNA, 75 bp, synthetic construct
  source 1..75: mol_type = other DNA
agtaaaaaaggggatgttattctgcgttgtaaaaatttattaggtcaacaaaatcaaacatcacgaaaaatgcag

SEQ ID NO: 540901 - DNA, 75 bp, synthetic construct
  source 1..75: mol_type = other DNA
cgttacgccagcgccggaaaaagcgaccagcggtccgttgaccagctgggcgacctgggagttagtttataattg

SEQ ID NO: 540902 - DNA, 75 bp, synthetic construct
  source 1..75: mol_type = other DNA
actttcctacatttttgatgctctttctggtatcgttagttcttattagtgcaaaaataaagtcgaatggcctgt

SEQ ID NO: 540903 - DNA, 75 bp, synthetic construct
  source 1..75: mol_type = other DNA
tgggcaacatgggcggaggtctgattgaccaggttttaccgcaaaactggatcccgatgttcagcaaccacgcgg

SEQ ID NO: 540904 - DNA, 75 bp, synthetic construct
  source 1..75: mol_type = other DNA
atgcgaaattatcgacacagggccagcgttttattagtcgtctatcttcccctcagtcaggtaagctggagaatc

SEQ ID NO: 540905 - DNA, 75 bp, synthetic construct
  source 1..75: mol_type = other DNA
cgagtcgacagccagcaggcgtaaagccgaagggcatttcagcaccatggcgaaagagctggccttcctggggat

SEQ ID NO: 540906 - DNA, 75 bp, synthetic construct
  source 1..75: mol_type = other DNA
gtcgttaatgacgccacgggataatgttacgccagttaaacttgaaggggtgtccggattaccgatagcgcgaca

SEQ ID NO: 540907 - DNA, 75 bp, synthetic construct
  source 1..75: mol_type = other DNA
ctggaacctgacgccgtatgcatcgttaacggggttcaccgctgataaccccgaatatcatttatccaatggcat

SEQ ID NO: 540908 - DNA, 75 bp, synthetic construct
  source 1..75: mol_type = other DNA
acatggggttaaccaggagacgggcagtgctttagttgccaacacgggcgcagggactgatatcgaaggatacaa

SEQ ID NO: 540909 - DNA, 75 bp, synthetic construct
  source 1..75: mol_type = other DNA
gtacaaccattcgttgctctgctcctcgtcagcctgttagtcgcacttgcggcggggataccggcgggggcgaag

SEQ ID NO: 540910 - DNA, 75 bp, synthetic construct
  source 1..75: mol_type = other DNA
tattgattttgatttgttggataatttaaaaaaactctattctgttgagataaataagtttaataagggggaggg

SEQ ID NO: 540911 - DNA, 75 bp, synthetic construct
  source 1..75: mol_type = other DNA
gctggtggatttcacccgcgaccgcctgcaccgggaaacgctgcgccgcttcggccgttatgaactcaccaccgc

SEQ ID NO: 540912 - DNA, 75 bp, synthetic construct
  source 1..75: mol_type = other DNA
gcagcatgagaccagacacgcttacaacgcgcaggggctggcgaaccgctgtataccggacagcctgcccgccgt

SEQ ID NO: 540913 - DNA, 75 bp, synthetic construct
  source 1..75: mol_type = other DNA
cagcggcccgcggcaaacgcgggaatacggctacagtgccacgggcaggctggagagtgtgcgcaccctcgcacc

SEQ ID NO: 540914 - DNA, 75 bp, synthetic construct
  source 1..75: mol_type = other DNA
cgtgctgaccaacgagaacggcagccagtccacgttccggtatgacccggtggacaggctgacggagcagcgcgg

SEQ ID NO: 540915 - DNA, 75 bp, synthetic construct
  source 1..75: mol_type = other DNA
atgaaactcggcgacacaccgctggtggatttcacccgcgaccgcctgcaccgggaaacgctgcgcagcttcggc

SEQ ID NO: 540916 - DNA, 75 bp, synthetic construct
  source 1..75: mol_type = other DNA
gcctgcccgacccggagctgcacccggacagcgccctcagcatgtggccggataaccgtatcgcccgtgacgcgc

SEQ ID NO: 540917 - DNA, 75 bp, synthetic construct
  source 1..75: mol_type = other DNA
gcgaaggatgcgcactatgtttaccactacgatgaatacggcagactgacggagaagacggaccgcatcccggcg

SEQ ID NO: 540918 - DNA, 75 bp, synthetic construct
  source 1..75: mol_type = other DNA
taaaaagaaaggtgaaatgttatctgatatttgtatttatgctacagcatgcggacatgcaggaattggtggtgg

SEQ ID NO: 540919 - DNA, 75 bp, synthetic construct
  source 1..75: mol_type = other DNA
gcatcaatgacaaatgggggcatcatatgggtgatcaagtcatagtaatggttaccagaataataaaaaaatcca

SEQ ID NO: 540920 - DNA, 75 bp, synthetic construct
  source 1..75: mol_type = other DNA
ggccagttaatctcggtgaaagatacgcagggccgtgaaacgcagtatgaatacaacgccgcaggcgacctgacc

SEQ ID NO: 540921 - DNA, 75 bp, synthetic construct
  source 1..75: mol_type = other DNA
tgctgccgccggagccgcccgcataccgggtgctgacgggcgtggtggacggcttcgggcggacgctgactttcc

SEQ ID NO: 540922 - DNA, 75 bp, synthetic construct
  source 1..75: mol_type = other DNA
ggacggcaaccggagcgagacacagtacgatgcgtggggaaaggcggtcagcaccacgcagggcgggctgacgcg

SEQ ID NO: 540923 - DNA, 75 bp, synthetic construct
  source 1..75: mol_type = other DNA
cggcttcgggcggacgctggccttccaccgggcggcggagggtgacgtggcgggcgcggtgacgggggtgacgga

SEQ ID NO: 540924 - DNA, 75 bp, synthetic construct
  source 1..75: mol_type = other DNA
ccactgcgaccatcgcggcctgccgctggcccttatcagtaaggaaggggcaacagaatggtgcgcagaatacga

SEQ ID NO: 540925 - DNA, 75 bp, synthetic construct
  source 1..75: mol_type = other DNA
atgcgattgagaatatgacatcaggtggactaatttatgccgtatctggtgtacctggattgattgctgcaaaca

SEQ ID NO: 540926 - DNA, 75 bp, synthetic construct
  source 1..75: mol_type = other DNA
gagcggacccaccactaccactacgacagccagcaccgcctggtgttctacacgcggatacagcatggcgagccg

SEQ ID NO: 540927 - DNA, 75 bp, synthetic construct
  source 1..75: mol_type = other DNA
tgaccacgatacagaacgacaggagccgcatccagacgatttatcagccggggagcttcacgccactcatcagag

SEQ ID NO: 540928 - DNA, 75 bp, synthetic construct
  source 1..75: mol_type = other DNA
tatgtaacccgctatgaccatgaccgttttggtcaggtgacggcggtgcaccgcgaggaaggcctgagccagtac

SEQ ID NO: 540929 - DNA, 75 bp, synthetic construct
  source 1..75: mol_type = other DNA
attatgacccgctgcaggggcgatatatcactcaggatccgattggactgaaggggggatggaacctgtatggat

SEQ ID NO: 540930 - DNA, 75 bp, synthetic construct
  source 1..75: mol_type = other DNA
tggtacgggtgggacggcgacaggctgacgacggtacagaccgacaccacgcgtatccagacggtataccagccg

SEQ ID NO: 540931 - DNA, 75 bp, synthetic construct
  source 1..75: mol_type = other DNA
caccgggaggaaggcatcagcacttacagcagttataacccgcgtggccaactggtcagtcagaaggatgcgcag

SEQ ID NO: 540932 - DNA, 75 bp, synthetic construct
  source 1..75: mol_type = other DNA
tgacccggtggacaggctgacggagcagcgcggctttgacggcaggacgcagcgttaccggtacagcgccacagg

SEQ ID NO: 540933 - DNA, 75 bp, synthetic construct
  source 1..75: mol_type = other DNA
actacgacagccagcaccgtctggtgttctacacgcggatacagcacggtgagccgcaggtggagagccgctacc

SEQ ID NO: 540934 - DNA, 75 bp, synthetic construct
  source 1..75: mol_type = other DNA
tcagcaccacgcagggcgggctgacgcgcagtatggagtacgatgctgccggacgtgtcatcagcctgaccaacg

SEQ ID NO: 540935 - DNA, 75 bp, synthetic construct
  source 1..75: mol_type = other DNA
aaagccagcagtggcttgcacagtgtgggttgacggcggaacagatggcggcgcaactggaggcggaatacatcc

SEQ ID NO: 540936 - DNA, 75 bp, synthetic construct
  source 1..75: mol_type = other DNA
aatatttttatgcaggcggtttttaaacaatcagaattgatgaaaatacaattgttaacagatgatgaaatttta

SEQ ID NO: 540937 - DNA, 75 bp, synthetic construct
  source 1..75: mol_type = other DNA
gtggcagcctggtttcctgaagcagatcgtcgggaggtttctacacaatggacttctttttccaccgaggagaat

SEQ ID NO: 540938 - DNA, 75 bp, synthetic construct
  source 1..75: mol_type = other DNA
ttcaatcgcccttttttactttgctttattaaccgtgtttatttttcagttcaaagcgtggtgagaccagaccat

SEQ ID NO: 540939 - DNA, 75 bp, synthetic construct
  source 1..75: mol_type = other DNA
gtcggttgtttcgtgggcgtgatgatgtatgggcccttcgatgggaaagcaaaaccagcggaaagggtattcgtc

SEQ ID NO: 540940 - DNA, 75 bp, synthetic construct
  source 1..75: mol_type = other DNA
atgttagtcagaatcaacggtggcaataagggggtatgcgaataccttgaaaaaggttataagcaaggaagggaa

SEQ ID NO: 540941 - DNA, 60 bp, synthetic construct
  source 1..60: mol_type = other DNA
cgtcgaagcggctattgcacgcgccaaagcgcgcaagctggaacagcaacaacaggctaa

SEQ ID NO: 540942 - DNA, 75 bp, synthetic construct
  source 1..75: mol_type = other DNA
catgcagggcatcactacaactggcgttgggttggagctggagcatttgacagcacaacctgctctcaaataatg

SEQ ID NO: 540943 - DNA, 75 bp, synthetic construct
  source 1..75: mol_type = other DNA
tgaagcgcctgcaacagcttgaaaaatgcaaaagcaacagcgcgaggaagccgttgatccgctcagcgtggaact

SEQ ID NO: 540944 - DNA, 75 bp, synthetic construct
  source 1..75: mol_type = other DNA
aaagtttgcaggtagttttcaggatgatgccagcatagaaggtgttgaatttgagtatgatggtaagcgagaaga

SEQ ID NO: 540945 - DNA, 75 bp, synthetic construct
  source 1..75: mol_type = other DNA
tcccttcctcgtcattttactggtgaaagtcggcggatttattcgctggctgaaacaggattacgccgacattcc

SEQ ID NO: 540946 - DNA, 75 bp, synthetic construct
  source 1..75: mol_type = other DNA
tgtatgcagaaaaatccgaaaaaaaatatcaggggagggtaattgatgcagggcttacctggattcataacagtc

SEQ ID NO: 540947 - DNA, 75 bp, synthetic construct
  source 1..75: mol_type = other DNA
ggtgatcagcgatgaagccggtggtggtatcagacaggcggcagaaaaatctggcccgtctggcagaaagcggga

SEQ ID NO: 540948 - DNA, 75 bp, synthetic construct
  source 1..75: mol_type = other DNA
gctgttattacccgtgtaaatcttacgcgtcaacaggcaaaagaaagatttatttgtttaaatgaacataaaggt

SEQ ID NO: 540949 - DNA, 75 bp, synthetic construct
  source 1..75: mol_type = other DNA
atgaactcatttcccattgaacaaggtgagcaactcagggtaggtactgtagattttgtttcacccaatgaaatt

SEQ ID NO: 540950 - DNA, 75 bp, synthetic construct
  source 1..75: mol_type = other DNA
acatcataaatggagtgttatcttcatttcagagccttggaggcgatgagtgtgaactccttcctaaaaacgagg

SEQ ID NO: 540951 - DNA, 75 bp, synthetic construct
  source 1..75: mol_type = other DNA
tacctaggtacaattttggtttctttaaaagcggataaatctaaaggagcagcggcacttaatgatttccctgga

SEQ ID NO: 540952 - DNA, 75 bp, synthetic construct
  source 1..75: mol_type = other DNA
aaactatcaagattttcgaaaaaataaactcatcttcatccgatttaagtaaggaaataaaaataaaatcgccgc

SEQ ID NO: 540953 - DNA, 75 bp, synthetic construct
  source 1..75: mol_type = other DNA
gcgattactttagcaggtgatgatgactattgtggggcagacaatgtcattggacgcagaactgtaactgatgtg

SEQ ID NO: 540954 - DNA, 75 bp, synthetic construct
  source 1..75: mol_type = other DNA
tggggaaaatgagcatcaactccaagtgccatcttggttttggaatagctcggaatgggcatcatttacgcaagc

SEQ ID NO: 540955 - DNA, 75 bp, synthetic construct
  source 1..75: mol_type = other DNA
tatcagtatccgttgaatccagttacgaatacagatcctctggggttagaagtttttcctagaccattccccttg

SEQ ID NO: 540956 - DNA, 75 bp, synthetic construct
  source 1..75: mol_type = other DNA
ccctgataagcgcgtatctcttaacggggacatcgtcagcgtgaatatgaccaatctacgcggcagtagttattc

SEQ ID NO: 540957 - DNA, 75 bp, synthetic construct
  source 1..75: mol_type = other DNA
cggagccccctactccaccacaaaaaatgcctttacgtcgactggcggaaaccgcattgacagcgcaatggtcgt

SEQ ID NO: 540958 - DNA, 75 bp, synthetic construct
  source 1..75: mol_type = other DNA
aagagagggtagatatccagattacaatgctaaagttagcgcagttgataacatcatagatggaatgttatcttc

SEQ ID NO: 540959 - DNA, 75 bp, synthetic construct
  source 1..75: mol_type = other DNA
tttgaatacaataaatatttaaaaaattattgcacagatgattatttcatgcgtcagtttagaaggtttggtaat

SEQ ID NO: 540960 - DNA, 75 bp, synthetic construct
  source 1..75: mol_type = other DNA
tgacataataaatgacagattctggagtgatgggaaaaaacccgacagatgtgacgtacttcaggaactaattga

SEQ ID NO: 540961 - DNA, 75 bp, synthetic construct
  source 1..75: mol_type = other DNA
gcggctattgcggcgcagcaggcttttgtgtgctattcactgaccaatgccgggcaacgtgccgattttttagaa

SEQ ID NO: 540962 - DNA, 75 bp, synthetic construct
  source 1..75: mol_type = other DNA
ggacagttctgcactaaaccaggcctgattgtgttgctgaaaggggagaaaaacgcggactttttacagcaactg

SEQ ID NO: 540963 - DNA, 75 bp, synthetic construct
  source 1..75: mol_type = other DNA
tttgacccaaatgtgcatggaaaagtaaagaaggataattacagggaattactcagactttttaataagtcaagt

SEQ ID NO: 540964 - DNA, 75 bp, synthetic construct
  source 1..75: mol_type = other DNA
gggctgctctgaagttagatttggtgacttcacctgaacaactggaacaggaactacaggctgcgcgctcagctg

SEQ ID NO: 540965 - DNA, 75 bp, synthetic construct
  source 1..75: mol_type = other DNA
attaccaattgagcgtcagcgtgccattgctaacctggtatacagcaaacgctacggtaacaacgcgccaggtga

SEQ ID NO: 540966 - DNA, 75 bp, synthetic construct
  source 1..75: mol_type = other DNA
tgcaggacagtaatccattaaacctgctgcgcttggttaacggccagtggacccgggaagccatttcctccttgt

SEQ ID NO: 540967 - DNA, 75 bp, synthetic construct
  source 1..75: mol_type = other DNA
gcgctagcaggtaaacaaccgctggacaatacgctgactaatttgagtggaaaggatgtagctggtcttctcgca

SEQ ID NO: 540968 - DNA, 75 bp, synthetic construct
  source 1..75: mol_type = other DNA
tattcagactgaaaatgaagtatcaactccggttcacccttcagcatcaatggtcgggctggatgctggcgtggc

SEQ ID NO: 540969 - DNA, 75 bp, synthetic construct
  source 1..75: mol_type = other DNA
acccaaaaagattgtcgtcttcggtttatgcggctgctttttgagcggtctggggtatctgacggcaggattaac

SEQ ID NO: 540970 - DNA, 75 bp, synthetic construct
  source 1..75: mol_type = other DNA
agctaacgatacccctacaggcgattaatacagaatcgcgaactatcgatgtcgccttttgctcagaaatgccag

SEQ ID NO: 540971 - DNA, 75 bp, synthetic construct
  source 1..75: mol_type = other DNA
attccactatccaaacaagcaattctaacggctccaaatattgaatcatttgtacaaagtgaactactacggtat

SEQ ID NO: 540972 - DNA, 75 bp, synthetic construct
  source 1..75: mol_type = other DNA
gatggtactattctaatgggcgatttctccaatgtaattctcgctaattgggaagggcaggaagtagattatgac

SEQ ID NO: 540973 - DNA, 75 bp, synthetic construct
  source 1..75: mol_type = other DNA
aagagcagcaggctgcgattagagaggcgtgcagtggtggtacgccggtttcgtgtgaaacagcagtcgcagcga

SEQ ID NO: 540974 - DNA, 75 bp, synthetic construct
  source 1..75: mol_type = other DNA
ttacgtttattcgaaatatttatcagatgcgccacgccttcaggtgtcaacatctggattgtggggttgccataa

SEQ ID NO: 540975 - DNA, 75 bp, synthetic construct
  source 1..75: mol_type = other DNA
atatgaaggggtacgatagtttttacaaaaagctggtcagttcagtaagcgggttgtgtgatgtaacatccagtt

SEQ ID NO: 540976 - DNA, 75 bp, synthetic construct
  source 1..75: mol_type = other DNA
catttagagaaaaatattctctcccagaaggggcggttatgctggacaagaaggataaggagctgctcaggctgt

SEQ ID NO: 540977 - DNA, 75 bp, synthetic construct
  source 1..75: mol_type = other DNA
gagggattggcctgactgtaacgaccctacaggctatataggtttttgccgtgctgaagcgtcaacagcaaaaaa

SEQ ID NO: 540978 - DNA, 75 bp, synthetic construct
  source 1..75: mol_type = other DNA
aagagcggcactgaactatcagtaacgccagcggctaaccctgcaattgctgccgggacaaaatttagcattctg

SEQ ID NO: 540979 - DNA, 75 bp, synthetic construct
  source 1..75: mol_type = other DNA
ccatcaacggtaatactgttacaggcacggggacaaacttttccgagcctctttctctcattcgtgtagggtgca

SEQ ID NO: 540980 - DNA, 75 bp, synthetic construct
  source 1..75: mol_type = other DNA
ttactcaatattacgcaacctgcattaacgcgaagaataaaaaagatggaggaagatttacatattcaactattt

SEQ ID NO: 540981 - DNA, 75 bp, synthetic construct
  source 1..75: mol_type = other DNA
aattcagaggactatgatctctggttaagattaagacggaagaatatcaaatgggataatatggaggaatgcctc

SEQ ID NO: 540982 - DNA, 75 bp, synthetic construct
  source 1..75: mol_type = other DNA
ggtgctgcgatgagtggtggtacatcggcaataggttatggtgtaggtaaggttgttcaagggccactggagaaa

SEQ ID NO: 540983 - DNA, 75 bp, synthetic construct
  source 1..75: mol_type = other DNA
tcaaccgctgggttggcagactgactgaccaggcctggcatgtggtgatggtggaggctgttcattatatggaag

SEQ ID NO: 540984 - DNA, 75 bp, synthetic construct
  source 1..75: mol_type = other DNA
cctgagtctggaggatggcgataacaacgtcattattcgcgaagatattattgcgcaactggaaactgcgcagaa

SEQ ID NO: 540985 - DNA, 75 bp, synthetic construct
  source 1..75: mol_type = other DNA
ggcagcctgagttcacagataaaacactctccaggaaaaccggggcggttcaactggcaaataactatccgttta

SEQ ID NO: 540986 - DNA, 75 bp, synthetic construct
  source 1..75: mol_type = other DNA
gtgccgtggagtatggtcggcaacttattgaacaaccagcaaaaagcgtcattatcctcgtgagcgatttttatg

SEQ ID NO: 540987 - DNA, 75 bp, synthetic construct
  source 1..75: mol_type = other DNA
acttaagttatcaacgtggcaatacactaatgtggggtattaccttacgtactaattttaatgatctccgtccgg

SEQ ID NO: 540988 - DNA, 75 bp, synthetic construct
  source 1..75: mol_type = other DNA
cccgtgggctgcttctggtcgtgctatcgcttccgactgcgcagacggtatgaccaagctgattttcgacaaaga

SEQ ID NO: 540989 - DNA, 75 bp, synthetic construct
  source 1..75: mol_type = other DNA
ttaccagatgatgataatttaatattaatgaaagcaatgagtgaagcaaagcctggtgatatactctgtatagat

SEQ ID NO: 540990 - DNA, 75 bp, synthetic construct
  source 1..75: mol_type = other DNA
tgatgatctgaacggaattgagagccgcgccagtgatgccgtggatgatttaatgctgggcgtaagtgccattgg

SEQ ID NO: 540991 - DNA, 75 bp, synthetic construct
  source 1..75: mol_type = other DNA
agtgaaggctatccagagaaagccgctaaggatgatatgtacagaatcggcgcaatgttgggaaccgtcggagag

SEQ ID NO: 540992 - DNA, 75 bp, synthetic construct
  source 1..75: mol_type = other DNA
cgtctggcactcggcagcgccattgttccgcctctgttgggggctgtctcttatacacaagtccccgaatccggg

SEQ ID NO: 540993 - DNA, 75 bp, synthetic construct
  source 1..75: mol_type = other DNA
gatcaagaaccatctacccggcgaagtgcgtagtcataagaatgtctggcaatggctcgtggataactggaacag

SEQ ID NO: 540994 - DNA, 75 bp, synthetic construct
  source 1..75: mol_type = other DNA
gatcttatggcacttcactaccgtcgtttcctgatccttatctgcggcctcgatcaccggctcaaactatttggt

SEQ ID NO: 540995 - DNA, 75 bp, synthetic construct
  source 1..75: mol_type = other DNA
atagaggtgcagatggaggtaaagatcttttaatcacagagcaattgcaaggtcagttaaataaatataaatttc

SEQ ID NO: 540996 - DNA, 75 bp, synthetic construct
  source 1..75: mol_type = other DNA
actgagctacctcaatgaagaggccagcaacgacgaaatagacgaagagattcagaacgagctggaggcctggaa

SEQ ID NO: 540997 - DNA, 75 bp, synthetic construct
  source 1..75: mol_type = other DNA
atttcaaagaggcgcacgcctatctgaacgaagacgccaccaatgacgaaatcgacgaagagattcagaatgagc

SEQ ID NO: 540998 - DNA, 75 bp, synthetic construct
  source 1..75: mol_type = other DNA
acgaagtacagaacgctaaacgcgtgcaaaacgcgcttaacgcctgccgcgccgccatgcttaagggagataaat

SEQ ID NO: 540999 - DNA, 75 bp, synthetic construct
  source 1..75: mol_type = other DNA
cgttaataaaatatttttttgaatctgaacgtgcttgtttttcaggtattgcttttttatcggtgtttattagtt

SEQ ID NO: 541000 - DNA, 75 bp, synthetic construct
  source 1..75: mol_type = other DNA
gtgtgcgtaaagtctggcgtcagttgttacgggaaggaatcagggtggccagatgtacagtggccgctcatggcg

SEQ ID NO: 541001 - DNA, 75 bp, synthetic construct
  source 1..75: mol_type = other DNA
gcgtaaagtctggcgccagttgttacgcgaaggtatcagggtggccagatgtacagtggctcgcctcatggcggt

SEQ ID NO: 541002 - DNA, 75 bp, synthetic construct
  source 1..75: mol_type = other DNA
agcagtacggggtcggaccggtagtgcgacgcgaactgcatattgccccgtcaacgtattaccattgtcagcaac

SEQ ID NO: 541003 - DNA, 75 bp, synthetic construct
  source 1..75: mol_type = other DNA
taaattcagcgtgatggataaacaggccgggtactacatgggcaaattgtcagtaatctttacgccttccttgcc

SEQ ID NO: 541004 - DNA, 75 bp, synthetic construct
  source 1..75: mol_type = other DNA
tgcctcactgcatcatggtgtggggggaactgcccgccagatggtgccggggctgatgatacgggaggcgtcatg

SEQ ID NO: 541005 - DNA, 75 bp, synthetic construct
  source 1..75: mol_type = other DNA
taatattattattagcggcatattgatttacggccttttctcctggccgggactgggatttgtcggggctgggtg

SEQ ID NO: 541006 - DNA, 75 bp, synthetic construct
  source 1..75: mol_type = other DNA
ccgccttacagctatacctggtataaagacggtaaggctgtggctgaccagactacagacacgttcaataaagcc

SEQ ID NO: 541007 - DNA, 75 bp, synthetic construct
  source 1..75: mol_type = other DNA
aaggggatcctctgtatgaaaaaaaatgacattttacagcgtggtccgaaccgtttccggaaaaaggataaaatc

SEQ ID NO: 541008 - DNA, 75 bp, synthetic construct
  source 1..75: mol_type = other DNA
taaaatatattcttaatcgcctcggctttaatggtgatggtagtaaagaatattttttgattagaacaaatcagg

SEQ ID NO: 541009 - DNA, 75 bp, synthetic construct
  source 1..75: mol_type = other DNA
gtcccaccggcgatgcctgactggtcaccaacacgtacttttaaaggctatgcagcctggggcgaaccggaaggc

SEQ ID NO: 541010 - DNA, 75 bp, synthetic construct
  source 1..75: mol_type = other DNA
ggagacgaaactgtcaggctcgccccatgtcggtattgatgaatgggcgtggcatcggggccaccgttacgatac

SEQ ID NO: 541011 - DNA, 75 bp, synthetic construct
  source 1..75: mol_type = other DNA
gtaggtcgttcaaattttgttgttttagttcaggcaacaaatatacaaattgttcctgtaaacaataactatgga

SEQ ID NO: 541012 - DNA, 75 bp, synthetic construct
  source 1..75: mol_type = other DNA
cgaaggtaaaattgaagaaaggcttcaaaatcgccaggctgaatatcaaaatgaaattaatcaactatatgcgct

SEQ ID NO: 541013 - DNA, 75 bp, synthetic construct
  source 1..75: mol_type = other DNA
acttcaaggcgcttttcaaaagggtattttggctttgacatattaggggctattccatttcatcgtccaacaaaa

SEQ ID NO: 541014 - DNA, 75 bp, synthetic construct
  source 1..75: mol_type = other DNA
ctttcactttctccggggctggcgtcggcggtgtttctgctggcctttttcggttttggcgcgaaagccgggatg

SEQ ID NO: 541015 - DNA, 75 bp, synthetic construct
  source 1..75: mol_type = other DNA
tatcactgctgatgatgcccgtaagcaccgtcagcagctgtttcgcaatatgcaaaagaatccaatgtttcgcca

SEQ ID NO: 541016 - DNA, 75 bp, synthetic construct
  source 1..75: mol_type = other DNA
tcttccgggtaatgccagaacctttggtcgtggggaagtacgttcactgcagaaaaggaagagaataaaaagagg

SEQ ID NO: 541017 - DNA, 75 bp, synthetic construct
  source 1..75: mol_type = other DNA
tcagttacttatattgatattggctccaatgatacagaccatattactattggtatcgacaaccaagaaccaata

SEQ ID NO: 541018 - DNA, 75 bp, synthetic construct
  source 1..75: mol_type = other DNA
attacgcaattacatgctggtgtaactttagtcgcccattttgccaccccttttgactttgccgatttaaccctg

SEQ ID NO: 541019 - DNA, 75 bp, synthetic construct
  source 1..75: mol_type = other DNA
tgttgagttgtttatagcactctgtgaatgggataaacattattttaaactccaatcttgcataagagaaagttg

SEQ ID NO: 541020 - DNA, 75 bp, synthetic construct
  source 1..75: mol_type = other DNA
ttctgttggcgtggctgccgccaataaaaatcctgacgacaatacagggagtggctctggttgtgacgacgacaa

SEQ ID NO: 541021 - DNA, 75 bp, synthetic construct
  source 1..75: mol_type = other DNA
attacgcaattacatgcaggcgtaactttagtcgcccgttttgcccccccttttaactttgccgatttaaccctg

SEQ ID NO: 541022 - DNA, 75 bp, synthetic construct
  source 1..75: mol_type = other DNA
agcgttatcagtaagcgcctcgatgtgtcgatgtcgaaggcgaagaacatcgctcagaccgagcaggtcggcgcg

SEQ ID NO: 541023 - DNA, 75 bp, synthetic construct
  source 1..75: mol_type = other DNA
tggagcgcgatatcgaggaccggtattacgcgattaagtcagccctgaaggccctgttcgaccagcgtctgaccg

SEQ ID NO: 541024 - DNA, 75 bp, synthetic construct
  source 1..75: mol_type = other DNA
aaaaatggcgaaatcgtattttatgggtggatgatcgaccagaaaataatgtttacgaaagacaggcatttgagg

SEQ ID NO: 541025 - DNA, 75 bp, synthetic construct
  source 1..75: mol_type = other DNA
caagagaaggggactcaaataaacatgcgcagtcagtcattatccaagaaattgcgacgaatcttttaaaccaag

SEQ ID NO: 541026 - DNA, 75 bp, synthetic construct
  source 1..75: mol_type = other DNA
tgttggcagtcggcgctggggtattcacattcttttggcttgatgacacaccggagcaggcacgttttctgagta

SEQ ID NO: 541027 - DNA, 75 bp, synthetic construct
  source 1..75: mol_type = other DNA
atgagcaccgctttgcttgacgccgtggtgaagaaaaaccgcgcgcgtttgattccgtttatgttggcgctatac

SEQ ID NO: 541028 - DNA, 75 bp, synthetic construct
  source 1..75: mol_type = other DNA
agccgcggtgaagttgatgaccagatgctattgaatgccacctccctgatacgtcaggggaactgggattattta

SEQ ID NO: 541029 - DNA, 75 bp, synthetic construct
  source 1..75: mol_type = other DNA
gtcgggatatgcaggtaattcactctgacgctgctctacaacggttattgacacgtttcaacgatcctgaggggt

SEQ ID NO: 541030 - DNA, 75 bp, synthetic construct
  source 1..75: mol_type = other DNA
ccacaactgtgcaaaacacattattgctagtgggattaaacgcgttgtctacgtagaaccttaccctaaaagtcg

SEQ ID NO: 541031 - DNA, 75 bp, synthetic construct
  source 1..75: mol_type = other DNA
gattttagttcctgcaggccaaatgagaagtggctgaccgatattacggagttccagcttccggctggaaaagtc

SEQ ID NO: 541032 - DNA, 75 bp, synthetic construct
  source 1..75: mol_type = other DNA
gcgcaggtgaaagtgcttaaacgcgataaagcgccggctcgtgaaaaagccctgaaactgctggagcgtgtgtac

SEQ ID NO: 541033 - DNA, 75 bp, synthetic construct
  source 1..75: mol_type = other DNA
ttgttaaaaacaaataagtttgcagctattatttcggatatggatcgcaaagaaggggcgcaagaaggttatgtc

SEQ ID NO: 541034 - DNA, 75 bp, synthetic construct
  source 1..75: mol_type = other DNA
tgacattactggcggcgggcattggtattggtctgtccgggctgctttctccagtactggcgatcgtagcgctgt

SEQ ID NO: 541035 - DNA, 75 bp, synthetic construct
  source 1..75: mol_type = other DNA
cgtaaaatgggctatgacaccaaaacagaagtttgtgggcatggtttccgctctatggcctgtagtgccttaatc

SEQ ID NO: 541036 - DNA, 75 bp, synthetic construct
  source 1..75: mol_type = other DNA
taagcaagcaggcaatagcaaccctgagagaaattcagaagctcagtggagatcaggaaatcatcttcattggtg

SEQ ID NO: 541037 - DNA, 75 bp, synthetic construct
  source 1..75: mol_type = other DNA
gctggcttgatggtattttgggctggttaaaaacaatatgggtgtcagtgaatgatttaaataatgctttttctg

SEQ ID NO: 541038 - DNA, 75 bp, synthetic construct
  source 1..75: mol_type = other DNA
tgacggtggcgcaggcgaaaacgctgctggcagccgcgccggcggcatcgcaaccgtcacaggaaacactttttg

SEQ ID NO: 541039 - DNA, 75 bp, synthetic construct
  source 1..75: mol_type = other DNA
ggtgtgcgtgcggattttcagcgccgtattgatgaggcccgccggatgtttgtcgacaaggtggcgctttatacg

SEQ ID NO: 541040 - DNA, 75 bp, synthetic construct
  source 1..75: mol_type = other DNA
aagaaactatagattttttatcaagctctgaagaaactataaatatagagtatattgaaggaaccaatgttagat

SEQ ID NO: 541041 - DNA, 75 bp, synthetic construct
  source 1..75: mol_type = other DNA
cgcgtcgtatcgctggcagaccttcagtggttgcccctaatcgcgtgcagcggcagtttactgttgtccgggcca

SEQ ID NO: 541042 - DNA, 75 bp, synthetic construct
  source 1..75: mol_type = other DNA
cccagggcggaaaaccggtgccgtttggatcactggtacgggaaaacagtaccggaataaccagtatggtgggtg

SEQ ID NO: 541043 - DNA, 75 bp, synthetic construct
  source 1..75: mol_type = other DNA
ttcaggttaatggtgctgtaaactgcgtaacagtaaaccagtcttcagaccgcgacctgaaggacaacattcagg

SEQ ID NO: 541044 - DNA, 75 bp, synthetic construct
  source 1..75: mol_type = other DNA
gttagtcgcttagttcagggtagcagtgagactgctttgtgggccgcaggaggaaaacaaaaatttgttctgtgg

SEQ ID NO: 541045 - DNA, 75 bp, synthetic construct
  source 1..75: mol_type = other DNA
agtcgattcaacatcgttgtggagttgttctatctcgttctgatttggctccattgggaagcaagacccaagtta

SEQ ID NO: 541046 - DNA, 75 bp, synthetic construct
  source 1..75: mol_type = other DNA
atggaatgtcggtccctgagcatccggctaaccggattttttatgtcagaaatgaacaaaaaaaacaaactctat

SEQ ID NO: 541047 - DNA, 75 bp, synthetic construct
  source 1..75: mol_type = other DNA
tggcggcttttttgtttttctttactttcattttctgtcggcggtgacggagacatacatcagatggaaaaaatc

SEQ ID NO: 541048 - DNA, 75 bp, synthetic construct
  source 1..75: mol_type = other DNA
gtctgtttcgatgcggatgagcggcgcgaagctccccggctggtataccgtctggatacgcgtggtgtcggtctg

SEQ ID NO: 541049 - DNA, 75 bp, synthetic construct
  source 1..75: mol_type = other DNA
actttcctacatttttgatggtgtttctggtatcgttagttcttattagtgcaaaaataaagtcgaatggcctgt

SEQ ID NO: 541050 - DNA, 75 bp, synthetic construct
  source 1..75: mol_type = other DNA
caaattgatgtcaaactgcgggagttcggacgcagcacaagccatgaatgcacgtttgtttttaatccgcaactg

SEQ ID NO: 541051 - DNA, 75 bp, synthetic construct
  source 1..75: mol_type = other DNA
tagttacggttaattactacatgacgacaattgcaggaatgtttcaatttgctgctgataacggctatatcgggt

SEQ ID NO: 541052 - DNA, 75 bp, synthetic construct
  source 1..75: mol_type = other DNA
cgcgccgggattcgctatcgcagagcataccagtcccgacacacgtatgcatgctggtcgttggctgccggtgcc

SEQ ID NO: 541053 - DNA, 75 bp, synthetic construct
  source 1..75: mol_type = other DNA
ccagtcatgggaggcagcaatgcggcgcgccgggattcgctatcgcagagcataccagtcccgacacacgtatgc

SEQ ID NO: 541054 - DNA, 75 bp, synthetic construct
  source 1..75: mol_type = other DNA
tttccctcactaaaaatagattatttatcattcctatctgcaggggttatgatttattatcttcttttgtgtatg

SEQ ID NO: 541055 - DNA, 75 bp, synthetic construct
  source 1..75: mol_type = other DNA
gccttagctgttgattacactgatggattaactatggagttctctgattggcgttttaatgttagatgctcaaat

SEQ ID NO: 541056 - DNA, 75 bp, synthetic construct
  source 1..75: mol_type = other DNA
gggaaatatccaaacgcaaaaatcattcatgatcctcgccttatatggaatactattgatatcgtagaaagtcat

SEQ ID NO: 541057 - DNA, 75 bp, synthetic construct
  source 1..75: mol_type = other DNA
actttcgtacatttttgatggtctttctggtatcgttagttcttattagtgcaaaaataaagtcgaatggcctgt

SEQ ID NO: 541058 - DNA, 75 bp, synthetic construct
  source 1..75: mol_type = other DNA
atggaacaatgatgatcaggagaaatttagcaaaagaccattttacggtaccaaaaacacaggcgggaaccaatc

SEQ ID NO: 541059 - DNA, 75 bp, synthetic construct
  source 1..75: mol_type = other DNA
gtcggctattatgaaactctctgtcccagaaagtggtcagaagttatcagcctggatggggacggaaatagacca

SEQ ID NO: 541060 - DNA, 75 bp, synthetic construct
  source 1..75: mol_type = other DNA
gtggcaaaacgggtatggcggcgtgaacgggacctgacgggctggatgtcgctgtcacggaaaccgcaagtgacc

SEQ ID NO: 541061 - DNA, 75 bp, synthetic construct
  source 1..75: mol_type = other DNA
cgtgaaaaggttttttcacttatatcgaaagatgatatgcatcttgtgagtgaattttttgacaaaaataaaatc

SEQ ID NO: 541062 - DNA, 75 bp, synthetic construct
  source 1..75: mol_type = other DNA
gccgcagtgagtcaatgtggctggtgcgtggcggtaaggcagcgcagccggacggccacacgctggcacggctgt

SEQ ID NO: 541063 - DNA, 75 bp, synthetic construct
  source 1..75: mol_type = other DNA
ctgaaacgcatcagtgaactgtatgccatcgagaatgaaatacggggcttaccagagtctgaacgtcttgccgtc

SEQ ID NO: 541064 - DNA, 75 bp, synthetic construct
  source 1..75: mol_type = other DNA
gcaatatgcaatcgttagctaattactggcgaaaacacaactcagcaatatctgctgtcatatataatgatgatg

SEQ ID NO: 541065 - DNA, 75 bp, synthetic construct
  source 1..75: mol_type = other DNA
gtataatttatatcaattattatatgatgtttggcatgatgattcatatggaacatcatcaattgatattactgg

SEQ ID NO: 541066 - DNA, 75 bp, synthetic construct
  source 1..75: mol_type = other DNA
tacctgaaattggcgaagaagaaattgcagaggtaattgactctttacgttcaggttggattacgacaggtccta

SEQ ID NO: 541067 - DNA, 75 bp, synthetic construct
  source 1..75: mol_type = other DNA
atggggcttagctactggcgctgtattgaagataccttctttgattttgccctgcgagtaccgcagcaagttgaa

SEQ ID NO: 541068 - DNA, 75 bp, synthetic construct
  source 1..75: mol_type = other DNA
gcgatatttttgaccagaccggtgcgctggtgattgtggtacgcgcggaaagcaaaccgaaagcgaaggagaccg

SEQ ID NO: 541069 - DNA, 75 bp, synthetic construct
  source 1..75: mol_type = other DNA
gcctacatgcgccagcttaaaaatctgggcgcgatccacggtggtagcgcatggctgaacgacgaactgaataca

SEQ ID NO: 541070 - DNA, 75 bp, synthetic construct
  source 1..75: mol_type = other DNA
agagcatcagttaacggcaccacccgtaccactgaacaggactttgaaagcgtttatgcgcattgccagagtgaa

SEQ ID NO: 541071 - DNA, 75 bp, synthetic construct
  source 1..75: mol_type = other DNA
atgttgactgcgcctccggcgcgacgctgcaggaagtggtacagcgtcgccagtcctatggcgcacgaactgaac

SEQ ID NO: 541072 - DNA, 75 bp, synthetic construct
  source 1..75: mol_type = other DNA
cggatattcaacgattcaaaaccgcttattacgactaccgctatcacgttcaggatgcattctacagtgacggtt

SEQ ID NO: 541073 - DNA, 75 bp, synthetic construct
  source 1..75: mol_type = other DNA
ctggcagcgattcattcagcaattaaattattgctcgatggaagatattgatgaattacgctggtcgctgtgcac

SEQ ID NO: 541074 - DNA, 75 bp, synthetic construct
  source 1..75: mol_type = other DNA
cctgcggtcagtctggcggggataactgccctgactgtggtgcggtgatgggcgacgcaacatatcaggaaacat

SEQ ID NO: 541075 - DNA, 75 bp, synthetic construct
  source 1..75: mol_type = other DNA
gcaagaaacggaacagaacgaccagaaagcggaacagaacgccccaaatacgcaacaaaacgagccagaaacgaa

SEQ ID NO: 541076 - DNA, 75 bp, synthetic construct
  source 1..75: mol_type = other DNA
tgcccgtggcgctaaatttcataccgttgccgatgaagcattgattagtgaggtgatcggtaaactggtgaattt

SEQ ID NO: 541077 - DNA, 75 bp, synthetic construct
  source 1..75: mol_type = other DNA
acggcctcacgatcaacgacacaccgttcagtaacgatacgacgattcaggaacatatagaggcgggagggaatc

SEQ ID NO: 541078 - DNA, 75 bp, synthetic construct
  source 1..75: mol_type = other DNA
ttgaagggattagcgacccgaacgatccgaaatgggtaaaggggatccagactcgcgactctgtgtaccagaacc

SEQ ID NO: 541079 - DNA, 75 bp, synthetic construct
  source 1..75: mol_type = other DNA
tgacggaattagcgacccgaacgatccgaaatgggtaaaggggatccagactcgcgattgtgtgtaccagaacca

SEQ ID NO: 541080 - DNA, 75 bp, synthetic construct
  source 1..75: mol_type = other DNA
cctccggatttggcggtgaaattcatgttcatctgcataacgttgttacgcagaatccccgcgaactggcgaaac

SEQ ID NO: 541081 - DNA, 75 bp, synthetic construct
  source 1..75: mol_type = other DNA
ggatgaagcggaaagggcgcgcaagaaaatcgaagacgcacaacgtgcggccattcttcaggacaaggttgctct

SEQ ID NO: 541082 - DNA, 75 bp, synthetic construct
  source 1..75: mol_type = other DNA
tacccgtggcgctaaatttcataccgttgccgatgaaacattgattagtaaggtactcggtaaactggtaaattt

SEQ ID NO: 541083 - DNA, 75 bp, synthetic construct
  source 1..75: mol_type = other DNA
ggaactggaatccctgctgcgctcgctgaaactgctggttgaacgcgcggatacccgacctgccggaaatgcggg

SEQ ID NO: 541084 - DNA, 75 bp, synthetic construct
  source 1..75: mol_type = other DNA
ctggacgaaagcggcggcgtggttacccggacgcaggattttgagccgggcgggcagatttgcagccggggcgag

SEQ ID NO: 541085 - DNA, 75 bp, synthetic construct
  source 1..75: mol_type = other DNA
gtgaaggtggtttgcctatccgcatgattgaaaatgagagcggttatttgattacctatttcagaaggatatatc

SEQ ID NO: 541086 - DNA, 75 bp, synthetic construct
  source 1..75: mol_type = other DNA
taaacccgatgggccagcaacagcagggatagatgatttgggtgaaattttagctaagatgaaacagagaacatc

SEQ ID NO: 541087 - DNA, 75 bp, synthetic construct
  source 1..75: mol_type = other DNA
cgatccaagtaaattgccggacatagcgaaacaattaagactgccatatcctattgaccaggccagtagtgcgcc

SEQ ID NO: 541088 - DNA, 75 bp, synthetic construct
  source 1..75: mol_type = other DNA
ctgccacagacaaattggccaacaactcaattaccaccaggatatacttgtgcagaaccctatttattcccagac

SEQ ID NO: 541089 - DNA, 75 bp, synthetic construct
  source 1..75: mol_type = other DNA
tcaatggctataccggatattccatcttcatttacgacaataatgcgggtggtgcaggttatgcagtgcaattga

SEQ ID NO: 541090 - DNA, 75 bp, synthetic construct
  source 1..75: mol_type = other DNA
acgcgccagcctcactgtttgcgtcaaaaaattggattacaactctcgccaacacgacgctctctataacgcgtg

SEQ ID NO: 541091 - DNA, 75 bp, synthetic construct
  source 1..75: mol_type = other DNA
gttgacctgtaaattccgtctgtcaggtgaagtaaaagaaggccagtttgctctgggtatttacctccacaccga

SEQ ID NO: 541092 - DNA, 75 bp, synthetic construct
  source 1..75: mol_type = other DNA
gaagtgggtaaaaccaaatctgacttgtacgccacaggatgattcccagtatccaggggtgatgctgccaactta

SEQ ID NO: 541093 - DNA, 75 bp, synthetic construct
  source 1..75: mol_type = other DNA
actgccggacggcaggacggtgcggtatggctataacagccagttgcaactgacttcagtgacatatccggatgg

SEQ ID NO: 541094 - DNA, 75 bp, synthetic construct
  source 1..75: mol_type = other DNA
actgtattacaaccgtcaccggtactacgatccgttgcaggggcggtatatcacccaggatccgatagggttgaa

SEQ ID NO: 541095 - DNA, 75 bp, synthetic construct
  source 1..75: mol_type = other DNA
tggtctaatgattctttagaaacatgtaagatgaagtgctccggaaataacattggacgttttattagatttgta

SEQ ID NO: 541096 - DNA, 75 bp, synthetic construct
  source 1..75: mol_type = other DNA
cgacccggagctgcacccggacagcgccctcagcatgtggccggataaccgtatcgcccgtgacgcgcactatct

SEQ ID NO: 541097 - DNA, 75 bp, synthetic construct
  source 1..75: mol_type = other DNA
ctacagcaccaccggcaggctgaccggcgttcacaccaccgcagcgaatctggatatccgcatcccgtatgccac

SEQ ID NO: 541098 - DNA, 75 bp, synthetic construct
  source 1..75: mol_type = other DNA
tcgtggaattaacgtttctatatcaggttaccatggcattggcgttttttatgtaccagagcatggtaaaccaac

SEQ ID NO: 541099 - DNA, 75 bp, synthetic construct
  source 1..75: mol_type = other DNA
cgatctccacaaactggtgcgagacactgacaaagttttccccgcccccgtaaattcggacctgggactgataac

SEQ ID NO: 541100 - DNA, 75 bp, synthetic construct
  source 1..75: mol_type = other DNA
ttactattgcggagaataaaataaaaatattgttggtttcacttttatctatagacaggacgtgtccctatattt

SEQ ID NO: 541101 - DNA, 75 bp, synthetic construct
  source 1..75: mol_type = other DNA
cggcagaagcctgtattttgagcacctgtttcccggtgaggacggttaccggtatgaccgtcacggcaggctgac

SEQ ID NO: 541102 - DNA, 75 bp, synthetic construct
  source 1..75: mol_type = other DNA
gaactcatgtatcagagcgttatggctttgccgctgggtcaatggcttgttgaaagcgccggacacgctgaatca

SEQ ID NO: 541103 - DNA, 75 bp, synthetic construct
  source 1..75: mol_type = other DNA
tattcccgtgccgctatttttgcacttatccggagcgcccaccctgaactttatctctacagggtacgccttcag

SEQ ID NO: 541104 - DNA, 75 bp, synthetic construct
  source 1..75: mol_type = other DNA
atgaagaaaaaccgcaaccatctggaacaacggcagttgaacagggagaggctgaaacaatggaaccggacgcaa

SEQ ID NO: 541105 - DNA, 75 bp, synthetic construct
  source 1..75: mol_type = other DNA
gcacagcaagcagagctgattcgcggatcgaatggaccagccggagaggggtattatgttgcgccaacgctggtg

SEQ ID NO: 541106 - DNA, 75 bp, synthetic construct
  source 1..75: mol_type = other DNA
aggagcagcgtgtgcaaggtagcatcactcagcgcactcgcacccgtccaagtgttcagcctggtccaatgattg

SEQ ID NO: 541107 - DNA, 75 bp, synthetic construct
  source 1..75: mol_type = other DNA
tactgcgaagctaacggaatttcgctagatagcatcaaggacctggttgttaggcataaatgcgataatccatca

SEQ ID NO: 541108 - DNA, 75 bp, synthetic construct
  source 1..75: mol_type = other DNA
tggtggagtacacccgcgaccgcctgcaccgggaaacgctgcgcagcttcggccgttatgaactcaccaccgctt

SEQ ID NO: 541109 - DNA, 75 bp, synthetic construct
  source 1..75: mol_type = other DNA
cgccggtacagccgcaaatacacctggcggtgctggaggggtgataaataatggaattatcctgacagcaattaa

SEQ ID NO: 541110 - DNA, 75 bp, synthetic construct
  source 1..75: mol_type = other DNA
gtgaaaagcaataaaggactgaatgagcaggacaagctggcaaaaaccaccgagattcaggcgcagctggatgac

SEQ ID NO: 541111 - DNA, 75 bp, synthetic construct
  source 1..75: mol_type = other DNA
gatgcgtttaaagcgttggtttcagagcgcagtgcgaaatactggagccaaacccgcccagagtatctttctatc

SEQ ID NO: 541112 - DNA, 75 bp, synthetic construct
  source 1..75: mol_type = other DNA
gtgttagtgggcatacgggtttcctggatggggttcgtttatcacgtagtcaaataaacaatattgctaaagaaa

SEQ ID NO: 541113 - DNA, 75 bp, synthetic construct
  source 1..75: mol_type = other DNA
gcagccactcagcccatcaaattagtaaacaatatcgacaaggtcagatttattcagacagaccctgtaggcgag

SEQ ID NO: 541114 - DNA, 75 bp, synthetic construct
  source 1..75: mol_type = other DNA
aaaagcgccatctaacgatggcgcgtctggaactactttttgttaacgtcaaacatggtggcatcggtcgccatg

SEQ ID NO: 541115 - DNA, 75 bp, synthetic construct
  source 1..75: mol_type = other DNA
gggttaccgaacgcgagacagaaaaatccctcgataaaaagatgctggcggtagttgccggagccagcacctttg

SEQ ID NO: 541116 - DNA, 75 bp, synthetic construct
  source 1..75: mol_type = other DNA
acaaatatgttctgatcctggagaatgcggacagcgcaaccgagtatggtcgctacccgattacgatcgatctgg

SEQ ID NO: 541117 - DNA, 75 bp, synthetic construct
  source 1..75: mol_type = other DNA
cgacttcgcttcaggagataggcgtcgacgtctccacctggagcgcgctgaagaacagcatctaccctggcgcca

SEQ ID NO: 541118 - DNA, 75 bp, synthetic construct
  source 1..75: mol_type = other DNA
atgccgactcttgatgtaacagacgtgctttttgaccccgatttttgcgacttcaacctgtgggtaacgcgtcgc

SEQ ID NO: 541119 - DNA, 75 bp, synthetic construct
  source 1..75: mol_type = other DNA
cttcaatttgtgggtaacacgccgtgtgcaaacggtggatgaggatgggatcggcagcgacagagaagttaaaaa

SEQ ID NO: 541120 - DNA, 75 bp, synthetic construct
  source 1..75: mol_type = other DNA
aaagtggcagatttctggcgtaccgcaccagtatgacttctatcaaaaagaagttcgcacacgactgagtctgaa

SEQ ID NO: 541121 - DNA, 75 bp, synthetic construct
  source 1..75: mol_type = other DNA
gtccgccggtagtcaactatccgggggaaggtttccgggaaatgacaaaggcgcagtgggccgccctgccccggg

SEQ ID NO: 541122 - DNA, 75 bp, synthetic construct
  source 1..75: mol_type = other DNA
catcatacactaaatcagtaagttggcagcattaccgtcttgccgaagaagatccagcttctgcaaccaggccat

SEQ ID NO: 541123 - DNA, 75 bp, synthetic construct
  source 1..75: mol_type = other DNA
atcgcatatccctgcatcgggctaaaatgagtgttttgggatacagaaaaagtcatcgtgatattgtaatttgtt

SEQ ID NO: 541124 - DNA, 75 bp, synthetic construct
  source 1..75: mol_type = other DNA
cgctaccgccgcacaatggacaataatttccgcctggtgaatgtgtatattaccgacatgaaaatcacggaaatc

SEQ ID NO: 541125 - DNA, 75 bp, synthetic construct
  source 1..75: mol_type = other DNA
accggctgaccggactgattgagtcgctgtcaccgtcagggcgtcggcgactgagtgcagaactggcgaaacgtc

SEQ ID NO: 541126 - DNA, 75 bp, synthetic construct
  source 1..75: mol_type = other DNA
ttgcgccagtggtaagaggaatagctcgaactcaagcccgaattgaagtacgtcaaaatgggtatctgatacata

SEQ ID NO: 541127 - DNA, 75 bp, synthetic construct
  source 1..75: mol_type = other DNA
ttgtagtgagtatgccttcgcaactcttcactatggcgcgttcttttaaagctgtagctaatggcaaaatttata

SEQ ID NO: 541128 - DNA, 75 bp, synthetic construct
  source 1..75: mol_type = other DNA
ccgtgcaccacgcgtgcgcgaacaacccacctgtacctctgcgcccagcgcggcgtgcggttggcgcttgccagc

SEQ ID NO: 541129 - DNA, 75 bp, synthetic construct
  source 1..75: mol_type = other DNA
aatccgttctatcatcaatatctttgtgtcccagatggtaaaggggactatacttgtggtggccaagaccaacgg

SEQ ID NO: 541130 - DNA, 75 bp, synthetic construct
  source 1..75: mol_type = other DNA
ggcaaagagcgcatcagctttgacagcgataacagcaccatggaaaaacgcgtgcgcgaagttaccctgaagctg

SEQ ID NO: 541131 - DNA, 75 bp, synthetic construct
  source 1..75: mol_type = other DNA
attgttcaaccatcggttcatgtaactggttagcaagtggatttaataggtatgaatgctctgttttcgtaacaa

SEQ ID NO: 541132 - DNA, 75 bp, synthetic construct
  source 1..75: mol_type = other DNA
tgctaaccatgacgaacttccttatgaaagagagcctatggaatctactaggaagtttttaattgaccctaaaac

SEQ ID NO: 541133 - DNA, 75 bp, synthetic construct
  source 1..75: mol_type = other DNA
tagttcattcgtcaaaggggattcatgcaaagtatgaagtagaagtatttattgaaagtatcagagcacatattc

SEQ ID NO: 541134 - DNA, 75 bp, synthetic construct
  source 1..75: mol_type = other DNA
tttaaatatatatcccaacaagagaaggatgtcgtcctaaaggtctataaatcagtaagtaaaataattagtggg

SEQ ID NO: 541135 - DNA, 75 bp, synthetic construct
  source 1..75: mol_type = other DNA
ttaacagagttatcagaagtggtaagtgcgaagaaattacttttaacgttggggatgaaaatgtaataacaaata

SEQ ID NO: 541136 - DNA, 75 bp, synthetic construct
  source 1..75: mol_type = other DNA
tcttggcctcggttacctagttcagggctggtataccggaaaacccgaaacaatatctgcgatgaatattcaggg

SEQ ID NO: 541137 - DNA, 75 bp, synthetic construct
  source 1..75: mol_type = other DNA
gtatccacattgagcaacagggcagcggtgaaattgcactggtatttttgcattattatggcggttcatcccgta

SEQ ID NO: 541138 - DNA, 75 bp, synthetic construct
  source 1..75: mol_type = other DNA
taggacgtcctcctaaagccttatttactgccgcttgtggattactggaaggcgttctgcgctatatgagccaat

SEQ ID NO: 541139 - DNA, 75 bp, synthetic construct
  source 1..75: mol_type = other DNA
tcgtgaacgtctcaataaagccagtaggcatgaaaaatttgcaatactggatgaattagaaatcatgaaccgcga

SEQ ID NO: 541140 - DNA, 75 bp, synthetic construct
  source 1..75: mol_type = other DNA
ggatgggcctcttctcaggcatctggcgcattgacagactggttaagccgcttcggtaccgcaagaatcacgctg

SEQ ID NO: 541141 - DNA, 75 bp, synthetic construct
  source 1..75: mol_type = other DNA
cctgttcctctattacgggagccgggtcgctcagccacttcgtgttcgccgttttattgaccttgctgttgagcg

SEQ ID NO: 541142 - DNA, 75 bp, synthetic construct
  source 1..75: mol_type = other DNA
agaatgggctagtagggtttgcgacagtatcacagacaaggaaagggaaaatctgaaggcattaatatgtagcaa

SEQ ID NO: 541143 - DNA, 75 bp, synthetic construct
  source 1..75: mol_type = other DNA
ttgttcgtattgtggaaaccggtagtatgggcattgcggcgcttgatctcggtatcggtgtctcagcacttagtc

SEQ ID NO: 541144 - DNA, 75 bp, synthetic construct
  source 1..75: mol_type = other DNA
gcgtgatacttacaaaagtcatgcgtaaacttgttgaaatcggccattggccgggcgcaaccatttacgctccct

SEQ ID NO: 541145 - DNA, 75 bp, synthetic construct
  source 1..75: mol_type = other DNA
agaaagcgtttaactagtgctatggcttctgactatcgtcaactcgggctcagcagtgagccagcaaatttttgg

SEQ ID NO: 541146 - DNA, 75 bp, synthetic construct
  source 1..75: mol_type = other DNA
tttacatttgcaatgaacgaaactaaatgccgtaaaccaactatcgaagttattgcacaaggttatagtactggc

SEQ ID NO: 541147 - DNA, 75 bp, synthetic construct
  source 1..75: mol_type = other DNA
tatacctttgcaatgaacgaaacaaaatgccgtaaacctactatcgaagttattgcacaaggttatagtacaggc

SEQ ID NO: 541148 - DNA, 75 bp, synthetic construct
  source 1..75: mol_type = other DNA
gccaagctcaggccacggcttgcgcggcctactggaggctatttgtcaggaacacgggctgaaggttgatatcgc

SEQ ID NO: 541149 - DNA, 75 bp, synthetic construct
  source 1..75: mol_type = other DNA
gtgtgcgaacgtcagcaccgctacccgcatctcacccttgaatcactggaggcggccatcgccgctgagctggaa

SEQ ID NO: 541150 - DNA, 75 bp, synthetic construct
  source 1..75: mol_type = other DNA
gataacacggtgttaataaaaggttttcatgatgttattcatgttagcttttgcagagacacgcgacttatagaa

SEQ ID NO: 541151 - DNA, 75 bp, synthetic construct
  source 1..75: mol_type = other DNA
tcagaaatgcccattatctcgaaaatggtgcggttgactgcgaggtgttatttgaaggtgaaacggaattcgtcc

SEQ ID NO: 541152 - DNA, 75 bp, synthetic construct
  source 1..75: mol_type = other DNA
ggatctgaatatggcaaaactcatcagcagtcatgaccatatcagcgcctgtttcccgctggataagtacccgcg

SEQ ID NO: 541153 - DNA, 75 bp, synthetic construct
  source 1..75: mol_type = other DNA
ggatctgaatatggcaaaactcatcagcagtcatgaccatatcagcgcctgtttcccgctggacaggtatccgcg

SEQ ID NO: 541154 - DNA, 75 bp, synthetic construct
  source 1..75: mol_type = other DNA
gatgcgacacgacaacagcaatttgcgcgcctcttttgaacgtgcaaaccgggttgccggtacgcagaaaaccac

SEQ ID NO: 541155 - DNA, 75 bp, synthetic construct
  source 1..75: mol_type = other DNA
gttcaggcgcaggttgatcgcaatgatgaaatttatcgccgtcagcgagagatgaaagaagcgttaaatacactg

SEQ ID NO: 541156 - DNA, 75 bp, synthetic construct
  source 1..75: mol_type = other DNA
cggcatttttactgcgcgttaaagagcattacacgcggctgttgccggattacccgcacttcgagattgcggaga

SEQ ID NO: 541157 - DNA, 75 bp, synthetic construct
  source 1..75: mol_type = other DNA
ttttctacttttttatttttctttcattgcttcctgttttaattaaagagggagctagagggaatggcaaatatt

SEQ ID NO: 541158 - DNA, 75 bp, synthetic construct
  source 1..75: mol_type = other DNA
gcgcaggctgttgttgaacgcaatgacgagatttatcgccgtcagcgagagaagaaagaagcgttagacactctg

SEQ ID NO: 541159 - DNA, 75 bp, synthetic construct
  source 1..75: mol_type = other DNA
gtctttatccggtggtgatggcatcgaaatccgacacagcacgggacgtcatgacgtggggtgatgctgttaatc

SEQ ID NO: 541160 - DNA, 75 bp, synthetic construct
  source 1..75: mol_type = other DNA
atgaaatttatcgccgtcagcgagagatgaaagaagcgttaaatacactgaaggatctgagctcaatcagaaagc

SEQ ID NO: 541161 - DNA, 75 bp, synthetic construct
  source 1..75: mol_type = other DNA
atgttttccctgttcggcaaagtttggcaacttcattgtgtttattatattttttgatttataaggaacataaaa

SEQ ID NO: 541162 - DNA, 75 bp, synthetic construct
  source 1..75: mol_type = other DNA
gaactgtctatacagtggactcattaacttctgattcttcagggacaagctccagtcaaacaattccttttaaag

SEQ ID NO: 541163 - DNA, 75 bp, synthetic construct
  source 1..75: mol_type = other DNA
aactgaggcggtggacgtattccgtctgaacaaacattctgtgtcggcagaacctcgcggagcttgtgaaccagt

SEQ ID NO: 541164 - DNA, 75 bp, synthetic construct
  source 1..75: mol_type = other DNA
ccggacattgcgaattccctgcatgtggacggacggtttttgtaaacagagcaatatgcgttttcaccggggggg

SEQ ID NO: 541165 - DNA, 75 bp, synthetic construct
  source 1..75: mol_type = other DNA
ctgtggagcgaaggtgttttgctctcccctcagcagtttcagcagcagactgaatgggagtcttttcgcagtgcc

SEQ ID NO: 541166 - DNA, 75 bp, synthetic construct
  source 1..75: mol_type = other DNA
actttcatacatttttgatgatctttctggtatcgttagttcttattagtgcaaaaataaagtcgaatggcctgt

SEQ ID NO: 541167 - DNA, 75 bp, synthetic construct
  source 1..75: mol_type = other DNA
agggtggtaaagctgacgcagcagcagcagcacaggcacttgatgatcttggaatcacaaccaacgactacaaag

SEQ ID NO: 541168 - DNA, 75 bp, synthetic construct
  source 1..75: mol_type = other DNA
agcagaaaaaagcggcgctggataaatacagacaattgggtgtattggatgagcagcagtaccagaacacgttaa

SEQ ID NO: 541169 - DNA, 75 bp, synthetic construct
  source 1..75: mol_type = other DNA
atgagtggaaatctcggaagcatatactatgaggtagacgcccggactgggaaactccttgccgcgcaacagcag

SEQ ID NO: 541170 - DNA, 75 bp, synthetic construct
  source 1..75: mol_type = other DNA
tcagccggatacacaggcgcagatggcgacgctggctaaatccgtgatgtatgtcggcgaggaatacaacctgac

SEQ ID NO: 541171 - DNA, 75 bp, synthetic construct
  source 1..75: mol_type = other DNA
gaacagcagtaccagaacacgctaaccgccatccagaaaaccgcgtcaatgcgccgccagcaaatcatcaaagac

SEQ ID NO: 541172 - DNA, 75 bp, synthetic construct
  source 1..75: mol_type = other DNA
gcaatgctggaagaccaactaaaccgactgaaaggcgctatcagtgacgcagcaacagaagccagaaacgccaac

SEQ ID NO: 541173 - DNA, 75 bp, synthetic construct
  source 1..75: mol_type = other DNA
tgccattttctccggacattgcgaattcccggcacgtggacggacggtttttgtaaacagagcaatatgcgtttt

SEQ ID NO: 541174 - DNA, 75 bp, synthetic construct
  source 1..75: mol_type = other DNA
ggccacggctggctgacagaaatcagccacctgagcgaaggccaccgtgtcgctgtccactacggctacgacgat

SEQ ID NO: 541175 - DNA, 75 bp, synthetic construct
  source 1..75: mol_type = other DNA
cccggcaggacgagtgcgtgaacgtgtaactccgttaacaacgtcaggaacagcaacgctcaatggaacaacagt

SEQ ID NO: 541176 - DNA, 75 bp, synthetic construct
  source 1..75: mol_type = other DNA
ccactacgacagccagcaccgcctggtgttctacacgcggatacagcatggcgagccactggtcgagagccgcta

SEQ ID NO: 541177 - DNA, 75 bp, synthetic construct
  source 1..75: mol_type = other DNA
acggggcaaatggggctgtccaggttgcaaccggcaataccggtgagaagttcgattatctcagtttcatgatgt

SEQ ID NO: 541178 - DNA, 75 bp, synthetic construct
  source 1..75: mol_type = other DNA
gtggagttaccagtctcttaccttacccagcagatgttttttcaacaccaaaacgtttagcgatacgacgtgcgc

SEQ ID NO: 541179 - DNA, 75 bp, synthetic construct
  source 1..75: mol_type = other DNA
gagaacccgcatcatgtgtatcagccgtaccgtctgccagggcagcagcatgatgaggaatcagggctgtactat

SEQ ID NO: 541180 - DNA, 75 bp, synthetic construct
  source 1..75: mol_type = other DNA
agggcggctttgacgggcggacgcaacgttatcattatgacctgaccggaaaactcacgcagagtgaagatgagg

SEQ ID NO: 541181 - DNA, 75 bp, synthetic construct
  source 1..75: mol_type = other DNA
attttttccttgcttaataacatcgtccttagtgatttctcgaccacattcggcacaactaacgccaacgaaatt

SEQ ID NO: 541182 - DNA, 75 bp, synthetic construct
  source 1..75: mol_type = other DNA
aaccgggtcgccaacggcatcacccgcggcaccggacagatagcgcagatcgttgagtcggaaaaatggatcaac

SEQ ID NO: 541183 - DNA, 75 bp, synthetic construct
  source 1..75: mol_type = other DNA
acggtatacgagccgggaagcttcacaccgctcatccgcatcgaaacagacaacggcgagcgggagaaaacgcag

SEQ ID NO: 541184 - DNA, 75 bp, synthetic construct
  source 1..75: mol_type = other DNA
tcggtgaaagacgcacagggccgtgaaacgcggtatgaatacaacgccgcaggcgacctgactgccgttatcacc

SEQ ID NO: 541185 - DNA, 75 bp, synthetic construct
  source 1..75: mol_type = other DNA
cgctaccgctacgacgatacggggcgggtggtggagcaactgaacccggcagggttaagctaccgctatctttat

SEQ ID NO: 541186 - DNA, 75 bp, synthetic construct
  source 1..75: mol_type = other DNA
atccaaacgccaggccgcagaagctgcccgtaaggcgaaacaggaagaggcggaagcacaacgcaaggccaaaca

SEQ ID NO: 541187 - DNA, 75 bp, synthetic construct
  source 1..75: mol_type = other DNA
tggcggttgataccaataacgccacgctgattaactcaggtaaagggagttctgtcgggattgaagcggggctcg

SEQ ID NO: 541188 - DNA, 75 bp, synthetic construct
  source 1..75: mol_type = other DNA
cgcggttaacgatatcaacaaccgtggcaacattgtcagtgatgttgacctgaacgtgacaaccaaaggcaacct

SEQ ID NO: 541189 - DNA, 75 bp, synthetic construct
  source 1..75: mol_type = other DNA
gttatgataatccgcacagtgaattaccctctgcaactgaagatgcgacgggtagccgcaagcagatgacgtgga

SEQ ID NO: 541190 - DNA, 75 bp, synthetic construct
  source 1..75: mol_type = other DNA
tggtcgcctggaagacaataccgccacgggcgtgattgcgtctgacaaaaacctggatctgaacgttgataacag

SEQ ID NO: 541191 - DNA, 75 bp, synthetic construct
  source 1..75: mol_type = other DNA
ggaaggatatttctgctggcggcgacctgacgatgaacaccaatcgccatgtgaccaacaactccaacagcaata

SEQ ID NO: 541192 - DNA, 75 bp, synthetic construct
  source 1..75: mol_type = other DNA
agtctggtcagcaccgagaaaggtgtaggggttcgcaacctcggcgttatcgcaggtggggttaatggtgtcagc

SEQ ID NO: 541193 - DNA, 75 bp, synthetic construct
  source 1..75: mol_type = other DNA
gcggactcaccggtaccattacgacagtcagcaccggctggtgcactacacgcggacacaatatgaagagccgct

SEQ ID NO: 541194 - DNA, 75 bp, synthetic construct
  source 1..75: mol_type = other DNA
gcggtagcattgttcagggttcagccggggtgcgcattggtgcccccaccggcgtggcctgttcggtgtgccccg

SEQ ID NO: 541195 - DNA, 75 bp, synthetic construct
  source 1..75: mol_type = other DNA
cccggcaggtaaccgcctgcccgacccggagctgcacccggacagcaccctcagcatgtggccggataaccgtat

SEQ ID NO: 541196 - DNA, 75 bp, synthetic construct
  source 1..75: mol_type = other DNA
aaaagaccttggtaattggataacatatgggccatctgggcaccccatttctaatatgcaaggtacgccagaaaa

SEQ ID NO: 541197 - DNA, 75 bp, synthetic construct
  source 1..75: mol_type = other DNA
cccggcggagtgacgtccggccatccggtcaatcccctgctcggtgcaaaggtccttcccggtgaaaccgacatc

SEQ ID NO: 541198 - DNA, 75 bp, synthetic construct
  source 1..75: mol_type = other DNA
agcagtccggcggcgaagacggtggcagtgtggtgttcccgccggtgctggtgcagatgctcgaccggctggaaa

SEQ ID NO: 541199 - DNA, 75 bp, synthetic construct
  source 1..75: mol_type = other DNA
atgaataaaaccataatggcagctatccgggcgcatgcactggatgaatccccgcgcgagagctgcggattcgtt

SEQ ID NO: 541200 - DNA, 75 bp, synthetic construct
  source 1..75: mol_type = other DNA
taaaatgccagatgaaaatctgaatgaaaaaaatagaacgcaaaaatattcaggaaaaattggtttgtctgttga

SEQ ID NO: 541201 - DNA, 75 bp, synthetic construct
  source 1..75: mol_type = other DNA
atgaatcagttaacggcttacaccttgcgcctgggcgataactgtctggtgctctcccagcggttgggggaatgg

SEQ ID NO: 541202 - DNA, 75 bp, synthetic construct
  source 1..75: mol_type = other DNA
cctcgatttattaggtcaggcacgcaacttcttatcgtatgccgctgaattagcgggagaaggcgatgaagatac

SEQ ID NO: 541203 - DNA, 75 bp, synthetic construct
  source 1..75: mol_type = other DNA
gagcagcagtaccagaacacgttaaccgccatccagaaaaccgcgtcaatgcgccgccagcaaatcatcaaagat

SEQ ID NO: 541204 - DNA, 75 bp, synthetic construct
  source 1..75: mol_type = other DNA
ttgcagcactgcgtgacctgaaagaacaggcaagccaggcgcagggggaaatgtcatcattctggcgcagcttgc

SEQ ID NO: 541205 - DNA, 75 bp, synthetic construct
  source 1..75: mol_type = other DNA
ttacagataaatttgctactctgactaaaattcaagatgaaaatctgaatgaaaaaaatagaacgcaaaattacg

SEQ ID NO: 541206 - DNA, 75 bp, synthetic construct
  source 1..75: mol_type = other DNA
ggggcgttactttcgggtggggcggcgacttttgatgcagtcacgacggctatggcgtctgctgcccctgctctt

SEQ ID NO: 541207 - DNA, 75 bp, synthetic construct
  source 1..75: mol_type = other DNA
tgcaactgacttcagtgacatatccggatggtttacgcagcagccggaaatatgaccgtcagggccgactggcag

SEQ ID NO: 541208 - DNA, 75 bp, synthetic construct
  source 1..75: mol_type = other DNA
aggttgaatccagtaagtggaaccacgcggggatcattaccgaggaaggtgagctgcttcaccatctgtacgggc

SEQ ID NO: 541209 - DNA, 75 bp, synthetic construct
  source 1..75: mol_type = other DNA
taccattacgacagccagcaccgtctggtgttctacacgcggatacagcacggcgaaccacaggtggagagccgc

SEQ ID NO: 541210 - DNA, 75 bp, synthetic construct
  source 1..75: mol_type = other DNA
agcgagtatgatgaggcggggaggctgaaggcgcagacggatgcggtggggcggcggacggagtaccggctgcat

SEQ ID NO: 541211 - DNA, 75 bp, synthetic construct
  source 1..75: mol_type = other DNA
ctaccggcggagctggcggtgatgctggggaggctggagcgggaactgcggcagggcagcgtgagtgaagaaagc

SEQ ID NO: 541212 - DNA, 75 bp, synthetic construct
  source 1..75: mol_type = other DNA
ttgggttgagaggtggatggaatatgtatcagtatccgttgaatcccatacaagtgatagacccaatggggttag

SEQ ID NO: 541213 - DNA, 75 bp, synthetic construct
  source 1..75: mol_type = other DNA
accgtggactgccgcaggcgctcatcagcccggaaggggaaacggcgtggtgcggggagtatgacgagtggggga

SEQ ID NO: 541214 - DNA, 75 bp, synthetic construct
  source 1..75: mol_type = other DNA
acatgcggatgaaataaaaaatgtgaaagcatcgttgaaaaacacacttattgatgttaaaaaaagatgcatgcc

SEQ ID NO: 541215 - DNA, 75 bp, synthetic construct
  source 1..75: mol_type = other DNA
atccagacggtataccagccggggagcttcacgccgctcctgagaatcgaaacagagaatggcgaacaggcgaag

SEQ ID NO: 541216 - DNA, 75 bp, synthetic construct
  source 1..75: mol_type = other DNA
gcaggggcgggagacccgttatgagtacagtaccgcaggcgacctcaccgctatcattgccccggacggtagccg

SEQ ID NO: 541217 - DNA, 75 bp, synthetic construct
  source 1..75: mol_type = other DNA
gtacctggattgattgttgcaaacagcattactaacagtgcttaccagttcggttatgatatggatgctattgtt

SEQ ID NO: 541218 - DNA, 75 bp, synthetic construct
  source 1..75: mol_type = other DNA
tgctttttccagcgtgtttggaaatgatgattcatcaaaagagaatccaaatgtcgggaaggatttgacggagga

SEQ ID NO: 541219 - DNA, 75 bp, synthetic construct
  source 1..75: mol_type = other DNA
gtatccactgaacccggtgcaacggctggatccgctgggattaagtgcggcgttgggcgcaggagcattaactgc

SEQ ID NO: 541220 - DNA, 75 bp, synthetic construct
  source 1..75: mol_type = other DNA
gtactataaccggaaccggtactatgatccgttgcaggggaggtatatcacccaggacccgatagggctgatggg

SEQ ID NO: 541221 - DNA, 75 bp, synthetic construct
  source 1..75: mol_type = other DNA
acgcagcacagctcgcagccgttaagcgcgctctggcaggtgctgccggaagatgttcgcctgagtccgcatgcg

SEQ ID NO: 541222 - DNA, 75 bp, synthetic construct
  source 1..75: mol_type = other DNA
gcgcgcgggagcggtgagtgcggagagtgaggcatggcttgcgcagtgcgggctgacggcggagcagatggccgc

SEQ ID NO: 541223 - DNA, 75 bp, synthetic construct
  source 1..75: mol_type = other DNA
tgacacacgacccggcatacccggatgaacagccgactgcgccgctggcgcgctacacgtacacggccagcggag

SEQ ID NO: 541224 - DNA, 75 bp, synthetic construct
  source 1..75: mol_type = other DNA
taacaacaattaacgaagagtattgtattcctgattatattatacataaaatggcggggttattcccacatgaac

SEQ ID NO: 541225 - DNA, 75 bp, synthetic construct
  source 1..75: mol_type = other DNA
acgcggatacagcacggcgaaccacaggtggagagccggtacctctatgacccgctgggccgccggacgggaaaa

SEQ ID NO: 541226 - DNA, 75 bp, synthetic construct
  source 1..75: mol_type = other DNA
ggccggacggcaggacggtacggtatggctataacagccagcggcaggtgacgtcggtgacgtacccggacgggc

SEQ ID NO: 541227 - DNA, 75 bp, synthetic construct
  source 1..75: mol_type = other DNA
gcactatgcggatgccattcgttataatgctcgaacgcctctgcaaggttctttgctgccgttaacccgtctggt

SEQ ID NO: 541228 - DNA, 75 bp, synthetic construct
  source 1..75: mol_type = other DNA
ggcagggtgacatgacccgcaagggactggatattgtgcagggttcagcaggggtgctgataggtgcgccgacgg

SEQ ID NO: 541229 - DNA, 75 bp, synthetic construct
  source 1..75: mol_type = other DNA
tcgggcggacgctgactttccaccgggcggcggagggtgacgtggcgggcgcggtgacgggggtgacggacggcg

SEQ ID NO: 541230 - DNA, 75 bp, synthetic construct
  source 1..75: mol_type = other DNA
agcacatacaccctcacagggcagctacagagcaggcacctgaacctcccgcagcttgaccgggactacgactgg

SEQ ID NO: 541231 - DNA, 75 bp, synthetic construct
  source 1..75: mol_type = other DNA
aaattaaatttaatttatctgaaacagaacttagtgaagtttcaggttatttttgcggaagaacaaagaaatcct

SEQ ID NO: 541232 - DNA, 75 bp, synthetic construct
  source 1..75: mol_type = other DNA
tgaacatcagaaaaagaatgaaattaatgttatagaactatggggacatgaagaagatattataaataaactgat

SEQ ID NO: 541233 - DNA, 75 bp, synthetic construct
  source 1..75: mol_type = other DNA
aagaatggtctgttcagaaattacaagaccatcttaataaagacgatattcaaaaaaaaaatatgcaaaatgaga

SEQ ID NO: 541234 - DNA, 75 bp, synthetic construct
  source 1..75: mol_type = other DNA
tcgtttcaacggaaaagaatccagagtcagtcttggcgcatatccgctggtctcactggcagaagccaggcagca

SEQ ID NO: 541235 - DNA, 75 bp, synthetic construct
  source 1..75: mol_type = other DNA
tgaggataagggctttctggaagtcgcgtcccgcacgcggcagcaactcagcaacatcatgcgctatgccgtata

SEQ ID NO: 541236 - DNA, 75 bp, synthetic construct
  source 1..75: mol_type = other DNA
ctttaaaagcttagatataacaaaaaataatggagataaaattaactctaatgaatttccttttgctggtgttat

SEQ ID NO: 541237 - DNA, 75 bp, synthetic construct
  source 1..75: mol_type = other DNA
atacggcaggctggcggagaagacggaccgcatcccggaaggggttatccggatgcacgacgagcggacccacca

SEQ ID NO: 541238 - DNA, 75 bp, synthetic construct
  source 1..75: mol_type = other DNA
aagtgaaaccggcaatatctgcagagacgactgtgccagcagaatacgcgcagcattccggagtcgatgacgccg

SEQ ID NO: 541239 - DNA, 75 bp, synthetic construct
  source 1..75: mol_type = other DNA
catgccagtccgtccatcattgattatctgccgtgggtggaattcctggatgaagaggagtgtcttctgcttgag

SEQ ID NO: 541240 - DNA, 75 bp, synthetic construct
  source 1..75: mol_type = other DNA
atggcggagtggtgggtgtgtctgacgatgccgccggaagaggtgaacaacattgcccgttttaaatccctgacg

SEQ ID NO: 541241 - DNA, 75 bp, synthetic construct
  source 1..75: mol_type = other DNA
aactcgatgccgccttcaaggtcgcggaaaaaatcgaccgggcgcgcggcatcaactctttgccgctggacgcat

SEQ ID NO: 541242 - DNA, 75 bp, synthetic construct
  source 1..75: mol_type = other DNA
aggccagcgacacaggccgatgagcaggcgctttacgacgtttcgccgtcctttgccgacctgctgccgtgggtg

SEQ ID NO: 541243 - DNA, 75 bp, synthetic construct
  source 1..75: mol_type = other DNA
caatatggcggagtggtgggtgtgtctgacgatgccgcagaaagaggtggaggcaatcgcccgctttaagacgct

SEQ ID NO: 541244 - DNA, 75 bp, synthetic construct
  source 1..75: mol_type = other DNA
agaacggcgtctggtggctggataaccgcccgcataaagtggtggtcgtcgaccgcctgcgcaaagcgccgcccc

SEQ ID NO: 541245 - DNA, 75 bp, synthetic construct
  source 1..75: mol_type = other DNA
atcaattacacattgatgtggccgcagatcctcttacggctctgtccggggaagataaatggaatattgggggcg

SEQ ID NO: 541246 - DNA, 75 bp, synthetic construct
  source 1..75: mol_type = other DNA
tactaataagttagaagctcaatacatcaaaaatcaactgggaatggacgccagtaaatattcactgcaatattc

SEQ ID NO: 541247 - DNA, 75 bp, synthetic construct
  source 1..75: mol_type = other DNA
aacggccaccttttacttcttgggccaaccggagcgggcaaatccgccaccctgaatgcgaaaatagcgcaactg

SEQ ID NO: 541248 - DNA, 75 bp, synthetic construct
  source 1..75: mol_type = other DNA
atatcgccggactgttaccggtgtacggacgggaaaccggcaccgggcatccgggaatttgctacttcaatcgcg

SEQ ID NO: 541249 - DNA, 75 bp, synthetic construct
  source 1..75: mol_type = other DNA
tttgatctgctgccatcggataccatcatgaacctgacggtggtggtgtatccgcaggacaaactggaacagcac

SEQ ID NO: 541250 - DNA, 75 bp, synthetic construct
  source 1..75: mol_type = other DNA
ccctgaccatggtctcgatgaccaacatgatcaacaacatcgcggagcgtgaccagttcctgggccgggatattg

SEQ ID NO: 541251 - DNA, 75 bp, synthetic construct
  source 1..75: mol_type = other DNA
aagagatctcgcgcaacggtaacattacgcgctggttttatgactccccccgcagtagcctgcccggcgcggtgg

SEQ ID NO: 541252 - DNA, 75 bp, synthetic construct
  source 1..75: mol_type = other DNA
acgatctttatcggccaaatgcaaaagtaggaagtggaagcacagcagatgctgttcgttatgaattggccacag

SEQ ID NO: 541253 - DNA, 75 bp, synthetic construct
  source 1..75: mol_type = other DNA
gacaaccaatgcactatccttttaagcatgccaaaaatgataatagcagaagattatcatatgaaaatagtagtg

SEQ ID NO: 541254 - DNA, 75 bp, synthetic construct
  source 1..75: mol_type = other DNA
gtgggacggcgacaggctgacgacggtacagaccgacaccacgcgtatccagacggtataccagccggggagctt

SEQ ID NO: 541255 - DNA, 75 bp, synthetic construct
  source 1..75: mol_type = other DNA
tgtatgaccgcagcgggacgcaggtgcgcgggtttgcttatgatgcggagcacgccgggcggatggtggcgcacc

SEQ ID NO: 541256 - DNA, 75 bp, synthetic construct
  source 1..75: mol_type = other DNA
ggtccgtctgagtccacacacctatatgatggctgtcagcacaaccgggcagtggctgatactcggctggccgga

SEQ ID NO: 541257 - DNA, 75 bp, synthetic construct
  source 1..75: mol_type = other DNA
ttgcgaccggatccaaaaagtttatcgccaacaattcagcgtgggcgcagcatgccattacaggtgataaggcgc

SEQ ID NO: 541258 - DNA, 75 bp, synthetic construct
  source 1..75: mol_type = other DNA
tacaggaaatctgccgtcaggcagatgtggagccggggatattcacggtaatccacacatgggggcgtgaccagc

SEQ ID NO: 541259 - DNA, 75 bp, synthetic construct
  source 1..75: mol_type = other DNA
gtggtgctggagtcggttatcaggttgccagtgtggttggcggtggatttacaccttttattgccgctgcactca

SEQ ID NO: 541260 - DNA, 75 bp, synthetic construct
  source 1..75: mol_type = other DNA
atactctcgtctataaaacctcatgcagcaactgtcattattcaaaaccatagtggcactggtgataatattggt

SEQ ID NO: 541261 - DNA, 75 bp, synthetic construct
  source 1..75: mol_type = other DNA
tcagaccgttaacgccagtgcgtttcggggcaaatcccaaccgttttaccagccaggcagcagcgaggatcaggg

SEQ ID NO: 541262 - DNA, 75 bp, synthetic construct
  source 1..75: mol_type = other DNA
cttggggaaattcacgccgtcaccggtagtggaaaattactttgatgaaaacgataactacctcggcagtaatta

SEQ ID NO: 541263 - DNA, 75 bp, synthetic construct
  source 1..75: mol_type = other DNA
actgcaggcgaatgtggcattcgacaaagcgcagctcaattgccagaacatggcgaaacgcatgatggagttcac

SEQ ID NO: 541264 - DNA, 75 bp, synthetic construct
  source 1..75: mol_type = other DNA
ttactaacacaagcgaaaactttactgatgttggtaaagcgcttgtttatctaggtaaagaacaagctgttactg

SEQ ID NO: 541265 - DNA, 75 bp, synthetic construct
  source 1..75: mol_type = other DNA
cagtctgaaatcgttcggattctggataaatttactgagcttacagctgagcttacagctgaacttaccatgcgt

SEQ ID NO: 541266 - DNA, 75 bp, synthetic construct
  source 1..75: mol_type = other DNA
gatgtcatggttcatgtctacggtccgcatattttccatacggataatgaaaccgtctggaactatgtcaatcag

SEQ ID NO: 541267 - DNA, 75 bp, synthetic construct
  source 1..75: mol_type = other DNA
aggattttattgagtttaaaaaaagaaggtggagtacctgctgtaaataaaattgacttggctaaattaataatt

SEQ ID NO: 541268 - DNA, 75 bp, synthetic construct
  source 1..75: mol_type = other DNA
gagttgcgccagaaacaatacgagtactatcgtgatttactgttcagtttcccgaaacctgaaactatcagtaat

SEQ ID NO: 541269 - DNA, 75 bp, synthetic construct
  source 1..75: mol_type = other DNA
gcggaaacggtattcgtggttacgttaaagaaaaaagtcatgatggggaacatctattaatagggcgacaaggtg

SEQ ID NO: 541270 - DNA, 75 bp, synthetic construct
  source 1..75: mol_type = other DNA
ttcagcaatctaagttgaaaggagtatataaactattggttgctggtgggacagcaaaatctttttctgataatg

SEQ ID NO: 541271 - DNA, 75 bp, synthetic construct
  source 1..75: mol_type = other DNA
aaagaatagcattatcaaaatatactaaggaaaaccaagttaaacaatttgaagagattataaaaaggtatattc

SEQ ID NO: 541272 - DNA, 75 bp, synthetic construct
  source 1..75: mol_type = other DNA
gttggcattatggcactaaagaaatcgttaaaaaattccacatgtatcatcgtgttgcgattgaatatagtggcg

SEQ ID NO: 541273 - DNA, 75 bp, synthetic construct
  source 1..75: mol_type = other DNA
aatcagttatgggcaattgaggatgaaaaaaattctatttacgtcacccctgatgaaatttctataagtatagac

SEQ ID NO: 541274 - DNA, 75 bp, synthetic construct
  source 1..75: mol_type = other DNA
gggaactgctgtggcagcatgagacgaaacacgcatacaacgagcaggggctggcaaaccgcgtcacgccggaca

SEQ ID NO: 541275 - DNA, 75 bp, synthetic construct
  source 1..75: mol_type = other DNA
atattatgttttacatttaggttattttcttttttagggtggttgatttgtattccaatatgtgtcttttctgag

SEQ ID NO: 541276 - DNA, 75 bp, synthetic construct
  source 1..75: mol_type = other DNA
gaagactttgggggaaatcaccgagataaacacagggcaaaaaccatctgagatacttgataaagcagcaacatt

SEQ ID NO: 541277 - DNA, 75 bp, synthetic construct
  source 1..75: mol_type = other DNA
ccggtgaaagtgtttatgaagcagcaaaccgcgaactcaaagaagaagtgggatttggcgcaagggatctgactt

SEQ ID NO: 541278 - DNA, 75 bp, synthetic construct
  source 1..75: mol_type = other DNA
gctgccgacgctgcgtcagcgcctgttccgctgtgtgagtatccgtgagaacgatgacggtacgtatgccatcac

SEQ ID NO: 541279 - DNA, 75 bp, synthetic construct
  source 1..75: mol_type = other DNA
cagtttacctggaaagcggtggctgatcgttcttgccaggcggtcaagactctgcgtgcgcatattgatattgca

SEQ ID NO: 541280 - DNA, 75 bp, synthetic construct
  source 1..75: mol_type = other DNA
aatacgatactgaatcctctattttcgactctttccatttttctggcatttcgttgaaaagcgatgagaatatgt

SEQ ID NO: 541281 - DNA, 75 bp, synthetic construct
  source 1..75: mol_type = other DNA
tatcgtcatgccttgagtggcaacatcctactatcggtctatttccagtctcctgtgatacttaagaagatataa

SEQ ID NO: 541282 - DNA, 75 bp, synthetic construct
  source 1..75: mol_type = other DNA
ttgattctacgattacggatttaggtaatgactccaacttattgatagtgttttatgttcagataatgcccgatg

SEQ ID NO: 541283 - DNA, 75 bp, synthetic construct
  source 1..75: mol_type = other DNA
aagaacctgtagctcaggcggtgaggtctatagggccaaacttagtcgttagcttattgctagatggtccccaaa

SEQ ID NO: 541284 - DNA, 75 bp, synthetic construct
  source 1..75: mol_type = other DNA
tggtgggagaatattgcgataggacgccgcaagcttacaacattgcatactaataatggtgtatcactatgtcct

SEQ ID NO: 541285 - DNA, 75 bp, synthetic construct
  source 1..75: mol_type = other DNA
cggcaccgatgtgcgagaaaaatcttgcctacgcgcacaaggtgaaggccgcactggaaaaaggcgcatcgccgg

SEQ ID NO: 541286 - DNA, 75 bp, synthetic construct
  source 1..75: mol_type = other DNA
acacttgaagtggacggcctgccaccggacgcgtttgcggtggtttcctttcatctcacccagtcactctcttca

SEQ ID NO: 541287 - DNA, 75 bp, synthetic construct
  source 1..75: mol_type = other DNA
gacgcttttgcggtggtttcctttcatctgaaccagtcactctcttcgctcttttccctcgatctctccctggtc

SEQ ID NO: 541288 - DNA, 75 bp, synthetic construct
  source 1..75: mol_type = other DNA
gttctatctgttacagcatttggaatgacacaaagatctactggtctaggctttgaacctagcactcaagttgcc

SEQ ID NO: 541289 - DNA, 75 bp, synthetic construct
  source 1..75: mol_type = other DNA
catcaccgttccggctggaaagttacgtttcagtctgttccggcaacggaaagaaaactttgaaatcgcaaaaag

SEQ ID NO: 541290 - DNA, 75 bp, synthetic construct
  source 1..75: mol_type = other DNA
aaaatacaaaggcagcttcccctatatctgtatccttgacgaagtcggtgcctactacacggaccgcattgctgt

SEQ ID NO: 541291 - DNA, 75 bp, synthetic construct
  source 1..75: mol_type = other DNA
atgcagagttcaatagggaaacacaagaggtaactttagtttttagtaaatacataatcccattgctatttcacc

SEQ ID NO: 541292 - DNA, 75 bp, synthetic construct
  source 1..75: mol_type = other DNA
acaaaacagggctttatcaatgaggcgataatacgcaattactatgatgttggtgaggataaagtaatcttcact

SEQ ID NO: 541293 - DNA, 75 bp, synthetic construct
  source 1..75: mol_type = other DNA
ggtttatggcaagtaagtggacgtagtgatgttgattatgagacaagagtatatcttgatgcttggtatgtaaaa

SEQ ID NO: 541294 - DNA, 75 bp, synthetic construct
  source 1..75: mol_type = other DNA
ctcagctatttaatgtattaaagggagaaatgagtcttgttggtccgaggccaattatcactgctgaattagaaa

SEQ ID NO: 541295 - DNA, 75 bp, synthetic construct
  source 1..75: mol_type = other DNA
catttttgctgttattgaaatggcagtgatagcatttgcaaaatggtatttctcacgctatgtttggttgttaac

SEQ ID NO: 541296 - DNA, 75 bp, synthetic construct
  source 1..75: mol_type = other DNA
aagaaatcgctcgcggagaattggtggagttaatggcagataaagtgttgccagtggaaatgccattcagtgccg

SEQ ID NO: 541297 - DNA, 75 bp, synthetic construct
  source 1..75: mol_type = other DNA
agcagattcgccagttagaggagagtttgggcgtgccgctgtttgaccgtagcgggcgaacgattcgtctcaccg

SEQ ID NO: 541298 - DNA, 75 bp, synthetic construct
  source 1..75: mol_type = other DNA
ggcagcaaggcttatactggatgaaaataatcatataaataaaataacaacaatggtgggaatgtccagtgcgtc

SEQ ID NO: 541299 - DNA, 75 bp, synthetic construct
  source 1..75: mol_type = other DNA
tttttgtgcagggcacaaactatctgtttccactaataacattgccatatttgattcgcatgttagggagtaact

SEQ ID NO: 541300 - DNA, 75 bp, synthetic construct
  source 1..75: mol_type = other DNA
gatgagttcattggttcgcaggatatcgtatttgaatcgacaacagaaaatacaggtgataaatcaggtgggtta

SEQ ID NO: 541301 - DNA, 75 bp, synthetic construct
  source 1..75: mol_type = other DNA
tcaattatatggttgaaacggtagagaaaacgccgcaactgaaaggtaagctgaccatcagccacgcctttgcgc

SEQ ID NO: 541302 - DNA, 75 bp, synthetic construct
  source 1..75: mol_type = other DNA
tcaaagtgaaatgcgaaacagctggttgcgtaattttatgattcagggttttcgttatgtttcagtaatccctac

SEQ ID NO: 541303 - DNA, 75 bp, synthetic construct
  source 1..75: mol_type = other DNA
tgcagagttgctagataaagatcctttggcaagacaagaatgggatgctacatttaagctcaaaaatgatcctcg

SEQ ID NO: 541304 - DNA, 75 bp, synthetic construct
  source 1..75: mol_type = other DNA
tgagtgaaatgattgctcaggcattacgtcagaaaattattgctggagagttactgcctggtgcccgcctctcgg

SEQ ID NO: 541305 - DNA, 75 bp, synthetic construct
  source 1..75: mol_type = other DNA
caatcctaaataagtttggattgtggttgcgagaaacatatattattggcaatgggaaaaatgcattagatgcct

SEQ ID NO: 541306 - DNA, 75 bp, synthetic construct
  source 1..75: mol_type = other DNA
atgacacaaccccatctgaaagcggtcgcgcgtttcgtgcgtgaccttctggactacgacgagcaactgatcaag

SEQ ID NO: 541307 - DNA, 75 bp, synthetic construct
  source 1..75: mol_type = other DNA
tatgtgctaatttttctaaattagggcgaacacctacaattgatgtaaaaatcataattgacccaatgtcaccag

SEQ ID NO: 541308 - DNA, 75 bp, synthetic construct
  source 1..75: mol_type = other DNA
ggtcatcaaccgttatatctccgttgaagccccccgactggagcgtctccgccgtcttgtccccaggacagtgca

SEQ ID NO: 541309 - DNA, 75 bp, synthetic construct
  source 1..75: mol_type = other DNA
ttgtcagcgcttctttaatattgtcggatttaattggttttgttattccattatatgtttcgattttttttattt

SEQ ID NO: 541310 - DNA, 75 bp, synthetic construct
  source 1..75: mol_type = other DNA
tgaaatacggaatcgttggctgagaagtttcatgattaaaggctatcgttatgtatcggttatacctactctgag

SEQ ID NO: 541311 - DNA, 75 bp, synthetic construct
  source 1..75: mol_type = other DNA
tcagagtgatgcaaggaacttttggttaagagagtttatgataaaagggtatcgctatgtttcagttatacctac

SEQ ID NO: 541312 - DNA, 75 bp, synthetic construct
  source 1..75: mol_type = other DNA
atggtatgtcaaaaattggtccatgtggaatgatttagtaatcctctttaaaactgttaacgttgtattaagaag

SEQ ID NO: 541313 - DNA, 75 bp, synthetic construct
  source 1..75: mol_type = other DNA
attgagggggatggtggtactcgagctggtgaaacaatagataatataccggtcatttctaacgactttgggtgg

SEQ ID NO: 541314 - DNA, 75 bp, synthetic construct
  source 1..75: mol_type = other DNA
cgcaattgtttaatgtcttaaagggagaaatgagtttagttgggccaagaccaataattactgctgagctcgaaa

SEQ ID NO: 541315 - DNA, 75 bp, synthetic construct
  source 1..75: mol_type = other DNA
tcagcaaggaggaacggtacctctgtttattgaccatgtctgcaacttagcagttcagcacgttggtagtaatga

SEQ ID NO: 541316 - DNA, 75 bp, synthetic construct
  source 1..75: mol_type = other DNA
tgcatttagaatgaagttccacactaataatggtggagcgaggctacctgcaggtgagtatacatcaatcatcaa

SEQ ID NO: 541317 - DNA, 75 bp, synthetic construct
  source 1..75: mol_type = other DNA
tatgttaaatggtagcaactatgattatatagatcggttatctcattatttagaaaggccagttactgaaacaga

SEQ ID NO: 541318 - DNA, 75 bp, synthetic construct
  source 1..75: mol_type = other DNA
accataaaacatgagataggacatattcttggtttgttacataataatgaaggtggttcatatttttcacatggt

SEQ ID NO: 541319 - DNA, 75 bp, synthetic construct
  source 1..75: mol_type = other DNA
aggagggtattcacttgctgccgccgagacggacaaacgattcaaatcgattgcaaccattagcatgtttaattc

SEQ ID NO: 541320 - DNA, 75 bp, synthetic construct
  source 1..75: mol_type = other DNA
ctggcgggccggaccgctggcgcactttattagcgaagagaactacgtctccggtgtgacgatagagcaactggt

SEQ ID NO: 541321 - DNA, 75 bp, synthetic construct
  source 1..75: mol_type = other DNA
ttccaggccgaaggtgattcttttcgtctcttttcaccgctgatggcggaagataacggcctgttactcgacgat

SEQ ID NO: 541322 - DNA, 75 bp, synthetic construct
  source 1..75: mol_type = other DNA
aacacaccgcgagctggctgcgcgtctggcctgatgaaatctacggcagcacggaaaccggcgtcatcgcctggc

SEQ ID NO: 541323 - DNA, 75 bp, synthetic construct
  source 1..75: mol_type = other DNA
tcttattcgttatggtgtcgggtgctaatgctgctactggtcctagtgtaaataatcagaggcttgatgtatcag

SEQ ID NO: 541324 - DNA, 75 bp, synthetic construct
  source 1..75: mol_type = other DNA
aagtgggcgacgagtctgcctgaggggctttactttaacatccaggggaacgcacatgcgaaagtaagccgggtt

SEQ ID NO: 541325 - DNA, 75 bp, synthetic construct
  source 1..75: mol_type = other DNA
ctcctatcgagttgcacattggcgatcatgtccagcggcatggtgctttatttgaggttatgcatattgttgaat

SEQ ID NO: 541326 - DNA, 75 bp, synthetic construct
  source 1..75: mol_type = other DNA
gaacaagaatagatataggttcatttaataggattgttatgaataactttgaaaagttaaaatcacggggagcaa

SEQ ID NO: 541327 - DNA, 75 bp, synthetic construct
  source 1..75: mol_type = other DNA
ttccactggtcgagatggttttgcacaaaggacgtaagccgcggatctcactcacgcgtgatacagaacatacct

SEQ ID NO: 541328 - DNA, 75 bp, synthetic construct
  source 1..75: mol_type = other DNA
ggcggctgggagtctatcgaaatggtgcgtaggtacgcacaccttgcacctaatcatttgacagagcacgcgagg

SEQ ID NO: 541329 - DNA, 75 bp, synthetic construct
  source 1..75: mol_type = other DNA
cagctgcagcagctcatccgcctgccgggtcagcagtatgatgaggagtccggcctgtattacaaccgccaccgc

SEQ ID NO: 541330 - DNA, 75 bp, synthetic construct
  source 1..75: mol_type = other DNA
atgagtaaaagaacaggcgaagaaaaaattaaaccagatacggggctgataaaactttcacctccccgcaaaatt

SEQ ID NO: 541331 - DNA, 75 bp, synthetic construct
  source 1..75: mol_type = other DNA
ggttgagcttggcaatgtgccgtttaaacagcaggagcaggtgctgttctggatttgcgatcgtctaccccgtcg

SEQ ID NO: 541332 - DNA, 75 bp, synthetic construct
  source 1..75: mol_type = other DNA
tgaaattggccgtaccgacatccggtggcttttccgggctgaaatcactgaatttgcaggtcttcgtgatgattg

SEQ ID NO: 541333 - DNA, 75 bp, synthetic construct
  source 1..75: mol_type = other DNA
gaagctgggaacaagtctataacgcgctgtacaagggcgttgtcgcaactgaaagcgttaggttttattgattat

SEQ ID NO: 541334 - DNA, 75 bp, synthetic construct
  source 1..75: mol_type = other DNA
agtcgtaccggcaaacatgttattgctcatgccgattatccagatgatgtttatgaatggcaaaatgaggtagcc

SEQ ID NO: 541335 - DNA, 75 bp, synthetic construct
  source 1..75: mol_type = other DNA
attaattgagacctctatggtcctcgccctctccgccatcgtcgtctccggcgttatgtattactaccaggctgc

SEQ ID NO: 541336 - DNA, 75 bp, synthetic construct
  source 1..75: mol_type = other DNA
cgaccatcgcggcctgccgctggcgcttgtcagcacggaaggggcaacagaatggtgcgcagaatacgatgaatg

SEQ ID NO: 541337 - DNA, 75 bp, synthetic construct
  source 1..75: mol_type = other DNA
tttacgctttttgtgaacgtggaggacaacgattaaattatatttttaaggggataaaagatggactgcttggac

SEQ ID NO: 541338 - DNA, 75 bp, synthetic construct
  source 1..75: mol_type = other DNA
atcaaaagattatatatcatcaatgttaaaagagtatgagtacgcttgctctctccggagtaatattgctgcatt

SEQ ID NO: 541339 - DNA, 75 bp, synthetic construct
  source 1..75: mol_type = other DNA
ttatcccattggtcggggaaaacgaaaatgcgttatttttcccaaccaaatccattgaactgctttttacacaga

SEQ ID NO: 541340 - DNA, 75 bp, synthetic construct
  source 1..75: mol_type = other DNA
gagccttacaacttgaaatcctcaatgcccttatagattgcgcgcctaactctttaaacaaggcacaggagcgag

SEQ ID NO: 541341 - DNA, 75 bp, synthetic construct
  source 1..75: mol_type = other DNA
atgggtaaaatctcccataaacttaaaaagatgggactcaatgcactagcgcgtcatcagcttaccgcaaaaatt

SEQ ID NO: 541342 - DNA, 75 bp, synthetic construct
  source 1..75: mol_type = other DNA
actcctgaaggcgatttacagcggatgtacaaatcttccattttcactttttattaataatgaacaattattaga

SEQ ID NO: 541343 - DNA, 75 bp, synthetic construct
  source 1..75: mol_type = other DNA
gtgcaattaagaacattgttggttggggttatcaagccagaaagcccggcgacagcagcggcaattcttgcctcc

SEQ ID NO: 541344 - DNA, 75 bp, synthetic construct
  source 1..75: mol_type = other DNA
ggctatctattacatgagtaaggaaaatacgctacaacaggccgtggggttgcccgatcagaaaacgcttaatat

SEQ ID NO: 541345 - DNA, 75 bp, synthetic construct
  source 1..75: mol_type = other DNA
gtcagtctggagcctcatcgtcttgccagcgtcattgctgccggagtggcagaggtttgtcatgctgtcgatgcc

SEQ ID NO: 541346 - DNA, 75 bp, synthetic construct
  source 1..75: mol_type = other DNA
atcgacaatcttattaaagggttactacaaactatgccatatgccagcaatataagtattgcggtattagatgat

SEQ ID NO: 541347 - DNA, 75 bp, synthetic construct
  source 1..75: mol_type = other DNA
ttgtggctgtcggtctaccgccggagtctatgagcctggatatcccacgtcttgtgctggatggtattgaagtgg

SEQ ID NO: 541348 - DNA, 75 bp, synthetic construct
  source 1..75: mol_type = other DNA
ctcgggtgtctatccggtgtgcttggcggacgcgcagacgcgatcatcatgcgcatcatggacattatgctgtcg

SEQ ID NO: 541349 - DNA, 75 bp, synthetic construct
  source 1..75: mol_type = other DNA
caagctactgacgagatgtcagcagcgttaacgcagtttatgaagaaaaaaatctacgaagaacaactggccaac

SEQ ID NO: 541350 - DNA, 75 bp, synthetic construct
  source 1..75: mol_type = other DNA
aaaagttattcacacttgtcaagagtcataaattcaaaaaaattattggaacataaatatggagaaaatgatgtc

SEQ ID NO: 541351 - DNA, 75 bp, synthetic construct
  source 1..75: mol_type = other DNA
gcgtccaaccaaccgggaagccgtgatgattgtgccgattgtggacgatcacctgattttgatccgcgaatacgc

SEQ ID NO: 541352 - DNA, 75 bp, synthetic construct
  source 1..75: mol_type = other DNA
gaacactattgtacaataataaaattactaaaaaaagaattatcacagatgatgtttcagaatgaacgtgaattc

SEQ ID NO: 541353 - DNA, 75 bp, synthetic construct
  source 1..75: mol_type = other DNA
gtccgggaatggtacgcttgcccccactgtatgaagcgggctgcaaagctgtatatcggcaagaaagacattggc

SEQ ID NO: 541354 - DNA, 75 bp, synthetic construct
  source 1..75: mol_type = other DNA
gtgagaggcagaacacgcagctataccaccgacctgccccgcatagggttgccattccttgcgcacatgcgtagc

SEQ ID NO: 541355 - DNA, 75 bp, synthetic construct
  source 1..75: mol_type = other DNA
acaagtggaatgagagcgagggtaaagcctactttaccggcgaaccgaccacggccgcgctgaaggtgtccttct

SEQ ID NO: 541356 - DNA, 75 bp, synthetic construct
  source 1..75: mol_type = other DNA
ggaattatttgatttgcgcctgcacgagcgagatgacgttttacaggccgtattcgacaaggcacatcaaaattt

SEQ ID NO: 541357 - DNA, 75 bp, synthetic construct
  source 1..75: mol_type = other DNA
tgccgggcgtgctggaaacttcactataaaagccagagtgccgacatactggacaggatgcgcatgaagatacgc

SEQ ID NO: 541358 - DNA, 75 bp, synthetic construct
  source 1..75: mol_type = other DNA
gtgagagacagaacgcgcagctatatcaccgacctgccccgtatagggttgccattccttgcgaacatgcgtagc

SEQ ID NO: 541359 - DNA, 75 bp, synthetic construct
  source 1..75: mol_type = other DNA
gctgatctaccaagtggagggcgatacgctctcggtactgcgtgttttacataccgccctgcaatggccaccagc

SEQ ID NO: 541360 - DNA, 75 bp, synthetic construct
  source 1..75: mol_type = other DNA
gaccgtctcatggcatgttgtctccgggcacgggaaaggcgatcggaaactcgaacaggtagacaaacattcggc

SEQ ID NO: 541361 - DNA, 75 bp, synthetic construct
  source 1..75: mol_type = other DNA
atgatgaaaaacgccgcaaaaacgataggaaaaaggctttacgggatcctgaatgccatgcggcaccgtgtctca

SEQ ID NO: 541362 - DNA, 75 bp, synthetic construct
  source 1..75: mol_type = other DNA
attccatatatatcatagtgttgcgattgaatgtggtggcgaaatttatgatattgataattaaaggattgttac

SEQ ID NO: 541363 - DNA, 75 bp, synthetic construct
  source 1..75: mol_type = other DNA
tgatagtgcgcaggaccttaattccggcgctcggcggcatgcttaccatgttgctggctaactacctgttgttct

SEQ ID NO: 541364 - DNA, 75 bp, synthetic construct
  source 1..75: mol_type = other DNA
gtgcgcctttatggacttaggcccggcggtcggcacggccaacctggcggctaaacatgccggtatggaagccgc

SEQ ID NO: 541365 - DNA, 75 bp, synthetic construct
  source 1..75: mol_type = other DNA
ttgaagactatcgacttattagtatttccaattgctgatattaaaaacttattcacacttgtgtttttttcttta

SEQ ID NO: 541366 - DNA, 75 bp, synthetic construct
  source 1..75: mol_type = other DNA
ttaaaactcattgattatttctttttccccaatgctattgcgagccttaatattttagttctattatccttttct

SEQ ID NO: 541367 - DNA, 75 bp, synthetic construct
  source 1..75: mol_type = other DNA
ggaacatggtatcacaatttatcaaaatgttagtgcaactaacaaacatagtctatttagcaaaaattattcctc

SEQ ID NO: 541368 - DNA, 75 bp, synthetic construct
  source 1..75: mol_type = other DNA
aacgataaacttcaggcctgcgagccgattataccagaggaagaagttacactctttccttatgatagtgatgtt

SEQ ID NO: 541369 - DNA, 75 bp, synthetic construct
  source 1..75: mol_type = other DNA
taatgacgtagagaaattagagttgctcaaacagatcaaagataagtttaaacctatcttaggtactgggatttt

SEQ ID NO: 541370 - DNA, 75 bp, synthetic construct
  source 1..75: mol_type = other DNA
gctttctatagcactccatttatatatttagtttttggtagtcaatggtttttaactgcggagattctgcgttgg

SEQ ID NO: 541371 - DNA, 75 bp, synthetic construct
  source 1..75: mol_type = other DNA
gccggggcagcagcatgatgaggaatcagggctgtactataaccggaaccggtactatgacccgctacaggggag

SEQ ID NO: 541372 - DNA, 75 bp, synthetic construct
  source 1..75: mol_type = other DNA
ggtggcaaaacgggtatggcgacgtgaacgggacctgacgggctggatgtcgctgtcacggaaaccgcaagtgac

SEQ ID NO: 541373 - DNA, 75 bp, synthetic construct
  source 1..75: mol_type = other DNA
tgtgtcgaatgactaagacatttggatcaacaatagctgacgtgataggtaaaaatcatgaggcggcaggggata

SEQ ID NO: 541374 - DNA, 75 bp, synthetic construct
  source 1..75: mol_type = other DNA
acgatgccctgttccagaccgttgccgaccagcaaaaggctttgaaggatgacgcccgtaccctggagcggctgc

SEQ ID NO: 541375 - DNA, 75 bp, synthetic construct
  source 1..75: mol_type = other DNA
ggacgtggcctattaccgcagctcgccttgtttctcgtcggcgggatgcagcgatgccgaacgggtcgctatggc

SEQ ID NO: 541376 - DNA, 75 bp, synthetic construct
  source 1..75: mol_type = other DNA
cagcgtgtcacgcagtccatggatgcgcgactcattcagctcacggaaaaacagaataaaacaggcggggacttt

SEQ ID NO: 541377 - DNA, 75 bp, synthetic construct
  source 1..75: mol_type = other DNA
ttgcggtttgtctggcatgcagtttttccacctcttctctggccgcggacgagcttgaaacccgcgcctttcaag

SEQ ID NO: 541378 - DNA, 75 bp, synthetic construct
  source 1..75: mol_type = other DNA
gaatcatgcggtgagcgacctgacgggccgtccgctgatgctctttaacagtgaaggtaaaaccgtctggcgacc

SEQ ID NO: 541379 - DNA, 75 bp, synthetic construct
  source 1..75: mol_type = other DNA
tttaaggcatataaagaaaatatctcctcagcaaggcccttaccatagagtaatccatacagatatttactatcg

SEQ ID NO: 541380 - DNA, 75 bp, synthetic construct
  source 1..75: mol_type = other DNA
agtaaagccgctattcttgaagagtttttacatggtacacaagagaaactaggaatagctgaaaaattaggacgt

SEQ ID NO: 541381 - DNA, 75 bp, synthetic construct
  source 1..75: mol_type = other DNA
gtccactggaagcattaatgattcgtcgattattaattcaggcggcaaattttaccgagaagcaaaccgtcgaac

SEQ ID NO: 541382 - DNA, 75 bp, synthetic construct
  source 1..75: mol_type = other DNA
ggtagcagaacatgaaattctgctcgcctttcgtgcgttacttgcctctgatagcgaacgttttctgccctccgc

SEQ ID NO: 541383 - DNA, 75 bp, synthetic construct
  source 1..75: mol_type = other DNA
cagaccagcctgtgggggctggcactcagcctgcccgcagacaccggctacccggacccgcgcggggaactggac

SEQ ID NO: 541384 - DNA, 75 bp, synthetic construct
  source 1..75: mol_type = other DNA
ctaaaaatgacaccttccgctggtggtttgatgagatcacgaagcgcgatgtgccgttcgatattatcggcctgt

SEQ ID NO: 541385 - DNA, 75 bp, synthetic construct
  source 1..75: mol_type = other DNA
gcaaacagttcaaacctaaagcctgggagaagatggattacccgcagcttaaaacggcaatccatgactatacgc

SEQ ID NO: 541386 - DNA, 75 bp, synthetic construct
  source 1..75: mol_type = other DNA
aaaacggcaattcatgactatacccgcgataccatcgcccgctttaagcaggcgggcgtgctgccggatatggtg

SEQ ID NO: 541387 - DNA, 75 bp, synthetic construct
  source 1..75: mol_type = other DNA
acaatgtgacgggattctctgaacatggaaattacgttattactcgaccggacgtagatcagcacagggaagtga

SEQ ID NO: 541388 - DNA, 75 bp, synthetic construct
  source 1..75: mol_type = other DNA
tattgttaacaggctggtagctgtgcaaccattcgggacagttaacaggccaatatatacaaatggtagtggttc

SEQ ID NO: 541389 - DNA, 75 bp, synthetic construct
  source 1..75: mol_type = other DNA
gatcgccgcgcacatggaacgaaacaaatcaggaatatgactatacgccatatgacatccgcattattggcaact

SEQ ID NO: 541390 - DNA, 75 bp, synthetic construct
  source 1..75: mol_type = other DNA
attgggttgagaggtggatggaatatgtatcagtatccgttgaatcccatacaagtgatagacccaatggggtta

SEQ ID NO: 541391 - DNA, 75 bp, synthetic construct
  source 1..75: mol_type = other DNA
gaacgattcactgagattgcaacgctgactcaatggctggaagaacgtgaacagacatctgtaaacgaacaaaga

SEQ ID NO: 541392 - DNA, 75 bp, synthetic construct
  source 1..75: mol_type = other DNA
ctgactctcgcactcaataaaaacaacgttgtgcttagtgagtactcgcaacagctcagcgcgttgcagcagcat

SEQ ID NO: 541393 - DNA, 75 bp, synthetic construct
  source 1..75: mol_type = other DNA
gcaaactagcctcgccgtctgtgaacaacaacgagatgaaagtctggcgagccttcaaaacctgaaaactcaact

SEQ ID NO: 541394 - DNA, 75 bp, synthetic construct
  source 1..75: mol_type = other DNA
tcctgaaaaccagattcaggtttatgtagagaacgaagatggatctcacgttcctgtttcgcaaccaatcatcat

SEQ ID NO: 541395 - DNA, 75 bp, synthetic construct
  source 1..75: mol_type = other DNA
acgagctgtggtatctgcatcgttatccggaagtagcgggctccggtctgtcggctattgaacactttatccagg

SEQ ID NO: 541396 - DNA, 75 bp, synthetic construct
  source 1..75: mol_type = other DNA
gaccgtgtcctggaaactgaccgcgcctgtgcgtgccctgggccgtatctttaaagagaacccaaccgccacacc

SEQ ID NO: 541397 - DNA, 75 bp, synthetic construct
  source 1..75: mol_type = other DNA
gtgaacttgttgcaacagcaggctaatgcattgcagcaacagcttgacggtgagcagcaaactaaaaaccagttg

SEQ ID NO: 541398 - DNA, 75 bp, synthetic construct
  source 1..75: mol_type = other DNA
atgctcgtgcaacgaaacaagtccaagacatcttttatcgtttggggaaatcttgtagcgagagttgggagaatt

SEQ ID NO: 541399 - DNA, 75 bp, synthetic construct
  source 1..75: mol_type = other DNA
gagtgaacgttttactgaaatcgccacgctgacacaatggctggaagagcgcgaacaagcctcagcaaacgaaca

SEQ ID NO: 541400 - DNA, 75 bp, synthetic construct
  source 1..75: mol_type = other DNA
accaggcactggaacacttcccgcaaggcagtattgatttgctgcatatcgatggcctgcataccctcgaagctg

SEQ ID NO: 541401 - DNA, 75 bp, synthetic construct
  source 1..75: mol_type = other DNA
atggatggtcaaaaaattagtcagttagtagaaaattgtgagttatatcccatcactgatgttggcggggaattg

SEQ ID NO: 541402 - DNA, 75 bp, synthetic construct
  source 1..75: mol_type = other DNA
tacagagagtgccgcggagcgtattgccgcttcaggattgtttgatgaactctggtatcaacatcgctacccaga

SEQ ID NO: 541403 - DNA, 75 bp, synthetic construct
  source 1..75: mol_type = other DNA
attgatggtgcgggttgcgttgatgttgctggtaatgatatgcgcaattgtggaacagccgttaatgcagacact

SEQ ID NO: 541404 - DNA, 75 bp, synthetic construct
  source 1..75: mol_type = other DNA
aatcaggcccgcgcagagcttgaggcagcaggaaaaccgttcacggaacaggatgtggcgcagcgggcctacaat

SEQ ID NO: 541405 - DNA, 75 bp, synthetic construct
  source 1..75: mol_type = other DNA
ggcggtgcacgaatatcataacgatctcaacgatgcccagatgtgcctgcgactcgggttccgcctggctgtctg

SEQ ID NO: 541406 - DNA, 75 bp, synthetic construct
  source 1..75: mol_type = other DNA
agaccgaatgggtgccgacgaagggctataacagcttcaacgaggctcagagcgcgataatccgctacatcacag

SEQ ID NO: 541407 - DNA, 75 bp, synthetic construct
  source 1..75: mol_type = other DNA
gacgccggacgtagcgccatgctcaaccctggcccgcatggttttagcgaagtgctgtacgccgtgtcatccgcc

SEQ ID NO: 541408 - DNA, 75 bp, synthetic construct
  source 1..75: mol_type = other DNA
caggcaatagatcgtgctttgggtgaagatatcccgatcaaaatggtctacgatctgacggcgacttttgcgcag

SEQ ID NO: 541409 - DNA, 75 bp, synthetic construct
  source 1..75: mol_type = other DNA
cagcaggaaaaccgttcacggaacaggatgtggcgcagcgggcctacaataacggtatggcggcctccggttttg

SEQ ID NO: 541410 - DNA, 75 bp, synthetic construct
  source 1..75: mol_type = other DNA
gtatcgtcgaatggaggggtacgaatatgattacgattacgacggtgagcatcgcgatgaaccgataatcgtgaa

SEQ ID NO: 541411 - DNA, 75 bp, synthetic construct
  source 1..75: mol_type = other DNA
aaagttaaaaaccaaacaataagaagtttttttggatcatatgtggctataaataatactgttgctgacagaact

SEQ ID NO: 541412 - DNA, 75 bp, synthetic construct
  source 1..75: mol_type = other DNA
atttgattgccatgcaggagcatctgttaattttccaaggctatggggtacagatataaaaaaattaatgcacct

SEQ ID NO: 541413 - DNA, 75 bp, synthetic construct
  source 1..75: mol_type = other DNA
aattgtttctggataacatcggcggtgcgccgaaaacgcgcaaaattaacaatatgcccctgacgtcggatatca

SEQ ID NO: 541414 - DNA, 75 bp, synthetic construct
  source 1..75: mol_type = other DNA
ggctgaattaagcaaaacaacgctttatttcaccgaaggcgggaacggtattccgcccacttatccggggccgga

SEQ ID NO: 541415 - DNA, 75 bp, synthetic construct
  source 1..75: mol_type = other DNA
atctgatgcacatttagtacttcaaccatttttagatgtgttaaatagtaatcaattgatggctctctcacggtt

SEQ ID NO: 541416 - DNA, 75 bp, synthetic construct
  source 1..75: mol_type = other DNA
ccgcgtaaaccgtcagttcggggcagaacatcctgaccagttgtgggtggctgattttacttacgtcagcacatg

SEQ ID NO: 541417 - DNA, 75 bp, synthetic construct
  source 1..75: mol_type = other DNA
atgatctggcagcctgagttcacagataaaacactctccaggaaacccggggcggttcacgatgtggaagtcatc

SEQ ID NO: 541418 - DNA, 75 bp, synthetic construct
  source 1..75: mol_type = other DNA
acgggaccggcaggagaagaaatcttctgtgatgaacatggccgcgtgcgggtgaaatttaactgggaccgctat

SEQ ID NO: 541419 - DNA, 75 bp, synthetic construct
  source 1..75: mol_type = other DNA
ggatttgcccattcattcgtatattttcataaagaaagagcatgatagctcagtatttgtagatgcaagtgaaat

SEQ ID NO: 541420 - DNA, 75 bp, synthetic construct
  source 1..75: mol_type = other DNA
taatgtcaccaccgatgcgggtgccgggtttgagcagacgctgaccggaatgacagtggggatcgacagccgtaa

SEQ ID NO: 541421 - DNA, 75 bp, synthetic construct
  source 1..75: mol_type = other DNA
agcatcaatggtctttacaaagcggaggtaatacaccgtaagagctggaaaaaccgtgcagaagtggaactggcc

SEQ ID NO: 541422 - DNA, 75 bp, synthetic construct
  source 1..75: mol_type = other DNA
aattaatgacatcatgattaacctgtctcatattcttattgattccttagatgatgcaaaggttaaccttacacc

SEQ ID NO: 541423 - DNA, 75 bp, synthetic construct
  source 1..75: mol_type = other DNA
tggttccgtaaggagctggaaccagtgctgaaagagaaaggctggtggggtgagaaagaaatcaccgacccggac

SEQ ID NO: 541424 - DNA, 75 bp, synthetic construct
  source 1..75: mol_type = other DNA
atggcgaaaagcctcgcgggcgggatgccgctttcgggcgtggtcggtaacgcgaatattatggacgcgcccgcg

SEQ ID NO: 541425 - DNA, 75 bp, synthetic construct
  source 1..75: mol_type = other DNA
aaaaatcacgcttaatactaaggttatttgatgatgttaagttgctatttaatgaagtgcctgtcagtattttag

SEQ ID NO: 541426 - DNA, 75 bp, synthetic construct
  source 1..75: mol_type = other DNA
aacgatcccgcaggagaaagccagaaacttcgccgcatcgctgacagcactgttatcaggcaactacagtgaaag

SEQ ID NO: 541427 - DNA, 75 bp, synthetic construct
  source 1..75: mol_type = other DNA
agtctaatgatgagattatgaaaaatcaaccaaatgatgttattaatgaaaaaattaataatgaattaaaactta

SEQ ID NO: 541428 - DNA, 75 bp, synthetic construct
  source 1..75: mol_type = other DNA
tgttcattcgttcatttttctcaaaaaggataatgattgcactgagttcattgaagcaggctcactcctgaaaaa

SEQ ID NO: 541429 - DNA, 75 bp, synthetic construct
  source 1..75: mol_type = other DNA
atgagcaaagaatctgtaatggcggcattgagaaaggcgcgtgaagcgcgtgaaggtaatatctttggcggtact

SEQ ID NO: 541430 - DNA, 75 bp, synthetic construct
  source 1..75: mol_type = other DNA
ccagcgcagcggctgacaatctacgagaacggaaaatatgagcgttggctggagcttcacccgtccgacaaaggg

SEQ ID NO: 541431 - DNA, 75 bp, synthetic construct
  source 1..75: mol_type = other DNA
tggagaaacaaggatggactcttgtaaaccggagcgcaattaaaaatatgactgtggagcaattgctaaaaattc

SEQ ID NO: 541432 - DNA, 75 bp, synthetic construct
  source 1..75: mol_type = other DNA
cagagccggaattcaacagatatcaggagaaagaaaacttgatagtaagatacatatagtcagcgggaagggcgt

SEQ ID NO: 541433 - DNA, 75 bp, synthetic construct
  source 1..75: mol_type = other DNA
ccgtttcggcgctgcaaatgccgttgcattgtccaccacaggccattgcacatcatcaacaactcgaacagcagg

SEQ ID NO: 541434 - DNA, 75 bp, synthetic construct
  source 1..75: mol_type = other DNA
agcgagcggtactgctgactcgcggtaacagtctgaatttacatcttaatgtccgacaaagccgtttactgccga

SEQ ID NO: 541435 - DNA, 75 bp, synthetic construct
  source 1..75: mol_type = other DNA
ccatttgatccgttgataacgccagtttatacaattagttttagtggtacggtagaagttccgcaaaattgtgag

SEQ ID NO: 541436 - DNA, 75 bp, synthetic construct
  source 1..75: mol_type = other DNA
gttagaggatggtcaggaagatattcaaccacctcgcccattggtcatggtattaacccataagcaatttagaaa

SEQ ID NO: 541437 - DNA, 75 bp, synthetic construct
  source 1..75: mol_type = other DNA
aaatggcgaatgctctggctcaagccagaacaatttctggggctactcagcaggttgttattgatacaattcttt

SEQ ID NO: 541438 - DNA, 75 bp, synthetic construct
  source 1..75: mol_type = other DNA
accctggataccttccggttttatctggagaaacaaggatggactcttgtaaaccggagcgcaattaaaaatatg

SEQ ID NO: 541439 - DNA, 75 bp, synthetic construct
  source 1..75: mol_type = other DNA
aggtatataccgaactgtatccgaaatctttacataatcgttttgaagagctccaaaggagcagaaataagacct

SEQ ID NO: 541440 - DNA, 75 bp, synthetic construct
  source 1..75: mol_type = other DNA
gcagggttttaacagatgatgaaatcagagatttatggcgaagtattaatactgattatgacaatcacgaattat

SEQ ID NO: 541441 - DNA, 75 bp, synthetic construct
  source 1..75: mol_type = other DNA
cctgatattcataaagttacatcgatgtgtcaacagtatcgtaatgaggaaagactgttcctggggaaatcagtg

SEQ ID NO: 541442 - DNA, 75 bp, synthetic construct
  source 1..75: mol_type = other DNA
acaacaaaatccttctggttgttgctatattgctatgttttgtttttatatcgattgtcgaacagcctcttggac

SEQ ID NO: 541443 - DNA, 75 bp, synthetic construct
  source 1..75: mol_type = other DNA
ttcagggtgaatacagacattcattttggaatgaaatttatgaaatggttctggcctggtatattacactaccaa

SEQ ID NO: 541444 - DNA, 75 bp, synthetic construct
  source 1..75: mol_type = other DNA
catattggacaacggattcggtgggctcgaggcatgattcaaatcttgcgtattgacaatccattattgggcaag

SEQ ID NO: 541445 - DNA, 75 bp, synthetic construct
  source 1..75: mol_type = other DNA
tgggaagcgcctcacccgcttgaacgcgcgttgcgtgccctggtagtccgccaccaggcgctgacagatatgcac

SEQ ID NO: 541446 - DNA, 75 bp, synthetic construct
  source 1..75: mol_type = other DNA
gggagagaagcgtttcgccgttttgccgaggaaacaggaattcgttatgtagccagaagcactcatgaacacgcg

SEQ ID NO: 541447 - DNA, 75 bp, synthetic construct
  source 1..75: mol_type = other DNA
aaaagatagtatttaccagcttattcatcggctttcaggtgtgggtatttcagtgatattaattactgatgaagc

SEQ ID NO: 541448 - DNA, 75 bp, synthetic construct
  source 1..75: mol_type = other DNA
agcttgccacatggacagtcaccgatccgtccctacggattcaacggctgctgcgtctgataacacaaccagaat

SEQ ID NO: 541449 - DNA, 75 bp, synthetic construct
  source 1..75: mol_type = other DNA
aatggccgtcacgctacgcgatgcacaggcctgctttaatctgaatgccctcgctcagccggcgaaggtgtcagg

SEQ ID NO: 541450 - DNA, 75 bp, synthetic construct
  source 1..75: mol_type = other DNA
cacgcgtgatacagaacataccttatggccattatatctagttgccaaacaattagtgcaggcagccaacctaca

SEQ ID NO: 541451 - DNA, 75 bp, synthetic construct
  source 1..75: mol_type = other DNA
ataactttaaagacaatatcaaaaactacaaagagatcactggtcaggtggatggtgaggggcgaaacttatcta

SEQ ID NO: 541452 - DNA, 75 bp, synthetic construct
  source 1..75: mol_type = other DNA
ggtctggtagtcagcgtattgcggaagatattctgagacagagaaagtgtggagtgctggtggtgactacgaatg

SEQ ID NO: 541453 - DNA, 75 bp, synthetic construct
  source 1..75: mol_type = other DNA
aagccggtaacggttggcgatgcgctcacctactggcttgagtcgtacgtaaaggaaaaccgcgtggattatatc

SEQ ID NO: 541454 - DNA, 75 bp, synthetic construct
  source 1..75: mol_type = other DNA
aaaggaagttttgtattcatagaacggggaatgaaattttcctgcaaaataaaaaaggaaaattcagagaaaaaa

SEQ ID NO: 541455 - DNA, 75 bp, synthetic construct
  source 1..75: mol_type = other DNA
tcgttatggcgagatgcgagtggtctcaacgatcccgcaggagaaaaccagaaacttcgccgcatcgctgacagc

SEQ ID NO: 541456 - DNA, 75 bp, synthetic construct
  source 1..75: mol_type = other DNA
ttataccagtaacgccagcgtaacgattcatacatcaccatcttatacagcgaataaaccaacaggcctgacaga

SEQ ID NO: 541457 - DNA, 75 bp, synthetic construct
  source 1..75: mol_type = other DNA
ctacctgagcgggaaagccagaaaagatcggtggtactggaataacagtatccaacggagccgaagtacggcggt

SEQ ID NO: 541458 - DNA, 75 bp, synthetic construct
  source 1..75: mol_type = other DNA
aagcggtgaagtctgcctatgacaatgctgaaaaacgtcttcagaaagatcagaacggtgcggatattcctgata

SEQ ID NO: 541459 - DNA, 75 bp, synthetic construct
  source 1..75: mol_type = other DNA
ggaactgtatatgtaatttacagttcgtacattaaaccgactgctgctgatgttggggcgttatcattatctggt

SEQ ID NO: 541460 - DNA, 75 bp, synthetic construct
  source 1..75: mol_type = other DNA
gatgtttatgttgaaataggtaattacgccacaggtgttaatattcagtgggattataccagtaacgccagcgta

SEQ ID NO: 541461 - DNA, 75 bp, synthetic construct
  source 1..75: mol_type = other DNA
atgagaaaggttgatgcttttgaaagctcagatgagaacaatacttgcaatagtttattaggcataaaaataaaa

SEQ ID NO: 541462 - DNA, 75 bp, synthetic construct
  source 1..75: mol_type = other DNA
atgaagataaacggaaaaaacgcttcttttacgcctgaagagctagccagaaaatatcatgaggaagccccggtt

SEQ ID NO: 541463 - DNA, 75 bp, synthetic construct
  source 1..75: mol_type = other DNA
tccccagagttaacaaggaaatatctcggcgaaaaagccgctttggatttgcccctatatttccagacatctgtt

SEQ ID NO: 541464 - DNA, 75 bp, synthetic construct
  source 1..75: mol_type = other DNA
atggtgatgtcagacggagaagtcagagcacgaacaatgggaacgccgcagggaggtgtcataagtccgttgctg

SEQ ID NO: 541465 - DNA, 75 bp, synthetic construct
  source 1..75: mol_type = other DNA
aagggggcaaatcagtgtgcgcgggcaggggataaattaccggatttactcgatgaatatatcagagcaacaact

SEQ ID NO: 541466 - DNA, 75 bp, synthetic construct
  source 1..75: mol_type = other DNA
agcggacggaattagcgctgcgtatcgccagcgcggcgaaacataccggcatcggcctgacgctgctgcccgtcc

SEQ ID NO: 541467 - DNA, 75 bp, synthetic construct
  source 1..75: mol_type = other DNA
gaggggcgcaaggattacagcgtccaccgcataaccctggatgatgccattgcggacggattataccgtcgtatc

SEQ ID NO: 541468 - DNA, 75 bp, synthetic construct
  source 1..75: mol_type = other DNA
aagcaacaaccaatcaaaatatagccagcataaagtccactaaagaaaatattattgctgataaattcatattct

SEQ ID NO: 541469 - DNA, 75 bp, synthetic construct
  source 1..75: mol_type = other DNA
gctcaaagagaaaaacggatggttgctgccgtggggtgatgtcgttaccaacccactgaaggcgcaacgactggc

SEQ ID NO: 541470 - DNA, 75 bp, synthetic construct
  source 1..75: mol_type = other DNA
gatttgggaatctcaaaagaaatgaaaccaagcaatgtccccagctcaattggtgacattggtggtagtatcact

SEQ ID NO: 541471 - DNA, 75 bp, synthetic construct
  source 1..75: mol_type = other DNA
taaaaacattaccagtgccattgcctgataaacagaaacaagagcgaatatctgctctgctcgataaattcgaca

SEQ ID NO: 541472 - DNA, 75 bp, synthetic construct
  source 1..75: mol_type = other DNA
acaagctcgcattgtcgaaatactcgataaattcgacaccctgaccaactccatcaccgaaggtctcccgcgtga

SEQ ID NO: 541473 - DNA, 75 bp, synthetic construct
  source 1..75: mol_type = other DNA
tgattacaaggaagatttatcctcctttgaggtatctatgggaaatatattgattgcaatgtcaggtgccactac

SEQ ID NO: 541474 - DNA, 75 bp, synthetic construct
  source 1..75: mol_type = other DNA
aaaagcacttattccttttgttgaacaacaatggttcttttctgataaatatgacaatgcagatgaatatctgtc

SEQ ID NO: 541475 - DNA, 75 bp, synthetic construct
  source 1..75: mol_type = other DNA
atgctcattcacataaccattctggttctcagtatcagtcttgttacgtatattccctttaataatataacacta

SEQ ID NO: 541476 - DNA, 75 bp, synthetic construct
  source 1..75: mol_type = other DNA
catgtttttctattcctggatatattatctttcagtatcaatgttcgcactttgctttttccatatgtcgctgaa

SEQ ID NO: 541477 - DNA, 75 bp, synthetic construct
  source 1..75: mol_type = other DNA
gtcgagacattaagccgggacgcctggcgggtaacgctggatgtggcggttgaagagtattaccagaacgaaccg

SEQ ID NO: 541478 - DNA, 75 bp, synthetic construct
  source 1..75: mol_type = other DNA
cgatgcggagaaaaatccgtggggactggcgatcgactgtaccgatgccgcgccgcagcgtctggtggcggagga

SEQ ID NO: 541479 - DNA, 75 bp, synthetic construct
  source 1..75: mol_type = other DNA
ttgcatcttatgagtttatgtatatcaattattttactgatttttttctatgtttgtttttcacttttcttcatt

SEQ ID NO: 541480 - DNA, 75 bp, synthetic construct
  source 1..75: mol_type = other DNA
cagagaatcagcacgccggactttatatcaaatgtgccataaggccggcgtggttctggctgacggtggtgaata

SEQ ID NO: 541481 - DNA, 75 bp, synthetic construct
  source 1..75: mol_type = other DNA
tgcgcagcctgagcccacgcgagctggcgggtgtgttcgcgcacgaggtcgcgcacatcgctaatgaggatctgc

SEQ ID NO: 541482 - DNA, 75 bp, synthetic construct
  source 1..75: mol_type = other DNA
tgcgcagcctgagcccacgcgagctggcgggtgtgctcgtgcacgaggtcgcgcacatcgctaatgaggatctgc

SEQ ID NO: 541483 - DNA, 75 bp, synthetic construct
  source 1..75: mol_type = other DNA
atgggaattcatttgttatcagcaaaagcgacgctccctgtttatgatcgtaataacctggccccaagaattgtt

SEQ ID NO: 541484 - DNA, 75 bp, synthetic construct
  source 1..75: mol_type = other DNA
tgataaagaggttgaactcggtcaggtgaccaccagccacattaatcagtcacatcacagcgatgccgttgctgt

SEQ ID NO: 541485 - DNA, 75 bp, synthetic construct
  source 1..75: mol_type = other DNA
tgatgaaggatccggtgaaattcactttaaaggtgaagttattgaagcaccgtgtgaaatacatcaggatgatat

SEQ ID NO: 541486 - DNA, 75 bp, synthetic construct
  source 1..75: mol_type = other DNA
cagcacgggtgaagccaccggcgtcggcgtgcgtttaatgaataaagatcaaagcaatatcgttttaggcaccgc

SEQ ID NO: 541487 - DNA, 75 bp, synthetic construct
  source 1..75: mol_type = other DNA
aatgagacacaggtgccttatgccattgaaaaagtgcgtaacctgcgggagaaaatttgcgggatagattcaggt

SEQ ID NO: 541488 - DNA, 75 bp, synthetic construct
  source 1..75: mol_type = other DNA
tatcgccgcgggcgcgaataatctggtacttggcagcaccgggctgtttattaaaggcgcgacgcttgctgacaa

SEQ ID NO: 541489 - DNA, 75 bp, synthetic construct
  source 1..75: mol_type = other DNA
aatgagacacaggtgccttatgccatggaaaaagtgcgtaacctgcgagagaaaatttgcgggttagatgcgagc

SEQ ID NO: 541490 - DNA, 75 bp, synthetic construct
  source 1..75: mol_type = other DNA
atgaagaaaagaggcagtcatttctcagcaaaagaaatcagagtttagcgataggtgaagtacctgaagatatat

SEQ ID NO: 541491 - DNA, 75 bp, synthetic construct
  source 1..75: mol_type = other DNA
gactggaaatttcgtgactggctggcgcagctcgacgaagagattcgttacaccatgcgcaccacagttaacgcg

SEQ ID NO: 541492 - DNA, 75 bp, synthetic construct
  source 1..75: mol_type = other DNA
cttcgggaaagaaatggcgatgattatgttctttgcgatggttatcaacattatgattgccgtttcacaccgtgg

SEQ ID NO: 541493 - DNA, 75 bp, synthetic construct
  source 1..75: mol_type = other DNA
ttgggcgtactgtttcaaagtggtgtgccgatgccgctggcgattctcctgaccttactgctcggcgcattgtgc

SEQ ID NO: 541494 - DNA, 75 bp, synthetic construct
  source 1..75: mol_type = other DNA
ggacagtattactggaaccgagtcaaaaatttttagcacctcaggaatgctcaatcgcggaggagtaaaaatact

SEQ ID NO: 541495 - DNA, 75 bp, synthetic construct
  source 1..75: mol_type = other DNA
tatcagtatccgttgaatccgatctcaaatatagatccattaggattatatgaatttaaatcaaaaaatatagat

SEQ ID NO: 541496 - DNA, 75 bp, synthetic construct
  source 1..75: mol_type = other DNA
gtatacatatccgctgagcccggtgaatggcatggatccattaggattatatgaatttaaatcaaaaaatataga

SEQ ID NO: 541497 - DNA, 75 bp, synthetic construct
  source 1..75: mol_type = other DNA
accaacgtaaatattgtcatgaactacattcgtaacctggatagtgaaacgggggcaatggtgcgcctgctggaa

SEQ ID NO: 541498 - DNA, 75 bp, synthetic construct
  source 1..75: mol_type = other DNA
agaaactccagtagaaggcagcccgctgtttttactgcagatgtgcatggagagtctggtaatgtgcggtaaaat

SEQ ID NO: 541499 - DNA, 75 bp, synthetic construct
  source 1..75: mol_type = other DNA
gccgcgatggagcaggttgtagaatggcaaaaccgaccactggctgctgtttaccccattgtttatcttgaatgt

SEQ ID NO: 541500 - DNA, 75 bp, synthetic construct
  source 1..75: mol_type = other DNA
caccagccgtaccggctgccggggcagcagtatgataaggagtcggggctgtactacaaccggaaccggtactac

SEQ ID NO: 541501 - DNA, 75 bp, synthetic construct
  source 1..75: mol_type = other DNA
ggcaaaaccaaagcggcaaaagcagaggttgaacgtaacggctacaaagtctgggaaccaaaaaaggagcgctga

SEQ ID NO: 541502 - DNA, 75 bp, synthetic construct
  source 1..75: mol_type = other DNA
ggcgacgtgaatcgaaaacttgattacctttttgaccgtgcttcagatgctgattttggatcactacgtgacgag

SEQ ID NO: 541503 - DNA, 75 bp, synthetic construct
  source 1..75: mol_type = other DNA
cgccaccgctattatgacccgctgcaggggcggtatatcactcaggatccgattgggctgaaggggggatggaat

SEQ ID NO: 541504 - DNA, 75 bp, synthetic construct
  source 1..75: mol_type = other DNA
gggtatcccaaaatccagttattcaaagctgttacgaagttgatggaacgtcacattgttcagaaaagatcccac

SEQ ID NO: 541505 - DNA, 75 bp, synthetic construct
  source 1..75: mol_type = other DNA
ctatagcggaaagagtggaagaaggtgagagtttagccctactttcagatgcgcagttgtttaatcgcttgtttg

SEQ ID NO: 541506 - DNA, 75 bp, synthetic construct
  source 1..75: mol_type = other DNA
ggtgaaacggcggtgattgaaaacgacgtatcgattctgcaatctgtgacgcttggcggtacgggtaaatctggt

SEQ ID NO: 541507 - DNA, 75 bp, synthetic construct
  source 1..75: mol_type = other DNA
aacagaaaggcgaatgaacaatcctgtcagtggctcactgcgtattggtcgtatcagcacaaaggagcgggaaaa

SEQ ID NO: 541508 - DNA, 75 bp, synthetic construct
  source 1..75: mol_type = other DNA
tcacaccaatattttctataccgccaaaaggagcagcagcggtcgaaacatggatttatcaggtggcaaaaaggc

SEQ ID NO: 541509 - DNA, 75 bp, synthetic construct
  source 1..75: mol_type = other DNA
acagtattaaaattattaatgctcttcatgattatctcgttttaggagatagcaggaaaattgcttgtgaacgat

SEQ ID NO: 541510 - DNA, 75 bp, synthetic construct
  source 1..75: mol_type = other DNA
agatttgtcatggagcaggccgttctgctttatggatcaggaaaaaactatttgttcttcagtcatggtactgtt

SEQ ID NO: 541511 - DNA, 75 bp, synthetic construct
  source 1..75: mol_type = other DNA
acgcgagcaaaatcgatgcgattataagtcgcaatggcacaaatacggcacaagaggtgaacgtggtttacttaa

SEQ ID NO: 541512 - DNA, 75 bp, synthetic construct
  source 1..75: mol_type = other DNA
gaacatgatttaaagataaccttaaaaatttcagatgaaaagaaatgcacgaatggtgtcttttgcatcgcatgg

SEQ ID NO: 541513 - DNA, 75 bp, synthetic construct
  source 1..75: mol_type = other DNA
caaaaaacccattgattaataatcataaacacaacaatctaaagcatgcttggttaaattttaaagaatcatctc

SEQ ID NO: 541514 - DNA, 75 bp, synthetic construct
  source 1..75: mol_type = other DNA
gggtgaaaagcacctgcaggaaaacctcgaatttatcgccgaaagtctctgtttatacgcgatcaagccaaaaaa

SEQ ID NO: 541515 - DNA, 75 bp, synthetic construct
  source 1..75: mol_type = other DNA
tgatttttcaattagatatagcccaactggttttatatcagaaaccaaaggtgctgtttgttttgctgatgataa

SEQ ID NO: 541516 - DNA, 75 bp, synthetic construct
  source 1..75: mol_type = other DNA
gaatcctaaaatacaaagatgaagtgattttgtgtaaccctgaaatgatagctaaagtggctgaaatggcaggat

SEQ ID NO: 541517 - DNA, 75 bp, synthetic construct
  source 1..75: mol_type = other DNA
ccgcactggccgtatctctgctgttcactgcacctgtttatgctgctgatgaaggttctggcgaaattcacttta

SEQ ID NO: 541518 - DNA, 75 bp, synthetic construct
  source 1..75: mol_type = other DNA
cagatattaagaaaacagcaggggctccataagagatgggtatttgtccacaccaaacctgcctaccgaagcgac

SEQ ID NO: 541519 - DNA, 75 bp, synthetic construct
  source 1..75: mol_type = other DNA
atgcgctgggaatgggtggatctggagtcggcaacaatcacattgcccgctgaagtcatgaaggcccgccgcccg

SEQ ID NO: 541520 - DNA, 75 bp, synthetic construct
  source 1..75: mol_type = other DNA
catgtggtcccgttatcccgtcaggcggtggagctattgcaagaccagtttacccgcagcggatacagtgatttc

SEQ ID NO: 541521 - DNA, 75 bp, synthetic construct
  source 1..75: mol_type = other DNA
aggcggcctatctcaaacagcgccgtcaaatgcttcaggactacgccgacgctattgattcaatactggctggtg

SEQ ID NO: 541522 - DNA, 75 bp, synthetic construct
  source 1..75: mol_type = other DNA
cagaagatgattcctgcccgatgcgtacacgcgcacatgcttttacttgaactggcacaccgccgagttacatca

SEQ ID NO: 541523 - DNA, 75 bp, synthetic construct
  source 1..75: mol_type = other DNA
ttgagcaagccagcactcacagcaaaggccatagaggccgcacagccgcaggacaagccctacaaactcacagat

SEQ ID NO: 541524 - DNA, 75 bp, synthetic construct
  source 1..75: mol_type = other DNA
cggaagactggctgactaccagggtgagcggttggtcagagtcctatacaaagcaggtcagatcggcactggaga

SEQ ID NO: 541525 - DNA, 75 bp, synthetic construct
  source 1..75: mol_type = other DNA
aaagccagacgcccaggccataacgcatggataccgattaatgaaattccggccttctacaaagcccttgagaga

SEQ ID NO: 541526 - DNA, 75 bp, synthetic construct
  source 1..75: mol_type = other DNA
cgtgacgtgctggcattgcttcagaagaaagagcgcaccgcacctgaggcggcccgcaagttacggcaaagaatc

SEQ ID NO: 541527 - DNA, 75 bp, synthetic construct
  source 1..75: mol_type = other DNA
acggatggcgcacaacattcagcaccgcacttaacgagtccggcaggtactcaccagactggatcgagatacaac

SEQ ID NO: 541528 - DNA, 75 bp, synthetic construct
  source 1..75: mol_type = other DNA
cggtcgagctattacaggaccagtttacccgcagcggatacagtgctttcgtctttccgggccgattcatggaca

SEQ ID NO: 541529 - DNA, 75 bp, synthetic construct
  source 1..75: mol_type = other DNA
acgcccaggccataacgcatggatacagattagtgaaattccggcattctacaaagcgcttgagagagccgggag

SEQ ID NO: 541530 - DNA, 75 bp, synthetic construct
  source 1..75: mol_type = other DNA
cggaggactggctggctaccagggtaggcggctggagtgagagctatacaaagcaggtcaaatcagcactggaga

SEQ ID NO: 541531 - DNA, 75 bp, synthetic construct
  source 1..75: mol_type = other DNA
ctatattagaggatgtatcacttattgcatatccagaaaccaattctatattagtcaaaggtaatgatcagcaaa

SEQ ID NO: 541532 - DNA, 75 bp, synthetic construct
  source 1..75: mol_type = other DNA
caactgctgcgtgccgttgtagataaacacgccctgctcgcccatcaacaacgggtagtgagtggggaacaggaa

SEQ ID NO: 541533 - DNA, 75 bp, synthetic construct
  source 1..75: mol_type = other DNA
ttcctatctctgtgcggcaagactcggtgatgtgcttgagttgaaatggcaggatattatggataaagggatcta

SEQ ID NO: 541534 - DNA, 75 bp, synthetic construct
  source 1..75: mol_type = other DNA
gcggcgatatatgcggaagcaattccacagttacgcattgcaatggagatttcctatctctgtgcggcaagactc

SEQ ID NO: 541535 - DNA, 75 bp, synthetic construct
  source 1..75: mol_type = other DNA
acatctattgctcataaaggaatgctgctggcggcgaaaactatggcagcaaccacagtcaatctcttccttgat

SEQ ID NO: 541536 - DNA, 75 bp, synthetic construct
  source 1..75: mol_type = other DNA
ggcgcgccatctgcatggtgtgcgacaggggatcaatctaccgttacggcttgagggcgaaattgtcggcgtgat

SEQ ID NO: 541537 - DNA, 75 bp, synthetic construct
  source 1..75: mol_type = other DNA
ccgttgaatcccatacaagtgatagacccaatggggttagatgcgattgagaatatgacatcaggtggactaatt

SEQ ID NO: 541538 - DNA, 75 bp, synthetic construct
  source 1..75: mol_type = other DNA
gcagtttgcgctggtggatagcatttgtcgccatttccccggcagcgagtttcttactggcggtgatttagctta

SEQ ID NO: 541539 - DNA, 75 bp, synthetic construct
  source 1..75: mol_type = other DNA
cgggattaggtttgcaatgtacctatctgaccgccagaggcaccagcacggtacaatacctgcacactaaaagtg

SEQ ID NO: 541540 - DNA, 75 bp, synthetic construct
  source 1..75: mol_type = other DNA
aaggttggcagaggttttctttcttttctaaccgaagggaagaaaagcaaggggaactcgaagaagcaagcgcag

SEQ ID NO: 541541 - DNA, 75 bp, synthetic construct
  source 1..75: mol_type = other DNA
atggtggtgtcaattgcgattatgtgtggtcaggatattcgagatgatagagtcagaacaattgtctatacctgt

SEQ ID NO: 541542 - DNA, 75 bp, synthetic construct
  source 1..75: mol_type = other DNA
taagctgattgatcatggcagacctcttgcggcaatcaattgcctgtgcaggatgcatcagacaaagcagccaat

SEQ ID NO: 541543 - DNA, 75 bp, synthetic construct
  source 1..75: mol_type = other DNA
cgagatgctgagagtatgcgcaggggctacatgacaggagcctacaactcacgaggtgtttattgtgttgaccca

SEQ ID NO: 541544 - DNA, 75 bp, synthetic construct
  source 1..75: mol_type = other DNA
agaaagagcgcaccgcgccggaacaggccaggaagctacggcagcggatcggggagatcttcaaatttgctgtta

SEQ ID NO: 541545 - DNA, 75 bp, synthetic construct
  source 1..75: mol_type = other DNA
agtaatcaagagcacccttctctatcgcaacggctcacagctggcgcgcaaagaaaaagagtattgctccaaacg

SEQ ID NO: 541546 - DNA, 75 bp, synthetic construct
  source 1..75: mol_type = other DNA
ttgattatcaggatggatacgcagatgaagaagattttactcgttgctggcgtagcaatggcgctggcgggatgt

SEQ ID NO: 541547 - DNA, 75 bp, synthetic construct
  source 1..75: mol_type = other DNA
atggtgtcgaataccagcgtaagctgcgcgaggaatggtaatggcaaaaagatttggctatttgatatcgatatt

SEQ ID NO: 541548 - DNA, 75 bp, synthetic construct
  source 1..75: mol_type = other DNA
atgctgcctgggtgcgtgtctctggaaataccggtacccagttcgtgaagcaggcgtcgacgttctttggacccg

SEQ ID NO: 541549 - DNA, 75 bp, synthetic construct
  source 1..75: mol_type = other DNA
ttcaccaggtggtagtgcaaataattcactacctagtgcagcaaattcaccaggtggtgcaggagttgcaccagg

SEQ ID NO: 541550 - DNA, 75 bp, synthetic construct
  source 1..75: mol_type = other DNA
atccacggcacgcagttgaaacgcgagcaacgtgattactgttcagtacgttgcgcttcgttcgaccagatggcc

SEQ ID NO: 541551 - DNA, 75 bp, synthetic construct
  source 1..75: mol_type = other DNA
gaaaacagcattctgtagaggtaaagcagagggaatatgggagaagtactgtgcataaatgcacttttgttttta

SEQ ID NO: 541552 - DNA, 75 bp, synthetic construct
  source 1..75: mol_type = other DNA
agtttcaatttgcaacagataatggttatacatcaggaaatccatttaacggtctgacaccattaaaaaagtcca

SEQ ID NO: 541553 - DNA, 75 bp, synthetic construct
  source 1..75: mol_type = other DNA
taatagcgaataatataaaagataagatatttggtcatgttgatacggtgtcccccaaagataagaaattaataa

SEQ ID NO: 541554 - DNA, 75 bp, synthetic construct
  source 1..75: mol_type = other DNA
agaggaaataagtgaacataacgttttatttgatcatgacattgaacgattaaaaaaaatttccaaagctcagct

SEQ ID NO: 541555 - DNA, 75 bp, synthetic construct
  source 1..75: mol_type = other DNA
tgccgctaaccgtgcggctggggatcaataatgcgcaggccattcgcgacgtcttgttaaacagtagcgaacagg

SEQ ID NO: 541556 - DNA, 75 bp, synthetic construct
  source 1..75: mol_type = other DNA
tactggatatgttcggtcccccaaaaacaaatgccgggatccggacagtaacattactgcagcctgctcttgaag

SEQ ID NO: 541557 - DNA, 75 bp, synthetic construct
  source 1..75: mol_type = other DNA
agtgtgactgtattccgggagattcgccggccatgaattttgctgctcttaaaaacaattgtcaacgacggatga

SEQ ID NO: 541558 - DNA, 75 bp, synthetic construct
  source 1..75: mol_type = other DNA
gcaatcagatgaaaaagttattctaattgatggaatagactttattggcttgaataataaatatcgcgatctttt

SEQ ID NO: 541559 - DNA, 75 bp, synthetic construct
  source 1..75: mol_type = other DNA
ttgagcaagacaccactgacagcaaaggccatagacgccgcacaaccgaaggacaagccctacaaactcaccgat

SEQ ID NO: 541560 - DNA, 75 bp, synthetic construct
  source 1..75: mol_type = other DNA
ttccagttcgaaagactttcacagatattgtaagttattgtactgatccgtttgcctctgtagaaagcaaggttt

SEQ ID NO: 541561 - DNA, 75 bp, synthetic construct
  source 1..75: mol_type = other DNA
ttccggccttttatagcgcccttgagagagccgggagcgtccagattcagacggcaatacgtttgctcatcctca

SEQ ID NO: 541562 - DNA, 75 bp, synthetic construct
  source 1..75: mol_type = other DNA
gaatgaatccggcaggtataaccctgattggatcgagctacagctcagtcatgtaccgaaaggaatcagagcggt

SEQ ID NO: 541563 - DNA, 75 bp, synthetic construct
  source 1..75: mol_type = other DNA
agccactttcagccagtgccatccttaaagccctggagcgtatcgggtacaagtcgatcgccactggtcatggct

SEQ ID NO: 541564 - DNA, 75 bp, synthetic construct
  source 1..75: mol_type = other DNA
aagtcttaaaaaggaattagaggataccatagacagattaaaaaacattcagaatgaaaatgaaaaagagagtat

SEQ ID NO: 541565 - DNA, 75 bp, synthetic construct
  source 1..75: mol_type = other DNA
cctgatagaattaaaagggataacaaaataaatatgatctttaaatttgctggtattccgctgttaagatcaaga

SEQ ID NO: 541566 - DNA, 75 bp, synthetic construct
  source 1..75: mol_type = other DNA
tctcaacataatgtaaaaaaaaacatattaaattatgcaagcacgcctcatccaaattacaaactgacgtcaaaa

SEQ ID NO: 541567 - DNA, 75 bp, synthetic construct
  source 1..75: mol_type = other DNA
atgtccatactctttcagcttgtaactgtattaccggtcactctgaccttgttcatcatcatttctttcttctgt

SEQ ID NO: 541568 - DNA, 75 bp, synthetic construct
  source 1..75: mol_type = other DNA
aagtatacaactcaaaatcattactcactaaattaggtgtcggcggtgttaccgacaggttatccagtctggact

SEQ ID NO: 541569 - DNA, 75 bp, synthetic construct
  source 1..75: mol_type = other DNA
gcggaattactcaaacctggcggaaaagagatctataccgaagataaagatgaaatggcgtggctgaaatttttc

SEQ ID NO: 541570 - DNA, 75 bp, synthetic construct
  source 1..75: mol_type = other DNA
gaatggtgatctggtgcgtgtgtggaacaaacgtggtcagattctgacaggcgcggtggtgactgacgggatcaa

SEQ ID NO: 541571 - DNA, 75 bp, synthetic construct
  source 1..75: mol_type = other DNA
accgcacatccggcacaccgtttacatagtcagcttaactatgcggaactgcgtaaaaaatatgcggttgcagat

SEQ ID NO: 541572 - DNA, 75 bp, synthetic construct
  source 1..75: mol_type = other DNA
cataagaaaactagttacaccctgaaattgagcataaaacctactgatggtgttatggctggagtcatatcaaag

SEQ ID NO: 541573 - DNA, 75 bp, synthetic construct
  source 1..75: mol_type = other DNA
atgaacatccataaattcatcgacatgaacgaagttatcgccagcaatcatcctcttgccaaaggtaccactgac

SEQ ID NO: 541574 - DNA, 75 bp, synthetic construct
  source 1..75: mol_type = other DNA
gcaaaattgagatttactccaaaacgctggaaaaatttggctataaggattgcccggcacacccaacctggcttg

SEQ ID NO: 541575 - DNA, 75 bp, synthetic construct
  source 1..75: mol_type = other DNA
cgcctgatttcagtgacacctgcagacctcgctccgactaatcatctttatctggtctggaacaaaaggacggct

SEQ ID NO: 541576 - DNA, 75 bp, synthetic construct
  source 1..75: mol_type = other DNA
gagcccctgagatgcaggctacattcaccattccggatttacgtattatccgcgacttggtctgtgacggccacg

SEQ ID NO: 541577 - DNA, 75 bp, synthetic construct
  source 1..75: mol_type = other DNA
gttctcggcgctattgccgcttttggcgcgttcggattccttggactgttgttcggtatgaaagatcccgtacgc

SEQ ID NO: 541578 - DNA, 75 bp, synthetic construct
  source 1..75: mol_type = other DNA
taggattaatttggaatttattaataacgatggcttgtcgttttattatatttctgtagatagttgtaaaaaaat

SEQ ID NO: 541579 - DNA, 75 bp, synthetic construct
  source 1..75: mol_type = other DNA
acatggttaaaggagaggcaagtgtttaccgttactcaaaaggtatgagaataacagattcaaaaggagttttgg

SEQ ID NO: 541580 - DNA, 75 bp, synthetic construct
  source 1..75: mol_type = other DNA
cttttggttggacggggggcttttgctgcttctgatgtcactcttactgtaaccggaagaataaatgaaggcacc

SEQ ID NO: 541581 - DNA, 75 bp, synthetic construct
  source 1..75: mol_type = other DNA
atgcaagcgctgccacgactcggttaaacaacgcatggagaagggcggaacggttaccgagttcgacaatgaagg

SEQ ID NO: 541582 - DNA, 75 bp, synthetic construct
  source 1..75: mol_type = other DNA
ggacacgggtgtgacgctaccggcggagctggcggtgatgctgggaaggctggagcgggagctgcggcagggcag

SEQ ID NO: 541583 - DNA, 75 bp, synthetic construct
  source 1..75: mol_type = other DNA
cctggcctatcagtattactggtcaaaaacctgccgaaggaccgtttagcgcgctggggtatttacgcgttgatt

SEQ ID NO: 541584 - DNA, 75 bp, synthetic construct
  source 1..75: mol_type = other DNA
gtttaccgtgtatgtgacatcaacgcctaaggaaggtgcgaataagcggggaaattcttctcggctgactcagtc

SEQ ID NO: 541585 - DNA, 75 bp, synthetic construct
  source 1..75: mol_type = other DNA
gtgacctatcggggttactctctggtgcggcagtgctctgtttagccttccttggttttgatgccatcgcgacca

SEQ ID NO: 541586 - DNA, 75 bp, synthetic construct
  source 1..75: mol_type = other DNA
atgaccagacggtcacgatccaggaaggtaaccgccttcttacggtggaaaaaggccacaagatcaccggagtac

SEQ ID NO: 541587 - DNA, 75 bp, synthetic construct
  source 1..75: mol_type = other DNA
gaaattgatcgcgctgaaactgatttactcatcaacctgtcaacgcttacccagcgcggtctggcaaagatgatt

SEQ ID NO: 541588 - DNA, 75 bp, synthetic construct
  source 1..75: mol_type = other DNA
gtagcaacgaccgcgttgggtatgggttatgataaacctgatttaagttttgtaatccattaccaagctccgagt

SEQ ID NO: 541589 - DNA, 75 bp, synthetic construct
  source 1..75: mol_type = other DNA
gcttcacgccgctcctgagaatcgaaacagagaatggtgaacaggcgaaggcgcggcaccgtagcctggcggagg

SEQ ID NO: 541590 - DNA, 75 bp, synthetic construct
  source 1..75: mol_type = other DNA
gcgagcagccgcaggcggtgccgggacgcagtggttcaggaaccacgctgaataaccactttgcggtaataccgg

SEQ ID NO: 541591 - DNA, 75 bp, synthetic construct
  source 1..75: mol_type = other DNA
aaaaccgtttccatcaatgccgcaatctggacggtgcttttgagataaatcaacctctacctaacacaccggttc

SEQ ID NO: 541592 - DNA, 75 bp, synthetic construct
  source 1..75: mol_type = other DNA
tcggtttattttattagtactaaaatcttccgtgaccgcgagatggggcctacgattattgtatcgccactgctt

SEQ ID NO: 541593 - DNA, 75 bp, synthetic construct
  source 1..75: mol_type = other DNA
aacaaaaaatattacagaaagatttcatgcttttagggctaaatatacagaggccattcgcgactgggtttctac

SEQ ID NO: 541594 - DNA, 75 bp, synthetic construct
  source 1..75: mol_type = other DNA
gacactggaagcgttcgctgcggcctgggacagtcgctatcctcagataagccgaagctggcaggctaactggcc

SEQ ID NO: 541595 - DNA, 75 bp, synthetic construct
  source 1..75: mol_type = other DNA
tcaacggcactatcgacaacgaaactaccctgttctgtaatgcccgtgatttacacgcgtttctcgaagtcggaa

SEQ ID NO: 541596 - DNA, 75 bp, synthetic construct
  source 1..75: mol_type = other DNA
tcgcgtcgtactacagagaatattgattcgcattatcgtagattaatgatgtatggatatgaagatgttggttta

SEQ ID NO: 541597 - DNA, 75 bp, synthetic construct
  source 1..75: mol_type = other DNA
ctcgactacagcagccagagcatcaggaacacttttgtgcgcggcctgggtcctctcacgccgcaactgagcaaa

SEQ ID NO: 541598 - DNA, 75 bp, synthetic construct
  source 1..75: mol_type = other DNA
accgattcgtgtttccgaaaatttttttgttttttccgggaggggtggggggcggttgcctgccagctcctgacg

SEQ ID NO: 541599 - DNA, 75 bp, synthetic construct
  source 1..75: mol_type = other DNA
agaaatctcacaccagtataacaaggacagatatgtatccaggctatatcatagcataacccacactgaaaatca

SEQ ID NO: 541600 - DNA, 75 bp, synthetic construct
  source 1..75: mol_type = other DNA
aagcccttcatgcgccccgcaaaatcgacctgcgtaaggaagccggactgctgggcgtgaatatcgtgaccgata

SEQ ID NO: 541601 - DNA, 75 bp, synthetic construct
  source 1..75: mol_type = other DNA
gcattccatgaagccctggacgaactgctgaaagcggcctttgcactaaacatgtggggtgccagcgtgcgcatc

SEQ ID NO: 541602 - DNA, 75 bp, synthetic construct
  source 1..75: mol_type = other DNA
tcaggagtggatgccaaaactgaaaggcgagtttgaagcgcagaacatcacgattgcccggcaccagaccacact

SEQ ID NO: 541603 - DNA, 75 bp, synthetic construct
  source 1..75: mol_type = other DNA
taggccctttaattcgtttctactctgaaatcagaagagtttcacctgaatttagaactattgcaattaataact

SEQ ID NO: 541604 - DNA, 75 bp, synthetic construct
  source 1..75: mol_type = other DNA
aattgtttctttcgcattagcggagaaaggagagaagctttcaaaaagacttagtgagcaaagacgttttctcaa

SEQ ID NO: 541605 - DNA, 75 bp, synthetic construct
  source 1..75: mol_type = other DNA
ttgtccttgaccgtgttgcgataactatagttactgctaaaaatgaagattatgcattcgatatgtttgaatctt

SEQ ID NO: 541606 - DNA, 75 bp, synthetic construct
  source 1..75: mol_type = other DNA
tatcaggcctacaaattcccgcaccctccgtaggccggataaggcgtttacgccgcatccggcaacagtgccgac

SEQ ID NO: 541607 - DNA, 75 bp, synthetic construct
  source 1..75: mol_type = other DNA
cccttctgaaaaaatttaccaggaagctgatggtactgttcagaaaacggaagcagatgctgacttagcagcagt

SEQ ID NO: 541608 - DNA, 75 bp, synthetic construct
  source 1..75: mol_type = other DNA
cctgcacggtttgatctaagccaaatgactattatctttgatcgtccagatcgtccagtacctatgagtcgaact

SEQ ID NO: 541609 - DNA, 75 bp, synthetic construct
  source 1..75: mol_type = other DNA
caggattctttaaccgagcttccttggaccaagccccctgccctggtaccagaagactggcctttaccgtcagac

SEQ ID NO: 541610 - DNA, 75 bp, synthetic construct
  source 1..75: mol_type = other DNA
agcgttgtgcgatatttcgcatttagatataaagggcttcaggctctcttcgcggacaaggtgacatttgatttc

SEQ ID NO: 541611 - DNA, 75 bp, synthetic construct
  source 1..75: mol_type = other DNA
atttgactcaaagttaatgaatggttgggacctacataagtggtcagatgaagtcagacaggataatattccgat

SEQ ID NO: 541612 - DNA, 75 bp, synthetic construct
  source 1..75: mol_type = other DNA
tcagccaaacaacttgaagatactgtagcacgcataggcagagctattgatcccaatcgcaaacgtatagaccgt

SEQ ID NO: 541613 - DNA, 75 bp, synthetic construct
  source 1..75: mol_type = other DNA
gcaaagttgtggcgatgacggtgctcggcctggcaatggcctgctggattgcggtgctggcaattgcggaagctg

SEQ ID NO: 541614 - DNA, 75 bp, synthetic construct
  source 1..75: mol_type = other DNA
gccagccttctgtcctggggtggtattgtcgggatatttaccggcgtcctgggcgttggcggcctgtttggcatc

SEQ ID NO: 541615 - DNA, 75 bp, synthetic construct
  source 1..75: mol_type = other DNA
atgcgacgcttgcgcgtcttatcaggcctacaaattcccgcaccctccgtagccggataggcgtttacgccgcat

SEQ ID NO: 541616 - DNA, 75 bp, synthetic construct
  source 1..75: mol_type = other DNA
ccactgcaacgcaggatggcaaatatactgatggaagtgttgctggtggtattgccgcattgatttgggagaagg

SEQ ID NO: 541617 - DNA, 75 bp, synthetic construct
  source 1..75: mol_type = other DNA
gatcaaagctatcgcacttgttgaaagtaatttaaaaaatgatagcatcggcaagaacagggataagaaaaacaa

SEQ ID NO: 541618 - DNA, 75 bp, synthetic construct
  source 1..75: mol_type = other DNA
ggtttcggtgaggactggatcaattccattgatacctcgcgttatatgctgccctatctattcccggcgctggcg

SEQ ID NO: 541619 - DNA, 75 bp, synthetic construct
  source 1..75: mol_type = other DNA
attccggttctgcgtcgctatggcgtgctcaccgccggtaacgacctgctgaccgatgcctgtctgaacgttcag

SEQ ID NO: 541620 - DNA, 75 bp, synthetic construct
  source 1..75: mol_type = other DNA
cgaaacgatgccgaagcaattaagtggtataaaaaagctgctgaactcggaaacgtcgatgccatgacaaatctt

SEQ ID NO: 541621 - DNA, 75 bp, synthetic construct
  source 1..75: mol_type = other DNA
agaggttgtctgagtggatggcgtataaaaaagcagtgaaagccgtcgacgtatcaacagctcctgatgttatct

SEQ ID NO: 541622 - DNA, 75 bp, synthetic construct
  source 1..75: mol_type = other DNA
tgggcggcattagtttgctcggcggttccggtgcgatcatcggtgcggtactcggcgcatggttcctgacgcaga

SEQ ID NO: 541623 - DNA, 75 bp, synthetic construct
  source 1..75: mol_type = other DNA
acaaggctcatcgactgatccagttacggatacacaaaaaatctcagctctatttaactcttacatgaacagcta

SEQ ID NO: 541624 - DNA, 75 bp, synthetic construct
  source 1..75: mol_type = other DNA
agaatattgagttttgctcttacaatggcttacacatactcaagataactattcagagcacaggtcaaatttgcg

SEQ ID NO: 541625 - DNA, 75 bp, synthetic construct
  source 1..75: mol_type = other DNA
gcgactggcaagctacacaccacgataaacgagcgcagaacgggattacactgcttttcccaatgaacgacctgt

SEQ ID NO: 541626 - DNA, 75 bp, synthetic construct
  source 1..75: mol_type = other DNA
aacactccaaccttccatgagatacgcgcattagcggcggtttatccccgctggcgcggggaacacgtggaccgc

SEQ ID NO: 541627 - DNA, 75 bp, synthetic construct
  source 1..75: mol_type = other DNA
ccccgctggcgcggggaacactgagcgtcggcggctcgctggatttgcgcggcggtttatccccgctggcgcggg

SEQ ID NO: 541628 - DNA, 75 bp, synthetic construct
  source 1..75: mol_type = other DNA
cttgatgattgaaaacgaggttggtgtttcctctcgtttagttaaagtgcccaaactggacatggattactgtga

SEQ ID NO: 541629 - DNA, 75 bp, synthetic construct
  source 1..75: mol_type = other DNA
gaactggaggccgttttgatgggtgctggtatctgctctatgaacagatcaaggagtaccttgatactggtcgtt

SEQ ID NO: 541630 - DNA, 75 bp, synthetic construct
  source 1..75: mol_type = other DNA
caccgcctgcggtcagagcggtggcggcaactgccctgattgtggcgcggtgatgggcgacgcaacataccagga

SEQ ID NO: 541631 - DNA, 75 bp, synthetic construct
  source 1..75: mol_type = other DNA
gaagaataacatatatggaagtattgttgctcctaaaaaaatctcagtaattaataatatttctggattaggtga

SEQ ID NO: 541632 - DNA, 75 bp, synthetic construct
  source 1..75: mol_type = other DNA
taataagtgtggggatggtattacatattctgatgggtttgaaacatttacccgaattcttgtacgtgacgttga

SEQ ID NO: 541633 - DNA, 75 bp, synthetic construct
  source 1..75: mol_type = other DNA
taggtgacaatatcataggtgacaaatacgaatatataattcgtagtattaaatctagggatctgcggactgtta

SEQ ID NO: 541634 - DNA, 75 bp, synthetic construct
  source 1..75: mol_type = other DNA
tattaaagcatgtaatgagagcctggttgcttgtcagaatggtaaaaaaatagatgagcaagggagtattgaagc

SEQ ID NO: 541635 - DNA, 75 bp, synthetic construct
  source 1..75: mol_type = other DNA
cctggtttcaggtggtaatcggtcagagtatctgcggcgctgccttgaagctggcccaggtgatctggagtccgg

SEQ ID NO: 541636 - DNA, 75 bp, synthetic construct
  source 1..75: mol_type = other DNA
tatttcagagtcggtagggaaatttttacacaactttatcttcaattatgaatttgaagaaggctacattataga

SEQ ID NO: 541637 - DNA, 75 bp, synthetic construct
  source 1..75: mol_type = other DNA
tatgagggtggcctaacaaacatactatctgatagatgcgcctacttaatagggaataaaattaaagagaggaga

SEQ ID NO: 541638 - DNA, 75 bp, synthetic construct
  source 1..75: mol_type = other DNA
tctatggcattaaacctgcagagatgatgactggagaaactgttaacaactttgcttccagggtacttgctcaac

SEQ ID NO: 541639 - DNA, 75 bp, synthetic construct
  source 1..75: mol_type = other DNA
ctggagaaagggcatcagtccggcattattcgcgtgcagattaattctcgctttgaaggctgtctggaatatgaa

SEQ ID NO: 541640 - DNA, 75 bp, synthetic construct
  source 1..75: mol_type = other DNA
gcaaattcgcctggtcacgctctccggtggcgtcggttcttatatgacgggtatcgggcagcttaacgcggcgtg

SEQ ID NO: 541641 - DNA, 75 bp, synthetic construct
  source 1..75: mol_type = other DNA
gaaaatctttattagatgaaaattatgaggctgcattgtttattgccttatctcttcctgatatatgtgggaaac

SEQ ID NO: 541642 - DNA, 75 bp, synthetic construct
  source 1..75: mol_type = other DNA
cagcaggagatagccttacactggtaacgacgggcggcggtgatgctgcattcacgttgggcaatgccggaggcg

SEQ ID NO: 541643 - DNA, 75 bp, synthetic construct
  source 1..75: mol_type = other DNA
tggaagagagaggtctggagaaaggtcgtgctgaagagcgctccagattagtgctcatgatgagacaaaggggaa

SEQ ID NO: 541644 - DNA, 75 bp, synthetic construct
  source 1..75: mol_type = other DNA
cctagtttcaatagttaataaccttcacagaacgaaacaaacagaaaaacaaatttcagaggccgaacaaaaaaa

SEQ ID NO: 541645 - DNA, 75 bp, synthetic construct
  source 1..75: mol_type = other DNA
acgcaaaatatatgcgtagtttgggaaaggatgtgcatttcaatacacctccgaatcgctcagtatcaatggcag

SEQ ID NO: 541646 - DNA, 75 bp, synthetic construct
  source 1..75: mol_type = other DNA
gatctgagtcgccttggtgtggatattgtggaatacaccgtggaatgcggccccggtattgcccgcccggaaaaa

SEQ ID NO: 541647 - DNA, 75 bp, synthetic construct
  source 1..75: mol_type = other DNA
atggtcgatattacccgtgtgcgtcgcgaatctctgcgctggagtttgttggttgccctgaacaagacccgccct

SEQ ID NO: 541648 - DNA, 75 bp, synthetic construct
  source 1..75: mol_type = other DNA
gttgcggaaggtagattggtaaccgatgtaagaccgggtaatttccgctctcccacgactttcacgatcacttat

SEQ ID NO: 541649 - DNA, 75 bp, synthetic construct
  source 1..75: mol_type = other DNA
ccgacaccacaactcagccttacgattacccgttaagtgcacggatgaccgttgcggaaggtagattggtaaccg

SEQ ID NO: 541650 - DNA, 75 bp, synthetic construct
  source 1..75: mol_type = other DNA
atctatttatcattagctatctattttgaagagcgcaggcgttcaaaagatggtatccacatgtcaagagaagta

SEQ ID NO: 541651 - DNA, 75 bp, synthetic construct
  source 1..75: mol_type = other DNA
ccgaccatcaatatggctgatggcggatttaacctgatgtctgattcatcagtactgaaagccagagaccaggca

SEQ ID NO: 541652 - DNA, 75 bp, synthetic construct
  source 1..75: mol_type = other DNA
tatctacttgttgtggctgactcgcggctggcgtaaatcgccgccatccgttaatccagatgatatttcacacct

SEQ ID NO: 541653 - DNA, 75 bp, synthetic construct
  source 1..75: mol_type = other DNA
tttggtgccctcggtgctttcacctttgttaatttgagtgtgataaagcactttattatcaatgagaaacaccgc

SEQ ID NO: 541654 - DNA, 75 bp, synthetic construct
  source 1..75: mol_type = other DNA
gcactggcgcttttacattgttcgccgactatgaaattaatgatcttactgtccgggctgataacggtgagacgt

SEQ ID NO: 541655 - DNA, 75 bp, synthetic construct
  source 1..75: mol_type = other DNA
gatagtcatggagaatattgggacgaaatattttcaggtaaagatgagaaaatagttaaaagtaaagataacaat

SEQ ID NO: 541656 - DNA, 75 bp, synthetic construct
  source 1..75: mol_type = other DNA
ggtgcagaagcgggctaccgctatcatgtcactgaggatgcctggattgagccacaggctgagctggtttacggt

SEQ ID NO: 541657 - DNA, 75 bp, synthetic construct
  source 1..75: mol_type = other DNA
tatggcgcgcgtgttattgccattacgccagcacaaacaccgctggcagaacaggtagatctggtattgccgctg

SEQ ID NO: 541658 - DNA, 75 bp, synthetic construct
  source 1..75: mol_type = other DNA
gccggctatctcgacgaaattacgcagcctggcgaagaggttttctgtcggtgctacgtcacctatctgtacaac

SEQ ID NO: 541659 - DNA, 75 bp, synthetic construct
  source 1..75: mol_type = other DNA
acgggcaacaacgcgattgctgccgagtggcatagccactggcgccagccagggtacgactaccgggaagatcac

SEQ ID NO: 541660 - DNA, 75 bp, synthetic construct
  source 1..75: mol_type = other DNA
aaggctcatcttgttcacggcatgccgagaaaaagcgtgtgtgatgaatataatgttaataatggttatcttagc

SEQ ID NO: 541661 - DNA, 75 bp, synthetic construct
  source 1..75: mol_type = other DNA
atgtcgcaacgtaaaactttatgtaaattaacatggttaacatttatgccactattgtttgtaaattcatattac

SEQ ID NO: 541662 - DNA, 75 bp, synthetic construct
  source 1..75: mol_type = other DNA
agaactttgtgcttcaaagatgagaattttctttggaataatgaatatttatgaaaagacttgcaagcatctttg

SEQ ID NO: 541663 - DNA, 75 bp, synthetic construct
  source 1..75: mol_type = other DNA
tgtctttatttaggctcatttgtctggataaacaaattaaactcatttagccttacaagccacggctatcagcga

SEQ ID NO: 541664 - DNA, 75 bp, synthetic construct
  source 1..75: mol_type = other DNA
tgaactggcagccaaaagcaaggtacaaccttttaaaatccgcttcagcgattgtgccggccttccaggaaagaa

SEQ ID NO: 541665 - DNA, 75 bp, synthetic construct
  source 1..75: mol_type = other DNA
caaccattcaaaatccgcttcagtgattgtgccggccttccaggaaagagtgctcaactcgtcttagcgcccagg

SEQ ID NO: 541666 - DNA, 75 bp, synthetic construct
  source 1..75: mol_type = other DNA
aagcgcaggcgaaagatcgcctgcggcggataaaactggtgttagacagccaccgtgggggcgctaaccgccagc

SEQ ID NO: 541667 - DNA, 75 bp, synthetic construct
  source 1..75: mol_type = other DNA
tgctcacccgtgtccggcgcacacactccacctcacctgtggagaactccttaattaccaaccctcaggagggtg

SEQ ID NO: 541668 - DNA, 75 bp, synthetic construct
  source 1..75: mol_type = other DNA
attgttaattcttacaaaaatgaaatttcatatatcatttctgaaaatgataatggtatatatgatgcaatgaat

SEQ ID NO: 541669 - DNA, 75 bp, synthetic construct
  source 1..75: mol_type = other DNA
gttatccagcagctgccatcactctaattggtagcggggcacttcgtggtgcagggaatacgaaaataccgctac

SEQ ID NO: 541670 - DNA, 75 bp, synthetic construct
  source 1..75: mol_type = other DNA
cgattcgccccggcgtgcgctgccaacaggttgacgacgccgcgcgccggatcattacagaagccggttatggtg

SEQ ID NO: 541671 - DNA, 75 bp, synthetic construct
  source 1..75: mol_type = other DNA
gcttggttttgaaagccagcaggtgagttgggaaagcgcacatcgctggcagactgaactcaatgcaacgttggt

SEQ ID NO: 541672 - DNA, 75 bp, synthetic construct
  source 1..75: mol_type = other DNA
gccgattgccgcgacattttgcagatggagcaacttttatctgcccttattcaacgtcttacgcgtgagacggtt

SEQ ID NO: 541673 - DNA, 75 bp, synthetic construct
  source 1..75: mol_type = other DNA
ctggtgcattaagtattattgaaaatatgggcagtgaaaaatatctttactttaccgttaacaacaaagagttta

SEQ ID NO: 541674 - DNA, 75 bp, synthetic construct
  source 1..75: mol_type = other DNA
ccgctccagcaggtcggcttaatctcagcgttggttatgaggcggcttgggtatcgcgttttatcgtcagcagac

SEQ ID NO: 541675 - DNA, 75 bp, synthetic construct
  source 1..75: mol_type = other DNA
tcccagaacatacgattagagcgcctcaccctaaaacaatcagaataaaaggatgggaaaatgatttcataaaat

SEQ ID NO: 541676 - DNA, 75 bp, synthetic construct
  source 1..75: mol_type = other DNA
gtgaaaaaaggtaacgaaggcacccttaaaacggctgctgatctgaaaggcaaaaaagtgggtgtcggtctgggc

SEQ ID NO: 541677 - DNA, 75 bp, synthetic construct
  source 1..75: mol_type = other DNA
taatggagaaaatattttacaactcactgaaattagcactactgattctgaagataaattaatatgcttatgtaa

SEQ ID NO: 541678 - DNA, 75 bp, synthetic construct
  source 1..75: mol_type = other DNA
atgcgctataatggtttaaataatatgtttttccctctttgccagattaacgataaccactctatcacaagttca

SEQ ID NO: 541679 - DNA, 75 bp, synthetic construct
  source 1..75: mol_type = other DNA
cgctttctctgcctgtcgcgctgtgtggtgccgtgacgtatgcagtcattggttggcaaaatattccggtgagcg

SEQ ID NO: 541680 - DNA, 75 bp, synthetic construct
  source 1..75: mol_type = other DNA
tggcaggctttactaccggtatcaccacggtgctctttggttttgggggcggttttgtcgtggtgccatttgttt

SEQ ID NO: 541681 - DNA, 75 bp, synthetic construct
  source 1..75: mol_type = other DNA
ggcggcgctggatctggtgaagaaaaccaacgatacgctggcagtaaccggtgaagcattctcccgtcaggagtc

SEQ ID NO: 541682 - DNA, 75 bp, synthetic construct
  source 1..75: mol_type = other DNA
tttatggcagtatcggagtgtccggcttcgacgaagatgccatccgcgggcgtgatattgttgtcgcaaccccag

SEQ ID NO: 541683 - DNA, 75 bp, synthetic construct
  source 1..75: mol_type = other DNA
aggatgttaaaagatacgatcaaaaggtactgtatggatttgttattgcacttacaaaaatagggttctgggctg

SEQ ID NO: 541684 - DNA, 75 bp, synthetic construct
  source 1..75: mol_type = other DNA
actacgtagagcagcggttaacaccggagcgtatctgcgggatcggcatggacagccgcatcctcgaaacatcat

SEQ ID NO: 541685 - DNA, 75 bp, synthetic construct
  source 1..75: mol_type = other DNA
actaccccggacgtttcaagggtgctcacgggcagaactttgcccgctggcagatggatggctggcgcaacaacg

SEQ ID NO: 541686 - DNA, 75 bp, synthetic construct
  source 1..75: mol_type = other DNA
tgaaggtgaagctcttgatgatgtcgttgttattggtgtagtgacgttcattataaactgcctattgaaggataa

SEQ ID NO: 541687 - DNA, 75 bp, synthetic construct
  source 1..75: mol_type = other DNA
ctgctgattttgtccggcggcaggacgcagtttgtgaaactcaggggcagggcattaatcactgatgatggtgaa

SEQ ID NO: 541688 - DNA, 75 bp, synthetic construct
  source 1..75: mol_type = other DNA
aaggcaaattcgaacggattagctgggatgaagccctggatactatcgccagtagcctgaaaaaaaccgtcgaac

SEQ ID NO: 541689 - DNA, 75 bp, synthetic construct
  source 1..75: mol_type = other DNA
ttcagatagactcatatggtgactacgacaacaattggcacactcttgagttgcaatatgagaaaggcacaggaa

SEQ ID NO: 541690 - DNA, 75 bp, synthetic construct
  source 1..75: mol_type = other DNA
tgcttgtggcgatttttctgccaaatgtagcgatgcatgtattgaaaaatataacactgggcaactcttcgggtt

SEQ ID NO: 541691 - DNA, 75 bp, synthetic construct
  source 1..75: mol_type = other DNA
tataaatggcttttataatccacgccgaagacattcaacactcggctctgatgaatcccctaatgattttggtaa

SEQ ID NO: 541692 - DNA, 75 bp, synthetic construct
  source 1..75: mol_type = other DNA
ggcacgctcaataatgtcaccattaacgagaactgtgtcatcagagggaaactgtctgcaaaccagattgaaggc

SEQ ID NO: 541693 - DNA, 75 bp, synthetic construct
  source 1..75: mol_type = other DNA
ctacggcagtaatgatggcaacagcaccacggatattgaaaacagcaagctggtcgtgatgtttggtaacaaccc

SEQ ID NO: 541694 - DNA, 75 bp, synthetic construct
  source 1..75: mol_type = other DNA
ggaaaatatccccattgatagtgataccctggtaacactacagaaattctttgaagaagattgtacctctcatac

SEQ ID NO: 541695 - DNA, 75 bp, synthetic construct
  source 1..75: mol_type = other DNA
acttccgggtgggcattgtcatgacaatccccgtgctgtttgtcacgctggcagcactggcgcttcgtctgtctt

SEQ ID NO: 541696 - DNA, 75 bp, synthetic construct
  source 1..75: mol_type = other DNA
atggcatttaaacactatgacgtggtcagggcggcgtcgccgtcagaccttgctgatacacttgctcaaaaaatt

SEQ ID NO: 541697 - DNA, 75 bp, synthetic construct
  source 1..75: mol_type = other DNA
tgcgcacaggcgcggtgattatctgacagctgaaaaaataagaaaacgcgcagctcgggtatttgtaaatgacga

SEQ ID NO: 541698 - DNA, 75 bp, synthetic construct
  source 1..75: mol_type = other DNA
gcggcaacgctgggtacgggcttcctgacagccttcctgtcatcggtgatgaacaatatgccgaccgtgctggtc

SEQ ID NO: 541699 - DNA, 75 bp, synthetic construct
  source 1..75: mol_type = other DNA
gtgcgccctggcaaatcgttatcttctcgctgggcatgtacctggtggtctacggcttacgaaatgccggtctga

SEQ ID NO: 541700 - DNA, 75 bp, synthetic construct
  source 1..75: mol_type = other DNA
tgcatttgcggcggataaactgcatgtgacagacattaccaggaatgcgacttacccggtactgatagacagcat

SEQ ID NO: 541701 - DNA, 75 bp, synthetic construct
  source 1..75: mol_type = other DNA
tgatgatctgaaagtgtttgtgatgggtgaagttaaaaaacagagcaccctgaaagtggactttagcggcatgac

SEQ ID NO: 541702 - DNA, 75 bp, synthetic construct
  source 1..75: mol_type = other DNA
gctcgcaaaaaccgtatatctccggtcaggtgaataaatccggtcaacaggcgatcaccaacgtaccactgacca

SEQ ID NO: 541703 - DNA, 75 bp, synthetic construct
  source 1..75: mol_type = other DNA
acgcgtcttatcatgccgacaaaaccgcgctcacccgtaggccggataaggcgttcacgccgcatccggcagttg

SEQ ID NO: 541704 - DNA, 75 bp, synthetic construct
  source 1..75: mol_type = other DNA
gtcctgtttcgacgcaggccgcgcgccagtggccagcctttgaaagtttcagccatcagatggaatacagccgga

SEQ ID NO: 541705 - DNA, 75 bp, synthetic construct
  source 1..75: mol_type = other DNA
agtctccgccgaacccgctggcgcggtttcgggctgccgctacggtccgatgtctgaaaaaccaggcctgcagcg

SEQ ID NO: 541706 - DNA, 75 bp, synthetic construct
  source 1..75: mol_type = other DNA
aaacaccggatgaactggatgaaaatgatattgccaaaatgcttcgtcagaatatcttaccagcgcttgctgtac

SEQ ID NO: 541707 - DNA, 75 bp, synthetic construct
  source 1..75: mol_type = other DNA
tacattctatgaaaataatactctttcaaaaatagcaaatgccattcacgaaaatatgagtgcaacaactatata

SEQ ID NO: 541708 - DNA, 75 bp, synthetic construct
  source 1..75: mol_type = other DNA
atttatagatatattgatattatagattattttttatgcgaatctgatcaaggaatatacgacgcttggaataaa

SEQ ID NO: 541709 - DNA, 75 bp, synthetic construct
  source 1..75: mol_type = other DNA
atgtattcgcgttttattattggttactggcatcttcagactcagtccgctttgctggcacatctctgtcagctg

SEQ ID NO: 541710 - DNA, 75 bp, synthetic construct
  source 1..75: mol_type = other DNA
tagcgtccagggaatgggcatttccattctccgtggggaggaaaatatccccattgatagtgataccctggtaac

SEQ ID NO: 541711 - DNA, 75 bp, synthetic construct
  source 1..75: mol_type = other DNA
taaacttaattgatagcaaactcttttgtacgtggctgacaaatacattcctcgaaatggttatatgtaccggct

SEQ ID NO: 541712 - DNA, 75 bp, synthetic construct
  source 1..75: mol_type = other DNA
aacttcgtttagttaatgagagtgatgcatctttcatattatcacttagattaaatgaaaactataataaattct

SEQ ID NO: 541713 - DNA, 75 bp, synthetic construct
  source 1..75: mol_type = other DNA
atgggtaaaaatatcaaagagcgcaatcaattagctgattttgccagtgtttttatggcttttattgttgtggct

SEQ ID NO: 541714 - DNA, 75 bp, synthetic construct
  source 1..75: mol_type = other DNA
ttaagatatggttttcagacaagcattttatctgttgatgaattgtcacgttatttatttgtctggtggctttgt

SEQ ID NO: 541715 - DNA, 75 bp, synthetic construct
  source 1..75: mol_type = other DNA
ttatttatttgtctggttaacgtttattggcgcgattggtaatgactccaacttattgatagtgttttatgttca

SEQ ID NO: 541716 - DNA, 75 bp, synthetic construct
  source 1..75: mol_type = other DNA
gcagtgatagtaccccgtatcatatgactcaagatgaaaacccactccgcgccgccatgattgtctttctcatga

SEQ ID NO: 541717 - DNA, 75 bp, synthetic construct
  source 1..75: mol_type = other DNA
agctatcagaggcgttccaggatatgctggaggtcgccaacgcagaagagtttgataaaaaacgctggctggatg

SEQ ID NO: 541718 - DNA, 75 bp, synthetic construct
  source 1..75: mol_type = other DNA
ggggcggtatattactcaggacccgatggggttgaaagggggatggaatttatatcagtatcctttaaatccact

SEQ ID NO: 541719 - DNA, 75 bp, synthetic construct
  source 1..75: mol_type = other DNA
atgcgccatcaggcggcaaaggctatcgcaccggtttgcgcggcggtgggccgatgaccactctgattgaattac

SEQ ID NO: 541720 - DNA, 75 bp, synthetic construct
  source 1..75: mol_type = other DNA
gcttatggggatttggttttgattttgaagatatgaaggttcgttgttggtatgaacaccatttcccgctgttgt

SEQ ID NO: 541721 - DNA, 75 bp, synthetic construct
  source 1..75: mol_type = other DNA
gggcggtatatcactcaggacccgatagggctggagggggggatggagtctgtatgcgtacccgctgaatccggt

SEQ ID NO: 541722 - DNA, 75 bp, synthetic construct
  source 1..75: mol_type = other DNA
cggcacgctgaatgtcgaaggtggagaagtttacttaggtgtttttgaacctgctgtaggaacgctaaacattgg

SEQ ID NO: 541723 - DNA, 75 bp, synthetic construct
  source 1..75: mol_type = other DNA
caccactgcaggtgatatgaacgttatgcctggggggcactgcgtgtcgctaaaaccactatcagcggcaacctg

SEQ ID NO: 541724 - DNA, 75 bp, synthetic construct
  source 1..75: mol_type = other DNA
gtgagtggcgcattagtagtctggaattgttggagttgattaatcagatccgcgtggctgaaggccttaacaaga

SEQ ID NO: 541725 - DNA, 75 bp, synthetic construct
  source 1..75: mol_type = other DNA
catgagacagagcacgcatacaacgaacagggtctggcaaaccgcgtcacgccggacagcctgccgcgggtggag

SEQ ID NO: 541726 - DNA, 75 bp, synthetic construct
  source 1..75: mol_type = other DNA
ggggcaaccagcttaatgaagagaacccgtattacctgcaccagccataccgtctgccaagaaagaagaatgaaa

SEQ ID NO: 541727 - DNA, 75 bp, synthetic construct
  source 1..75: mol_type = other DNA
cggtatacgagccgggaagcttcacaccactcatccgcatcgaaacagacaacggcgagcgggagaaaacgcagc

SEQ ID NO: 541728 - DNA, 75 bp, synthetic construct
  source 1..75: mol_type = other DNA
acctgaccagaaaactcacgcagagtgaagacgaggggcttatcaccctctggcactacgatgcgtcggaccgca

SEQ ID NO: 541729 - DNA, 75 bp, synthetic construct
  source 1..75: mol_type = other DNA
agcaaaacagccggacattcctgattcactgccggagagcacagaatacggcgctgacaggggtatccgcctttc

SEQ ID NO: 541730 - DNA, 75 bp, synthetic construct
  source 1..75: mol_type = other DNA
gatgacgaggggggaaacctgctgggcgaggaaagcgcgcagcaccttcagcagtcactccgtctgccgggacag

SEQ ID NO: 541731 - DNA, 75 bp, synthetic construct
  source 1..75: mol_type = other DNA
cgtcaacgagcagaaaaacctgggtgatgcttccgttatcaataatggcctgctcaccatctccactgagcgtag

SEQ ID NO: 541732 - DNA, 75 bp, synthetic construct
  source 1..75: mol_type = other DNA
tatctagattcagaatgcgatgttgtaaaatttgctctctcaccatttactgaacaggatcggaggctttttact

SEQ ID NO: 541733 - DNA, 75 bp, synthetic construct
  source 1..75: mol_type = other DNA
accaggagagccagctcgcgtgattagcagaggtgacgttgtaattcttgtataccggagtgaagagaaatatga

SEQ ID NO: 541734 - DNA, 75 bp, synthetic construct
  source 1..75: mol_type = other DNA
ggctggtacgatatgtggaactacgtgaatgacgccaccggttatcgtgtgattaacaccggcctgatcccgatt

SEQ ID NO: 541735 - DNA, 75 bp, synthetic construct
  source 1..75: mol_type = other DNA
ggatgatatatgccatcccaagagatttgaaattcaaattgattttttaaataaaaacaagaatataagtgttgt

SEQ ID NO: 541736 - DNA, 75 bp, synthetic construct
  source 1..75: mol_type = other DNA
tttatattaaagagaagcccgaatatctacatgaatgcttaaaaagtctatatgaacaaacaaagcaagctgatg

SEQ ID NO: 541737 - DNA, 75 bp, synthetic construct
  source 1..75: mol_type = other DNA
aagctctccttcaaccacgtgctgacctggggctcggcggatgacaccacgcaattcaccgataaatcgcgcctt

SEQ ID NO: 541738 - DNA, 75 bp, synthetic construct
  source 1..75: mol_type = other DNA
catcagcaacgcggccatcgtcgatcttaatggatcggagcagacggtagaggcattcaccggactgataggttc

SEQ ID NO: 541739 - DNA, 75 bp, synthetic construct
  source 1..75: mol_type = other DNA
ttgggtcgggtggctcattaacgttacgtgatttacagggcgacgaggtggaagcggacaaaacgttacatattg

SEQ ID NO: 541740 - DNA, 75 bp, synthetic construct
  source 1..75: mol_type = other DNA
ttctcaggggtcggcaagcagtatgtggatgcgtcatgtcggagggcacgaacgttcaagggccggtgacggtca

SEQ ID NO: 541741 - DNA, 75 bp, synthetic construct
  source 1..75: mol_type = other DNA
gtcagggtgaactgacaggtggcggaaacatacccggaaagacggaacgcgcattgaaacggaaggcgacggaaa

SEQ ID NO: 541742 - DNA, 75 bp, synthetic construct
  source 1..75: mol_type = other DNA
gaaattcagtaggttgacgctgggtgttttgctggcactaagcggttcggcgtcaggtgcgagtctggaagttga

SEQ ID NO: 541743 - DNA, 75 bp, synthetic construct
  source 1..75: mol_type = other DNA
cgcaatagcataagcggtaaaggtatcgtgagcgcaaccgccagcacagacgtagagctggatggcgataatagc

SEQ ID NO: 541744 - DNA, 75 bp, synthetic construct
  source 1..75: mol_type = other DNA
gggtggtgaaaaaagaactggcggacggcagcgtcacgcgcagcgggtatgacccggtggggcggcttacggcgc

SEQ ID NO: 541745 - DNA, 75 bp, synthetic construct
  source 1..75: mol_type = other DNA
aattatgcaccttttgtacgaatacactagaagtgatagatataagaagcgtatctcgaaattcaaagaacattg

SEQ ID NO: 541746 - DNA, 75 bp, synthetic construct
  source 1..75: mol_type = other DNA
gggtattgattcaatatgtacccgcagatgcatctacaggtagtcagttgttttggctcttcctggctattgtcg

SEQ ID NO: 541747 - DNA, 75 bp, synthetic construct
  source 1..75: mol_type = other DNA
atggtgaattactgtcttatatcattggcgctgacaaactgtcagtgccggattcttatccgtgtccggcgcacg

SEQ ID NO: 541748 - DNA, 75 bp, synthetic construct
  source 1..75: mol_type = other DNA
aagacacgcagggccatgaaacgcggtatgaatacaacgccgccggtgacctgaccgccgtcattgccccggacg

SEQ ID NO: 541749 - DNA, 75 bp, synthetic construct
  source 1..75: mol_type = other DNA
gatgaatacggcagactgacggagaagacggaccgcatcccggcgggtgtgatacggacggacgacgagcggacc

SEQ ID NO: 541750 - DNA, 75 bp, synthetic construct
  source 1..75: mol_type = other DNA
tctgcggttgaatttaggaaaatctaaacgtaatgacggtggcgcactatcatcagctagacgagatttaaaacc

SEQ ID NO: 541751 - DNA, 75 bp, synthetic construct
  source 1..75: mol_type = other DNA
agatcccctggaatccgaacacccgtaccgaggtgagcaccctctgcatcagccagttccgctacagcgcacaaa

SEQ ID NO: 541752 - DNA, 75 bp, synthetic construct
  source 1..75: mol_type = other DNA
cgtgagaaaaatgggctagacttgcaggatttacaagattggtactggaaagagaagatgacatatgagtatcac

SEQ ID NO: 541753 - DNA, 75 bp, synthetic construct
  source 1..75: mol_type = other DNA
tgatccgcaatattctgcgtgagcaacttgtccccgctacaccacgaacgcaaagaaacgctattttccagactg

SEQ ID NO: 541754 - DNA, 75 bp, synthetic construct
  source 1..75: mol_type = other DNA
agatgcgtcttttttatctgaaccactcgccgtactcctggcactggaatgtcagatttagacctcaggaagccg

SEQ ID NO: 541755 - DNA, 75 bp, synthetic construct
  source 1..75: mol_type = other DNA
gacggccatacgctggcgcggctgtgggggtcgctgccgccggatatccggttaagcccgcatctttacctggcg

SEQ ID NO: 541756 - DNA, 75 bp, synthetic construct
  source 1..75: mol_type = other DNA
ggatcaaaccaggttgaaaaggtggggatcattcgtgcgctgacggtgggtgtggcttaccagacgacggtaggc

SEQ ID NO: 541757 - DNA, 75 bp, synthetic construct
  source 1..75: mol_type = other DNA
cggaccgcatcacgcaccggacggtgaacggcgacccggcagagcagtggcagtatgatgagcacgggtggttaa

SEQ ID NO: 541758 - DNA, 75 bp, synthetic construct
  source 1..75: mol_type = other DNA
ctcagcgttccccgacacactgcccggtaccgaatacggtcccgacagaggtatccgcctttcggcggtgtggct

SEQ ID NO: 541759 - DNA, 75 bp, synthetic construct
  source 1..75: mol_type = other DNA
gagcaactgaacccggcagggttaagctaccgctatctttatgagcaggaccgcatcaccgtcaccgacagcctg

SEQ ID NO: 541760 - DNA, 75 bp, synthetic construct
  source 1..75: mol_type = other DNA
tgaagctgggcggaacgccgctggtcgagtacacgcgggaccggctgcaccgtgagacggcccgcagcttcggcg

SEQ ID NO: 541761 - DNA, 75 bp, synthetic construct
  source 1..75: mol_type = other DNA
tggctgtaaatgaccatgggttgacatgtccatcaacaacagattgctcagatagatgtagtgattatattaatc

SEQ ID NO: 541762 - DNA, 75 bp, synthetic construct
  source 1..75: mol_type = other DNA
aatggtattgatccattagggttaagtcccgcagatgtagcgctaataagaagaaaagatcaactaaaccatcaa

SEQ ID NO: 541763 - DNA, 75 bp, synthetic construct
  source 1..75: mol_type = other DNA
aagacgcacagggccgtgaaacgcggtatgaatacaacgccgcaggcgacctgactgccgtcattaccccggacg

SEQ ID NO: 541764 - DNA, 75 bp, synthetic construct
  source 1..75: mol_type = other DNA
actaccactacgacagccagcaccgtctggtgttcgacacgcggatacagcaaggggagccaccggtcgagagcc

SEQ ID NO: 541765 - DNA, 75 bp, synthetic construct
  source 1..75: mol_type = other DNA
actaccactacgacagccagcaccgtctggtgttccacacgcggatacagcaaggggagccacgggtcgagagcc

SEQ ID NO: 541766 - DNA, 75 bp, synthetic construct
  source 1..75: mol_type = other DNA
gatgggagcctctgtctctgattattttaaaaagatgcaaccccgcagagatacctggatttggataatagatac

SEQ ID NO: 541767 - DNA, 75 bp, synthetic construct
  source 1..75: mol_type = other DNA
agggagatatgacccagtacggcggtccgatagtccaggggtcagcgggggtactgataggcgcgccgaccggtg

SEQ ID NO: 541768 - DNA, 75 bp, synthetic construct
  source 1..75: mol_type = other DNA
actaccactacgacagccagcaccggctggtgttctacacgcggatacagcaaggggagccacaggtcgagagcc

SEQ ID NO: 541769 - DNA, 75 bp, synthetic construct
  source 1..75: mol_type = other DNA
actaccactacgacagccagcaccggctggtgttcaacacgcggatacagcaaggggagccactggtcgagagcc

SEQ ID NO: 541770 - DNA, 75 bp, synthetic construct
  source 1..75: mol_type = other DNA
aaagaaagtaatcagcgatggtgctctgacggggtcgagttccgctgtgataacggagagagactgcgtgtcaca

SEQ ID NO: 541771 - DNA, 75 bp, synthetic construct
  source 1..75: mol_type = other DNA
tttccaacacgtcattggttgctgactactttgccaagcgtcgcggcgcactgctggtggacgtaccaaacctgg

SEQ ID NO: 541772 - DNA, 75 bp, synthetic construct
  source 1..75: mol_type = other DNA
actggcttaaatgttttgtcgcggtagtggatgcgggatcgctttcggctgcggcacctgaagtccatcgctcac

SEQ ID NO: 541773 - DNA, 75 bp, synthetic construct
  source 1..75: mol_type = other DNA
atggtagagccaaacctcaaagaagccgtcaaagcgatgtgcaaagcatatccaggtgggcgcgaagcaatggct

SEQ ID NO: 541774 - DNA, 75 bp, synthetic construct
  source 1..75: mol_type = other DNA
ccgcatagtgcgctgggttatcgctcgccacgggaatatctgcggcagtgggcttgtaatgggttaagtgataac

SEQ ID NO: 541775 - DNA, 75 bp, synthetic construct
  source 1..75: mol_type = other DNA
caggacgtcatgctgggagcggtggaacgccgcttcggcaacgagcttccggcgtctccagtagagtggctgacg

SEQ ID NO: 541776 - DNA, 75 bp, synthetic construct
  source 1..75: mol_type = other DNA
cgcaacaacaacatcgttctggaatatcgcaaaaaagaactggttcgcctgtccctgacagaccccgtgacaggg

SEQ ID NO: 541777 - DNA, 75 bp, synthetic construct
  source 1..75: mol_type = other DNA
gtaccaatgcacgattggtggatgttgatggttgcatatttaacaggaacggttatttttgatcaacaatcccat

SEQ ID NO: 541778 - DNA, 75 bp, synthetic construct
  source 1..75: mol_type = other DNA
cacaagcacaagggcaactcgtatcaacagatttcaatcgattcgagcaatttttggagtcgcttggattaccaa

SEQ ID NO: 541779 - DNA, 75 bp, synthetic construct
  source 1..75: mol_type = other DNA
tattcgccgctttattcaggcggggatgagcgagcgcgagatagccgctgaactggagtggtttatgcgccagca

SEQ ID NO: 541780 - DNA, 75 bp, synthetic construct
  source 1..75: mol_type = other DNA
cagaggaaatattgccaatgacggtctgttaacgctaaaaaacgtgactggcgaactgcgtaatagcataagcgg

SEQ ID NO: 541781 - DNA, 75 bp, synthetic construct
  source 1..75: mol_type = other DNA
gtgcgccgcttcagccgttatgatctggtggatcgcaacaacaacatcgttctggaatatcgcaaaaaagaactg

SEQ ID NO: 541782 - DNA, 75 bp, synthetic construct
  source 1..75: mol_type = other DNA
ctgctggtggatgttccgcacctggaagagctggatcgcgtggacttgtttagccgggcaatgcgtacctctgcc

SEQ ID NO: 541783 - DNA, 75 bp, synthetic construct
  source 1..75: mol_type = other DNA
atagtacagaaaatacagttggcatatcaattggggtttatagcaagtatatggcaaatattaggtagtgtattt

SEQ ID NO: 541784 - DNA, 75 bp, synthetic construct
  source 1..75: mol_type = other DNA
gagtgcttcttggaacgctgattccctttgttttattgacttttataccaacattatttatatcattgggctttt

SEQ ID NO: 541785 - DNA, 75 bp, synthetic construct
  source 1..75: mol_type = other DNA
ggcacgatatgctgattcgttttcctgaagatacaggtactctgccctggatcctgttaagaacaccttacaaaa

SEQ ID NO: 541786 - DNA, 75 bp, synthetic construct
  source 1..75: mol_type = other DNA
taaaagaaaaaataggctatagcctgggcgatgccgccagccatatcgtctttgattcttctgttgccatcctcg

SEQ ID NO: 541787 - DNA, 75 bp, synthetic construct
  source 1..75: mol_type = other DNA
aattaacgagaataaagaatatggtgggctaatatgtaagaagcaaggtgaatatttccctatgaatccgataag

SEQ ID NO: 541788 - DNA, 75 bp, synthetic construct
  source 1..75: mol_type = other DNA
tgcccttgaaaatgcgctagcgtggagagactatcgggttaaagagtgggcggctgaatctgatattgctgaact

SEQ ID NO: 541789 - DNA, 75 bp, synthetic construct
  source 1..75: mol_type = other DNA
cgatgtcgttgaggctaaagaatcaacagaggatcggacttatttctttgatgcaggttacccccatatagggat

SEQ ID NO: 541790 - DNA, 75 bp, synthetic construct
  source 1..75: mol_type = other DNA
aaatatatgatcgaaggctatcgcgaagtggcatatctatgtgactctgtacgcgttattgaatcaacacaagta

SEQ ID NO: 541791 - DNA, 75 bp, synthetic construct
  source 1..75: mol_type = other DNA
gatgaggttcatctttttcgtgcaagggtttttgaggaccaagaggaagtaaagcaagccttggagcatcccgag

SEQ ID NO: 541792 - DNA, 75 bp, synthetic construct
  source 1..75: mol_type = other DNA
attaagcaatctgctgctgaagcgcccccttcgtgcactaagcctggcaagacaagaggctgtattttgcagcac

SEQ ID NO: 541793 - DNA, 75 bp, synthetic construct
  source 1..75: mol_type = other DNA
ggattatactttcccggagccaggtatcaccgtcacggttccgagcaaacagtgggttgccaatatagtaaaaca

SEQ ID NO: 541794 - DNA, 75 bp, synthetic construct
  source 1..75: mol_type = other DNA
gcggtacattgggtcagataatcgcattagtggtggagcaggctcaggttattcactgacacagagagggataga

SEQ ID NO: 541795 - DNA, 75 bp, synthetic construct
  source 1..75: mol_type = other DNA
tttttatggctgggactggttttttcgcttttttataccagagcggtaaacaatgatatatggaaggggatatta

SEQ ID NO: 541796 - DNA, 75 bp, synthetic construct
  source 1..75: mol_type = other DNA
caaaaaaatattgattttattaatctatataatgaaataaggaagaaatacaacaacaacccatcgggacaacaa

SEQ ID NO: 541797 - DNA, 75 bp, synthetic construct
  source 1..75: mol_type = other DNA
aaggccaaagtcttcagttatatcgtaagcgtaaagccaatgccgtctgtaacacctgctccttgcagactaaat

SEQ ID NO: 541798 - DNA, 75 bp, synthetic construct
  source 1..75: mol_type = other DNA
tgcttctcaattttatttaataaaagcttctattgttgtcttaataaagaaagaggagcatcgaggcttgaaagt

SEQ ID NO: 541799 - DNA, 75 bp, synthetic construct
  source 1..75: mol_type = other DNA
aactcagagagctttatgctacttatcaaaaaatatccacccctctgaaacacatgtttaattcattttttttag

SEQ ID NO: 541800 - DNA, 75 bp, synthetic construct
  source 1..75: mol_type = other DNA
aaaaggaatccaaaagcgaccatcaaatccccctgtcagataagttcctgaaaaggaaaaaacggtctcctgtag

SEQ ID NO: 541801 - DNA, 75 bp, synthetic construct
  source 1..75: mol_type = other DNA
gtcgtgcaatatctgatggtgtattaagatatgttaataaccaaaatattgatgaagttaactataatgaaatca

SEQ ID NO: 541802 - DNA, 75 bp, synthetic construct
  source 1..75: mol_type = other DNA
gtccgcgaatcagggatctccacgacaagaagctgtttatcaaagggaaagcggaccaatacccggcacttcagt

SEQ ID NO: 541803 - DNA, 75 bp, synthetic construct
  source 1..75: mol_type = other DNA
gaaggccggaaatggattggcggtcaggcccgtggtggtgccgggcagccggctattcgccccacacatgatctg

SEQ ID NO: 541804 - DNA, 75 bp, synthetic construct
  source 1..75: mol_type = other DNA
gtaacagtgttctgaccatcattgaacgggataacgagcgtgtggggaataacccgatgatccagcaggctgaca

SEQ ID NO: 541805 - DNA, 75 bp, synthetic construct
  source 1..75: mol_type = other DNA
ccgcggtgctcgaacaccaacggctttcaggtgcaaaaactgtgcgtaattgcggagaacagtatgtcaaatacc

SEQ ID NO: 541806 - DNA, 75 bp, synthetic construct
  source 1..75: mol_type = other DNA
aaactggctggagaaatgattggtatcgctgccggtctggaaattccgatgatgttaatcgcaggctattacatg

SEQ ID NO: 541807 - DNA, 75 bp, synthetic construct
  source 1..75: mol_type = other DNA
tgggtgaaatcagggaccggaaaccggaaaatcagagctatcgcgccagtggactgacgctgctgacggcagcta

SEQ ID NO: 541808 - DNA, 75 bp, synthetic construct
  source 1..75: mol_type = other DNA
aaaaaattcggaggatgaccattcctgtagacaatataattaacatctatcctgatctacataaaaaaaatgaca

SEQ ID NO: 541809 - DNA, 75 bp, synthetic construct
  source 1..75: mol_type = other DNA
tgactaaagtcgcgctggcgctggctttagcggggtactgcgcagtgcctgccgccatggcagaagggcagggca

SEQ ID NO: 541810 - DNA, 75 bp, synthetic construct
  source 1..75: mol_type = other DNA
tcccagttaccaacgccgaagcgaaaactgcgttcgactacagcgaaggtggcctcacccttggcgcggatggtg

SEQ ID NO: 541811 - DNA, 75 bp, synthetic construct
  source 1..75: mol_type = other DNA
tgactaaagtcgcgctggcgctggctttagcgggatactgcgcagtgcctgctgctatggcagaagggcagggca

SEQ ID NO: 541812 - DNA, 75 bp, synthetic construct
  source 1..75: mol_type = other DNA
cacccggacagtaccacattataacacaatcaacttatttaatgatgatggtggctttattttttatagacatca

SEQ ID NO: 541813 - DNA, 75 bp, synthetic construct
  source 1..75: mol_type = other DNA
gtcacaatgtccgctgggtgcgtgatgagatgagcagtctggtgctgctgactgacacgccctggtatccgcctt

SEQ ID NO: 541814 - DNA, 75 bp, synthetic construct
  source 1..75: mol_type = other DNA
ctgtttaaccctgacacagttgaagcatacgcaaaacgcgcggagatatcgcctaaaccactatatgccgcgtcg

SEQ ID NO: 541815 - DNA, 75 bp, synthetic construct
  source 1..75: mol_type = other DNA
ggtgttaggtgaagagttcattaatgaaagaaaactgagtgataaagcttatattggtgtctacaaaacaactgg

SEQ ID NO: 541816 - DNA, 75 bp, synthetic construct
  source 1..75: mol_type = other DNA
aaagtagtatcaggtgatatttcagatgttccaaactcggtaatgaaaatgcataaaataagaatagaagggcat

SEQ ID NO: 541817 - DNA, 75 bp, synthetic construct
  source 1..75: mol_type = other DNA
aaaagagattatgctggcgaaacaaaaagtcttatcgggacagttatcagatatacccgattcggtaaacaagat

SEQ ID NO: 541818 - DNA, 75 bp, synthetic construct
  source 1..75: mol_type = other DNA
gacctctttcgactattccgaaggcggcctcactattggcgcagacggtgttcagggctacggtttgtctatcga

SEQ ID NO: 541819 - DNA, 75 bp, synthetic construct
  source 1..75: mol_type = other DNA
gtttcctgatttggatggctggggttatcggggggatccttcactgtggcgtgaaatgcgtcagtctttatcgcg

SEQ ID NO: 541820 - DNA, 75 bp, synthetic construct
  source 1..75: mol_type = other DNA
ccatcgggacaacaagagtacttaaacaaactcagagagctttatgctacttatcaaaaaatatccacccctctg

SEQ ID NO: 541821 - DNA, 75 bp, synthetic construct
  source 1..75: mol_type = other DNA
atacagaaagatgtattgcccttattgattatgagaactgcagtaatctgaaaaatatatcacttaaagaatata

SEQ ID NO: 541822 - DNA, 75 bp, synthetic construct
  source 1..75: mol_type = other DNA
acgattgccacgaatttttctaaagctggcgctattgttttacattcagataattttactaagaatgatttttat

SEQ ID NO: 541823 - DNA, 75 bp, synthetic construct
  source 1..75: mol_type = other DNA
atcgccattccgctaatggatatggtggcgattatgtaccgtcgcctgcgtaaaggcatgagcccattctctcct

SEQ ID NO: 541824 - DNA, 75 bp, synthetic construct
  source 1..75: mol_type = other DNA
ttgttaaagaaaactcttcggtgtactccgtcaaggtcactattccgccttatatgcgttccctttttgggaatc

SEQ ID NO: 541825 - DNA, 75 bp, synthetic construct
  source 1..75: mol_type = other DNA
aaccatactccacgataaaaaataaaaatggaaatataacctgggctatagtcgatgacttaggtgctattagct

SEQ ID NO: 541826 - DNA, 75 bp, synthetic construct
  source 1..75: mol_type = other DNA
agatatcgtaattaatagggtaaaaggtaattactcgcaaaaacaagaaacattaaaaaaattatgcgtaagagc

SEQ ID NO: 541827 - DNA, 75 bp, synthetic construct
  source 1..75: mol_type = other DNA
ttgccattgccctgaccggcaccgaaggcggcaggaagagaatggcgtccctggaatccacctatgtgacgttgt

SEQ ID NO: 541828 - DNA, 75 bp, synthetic construct
  source 1..75: mol_type = other DNA
gctgggccgccgggtgctggcggaaaacggtctggagggtgagacgatggcccgcttcattgctgccggtaaaaa

SEQ ID NO: 541829 - DNA, 75 bp, synthetic construct
  source 1..75: mol_type = other DNA
ctggttgcgccgcgctgctggtcgcctttgtggccacattcgccgtgtactggtatatcgggcgcaccggtcgcc

SEQ ID NO: 541830 - DNA, 75 bp, synthetic construct
  source 1..75: mol_type = other DNA
gggttggtccttcgtttattacaatagccaactggttccctcgtaaagaacggggcatcgtcggtgcggtctgga

SEQ ID NO: 541831 - DNA, 75 bp, synthetic construct
  source 1..75: mol_type = other DNA
gctatagtcgtgctgatgacaggtaaaggttctcccgtaagtgaaggtttaccaccattaagcgaaattgttccg

SEQ ID NO: 541832 - DNA, 75 bp, synthetic construct
  source 1..75: mol_type = other DNA
gctatagtggtactgatgtcaggtaaaggttcgcccgtaagtgaaggtttgccgccattaagcgaaatcgtcccg

SEQ ID NO: 541833 - DNA, 75 bp, synthetic construct
  source 1..75: mol_type = other DNA
ccgttgagggggtatggtgtttcgatgtgacggagggtaagacacgcaatgcggctcgcctggttccaattcata

SEQ ID NO: 541834 - DNA, 75 bp, synthetic construct
  source 1..75: mol_type = other DNA
atacggcgcaggatgcaagcacaacgcaaaagggattagttcagctcagtagcgcaactaacagcgacagcgaaa

SEQ ID NO: 541835 - DNA, 75 bp, synthetic construct
  source 1..75: mol_type = other DNA
cacagggaacatccgggattcagctgtatgaggcatacaacaatggctaccttcccctatggcaatgtgcttcac

SEQ ID NO: 541836 - DNA, 75 bp, synthetic construct
  source 1..75: mol_type = other DNA
agtaccgataaacaagccaagaacagtactgagcaacaggacagtaccagttttaatgaagcccgtttaaagaaa

SEQ ID NO: 541837 - DNA, 75 bp, synthetic construct
  source 1..75: mol_type = other DNA
tattttttatcgctcagcgcgagatggttacggattcgaagctgactggtcagaattctacaccacaacacgtaa

SEQ ID NO: 541838 - DNA, 75 bp, synthetic construct
  source 1..75: mol_type = other DNA
tcaataacgaccagaatttcagcacaactatcaacaatgccttggctctcaaagcgcctttggcaagccctgcat

SEQ ID NO: 541839 - DNA, 75 bp, synthetic construct
  source 1..75: mol_type = other DNA
ctgaatgagcttgccgcagcacttggcaatgacccgaactttgcgacaacaatgacaaatgcgctggcagggaaa

SEQ ID NO: 541840 - DNA, 75 bp, synthetic construct
  source 1..75: mol_type = other DNA
gacgaaatgcagcaatcgctggggcgcaacccggatggtaagcatctgatcattctgcataccaaaggctcacac

SEQ ID NO: 541841 - DNA, 75 bp, synthetic construct
  source 1..75: mol_type = other DNA
tgtgctgtcacgtgaaaataacggtgtcgcatccgaagacctgctggcggtggtgcgtaacgcccttaatggcga

SEQ ID NO: 541842 - DNA, 75 bp, synthetic construct
  source 1..75: mol_type = other DNA
ttgagctggtggtcatcaaaagcgaaaccaccgatgactcatgtgcattggtgctcaaattgagctcagttcaaa

SEQ ID NO: 541843 - DNA, 75 bp, synthetic construct
  source 1..75: mol_type = other DNA
agtaccgataaacaagccaagaatagtaccgagcaacaggacagtaacagttttaatcaagcccgtttaaagaaa

SEQ ID NO: 541844 - DNA, 75 bp, synthetic construct
  source 1..75: mol_type = other DNA
tacggtgatttatacggcgacaaatacgcagagatttatgaatgtctgggggaatatgagagaaaaccacacaat

SEQ ID NO: 541845 - DNA, 75 bp, synthetic construct
  source 1..75: mol_type = other DNA
gcgctctccgccatcatggccacgctgcatgttcagggcgttcagcgcgtggaactgaccagccccgcacagaat

SEQ ID NO: 541846 - DNA, 75 bp, synthetic construct
  source 1..75: mol_type = other DNA
taatctcaccgccgaaaaaattgaaaacaccggaaatatcattgagtgtgcagacttgcaagagacgattaacgc

SEQ ID NO: 541847 - DNA, 75 bp, synthetic construct
  source 1..75: mol_type = other DNA
gtggacgcgttcatacgctgtaaaatttttagggaccctaacggagtgaatgatgttgttaccaaaggacattca

SEQ ID NO: 541848 - DNA, 75 bp, synthetic construct
  source 1..75: mol_type = other DNA
ggtactgggcgatcatcgaaagaacgagaagttcagcctgtggtgcagcgatctttctgcctcacattgtgcgtg

SEQ ID NO: 541849 - DNA, 75 bp, synthetic construct
  source 1..75: mol_type = other DNA
acaacgagttgcatttaaaagcgatccagcgttatctgcgataataaataaagaacaaatagataaaaagtgtcg

SEQ ID NO: 541850 - DNA, 75 bp, synthetic construct
  source 1..75: mol_type = other DNA
ccgcagctggatgcgctgatccaacggacgctaagtggttcacacaccctcgccgaagcgaaactgcgggaataa

SEQ ID NO: 541851 - DNA, 75 bp, synthetic construct
  source 1..75: mol_type = other DNA
caagtgatgacctgttcgagtgcgaaggagcgattcgagaggagattagttgcttcaatcatccgggcatctatc

SEQ ID NO: 541852 - DNA, 75 bp, synthetic construct
  source 1..75: mol_type = other DNA
taaaaaatgagttacaagaggaatctgataatgttttaatcgaaacaaatattgctgctgttataaatatattag

SEQ ID NO: 541853 - DNA, 75 bp, synthetic construct
  source 1..75: mol_type = other DNA
ccggtgtggcttacctgctgtatggcatagattcacacaacaaccgatatcagctcgaatcaacaaggcgcacac

SEQ ID NO: 541854 - DNA, 75 bp, synthetic construct
  source 1..75: mol_type = other DNA
ccggtgtggcttacctgctgcatggtatggattcattcaacagccggtatcagatcgaatcaacaaggcgcacgc

SEQ ID NO: 541855 - DNA, 75 bp, synthetic construct
  source 1..75: mol_type = other DNA
cgcccggcgtcgtctggctgcggcggctcgtgccgcgcaaaaaggccgcgcgtcactcgttcccgcctcgcaagc

SEQ ID NO: 541856 - DNA, 75 bp, synthetic construct
  source 1..75: mol_type = other DNA
tcagagtttctacttaatttttatgagtgttgctataagtttttaccaagagcgcagcctcaagataaaatcgat

SEQ ID NO: 541857 - DNA, 75 bp, synthetic construct
  source 1..75: mol_type = other DNA
gtgagcgaaaacggtttaagtggagtcttgactgatcgtaataataaaataaaactcatcacgggcgtggcacca

SEQ ID NO: 541858 - DNA, 75 bp, synthetic construct
  source 1..75: mol_type = other DNA
gtcagagtcaaaggaacaccccatagatattcaagaaaaaaaagatgcgtttgtgaatgagttcaagggggtatt

SEQ ID NO: 541859 - DNA, 75 bp, synthetic construct
  source 1..75: mol_type = other DNA
tggagcttctctatatacctatggcacttcctgattctagcaatgggtgtgtggtacgtaggaatcagtttctat

SEQ ID NO: 541860 - DNA, 75 bp, synthetic construct
  source 1..75: mol_type = other DNA
tcaccacgctggagaaaaaactcgcctgcctgaaagatgagaaaaaagccctgatgcagcagctactgactggca

SEQ ID NO: 541861 - DNA, 75 bp, synthetic construct
  source 1..75: mol_type = other DNA
taatgcctctgttgaccgcagaggaagcctccgctggaaagaattcaaccagattcatgtgcccctaccaccatt

SEQ ID NO: 541862 - DNA, 75 bp, synthetic construct
  source 1..75: mol_type = other DNA
atagtcgttatatggcgggagaaagtgtgaaaaattatatcctgcttaaaaaaggtgagtttgcatataacaaag

SEQ ID NO: 541863 - DNA, 75 bp, synthetic construct
  source 1..75: mol_type = other DNA
gagtgttgaacaacaaaagatcgccgccgtcctgtccgctgccgacgacgaaatcgccacgctggagaaaaaact

SEQ ID NO: 541864 - DNA, 75 bp, synthetic construct
  source 1..75: mol_type = other DNA
tgaaagatgagaaaaaagccctgatgcagcagctactgactggcaaacgtcgtgttaaggtcgatgaggcggttg

SEQ ID NO: 541865 - DNA, 75 bp, synthetic construct
  source 1..75: mol_type = other DNA
atttattccaacttagtaatacctattccagatgccaaggaacaacaaaaaatcgccgccgtcctttccgctgca

SEQ ID NO: 541866 - DNA, 75 bp, synthetic construct
  source 1..75: mol_type = other DNA
caggcggatgaagtacatcttttcatttcggcacaggcgtcagtaattgttcggcttggttctctataccaagag

SEQ ID NO: 541867 - DNA, 75 bp, synthetic construct
  source 1..75: mol_type = other DNA
acccgaatattttttaccttccggcgacaaatgacgctgatgacggctatcagggtgattacgatggtgacttca

SEQ ID NO: 541868 - DNA, 75 bp, synthetic construct
  source 1..75: mol_type = other DNA
acggatacattctaacccacaacaccacgctatacagccagatggcaatcaactgcgcagtgcatgagaaaaagc

SEQ ID NO: 541869 - DNA, 75 bp, synthetic construct
  source 1..75: mol_type = other DNA
gggatcatcacctaaatccgaagcctacaacgataatggcttaggtttgccattaatacagggtaatgccgatat

SEQ ID NO: 541870 - DNA, 75 bp, synthetic construct
  source 1..75: mol_type = other DNA
agcgaatttaacgcaaggtacagcacggatatcagtatctggtgatcaatgtaatgagttttaccatcaacaatt

SEQ ID NO: 541871 - DNA, 75 bp, synthetic construct
  source 1..75: mol_type = other DNA
tgctttagattaaaaaatgggctcagtcaccgttattttaaatatttatttgaggctgattatctcaagccacag

SEQ ID NO: 541872 - DNA, 75 bp, synthetic construct
  source 1..75: mol_type = other DNA
acgcggcttcgcctcacgtaaggctgctttgttgggccggttggttgctgatgttgctggtccttctctttttct

SEQ ID NO: 541873 - DNA, 75 bp, synthetic construct
  source 1..75: mol_type = other DNA
gttgtgactaaagatgtacctccattttctatagtaggtggaataccagctaaggttataaaatcaagattttca

SEQ ID NO: 541874 - DNA, 75 bp, synthetic construct
  source 1..75: mol_type = other DNA
tgtacatattgtatcaggaaatcatcccacaacggattttatatctacccatccgatgttttatttaagtaataa

SEQ ID NO: 541875 - DNA, 75 bp, synthetic construct
  source 1..75: mol_type = other DNA
cttgatcctattcccgccctggcattaatgattgccgttggtgcgtcatccatttatgccggagatatccccggc

SEQ ID NO: 541876 - DNA, 75 bp, synthetic construct
  source 1..75: mol_type = other DNA
gatatatataatatgagcgccgggaataacgtgaaggttgctgcggatgctttccttgaaattattttctctctt

SEQ ID NO: 541877 - DNA, 75 bp, synthetic construct
  source 1..75: mol_type = other DNA
tttatgacagtgataatacgtcaggtgaggttttaaataatgattttacagaagaagagtcatttgaaactgcgt

SEQ ID NO: 541878 - DNA, 75 bp, synthetic construct
  source 1..75: mol_type = other DNA
taaattccagtcgtaagggtgagttgtctacatgggacaccatctacttgcatctgatattagcaataaatgctg

SEQ ID NO: 541879 - DNA, 75 bp, synthetic construct
  source 1..75: mol_type = other DNA
aatccctcgccatcaacgcctccaacatctcaacgaccaccatcaacggccagaaacactacgtcattcgtggtg

SEQ ID NO: 541880 - DNA, 75 bp, synthetic construct
  source 1..75: mol_type = other DNA
gtgaagctatccagcatccacgttaaatccctcgccatcaacgcctccaacatctcaacgacaaccatcaacggg

SEQ ID NO: 541881 - DNA, 75 bp, synthetic construct
  source 1..75: mol_type = other DNA
tcagaatatcaaaacaaaaatgattatatcattacaactgaaaaacttactactatccttaataaactgcctccc

SEQ ID NO: 541882 - DNA, 75 bp, synthetic construct
  source 1..75: mol_type = other DNA
gcacttttgcgtataccagggacacctgcttcggcggcttatgttgctgattcaaatgaactggtaaagcaaggt

SEQ ID NO: 541883 - DNA, 75 bp, synthetic construct
  source 1..75: mol_type = other DNA
aagtggcctttcatgcaataaataccctgatggtatttggtaaaaaaccacaatataaatttgcttcagcattag

SEQ ID NO: 541884 - DNA, 75 bp, synthetic construct
  source 1..75: mol_type = other DNA
cccggcttcgcagcggcaacatggatgatgaagactgggctcgcgtgtccgaggcaaccggtcgcattattgagt

SEQ ID NO: 541885 - DNA, 75 bp, synthetic construct
  source 1..75: mol_type = other DNA
aacaatatcgcattgatgagcactttttatgacagtgaaaatacgtcaggtgaggttttaaataatgattttaca

SEQ ID NO: 541886 - DNA, 75 bp, synthetic construct
  source 1..75: mol_type = other DNA
gtgtgtcatccagcacccgactctgcgtgatgttcttgatgatctcggaaaaaagagcggtatcgtgtttattac

SEQ ID NO: 541887 - DNA, 75 bp, synthetic construct
  source 1..75: mol_type = other DNA
gccattacgagaaacagcccctgatattagggctgttcgaggtgttttgactagaaataaacttcagaaagattt

SEQ ID NO: 541888 - DNA, 75 bp, synthetic construct
  source 1..75: mol_type = other DNA
agaggtcaatggaaactggcgcgtagtgtttaagctcgaagaacctaacgtctttgacgtggatctcgaggatta

SEQ ID NO: 541889 - DNA, 75 bp, synthetic construct
  source 1..75: mol_type = other DNA
tttcccctgctccatgcaacatccaacgttacgggatgtactcgatagtctgggtaaacaaagcggcatcgtttt

SEQ ID NO: 541890 - DNA, 75 bp, synthetic construct
  source 1..75: mol_type = other DNA
ttacccgctggccataacctgcctgatgtaaagcccggcgaacagctgcagcaacagcgcgcagaagtgtttcag

SEQ ID NO: 541891 - DNA, 75 bp, synthetic construct
  source 1..75: mol_type = other DNA
gtatatcactcaggatccgattgggctgaaggggggatggaacctgtatacatatccgctgagcccggtgaatag

SEQ ID NO: 541892 - DNA, 75 bp, synthetic construct
  source 1..75: mol_type = other DNA
acacttgaggcccttttggttgagcgagttaaaaacatcaaatcttctgcactcgttttcagtgacttgccacca

SEQ ID NO: 541893 - DNA, 75 bp, synthetic construct
  source 1..75: mol_type = other DNA
atccgaaatataccaccaagcgtggcaatactttttacatcaactttcgtcttccctctggcgcattctttcgtc

SEQ ID NO: 541894 - DNA, 75 bp, synthetic construct
  source 1..75: mol_type = other DNA
caagataaaaccatggttgccagtaaaatggacaaaagaattaataaatgattatttgtatggctgtttactatc

SEQ ID NO: 541895 - DNA, 75 bp, synthetic construct
  source 1..75: mol_type = other DNA
ctttactgcccttaacgcttattcaggaagcccaattgtattgctgggggcacatttacttatcctgacgggtct

SEQ ID NO: 541896 - DNA, 75 bp, synthetic construct
  source 1..75: mol_type = other DNA
cgggatacgtatcagacatcatggaagcgtttaagaacgatatttttccttatgtcggaacaaggccagtggggg

SEQ ID NO: 541897 - DNA, 75 bp, synthetic construct
  source 1..75: mol_type = other DNA
ctccctgctcctgtcagaagcatgggggatgttcaccgcagaaaagggtaaaggctgggctgctaccattgccaa

SEQ ID NO: 541898 - DNA, 75 bp, synthetic construct
  source 1..75: mol_type = other DNA
ctgggcgcgggtcgatgaatcttccgataacaattcattgcttaatccggcgaagaaattcacttatcaggcacc

SEQ ID NO: 541899 - DNA, 75 bp, synthetic construct
  source 1..75: mol_type = other DNA
cagtggctacttctgccgttgtgtctggttcagtatttgcctggactcctggtgattttaatggttcttttgaaa

SEQ ID NO: 541900 - DNA, 75 bp, synthetic construct
  source 1..75: mol_type = other DNA
acggtctggtggggttcgatttatgccaaaatagcctatgctagccttgcaggtttaattggatatggtgttaag

SEQ ID NO: 541901 - DNA, 75 bp, synthetic construct
  source 1..75: mol_type = other DNA
ctctgcaaccggcttagcgtgctttattttccgttttctgagacgacccctagttgtttgcggtcttgcgtggca

SEQ ID NO: 541902 - DNA, 75 bp, synthetic construct
  source 1..75: mol_type = other DNA
cagtatagaacgattatagatatatgtatcagtgaaagagatagcggtatttataacgccatgaataaaggagtt

SEQ ID NO: 541903 - DNA, 75 bp, synthetic construct
  source 1..75: mol_type = other DNA
aaggagcatgccgacgggagcatcacccgcagcgagtatgatgaggcggggaggctgaaggcgcagacggatgcg

SEQ ID NO: 541904 - DNA, 75 bp, synthetic construct
  source 1..75: mol_type = other DNA
aggctgagcaacagcgtcagcaggaaaaagaacggcagcgactcgccgagcagaaacgacaaaagtccgataaag

SEQ ID NO: 541905 - DNA, 75 bp, synthetic construct
  source 1..75: mol_type = other DNA
cagtcgaagtcgtcaggctttttaattattcgtattgtccactttattgttaaagggattaagcatgtcacgcga

SEQ ID NO: 541906 - DNA, 75 bp, synthetic construct
  source 1..75: mol_type = other DNA
tgattcagatggccatgaaattatggccgttgatatttatgtaaacgtaagcgtaaaccgaccgccctatgtagc

SEQ ID NO: 541907 - DNA, 75 bp, synthetic construct
  source 1..75: mol_type = other DNA
gcgcgggaacaaacgtatttcatcgacaaaaccaccgaccatagcgaaaaccggctgtggatgatggccaacatg

SEQ ID NO: 541908 - DNA, 75 bp, synthetic construct
  source 1..75: mol_type = other DNA
tattctgctaaaaatttctatgaaaccactaattttatggggcaaacggttcgggaatttggtgccagtaaaatt

SEQ ID NO: 541909 - DNA, 75 bp, synthetic construct
  source 1..75: mol_type = other DNA
atggcgcagcagcgccaagatcggcgcggggaagttcaggccgctacggcctctgcaaccggcttagcgtgcttt

SEQ ID NO: 541910 - DNA, 75 bp, synthetic construct
  source 1..75: mol_type = other DNA
atgtccgggggatatttgttaaatagcaaaggtcacggtggagagcgtggtgtgctactgtacgggctgatcagc

SEQ ID NO: 541911 - DNA, 75 bp, synthetic construct
  source 1..75: mol_type = other DNA
aaaatctagcatagtagtcaccatgttctttatgttacaaattataaaaaatatgcttataaaacttattaggtg

SEQ ID NO: 541912 - DNA, 75 bp, synthetic construct
  source 1..75: mol_type = other DNA
ttgctcattcttttcctgttgcaatcaattctgtcgatatcgccatcaatcaagatatgaaggcaattaaaccag

SEQ ID NO: 541913 - DNA, 75 bp, synthetic construct
  source 1..75: mol_type = other DNA
gaaggatatgaagacgacaaaaattgacaatgcgatcgaccacatttctgaaacggtttttgagcagacatccct

SEQ ID NO: 541914 - DNA, 75 bp, synthetic construct
  source 1..75: mol_type = other DNA
tttataattgtaaccgattacggctttaatattacaacaacaaaagaaatatcaataaatcgaaataataaaaaa

SEQ ID NO: 541915 - DNA, 75 bp, synthetic construct
  source 1..75: mol_type = other DNA
gctatctggatgcacaggttggaaaagtgctggataaaatcaaagctgtgggtgaagaagataacacaatcgtta

SEQ ID NO: 541916 - DNA, 75 bp, synthetic construct
  source 1..75: mol_type = other DNA
ctggcccaggagaaaaatctggcggcgttccgtggctattcttgtgacacggcgaccaaactttctctgcgttgc

SEQ ID NO: 541917 - DNA, 75 bp, synthetic construct
  source 1..75: mol_type = other DNA
catgatggatattaaaggaaaaatcatcacaactgatgcgatgggctgccagaaagatattgcagaaaagataca

SEQ ID NO: 541918 - DNA, 75 bp, synthetic construct
  source 1..75: mol_type = other DNA
aacaatagatatacttaggcatgcggattcttctgtcgattggcgcatgcattttttaagtgaccaaataaactt

SEQ ID NO: 541919 - DNA, 75 bp, synthetic construct
  source 1..75: mol_type = other DNA
catacagcattaaataacgaggatgaattagaaaaatgtggattgctaaccagacctgtatatagacatcatggt

SEQ ID NO: 541920 - DNA, 75 bp, synthetic construct
  source 1..75: mol_type = other DNA
cggtattaagcggatcggcaacttcctttaacaatcaaaaaaccgcaaaaacggatgttaatggtctggcgacta

SEQ ID NO: 541921 - DNA, 75 bp, synthetic construct
  source 1..75: mol_type = other DNA
gagagccacattctggttatgggcaacaatccacaacatggatgacattgagctaaaatacatgtgtgactacag

SEQ ID NO: 541922 - DNA, 75 bp, synthetic construct
  source 1..75: mol_type = other DNA
gacagcagacgtttgtttttgcttaatctgaataaagcctggaatcagcaaaaattacgtaaatcccgtacagat

SEQ ID NO: 541923 - DNA, 75 bp, synthetic construct
  source 1..75: mol_type = other DNA
atttacctgatatctcctgtcaggacatcgaaatttgcagacatgaattaaacaacgcaattcaccaatgtgtac

SEQ ID NO: 541924 - DNA, 75 bp, synthetic construct
  source 1..75: mol_type = other DNA
aaaaataattatactcttacaaatccttattcaaacgtttttggttcgaatttatctattcgtcagcggcaacag

SEQ ID NO: 541925 - DNA, 75 bp, synthetic construct
  source 1..75: mol_type = other DNA
ccagtacgcgcgactggcgtcgacgcgattgcacggaaaagagcaattcaggctggtcaatagtttgtaccagta

SEQ ID NO: 541926 - DNA, 75 bp, synthetic construct
  source 1..75: mol_type = other DNA
ttgattggaaaaaatacggatttattggttatgatgcttgggatgatgaatttgaatatgttactgaaattgatg

SEQ ID NO: 541927 - DNA, 75 bp, synthetic construct
  source 1..75: mol_type = other DNA
acataatagcctataaggtatcagatgatacgataatttcagcaacctcagaaaaaatcacaaaaattaacgact

SEQ ID NO: 541928 - DNA, 75 bp, synthetic construct
  source 1..75: mol_type = other DNA
ggaattactatcatctcccccacttaatcggacagacgaaatatatcaagcattattaaccaaagaaaaaataac

SEQ ID NO: 541929 - DNA, 75 bp, synthetic construct
  source 1..75: mol_type = other DNA
aaacaagactacgcagcatatcataatagaatcgcaagtagcattttttgggaattactatcatctcccccactt

SEQ ID NO: 541930 - DNA, 75 bp, synthetic construct
  source 1..75: mol_type = other DNA
aagatcattctacaccttggatggaaatgttaaattctaaagcatttgagcgttttttagattcctcaatagata

SEQ ID NO: 541931 - DNA, 75 bp, synthetic construct
  source 1..75: mol_type = other DNA
cttcctcggtagtagctattagtttgactgacaaaactaactcaaccgaagtatctaatggtgcgctaattaatc

SEQ ID NO: 541932 - DNA, 75 bp, synthetic construct
  source 1..75: mol_type = other DNA
ccagactcagcgggatcaccgccaccacgctgcgggcctggcagcggcgctacggcttactcaagcctcagcgca

SEQ ID NO: 541933 - DNA, 75 bp, synthetic construct
  source 1..75: mol_type = other DNA
ctctttctggttgtgatatttcaccttcatcaattggtgatattaccatttcgttaaaaagctctccttctgcag

SEQ ID NO: 541934 - DNA, 75 bp, synthetic construct
  source 1..75: mol_type = other DNA
aaccaggcatgtcgtcagacagaagaactgttcatgataaaatgattgagtcaatcagcatagctgattacattg

SEQ ID NO: 541935 - DNA, 75 bp, synthetic construct
  source 1..75: mol_type = other DNA
atgtgaagtatgtaaaaaatatcattgaaaaaaaatccaaaccgaccgttatttctgagagcatttcagaaatta

SEQ ID NO: 541936 - DNA, 75 bp, synthetic construct
  source 1..75: mol_type = other DNA
ggaaattactgatatcaggcctactcgacacaatatataataatatatatcagataattattggaaaaaaattta

SEQ ID NO: 541937 - DNA, 75 bp, synthetic construct
  source 1..75: mol_type = other DNA
acagaggctcacgactgggaccggtggggatttcagtgcccagtactcccaccggaacgtatatagcatccccac

SEQ ID NO: 541938 - DNA, 75 bp, synthetic construct
  source 1..75: mol_type = other DNA
aacagatggggagaccctgacattggcgggctgattattgctgcgtaccagggagaagctgacggtgataaagtc

SEQ ID NO: 541939 - DNA, 75 bp, synthetic construct
  source 1..75: mol_type = other DNA
gccagcggactgacgctgctgacggcagctatctcgctgtggaataccgtctatatggaaagagcggtcgatgcc

SEQ ID NO: 541940 - DNA, 75 bp, synthetic construct
  source 1..75: mol_type = other DNA
caggagattgataagcagaacattgagcttgagcagacgcgtgaccaactggcttctttgcttcagcggcaccat

SEQ ID NO: 541941 - DNA, 75 bp, synthetic construct
  source 1..75: mol_type = other DNA
aaaagaagaacaaggcacctctactcatgtaaataaaacagaaacagagtggcagttggcagatcccctcaaagc

SEQ ID NO: 541942 - DNA, 75 bp, synthetic construct
  source 1..75: mol_type = other DNA
tcatatgcttatcaatatacagatgttcatgatggcccttgtcatttttttggtctatatggagaacccttatta

SEQ ID NO: 541943 - DNA, 75 bp, synthetic construct
  source 1..75: mol_type = other DNA
aactgcgtgaatctctcgcttcaggcgaaattgctgctgtacagtcgacgctggttgccgacaatacgccgctta

SEQ ID NO: 541944 - DNA, 75 bp, synthetic construct
  source 1..75: mol_type = other DNA
agtatctttttcgctcggttttgtcataaagatgttctatcggccagatgcgttgaaatctgcaccagatgaagc

SEQ ID NO: 541945 - DNA, 75 bp, synthetic construct
  source 1..75: mol_type = other DNA
gatgatcgtaataacatctatactgtattttggattaatatatctattacaaagagatttattaaaattagtctt

SEQ ID NO: 541946 - DNA, 75 bp, synthetic construct
  source 1..75: mol_type = other DNA
attaaggaaaaagttaacgaaataattcgttcaattggtaaacgtaatccaaatctatttcctgatggtgagcat

SEQ ID NO: 541947 - DNA, 75 bp, synthetic construct
  source 1..75: mol_type = other DNA
cattaatccccgttataccgaaagtggcgcagtagactgtgacgttttttttgacgacagggaccaggcagtccc

SEQ ID NO: 541948 - DNA, 75 bp, synthetic construct
  source 1..75: mol_type = other DNA
tctgaggctgaaaagtgcggccacgatggaagcacagagcgacatttacgaccggacaaaaggccgtctggcgat

SEQ ID NO: 541949 - DNA, 75 bp, synthetic construct
  source 1..75: mol_type = other DNA
gaatatcttcgcggaaggcgcttatgccaagcgacgaattggctaaaactcacaaaggtttcaggtcgacaaatt

SEQ ID NO: 541950 - DNA, 75 bp, synthetic construct
  source 1..75: mol_type = other DNA
acgtgcttaaccacagctttatgcgtccgggactggtgaacgtgattgtctcggtggcgatgggcctgatgattg

SEQ ID NO: 541951 - DNA, 75 bp, synthetic construct
  source 1..75: mol_type = other DNA
agatataacttataagaactggtggggtggggtgtatatgtcaccaacaggaaatcttggagatcatatggggcc

SEQ ID NO: 541952 - DNA, 75 bp, synthetic construct
  source 1..75: mol_type = other DNA
ggattctgacgatgtatcggtagctgaccgatttgcattgcaactcgctttcttcgaaagtaatgaaaacatatc

SEQ ID NO: 541953 - DNA, 75 bp, synthetic construct
  source 1..75: mol_type = other DNA
aagcgatgctggtgaaaatgggctttgaaggagccgtgatccaaagtgtcaatctggaaacgggtgtgattcaga

SEQ ID NO: 541954 - DNA, 75 bp, synthetic construct
  source 1..75: mol_type = other DNA
ttacctcctctgcggaggatgtgccggacgtggatgacggcggagagaaagtcaccgccggggagttctggcccg

SEQ ID NO: 541955 - DNA, 75 bp, synthetic construct
  source 1..75: mol_type = other DNA
gtcactacttcgcgactgatgcacgtcactaccgaggctgtgggacacgtcatcgaacagcttgaagagtggcag

SEQ ID NO: 541956 - DNA, 75 bp, synthetic construct
  source 1..75: mol_type = other DNA
gctctgttcgctgttacgttttgcgtatcagtcgggatttatatcaaccaaaccatttgaaggagtaaaaaatta

SEQ ID NO: 541957 - DNA, 75 bp, synthetic construct
  source 1..75: mol_type = other DNA
gaggtgctctggagtaccgggatccggcggatggagctggcgaacctgatgctgtgggatgtggatacccggcgt

SEQ ID NO: 541958 - DNA, 75 bp, synthetic construct
  source 1..75: mol_type = other DNA
atagcaatactggcgcaccaacaaacagcagcgaacttgccgcagacgcccaacaggctacgagcctgcgcgaaa

SEQ ID NO: 541959 - DNA, 75 bp, synthetic construct
  source 1..75: mol_type = other DNA
aatggcgaaacagcagagccgaaagtcaacatcaaggcaacaaaagaaggttcatttactttgcttgttgctgtg

SEQ ID NO: 541960 - DNA, 75 bp, synthetic construct
  source 1..75: mol_type = other DNA
ctcacccagtcactctcttcgctcttttccctcgatctctccctggtcagccagcagtttctctcccttgaattt

SEQ ID NO: 541961 - DNA, 75 bp, synthetic construct
  source 1..75: mol_type = other DNA
atgcgtcacgacaaacttagcgatgcggtgaacctgaccgggggaaccagctccaaaacgtctgccagccagtac

SEQ ID NO: 541962 - DNA, 75 bp, synthetic construct
  source 1..75: mol_type = other DNA
atttcaggaaagtaaaggagaagttaaatgttccctcgaagaagcacgaattaatgcaaaagaaaaattagcaga

SEQ ID NO: 541963 - DNA, 75 bp, synthetic construct
  source 1..75: mol_type = other DNA
gttaatgctgggacaatcagaatcatggcattagggcttataaacaatcttcaacatgtttctactttccgaaca

SEQ ID NO: 541964 - DNA, 75 bp, synthetic construct
  source 1..75: mol_type = other DNA
tggcgcaacggacaatgagaaagccgagcttggtagtgcaggtgctggaacaccgggggatgggggccagataat

SEQ ID NO: 541965 - DNA, 75 bp, synthetic construct
  source 1..75: mol_type = other DNA
atgaggatgggcgtgacaaaacggtaattgcagtaatgaaagctatcagagccgctggaattaaagagaagaatt

SEQ ID NO: 541966 - DNA, 75 bp, synthetic construct
  source 1..75: mol_type = other DNA
atatgtcagaaatgaaaatttcaggttatgaattttcttatactgaatctgttccttatcttgcagaaaacagga

SEQ ID NO: 541967 - DNA, 75 bp, synthetic construct
  source 1..75: mol_type = other DNA
gaatatcttcggggaagacggctatgccaagccacaaactggttaaaactcacaaatgcatcaggtcaacagatt

SEQ ID NO: 541968 - DNA, 75 bp, synthetic construct
  source 1..75: mol_type = other DNA
ttcttgaatggattgaggaaaacttatcagcgaaaatgaaagtggacgatatagcaaaaaaaagcggttatagcc

SEQ ID NO: 541969 - DNA, 75 bp, synthetic construct
  source 1..75: mol_type = other DNA
gtgtttagtgttattttaagcaacttatcatttgcaaacaatcttcactcaagaatagtaaatgctaggttctct

SEQ ID NO: 541970 - DNA, 75 bp, synthetic construct
  source 1..75: mol_type = other DNA
cagcctggcaagcattgcaagaagatgaagtgatgaggaaaatagccatagaacgccttgtcgaagggtttcatg

SEQ ID NO: 541971 - DNA, 75 bp, synthetic construct
  source 1..75: mol_type = other DNA
tgacgaatttcaggaaagcaaaggagaaattaaaggttctctggaagaagcccgaattaatgcaacagagaaatt

SEQ ID NO: 541972 - DNA, 75 bp, synthetic construct
  source 1..75: mol_type = other DNA
ttgctccccgcccgatggggaatcgtccggtatggattgggtatgacgcaaacggcagcagtggcaacggcgaca

SEQ ID NO: 541973 - DNA, 75 bp, synthetic construct
  source 1..75: mol_type = other DNA
tgtcaaaaagtgccgcaatatgggcattgttttcagcagggatgagttacaaaaaatcaaagaacgcctattctc

SEQ ID NO: 541974 - DNA, 75 bp, synthetic construct
  source 1..75: mol_type = other DNA
gccgtaaggtcgttgtcgttggtgcgttgaataatcaggaaacgatcgtccaggaagtgtttgtcacgcagcagg

SEQ ID NO: 541975 - DNA, 75 bp, synthetic construct
  source 1..75: mol_type = other DNA
caaaacgcacccaaaggtgcggggcgaactgctgttcttcccgacgcggatggacccttcgctcaatacgatggc

SEQ ID NO: 541976 - DNA, 75 bp, synthetic construct
  source 1..75: mol_type = other DNA
ggtaaaaactcaggttgcaatccagctggcacttgatgcttccgacatactcagtgacagcagcatcagcgatat

SEQ ID NO: 541977 - DNA, 75 bp, synthetic construct
  source 1..75: mol_type = other DNA
gaccgggcaaaagacggttgctgttgctgttccggcaggctcatcaacctcggatattactgaggtggtaacggc

SEQ ID NO: 541978 - DNA, 75 bp, synthetic construct
  source 1..75: mol_type = other DNA
cacaaataataaataaagacataaaagcaatatcctactatgtaaaaaagatgttagtcagatataaactaacaa

SEQ ID NO: 541979 - DNA, 75 bp, synthetic construct
  source 1..75: mol_type = other DNA
attggcaaatataaactctgcccctgtgcacatgaaaaaatataattttccagtcaaagataaaaatctgattga

SEQ ID NO: 541980 - DNA, 75 bp, synthetic construct
  source 1..75: mol_type = other DNA
ggagttcttaaggcggtatcactgcgcctgaaggaactcgacgatctgtacgccaaatatatggggcggcggatt

SEQ ID NO: 541981 - DNA, 75 bp, synthetic construct
  source 1..75: mol_type = other DNA
gatacatcttattatggtagatatttttttaacggtattgatgtgtctaaaataaccaataaaaaacagttatat

SEQ ID NO: 541982 - DNA, 75 bp, synthetic construct
  source 1..75: mol_type = other DNA
aaatattttctgatcgtatcattatttctgactttaatcttaccatacaaaaaaatgagtttgttgttataacag

SEQ ID NO: 541983 - DNA, 75 bp, synthetic construct
  source 1..75: mol_type = other DNA
catggtggaaccgttattatggtaactcatgacacaaatttaattacaaatgatatgaggattatatctttttga

SEQ ID NO: 541984 - DNA, 75 bp, synthetic construct
  source 1..75: mol_type = other DNA
ctcttacgggaaagaattgatgatcgtctttctgaggaaatcgttcagaaattacggacattaaacggggaggag

SEQ ID NO: 541985 - DNA, 75 bp, synthetic construct
  source 1..75: mol_type = other DNA
gcgagcgtcatatagccgcctgtattgtaatgacaacgtttcgcggctattcttgtattgtttggatgcaagaat

SEQ ID NO: 541986 - DNA, 75 bp, synthetic construct
  source 1..75: mol_type = other DNA
atcaacacctggcctgccaaccgcgtgaaagagttgttgccctggaatgtcactcaatctgtaaactaattttta

SEQ ID NO: 541987 - DNA, 75 bp, synthetic construct
  source 1..75: mol_type = other DNA
tgggcttgccatctgcggggtagccttacaaaccttatttcgtaaccctctcgtttcacctaaagtgctaggttt

SEQ ID NO: 541988 - DNA, 75 bp, synthetic construct
  source 1..75: mol_type = other DNA
ccttcgccagaagtatttcgtaattctcttgagaatgagatttttattgcaagccaatttaaagttaaattttaa

SEQ ID NO: 541989 - DNA, 75 bp, synthetic construct
  source 1..75: mol_type = other DNA
gtagtgagctggcaaaactgaaaaaagtaaaccgactactcaacgaaagcaaaagggagatcacgaaactgattc

SEQ ID NO: 541990 - DNA, 75 bp, synthetic construct
  source 1..75: mol_type = other DNA
cattagcgtggaaaaaccttgtccgcacggtgaaggcggaactagcaggcgaattaaaaagcctcaaaactgagt

SEQ ID NO: 541991 - DNA, 75 bp, synthetic construct
  source 1..75: mol_type = other DNA
atttctccaattgttcacctgttgatcccacaagtaccaggccgacctattttggggataccgatggctcagttg

SEQ ID NO: 541992 - DNA, 75 bp, synthetic construct
  source 1..75: mol_type = other DNA
taggtataaatcaagttgttgcacataacggtaatggtggaagagaatgcataggtgaaacggggacagttttag

SEQ ID NO: 541993 - DNA, 75 bp, synthetic construct
  source 1..75: mol_type = other DNA
aagaaaggcccacttcccggtgattatcacattggctatgacacaggtgcagaatcacaatacgaaagcgatgta

SEQ ID NO: 541994 - DNA, 75 bp, synthetic construct
  source 1..75: mol_type = other DNA
aaaaattttacaccaacaccagaaccaaacactgataagcccaccgagggcgacggagaaaaaatggaagagtta

SEQ ID NO: 541995 - DNA, 75 bp, synthetic construct
  source 1..75: mol_type = other DNA
actaagttgtcagcgatggaaaacggcaatacgcgccgccctggcagtgcgccaggcggaagcaaagaaccgttt

SEQ ID NO: 541996 - DNA, 75 bp, synthetic construct
  source 1..75: mol_type = other DNA
ctcactgaaagcggaaaccggcgaggacggtaaaacccgcctctacgcacggctggtccctaaccagtacctgat

SEQ ID NO: 541997 - DNA, 75 bp, synthetic construct
  source 1..75: mol_type = other DNA
atgaacgtttcgaccaaataatcgagaaatttaaagcattaccagatcataaaaactcgaaatttgataggcaat

SEQ ID NO: 541998 - DNA, 75 bp, synthetic construct
  source 1..75: mol_type = other DNA
gcttcaattagtgaatattggtggaaaaacttcctcagtactgtagaacttcaaagttctgaacttaatacaaaa

SEQ ID NO: 541999 - DNA, 75 bp, synthetic construct
  source 1..75: mol_type = other DNA
tgcaacgggtgacgctgacacggtcgatacaccggaacaggccgccgacgaagtggccgtcattgctgacgaaat

SEQ ID NO: 542000 - DNA, 75 bp, synthetic construct
  source 1..75: mol_type = other DNA
acagtgaaatttttgtgatggccagtgacgtgctggggatccggttcgcgggcggtagaaacgtaaccgtcgcga

SEQ ID NO: 542001 - DNA, 75 bp, synthetic construct
  source 1..75: mol_type = other DNA
catcgacacaccaggaagagagtgacgcattaattcgactgcgggcaagtaatcaccagcaatggactgcactgt

SEQ ID NO: 542002 - DNA, 75 bp, synthetic construct
  source 1..75: mol_type = other DNA
cagtaagtacagatttcaacgacagattagttccaggtcgttattctgacgttattactgttattctgaacggcc

SEQ ID NO: 542003 - DNA, 75 bp, synthetic construct
  source 1..75: mol_type = other DNA
attcgttcaattaaggaaacagatttaaagaaaatcgttaattttggtcagattaccctgaatgggatgacaggt

SEQ ID NO: 542004 - DNA, 75 bp, synthetic construct
  source 1..75: mol_type = other DNA
ggtcatcccggtttatccccgctggcgcggggaacacggatctgccagcgcctctgcggggcggtaaaccggttt

SEQ ID NO: 542005 - DNA, 75 bp, synthetic construct
  source 1..75: mol_type = other DNA
atgttggcgaaagttggcatggcgccgtgggttccccctcacccgaaccctctccccgatggggtgagggaactg

SEQ ID NO: 542006 - DNA, 75 bp, synthetic construct
  source 1..75: mol_type = other DNA
tttaataaaaaacataaagaacacatggatgatcgttttatccatctaattagaagcaatgctatagcatccaca

SEQ ID NO: 542007 - DNA, 75 bp, synthetic construct
  source 1..75: mol_type = other DNA
cgccgctgaacatgaaatactgcgtgcattcaggacattactggattcagaaagtgatcgttttcagccctccgc

SEQ ID NO: 542008 - DNA, 75 bp, synthetic construct
  source 1..75: mol_type = other DNA
cgacattcactgagaaaaacggttatccgccggaaaaagtggatgtggctacggggaaagcgcagggtaaaggac

SEQ ID NO: 542009 - DNA, 75 bp, synthetic construct
  source 1..75: mol_type = other DNA
atctcagccagccaggatctgcggccaacctaatcaggatctcggttgaaagaatgctgacggcgattggtattc

SEQ ID NO: 542010 - DNA, 75 bp, synthetic construct
  source 1..75: mol_type = other DNA
tggtttgaaccttatatggatgaaaaggttttcagctgtatggcgaactgctcccgggtaaactgtggtgaagtg

SEQ ID NO: 542011 - DNA, 75 bp, synthetic construct
  source 1..75: mol_type = other DNA
aacgttccggcacgggacgctccgcttcaatggcaatgtcagcgaaaagctcctgactctgctgatacaggaact

SEQ ID NO: 542012 - DNA, 75 bp, synthetic construct
  source 1..75: mol_type = other DNA
accctgccatcggatgagcgatttatgagccgggtggtggcctatgatttacccatcggttactgctggcattcg

SEQ ID NO: 542013 - DNA, 75 bp, synthetic construct
  source 1..75: mol_type = other DNA
tgtattccggtagaaaaagaggatgaggcttacattaccacgttgaccggagacacggtgcgttgtatctgtcgc

SEQ ID NO: 542014 - DNA, 75 bp, synthetic construct
  source 1..75: mol_type = other DNA
attgtcgggatctgcacagccattttcgttgccagcgtattgtggttaagttcgttagccgccagtcgtattacc

SEQ ID NO: 542015 - DNA, 75 bp, synthetic construct
  source 1..75: mol_type = other DNA
gctggaatcattccagtgacgctgagagtaaaggagcatcaggtcagagagctggttaatcagttacgagatgtg

SEQ ID NO: 542016 - DNA, 75 bp, synthetic construct
  source 1..75: mol_type = other DNA
atggccgctgaaattgaagtgctacgtcaacgcattgtggaactggaaacaaaagcgaatcagcaaaccagaata

SEQ ID NO: 542017 - DNA, 75 bp, synthetic construct
  source 1..75: mol_type = other DNA
tctggccaaattaattaaaaccattcgcaaccagcatccggaagacaccgttacggtgctgtcacacagtcaagg

SEQ ID NO: 542018 - DNA, 75 bp, synthetic construct
  source 1..75: mol_type = other DNA
gtggtgccggaatttctcggaaatcgcgcccccttcgcagatcctcatgccagagcggtaatttgtggcctgggt

SEQ ID NO: 542019 - DNA, 75 bp, synthetic construct
  source 1..75: mol_type = other DNA
acgggggatctggctcgttcggcctgtaccgtgacctgcaaatggacgtggctggctcatgaaaatcgctgggat

SEQ ID NO: 542020 - DNA, 75 bp, synthetic construct
  source 1..75: mol_type = other DNA
ttaaaattatgatgcagacaaacggagataatcgtttcttggaagatttgaaactacgtcgtgcaatatctgatg

SEQ ID NO: 542021 - DNA, 75 bp, synthetic construct
  source 1..75: mol_type = other DNA
tcttactccggaaacacttttcggctccaaatctcaggataaacatgcacttttccccatttttactgcgagttg

SEQ ID NO: 542022 - DNA, 75 bp, synthetic construct
  source 1..75: mol_type = other DNA
tcgcaggagtcgggggcgcagataacattgtgagtctgatgcattgcgcaacgcgattacgttttaaattaaagg

SEQ ID NO: 542023 - DNA, 75 bp, synthetic construct
  source 1..75: mol_type = other DNA
ggcgcggttttttaccgccgcttcggcagctatgcgcacgattttaccgtctggaaaggcgtttctgctgttgtt

SEQ ID NO: 542024 - DNA, 75 bp, synthetic construct
  source 1..75: mol_type = other DNA
attatatttgttattgggatttattccttaactatatccagtattcagattacgttcacctgctgcatttcgtca

SEQ ID NO: 542025 - DNA, 75 bp, synthetic construct
  source 1..75: mol_type = other DNA
ccagtcgcgagttgacgctcggcattctggtcgaacccatgctcattctctcactgctggtattggcgctgatag

SEQ ID NO: 542026 - DNA, 75 bp, synthetic construct
  source 1..75: mol_type = other DNA
atctggtcatttttgcgttagcacaggccgtgattctgctgctaaccccgctttttacgggtatttcccggcaga

SEQ ID NO: 542027 - DNA, 75 bp, synthetic construct
  source 1..75: mol_type = other DNA
atgctcgccaccatcccggataactccattacgctgtttgacaagctcttttacagcgcagacctgctgctgacg

SEQ ID NO: 542028 - DNA, 75 bp, synthetic construct
  source 1..75: mol_type = other DNA
gtcgcggaggtgaatgccgaactggaaaacgtggaggccatctggaaagcaaaaggccacacgctggcagcagat

SEQ ID NO: 542029 - DNA, 75 bp, synthetic construct
  source 1..75: mol_type = other DNA
ataatatttggaattggccttattcctttaactatatccagtattcagattgtcttcacctgctgcatttcgtca

SEQ ID NO: 542030 - DNA, 75 bp, synthetic construct
  source 1..75: mol_type = other DNA
caacaccaaaggccgtaaaagccgcctgtgagaatgctgagaaacgactgcagaaagataagaacggtgcggatg

SEQ ID NO: 542031 - DNA, 75 bp, synthetic construct
  source 1..75: mol_type = other DNA
cgaagccactgaacaggccactgcagcagtgaggtctgcttccgctgcgaggacatccgagacgaacgcgaaagc

SEQ ID NO: 542032 - DNA, 75 bp, synthetic construct
  source 1..75: mol_type = other DNA
gtgcagcttcctcggcaacggcggcaggaaattccgcgaaggcggcaaagacgtctgagacgaacgccaggtctt

SEQ ID NO: 542033 - DNA, 75 bp, synthetic construct
  source 1..75: mol_type = other DNA
tgccgccaccaaccgtgatttgtggcaaatggttgaagatcgccagtttcgcagcgatctcttttatcgcctgaa

SEQ ID NO: 542034 - DNA, 75 bp, synthetic construct
  source 1..75: mol_type = other DNA
caaaatcgctggcacatgtcgtgaatattctcgatccggatgtgattgtgctggggggcgggatgagcaatgtag

SEQ ID NO: 542035 - DNA, 75 bp, synthetic construct
  source 1..75: mol_type = other DNA
gcctatgacaatgctgaaaaacgtcttcagaaagatcagaacggtgcggatattccgggaaaggataccttcacg

SEQ ID NO: 542036 - DNA, 75 bp, synthetic construct
  source 1..75: mol_type = other DNA
gagagaatatcaagcaaatttccaataatccagacaaaaacctttatatagcgcctgatattccagataaaaaac

SEQ ID NO: 542037 - DNA, 75 bp, synthetic construct
  source 1..75: mol_type = other DNA
tgtgggagctgattgataacagccagcttgatgatgagatggcggagatgaagaccaccatcaccgaaacccgca

SEQ ID NO: 542038 - DNA, 75 bp, synthetic construct
  source 1..75: mol_type = other DNA
aaaaaatgttaggaatagcgataagtatgttttccgcacgcttacttacactatgtttaacatttttattggtta

SEQ ID NO: 542039 - DNA, 75 bp, synthetic construct
  source 1..75: mol_type = other DNA
tttattgattacggatttaactactcagcgcccaaaatcatatcaatatcaagggaaaatactgattccataagt

SEQ ID NO: 542040 - DNA, 75 bp, synthetic construct
  source 1..75: mol_type = other DNA
gctcgcgagcagacgtattttgtcgataagacgcctgaccatagcgaaaacaggctgtggatgatggccaacatg

SEQ ID NO: 542041 - DNA, 75 bp, synthetic construct
  source 1..75: mol_type = other DNA
ataacaccattaagttacaggaaaaaaaatgtgtggggaggtggagttgctaagttcaatactgattggcattat

SEQ ID NO: 542042 - DNA, 75 bp, synthetic construct
  source 1..75: mol_type = other DNA
aagagattctaatagatataaataaatctgtggaagaggacatgagtaaggatttaaaaattaaaattgataata

SEQ ID NO: 542043 - DNA, 75 bp, synthetic construct
  source 1..75: mol_type = other DNA
cttgtatcactacgatgatataggtgctcggattatagagcaggggctcagaatggcaggcatttttcaagtttc

SEQ ID NO: 542044 - DNA, 75 bp, synthetic construct
  source 1..75: mol_type = other DNA
ctctttttaacgatgaagcagcaggtgtgtatacgagtaatttgtacaacgaccccacacctttcaatacattct

SEQ ID NO: 542045 - DNA, 75 bp, synthetic construct
  source 1..75: mol_type = other DNA
agttgtttgttgtgataataagtttaatttgtgtcgcttaccagttggtatggataattccttatacagtaattg

SEQ ID NO: 542046 - DNA, 75 bp, synthetic construct
  source 1..75: mol_type = other DNA
atggcttcatttgaggttgtgtcatcagatgaaccagttggaataaaaacttacgatggtaagtttaagctaaag

SEQ ID NO: 542047 - DNA, 75 bp, synthetic construct
  source 1..75: mol_type = other DNA
aaagcaatcgggctagagtatcaaaataaggcgctttttaatgacgaggcaacagcagtatacaaggggagtgtg

SEQ ID NO: 542048 - DNA, 75 bp, synthetic construct
  source 1..75: mol_type = other DNA
ggacccttttgcacaacaggaacgggagtttgaagatacttatcgtgctgagcttaaagcatatgagcgaaaaaa

SEQ ID NO: 542049 - DNA, 75 bp, synthetic construct
  source 1..75: mol_type = other DNA
gcctcagcaaaggccgctgaggcatcaaaaagtgctgccgctgcagagtcctcaaaaagcgcggcggccaccagt

SEQ ID NO: 542050 - DNA, 75 bp, synthetic construct
  source 1..75: mol_type = other DNA
ttatggatgtcgccggaaacgcgacaaataccataattaatggtggcacacagaatataaataatcatggtattg

SEQ ID NO: 542051 - DNA, 75 bp, synthetic construct
  source 1..75: mol_type = other DNA
atggaacgacaattaaggggggtaattcacacataagtggggggactgcgaatggaacaatcattgatggtggca

SEQ ID NO: 542052 - DNA, 75 bp, synthetic construct
  source 1..75: mol_type = other DNA
ccggcaggtgcctccatagtaagtgcagaaattgattatcagatatttcgtgattttgctgaaaataaaggcgcg

SEQ ID NO: 542053 - DNA, 75 bp, synthetic construct
  source 1..75: mol_type = other DNA
gacgcgctgcttctctcgccgtcagcttatcgagtgcttgcgcaccggagcggataaatttggctggaagcagcg

SEQ ID NO: 542054 - DNA, 75 bp, synthetic construct
  source 1..75: mol_type = other DNA
gctcccgcgcgtactggatgatcccaaagttgatgtagcgattatcagcaccacttacattcagcagaccgggct

SEQ ID NO: 542055 - DNA, 75 bp, synthetic construct
  source 1..75: mol_type = other DNA
ctctcacttcactattaccggaggggaggctaattatgttgtgctggaaaataccggcgaactgacggtagtgaa

SEQ ID NO: 542056 - DNA, 75 bp, synthetic construct
  source 1..75: mol_type = other DNA
agtaccaagaggaactggacctcgaggctctggagcacctggaggacccggtactcctggagcgcgtgaaggtac

SEQ ID NO: 542057 - DNA, 75 bp, synthetic construct
  source 1..75: mol_type = other DNA
ccgcgttaccgaaggtgatgccaaagtggctgctggtgcttgactgtacagataacgtcttgatcttgttaccga

SEQ ID NO: 542058 - DNA, 75 bp, synthetic construct
  source 1..75: mol_type = other DNA
cctgtaggaaccgcctacaatcatcaatgggccattggacaaataaacgctgttcgcccaaatccactggcattt

SEQ ID NO: 542059 - DNA, 75 bp, synthetic construct
  source 1..75: mol_type = other DNA
ttcagttaatatttgcaatgatgataaaaatataaattggagaattaatagtactatggtagccattgatgattc

SEQ ID NO: 542060 - DNA, 75 bp, synthetic construct
  source 1..75: mol_type = other DNA
ttttcttctctatttctgcgaatgcagttactgtaaaccaatttcagagagagttggatttggcagacaaggcaa

SEQ ID NO: 542061 - DNA, 75 bp, synthetic construct
  source 1..75: mol_type = other DNA
accacggctgccgcccaaactaatcatatactactgtggtgaaccgccccgggaatcctggagactaaacttcct

SEQ ID NO: 542062 - DNA, 75 bp, synthetic construct
  source 1..75: mol_type = other DNA
gttattcagctacccatgtggaaaagcaccatatgctctacaagcttgattcagttgatgcctacgagcaaaaac

SEQ ID NO: 542063 - DNA, 75 bp, synthetic construct
  source 1..75: mol_type = other DNA
tcactttatctccagcgtgattgatcaggttcgcgataagaaagcgattgtgttctacgcagctgaccacggtga

SEQ ID NO: 542064 - DNA, 75 bp, synthetic construct
  source 1..75: mol_type = other DNA
ctataaccccgactgggcggttctaatcgaaaaggatggcaaggaaaaactctacttcgttgtcgaaaccaaaag

SEQ ID NO: 542065 - DNA, 75 bp, synthetic construct
  source 1..75: mol_type = other DNA
ttgcagagcaattgcagaaggaaatagaaaacgaggaaggcatcaagtttggcgtggtcgagaagcacctgtttg

SEQ ID NO: 542066 - DNA, 75 bp, synthetic construct
  source 1..75: mol_type = other DNA
attttacacgaagcttaaccaatcttttaaacagtttaggtggaagcggtaaaagtcttggtgaatctcttggtg

SEQ ID NO: 542067 - DNA, 75 bp, synthetic construct
  source 1..75: mol_type = other DNA
gttgttggtgtaaccagaagtatttacgggcttatgactgctatcacaagattaggtcaggtcgctgatactaca

SEQ ID NO: 542068 - DNA, 75 bp, synthetic construct
  source 1..75: mol_type = other DNA
cgaaattgacccgaaacgactggcggccatgccggatgccgtgacctgcattgactgccagacactcagggagac

SEQ ID NO: 542069 - DNA, 75 bp, synthetic construct
  source 1..75: mol_type = other DNA
ttttcaaaagttctgaaaatggtctgcaagattttacacgaagcttaacaacgcttttaaatagtttagatggaa

SEQ ID NO: 542070 - DNA, 75 bp, synthetic construct
  source 1..75: mol_type = other DNA
tggctgctatcacaagattaggtcaggtcgctgatacaacagcggataacgtgaatagaaagaatgggaaaccat

SEQ ID NO: 542071 - DNA, 75 bp, synthetic construct
  source 1..75: mol_type = other DNA
cgtatttgataaagatgcaggtcaagtaaaagagttcacaaagtcattagctcaaacaacgggtttagatatcgc

SEQ ID NO: 542072 - DNA, 75 bp, synthetic construct
  source 1..75: mol_type = other DNA
catcggtgaaatatgaatcagatggaggccccggtatcgcgcaaattatggcttttttgatggggtccagcgagg

SEQ ID NO: 542073 - DNA, 75 bp, synthetic construct
  source 1..75: mol_type = other DNA
accgttattctcaaccagcaggcggatgctgacggaaaggtacaggctttcagctctgttggtattgccagcggt

SEQ ID NO: 542074 - DNA, 75 bp, synthetic construct
  source 1..75: mol_type = other DNA
gcggtgattacaaataatgcacagcaaaaatcccagcttttactggatcttaaggctcaggatacaaatgtcagt

SEQ ID NO: 542075 - DNA, 75 bp, synthetic construct
  source 1..75: mol_type = other DNA
atatgcgctttggtctggagtttgagaagtcagcctttggtaaatataacgtggataatgcggtaaacgcaaatt

SEQ ID NO: 542076 - DNA, 75 bp, synthetic construct
  source 1..75: mol_type = other DNA
tataacgcagcattcaatggtgctataaccggcggcagggctgatgtcagtatgcataatgcactgtggactctg

SEQ ID NO: 542077 - DNA, 75 bp, synthetic construct
  source 1..75: mol_type = other DNA
gcgatcttttatcatatatatatcatggaaaaataaccggtaataccagtgtggaaatacccaaactggcaggca

SEQ ID NO: 542078 - DNA, 75 bp, synthetic construct
  source 1..75: mol_type = other DNA
ccggcacgctgatattccagggtcatccagttattcatgctggaacgacgacttcttccagccagagcgactggg

SEQ ID NO: 542079 - DNA, 75 bp, synthetic construct
  source 1..75: mol_type = other DNA
agtggcgattctcggcggtatcgtcggtgatgcggcattttctccagcttttcacagcctgttctcccgctatat

SEQ ID NO: 542080 - DNA, 75 bp, synthetic construct
  source 1..75: mol_type = other DNA
cgaccagctgctggtgacccggatcgacagcaaggccaccgccctttcgccaaaactgcctgacgctaaagataa

SEQ ID NO: 542081 - DNA, 75 bp, synthetic construct
  source 1..75: mol_type = other DNA
ccgcgtactggctaaccaaagtctggccctgaacagcggtgtacaaatctgcaataccttgattgttcctgatac

SEQ ID NO: 542082 - DNA, 75 bp, synthetic construct
  source 1..75: mol_type = other DNA
gacaccgtgaatgacaggagccagtatgaagggaatattacgctgaaccataactcagccctggatatcggcagc

SEQ ID NO: 542083 - DNA, 75 bp, synthetic construct
  source 1..75: mol_type = other DNA
cggacgtcctgttaacagccccgggtgcttttgccgacagttcactgacagtgcatgatggcggtcatcttacag

SEQ ID NO: 542084 - DNA, 75 bp, synthetic construct
  source 1..75: mol_type = other DNA
tcgggcaactacgaaaccatcggcggctttatgatgtttatgttgcgtaagatcccgaaacgcaccgattcggtg

SEQ ID NO: 542085 - DNA, 75 bp, synthetic construct
  source 1..75: mol_type = other DNA
tgttgtctctgaacttgccagcagggtaataaaaaagacatgccgaagattaacgcatattcttctggctggcat

SEQ ID NO: 542086 - DNA, 75 bp, synthetic construct
  source 1..75: mol_type = other DNA
tgtataccgcctaattgacccgagggatggcagtacgttctatgtaggtaaaggcaaaggtaatcgtgtctttgc

SEQ ID NO: 542087 - DNA, 75 bp, synthetic construct
  source 1..75: mol_type = other DNA
ttttcattgctgataaatggctcaaatcaacacgtgaaaatttccctacgatgaaatactgggacgaagatcctg

SEQ ID NO: 542088 - DNA, 75 bp, synthetic construct
  source 1..75: mol_type = other DNA
actttgaggcaacacaaagttcgcgctatggttttgaaggtcgagaagccccacctgaaatagcaaatctttatc

SEQ ID NO: 542089 - DNA, 75 bp, synthetic construct
  source 1..75: mol_type = other DNA
gggctaacgcttggtatcgacagccgtttctcccgtgaagaaagcagcacaactcaggcgggtgtagtctggacg

SEQ ID NO: 542090 - DNA, 75 bp, synthetic construct
  source 1..75: mol_type = other DNA
caataagcaaattatccatcgaaatggtaacagagccgataccagaccaaaaaatcttatgcaagtccgagactt

SEQ ID NO: 542091 - DNA, 75 bp, synthetic construct
  source 1..75: mol_type = other DNA
ggttaataggagttcaaaggatattgacctctatgatgctgtacgttttagctggcgtgtcagcgttgaccgcgc

SEQ ID NO: 542092 - DNA, 75 bp, synthetic construct
  source 1..75: mol_type = other DNA
acggacaaaaacaaagcagttcagacagtaaaagaccggatcctggccgggcgggcaaaacaacccgttatcttt

SEQ ID NO: 542093 - DNA, 75 bp, synthetic construct
  source 1..75: mol_type = other DNA
accgtgaatgacaggagccagtatgaagggaatattacgctggaccataactcaaccctggatatcggcagccgg

SEQ ID NO: 542094 - DNA, 75 bp, synthetic construct
  source 1..75: mol_type = other DNA
tacactaaggacaaggacggaaatttagttaaggttgccggcggatatgcttttaaaacaggaggaaccacagga

SEQ ID NO: 542095 - DNA, 75 bp, synthetic construct
  source 1..75: mol_type = other DNA
aagccccacctgaaatagcaaacctttatcttgggaaaaaaataccagatgaattaagaaaaaaaggagctatgt

SEQ ID NO: 542096 - DNA, 75 bp, synthetic construct
  source 1..75: mol_type = other DNA
atttaggtaagaagatccctgatgatctcagaaaaaaaggtgctatgtctcctgtgagatattctcccggatttg

SEQ ID NO: 542097 - DNA, 75 bp, synthetic construct
  source 1..75: mol_type = other DNA
cgttccaacataagaccctaatgatatcggttaacagaagctcaaaggatattgacctctatgatgctgtacgtt

SEQ ID NO: 542098 - DNA, 75 bp, synthetic construct
  source 1..75: mol_type = other DNA
gatcttcatgaagatgagcaaagcctgaagaataaagtggcggaacatccgcactcaaaattcctcgtctgtaat

SEQ ID NO: 542099 - DNA, 75 bp, synthetic construct
  source 1..75: mol_type = other DNA
aactggaagagcacggcatgacccaactgggcgaaaatcatgacattacgctggatgtcagccgccgtatatacg

SEQ ID NO: 542100 - DNA, 75 bp, synthetic construct
  source 1..75: mol_type = other DNA
acgtccgctttggactggagtttgagaaatccgcctttggtaagtacaacgttgataatgcagtcaacgctaact

SEQ ID NO: 542101 - DNA, 75 bp, synthetic construct
  source 1..75: mol_type = other DNA
actattaattttttgggtggcaaaggaacaccgggagaactgtattttgacagtagctatggaagttattatata

SEQ ID NO: 542102 - DNA, 75 bp, synthetic construct
  source 1..75: mol_type = other DNA
ctgatatcccaggcgggtattgtgcgttccgatattccgtatcagttgtttcgtgattttgctgaaaacaaggga

SEQ ID NO: 542103 - DNA, 75 bp, synthetic construct
  source 1..75: mol_type = other DNA
gcaattgccgctacccgcaacttcttcgagcaattgggcgtgccgacccgcctgtccgactacggtctggacggc

SEQ ID NO: 542104 - DNA, 75 bp, synthetic construct
  source 1..75: mol_type = other DNA
cctctccgactacggtctggacggcagctccatcccggctttgctgaaaaaactggaagagcacggcatgaccca

SEQ ID NO: 542105 - DNA, 75 bp, synthetic construct
  source 1..75: mol_type = other DNA
cagatgtaaacattctgcaactggcgttctttggcccattgctcggcgctctggcacgctcggtcggcggaatga

SEQ ID NO: 542106 - DNA, 75 bp, synthetic construct
  source 1..75: mol_type = other DNA
ccgatgcttttggggctaacgataggagtcgtcatcggtaaagctctggtctgctttttaggggggttgcttgta

SEQ ID NO: 542107 - DNA, 75 bp, synthetic construct
  source 1..75: mol_type = other DNA
cacggtttccgcgataactgcgaatgctctagttgccagaccacggcccgtatttgttccgaattgacagataag

SEQ ID NO: 542108 - DNA, 75 bp, synthetic construct
  source 1..75: mol_type = other DNA
tatgctgaacgcgtctggaacatcactgaaggttccgacgatgagcgtattgacgccgcgattgccgcaacccgc

SEQ ID NO: 542109 - DNA, 75 bp, synthetic construct
  source 1..75: mol_type = other DNA
tcggcgcaaccgtacaggttatcccgcacattactaacgctatcaaagaacgcgttcttgccggtggcgaaggcc

SEQ ID NO: 542110 - DNA, 75 bp, synthetic construct
  source 1..75: mol_type = other DNA
agaattccgccgctgggtgctggatcttctcgatcgagaaattcaacaatccccaatcacaaaacaattcactga

SEQ ID NO: 542111 - DNA, 75 bp, synthetic construct
  source 1..75: mol_type = other DNA
ggataacagccatatagcactgggaagcagtaaggtttttgtggataagaatgacgggacgggaaattatgtcag

SEQ ID NO: 542112 - DNA, 75 bp, synthetic construct
  source 1..75: mol_type = other DNA
attcctcacgatgctcgcgtattgattacctacggtggcggcagcgtgaaaaaaaccggcgttctcgatcaagtt

SEQ ID NO: 542113 - DNA, 75 bp, synthetic construct
  source 1..75: mol_type = other DNA
ggccatttaaggatgacaaactgactccacgcttggctgatacgtcgcggacactttggataacttattctttat

SEQ ID NO: 542114 - DNA, 75 bp, synthetic construct
  source 1..75: mol_type = other DNA
tgatgctgtctgtcatgggctatcaacggtctctctgggcggcttttcaacacacagcgagagtattggttattt

SEQ ID NO: 542115 - DNA, 75 bp, synthetic construct
  source 1..75: mol_type = other DNA
cgaccagttgctggtaacgcggatcgacagcaaggccaccgccctttcgcccaaactgcctgacgttaaagataa

SEQ ID NO: 542116 - DNA, 75 bp, synthetic construct
  source 1..75: mol_type = other DNA
ggttatgaagaagcggcagcacaaggtttgctggccggtcttaacgccgctcgcctgtctgctgacaaagagggc

SEQ ID NO: 542117 - DNA, 75 bp, synthetic construct
  source 1..75: mol_type = other DNA
atctcggcgtactggttgatgacctgtgcactttaggaaccaaagaaccgtatcgtatgtttacttcgcgcgcag

SEQ ID NO: 542118 - DNA, 75 bp, synthetic construct
  source 1..75: mol_type = other DNA
aaggtgatgaaagaggattttgatgcccctgttacagcaatatctggtcaggggccccttaactggcgttttgac

SEQ ID NO: 542119 - DNA, 75 bp, synthetic construct
  source 1..75: mol_type = other DNA
atcagggaaatattacactcaacaataactccacactgaatatcaacagtcgtttcactggcgggattgaggccc

SEQ ID NO: 542120 - DNA, 75 bp, synthetic construct
  source 1..75: mol_type = other DNA
ggacaacagccatataacactgggaagcagcagggtttttgtggataaaaatgacggaacgggaaattatgtcag

SEQ ID NO: 542121 - DNA, 75 bp, synthetic construct
  source 1..75: mol_type = other DNA
tgggatatgattttcttacatcatttgcaacagtggctgcatgtattaataatatgggattaggttttggggcta

SEQ ID NO: 542122 - DNA, 75 bp, synthetic construct
  source 1..75: mol_type = other DNA
gatatgatttaaccggtgataacgccacgctggacatcagccagcaggcgcatgtttccggggatgttcatgcaa

SEQ ID NO: 542123 - DNA, 75 bp, synthetic construct
  source 1..75: mol_type = other DNA
tcacgctgcaaaaaggctccacgctggacattaacaaccggttcattggcgggattgaagcctatgacagtaagg

SEQ ID NO: 542124 - DNA, 75 bp, synthetic construct
  source 1..75: mol_type = other DNA
gatcattgcgccatccgccagcgaagaagcgttgaaaatcaccgcagctaaacagaacgtacgtgtgctcacctg

SEQ ID NO: 542125 - DNA, 75 bp, synthetic construct
  source 1..75: mol_type = other DNA
gcggtctgctggttcaggatcgcgatctgggcatggtcggtgcggaagaactgcgcgtcgtcaccaaacgtcagc

SEQ ID NO: 542126 - DNA, 75 bp, synthetic construct
  source 1..75: mol_type = other DNA
agcctggcggttctatccgtgatgacgaagtgattgccgccgccgacgagcacggtattgcgatgctcttcaccg

SEQ ID NO: 542127 - DNA, 75 bp, synthetic construct
  source 1..75: mol_type = other DNA
cttgatgcttacgatcgcgcgtataaaaccgacccaacctccgcattcggcggcattatcgcttttaaccgtgag

SEQ ID NO: 542128 - DNA, 75 bp, synthetic construct
  source 1..75: mol_type = other DNA
cttgatgcttacgatcgcgcgtacaaaaccgacccaacctccgcattcggcggcattattgcctttaaccgcgag

SEQ ID NO: 542129 - DNA, 75 bp, synthetic construct
  source 1..75: mol_type = other DNA
gactctggaaactcgctttgaccttgccatcaaagccttcgaacacaccgccgcctacgacagcatgattgccaa

SEQ ID NO: 542130 - DNA, 75 bp, synthetic construct
  source 1..75: mol_type = other DNA
ttatcgccacaggcacaggcagtgaaagagttgttaatgtcagtgatgagttctccagtgatggaaaaaaggcag

SEQ ID NO: 542131 - DNA, 75 bp, synthetic construct
  source 1..75: mol_type = other DNA
ctggccgccggagagaaataccccacgttccccgactcgagtgttgtaaccttctggcagagcgctaataaaatc

SEQ ID NO: 542132 - DNA, 75 bp, synthetic construct
  source 1..75: mol_type = other DNA
cctaggaaattgcatcagcaatgaacacgtcagtaatgagcgtatatgcaggagcgatgaaaaaaagatcccacg

SEQ ID NO: 542133 - DNA, 75 bp, synthetic construct
  source 1..75: mol_type = other DNA
agatccgccatcaggcacggacgcagaacctgcattttaaacagtacaaaaacggcagcgtcagcagccgttttg

SEQ ID NO: 542134 - DNA, 75 bp, synthetic construct
  source 1..75: mol_type = other DNA
cgtcatgtcaaaccgcacggcatgttatacaaccaggcggcgaaagaggcacaactggcagacgccatcgccaga

SEQ ID NO: 542135 - DNA, 75 bp, synthetic construct
  source 1..75: mol_type = other DNA
gggcaaagcgttgatgtgaatgctattgcgcaaatgaacctctttctccccagtgattacagtgctattagactt

SEQ ID NO: 542136 - DNA, 75 bp, synthetic construct
  source 1..75: mol_type = other DNA
gattggcgcgggccagatgagccgcgtgtactccgcgaaaatcgccggtattaaagccgccgatgaaggtctgga

SEQ ID NO: 542137 - DNA, 75 bp, synthetic construct
  source 1..75: mol_type = other DNA
ggtatggatgtggcgcgcaaactgttgattctcgcccgtgaaactggacgtgaactggagctggcggatatcgag

SEQ ID NO: 542138 - DNA, 75 bp, synthetic construct
  source 1..75: mol_type = other DNA
cggtggcggatcaatatgccgacttcctccgcgaaggtttccacgtggtgacgccgaacaaaaaggccaacacct

SEQ ID NO: 542139 - DNA, 75 bp, synthetic construct
  source 1..75: mol_type = other DNA
gaagatgagctgccggtcaaaggtatttctaacctgaataacatggcgatgttcagcgtttcaggtccaggaatg

SEQ ID NO: 542140 - DNA, 75 bp, synthetic construct
  source 1..75: mol_type = other DNA
atgaccgatgaaatcccgttagatgatgcactgttacaattgcgggaatttatcgacgaaaactccggtgaattt

SEQ ID NO: 542141 - DNA, 75 bp, synthetic construct
  source 1..75: mol_type = other DNA
tgctgagcccccccgccgtattgcggcaagtcgtattccggctgatcacatggtgctgatggcaggcttcaccgc

SEQ ID NO: 542142 - DNA, 75 bp, synthetic construct
  source 1..75: mol_type = other DNA
tttcgtcgatctggaattcgctcaaataaaacatgttctgcatggcatcagcctgttagggcagtgcccggatag

SEQ ID NO: 542143 - DNA, 75 bp, synthetic construct
  source 1..75: mol_type = other DNA
tcgggcgcttaattcgcctggtgaaagaatatcatttgctgaatccggtgattgtcgactgtacctccagccagg

SEQ ID NO: 542144 - DNA, 75 bp, synthetic construct
  source 1..75: mol_type = other DNA
cagtggcggatcaatatgccgacttcttgcgcgaaggtttccacgttgtcacgccgaacaaaaaggccaacacct

SEQ ID NO: 542145 - DNA, 75 bp, synthetic construct
  source 1..75: mol_type = other DNA
agaatccgtaatgtccgtatatcaacagtttattaatgagataaagagtttttcagcgaaggaaggagttaacgc

SEQ ID NO: 542146 - DNA, 75 bp, synthetic construct
  source 1..75: mol_type = other DNA
cctgcgcgaaggtttccatgtggtgaccccgaacaaaaaggccaacacctcgtcgatggattactaccatcagct

SEQ ID NO: 542147 - DNA, 75 bp, synthetic construct
  source 1..75: mol_type = other DNA
tggcgcgggaaatgggttataccgaaccggatccgcgagatgatctttctggtatggatgtggcgcgtaaactat

SEQ ID NO: 542148 - DNA, 75 bp, synthetic construct
  source 1..75: mol_type = other DNA
ataccggaaatcctcaagcaccaggtacgctcattggtgccagccgtgatgaagacgaattaccggtcaagggca

SEQ ID NO: 542149 - DNA, 75 bp, synthetic construct
  source 1..75: mol_type = other DNA
atttcactttcaatgccagcattgctgctggtgctgcggccggtgatagtaacagcgcagctctgcaatccttcc

SEQ ID NO: 542150 - DNA, 75 bp, synthetic construct
  source 1..75: mol_type = other DNA
ctgctatggtgctggccgcaagcctgttaatgactggctgtgtctcttccggttatggcaactattcgaatgcca

SEQ ID NO: 542151 - DNA, 75 bp, synthetic construct
  source 1..75: mol_type = other DNA
tttggtctggagtttgagaaatcagcctttggtaagtacaacgttgataatgctgtcaacgccagcttccgttat

SEQ ID NO: 542152 - DNA, 75 bp, synthetic construct
  source 1..75: mol_type = other DNA
cgcccccttgctgagttgttaaaagcaaaagggataaatgtatggtatgacgaattctctttaggctggggtaaa

SEQ ID NO: 542153 - DNA, 75 bp, synthetic construct
  source 1..75: mol_type = other DNA
acttataatgcaaccagcaataccttctcctatacggctgacggtgtaaaccaaacgaatgctgcagcaaatctc

SEQ ID NO: 542154 - DNA, 75 bp, synthetic construct
  source 1..75: mol_type = other DNA
ctgacgctactgctaataaaactgctcgtgatgcacttgcggcgtctttacatgctgagccgggtaaaactgtta

SEQ ID NO: 542155 - DNA, 75 bp, synthetic construct
  source 1..75: mol_type = other DNA
tctgcccaggacaggtgcgtcaggccgtggcagtgatgccccttgcggcgaaggttctcaaaaaggtgatggtga

SEQ ID NO: 542156 - DNA, 75 bp, synthetic construct
  source 1..75: mol_type = other DNA
gtattgctggctctggtaggcgttctatcgcttcagcgttaatcgcttttattctcgatgcgtttgatgatggac

SEQ ID NO: 542157 - DNA, 75 bp, synthetic construct
  source 1..75: mol_type = other DNA
aaggtttggtatgtgaataattatgcgtggggaaattatgagtccggcggcacaattactgttacatgcctgaat

SEQ ID NO: 542158 - DNA, 75 bp, synthetic construct
  source 1..75: mol_type = other DNA
tcagcaggtatactccgaccaaaacaaggtttggtatgtgaataattatgcgtggggaaattatgagtccggcgg

SEQ ID NO: 542159 - DNA, 75 bp, synthetic construct
  source 1..75: mol_type = other DNA
ttaaatacattgaattccaaaatgttagagatctctcgccataaaaatgacatttcgcgatgcaactctaaaaaa

SEQ ID NO: 542160 - DNA, 75 bp, synthetic construct
  source 1..75: mol_type = other DNA
tggtcacggcgcaaacggtctgcctacatggcgatggcgagcacgcactggcgttcgcccgccgattacgagcta

SEQ ID NO: 542161 - DNA, 75 bp, synthetic construct
  source 1..75: mol_type = other DNA
gtgaatgaaatttatcgcggggaagacagtattgtccgccattggctgaaagcgccgtggagtatggacggctgg

SEQ ID NO: 542162 - DNA, 75 bp, synthetic construct
  source 1..75: mol_type = other DNA
atctcgtcttgatgaaattgaccgcgtatccggccagacccagttcaacggcgtgaacgtgctggcgaaagacgg

SEQ ID NO: 542163 - DNA, 75 bp, synthetic construct
  source 1..75: mol_type = other DNA
ctggggctatggatattgctggagaaaacgccgctcggtaaagccatttacctgattgggtctaacgaacgagca

SEQ ID NO: 542164 - DNA, 75 bp, synthetic construct
  source 1..75: mol_type = other DNA
cgaatcgtacttgctggtgtcaatcctcgcggcagtactcggcggggttaatccggacggcggcagcgggcggat

SEQ ID NO: 542165 - DNA, 75 bp, synthetic construct
  source 1..75: mol_type = other DNA
atccggacggcggcagcgggcggataattggtatgtgctggcgctgtttcttctgcaaattattgaaagcggctt

SEQ ID NO: 542166 - DNA, 75 bp, synthetic construct
  source 1..75: mol_type = other DNA
agccaaagcatccgatctgttagctaatatcaccgatggatcagtgatcactgggggaggggcaaacgcttttgg

SEQ ID NO: 542167 - DNA, 75 bp, synthetic construct
  source 1..75: mol_type = other DNA
ggcttcaggtaaaagtcttattgctagtacgctgtatcgcgaactgcgcgaacaggtgggcgatgagcacatcgg

SEQ ID NO: 542168 - DNA, 75 bp, synthetic construct
  source 1..75: mol_type = other DNA
gcgcgtttgcgtgacgaacttaacttctcaattttcgttgataccccgctggatatctgcctgatgcgccgcatc

SEQ ID NO: 542169 - DNA, 75 bp, synthetic construct
  source 1..75: mol_type = other DNA
acgtttgctaacgccgttaaaaatgagacttacactgcaactgttggtgtaactttaccagcgacatatacagtc

SEQ ID NO: 542170 - DNA, 75 bp, synthetic construct
  source 1..75: mol_type = other DNA
aagctaaactgtctgacttaatggcaaacaatgctaaggcaaaaacagtcattacaacagataaaggtacattta

SEQ ID NO: 542171 - DNA, 75 bp, synthetic construct
  source 1..75: mol_type = other DNA
tagattatacttacaacgctaaatctggtgattttactaccactaaatctactgctggtacgggtgtagacgccg

SEQ ID NO: 542172 - DNA, 75 bp, synthetic construct
  source 1..75: mol_type = other DNA
gtaacaaaaggtgttgattcggtttatgttgataacaacggggcgttgaccacatctgatactgtagatttttac

SEQ ID NO: 542173 - DNA, 75 bp, synthetic construct
  source 1..75: mol_type = other DNA
accgctaagggcactattactatcgatggttctgcacaggatgttcagatcagcagtgatggtaaaattacggca

SEQ ID NO: 542174 - DNA, 75 bp, synthetic construct
  source 1..75: mol_type = other DNA
tggactccattcaggacgaaatcaaatcccgtctggacgaaattgaccgcgtatctggccagacccagttcaacg

SEQ ID NO: 542175 - DNA, 75 bp, synthetic construct
  source 1..75: mol_type = other DNA
tgcgttttattctggcctttccgttcacattactgaccgcggcagatatcagtatcagcctgtattcatggtgta

SEQ ID NO: 542176 - DNA, 75 bp, synthetic construct
  source 1..75: mol_type = other DNA
attacccgctggcaggggaaatcagatgtttttgatgcaaaccataacgtgtttgactataacgtattacgaaag

SEQ ID NO: 542177 - DNA, 75 bp, synthetic construct
  source 1..75: mol_type = other DNA
ttaatgcatggatgggcgtaaccagaccggctcaaccgaaaacaccggaggaggtgattacccgctggcagggaa

SEQ ID NO: 542178 - DNA, 75 bp, synthetic construct
  source 1..75: mol_type = other DNA
ttcgagtacggcggatatgaaggcagcgctggttgaaaaattcagggacgaaggcaccctgatgatttgtactga

SEQ ID NO: 542179 - DNA, 75 bp, synthetic construct
  source 1..75: mol_type = other DNA
cgatggcgctaaaacagccaaaaaactcagtggcgcactgtccggcagaaaaaaaatactgctttccgccacgcc

SEQ ID NO: 542180 - DNA, 75 bp, synthetic construct
  source 1..75: mol_type = other DNA
gtgttatcagtggttgtctttaccctttctaatctccttgtatcctcaggagcgcatctgatttatcggatatta

SEQ ID NO: 542181 - DNA, 75 bp, synthetic construct
  source 1..75: mol_type = other DNA
actccttttgggatatttatcgttatcgctttgctatgcggttttgcaggtgcaaactttgcttcgagcatgggc

SEQ ID NO: 542182 - DNA, 75 bp, synthetic construct
  source 1..75: mol_type = other DNA
tggcacaacatgccggcgtgccggtgacggactgaaggtggggaaatacttttttcgtggtgcgtttatccagca

SEQ ID NO: 542183 - DNA, 75 bp, synthetic construct
  source 1..75: mol_type = other DNA
agcgaattacggcgaacgcctggccaaacaatatgcacgatgtgtcgcagggccatctatcgccatgcgcatcca

SEQ ID NO: 542184 - DNA, 75 bp, synthetic construct
  source 1..75: mol_type = other DNA
cattcatgcctgcgccaatattggcaatgacaccgatagcatcgctacgatggcaggcgcaattgcagggacatg

SEQ ID NO: 542185 - DNA, 75 bp, synthetic construct
  source 1..75: mol_type = other DNA
aaccaggtgaaagggatccccctgaaactggttcgtcagcgtgtccgggtgtttaaagccagtccgtcaggaaaa

SEQ ID NO: 542186 - DNA, 75 bp, synthetic construct
  source 1..75: mol_type = other DNA
aaattaaagaggcgcgtaaagccgcccgtcagcttccttctctaaaagagaaaatggaagccaagcgcgcattaa

SEQ ID NO: 542187 - DNA, 75 bp, synthetic construct
  source 1..75: mol_type = other DNA
tcggcgaacattatggattacgtagtgcaatgctggttgtactggcgctggttattctcgcggcggtgatgctgc

SEQ ID NO: 542188 - DNA, 75 bp, synthetic construct
  source 1..75: mol_type = other DNA
ggtgccgccgttgagcgagaaatgaataaaacggttttgccgatgatgcacggtttttatagcctgggcacgctg

SEQ ID NO: 542189 - DNA, 75 bp, synthetic construct
  source 1..75: mol_type = other DNA
ctcgatcgctgaaatgggcggtgttctctttggtctgtcgatcggttcgatgagcggtattctctgctcggcgtg

SEQ ID NO: 542190 - DNA, 75 bp, synthetic construct
  source 1..75: mol_type = other DNA
ttaaattcgtaattgtatctataattatctcctttattatctcaaactttttatattggatgagttatgcttcct

SEQ ID NO: 542191 - DNA, 75 bp, synthetic construct
  source 1..75: mol_type = other DNA
gtatttgccagataatccagattcagccggataacccacgttttaaagatttgggcttctctatttcagatatca

SEQ ID NO: 542192 - DNA, 75 bp, synthetic construct
  source 1..75: mol_type = other DNA
gatattaagcctggcgctctggctgacatcgcccgtgctctttgccgttggtctcggcgtctttggggctagttt

SEQ ID NO: 542193 - DNA, 75 bp, synthetic construct
  source 1..75: mol_type = other DNA
atctggcacagtggttaacgttaagcggcaaagccgaggactcacttacacagaccatcgccagcgcgcgggttg

SEQ ID NO: 542194 - DNA, 75 bp, synthetic construct
  source 1..75: mol_type = other DNA
gcgtatccatgagatttaccagcactgccgctccgacgagcaaatagaacaggagtttaatcagctccaagatga

SEQ ID NO: 542195 - DNA, 75 bp, synthetic construct
  source 1..75: mol_type = other DNA
ttatgatttaccgtggaatccgcagcgcgtggagcaacgtatcgggcgtgttcaccgctacggacaaaaacacga

SEQ ID NO: 542196 - DNA, 75 bp, synthetic construct
  source 1..75: mol_type = other DNA
aagtctggcgctctggctgacatcccccgtcctctttgccgttggtcttggtgtctttggagccagttttggttc

SEQ ID NO: 542197 - DNA, 75 bp, synthetic construct
  source 1..75: mol_type = other DNA
gatgcacggtttttatagcctgggcacgctggcaggcgcaggtgtcgggatggcacttacggcctttggcgttcc

SEQ ID NO: 542198 - DNA, 75 bp, synthetic construct
  source 1..75: mol_type = other DNA
tgagcggtattctctgctcggcgtggttagtgaaacgctttgggacgcgtaatgtcatcctggtcacgatgtcct

SEQ ID NO: 542199 - DNA, 75 bp, synthetic construct
  source 1..75: mol_type = other DNA
cagtaccgacaaccccgccgccgatgcggtgcgttttcgcccccatcccggaatgggctttccggtcagcgagtt

SEQ ID NO: 542200 - DNA, 75 bp, synthetic construct
  source 1..75: mol_type = other DNA
gtttcggatgcaacgctgaccgcgctgaaagcaatgctggaagtgaagcaggaagtcgcgccgtggattgatctg

SEQ ID NO: 542201 - DNA, 75 bp, synthetic construct
  source 1..75: mol_type = other DNA
ttccgcgatgccgcagcgtgcggttaaaaccattaagcgaattaacgatttccatcggggtttgaaaacgggaag

SEQ ID NO: 542202 - DNA, 75 bp, synthetic construct
  source 1..75: mol_type = other DNA
ccagtatcgtgattcatgttccgcgcggggatgaaaaaggaaaaacgccgctacatggtacggtattgttgtgtc

SEQ ID NO: 542203 - DNA, 75 bp, synthetic construct
  source 1..75: mol_type = other DNA
gaattcgacttcgataaatctctttggcgcgtacctgcaaagcgtgaagaaatcaaaggtgtgcgttactcgtat

SEQ ID NO: 542204 - DNA, 75 bp, synthetic construct
  source 1..75: mol_type = other DNA
gtgattgccagcacacaaccggcacaaaccaccgtatatctggagcagccagaagccatcgattacaaacggtaa

SEQ ID NO: 542205 - DNA, 75 bp, synthetic construct
  source 1..75: mol_type = other DNA
tggagccgcatattcacctggataccacgcaaaccgccgggcaaccgaactggaatcagtccggcacgctgtttg

SEQ ID NO: 542206 - DNA, 75 bp, synthetic construct
  source 1..75: mol_type = other DNA
gatcggctcgcttttggtgtatacccaacgatcactttggctgaggctcggggtaagcgcgatgcagcaaagaaa

SEQ ID NO: 542207 - DNA, 75 bp, synthetic construct
  source 1..75: mol_type = other DNA
tcatcgggcgcgtgttcttcgctatctagagctgtatatctttccttatattggcttgtctgatatccgacagct

SEQ ID NO: 542208 - DNA, 75 bp, synthetic construct
  source 1..75: mol_type = other DNA
aatggttcaatggtgggctgattttcttgaggccaatcgaaataactctgttacaccttatgaatttgctaaatt

SEQ ID NO: 542209 - DNA, 75 bp, synthetic construct
  source 1..75: mol_type = other DNA
ggggtttgccgggctgcgtgatctgaaacgcactctggaacagtggcttggtccagcccttagttccagcgaaaa

SEQ ID NO: 542210 - DNA, 75 bp, synthetic construct
  source 1..75: mol_type = other DNA
agctattgcggtagctaaaagagtccacaggccagctttaccattcgaacgattctcagaacttttagaacgaat

SEQ ID NO: 542211 - DNA, 75 bp, synthetic construct
  source 1..75: mol_type = other DNA
tcatggatttagaactatggcgcgtggtgcgctaagtgagtcgaaactatggaatgatgacgctattgaaagaca

SEQ ID NO: 542212 - DNA, 75 bp, synthetic construct
  source 1..75: mol_type = other DNA
cggtgcgttatcgacaaccaaagcgcgacattaccctgccttaccctccagcaggttacctgagtttcttgctcg

SEQ ID NO: 542213 - DNA, 75 bp, synthetic construct
  source 1..75: mol_type = other DNA
ctgaacatctagatgagcggcgtcttatggttcaatggtgggcggattatttagatataagtaagcattctcaag

SEQ ID NO: 542214 - DNA, 75 bp, synthetic construct
  source 1..75: mol_type = other DNA
gcatggattcagaacgatggcgcgcggtgctatgggtgagtcagggttgtggagtgatgacgcgataggtaatga

SEQ ID NO: 542215 - DNA, 75 bp, synthetic construct
  source 1..75: mol_type = other DNA
aatagcgcattacgtgcgatgggctatgacactaaaacagatgtctgcggacatgggtttaggacgatggcgcgt

SEQ ID NO: 542216 - DNA, 75 bp, synthetic construct
  source 1..75: mol_type = other DNA
atgtatgcccgcattcgcattaaccggggcaacctgcccgccattaagctgggggcagcccgggtcagactggcc

SEQ ID NO: 542217 - DNA, 75 bp, synthetic construct
  source 1..75: mol_type = other DNA
cgcgcagaatactgtggctggtgataaccaggtgaaggggatccccctgaaactggtgcgtgagcgtgtcagggt

SEQ ID NO: 542218 - DNA, 75 bp, synthetic construct
  source 1..75: mol_type = other DNA
ctgtcaggtatgctggccgaagcgattcgtcgcatcagcaacgaagaatcgatctctgccatgttcgaacactaa

SEQ ID NO: 542219 - DNA, 75 bp, synthetic construct
  source 1..75: mol_type = other DNA
cggtagctgcgcagcattgattctgatgagcttttggtttcgccgtggagatcgtaaaagaaaaggatttttatt

SEQ ID NO: 542220 - DNA, 75 bp, synthetic construct
  source 1..75: mol_type = other DNA
ctggcgctgggaaaataccccgaagtctcgctggcggatgccagggcacgtaaggatgaggcccgtaagctatta

SEQ ID NO: 542221 - DNA, 75 bp, synthetic construct
  source 1..75: mol_type = other DNA
caaaaccagtcacctgttagctccgattaaaaaagttgatgccagtggtaagcatgacgttgctcagcgcctgca

SEQ ID NO: 542222 - DNA, 75 bp, synthetic construct
  source 1..75: mol_type = other DNA
gatggtgcagtggtgggcagattttctatattccaataaatcacgttctatatctccttatgactttgctagaga

SEQ ID NO: 542223 - DNA, 75 bp, synthetic construct
  source 1..75: mol_type = other DNA
tgttcccaggggatcacgacgcggccaaagttatgagtgagaacacagtaaatagcgccttgcgtgcgatggggt

SEQ ID NO: 542224 - DNA, 75 bp, synthetic construct
  source 1..75: mol_type = other DNA
aacagtgctttgcgagctatgggttatgacactagaactgaagtatgcggtcatggttttagaacgatggcgcgt

SEQ ID NO: 542225 - DNA, 75 bp, synthetic construct
  source 1..75: mol_type = other DNA
aaattgcagaacgtatgggagttaatgacagtactgtaagccgtgaatgggcaaaacgaggaatgccacacccaa

SEQ ID NO: 542226 - DNA, 75 bp, synthetic construct
  source 1..75: mol_type = other DNA
cgccattgaatggaatgtggcgattaacgacagtgatattttgatatctgaccatgtcatcgagcgcatcaactg

SEQ ID NO: 542227 - DNA, 75 bp, synthetic construct
  source 1..75: mol_type = other DNA
gatgcaggaatcctcagttggaccagcattgagcatgaactttgacatgcgcaaagacgttcgaggcgtgtttat

SEQ ID NO: 542228 - DNA, 75 bp, synthetic construct
  source 1..75: mol_type = other DNA
gctttggcccggtggcgcaaatctacatcggcggcaaacaaaaaaggacgatgcgcaatctcaccatcacgcgga

SEQ ID NO: 542229 - DNA, 75 bp, synthetic construct
  source 1..75: mol_type = other DNA
tacctatcccgatgaactggcggtaaaaaactttgtggtagcgaacatcaccggtagcgactgccgacagttagt

SEQ ID NO: 542230 - DNA, 75 bp, synthetic construct
  source 1..75: mol_type = other DNA
gcctcgttgcaatggttgcctgatcattacgaactgtttccacatcttgtgtcgttactcaatccgcatggcgta

SEQ ID NO: 542231 - DNA, 75 bp, synthetic construct
  source 1..75: mol_type = other DNA
gtttatctactgggggccgtcaggaatggtagcaggtgaggccattattataagtatcacgagtggttttttgtc

SEQ ID NO: 542232 - DNA, 75 bp, synthetic construct
  source 1..75: mol_type = other DNA
ctgtactggctttttgatagcgccggactcattcataaacgaataaaatcatcgctccggacgcagattgaagga

SEQ ID NO: 542233 - DNA, 75 bp, synthetic construct
  source 1..75: mol_type = other DNA
ggtgatgggcggtgtgttgtttattccacttggggcgattgtggttggcctgattataaaatggttcgactggct

SEQ ID NO: 542234 - DNA, 75 bp, synthetic construct
  source 1..75: mol_type = other DNA
cggactgctcacggcctctttccactggtggcgcaggaaagttaaccggctgccaccatggatgatgtgtaaatc

SEQ ID NO: 542235 - DNA, 75 bp, synthetic construct
  source 1..75: mol_type = other DNA
acgctgctgatggggagcttatggggcatttcctggggatgtgcaatgtggtttatgtactgggggccgtcagga

SEQ ID NO: 542236 - DNA, 75 bp, synthetic construct
  source 1..75: mol_type = other DNA
tccggactgtgcatggcctctttccactggtggcgcaggaaagttaacctgctgccaccatgggatgatgtgtaa

SEQ ID NO: 542237 - DNA, 75 bp, synthetic construct
  source 1..75: mol_type = other DNA
ttggtattagaatggataaaataaatggagaatcgcttttaaatatttcgtccttgccagcacaggctgagcatg

SEQ ID NO: 542238 - DNA, 75 bp, synthetic construct
  source 1..75: mol_type = other DNA
gcaaagcctcggctacattgataacggttacaacaccggcctttataccaactggaagtttgatatgtggctgga

SEQ ID NO: 542239 - DNA, 75 bp, synthetic construct
  source 1..75: mol_type = other DNA
atgagagttaacctactgatagcgatgataatctttgcgctaatctggcctgcaaccgcgctcagagctgcagtg

SEQ ID NO: 542240 - DNA, 75 bp, synthetic construct
  source 1..75: mol_type = other DNA
aaaacattccgtttgccgcagatatttatgacgagaacggaaatattattggcaatgtagggcaaggtggtcagg

SEQ ID NO: 542241 - DNA, 75 bp, synthetic construct
  source 1..75: mol_type = other DNA
gtaaggatcaggcctccggcaactggtatgttcgcaacgtcacccatacgaaagcagcaaatctgcggttaataa

SEQ ID NO: 542242 - DNA, 75 bp, synthetic construct
  source 1..75: mol_type = other DNA
gaacgccgactgccggacgcaaaccatcggcagcctttcaggattaagttgtaagatggtcaactataccctgca

SEQ ID NO: 542243 - DNA, 75 bp, synthetic construct
  source 1..75: mol_type = other DNA
atttcggctatatcgtaaccaccagcggtaaaacagctgccgacgaagtgctgatcaaggtgaccggacccgcgc

SEQ ID NO: 542244 - DNA, 75 bp, synthetic construct
  source 1..75: mol_type = other DNA
atttccagcgaacagctcaacgccctttccaccggcaccgccgttgcgccggaagcgggtgcgacgctgatttta

SEQ ID NO: 542245 - DNA, 75 bp, synthetic construct
  source 1..75: mol_type = other DNA
aaaaaggcgcacttgaagtggcgcgggaaatagcctgccggctgcgggatatgggctggacgccggaacggattc

SEQ ID NO: 542246 - DNA, 75 bp, synthetic construct
  source 1..75: mol_type = other DNA
ttatggtgccgggagtgcagagaaaatatatagcgataatagagatattattggtattagaatggataaaataaa

SEQ ID NO: 542247 - DNA, 75 bp, synthetic construct
  source 1..75: mol_type = other DNA
cgtgctttcattgacggcggagcaaattcgtccggcaccggaatttgccgtgacgctttcaacagaatatctcac

SEQ ID NO: 542248 - DNA, 75 bp, synthetic construct
  source 1..75: mol_type = other DNA
tccttggaagcctgcgcggcaacggcagagggcgatttgtcttacaggacggcagccaggtgacaggggaggggg

SEQ ID NO: 542249 - DNA, 75 bp, synthetic construct
  source 1..75: mol_type = other DNA
atgccatttaaaaaactctcccgacgcaacttcctgacggcaagctcggcgcttgccttcctccatacccctttc

SEQ ID NO: 542250 - DNA, 75 bp, synthetic construct
  source 1..75: mol_type = other DNA
atacgtttctctatctcactcgcgacaccttctcgccgtgggagaatctggcgttgctgttgcagaactacgaca

SEQ ID NO: 542251 - DNA, 75 bp, synthetic construct
  source 1..75: mol_type = other DNA
gagaagaaaagccatggtaacatcgtctgcttccgtaacctcaagaaagccactgatgatgccatagcgttattc

SEQ ID NO: 542252 - DNA, 75 bp, synthetic construct
  source 1..75: mol_type = other DNA
ctatttattatcagcaatggggttgataccaagtattacgccaataaccgagctaaccatttcgagcagaccttc

SEQ ID NO: 542253 - DNA, 75 bp, synthetic construct
  source 1..75: mol_type = other DNA
agcaaagagaaagtctcgattcttgacgatgtggattttgaagtctcgctgattcatcgcgacgaaattaacgtc

SEQ ID NO: 542254 - DNA, 75 bp, synthetic construct
  source 1..75: mol_type = other DNA
cgtaaagaacgccgcggcgactacctcggcgcaaccgtacaggttattccgcacatcaccaatgcaatcaaagaa

SEQ ID NO: 542255 - DNA, 75 bp, synthetic construct
  source 1..75: mol_type = other DNA
atgccgctaaatgatgagcttgaaaaaagtataaaaaaacgctatcaaaataaaaagatagttttttctcttggg

SEQ ID NO: 542256 - DNA, 75 bp, synthetic construct
  source 1..75: mol_type = other DNA
gacgtcgccaataacttcgccttcgcaatgggggcgctcttcctgttgagttactacaccgacgtcgctggcgtc

SEQ ID NO: 542257 - DNA, 75 bp, synthetic construct
  source 1..75: mol_type = other DNA
gcaaaattattggctgggcatttgcagccggtgccgtggatggtattggcagcggtgtggccaaaattggtcagg

SEQ ID NO: 542258 - DNA, 75 bp, synthetic construct
  source 1..75: mol_type = other DNA
ccaccgcccaatatgacaggtgtggtctcccagacctttgataaaaaggtgtcagacgcggcggttgcagatatt

SEQ ID NO: 542259 - DNA, 75 bp, synthetic construct
  source 1..75: mol_type = other DNA
tctggcgaaaatggaacaacgggagcaggactaccgggccaaaattgaagagcaggagaatgagctggctatcct

SEQ ID NO: 542260 - DNA, 75 bp, synthetic construct
  source 1..75: mol_type = other DNA
aaacagactaccgaactgttgttcgataaatgcctgcataaatacgtgattgtcgacgccatccgggatgaaaac

SEQ ID NO: 542261 - DNA, 75 bp, synthetic construct
  source 1..75: mol_type = other DNA
cagcgggacagccagtgccgtcatttggctcaggggcatcagtaccgccacccacggcgttttatcagccaggag

SEQ ID NO: 542262 - DNA, 75 bp, synthetic construct
  source 1..75: mol_type = other DNA
taacggcattcaggtgtcgcagcagatgctgcgggaactgaatctgggtgatgcagtcccgcagtcagcgggtca

SEQ ID NO: 542263 - DNA, 75 bp, synthetic construct
  source 1..75: mol_type = other DNA
agctatttaaccggtacacagaatgtgattgatggcggcagcacactgccggagacggttagcgtcggtatctga

SEQ ID NO: 542264 - DNA, 75 bp, synthetic construct
  source 1..75: mol_type = other DNA
gtttatctactgggggccgtcaggaatggtggcaggtgaggccattattataagtatcacggggttctacgtcgg

SEQ ID NO: 542265 - DNA, 75 bp, synthetic construct
  source 1..75: mol_type = other DNA
tcaggaatggtggcaggtgaggccattattataagtatcacgggtggttttttgttcggactgctcatggcctct

SEQ ID NO: 542266 - DNA, 75 bp, synthetic construct
  source 1..75: mol_type = other DNA
caaaacgccattatcggcggagccagcctgtgggtgatgcagggcaaagataaagaaacgtataccggcgtggcg

SEQ ID NO: 542267 - DNA, 75 bp, synthetic construct
  source 1..75: mol_type = other DNA
tgatcatcaaatggttcgactggctgtatgagctgggcaaccgcgagactaatcgctataaggctgcgatattgc

SEQ ID NO: 542268 - DNA, 75 bp, synthetic construct
  source 1..75: mol_type = other DNA
cctacgcaaacgcgttgccgatgtaccgcgccgtccgctgtttaccatgaaccgcgtggagaccaatctcacgtg

SEQ ID NO: 542269 - DNA, 75 bp, synthetic construct
  source 1..75: mol_type = other DNA
ttcccgctgaccagcgtactggtgtttcgctttgatgttagcgtcgcaccgccggaaatcttgttgcaggcgttg

SEQ ID NO: 542270 - DNA, 75 bp, synthetic construct
  source 1..75: mol_type = other DNA
tttgcgcgtcatggcgcaaacctaatcttgctggatatctcccctgagattgaaaagctggcggatgagctgtgt

SEQ ID NO: 542271 - DNA, 75 bp, synthetic construct
  source 1..75: mol_type = other DNA
gctgcgtcgcctcgccgatccgctggaagtcggcgaactggcggccttcctcgcatcggatgaatccagctattt

SEQ ID NO: 542272 - DNA, 75 bp, synthetic construct
  source 1..75: mol_type = other DNA
aagcggcgattgttgggctgaccaaatcgctggcggtggagtacgcgcaatccggtattcgcgttaatgcaattt

SEQ ID NO: 542273 - DNA, 75 bp, synthetic construct
  source 1..75: mol_type = other DNA
cagcactagtgctcggactgacgttaatggggaatgcacaggcagtgacgaccattccgttctggcactctatgg

SEQ ID NO: 542274 - DNA, 75 bp, synthetic construct
  source 1..75: mol_type = other DNA
acttactgtgattcagcagttcagttgatgtggacactctttcaggcaggtgttctggccgaacgaagagctacc

SEQ ID NO: 542275 - DNA, 75 bp, synthetic construct
  source 1..75: mol_type = other DNA
aaagaagcgttcaacagcgcatgggatcaatataaagataaagaagatcggcgtgatgacgccagtcgcgaagaa

SEQ ID NO: 542276 - DNA, 75 bp, synthetic construct
  source 1..75: mol_type = other DNA
tggtaaaagaagtggatgcactcggcggtctgatggcgaaggcgatcgagcaggcgggtatccagtttaggatac

SEQ ID NO: 542277 - DNA, 75 bp, synthetic construct
  source 1..75: mol_type = other DNA
taccgattatgccagatggcggagttttaggttaacagatgatagtaggtatattgggttaacaatgcctaaagt

SEQ ID NO: 542278 - DNA, 75 bp, synthetic construct
  source 1..75: mol_type = other DNA
cacatatctcatgtcgcggcagcagcacatgcaccatttttgagtgccgccgcaccaggaatgttatctatgaat

SEQ ID NO: 542279 - DNA, 75 bp, synthetic construct
  source 1..75: mol_type = other DNA
ttcctttcggactccatcgcgaaaccggacggtttctggacatcacggaagtcagcagaggaagcgcatgcaact

SEQ ID NO: 542280 - DNA, 75 bp, synthetic construct
  source 1..75: mol_type = other DNA
aaagtgattgttcgtgacaaagtgggaagctttatgtcgaagacagaatgtcagacatatctgcaaaactggatc

SEQ ID NO: 542281 - DNA, 75 bp, synthetic construct
  source 1..75: mol_type = other DNA
caggttcatatcgtgcaattgcatggattaaacctcattttcagcttgaggggttaagtatgtcattgcgtcttg

SEQ ID NO: 542282 - DNA, 75 bp, synthetic construct
  source 1..75: mol_type = other DNA
ctgccagcggccccgctcggtctgaaatccgccccggcgatattttcaaagataactacggcggcacgataacga

SEQ ID NO: 542283 - DNA, 75 bp, synthetic construct
  source 1..75: mol_type = other DNA
tggctagaaggaaaatattgtaaagccatttcttattattataagtatttacttgttaaattatttggcttaaag

SEQ ID NO: 542284 - DNA, 75 bp, synthetic construct
  source 1..75: mol_type = other DNA
tggcattgagtttgtggattattttaatgccggggttatgcttattaatatcagcgcatggaaaaaacataatat

SEQ ID NO: 542285 - DNA, 75 bp, synthetic construct
  source 1..75: mol_type = other DNA
tatatcatgtgacagataaatttgacattaatccggacactctggttctgggaattcctttatcaacatgtttgc

SEQ ID NO: 542286 - DNA, 75 bp, synthetic construct
  source 1..75: mol_type = other DNA
ataatgcattatgttacccaaaacaaaccatggtataaaatatttagagcacgaaactttgaacattatttttat

SEQ ID NO: 542287 - DNA, 75 bp, synthetic construct
  source 1..75: mol_type = other DNA
ttgttaaatcttaaaaacttcgtcgctaagaaacaaaatttatttcaacgtgaaataccgaatattaaagctttg

SEQ ID NO: 542288 - DNA, 75 bp, synthetic construct
  source 1..75: mol_type = other DNA
acttaatggacgagtgcattaccttaataacaagtacaataataagacaacattgtcagtacgatgtgatgaaga

SEQ ID NO: 542289 - DNA, 75 bp, synthetic construct
  source 1..75: mol_type = other DNA
gaagtaattgaaatgcctggaagtccaggggtttatcgtgcaattgcatggattaaacctcattttcaacttgag

SEQ ID NO: 542290 - DNA, 75 bp, synthetic construct
  source 1..75: mol_type = other DNA
aaaaaatcggagtttcgcaagctgtactggcttcggcaattggttgggggcaatcccgcatcgccaactatgagc

SEQ ID NO: 542291 - DNA, 75 bp, synthetic construct
  source 1..75: mol_type = other DNA
atgcgttttgtacagtttgatgagtactacaacgcacttacccagcaacttccatatcccggtcacccagaaacc

SEQ ID NO: 542292 - DNA, 75 bp, synthetic construct
  source 1..75: mol_type = other DNA
gattttattttcttcaggttttggcatcggaataaaactgattcgcgcctgtgactcacaaagcattactgttca

SEQ ID NO: 542293 - DNA, 75 bp, synthetic construct
  source 1..75: mol_type = other DNA
tttgaaccggtgccaggggatggcctgtttgtgcggattacatccgagaaaacagagggaagaggggcggcttca

SEQ ID NO: 542294 - DNA, 75 bp, synthetic construct
  source 1..75: mol_type = other DNA
ttgtcaccttatcttcggacatttccgctccactaattgcagacatgcaatactttgagctgtatagcaccgaag

SEQ ID NO: 542295 - DNA, 75 bp, synthetic construct
  source 1..75: mol_type = other DNA
aacggctttaatactgaccagatgctgaagcagctgggcaacctgaatccgcagcagtttatgtccggcagccag

SEQ ID NO: 542296 - DNA, 75 bp, synthetic construct
  source 1..75: mol_type = other DNA
agtattgcgatggggatatttgctaacttacccgtggcgctggctccggcaatggggctgaacgccttctttgcc

SEQ ID NO: 542297 - DNA, 75 bp, synthetic construct
  source 1..75: mol_type = other DNA
attttggttggcactccgagaaagaaaactcatattcccagccttagtattaacaatactactgcttcaaagacc

SEQ ID NO: 542298 - DNA, 75 bp, synthetic construct
  source 1..75: mol_type = other DNA
cttaggacgaatcccgtatggtatgcaaactgtgcctgctgagacatttaattttgaagaacacattagtgaaga

SEQ ID NO: 542299 - DNA, 75 bp, synthetic construct
  source 1..75: mol_type = other DNA
tctcctggcagaccgggatgggcgcaatattctggggcgcagttggactatttttgctcacgctgtttcgtatcc

SEQ ID NO: 542300 - DNA, 75 bp, synthetic construct
  source 1..75: mol_type = other DNA
ggtactggatgatctccaacattcccttaagtttacgtattggtatcaccagcggggtgatgctgccaacttact

SEQ ID NO: 542301 - DNA, 75 bp, synthetic construct
  source 1..75: mol_type = other DNA
gaccgggcatgtcattcgtacttctaactgggcgcaaaccctgccgccagaacagcgtccgacctttacccaggt

SEQ ID NO: 542302 - DNA, 75 bp, synthetic construct
  source 1..75: mol_type = other DNA
aacagtgggaaagtatataggtatgcagatcaggatgtgctcaatattttacttaatggacgagtgcattacctt

SEQ ID NO: 542303 - DNA, 75 bp, synthetic construct
  source 1..75: mol_type = other DNA
gactcgctgtgtgagttcaccgtaaaggaacataatattgagttcagggctgttctcgcttacgaaccgaagaag

SEQ ID NO: 542304 - DNA, 75 bp, synthetic construct
  source 1..75: mol_type = other DNA
tcgtttcaacggaaaagaatccagagtcagtcttggcgcatacccgcttgtctcactggcagaagccaggcaaca

SEQ ID NO: 542305 - DNA, 75 bp, synthetic construct
  source 1..75: mol_type = other DNA
gcgctggtggaatccgaactctggtcacgggatgtcgtggagcggcagatgagccatcaggagcgcaacagtgtg

SEQ ID NO: 542306 - DNA, 75 bp, synthetic construct
  source 1..75: mol_type = other DNA
atgctgacgaaatatgcccttgtggcagtcatagtgctgtgtttgacggttctgggatttacgcttctggtcggc

SEQ ID NO: 542307 - DNA, 75 bp, synthetic construct
  source 1..75: mol_type = other DNA
atgaagccccaggagatatttctatcaaccctggggctgccactccaaacccgaacaatttggatggtagtccct

SEQ ID NO: 542308 - DNA, 75 bp, synthetic construct
  source 1..75: mol_type = other DNA
tgaacgtgatataaacaacttacgcctcgagcgtggtatggctcattacaacgagccaatggcgtgggcgcaatt

SEQ ID NO: 542309 - DNA, 75 bp, synthetic construct
  source 1..75: mol_type = other DNA
caatcccggcggaacgagaagctatagaaggtgttaagcattcgcaacgtggttctaaaatgcgaacacctcact

SEQ ID NO: 542310 - DNA, 75 bp, synthetic construct
  source 1..75: mol_type = other DNA
gaactgacccggcatgccgttctgctgatgctgcatgtgttcattcgctccagtgaactgcgtttcgcccgctgg

SEQ ID NO: 542311 - DNA, 75 bp, synthetic construct
  source 1..75: mol_type = other DNA
gaacatggcttgattaagaatgctcttgattattacttggatggcataaatataaatattcctgaattaagaatt

SEQ ID NO: 542312 - DNA, 75 bp, synthetic construct
  source 1..75: mol_type = other DNA
caccgcgccgccggttaaaaaccactatcccgccctgccgccggagaggttgcccgaattgtttgagcgtattgg

SEQ ID NO: 542313 - DNA, 75 bp, synthetic construct
  source 1..75: mol_type = other DNA
gtggctctgggctggcacaaaaccaacaaaaagtggtcgcctgattatgcagagcgcattctcgccagcatgaat

SEQ ID NO: 542314 - DNA, 75 bp, synthetic construct
  source 1..75: mol_type = other DNA
tcgtgccgctctcccgccaggcgattgccattctgaaacagatacaggagctttccggccatctggatctggtgt

SEQ ID NO: 542315 - DNA, 75 bp, synthetic construct
  source 1..75: mol_type = other DNA
atgctgacgaaatatgcccttgtggcagtcatagtgctgtgtttgacggtcctgggatttacgcttctggtcggt

SEQ ID NO: 542316 - DNA, 75 bp, synthetic construct
  source 1..75: mol_type = other DNA
tattccgctgctgatggggctactgacaatatatcaatggctgttgcgtcaattggtagcctgatgtggcatgcg

SEQ ID NO: 542317 - DNA, 75 bp, synthetic construct
  source 1..75: mol_type = other DNA
gtaaaggcgggctgattttactgatagtcgtgctggttgcaggctactatggtgttgatttaaccgggttaatga

SEQ ID NO: 542318 - DNA, 75 bp, synthetic construct
  source 1..75: mol_type = other DNA
atgcgttggcaagggcgacgtgaaagtgacaatgtcgaagacaggcgtaacagctctggtggcccgtcaatgggc

SEQ ID NO: 542319 - DNA, 75 bp, synthetic construct
  source 1..75: mol_type = other DNA
ttaagtgggtcgctttaatcttaatgattggcgaccatattaataaatatttattaaatgacacaatccccattc

SEQ ID NO: 542320 - DNA, 75 bp, synthetic construct
  source 1..75: mol_type = other DNA
attcttgaaagctgattgtggtgatacatcacgtacagaaatgtggctaccgattaaaacgtgtattgaaacagc

SEQ ID NO: 542321 - DNA, 75 bp, synthetic construct
  source 1..75: mol_type = other DNA
cggtgcaccattgaaaatgccacagatgcattaaatgccataaagaaagcgaatactgattcaaatcggggataa

SEQ ID NO: 542322 - DNA, 75 bp, synthetic construct
  source 1..75: mol_type = other DNA
gctctgggcgttgttgatcggtattggtatcgcctttacgccatgcgtgctgccaatgtacccactgatttctgg

SEQ ID NO: 542323 - DNA, 75 bp, synthetic construct
  source 1..75: mol_type = other DNA
ggctcgctgtgtgagtttacggtgaaggaacgtaatattgagtttaaggctgttctcgcttacgaaccgaagaag

SEQ ID NO: 542324 - DNA, 75 bp, synthetic construct
  source 1..75: mol_type = other DNA
gactctctgtgtgagttcaccgtaaaggaacgtaatattgagtttaaggctgttctcgcttacgaaccgaagaag

SEQ ID NO: 542325 - DNA, 75 bp, synthetic construct
  source 1..75: mol_type = other DNA
cacctaccagggctgcgctgatgccggtttctgttatccgccagaaaccaaaaccgttccgttaagcgaagtggt

SEQ ID NO: 542326 - DNA, 75 bp, synthetic construct
  source 1..75: mol_type = other DNA
ggctgtgctgatgccggtttctgttatccgccagaaaccaaaaccgttccgttaagcgaagtggtcgccaacaac

SEQ ID NO: 542327 - DNA, 75 bp, synthetic construct
  source 1..75: mol_type = other DNA
ggacgttcacaatttgtccccgcggatcaagcctttgcttttgattttcagcaaaaccaacatgaccttaatctg

SEQ ID NO: 542328 - DNA, 75 bp, synthetic construct
  source 1..75: mol_type = other DNA
tggttccggtgttgactatgcacatctggaacaggtgtgtggtgcgatggtgcggcaggttatcgactttggtca

SEQ ID NO: 542329 - DNA, 75 bp, synthetic construct
  source 1..75: mol_type = other DNA
accggaagttctgtttgataacggtcaggcgaggttgattcgccgccgccagaccattggtgaattactggcgct

SEQ ID NO: 542330 - DNA, 75 bp, synthetic construct
  source 1..75: mol_type = other DNA
aggccggagaaggcgttcactgaactgaaccccaaaacctggacagtttcagttaaccggctttttgatactcag

SEQ ID NO: 542331 - DNA, 75 bp, synthetic construct
  source 1..75: mol_type = other DNA
tccatcctggagcacatggaacgcgctaaatttttcgatccagatgaactgtgctcggcaggtgatttacttcag

SEQ ID NO: 542332 - DNA, 75 bp, synthetic construct
  source 1..75: mol_type = other DNA
tggtagttatcgtccggttggcaccagcgatctgtttcgcgaactgagcgttccgttgataaagcatccggggat

SEQ ID NO: 542333 - DNA, 75 bp, synthetic construct
  source 1..75: mol_type = other DNA
cgccagggcatcgggtatggctgcgcgttaacccggggtttggtcacggacatagccaaaaaaccaataccggtg

SEQ ID NO: 542334 - DNA, 75 bp, synthetic construct
  source 1..75: mol_type = other DNA
tttcgtcatgagcaatctgcaggctatgcggctgcggcaagcggttttcttacccaaaagccagggatctgcctg

SEQ ID NO: 542335 - DNA, 75 bp, synthetic construct
  source 1..75: mol_type = other DNA
acagatccggaattgatcactggattggttgcccagcgattagtcagaaaattgtgcgctcaatgtagcataaca

SEQ ID NO: 542336 - DNA, 75 bp, synthetic construct
  source 1..75: mol_type = other DNA
ccgatgcaatactgcggtttcagtccgattatgatgaaacctcggctgttccgttgctttccatacagaacgcga

SEQ ID NO: 542337 - DNA, 75 bp, synthetic construct
  source 1..75: mol_type = other DNA
aggaaattgacagcaaccgccccattgctgtgccagtcgttggtgatattgcatccagtatgcaaggtatgctgg

SEQ ID NO: 542338 - DNA, 75 bp, synthetic construct
  source 1..75: mol_type = other DNA
gtcatcgaccctgcagcaggaactgaaagtggccatattaccaaacttaacccaaaacaagtcgctggtaattaa

SEQ ID NO: 542339 - DNA, 75 bp, synthetic construct
  source 1..75: mol_type = other DNA
gacgatcgttatttttaataatggcggcatctacagaggagacggtgttgatctcagtggcgctggtgcaccatc

SEQ ID NO: 542340 - DNA, 75 bp, synthetic construct
  source 1..75: mol_type = other DNA
aactatgggataacgctgaacgcgtcgctaagtttctccttccgaaaggacatctggaggggaaggagtggtgtg

SEQ ID NO: 542341 - DNA, 75 bp, synthetic construct
  source 1..75: mol_type = other DNA
agaagcagaatacagatgcgctggaaaaacagattaacgagcggatggacggcgtgttaagtcgctggctgctgc

SEQ ID NO: 542342 - DNA, 75 bp, synthetic construct
  source 1..75: mol_type = other DNA
acggtaagagggtttatcgcagggatcgcctgttcagtggctgtcgcctcagcattgtggtggtggcaggtctat

SEQ ID NO: 542343 - DNA, 75 bp, synthetic construct
  source 1..75: mol_type = other DNA
aaaacaaattaatgagcgactcgaaggcgtgttaagccgctggctgctgctgaagaataatacgataccgacgat

SEQ ID NO: 542344 - DNA, 75 bp, synthetic construct
  source 1..75: mol_type = other DNA
tctaccgcacagagcgggcattgcagcttatctgcgacaagctccagcaggtggagctgaagcgcgttccgcgcg

SEQ ID NO: 542345 - DNA, 75 bp, synthetic construct
  source 1..75: mol_type = other DNA
tgaaacaaggcaacacagtaagagggtttatcgcagggatcgtctgttcagcggttgtcgcctcagcattgtggt

SEQ ID NO: 542346 - DNA, 75 bp, synthetic construct
  source 1..75: mol_type = other DNA
aaaacagattaacgagcggatggacggcgtgttaagtcgctggctgctgctgaagaataatacgataccgacgat

SEQ ID NO: 542347 - DNA, 75 bp, synthetic construct
  source 1..75: mol_type = other DNA
tattgaacagagacttaataaaaccggccatcgctgagctgaacgaaaaaagcgatctggccgtcaccgtcgaga

SEQ ID NO: 542348 - DNA, 75 bp, synthetic construct
  source 1..75: mol_type = other DNA
cgggcgcagtatctcaaaggtgaggcgaaagtagagatcaccttctccgatgccatcatgccgtatctgacacag

SEQ ID NO: 542349 - DNA, 75 bp, synthetic construct
  source 1..75: mol_type = other DNA
cattccctgatatggggcggaaaaatgccgaggttcagctacaggaagcaattgatcgtttgtgggacaggtcga

SEQ ID NO: 542350 - DNA, 75 bp, synthetic construct
  source 1..75: mol_type = other DNA
ggcagcgtcggtgtgttctggcgcaataacgaaacgccttcttatgctttaagtcagtttctgcactttttacag

SEQ ID NO: 542351 - DNA, 75 bp, synthetic construct
  source 1..75: mol_type = other DNA
taattaagaatatatcaagattatcaagaagttacagcattaggatttacgagttgctccagcagtttcgcagta

SEQ ID NO: 542352 - DNA, 75 bp, synthetic construct
  source 1..75: mol_type = other DNA
cgatcaaaaaggggcgcacggttgtagccctgcattttcgcttcaaggaagacaaacaaatcaagatgacgatct

SEQ ID NO: 542353 - DNA, 75 bp, synthetic construct
  source 1..75: mol_type = other DNA
tttgattcggtcgctgctcacatggaaacagaagctgaggagtggcaatctattaagaacctgtgccaacgagaa

SEQ ID NO: 542354 - DNA, 75 bp, synthetic construct
  source 1..75: mol_type = other DNA
ttccggcttacgtcaaactgccgggatggtttgctgccttcgaacaatctgcaacatttatcacgctgtatacat

SEQ ID NO: 542355 - DNA, 75 bp, synthetic construct
  source 1..75: mol_type = other DNA
cgaaccagagaaagcagacaacaagacgataaaagactaagagtcaaaatcggttgaagacgaagatattattcg

SEQ ID NO: 542356 - DNA, 75 bp, synthetic construct
  source 1..75: mol_type = other DNA
ccgtaatgagcaggccggtatcgactggaacgcggtcttcagcgacagaacgctgggactgagcctcggcagcac

SEQ ID NO: 542357 - DNA, 75 bp, synthetic construct
  source 1..75: mol_type = other DNA
tcattctcccagactcacagacactgcagctgctctattccatgagtctctccgacaaaccggttattgagaatt

SEQ ID NO: 542358 - DNA, 75 bp, synthetic construct
  source 1..75: mol_type = other DNA
cgaaccagagaaagcagacaaaaagacgatcaaagactaagagtcaaaatcggttgaagacgaagatattattcg

SEQ ID NO: 542359 - DNA, 75 bp, synthetic construct
  source 1..75: mol_type = other DNA
ccggtggctggctggagccggattatcaaattactgttccacgcgcatttaaaccggaaggagtcgaagatggat

SEQ ID NO: 542360 - DNA, 75 bp, synthetic construct
  source 1..75: mol_type = other DNA
taatgacactatcctctggtgtctcacagccgttgcttgctgatgttcaatatttcgaactctatagtagttcgg

SEQ ID NO: 542361 - DNA, 75 bp, synthetic construct
  source 1..75: mol_type = other DNA
ggtcgagtaactgctctggcgtcgaatgcgcaggggacatccgggattcagctgtatgaggcatacaacaatggc

SEQ ID NO: 542362 - DNA, 75 bp, synthetic construct
  source 1..75: mol_type = other DNA
gctgtatgaggcatacaacaatggctacccttctccctatggcaatgtgcttcaccttaaaggtgccaccgctgc

SEQ ID NO: 542363 - DNA, 75 bp, synthetic construct
  source 1..75: mol_type = other DNA
actctgccgtcaccaaaaacctgacgccggtgccgatgcagatcgccaatcagcagagttacatcgagagtgtga

SEQ ID NO: 542364 - DNA, 75 bp, synthetic construct
  source 1..75: mol_type = other DNA
cgaaccagagaaagcagacaagaagacgatgaaagactgagagtcaaaatcggttgaagacgaagatattattcg

SEQ ID NO: 542365 - DNA, 75 bp, synthetic construct
  source 1..75: mol_type = other DNA
catattccggtacggatcacaccggatgtactgacatacctgaatacatccacaaccggcagcacacaacaaatc

SEQ ID NO: 542366 - DNA, 75 bp, synthetic construct
  source 1..75: mol_type = other DNA
cgaaccagagaaagcagacaaaaagacgataaaagactcagagtcaaaatcggttgaagacgaagatattattcg

SEQ ID NO: 542367 - DNA, 75 bp, synthetic construct
  source 1..75: mol_type = other DNA
tttgattcgctcgctgctcacatggagtctgaaaaagcggagtggcaatccattaagaagttgtgccagcaagat

SEQ ID NO: 542368 - DNA, 75 bp, synthetic construct
  source 1..75: mol_type = other DNA
ttacagacagtgacgaagagaaaccgctaaaagtggaagtcgccgagggagcctttgattccctgattactcaca

SEQ ID NO: 542369 - DNA, 75 bp, synthetic construct
  source 1..75: mol_type = other DNA
taccgtgatgactcaacactgataacgcgttttatggaatcactaaaggctcagattaaacaaacacagaagcgt

SEQ ID NO: 542370 - DNA, 75 bp, synthetic construct
  source 1..75: mol_type = other DNA
aaaggtgataaagaacgctggagtatcagcggcgatgttcaacaaattaaaaatcttcctgtaatcctctatagc

SEQ ID NO: 542371 - DNA, 75 bp, synthetic construct
  source 1..75: mol_type = other DNA
agccatcttcattagcgggctgttcttctatgcgccaagagacgccgccagcagtcttgatgagctgaaagcgag

SEQ ID NO: 542372 - DNA, 75 bp, synthetic construct
  source 1..75: mol_type = other DNA
agcgagctgcccatacgtattggtagtattaaactagctgagcctccagagctacgactgtgtgggaaaattata

SEQ ID NO: 542373 - DNA, 75 bp, synthetic construct
  source 1..75: mol_type = other DNA
atgaaacgtcaggtggtgctgaatgtggaaattctgagtatccggaaaacccgcaatgagcaggccggtatcgac

SEQ ID NO: 542374 - DNA, 75 bp, synthetic construct
  source 1..75: mol_type = other DNA
ggtcaccataaccaggccacctttccgatggctgaacaggcaggggctgtctggcagaagattacacagggtgag

SEQ ID NO: 542375 - DNA, 75 bp, synthetic construct
  source 1..75: mol_type = other DNA
tataaccatcacggatggtacgagacagaaagggaggtacgccagttaacagaacatctgatgttagagagcaac

SEQ ID NO: 542376 - DNA, 75 bp, synthetic construct
  source 1..75: mol_type = other DNA
tttgagtactattacagccagctggagcgcagtttgtcgtatttaactaagcttgccacgaaagacagttctgat

SEQ ID NO: 542377 - DNA, 75 bp, synthetic construct
  source 1..75: mol_type = other DNA
gttgtgcgcgaaacaaaccagcagtggatcaataccacgccccttccggaaaaaaccgttacccgggcaatacca

SEQ ID NO: 542378 - DNA, 75 bp, synthetic construct
  source 1..75: mol_type = other DNA
tgaaaaagcaggcggtaaaacgcaaactgcaccggttgcaaccccgcaagaactggccgattacgacgccattat

SEQ ID NO: 542379 - DNA, 75 bp, synthetic construct
  source 1..75: mol_type = other DNA
cgctcgtgcgtgcaggcaagaacgggcgaattatcagaattgtaatattttacgttgcgtgccatcggttttctc

SEQ ID NO: 542380 - DNA, 75 bp, synthetic construct
  source 1..75: mol_type = other DNA
gtccatttcagtgcttagaattcttgaatctacgctgatcaaaattaatggcgactgtgatatttccaaaataaa

SEQ ID NO: 542381 - DNA, 75 bp, synthetic construct
  source 1..75: mol_type = other DNA
gggatgctggaaccagtcagatttgaaagtgcgggaacgccgcccgtgcctgctggcaggggcggcagagttatc

SEQ ID NO: 542382 - DNA, 75 bp, synthetic construct
  source 1..75: mol_type = other DNA
gagtatctgcaatgcctggcttccctcgccagggcacagaatgatagcgaagcgttagccgttcacctgcaacgc

SEQ ID NO: 542383 - DNA, 75 bp, synthetic construct
  source 1..75: mol_type = other DNA
ttgaccacggcaaaacaaccttattgcaggcgattactggcgtaaatgccgaccgtctgccggaagaaaaaaagc

SEQ ID NO: 542384 - DNA, 75 bp, synthetic construct
  source 1..75: mol_type = other DNA
acgctacgtcaggcggcgcagcaaggaataattaccgcgatcgttaaagatcgttattaccgtaacgatcggatt

SEQ ID NO: 542385 - DNA, 75 bp, synthetic construct
  source 1..75: mol_type = other DNA
agaaccttttagatcatctgacttaaagaacttgatgaaaggtcagttaggaagcaagagatcattttatgagca

SEQ ID NO: 542386 - DNA, 75 bp, synthetic construct
  source 1..75: mol_type = other DNA
atgttaatttttatggacgttagatttatagtggagccgatttattccttgcataataataaacttattgcaatg

SEQ ID NO: 542387 - DNA, 75 bp, synthetic construct
  source 1..75: mol_type = other DNA
catagaaaatcacaccatatcagaaacaataaaacgaataaaagaattcgtccctcatgttatagcagagggaat

SEQ ID NO: 542388 - DNA, 75 bp, synthetic construct
  source 1..75: mol_type = other DNA
tcaacaaaataataatccccaatattatgagaaatatacttgagtattactttgcatttgttcatagaactgacg

SEQ ID NO: 542389 - DNA, 75 bp, synthetic construct
  source 1..75: mol_type = other DNA
atattactggccttagctgtcccatattcgggattcagtggaatgctccaataatagaaactgacgaagcgaaga

SEQ ID NO: 542390 - DNA, 75 bp, synthetic construct
  source 1..75: mol_type = other DNA
tccccatataatccatatattatttcttttgatgaagaacaattattaaagacccctgtcattgattctagtaat

SEQ ID NO: 542391 - DNA, 75 bp, synthetic construct
  source 1..75: mol_type = other DNA
gatctggcaaaagagacgggtaccgacgagcaggcaatgcgcctgacgctacgccaggcggcgcagcaaggaata

SEQ ID NO: 542392 - DNA, 75 bp, synthetic construct
  source 1..75: mol_type = other DNA
tggcgggggcgcgtgtggtgatgcttaacccgccgcgtcgcggtaaacgtaagccggaatatctgcaatggctgg

SEQ ID NO: 542393 - DNA, 75 bp, synthetic construct
  source 1..75: mol_type = other DNA
cagccaacaaatgcagctcatgccgggcagcgtattgcgcttaacatcgcgggtgatgcggaaaaagagcagatt

SEQ ID NO: 542394 - DNA, 75 bp, synthetic construct
  source 1..75: mol_type = other DNA
tgcctactggccgcagccggatggtcgtgttccgggttttatcgacgttcccggtcatgaaaagtttctttccaa

SEQ ID NO: 542395 - DNA, 75 bp, synthetic construct
  source 1..75: mol_type = other DNA
caaagcaccacgcgcagcgcggtaagtgagcgccataatcgtggtaaaggggatatgcaacggatgccggaaaca

SEQ ID NO: 542396 - DNA, 75 bp, synthetic construct
  source 1..75: mol_type = other DNA
cagctggataagttcatccagatgcgcctccctgaaatcaaagaagttaagacgcagaatttcattggatacaac

SEQ ID NO: 542397 - DNA, 75 bp, synthetic construct
  source 1..75: mol_type = other DNA
ctcaccagttccgccgagttcaaaaagcgtcttctgcatatcgccaagggggcggtgtataccggcagtaccaaa

SEQ ID NO: 542398 - DNA, 75 bp, synthetic construct
  source 1..75: mol_type = other DNA
atctcggctcgcaacacgctggcgggggcgcgcgtggtgatgctcaacccgccacgtcgcggtaagcgtaagccg

SEQ ID NO: 542399 - DNA, 75 bp, synthetic construct
  source 1..75: mol_type = other DNA
aaaggtgccgggctggtcgtcaccggtacggcgttaagcggggaagtgaaggtaggcgattcactctggctgact

SEQ ID NO: 542400 - DNA, 75 bp, synthetic construct
  source 1..75: mol_type = other DNA
cgcctcgctatcgaccgcgcttttaccgtaaaaggtgccgggctggtggtcaccggtacggcgttaagcggggaa

SEQ ID NO: 542401 - DNA, 75 bp, synthetic construct
  source 1..75: mol_type = other DNA
cgtgcgtgcgctacatgcgcagaatcagccaacagaaaccgcccatgccgggcagcgtatcgcgcttaatattgc

SEQ ID NO: 542402 - DNA, 75 bp, synthetic construct
  source 1..75: mol_type = other DNA
ttgaccacggcaaaacgacattattgcaggcgattacgggagtgaatgccgatcgtctgccggaagaaaagaagc

SEQ ID NO: 542403 - DNA, 75 bp, synthetic construct
  source 1..75: mol_type = other DNA
ccgatggaagatgaagctctggtactgttgttgattgaaaagatgcgcgaaagcggcgatatccacagccaccac

SEQ ID NO: 542404 - DNA, 75 bp, synthetic construct
  source 1..75: mol_type = other DNA
agacgagcgcatacagaaaatcataaaggagaataattttctcgcttttgaaatatcagaaagtcatcctaacct

SEQ ID NO: 542405 - DNA, 75 bp, synthetic construct
  source 1..75: mol_type = other DNA
aaccaattaccgggtattattagtcatattgagcgcggcgcagagcagtgcgaagtattaatggcgctaccggac

SEQ ID NO: 542406 - DNA, 75 bp, synthetic construct
  source 1..75: mol_type = other DNA
agtataatttaactagagaagatatagattatatagccaatgaaacattgcataaatctcataaaaagattaatt

SEQ ID NO: 542407 - DNA, 75 bp, synthetic construct
  source 1..75: mol_type = other DNA
tgaagtgcggctacgccagtggctggcagggctggatccaactggaaaactttagcgcctggaacggtctgccgt

SEQ ID NO: 542408 - DNA, 75 bp, synthetic construct
  source 1..75: mol_type = other DNA
ggctgattcagctctatgacctcctggcgcagatccagcaaaaagcctttgatgtattaagtgacgacgacgccc

SEQ ID NO: 542409 - DNA, 75 bp, synthetic construct
  source 1..75: mol_type = other DNA
gcagtactgacccgctatggtcagcggctgattcagctctatgacctcctggcgcagatccagcaaaaagccttt

SEQ ID NO: 542410 - DNA, 75 bp, synthetic construct
  source 1..75: mol_type = other DNA
gggcaaacactgtgcgccacagtgccggtaaatgaagcgacttctcttcagcaaggacagaatgtcacggcctac

SEQ ID NO: 542411 - DNA, 75 bp, synthetic construct
  source 1..75: mol_type = other DNA
caaattgcttgccgcttcccgtggtgagtttgttgaagggattagcgacccgaatgattcgaaatgggttaaggg

SEQ ID NO: 542412 - DNA, 75 bp, synthetic construct
  source 1..75: mol_type = other DNA
accgttacgaaaaaggcggggaagatggtatcacaatgatatttatagctccttccccttcagctcaggacaaac

SEQ ID NO: 542413 - DNA, 75 bp, synthetic construct
  source 1..75: mol_type = other DNA
ttctgatctgttcatctgcgtttgcagtgcaagttccagtacctgaattccctaagtatataaatgatttaacag

SEQ ID NO: 542414 - DNA, 75 bp, synthetic construct
  source 1..75: mol_type = other DNA
tcgaaaagcagctgcgtaacgagaacaccctgctacccgcgacactggattaccgccaggtatccggtctttcta

SEQ ID NO: 542415 - DNA, 75 bp, synthetic construct
  source 1..75: mol_type = other DNA
ccaaatgcgcaacaaaacgagccagaaacgaaaaagcctgaaccagtagcgcaacaggaaccggaaaaagtctgc

SEQ ID NO: 542416 - DNA, 75 bp, synthetic construct
  source 1..75: mol_type = other DNA
tgaacaggcaacgactgaagcagtggaaccggatacaactgaacataatcaggacacgcagtcgatggatgctca

SEQ ID NO: 542417 - DNA, 75 bp, synthetic construct
  source 1..75: mol_type = other DNA
gcggtcttgacccgttatggtcagcggctgatccagctttacgatctgctcgcccagatccaacaaaaagccttt

SEQ ID NO: 542418 - DNA, 75 bp, synthetic construct
  source 1..75: mol_type = other DNA
accacatcatcgagcgcatcaactgtaccaacggcaaaatcaactggggcatcggcataggccttgcgggaagca

SEQ ID NO: 542419 - DNA, 75 bp, synthetic construct
  source 1..75: mol_type = other DNA
aggtatctctccataccgcaaaatttcaaactgaataatattcaccttgataatactcaccttgcctggaaattg

SEQ ID NO: 542420 - DNA, 75 bp, synthetic construct
  source 1..75: mol_type = other DNA
accacatcatcgagcgcatcaactgtactaacggcaaaatcaactggggcattggcataggtcttgcgggaagta

SEQ ID NO: 542421 - DNA, 75 bp, synthetic construct
  source 1..75: mol_type = other DNA
aaacagaatggaaacagctgctgccgcaaatggcttcctttgcacacatcacaacagatattggctattccgtgc

SEQ ID NO: 542422 - DNA, 75 bp, synthetic construct
  source 1..75: mol_type = other DNA
gccctttataatttgagctggacgtttatttgtttttttatttttgcagtaatttatttttttattcaggtgttt

SEQ ID NO: 542423 - DNA, 75 bp, synthetic construct
  source 1..75: mol_type = other DNA
ccaggcagtgaaaaactttgtcgtggcgaatatcacggggtcggattgtcggcagttgatccatgttgaaaatgg

SEQ ID NO: 542424 - DNA, 75 bp, synthetic construct
  source 1..75: mol_type = other DNA
cgcggtatccaaatctctgccgggaatgctgtctcctttgttgcactgactaacattgagatgaagcgtgcctcg

SEQ ID NO: 542425 - DNA, 75 bp, synthetic construct
  source 1..75: mol_type = other DNA
acacgactggattgcctcatttaaacaagcttttagtgaagggcaaacggtcgtcgtgcctgccggattggtttg

SEQ ID NO: 542426 - DNA, 75 bp, synthetic construct
  source 1..75: mol_type = other DNA
gacaatttcgtgattgataatattgaaatgattaatagcgccgggatgttaatcggctatggggtaattaaaggc

SEQ ID NO: 542427 - DNA, 75 bp, synthetic construct
  source 1..75: mol_type = other DNA
ctggaactacataaccagccgcaacacttttttatgagaaatatcaatgtgatgcaggaattttctgttgggcct

SEQ ID NO: 542428 - DNA, 75 bp, synthetic construct
  source 1..75: mol_type = other DNA
cgcgacagtcgctatttacggttgtgacaatttcgtgattgataatattgaaatgattaatagcgccgggatgtt

SEQ ID NO: 542429 - DNA, 75 bp, synthetic construct
  source 1..75: mol_type = other DNA
taccaacggcaaaatcaactggggtatcggcataggccttgcgggaagtacctacgataataactacccggaaga

SEQ ID NO: 542430 - DNA, 75 bp, synthetic construct
  source 1..75: mol_type = other DNA
ctacgcagcacaggaattatttgacgtctcgcaggttcgcggcggaacgccttatggcgcgaccaccattgcagg

SEQ ID NO: 542431 - DNA, 75 bp, synthetic construct
  source 1..75: mol_type = other DNA
cggcggccaggaacagaccattacttcaacctggacgacccttgctcaccacggcatgataattgttcctattgg

SEQ ID NO: 542432 - DNA, 75 bp, synthetic construct
  source 1..75: mol_type = other DNA
aataatattacccagatttttgtgcaaagctccgtgacggtactgatcggcatggggaattcttcgctatcctgg

SEQ ID NO: 542433 - DNA, 75 bp, synthetic construct
  source 1..75: mol_type = other DNA
aaccgcgactatcggcaattatccggtggtgaacaacagcgcgtgcaattagcgcgcctgctggtgcaactctgg

SEQ ID NO: 542434 - DNA, 75 bp, synthetic construct
  source 1..75: mol_type = other DNA
aggctttgctgaaagaagatcttttcctggtaggaactcaagattgcccggggcaaagcgttgatgttaatgcta

SEQ ID NO: 542435 - DNA, 75 bp, synthetic construct
  source 1..75: mol_type = other DNA
gcgttgcagtattacccgaatcggccgcgcgttcgttatgtggcgcagtaaatgggtggatgtcacgcattacca

SEQ ID NO: 542436 - DNA, 75 bp, synthetic construct
  source 1..75: mol_type = other DNA
ctatagtgcaaaccatcctttttaaaggaaatatacagcaagtttttgaaagcaatgacatgggtggtgcgagct

SEQ ID NO: 542437 - DNA, 75 bp, synthetic construct
  source 1..75: mol_type = other DNA
cggtttgatggcgaaagcaatcgatcaggcaggtatccagtttaggatattaaacgccagcaaaggcccggcggt

SEQ ID NO: 542438 - DNA, 75 bp, synthetic construct
  source 1..75: mol_type = other DNA
atgcgcagggtaaagatctgaaagaatcaaaaactggcctcgaaggccttgacccggaaaatccggctccgggcg

SEQ ID NO: 542439 - DNA, 75 bp, synthetic construct
  source 1..75: mol_type = other DNA
acgggcggcaattctgggttgatcgtgttggtcctgatgattgtggatcatgtcacatctggctgggtaacggct

SEQ ID NO: 542440 - DNA, 75 bp, synthetic construct
  source 1..75: mol_type = other DNA
ccggaaaacgaagtcgaattaattggcgcggaaaaggtcgcggaatacaaaataacagaatcggaagacggggga

SEQ ID NO: 542441 - DNA, 75 bp, synthetic construct
  source 1..75: mol_type = other DNA
agaaaattagacaaactgcatgatgcaaatatttttgaagttataaaggatggggaagatatcgttattagatat

SEQ ID NO: 542442 - DNA, 75 bp, synthetic construct
  source 1..75: mol_type = other DNA
gttggatattcaccatcaacaacatctatttcgtttattacgtcagttagttcgagaacggcaatgtaacgtctg

SEQ ID NO: 542443 - DNA, 75 bp, synthetic construct
  source 1..75: mol_type = other DNA
atgaaaaagaaaacaactctcagcgaggaggatcaggccctgtttcgccagttgatggcgggtactcgcaagatt

SEQ ID NO: 542444 - DNA, 75 bp, synthetic construct
  source 1..75: mol_type = other DNA
caaaagagtatggtggtgatgcggcgttgctggtgttgattgaagtggaagagtggctgccgccggagttgccct

SEQ ID NO: 542445 - DNA, 75 bp, synthetic construct
  source 1..75: mol_type = other DNA
aagcaggacacgattgtccaccgaccgcagcgtaaaaaaatcagcgaagtaccggtcaagcggttgattcaggag

SEQ ID NO: 542446 - DNA, 75 bp, synthetic construct
  source 1..75: mol_type = other DNA
catggagtcagtctgtatgcacctttgccattgaaacaaacatatgaagtgtacttcggatatgaccgtatgttc

SEQ ID NO: 542447 - DNA, 75 bp, synthetic construct
  source 1..75: mol_type = other DNA
cacggtaaaaggttttgttgccggtgccgcctgtactgccgttatcgcatctgcactctggtggtggcaggcgta

SEQ ID NO: 542448 - DNA, 75 bp, synthetic construct
  source 1..75: mol_type = other DNA
ttcgccggagttgtttcttgatttgcacggcctgacgcagctacaagccaaacaggaactgggcgcattaattgc

SEQ ID NO: 542449 - DNA, 75 bp, synthetic construct
  source 1..75: mol_type = other DNA
ggaagcatattttgaagcagcaaacgccgctgtggctggcgcaacatccgcatgtgatggcatttcaccaggcac

SEQ ID NO: 542450 - DNA, 75 bp, synthetic construct
  source 1..75: mol_type = other DNA
ggttgaaagtatggcaagaacatgacctgttgcaggtcgaagtggcggacagcggacctggggtagaagagaata

SEQ ID NO: 542451 - DNA, 75 bp, synthetic construct
  source 1..75: mol_type = other DNA
acaggaagtgatccagatggggcggcatccgcatcgtacggatgttcagcgtgacgaaactacgcagataatggc

SEQ ID NO: 542452 - DNA, 75 bp, synthetic construct
  source 1..75: mol_type = other DNA
cacggtctgacgcagctgcaggccaagcaggaactgggcgcgttgattgccgcctgccgccgtgaacatgtgttt

SEQ ID NO: 542453 - DNA, 75 bp, synthetic construct
  source 1..75: mol_type = other DNA
aagcaggacaccatcgtccatcggccgctacgtaaaaaaattagcgaagtaccggtcaagcggttaattcaggaa

SEQ ID NO: 542454 - DNA, 75 bp, synthetic construct
  source 1..75: mol_type = other DNA
catcaggcaccaaaagagtatggcggtgatgcggcgttgttggtgttgattgaagtcgaagagtggctgccgccg

SEQ ID NO: 542455 - DNA, 75 bp, synthetic construct
  source 1..75: mol_type = other DNA
atgcgcagggtaaagatctgaaagaatcaaaaactggcctcgaaggcattgacccggaaaatccggcccctggcg

SEQ ID NO: 542456 - DNA, 75 bp, synthetic construct
  source 1..75: mol_type = other DNA
tgccgcttttccacaagaaacgatgccggacgatacaccttacgatttcaatacgctggttctcgtagatgcaga

SEQ ID NO: 542457 - DNA, 75 bp, synthetic construct
  source 1..75: mol_type = other DNA
aaactgaacattggtgaagatgttgaggaaatgctgcgttctgatctggcacttgagctggatggcgcgaagaat

SEQ ID NO: 542458 - DNA, 75 bp, synthetic construct
  source 1..75: mol_type = other DNA
actgctaatggtgcaggaggctggaatatagcggacattccactcgattttaaattgagtgacgctcaacagttt

SEQ ID NO: 542459 - DNA, 75 bp, synthetic construct
  source 1..75: mol_type = other DNA
ccgatgaaaaagagaacggtccggaagataccacgcaagatgacgatatgaagcagagcatcgtcaaatggctgt

SEQ ID NO: 542460 - DNA, 75 bp, synthetic construct
  source 1..75: mol_type = other DNA
tcgtgaaattggcctcacccgtgaacgtgttcgccagattcaggttgaaggcctgcgccgtctgcgtgagatttt

SEQ ID NO: 542461 - DNA, 75 bp, synthetic construct
  source 1..75: mol_type = other DNA
gaacgggcgattatgaaccaaacccgtactattcgtttgccgattcacatcgtaaaggagctgaacgtttacctg

SEQ ID NO: 542462 - DNA, 75 bp, synthetic construct
  source 1..75: mol_type = other DNA
aggagtagccgaagccagagagccggaagtgctgaaatgccggatattcagttacaaggaggtcaccgaaaaatg

SEQ ID NO: 542463 - DNA, 75 bp, synthetic construct
  source 1..75: mol_type = other DNA
ttatgaaatcaatgacgaagattattttgaaattgatggcataaacgcaaaaccattaagcgaaaaacccacatt

SEQ ID NO: 542464 - DNA, 75 bp, synthetic construct
  source 1..75: mol_type = other DNA
gttgcccgttgtgctgattgaggctgacaggggggacaaggtgcagaaaaaaggcgcgtttgactttgacaacct

SEQ ID NO: 542465 - DNA, 75 bp, synthetic construct
  source 1..75: mol_type = other DNA
cgccgtgaaggagcgtttcaccacacctccggcctccgaagccacggatgcctatacaggcgctgccgttcatgc

SEQ ID NO: 542466 - DNA, 75 bp, synthetic construct
  source 1..75: mol_type = other DNA
caactgctggccctcaccgcacgcgattcctacgcggcacgactgggcgcgcttgaagacaaaatcaataacgga

SEQ ID NO: 542467 - DNA, 75 bp, synthetic construct
  source 1..75: mol_type = other DNA
tagtcaaacaggcgaacaccggaaggggggtagcccaggctaaagaaaatgaagtattgaaatgctggatattca

SEQ ID NO: 542468 - DNA, 75 bp, synthetic construct
  source 1..75: mol_type = other DNA
gccagaaacaaaaccagaaacaaaaccagaaacaaaaccagaaacaaaaccagaatccgctccggagcattatga

SEQ ID NO: 542469 - DNA, 75 bp, synthetic construct
  source 1..75: mol_type = other DNA
ggcgatctggaagaggcgctgaatgcggcgcaagccatcggcgatgaccgcttacagcagcaaagtcaggggcgg

SEQ ID NO: 542470 - DNA, 75 bp, synthetic construct
  source 1..75: mol_type = other DNA
ctgttaggcattgaaccgaaagtccgtcaattgcaacaaaacgcgacgcaggcggaagtgaaccgcttgtctgtg

SEQ ID NO: 542471 - DNA, 75 bp, synthetic construct
  source 1..75: mol_type = other DNA
ggcgatctggaagaggcgctgaatgcggcgcaggctattggcgatgaccgcttacaacagcaaagtcaggggcgg

SEQ ID NO: 542472 - DNA, 75 bp, synthetic construct
  source 1..75: mol_type = other DNA
atggcagaaatggtaagcgttggctgcaaattgccaaatggccttcaggtaactctggatggcaaaacagtaatc

SEQ ID NO: 542473 - DNA, 75 bp, synthetic construct
  source 1..75: mol_type = other DNA
attttatctttataaaaaaataataaaagaagaacctgatgaacaacgtttttctgaagaggttagggggatata

SEQ ID NO: 542474 - DNA, 75 bp, synthetic construct
  source 1..75: mol_type = other DNA
cggtgattctggcaaccacggaagacacctggggacagcagttcgagaaaatgggtaagacctatcagcaaccga

SEQ ID NO: 542475 - DNA, 75 bp, synthetic construct
  source 1..75: mol_type = other DNA
ctccgtgaggctatcgcgtatgccgacagcgttcatgactatgttagccgtgatatgatgatcgagatccttgcc

SEQ ID NO: 542476 - DNA, 75 bp, synthetic construct
  source 1..75: mol_type = other DNA
attagagctggaaggcgcgaaggatctgcgtgaggctatcgcatatgccgacagcgttcatgactatgttagccg

SEQ ID NO: 542477 - DNA, 75 bp, synthetic construct
  source 1..75: mol_type = other DNA
ctttctggataacgcgaaactggtcatttcaggcaaggatgcggtcaggcgtgtgggtaatgtcatcaccgtcac

SEQ ID NO: 542478 - DNA, 75 bp, synthetic construct
  source 1..75: mol_type = other DNA
gcaacaacagggcgttctggaaacaggcgatctggaagaggcgctgaatgcggcgcaggctattggcgatgaccg

SEQ ID NO: 542479 - DNA, 75 bp, synthetic construct
  source 1..75: mol_type = other DNA
atcaacgcgctcaattagcccaaatgaagatgaagcagcaaaattcacctcggtaattctggcaaccacggaaga

SEQ ID NO: 542480 - DNA, 75 bp, synthetic construct
  source 1..75: mol_type = other DNA
ttttatgaaaatcgctcaacgatcaccgatgtggagaaactggaaacaccaatgagtttcagatggcttgctggc

SEQ ID NO: 542481 - DNA, 75 bp, synthetic construct
  source 1..75: mol_type = other DNA
acagtctgtgctgcgagctggttctgccggccggaactctcaggctgaaaggtgaactgacaccggcgttattac

SEQ ID NO: 542482 - DNA, 75 bp, synthetic construct
  source 1..75: mol_type = other DNA
gtgtggatcactattgcaccgttcgtgacatttctgcgcagaccggtgtcagcaaaaaccgccattttttctctg

SEQ ID NO: 542483 - DNA, 75 bp, synthetic construct
  source 1..75: mol_type = other DNA
ccgccggaaccgattttcaccggagtttaaatggagacttgttcagcggactcttttacccggtgcctgtgtcgc

SEQ ID NO: 542484 - DNA, 75 bp, synthetic construct
  source 1..75: mol_type = other DNA
tgaggggagattgtctggcggtactgcagcagaattttgtaattctgcggtggcggcgttgcaggctgctggcct

SEQ ID NO: 542485 - DNA, 75 bp, synthetic construct
  source 1..75: mol_type = other DNA
actggcccgggctcttttcccggggcgatacccttcagccccgacagtaactcagactgtgaaaacagagaaaaa

SEQ ID NO: 542486 - DNA, 75 bp, synthetic construct
  source 1..75: mol_type = other DNA
tttaaatggaggcttgttcagcaaactcttttacccggtgcctgtgtcgcacaaatagctcgtgagaacggaatc

SEQ ID NO: 542487 - DNA, 75 bp, synthetic construct
  source 1..75: mol_type = other DNA
tgttgccatcaccggtcaggtgtccgctcccttcatcggcaccgacgcatttcaggaagttgatgtcctgggatt

SEQ ID NO: 542488 - DNA, 75 bp, synthetic construct
  source 1..75: mol_type = other DNA
cacggcaccaaagcggcgaacttcgcagtgcaggagtgcgatctgctgatcgccgtgggtgcacgttttgatgac

SEQ ID NO: 542489 - DNA, 75 bp, synthetic construct
  source 1..75: mol_type = other DNA
cgggtgaccggcaaactgaacaccttcgcaccacacgccagtgttatccatatggatatcgacccggcagaaatg

SEQ ID NO: 542490 - DNA, 75 bp, synthetic construct
  source 1..75: mol_type = other DNA
atgaatggcgcacagtgggtggtacatgcgttgcgggcacagggtgtgaataccgttttcggttatccgggtggc

SEQ ID NO: 542491 - DNA, 75 bp, synthetic construct
  source 1..75: mol_type = other DNA
gcaatggcagctatcggctatgctcgtgctaccggcaaaaccggtgtatgcattgccacgtctggccctggtgca

SEQ ID NO: 542492 - DNA, 75 bp, synthetic construct
  source 1..75: mol_type = other DNA
gctatctacgcgccgttgttgttaaaacaactgtcggatcgtaaacctgaagattgtgtagtaaccacagatgta

SEQ ID NO: 542493 - DNA, 75 bp, synthetic construct
  source 1..75: mol_type = other DNA
aaaggtgttcggcctgagacgttgctccgacaggttaacaccgtctcgttgccggacagtgcgatcccgccaggc

SEQ ID NO: 542494 - DNA, 75 bp, synthetic construct
  source 1..75: mol_type = other DNA
atagccgaagtgctttatgagcagtccttatttaatcctgagtgggttcttaatgctattgaaagtgaacttatc

SEQ ID NO: 542495 - DNA, 75 bp, synthetic construct
  source 1..75: mol_type = other DNA
gtcgattatcgaaaacctgaccctggcgcaggtgaaagtgcttaaacgcgataaagcgcccgctcgtgaaaaagc

SEQ ID NO: 542496 - DNA, 75 bp, synthetic construct
  source 1..75: mol_type = other DNA
ggcgcagctttccggcggtcagcagcagcgtgtggcgatcgctcgcgcattgtgtatggatcctattgcgatgct

SEQ ID NO: 542497 - DNA, 75 bp, synthetic construct
  source 1..75: mol_type = other DNA
gggctggggatcatcgaagagctacgccgacacggctacgagatgagcgctggcaccgtgtacccgatgctgcac

SEQ ID NO: 542498 - DNA, 75 bp, synthetic construct
  source 1..75: mol_type = other DNA
gaatcgtaaatgtatcattgaagacggtgaatttgctgtagcagttgttttgatattatctggtgtagcagggta

SEQ ID NO: 542499 - DNA, 75 bp, synthetic construct
  source 1..75: mol_type = other DNA
ggcatacaatcctgaagataatcagggggctcgctggttgttgggttcagagctgttacgcactggcgctcatga

SEQ ID NO: 542500 - DNA, 75 bp, synthetic construct
  source 1..75: mol_type = other DNA
attactggcgtttgtacggagggtggcgagccctctgtaaaagctgctatttccgaatgtctgttgttatgacta

SEQ ID NO: 542501 - DNA, 75 bp, synthetic construct
  source 1..75: mol_type = other DNA
acctaactttgaacgtcataacgggaaaagctctaaaaaacgggcggttacaaacgagcgagttacaaaaatacg

SEQ ID NO: 542502 - DNA, 75 bp, synthetic construct
  source 1..75: mol_type = other DNA
tgaataccagggcttgttcgcgccgaaaggtgttcgacctgagacgttactccgacaggttaacaccgtctcgtt

SEQ ID NO: 542503 - DNA, 75 bp, synthetic construct
  source 1..75: mol_type = other DNA
cgcttcgccgtcgccattgaaggtgaaaacaatattcgagccggagtccgctatcgtcttaatgaacagcatcag

SEQ ID NO: 542504 - DNA, 75 bp, synthetic construct
  source 1..75: mol_type = other DNA
tggccacagatcccggagagagagcattttgcagtcagtttgcccgcagcgacgatcatgctcgcatcggctgtt

SEQ ID NO: 542505 - DNA, 75 bp, synthetic construct
  source 1..75: mol_type = other DNA
tgccatatcgccagtaatggcgatatggtgcagatagtcagttttggcgctagcgcgaagattgccaatagcggt

SEQ ID NO: 542506 - DNA, 75 bp, synthetic construct
  source 1..75: mol_type = other DNA
ctcaggcttaaaggtaaactgacgccggcgttattacagacacttatccgtgaaataaaagggagcagccactga

SEQ ID NO: 542507 - DNA, 75 bp, synthetic construct
  source 1..75: mol_type = other DNA
tgtcgctcggctgcggcgagcactgctggctcgatcatatccgtaaccaaaagtacgccgcactgggtaaaatgc

SEQ ID NO: 542508 - DNA, 75 bp, synthetic construct
  source 1..75: mol_type = other DNA
gaaatatattacactgattctctcattgattggattacacatcattgtcaatgtgacaagtctggtgcgagggat

SEQ ID NO: 542509 - DNA, 75 bp, synthetic construct
  source 1..75: mol_type = other DNA
aacccgccggaaccgattttcaccggagtttaaatggagacttgttcagcaaactcttttacccggtgcctgtgt

SEQ ID NO: 542510 - DNA, 75 bp, synthetic construct
  source 1..75: mol_type = other DNA
ggaactctcaggctgaaaggtgaactgacaccggcgttattacagacacttatccgcgaaatgaaagggagcagc

SEQ ID NO: 542511 - DNA, 75 bp, synthetic construct
  source 1..75: mol_type = other DNA
cagtttttggtctggtgtctaaccgttggggcgcacttcaatatagatgggcgcgattgttgccagacaggacaa

SEQ ID NO: 542512 - DNA, 75 bp, synthetic construct
  source 1..75: mol_type = other DNA
agacggttcaggctgtacgcttactaccgtacatccttgctacagatttcagactcagctctccctccaggtact

SEQ ID NO: 542513 - DNA, 75 bp, synthetic construct
  source 1..75: mol_type = other DNA
ataatattcgggggtgtccggatattcctgctgaaacgctgtatgcgccgggagaacagtttcagggagggtaat

SEQ ID NO: 542514 - DNA, 75 bp, synthetic construct
  source 1..75: mol_type = other DNA
atgagagaaaataaaagtaatcctgaactcaaaatcagaagtacagaacgagattataaatacatttccagaatt

SEQ ID NO: 542515 - DNA, 75 bp, synthetic construct
  source 1..75: mol_type = other DNA
ctgaatgaatcatcagaaatatcagaggaaacttataatgaaagaaaaagaaatgatgcggaactaaaaaacaga

SEQ ID NO: 542516 - DNA, 75 bp, synthetic construct
  source 1..75: mol_type = other DNA
ataatatttgggggtgtccggatatttctgctgaaacgccgtatgcaccgggagaacacattaagggagggcggc

SEQ ID NO: 542517 - DNA, 75 bp, synthetic construct
  source 1..75: mol_type = other DNA
aggatattcctgttgaaacgccgtatgtgccgggagaacacattaagggagggcagcaataatgcttcgcattaa

SEQ ID NO: 542518 - DNA, 75 bp, synthetic construct
  source 1..75: mol_type = other DNA
attttcagcgcaggtattgattcgtggaaagcggacccggaattaaataattttcgttatatgtggaatatcctg

SEQ ID NO: 542519 - DNA, 75 bp, synthetic construct
  source 1..75: mol_type = other DNA
aaaccatccacaacatgccaggcggtgcaacgccagatcaggtttacgccgcactgctggtagccgaccagtacg

SEQ ID NO: 542520 - DNA, 75 bp, synthetic construct
  source 1..75: mol_type = other DNA
cagaaaagaactggaaagtgcatataagaaagacagtcctatggtttttgagtgtgtggataaaaattgtgttgc

SEQ ID NO: 542521 - DNA, 75 bp, synthetic construct
  source 1..75: mol_type = other DNA
tcgctacttcccgtgacgttaactccggagccggataataaaatcccggcaccagtgcagatacctgaacagata

SEQ ID NO: 542522 - DNA, 75 bp, synthetic construct
  source 1..75: mol_type = other DNA
atctggctggttgccggtatcaccgatatgcgaaatggctttaacggcctggcctcaaaagttcagaacgtcctg

SEQ ID NO: 542523 - DNA, 75 bp, synthetic construct
  source 1..75: mol_type = other DNA
tttaaatggagacttgttcagcagactcttttacccggtgcctgtgtcgcacaaatagctcgtgagaacggaatc

SEQ ID NO: 542524 - DNA, 75 bp, synthetic construct
  source 1..75: mol_type = other DNA
gcccccgcacaggaaccagagcagataaatacaccgtccgacagtctgtgttgtgagctggttctgccggccgga

SEQ ID NO: 542525 - DNA, 75 bp, synthetic construct
  source 1..75: mol_type = other DNA
atgtccatcatttttaatagacactatcgtatgaaacaccggacctggatcactgaagctttacgtcttcacttt

SEQ ID NO: 542526 - DNA, 75 bp, synthetic construct
  source 1..75: mol_type = other DNA
ctggctgaactgtgctacaacaccctgctggaagaaggcgaaaaagcgatgcttgccgccgaacagcatgtagtg

SEQ ID NO: 542527 - DNA, 75 bp, synthetic construct
  source 1..75: mol_type = other DNA
cgcgacgccagatcaggtttacgccgctctgctggtagccgaccagtacggtcagcgtttcctgcaagagtggga

SEQ ID NO: 542528 - DNA, 75 bp, synthetic construct
  source 1..75: mol_type = other DNA
ttccggtagcaatcgcaccgaccatagcctctaccgacgcaccgtgtagcgcactgtctgttatctacaccgatg

SEQ ID NO: 542529 - DNA, 75 bp, synthetic construct
  source 1..75: mol_type = other DNA
tcttatcggtgcaggaggacttccaggacaaactgatgcagcgaatttacttaagcctgctcttgcccgtgggga

SEQ ID NO: 542530 - DNA, 75 bp, synthetic construct
  source 1..75: mol_type = other DNA
gcctgaccgctatcccggacgcgcatcactattatcacggtgaaaaagtggcattcggtacgctgacgcagctgg

SEQ ID NO: 542531 - DNA, 75 bp, synthetic construct
  source 1..75: mol_type = other DNA
ctctgctggaagaggccgaaaaagcgatgctcgccgccgaacagcatgtggtaacccctgcactggaacgcgtga

SEQ ID NO: 542532 - DNA, 75 bp, synthetic construct
  source 1..75: mol_type = other DNA
gcgctggtggggttaattcgccacccgttgatgccggtgtatatcgatattttgcgtaaagtggttggggtttag

SEQ ID NO: 542533 - DNA, 75 bp, synthetic construct
  source 1..75: mol_type = other DNA
gccgctggcaatttgatgacgataaactcaatacgctacatcatttaggcgctggcacctttgttaccagcggca

SEQ ID NO: 542534 - DNA, 75 bp, synthetic construct
  source 1..75: mol_type = other DNA
tgcatcatgccagtcgtctgttaaaccacggccctactgttttgatcactagttttgatgatcaatcccaacgac

SEQ ID NO: 542535 - DNA, 75 bp, synthetic construct
  source 1..75: mol_type = other DNA
gaatttaaatggctgctgctggcgacggcggtgtttttgtgggtcggtggctggctgtgctggcgcttatggcgc

SEQ ID NO: 542536 - DNA, 75 bp, synthetic construct
  source 1..75: mol_type = other DNA
cggcggtatttttgtgggttggtggctggctgtgctggcggttatggcgcagcggcaaagcaaccgatcgtttga

SEQ ID NO: 542537 - DNA, 75 bp, synthetic construct
  source 1..75: mol_type = other DNA
ctttgttggcccgacgcgtccgctggtgccaatggtggcgggaatgctggatctgccggtggcaaaatttatcac

SEQ ID NO: 542538 - DNA, 75 bp, synthetic construct
  source 1..75: mol_type = other DNA
gaagtttcagttgtccgaagtagacgagtgggtgcgtgcaggcggcgctggtgaagactctggtgaacaaggagg

SEQ ID NO: 542539 - DNA, 75 bp, synthetic construct
  source 1..75: mol_type = other DNA
tctgacttgctatgtcaccctgcccggaccgtatccggcagtaaaactctcactgaaatatcaggcacgtccgaa

SEQ ID NO: 542540 - DNA, 75 bp, synthetic construct
  source 1..75: mol_type = other DNA
cagatgcagcgccgtgaagaggtaaatatcaacgtgcaccgggagcgcggggaggatgttgagccgggagatgat

SEQ ID NO: 542541 - DNA, 75 bp, synthetic construct
  source 1..75: mol_type = other DNA
gtccggtgcttggtttgccacttgttgaagagaaatgcctggcgtggatggagtgccgcctgctacctgcgactt

SEQ ID NO: 542542 - DNA, 75 bp, synthetic construct
  source 1..75: mol_type = other DNA
atggcaacaaaagaagaaaatcagaaacgtcttcgtgaactggctggcctgctggggcgcgaggcagatatgtcg

SEQ ID NO: 542543 - DNA, 75 bp, synthetic construct
  source 1..75: mol_type = other DNA
cgcttggcaagcttgagatcgccgtacagttggataacggcaaactgacggtccatatcggtgcgaatcaaagcg

SEQ ID NO: 542544 - DNA, 75 bp, synthetic construct
  source 1..75: mol_type = other DNA
gagttaagtttctggcacgcctggctggcagggatcgtcggttgcctgctgggcgactggatctccttctggctg

SEQ ID NO: 542545 - DNA, 75 bp, synthetic construct
  source 1..75: mol_type = other DNA
cctcactcttccggacaaaaaacagtcatcgatggtttctttttggctcgaggaaaatctcattttttatcccag

SEQ ID NO: 542546 - DNA, 75 bp, synthetic construct
  source 1..75: mol_type = other DNA
aacgtacaggccgcaccgatggcacagaaacccgtacaggttcctgtgtcgcctgatgcacaggcccgtattgca

SEQ ID NO: 542547 - DNA, 75 bp, synthetic construct
  source 1..75: mol_type = other DNA
ggtgatttatccccgtgcagaaactctgttacccggtgcaaccacagatgtctgggtgatggtcggacagacgga

SEQ ID NO: 542548 - DNA, 75 bp, synthetic construct
  source 1..75: mol_type = other DNA
gggtaacgaggatgtatcggtgtggtggaaccgtctgtgtgacaacgtgctgccggaaaaaacaatgccgtttga

SEQ ID NO: 542549 - DNA, 75 bp, synthetic construct
  source 1..75: mol_type = other DNA
gccagcggaggttcttcctgcgcttgttctggctgcgtcatggtacgacgatgcgtcccgtgagactgatatcct

SEQ ID NO: 542550 - DNA, 75 bp, synthetic construct
  source 1..75: mol_type = other DNA
gatatccttgagcgaaatgccatctctcatcctggctttgttccggtcagggcattaagggtacccgtcagatga

SEQ ID NO: 542551 - DNA, 75 bp, synthetic construct
  source 1..75: mol_type = other DNA
gctggcctgctggggcgcgaggcggatatgtcggggagtgctgcggatattgctcaacgtgtgtctgagtgggaa

SEQ ID NO: 542552 - DNA, 75 bp, synthetic construct
  source 1..75: mol_type = other DNA
accaacactggcatcgcttctgcgtaagcgtgcagcaagaaccgtattgacggggatgtgttattcagtcggcag

SEQ ID NO: 542553 - DNA, 75 bp, synthetic construct
  source 1..75: mol_type = other DNA
aaatggttgctgctggcgacggcggtatttttgtgggttggtggctggctgtgctggcggttatggcgcagcggt

SEQ ID NO: 542554 - DNA, 75 bp, synthetic construct
  source 1..75: mol_type = other DNA
cgggtggtacatctgataagtgagcggccggttcgccaccaggctgctgccgcctgggagcgcagccatgattat

SEQ ID NO: 542555 - DNA, 75 bp, synthetic construct
  source 1..75: mol_type = other DNA
agacaggtattgcaaatggcggggtgatcctgatgacggagaaaaccgcgcccttcacgttttatatccgtaccg

SEQ ID NO: 542556 - DNA, 75 bp, synthetic construct
  source 1..75: mol_type = other DNA
ctggcgttacggggtatgcgtgttctggtgccattatcactggcaacggccatgatacagcacggaacggctgaa

SEQ ID NO: 542557 - DNA, 75 bp, synthetic construct
  source 1..75: mol_type = other DNA
gccgacacccatgcctccctgaagccggtgatctccatgtggctgtccattgccattcgtggtctgctggcaatg

SEQ ID NO: 542558 - DNA, 75 bp, synthetic construct
  source 1..75: mol_type = other DNA
agtacatcagcgatcacctggcagacagcaattttgatatcgccagcgtcgcacagcatgtttgcttgtcgccgt

SEQ ID NO: 542559 - DNA, 75 bp, synthetic construct
  source 1..75: mol_type = other DNA
aggggaagggcgctattcggagctgctggcgataaatctgcttgagcaattgttactgcggcgcatggaagcgat

SEQ ID NO: 542560 - DNA, 75 bp, synthetic construct
  source 1..75: mol_type = other DNA
gacctattggctggaagtattgctctcttttctggttccctcatcttccggccttgcagtgttaacgatgccaat

SEQ ID NO: 542561 - DNA, 75 bp, synthetic construct
  source 1..75: mol_type = other DNA
tggcgcgaggaccagcgcattagtcaggcgaagctgcttttgagcaccacccggatgcctatcgccaccgtcggg

SEQ ID NO: 542562 - DNA, 75 bp, synthetic construct
  source 1..75: mol_type = other DNA
gataatcgggtacgcgaggcctgccagtacatcagtgatcatcttgcggacagtcattttgatgtggccagagtg

SEQ ID NO: 542563 - DNA, 75 bp, synthetic construct
  source 1..75: mol_type = other DNA
gaaaggttatatcctcaatctcaccattcgcggtcagggggtggtaaaaaatcaggggcgagaatttgtctgtcg

SEQ ID NO: 542564 - DNA, 75 bp, synthetic construct
  source 1..75: mol_type = other DNA
agttccgatgagcaatcccagcggcgtaacattatggcagcagcctggtcgatgcccgtagagtttgaaccgcca

SEQ ID NO: 542565 - DNA, 75 bp, synthetic construct
  source 1..75: mol_type = other DNA
tctgaaatgggttgcgccgctgcttgggatattaacagtggtaattatggtggcattaagtctgggggcattgtt

SEQ ID NO: 542566 - DNA, 75 bp, synthetic construct
  source 1..75: mol_type = other DNA
ctggagtcgctggcgctggtcggtttgattctgcccggtacggtgctgatggcggggctgggagcgctgattggc

SEQ ID NO: 542567 - DNA, 75 bp, synthetic construct
  source 1..75: mol_type = other DNA
gtcgaaggccgctggcagtttgatgatgataagctcaatacgttgcatcatttaggtgctggcacgtttgttacc

SEQ ID NO: 542568 - DNA, 75 bp, synthetic construct
  source 1..75: mol_type = other DNA
atgccaaagataactgtgtagtcgcgctgaatgacatcgccagtggcgatattgtctggtgggatgagggggaaa

SEQ ID NO: 542569 - DNA, 75 bp, synthetic construct
  source 1..75: mol_type = other DNA
gccgctggcagtttgatgatgataagctcaatacgttgcatcatttaggtgctggcatgtttgttaccagtggta

SEQ ID NO: 542570 - DNA, 75 bp, synthetic construct
  source 1..75: mol_type = other DNA
ggtcgtcgcggctcattaacctgcaacctcaccattcatggtgtccagggccatgtggcctacccgcacctggct

SEQ ID NO: 542571 - DNA, 75 bp, synthetic construct
  source 1..75: mol_type = other DNA
acagaagacaaactggtagagcttgttgacgatttaacctatgaagggtggttgatcgcaatcgacaagacaatc

SEQ ID NO: 542572 - DNA, 75 bp, synthetic construct
  source 1..75: mol_type = other DNA
ttgatgatttaacctatgaaggttggttgatcgcaatcgacaagacaatcaaagaattatccgaacaggataaaa

SEQ ID NO: 542573 - DNA, 75 bp, synthetic construct
  source 1..75: mol_type = other DNA
atggctgaaaagcaggttaaagattacgaaaagtttgttgtgcgtttccctgacgggatgagggacgcgattgcg

SEQ ID NO: 542574 - DNA, 75 bp, synthetic construct
  source 1..75: mol_type = other DNA
gaacagcaactgccacccgggatcagtgaatccggtgaagtggtggatatggccgcttatgaggcatggcaacag

SEQ ID NO: 542575 - DNA, 75 bp, synthetic construct
  source 1..75: mol_type = other DNA
caacccggaaatggagaaccgtctgagtgccgtacttgccgcaagggaagcagaaggtcgtcagatggccagcct

SEQ ID NO: 542576 - DNA, 75 bp, synthetic construct
  source 1..75: mol_type = other DNA
ttattccgacattcagtctctgccggatctgacctgttatgtcaccctgcccggaccgtatccggcagtaaaact

SEQ ID NO: 542577 - DNA, 75 bp, synthetic construct
  source 1..75: mol_type = other DNA
gcttggcgttacgggcggcaacaagaaaagcggcctctatgaagatggcgtgcgcaaagaccgtctggacaacaa

SEQ ID NO: 542578 - DNA, 75 bp, synthetic construct
  source 1..75: mol_type = other DNA
gaaccgacgccgcaggcgttgctggaatctgccatgcgccatgttgatcatctcgatcgtctgaactttgatcaa

SEQ ID NO: 542579 - DNA, 75 bp, synthetic construct
  source 1..75: mol_type = other DNA
tgggaatgtgccgattggcgatggtgctcccatcgccgtacagtccatgaccaatacgcgtacgacagacgtcga

SEQ ID NO: 542580 - DNA, 75 bp, synthetic construct
  source 1..75: mol_type = other DNA
tagaagatatcgaatctgatgttcgctatgtgggagatggacttgtcgaactcgctcaacgcttaggcactatca

SEQ ID NO: 542581 - DNA, 75 bp, synthetic construct
  source 1..75: mol_type = other DNA
agatatcatcaccccgatggacgtttctatcatcggctgtgtggtgaacggtcctggcgaggcgttggtttccac

SEQ ID NO: 542582 - DNA, 75 bp, synthetic construct
  source 1..75: mol_type = other DNA
aagccggtggtgcacgcagcggggcagtaaaatccgccgttggtttaggactgctgctgtctgaaggcatcggcg

SEQ ID NO: 542583 - DNA, 75 bp, synthetic construct
  source 1..75: mol_type = other DNA
aaaccggacggggagttctgccgctgggacgggtcatcatgggctaaggatgaagcggcagaacaggcttaccgg

SEQ ID NO: 542584 - DNA, 75 bp, synthetic construct
  source 1..75: mol_type = other DNA
cgtgacctgctgcctcacatgcaggggatgcgtaaggcagatatcatcaggcgactggaaaatgaactgggggaa

SEQ ID NO: 542585 - DNA, 75 bp, synthetic construct
  source 1..75: mol_type = other DNA
gtgacgcagagaacatggcacgcctgggaaaatgcggaacaggtggatgtcaccggtctggaggaccacccaggc

SEQ ID NO: 542586 - DNA, 75 bp, synthetic construct
  source 1..75: mol_type = other DNA
atgagagtgagatagataaagacaaattaaaagaaatggttcttcctttatttaatgaacattttggcacagcat

SEQ ID NO: 542587 - DNA, 75 bp, synthetic construct
  source 1..75: mol_type = other DNA
ctgaccgaacgggagattgctgaagcggaggaagtgacaacaatcaatattaagtccggagagcaggcagcatga

SEQ ID NO: 542588 - DNA, 75 bp, synthetic construct
  source 1..75: mol_type = other DNA
atgaccagaaaaaccagagataagacagcaccaaaatatcgcgcgttagacatgacagagcacgctttaaaggtg

SEQ ID NO: 542589 - DNA, 75 bp, synthetic construct
  source 1..75: mol_type = other DNA
gcaaacaaccaactggatcaacatcaacagcgacaacgacaacaaacgctgcgtgtcaaaaatcaccttttccgg

SEQ ID NO: 542590 - DNA, 75 bp, synthetic construct
  source 1..75: mol_type = other DNA
cgaggtcgatcttaagcgtaagatcctcgacgatttacgtcacctggaatcagtcgtcactaacaaaatcagcga

SEQ ID NO: 542591 - DNA, 75 bp, synthetic construct
  source 1..75: mol_type = other DNA
ctttcagtccgtgatctgctgcctcacatgcaggggatgcgcaaggcagatatcatcaggcgtctggaaaatgaa

SEQ ID NO: 542592 - DNA, 75 bp, synthetic construct
  source 1..75: mol_type = other DNA
ccgaccatggcgatttgcagttaagcggtgcatcggtttatttcaaagccgcccgtagcgccagtcagagcctga

SEQ ID NO: 542593 - DNA, 75 bp, synthetic construct
  source 1..75: mol_type = other DNA
cgcccgtagcgccagtcagagcctgaatattccttcagaaataaaagaagggcaaaccactgactggatcaacat

SEQ ID NO: 542594 - DNA, 75 bp, synthetic construct
  source 1..75: mol_type = other DNA
aacagcgataacgacaataaacgctgcgtctcaaaaatcaccttttccggtcatacggtgaactcatcggatatg

SEQ ID NO: 542595 - DNA, 75 bp, synthetic construct
  source 1..75: mol_type = other DNA
tcccgacctgataagcgcattcatgaccacggcggcggcaaactttgccacgctgacagaacgggagatcgcaga

SEQ ID NO: 542596 - DNA, 75 bp, synthetic construct
  source 1..75: mol_type = other DNA
ggagtggctgggggattcgggggccaacgtgattgttcgtatgccgctgattcgtggttataacgattcgtggga

SEQ ID NO: 542597 - DNA, 75 bp, synthetic construct
  source 1..75: mol_type = other DNA
tttattctggtcaacatcatctttacgttcgtgctggggctgctggataaaatgttaggctggcaacgtgccggt

SEQ ID NO: 542598 - DNA, 75 bp, synthetic construct
  source 1..75: mol_type = other DNA
cgcctgaaagcaaacacagcaagcataagcgatgagacgcgtcgcgcgctggacaatgaatatcaaaaactggag

SEQ ID NO: 542599 - DNA, 75 bp, synthetic construct
  source 1..75: mol_type = other DNA
ataacagaaaagttttatgggctgcctttatttgatcctgatagcattcttaatgctattgaaagtgaactcatc

SEQ ID NO: 542600 - DNA, 75 bp, synthetic construct
  source 1..75: mol_type = other DNA
tacaatttaaaacaaataatagaaaggccggaattgcgtttatgttaattatgggggccatttttaatcatgatg

SEQ ID NO: 542601 - DNA, 75 bp, synthetic construct
  source 1..75: mol_type = other DNA
tatcacatcaacagcttaccagaagaaacccaaagggctattaagggagcatcattttctgatacccctccagta

SEQ ID NO: 542602 - DNA, 75 bp, synthetic construct
  source 1..75: mol_type = other DNA
atgcgcacatcaggaaaacttaataatcagaagaagcagcataaccgcgccattgaccttacagagcactggctg

SEQ ID NO: 542603 - DNA, 75 bp, synthetic construct
  source 1..75: mol_type = other DNA
agcacatcccgaactgataagcgcattcatgaccacgacggcggcaaactttgccacgctgacagaacgggagat

SEQ ID NO: 542604 - DNA, 75 bp, synthetic construct
  source 1..75: mol_type = other DNA
cgctgacagaacgggagatcgcagaagcagaacaggtaacaaccatcaacgttaaaaccggagaggtggaatcat

SEQ ID NO: 542605 - DNA, 75 bp, synthetic construct
  source 1..75: mol_type = other DNA
tcagatagctttcaatctcgctatcgagtcgataaccggaaagcatccgaaggacttgcacttttccgatgacac

SEQ ID NO: 542606 - DNA, 75 bp, synthetic construct
  source 1..75: mol_type = other DNA
cgttgacagagcgggagatagccgaagcggaacaggtgacaaccatcaacgttaaaaccggagaggtgacagcat

SEQ ID NO: 542607 - DNA, 75 bp, synthetic construct
  source 1..75: mol_type = other DNA
aaaatcccaggtgggacgaagtgggaaaccatgaaaagtgggtagaaaaagtgggcgcaggtgggcgcatgacca

SEQ ID NO: 542608 - DNA, 75 bp, synthetic construct
  source 1..75: mol_type = other DNA
atgatactcagcgaaaatgtggtcactgccagcatactcgatgcagtatgttcagaatgttatcgactgcttcga

SEQ ID NO: 542609 - DNA, 75 bp, synthetic construct
  source 1..75: mol_type = other DNA
tttctgcgctttgaccgccagattgtgctggttgattgcctgcaacctctcaacagtgggccacaggcatttaat

SEQ ID NO: 542610 - DNA, 75 bp, synthetic construct
  source 1..75: mol_type = other DNA
tgccgccgcgtggaccgattatctccaccactgtaaacagcaggggctgcactttattcagcctgggcgctttgt

SEQ ID NO: 542611 - DNA, 75 bp, synthetic construct
  source 1..75: mol_type = other DNA
gggcaaaccgatgctgctaatttacttaagccagcccttgctcgtggggaattgcgtatcatagcagcaacgaca

SEQ ID NO: 542612 - DNA, 75 bp, synthetic construct
  source 1..75: mol_type = other DNA
atgcgctggtgaatcgtggtgtcgacaggcacttgcgactggccgtaaccggtcttagccgcagtgggaaaacag

SEQ ID NO: 542613 - DNA, 75 bp, synthetic construct
  source 1..75: mol_type = other DNA
cagacatctgcgcctcgctgtaaccggacttagccgcagcggcaaaacagcgtttatcaccgcgatggttaatca

SEQ ID NO: 542614 - DNA, 75 bp, synthetic construct
  source 1..75: mol_type = other DNA
aatcgactcagcgatggggcgccgctgacggtttatcccggtgaagttcctgcccgtttacctggtcaggcattc

SEQ ID NO: 542615 - DNA, 75 bp, synthetic construct
  source 1..75: mol_type = other DNA
gggatcaaagtaaataagctgggggatgataaaggtatcggtgaagtagttggcgttggtcgctactggacaggc

SEQ ID NO: 542616 - DNA, 75 bp, synthetic construct
  source 1..75: mol_type = other DNA
gagcctctcttatgtcggtaaaccggaatatccgccaaccgttatcgacagcattaacgccaaagtcacggcaaa

SEQ ID NO: 542617 - DNA, 75 bp, synthetic construct
  source 1..75: mol_type = other DNA
aaggcgtggacgacattaccgacactgacctgcgccagaagatcgccgatgcactcaaccgactggccagcaaaa

SEQ ID NO: 542618 - DNA, 75 bp, synthetic construct
  source 1..75: mol_type = other DNA
gagaatcagcgtttacgtctctctcctgccgggcataactttttacgctatagccaacaaattctcgcgttagtg

SEQ ID NO: 542619 - DNA, 75 bp, synthetic construct
  source 1..75: mol_type = other DNA
gccatcaataaatggaacggcacactgccgcaatacatgaccagcggtgctaatacaccatttatccaggttaaa

SEQ ID NO: 542620 - DNA, 75 bp, synthetic construct
  source 1..75: mol_type = other DNA
aactgggcgacgataaaggcgtcggtgaggtggtcggtgttggtcgctactggactggctggaatactgaagttt

SEQ ID NO: 542621 - DNA, 75 bp, synthetic construct
  source 1..75: mol_type = other DNA
tgcgttataaatcgaatgattctctgctgcgtcatttcaaggacacctccacgttgtatctggagattgttgatt

SEQ ID NO: 542622 - DNA, 75 bp, synthetic construct
  source 1..75: mol_type = other DNA
atgacttcagcatttgcactggtgatgacggtttttcttataacgggtgaatcacagaatgtgattaccggaatt

SEQ ID NO: 542623 - DNA, 75 bp, synthetic construct
  source 1..75: mol_type = other DNA
tgacggttttccttataacgggggagccacagaatgtgattaccggaatttattccagtaaagaatcctgccatc

SEQ ID NO: 542624 - DNA, 75 bp, synthetic construct
  source 1..75: mol_type = other DNA
gctttatcgcctgctatcacagccgagtcgtatcaagcgtcaattgcgtttactgcgttatttacgctggcatta

SEQ ID NO: 542625 - DNA, 75 bp, synthetic construct
  source 1..75: mol_type = other DNA
tgccagcgaatatctgcgaaaaggctcagaggtttatcttgaaggcaaattgcggacaagaaaatggcaggatca

SEQ ID NO: 542626 - DNA, 75 bp, synthetic construct
  source 1..75: mol_type = other DNA
gttggtggaaccatgcaaatgcttggtggcaagcaaggaggcaatgaacagtcttcacctcagcgaaataacggt

SEQ ID NO: 542627 - DNA, 75 bp, synthetic construct
  source 1..75: mol_type = other DNA
gcgaaaaggctctgaggtttatcttgaaggcaaattgcggacaagaaaatggcaggatcaaagcggacaggatcg

SEQ ID NO: 542628 - DNA, 75 bp, synthetic construct
  source 1..75: mol_type = other DNA
ggcgtcagtgaaattcgcctggcgttacgttttaaatcgaacgattcgctgctgcgccactttaaggatacctcc

SEQ ID NO: 542629 - DNA, 75 bp, synthetic construct
  source 1..75: mol_type = other DNA
actttattcagcctgggcgctttgttttgccgggcgatatggcaggcgcacccgcgctgcaattcttcccgtggc

SEQ ID NO: 542630 - DNA, 75 bp, synthetic construct
  source 1..75: mol_type = other DNA
atgaagcgactcaaaaatgaacttaacgcgctggtgaatcgtggcgtcgacaggcacctgcgactggcggtaacc

SEQ ID NO: 542631 - DNA, 75 bp, synthetic construct
  source 1..75: mol_type = other DNA
gatgggatcgccaaagcaggagatcttcatgcgcgactgccgtctggtgcatccagatgcgctgtatatgggcgt

SEQ ID NO: 542632 - DNA, 75 bp, synthetic construct
  source 1..75: mol_type = other DNA
atgaataacaacaccacggcaccgacctatacgctgcgtggcttacagttgattggttggcgtgatatgcagcac

SEQ ID NO: 542633 - DNA, 75 bp, synthetic construct
  source 1..75: mol_type = other DNA
gatgtcgataaaccgctgccgcatattcgccttgatgccgcgctggaatttttaataggagataaattgcgatga

SEQ ID NO: 542634 - DNA, 75 bp, synthetic construct
  source 1..75: mol_type = other DNA
cagcttgatagtaatttaacggcttctttagggcagcttgaaaggaagtttaataagacctttgacaagattgaa

SEQ ID NO: 542635 - DNA, 75 bp, synthetic construct
  source 1..75: mol_type = other DNA
ttatcgttgagctaggcttcaatgaaaacgttattaagggcttgcaaagagttgaaaaggcagctttgcagtcag

SEQ ID NO: 542636 - DNA, 75 bp, synthetic construct
  source 1..75: mol_type = other DNA
attatctgatttttaagcagggtttcataaaaagaagaatgcttgttaatccagcgacacatcctgtcggcgtga

SEQ ID NO: 542637 - DNA, 75 bp, synthetic construct
  source 1..75: mol_type = other DNA
tagagcgtttaaggtcgataccaagcaacttgacagcaatttaacggcttctttaaagtcaatggaggggaagat

SEQ ID NO: 542638 - DNA, 75 bp, synthetic construct
  source 1..75: mol_type = other DNA
ctggtagtgttgaaggtggtaaaggaaaattatctgtagctgatgcagttgccagagtaatggttgtcggtatga

SEQ ID NO: 542639 - DNA, 75 bp, synthetic construct
  source 1..75: mol_type = other DNA
agaatggcaggtgctttccagttatttgccagaagccttggaatgactacggaagaattagacaaggccatgaaa

SEQ ID NO: 542640 - DNA, 75 bp, synthetic construct
  source 1..75: mol_type = other DNA
atgtttgaacgcggcagcgcgaagattatgccgttttttaaaacgctgctggtggaattagcgccggtttttgac

SEQ ID NO: 542641 - DNA, 75 bp, synthetic construct
  source 1..75: mol_type = other DNA
gtggcggtgccggaagagacggagaaaaaagcgcgtgacgtcaatgagaaaacggtgctgctgaagaagaaatcc

SEQ ID NO: 542642 - DNA, 75 bp, synthetic construct
  source 1..75: mol_type = other DNA
atgagaaagacgggcaaccgccgcgagcgtggggcaaaaaccaccatcgtccggcggcagatcaaaaagaatcat

SEQ ID NO: 542643 - DNA, 75 bp, synthetic construct
  source 1..75: mol_type = other DNA
aagagtcttggtgaatctcttggtagcttgatgactgatatgtcacatggtgtcgattcattgactgatatttct

SEQ ID NO: 542644 - DNA, 75 bp, synthetic construct
  source 1..75: mol_type = other DNA
taaaggtcatacatccaccagcattaatggtgacagagcagctagcagccttgataacctgtcttcggcagcagt

SEQ ID NO: 542645 - DNA, 75 bp, synthetic construct
  source 1..75: mol_type = other DNA
ttgattgtcaacagcgtcagtaaatccgagcgtgaaagcattatcgccgcgctgcacgggcagtcgattttcagt

SEQ ID NO: 542646 - DNA, 75 bp, synthetic construct
  source 1..75: mol_type = other DNA
aaagaatccttattttctaatgtgattggtacatcccgactaatgggtttaagcactgatgaaattaacgggatt

SEQ ID NO: 542647 - DNA, 75 bp, synthetic construct
  source 1..75: mol_type = other DNA
tggcgcgaggaccagcgcatcagtcaggcgaagctgctttttgagcaccacccggatgcctatcgccaccgtcgg

SEQ ID NO: 542648 - DNA, 75 bp, synthetic construct
  source 1..75: mol_type = other DNA
atgcaccggggcgagtccgagcgagttccgtgccggttgtgaagaaaaagtgaatgatgtagccgccaagttgtc

SEQ ID NO: 542649 - DNA, 75 bp, synthetic construct
  source 1..75: mol_type = other DNA
aaaaatggcctttagacatcataaaagaaacacaagcaatcgcaggatattcaaaacttaacctcgaattagtgt

SEQ ID NO: 542650 - DNA, 75 bp, synthetic construct
  source 1..75: mol_type = other DNA
ctgagcgtgcagctgaaaagctgcgcggcgagcgtcagttctgcaggcatattgccgtgtttgtgaaaacatcgc

SEQ ID NO: 542651 - DNA, 75 bp, synthetic construct
  source 1..75: mol_type = other DNA
gcggttttcagagtggagggcttatcgccatacgagcggtagaggaagatcttaaattctacacaaatactccta

SEQ ID NO: 542652 - DNA, 75 bp, synthetic construct
  source 1..75: mol_type = other DNA
gcttgtcagtacatcagcgatcacctggcagacagtaattttgatatcgccagcgtcgcacagcatgtctgcctg

SEQ ID NO: 542653 - DNA, 75 bp, synthetic construct
  source 1..75: mol_type = other DNA
atagtggagcaagctgcacctgatgaattttttgcgcatcctaaatcagagcgtacgagggcatttttatcgcag

SEQ ID NO: 542654 - DNA, 75 bp, synthetic construct
  source 1..75: mol_type = other DNA
ctttgggaaatatggaaaagaagattaaccagacttttaataagctggaggaaagagccaaatctacgaaggtct

SEQ ID NO: 542655 - DNA, 75 bp, synthetic construct
  source 1..75: mol_type = other DNA
agaattgaacgtaatttgaatagagcgtttaaggtcgataccaagcaacttgacagcaatctgacaagttcttta

SEQ ID NO: 542656 - DNA, 75 bp, synthetic construct
  source 1..75: mol_type = other DNA
tcgcctggttctctccggggctaaccgcacaggctttgcggggaaaaaaacaggagtggctggcggcaatcgaca

SEQ ID NO: 542657 - DNA, 75 bp, synthetic construct
  source 1..75: mol_type = other DNA
actggcatcgatggaacgctggatgatggcgaatcagccattctggagtgtgatggtggagtctgatgctctcgc

SEQ ID NO: 542658 - DNA, 75 bp, synthetic construct
  source 1..75: mol_type = other DNA
ttgctggttacccctgtcggtatcggacggctggcgattgttcccggaaacgaagtttcagacgtcagagcgtcg

SEQ ID NO: 542659 - DNA, 75 bp, synthetic construct
  source 1..75: mol_type = other DNA
aagcgcgtccgatacgctgtatcaatattttggccagcatggcgacaaagtggtgcagccgttggtacaaaagct

SEQ ID NO: 542660 - DNA, 75 bp, synthetic construct
  source 1..75: mol_type = other DNA
tatatattaaatgataacgcagaaccagattttttatcttatgttcgtgatccacagaatggttttatttctata

SEQ ID NO: 542661 - DNA, 75 bp, synthetic construct
  source 1..75: mol_type = other DNA
tttgcaacttctgtaggtatgtcagcactctattttgccgctgcgatgaaagataatggtggcggactggtgatt

SEQ ID NO: 542662 - DNA, 75 bp, synthetic construct
  source 1..75: mol_type = other DNA
ctgctgcgccgtttctggagcgggacgaaaaagcgtgaccgtattcaccgcattccggaagatcgcaaaaagaaa

SEQ ID NO: 542663 - DNA, 75 bp, synthetic construct
  source 1..75: mol_type = other DNA
tgggcgccgccagccagacgctgaatcagcaggcggtgaccgccagtaatctggcaaatgcctcgacaccgggtt

SEQ ID NO: 542664 - DNA, 75 bp, synthetic construct
  source 1..75: mol_type = other DNA
caaaaatgtgcctggttcacatcggaaagaatctgcccgcaaaaaaaagccggatttctggcaactctgatcgca

SEQ ID NO: 542665 - DNA, 75 bp, synthetic construct
  source 1..75: mol_type = other DNA
aattgactctgaagataataaaataataaaaagaataagaatgtcagtaagaaaagacaatattatattacgtaa

SEQ ID NO: 542666 - DNA, 75 bp, synthetic construct
  source 1..75: mol_type = other DNA
atgaccacaccaaatccactggcaaaaacgaaggtgcgggaacgacgttctggatgtacaccggtcaagggcgat

SEQ ID NO: 542667 - DNA, 75 bp, synthetic construct
  source 1..75: mol_type = other DNA
gcattattacctgcgaacctagcaagtatcggtggtattgctatctggggttggattatctctattattggtgca

SEQ ID NO: 542668 - DNA, 75 bp, synthetic construct
  source 1..75: mol_type = other DNA
aggtgtgaaagcgggcagcacctcgattgtggggatgactgcgggtggtgcgcaggttgctgtggccggtgttac

SEQ ID NO: 542669 - DNA, 75 bp, synthetic construct
  source 1..75: mol_type = other DNA
gacgctggcctggcgtccgggtgacagcgggcagaaaaaactggttcagttgttcgactccggtgaagtctgcgc

SEQ ID NO: 542670 - DNA, 75 bp, synthetic construct
  source 1..75: mol_type = other DNA
tcactgggtaaaaccattacctcaaaagaggtgatgacccgtactgtaaaaatcagcggtgtggggcgtccgtat

SEQ ID NO: 542671 - DNA, 75 bp, synthetic construct
  source 1..75: mol_type = other DNA
aaaaataaaagaagttattctccctttctttaatgagcattttggagcagcatttatgggaagaactaacttagt

SEQ ID NO: 542672 - DNA, 75 bp, synthetic construct
  source 1..75: mol_type = other DNA
ggaaatcactattgctgccgatggcacaatctcggcgctcaatccgggcgatccggcaaatacggttgcgccagt

SEQ ID NO: 542673 - DNA, 75 bp, synthetic construct
  source 1..75: mol_type = other DNA
aacttttccgtcgctgtagcgcccgcgatatgttgttgatttcggcgatttgcggggtagtacgttggggcatta

SEQ ID NO: 542674 - DNA, 75 bp, synthetic construct
  source 1..75: mol_type = other DNA
gaccgttttcgccggtttcctgtatcaatatctgggccacggcgtgttctgggtaatggcgctggtggcgcttcc

SEQ ID NO: 542675 - DNA, 75 bp, synthetic construct
  source 1..75: mol_type = other DNA
acgctaataatgcactgaacattattcccgaatcagcaagcacagctgtagacaacgatgaaaaatatctgtcct

SEQ ID NO: 542676 - DNA, 75 bp, synthetic construct
  source 1..75: mol_type = other DNA
cattgagattatggtgctgaccaaaagtgcgtccgatacgctgtatcaatactttggtcagcatggggataaagt

SEQ ID NO: 542677 - DNA, 75 bp, synthetic construct
  source 1..75: mol_type = other DNA
gtggcggtgccggaagaaacggagaaaaaagcgcgtgatgtgaatgagaaaacggcgctgctgaagaagaaatcc

SEQ ID NO: 542678 - DNA, 75 bp, synthetic construct
  source 1..75: mol_type = other DNA
ttttagttacggcatttttctacctttctggagcgtctggcttaaggggattggcttaacgccagaaaccatcgg

SEQ ID NO: 542679 - DNA, 75 bp, synthetic construct
  source 1..75: mol_type = other DNA
gtcatatatgatattttgataactcgtgagatgaagaaatactctatcaaaaatgatatatctgatatcgataga

SEQ ID NO: 542680 - DNA, 75 bp, synthetic construct
  source 1..75: mol_type = other DNA
atacgttcgccgcaggctcggtgttgatggttcagcaattcttacatctgaacattatgcaaaaatctttaatct

SEQ ID NO: 542681 - DNA, 75 bp, synthetic construct
  source 1..75: mol_type = other DNA
cgatttattgagtcagtggcgaagttatggaatgtattgtctggagcttgacgccgattttttcagggatgaagg

SEQ ID NO: 542682 - DNA, 75 bp, synthetic construct
  source 1..75: mol_type = other DNA
gcctcaaaaaagtttcttcatttacatgaacattgtctgttatctgcacacgttaccccgtctgtggaaaagacg

SEQ ID NO: 542683 - DNA, 75 bp, synthetic construct
  source 1..75: mol_type = other DNA
gctcaaactcggcagacaatattggtggggtttattaccgccagttgcagtattgcataaacggcacctggtatt

SEQ ID NO: 542684 - DNA, 75 bp, synthetic construct
  source 1..75: mol_type = other DNA
cgtggtttaacctcattcagcgggaactggtgaaggtggtggagggggccgggctgacgctggatccgacagatg

SEQ ID NO: 542685 - DNA, 75 bp, synthetic construct
  source 1..75: mol_type = other DNA
gtcagcacatcgaagagtgaagggcgtattgtccgctttgacctgaagtttgtcgaagcgggagaactctcttac

SEQ ID NO: 542686 - DNA, 75 bp, synthetic construct
  source 1..75: mol_type = other DNA
tccaaattttgatcgcgagaaaggagctcagcattcccttgaagggctgaggattatcgcgaaagctcttaaagt

SEQ ID NO: 542687 - DNA, 75 bp, synthetic construct
  source 1..75: mol_type = other DNA
gttagccttttccagaatgacgctacagcgttcagggcaatcacctattgcggatggcaaaaactcgataaggcc

SEQ ID NO: 542688 - DNA, 75 bp, synthetic construct
  source 1..75: mol_type = other DNA
ttcagctaaaatctgtcatgctgaatacgcttaccacccaatgggaaatgagtgtgaaagcagcagagaagcgcg

SEQ ID NO: 542689 - DNA, 75 bp, synthetic construct
  source 1..75: mol_type = other DNA
atccctgtctggatgcatctgtttaatattattaataaccttgatggtgtgaaaattggatttattatatctctt

SEQ ID NO: 542690 - DNA, 75 bp, synthetic construct
  source 1..75: mol_type = other DNA
catctttgccgaatatattgaaagagtatggctataaaagttattttatagcgtctacagaaaaaatagcccact

SEQ ID NO: 542691 - DNA, 75 bp, synthetic construct
  source 1..75: mol_type = other DNA
gccagcgagtgtcagcttgcaccatttttcgataatggtacgagcttatgttacgaacgctttccggagcatgtt

SEQ ID NO: 542692 - DNA, 75 bp, synthetic construct
  source 1..75: mol_type = other DNA
atgatgattaatgttaacgggcgacccgtgtcgaccggggctttgctcgaccttctgacgcgtgctgtgattatt

SEQ ID NO: 542693 - DNA, 75 bp, synthetic construct
  source 1..75: mol_type = other DNA
aggcgctggcgtggatggtggaggatggtgttgcttcccgtcttgatattaacgctgtccggaccgggacagact

SEQ ID NO: 542694 - DNA, 75 bp, synthetic construct
  source 1..75: mol_type = other DNA
gatgcatttcgtgtccgtgtgcgtgaggcatttcgccgtcgtgttgcggagactgaacagcatggcggaactgac

SEQ ID NO: 542695 - DNA, 75 bp, synthetic construct
  source 1..75: mol_type = other DNA
ggctatccagtttgaacataccaacgaggttcagaacctggtaagccagaccctgggggaaataaacagtctctc

SEQ ID NO: 542696 - DNA, 75 bp, synthetic construct
  source 1..75: mol_type = other DNA
atggaactgtggctgacggtgaacggcaaacgcaccagtgccagcgcaccgctggatccgctgacccgctccgtg

SEQ ID NO: 542697 - DNA, 75 bp, synthetic construct
  source 1..75: mol_type = other DNA
gtaaacgcacctgcgccagcgcacagctggatccgctgacccgcgccgtggtgatttccctgtttacctggcggc

SEQ ID NO: 542698 - DNA, 75 bp, synthetic construct
  source 1..75: mol_type = other DNA
gcgtctttaccgacggcgatttacgtcgctggctggttggcggcggcgcactcaccacgccagtcaatgaagcga

SEQ ID NO: 542699 - DNA, 75 bp, synthetic construct
  source 1..75: mol_type = other DNA
cccctcctctgctattctcgagatcgaacgcaaagttacgacgctaacccgcagcggcgaactgccagttgataa

SEQ ID NO: 542700 - DNA, 75 bp, synthetic construct
  source 1..75: mol_type = other DNA
tcagtattatctccgatgaatatactcagacaccgtcgcgggagggatatgttggcagcggcgagtcggcactcg

SEQ ID NO: 542701 - DNA, 75 bp, synthetic construct
  source 1..75: mol_type = other DNA
cggcctttataccaactggaagtttgatatgtggctggaaaattcaccagtttcatctcctttaactggcttgcg

SEQ ID NO: 542702 - DNA, 75 bp, synthetic construct
  source 1..75: mol_type = other DNA
tgcgtaaggctgcacaaaactatcagtcgacgctggcgtggtatcaggcaatcccggacagcccaactgctgaac

SEQ ID NO: 542703 - DNA, 75 bp, synthetic construct
  source 1..75: mol_type = other DNA
tgggcgaaagtcgtaccaaacgatcgggaaatcactatgcgtgagctaaccccagcagccgttactggcacgctg

SEQ ID NO: 542704 - DNA, 75 bp, synthetic construct
  source 1..75: mol_type = other DNA
ttccggtagatggtttatgcgtgcgtgtcggagcattgcgctgccatagtcaggcattcaccatcaaattgaaaa

SEQ ID NO: 542705 - DNA, 75 bp, synthetic construct
  source 1..75: mol_type = other DNA
cagaattgctgatttagaagctaaacagccatcaccagtagtaccggaaggactggttaaagcagtgcgcttcta

SEQ ID NO: 542706 - DNA, 75 bp, synthetic construct
  source 1..75: mol_type = other DNA
gtggtgccggctactggattagctggtcggtgatattcctgtgctggcctgtggcgcttcctttatatgtcgatt

SEQ ID NO: 542707 - DNA, 75 bp, synthetic construct
  source 1..75: mol_type = other DNA
ccgacgtcaccgctgggcctggcggcgaaagcggtgctggatatctccgtagaacgcgaagcctgcccgatgcac

SEQ ID NO: 542708 - DNA, 75 bp, synthetic construct
  source 1..75: mol_type = other DNA
cggtaaaacagctgccgacgaagtgctgatcaaggtgaccgggacccgcgcaggtgattggcgggcgctcctatt

SEQ ID NO: 542709 - DNA, 75 bp, synthetic construct
  source 1..75: mol_type = other DNA
ttatctcggatggaagtaagcgcattgcagaactggaagcacgggaaataaaaccagccaaaggtgaagttcttg

SEQ ID NO: 542710 - DNA, 75 bp, synthetic construct
  source 1..75: mol_type = other DNA
gcaatacatcaaactccgcgatcaggagaacgaggatattgcgctaacggtagggaagctgcgtgttgagcttga

SEQ ID NO: 542711 - DNA, 75 bp, synthetic construct
  source 1..75: mol_type = other DNA
ggtaaagaatgtgctcacttttttatgccagtcaggataccaactggcactggcgacctcttcatcttatcaggt

SEQ ID NO: 542712 - DNA, 75 bp, synthetic construct
  source 1..75: mol_type = other DNA
acgacattgaaatctatcgtgatgaaacacgcacgcatgtgattaatatcagccaccatctgcgccaacagacgg

SEQ ID NO: 542713 - DNA, 75 bp, synthetic construct
  source 1..75: mol_type = other DNA
acaaaatcatggtgaaagcccttgccgaccgtctggctgaagcctttgcggagtatctccatgagcgggtacgta

SEQ ID NO: 542714 - DNA, 75 bp, synthetic construct
  source 1..75: mol_type = other DNA
ctgttcccggcaaaccgtgtgggcgacgacattgaaatctaccgcgacgaaacacgcacccatgtgatcaacgtc

SEQ ID NO: 542715 - DNA, 75 bp, synthetic construct
  source 1..75: mol_type = other DNA
aacacaccggcatgaaactcacggaatctttcgctatgtggcctggcgcatcagtttcgggttggtacttcagcc

SEQ ID NO: 542716 - DNA, 75 bp, synthetic construct
  source 1..75: mol_type = other DNA
ggtgctggacggcggtatgggcaccatgatccagagctatcgactgaacgaagccgattttcgtggtgaacgctt

SEQ ID NO: 542717 - DNA, 75 bp, synthetic construct
  source 1..75: mol_type = other DNA
gtgaaagagaaacaggcccaggctacacagcctattgtgattaaagcgggcgaacgcccggataacagcgcaatt

SEQ ID NO: 542718 - DNA, 75 bp, synthetic construct
  source 1..75: mol_type = other DNA
gcgtgatgcggcatctgtgcacggcgaatcgggaatggctggctacgactttgttgagcacaaccgaaagccgct

SEQ ID NO: 542719 - DNA, 75 bp, synthetic construct
  source 1..75: mol_type = other DNA
gttggcaccgaatctggggtatgatgccgagcaagtgataacaccggggtatttgccccggtttttaatgtcata

SEQ ID NO: 542720 - DNA, 75 bp, synthetic construct
  source 1..75: mol_type = other DNA
tgccgtcgggcgtacaaaatcctcaccgaagaggttggcttcccgccagaagatatcatcttcgacccgaacatc

SEQ ID NO: 542721 - DNA, 75 bp, synthetic construct
  source 1..75: mol_type = other DNA
ttcgcggtcgcaactggcattgaagagcacaacaattacgcgcaggactttatcggcgcgtgtgaagacatcaaa

SEQ ID NO: 542722 - DNA, 75 bp, synthetic construct
  source 1..75: mol_type = other DNA
gcgcatttgccgtgactggcgggctggaagaggacgcactggctgatgcctttgaagcacagcacgatgattaca

SEQ ID NO: 542723 - DNA, 75 bp, synthetic construct
  source 1..75: mol_type = other DNA
ctctctttgcaacatggctgacgctaaattatccggaccagatgagaagttattttaccaaagccgtcgactata

SEQ ID NO: 542724 - DNA, 75 bp, synthetic construct
  source 1..75: mol_type = other DNA
aataaccgaagaaacgaagcaagaagtcattgctctttcaggtgttaatactaaaaatggagatattttattcaa

SEQ ID NO: 542725 - DNA, 75 bp, synthetic construct
  source 1..75: mol_type = other DNA
accagaattatatggagcagcggaacgaattaaaaataaactagaatatcgactcggtgccattatgattcaaca

SEQ ID NO: 542726 - DNA, 75 bp, synthetic construct
  source 1..75: mol_type = other DNA
ccgtagcgatgtggtgctggtgtccggtattcaccgtggcgaaccgaaaatcgttggtcgttatgacagtcttgg

SEQ ID NO: 542727 - DNA, 75 bp, synthetic construct
  source 1..75: mol_type = other DNA
ctacggcggcggttactaccgtcgtggtcatgcgcaacatgcgctggtgtttacgccagaaaatcaaaagattac

SEQ ID NO: 542728 - DNA, 75 bp, synthetic construct
  source 1..75: mol_type = other DNA
aacttacccggaccagatgagagagtgttttaacaaagtggttgcgtatatggaaagcgtgacaacattcattac

SEQ ID NO: 542729 - DNA, 75 bp, synthetic construct
  source 1..75: mol_type = other DNA
agcaggctacgcgcccgattgaagtgattgaaggcccgctgatggacggtatgaacgtggtcggcgatctgtttg

SEQ ID NO: 542730 - DNA, 75 bp, synthetic construct
  source 1..75: mol_type = other DNA
cagaccaccgaagcattttacaactccctgcgccatgccgaagccctgacttttggcctcaactgcgcgctgggg

SEQ ID NO: 542731 - DNA, 75 bp, synthetic construct
  source 1..75: mol_type = other DNA
agtggtaggcgttgaggcgcagcggctgtttaaagacgccaacgacatgctggataaattaagcgccgagaaaac

SEQ ID NO: 542732 - DNA, 75 bp, synthetic construct
  source 1..75: mol_type = other DNA
ttttcgggtttattactcttccattcgctatatataaaacggtaagtcaatttaaaaaaatgaggaaaaataaaa

SEQ ID NO: 542733 - DNA, 75 bp, synthetic construct
  source 1..75: mol_type = other DNA
tattgcagcgatgagtcgtgcagtagaaggattagcgccgcgcaaactgccggaaattcccgtagcctgccgttt

SEQ ID NO: 542734 - DNA, 75 bp, synthetic construct
  source 1..75: mol_type = other DNA
acaaaattatggtgaaagctcttgccgaccgactggccgaagcttttgcggagtatctccatgagcgtgtgcgta

SEQ ID NO: 542735 - DNA, 75 bp, synthetic construct
  source 1..75: mol_type = other DNA
cgtcctgtgcctgccgttgctgctgacaggttgcgggaactcgaaaaacgcacccgtgccatcggtggtgatcct

SEQ ID NO: 542736 - DNA, 75 bp, synthetic construct
  source 1..75: mol_type = other DNA
tctgtccggggtgttgtggcacaggctggacagcacccgccacgataaccagacgctgcgccgtgaattacagac

SEQ ID NO: 542737 - DNA, 75 bp, synthetic construct
  source 1..75: mol_type = other DNA
ctactctgtgcatatggatgcgtttttatatatgcaaaaacaaaagaaaatcgcagatgagcaagctattctgga

SEQ ID NO: 542738 - DNA, 75 bp, synthetic construct
  source 1..75: mol_type = other DNA
tgccttgtctgcatgtgcctgttgatgctggtcgcgtcctctctgttgcgccggatggctctgtagaatgggaat

SEQ ID NO: 542739 - DNA, 75 bp, synthetic construct
  source 1..75: mol_type = other DNA
gtcgggcaacacatctctatattgacggcaatccgtcaaagtttttgcaaggtcactctgttatcggttccgatg

SEQ ID NO: 542740 - DNA, 75 bp, synthetic construct
  source 1..75: mol_type = other DNA
ccaaaccagccaaaattccatcatgggtttatgagaaaggtttaattttcgattataaccgtatttcacatgcca

SEQ ID NO: 542741 - DNA, 75 bp, synthetic construct
  source 1..75: mol_type = other DNA
gtatctggctggttgcaggtatcaccgatatgcgaaatggctttaaacggcctggcatcaaaagttcagaacgtc

SEQ ID NO: 542742 - DNA, 75 bp, synthetic construct
  source 1..75: mol_type = other DNA
ggtaaggttgagatttcgttccctgggcagataccggataacggaaaagattatggttatttgtatttacagcag

SEQ ID NO: 542743 - DNA, 75 bp, synthetic construct
  source 1..75: mol_type = other DNA
tgatataattatctttaatgacagtgtcattaataaaggtattaacaagcaaatattaagaaatattaattgtcg

SEQ ID NO: 542744 - DNA, 75 bp, synthetic construct
  source 1..75: mol_type = other DNA
gtggtgccgcgacggaatccgactggatccgcgcaggcgggcgcaacccggatgaggtcaaacgtcgccgtaagg

SEQ ID NO: 542745 - DNA, 75 bp, synthetic construct
  source 1..75: mol_type = other DNA
gtggaaaaaataaagaaactatttagtagcaaatacgcagtcatacgtcgtgatgacctgtcagttatagtcgaa

SEQ ID NO: 542746 - DNA, 75 bp, synthetic construct
  source 1..75: mol_type = other DNA
tatttattctattgaagaatatacgagtcaggaaaaatacggtaaaagtaaagtctatagctacttctggttttt

SEQ ID NO: 542747 - DNA, 75 bp, synthetic construct
  source 1..75: mol_type = other DNA
ttaatttaccgtctgcgctacgtatgacttatgtgtgctggaaacagggcattcgtgtaacagatatggtatctc

SEQ ID NO: 542748 - DNA, 75 bp, synthetic construct
  source 1..75: mol_type = other DNA
taaagttatgagcgaaggtaatgactccaacttattgatagtgttttatgttcagataatgcccgatgactttgt

SEQ ID NO: 542749 - DNA, 75 bp, synthetic construct
  source 1..75: mol_type = other DNA
cttgatgcaaataaaattgaattaatatcaccttttgattacggaaagacggtaatattaaatgaaaacacccag

SEQ ID NO: 542750 - DNA, 75 bp, synthetic construct
  source 1..75: mol_type = other DNA
aaatagcggtgacaacaccagttatttaattcaatcatgggttgatgacagtaaaacggaaaaaaagagccagga

SEQ ID NO: 542751 - DNA, 75 bp, synthetic construct
  source 1..75: mol_type = other DNA
ctgcgaagaaagctttgtttatttcatctgtaagaaaatttctctcgtctaaaaacagagataatttcatagatt

SEQ ID NO: 542752 - DNA, 75 bp, synthetic construct
  source 1..75: mol_type = other DNA
gcatgggtttaggacgatggcacgtggtgcgttgggtgagtcaggattatggagtgatgatgctatagaacgcca

SEQ ID NO: 542753 - DNA, 75 bp, synthetic construct
  source 1..75: mol_type = other DNA
ggcgcatacctgcaaaacgaaaagaaattaagggagtgcgttattcgtatcgtggtatgaagatgaaagaggagc

SEQ ID NO: 542754 - DNA, 75 bp, synthetic construct
  source 1..75: mol_type = other DNA
ttaaactgccgagaaaaatacaatcaacatatttactgtggaagcagggcgcaaacatgaaagaaatgcttccaa

SEQ ID NO: 542755 - DNA, 75 bp, synthetic construct
  source 1..75: mol_type = other DNA
cgccgaatttaaagctaaaacacgccatggtcgcgcatgtgggaaaggcggtacagtttatttaggtaaaaactc

SEQ ID NO: 542756 - DNA, 75 bp, synthetic construct
  source 1..75: mol_type = other DNA
cgatcgataggatctaatggcgaaggtaaagcgacacatttgtacattgatggtaatccgtccaagtttttgcag

SEQ ID NO: 542757 - DNA, 75 bp, synthetic construct
  source 1..75: mol_type = other DNA
actcaaatccagcaagtgacatggccggtgcgttatcgacaaccaaagcacgacactatccagctttaccctcta

SEQ ID NO: 542758 - DNA, 75 bp, synthetic construct
  source 1..75: mol_type = other DNA
gataatctttttgcagcgcttggtgaacgtaatatcgctgagttaaaaactcgagatttattagcacctattaaa

SEQ ID NO: 542759 - DNA, 75 bp, synthetic construct
  source 1..75: mol_type = other DNA
atggacgtaatcagtgagttttatttttctggtgctctgcctgcgggctggcgtaagcgcgatgatgtggctttt

SEQ ID NO: 542760 - DNA, 75 bp, synthetic construct
  source 1..75: mol_type = other DNA
agttttttcctgtagggatggaagatatttcaaaatatagtttatctgaaaataataacagccagcctatatgtt

SEQ ID NO: 542761 - DNA, 75 bp, synthetic construct
  source 1..75: mol_type = other DNA
aagagattggtcatgccaatgccgatatcattcgtgaagcggctaaacatcacgaagtcggcctgcacgcctggg

SEQ ID NO: 542762 - DNA, 75 bp, synthetic construct
  source 1..75: mol_type = other DNA
cggctggtgaaacccaaattcttatggaagatgctgcgctcaaacgccgcatcactttatggctgggatattttg

SEQ ID NO: 542763 - DNA, 75 bp, synthetic construct
  source 1..75: mol_type = other DNA
tttgatggacagaaaaatgcagagaacaacgctcgttatatcgcagctttcaaccctgaagtagtgcaggcgctg

SEQ ID NO: 542764 - DNA, 75 bp, synthetic construct
  source 1..75: mol_type = other DNA
tgcggtccgtctggcaaagcgtgagcttcgtcagcgcagcctttatcggctcacaggcttgtataattatcggct

SEQ ID NO: 542765 - DNA, 75 bp, synthetic construct
  source 1..75: mol_type = other DNA
gtgcctgagttgtctgtaattatacaatggatgaatcaataccctaagaccggctggctattgctgtgtatctat

SEQ ID NO: 542766 - DNA, 75 bp, synthetic construct
  source 1..75: mol_type = other DNA
atcgacgatattgcacgcggccttcgcaccctggaagagattatcggtcaaccggtaacctgttctgccgctgcg

SEQ ID NO: 542767 - DNA, 75 bp, synthetic construct
  source 1..75: mol_type = other DNA
ttcagatgctgtcgatgccgtggttgacagaattgctgatttagaagctaaacaatgcattgaagagatgagtaa

SEQ ID NO: 542768 - DNA, 75 bp, synthetic construct
  source 1..75: mol_type = other DNA
attctcggacatgtacatgcgcgcgaaggaaatcggcttcgaggtattagctgatgagatcctcgatatagctga

SEQ ID NO: 542769 - DNA, 75 bp, synthetic construct
  source 1..75: mol_type = other DNA
aaaaggtgggccgtccgcatggttataccgaagagaaagcgttagagatctgcgaactggtagcggacggtcaga

SEQ ID NO: 542770 - DNA, 75 bp, synthetic construct
  source 1..75: mol_type = other DNA
gaacgcgtcacacaggagatcgtcggcaacaaggaagaagcgcccgttcaggttgaagtcacgaaagaagagatc

SEQ ID NO: 542771 - DNA, 75 bp, synthetic construct
  source 1..75: mol_type = other DNA
ctgacgataaaaagccagccgctaaaaaggtgggccgtccgcatggttataccgaagaaaaagcattagaaatct

SEQ ID NO: 542772 - DNA, 75 bp, synthetic construct
  source 1..75: mol_type = other DNA
ctgacgataaaaagccagcagccaaaaagacgggccgtccgcatggttataccgaagaaaaggcattagaaatct

SEQ ID NO: 542773 - DNA, 75 bp, synthetic construct
  source 1..75: mol_type = other DNA
gtatgcgggtaagttctggctgtattcgtctgcgtgatgacgatatcaaaacacttttcagccaggtcagccccg

SEQ ID NO: 542774 - DNA, 75 bp, synthetic construct
  source 1..75: mol_type = other DNA
tcaggttgatagaaatatcgcctggggcttttgtccatctggaacctcgcgaatgcttaacgccagacagcctca

SEQ ID NO: 542775 - DNA, 75 bp, synthetic construct
  source 1..75: mol_type = other DNA
aatatctggtgctgtataacagcaaaagaccccacaaggcgctcgcactaatgacgcccgtggaatatattttaa

SEQ ID NO: 542776 - DNA, 75 bp, synthetic construct
  source 1..75: mol_type = other DNA
tccctacacgccaaaaatgaacgctatctgtgaacgttttaaccggacgttaagagagcagtttattgaatttaa

SEQ ID NO: 542777 - DNA, 75 bp, synthetic construct
  source 1..75: mol_type = other DNA
tggctgggacgattattcataaaacattacctcagtgatgttaaaaaagatgatatcattatctttaatgacagt

SEQ ID NO: 542778 - DNA, 75 bp, synthetic construct
  source 1..75: mol_type = other DNA
accaaagaaaaccaatctggctggactcttcgtatacttgaggcactatttttcaataaaaaattaattactaat

SEQ ID NO: 542779 - DNA, 75 bp, synthetic construct
  source 1..75: mol_type = other DNA
aataaaaacgcccccatcatttctgacagaggcgtttaatttatccggcaatatttacccttcgtgcaatccaca

SEQ ID NO: 542780 - DNA, 75 bp, synthetic construct
  source 1..75: mol_type = other DNA
gcaccaaagtgaacattatcaacacaccgattaaagtctctgccgagccaaatggcgcacgcctggtagaagtgc

SEQ ID NO: 542781 - DNA, 75 bp, synthetic construct
  source 1..75: mol_type = other DNA
atgatcaaaacgcgtttttctcgctggctaacgttttttacgctcgccgctgccgtggcgctggcgctaccggca

SEQ ID NO: 542782 - DNA, 75 bp, synthetic construct
  source 1..75: mol_type = other DNA
cgaagtgatgcagcacgtaatggacgtgcgttccggaatgccggttgatgtgcgtcgtcatcaagtgaatcagca

SEQ ID NO: 542783 - DNA, 75 bp, synthetic construct
  source 1..75: mol_type = other DNA
agccgtacagtttccattttcagcgttatggctgattcggcgcggcagcattcatcggggcttatcatggaaaaa

SEQ ID NO: 542784 - DNA, 75 bp, synthetic construct
  source 1..75: mol_type = other DNA
cgaggttgcgggctaatctcacccaggaacaactgggcgttcgtgcaggcatcgccgaagatacggcctgctccc

SEQ ID NO: 542785 - DNA, 75 bp, synthetic construct
  source 1..75: mol_type = other DNA
atgatcaaaatgcgtttttctcgctggttgacgttttttacgctcgccgctgccataacgctggcgctaccggca

SEQ ID NO: 542786 - DNA, 75 bp, synthetic construct
  source 1..75: mol_type = other DNA
acccatcagcttaagccttggctacaagctagtagcgctggtcgataaagcacagggtaacccgctcacccagcg

SEQ ID NO: 542787 - DNA, 75 bp, synthetic construct
  source 1..75: mol_type = other DNA
atggggtatcaggtgatcgacagcgccagcgtgattgccacccatgtgaataagattgtgcgcagctatattcct

SEQ ID NO: 542788 - DNA, 75 bp, synthetic construct
  source 1..75: mol_type = other DNA
aacggcgatatcgcccatgacgtgcgccaccagttgctggcaagcccgacggtactctacaccgccaccgggatc

SEQ ID NO: 542789 - DNA, 75 bp, synthetic construct
  source 1..75: mol_type = other DNA
aaaaaagtttttggtgaatattatgcgagcctgattgtatttggagatacacctgaagaagctgttgataacgga

SEQ ID NO: 542790 - DNA, 75 bp, synthetic construct
  source 1..75: mol_type = other DNA
tcgtcgatggcaccgcgactggcggaagatttgagcgcggcgctcaattacagccagttgctgaaagtgtaccgg

SEQ ID NO: 542791 - DNA, 75 bp, synthetic construct
  source 1..75: mol_type = other DNA
tgtaaataagattgtgcgcagctatattcctgatttgtttaactatgatgatattacgcagttgcataaccgttt

SEQ ID NO: 542792 - DNA, 75 bp, synthetic construct
  source 1..75: mol_type = other DNA
ttgacgccaaccgctacctcggaaaatggtatgaaatagctcgcctcgagaaccggttcgaacgtggtctggaac

SEQ ID NO: 542793 - DNA, 75 bp, synthetic construct
  source 1..75: mol_type = other DNA
atgaagttatggcctgtgttgactggcattgcactctctttcactcttatagcatgtaaggccccgacaccacct

SEQ ID NO: 542794 - DNA, 75 bp, synthetic construct
  source 1..75: mol_type = other DNA
caggcgtttgccgacaacctgccgtggccgacgtgggtggaaaataatgccaacgcctcggcggtaggtgaactg

SEQ ID NO: 542795 - DNA, 75 bp, synthetic construct
  source 1..75: mol_type = other DNA
cgtttccctgcgcgatatcgtcaccatcgccaccgtgctggtcgccagtagcgcggtgactaaagatcatattct

SEQ ID NO: 542796 - DNA, 75 bp, synthetic construct
  source 1..75: mol_type = other DNA
caacggcattaaggctgatgaagcggatattccggcggataaactgatggccctgccctccagcgaaacctacgg

SEQ ID NO: 542797 - DNA, 75 bp, synthetic construct
  source 1..75: mol_type = other DNA
aaatatgtatctgtgtatattttatacaccctgtcaggaaacgaatattttggcagaaatgaagatttcggtagc

SEQ ID NO: 542798 - DNA, 75 bp, synthetic construct
  source 1..75: mol_type = other DNA
aagccgatgggaatcctcctggagacggaacagcgttgatgccagtgatgacggaaaacgggggaatgtattttc

SEQ ID NO: 542799 - DNA, 75 bp, synthetic construct
  source 1..75: mol_type = other DNA
cacgcgtaaggacgttccatccctgcgtttgggtaaagtgagcatcgcgaaagataccgcatcggtattccgtaa

SEQ ID NO: 542800 - DNA, 75 bp, synthetic construct
  source 1..75: mol_type = other DNA
accacgcaggttccttccactatgaaggtcatgatcctggactcaggcgatccgaacgggccattaagccgtgcg

SEQ ID NO: 542801 - DNA, 75 bp, synthetic construct
  source 1..75: mol_type = other DNA
atgcctgccgcgcggctatgcttcatgggaaaggaaagtgatatggctacttttaccaaagagcaattgattgcc

SEQ ID NO: 542802 - DNA, 75 bp, synthetic construct
  source 1..75: mol_type = other DNA
atgaagatagaacttattacgataaaagagtttattgaacaagccgaatgttatttcaggaactatatggacgga

SEQ ID NO: 542803 - DNA, 75 bp, synthetic construct
  source 1..75: mol_type = other DNA
ccattcgctgcatcaatcgccagcggtttgccgaagagatgcagatcctgcgtgagattttcaactctggctggc

SEQ ID NO: 542804 - DNA, 75 bp, synthetic construct
  source 1..75: mol_type = other DNA
tgccaagcatccgtgctgcggatattcgttccgacgaagaacagacgtcgaccacaacggatactctggcaacgc

SEQ ID NO: 542805 - DNA, 75 bp, synthetic construct
  source 1..75: mol_type = other DNA
gactattaaatggtaatataccagcagacgtttgttctgtattactgttagattactttaatcagttgaataatg

SEQ ID NO: 542806 - DNA, 75 bp, synthetic construct
  source 1..75: mol_type = other DNA
tacttgcattccctgagaagacattcaatgtagctaaagtactattccaaacaaaggatttcttccgttttgata

SEQ ID NO: 542807 - DNA, 75 bp, synthetic construct
  source 1..75: mol_type = other DNA
gcttactaataaacagtatagcggaattttgggcacctctaatgtttgagagtacagctaattccattatggaaa

SEQ ID NO: 542808 - DNA, 75 bp, synthetic construct
  source 1..75: mol_type = other DNA
aagatcgttatcaccgtatggatatcgacgaagatttcggtcttcatagtagtcatcatgactactttccagaaa

SEQ ID NO: 542809 - DNA, 75 bp, synthetic construct
  source 1..75: mol_type = other DNA
tatttttctgacagagatgggaagaaaaatattttgcatacgattcttcatggggctgtcatgattaaacctgaa

SEQ ID NO: 542810 - DNA, 75 bp, synthetic construct
  source 1..75: mol_type = other DNA
tggttggcacacatttaaagatagcaatagtcaattcttttgcgatgtatctaggactatgggccattgcccttc

SEQ ID NO: 542811 - DNA, 75 bp, synthetic construct
  source 1..75: mol_type = other DNA
ctcgctgggcatctcatcccagggagcgcacagcgcatctcacggtgcggcgatgatccctctgtatcagttcat

SEQ ID NO: 542812 - DNA, 75 bp, synthetic construct
  source 1..75: mol_type = other DNA
tgcggaagctgcgctgcgtatttcacgcggcacgaaaaccaccttcagttattgggggatggtggcggctcacct

SEQ ID NO: 542813 - DNA, 75 bp, synthetic construct
  source 1..75: mol_type = other DNA
atgaaatgctcacctgtttttacttcaaccacaaaccacgttttcacattcgaacgagtaacgctttgcacgatt

SEQ ID NO: 542814 - DNA, 75 bp, synthetic construct
  source 1..75: mol_type = other DNA
tattttgactcgttaaataatggcgaggagtatttgagttttaaagaatatatcggatgtataaggggaaaataa

SEQ ID NO: 542815 - DNA, 75 bp, synthetic construct
  source 1..75: mol_type = other DNA
tcgttgcccgctacggtacttataaagatcacaacacgctaacagatgccgaactggtggcaattctttatgaag

SEQ ID NO: 542816 - DNA, 75 bp, synthetic construct
  source 1..75: mol_type = other DNA
ttgttcgctggatctgggcgggcgggctgatgatggcgttgggcgggctgctgtgcctgtttgatcctcgctatc

SEQ ID NO: 542817 - DNA, 75 bp, synthetic construct
  source 1..75: mol_type = other DNA
tgctgtatgcggaaaaacgttattacaacactgccgggtcgatgatgaccgaagcggcgattgacggcggcatca

SEQ ID NO: 542818 - DNA, 75 bp, synthetic construct
  source 1..75: mol_type = other DNA
cctgacgcaaaaccccgggtttgcagcgaccggaacggtcgcgccacccttgtcgcgccgtgacctgcgctcccg

SEQ ID NO: 542819 - DNA, 75 bp, synthetic construct
  source 1..75: mol_type = other DNA
cctggcttgcagcgaccgttccggtcgcgccgcctctgtcgcgccgtggcctgcgctcccggcatcccggcaaaa

SEQ ID NO: 542820 - DNA, 75 bp, synthetic construct
  source 1..75: mol_type = other DNA
gcgtcatttcgcggcgtatcgtttaaggttgaagaagaaagtgcgggaaccggtcgccgtgtggaaacacacgaa

SEQ ID NO: 542821 - DNA, 75 bp, synthetic construct
  source 1..75: mol_type = other DNA
ggtgcagaaacggcacaggcaaccgtaagagtctggatccgttttcgtggggatgttacggcatccagccggata

SEQ ID NO: 542822 - DNA, 75 bp, synthetic construct
  source 1..75: mol_type = other DNA
gggtgaaatgtacatcctgcaaaactttttgcccaaaagcaggcaaaaacttttgcggtctgcccccggacagtc

SEQ ID NO: 542823 - DNA, 75 bp, synthetic construct
  source 1..75: mol_type = other DNA
gtggaggccgcctgtcagcccgcgcgaaaacccctggcaggctggcgcctgccggaagggaagcgggccacgctg

SEQ ID NO: 542824 - DNA, 75 bp, synthetic construct
  source 1..75: mol_type = other DNA
ttatgcgttgcgggttttatacagattataacacgctaacagatgccgaactggtggcaactctttacgaaggag

SEQ ID NO: 542825 - DNA, 75 bp, synthetic construct
  source 1..75: mol_type = other DNA
acgccggtaaacacggcgcttacggatatcgtccgcgatccgctgctgcgcaatgcttatctgagtctgcataac

SEQ ID NO: 542826 - DNA, 75 bp, synthetic construct
  source 1..75: mol_type = other DNA
gaagatcacccgccttgccgcctgtgaagatgaaaacggtcaacggggccgccgccagtcacacttgcaggcgct

SEQ ID NO: 542827 - DNA, 75 bp, synthetic construct
  source 1..75: mol_type = other DNA
agcagagggggcgtagtaatccttgtataccggagtgaagagaaaaatgagcgagatcaactatcaggcactgcg

SEQ ID NO: 542828 - DNA, 75 bp, synthetic construct
  source 1..75: mol_type = other DNA
gaaagggacgccgagtgatatctatgtcggcaccaaagatattgccgagcagttagtcgcgcagtctgtcgcagg

SEQ ID NO: 542829 - DNA, 75 bp, synthetic construct
  source 1..75: mol_type = other DNA
ctggaaaatatgattgataagaaagccatgagagaacgtttatccgtggtattaaccgaattaggcgcactgtaa

SEQ ID NO: 542830 - DNA, 75 bp, synthetic construct
  source 1..75: mol_type = other DNA
gtgtttaatggcttctacgaagcgttgctggtgctggcgggatatctgctgattaatctggtcttcggcaatatt

SEQ ID NO: 542831 - DNA, 75 bp, synthetic construct
  source 1..75: mol_type = other DNA
atgccggggtgtactccagttttctgcgtcattgcgaagtggcggcagcacgttatggcctgagcgcagtagata

SEQ ID NO: 542832 - DNA, 75 bp, synthetic construct
  source 1..75: mol_type = other DNA
ttcgattgaagtggcccatggcgacggtttgcagggttccagctttaactatggtttcggcgcacatagcgacct

SEQ ID NO: 542833 - DNA, 75 bp, synthetic construct
  source 1..75: mol_type = other DNA
ttgaaaatagtcttgagcaacttaactcagcatggatttatcaaagtgaattggttgctaagatacaaagtacat

SEQ ID NO: 542834 - DNA, 75 bp, synthetic construct
  source 1..75: mol_type = other DNA
acgcttttgatattgactatatgcaacagggcgacccggcacgcgtaattacctggggagatatcgtaattcttg

SEQ ID NO: 542835 - DNA, 75 bp, synthetic construct
  source 1..75: mol_type = other DNA
ggcgctccttggttatttttacatcgtgttctgcagcggacggtggctgtcgctgttgttcctgaaaaaatggaa

SEQ ID NO: 542836 - DNA, 75 bp, synthetic construct
  source 1..75: mol_type = other DNA
tcgatacagccctgaacaccggcctggcgctccttggttatttctacatcatgttctgcagcggacgatggctgt

SEQ ID NO: 542837 - DNA, 75 bp, synthetic construct
  source 1..75: mol_type = other DNA
cgtgccacgccgcgcggctggcccggacattcgtcacatcatcatcggcaacgaaggtgcattgtgctatatcac

SEQ ID NO: 542838 - DNA, 75 bp, synthetic construct
  source 1..75: mol_type = other DNA
aacgaaggtgcattgtgctatatcactgaagtaacagtgaaaatctttaaattcaccccggaaaacaacctcttc

SEQ ID NO: 542839 - DNA, 75 bp, synthetic construct
  source 1..75: mol_type = other DNA
atgtctttatctcgcgcagcgattgtcgaccagctaaaggaaattgttggtgcagatcgcgtaattaccgatgaa

SEQ ID NO: 542840 - DNA, 75 bp, synthetic construct
  source 1..75: mol_type = other DNA
gtagaaaaacgtgttacagcatcagttggctcgtggatcaagcgactcaatagttggctgcgaaaagagttttaa

SEQ ID NO: 542841 - DNA, 75 bp, synthetic construct
  source 1..75: mol_type = other DNA
ttgatatcggtggtggtacaatggatatcgccgtttataccggtggggcattgcgccacactaaggtaattcctt

SEQ ID NO: 542842 - DNA, 75 bp, synthetic construct
  source 1..75: mol_type = other DNA
aacaacctcttctacggctatatcctggaagacatgaaaaccggcttcaacatcctgcgtgaaatcatggtggaa

SEQ ID NO: 542843 - DNA, 75 bp, synthetic construct
  source 1..75: mol_type = other DNA
ggcgaatcttcagaccttatccgttaccctgaaaatcaccatgaaattggcagtggtgatattggtggtcaatac

SEQ ID NO: 542844 - DNA, 75 bp, synthetic construct
  source 1..75: mol_type = other DNA
acacaggaatgtgtgatagcggaggttctactccttggggagagccgatttttattgaatgtgactgccttatga

SEQ ID NO: 542845 - DNA, 75 bp, synthetic construct
  source 1..75: mol_type = other DNA
tatggcgctacttgcctgggcgatgaaatcgttaccggtagggacggcttatgccgtgtggacgggtattggcgc

SEQ ID NO: 542846 - DNA, 75 bp, synthetic construct
  source 1..75: mol_type = other DNA
aaccggaagaggaaatcgacaagtaccacaacccgctcaacaaaatcatctgtgaagaaaccattcgcctcggtg

SEQ ID NO: 542847 - DNA, 75 bp, synthetic construct
  source 1..75: mol_type = other DNA
gtgcagatcgcgtaattaccgatgaaacagtattaaagaaaaacagtattgaccgttttcgtaaatttccggata

SEQ ID NO: 542848 - DNA, 75 bp, synthetic construct
  source 1..75: mol_type = other DNA
ttaatattgatattgagaatatgcaggcgacggcgcaatgtggcgttcccctggaagtgctggaaaacgcgttgc

SEQ ID NO: 542849 - DNA, 75 bp, synthetic construct
  source 1..75: mol_type = other DNA
cacgcgtaaggatgttccatccctgcgtttgggtgctgtatcaatctcccaggataccgcttcagttttccgtaa

SEQ ID NO: 542850 - DNA, 75 bp, synthetic construct
  source 1..75: mol_type = other DNA
ctgatcccggcatcgatgatgccgttgccattgccgccgcgatttttgctcccgaactcgacctgcaactgatga

SEQ ID NO: 542851 - DNA, 75 bp, synthetic construct
  source 1..75: mol_type = other DNA
ccaccgtcgcgggtaatgtctcggttgagaaaaccacccgcaacgccctgcaactgctgcatttctggaatgcgg

SEQ ID NO: 542852 - DNA, 75 bp, synthetic construct
  source 1..75: mol_type = other DNA
tgccaaagcacgcaagctggaacagcaacaggctaatgcagagccagaagaacagattgatccgcgcaaagcggc

SEQ ID NO: 542853 - DNA, 75 bp, synthetic construct
  source 1..75: mol_type = other DNA
agggcgaatttacctcaggcacgacggtggttgatatcgacggttgcctgggcaaaccagccaatgtacaggtgg

SEQ ID NO: 542854 - DNA, 75 bp, synthetic construct
  source 1..75: mol_type = other DNA
cgcagtgcccggaatgcaaaccgcatattcgtcgtctggtgatcatgggcggttctgccggtcgtggcaatttca

SEQ ID NO: 542855 - DNA, 75 bp, synthetic construct
  source 1..75: mol_type = other DNA
atgcaaagtggtctgcgtatgcacgatctctgcgctatcgcctggctggtgcgtccggatttgttcaccctcaaa

SEQ ID NO: 542856 - DNA, 75 bp, synthetic construct
  source 1..75: mol_type = other DNA
aatcgacgccgcccgcaaaaaataccagccatggtggcagtttggggaaggctattccaccgaaaacgaagaatg

SEQ ID NO: 542857 - DNA, 75 bp, synthetic construct
  source 1..75: mol_type = other DNA
cttcagtgatagcgggctggaggggcgcagggctggtcttgagcagatgaaaaacagcatccgtaacgcggtgac

SEQ ID NO: 542858 - DNA, 75 bp, synthetic construct
  source 1..75: mol_type = other DNA
ccgttccgacgaagatacgtcgaaaacaacggatactgcagcaacgcctgcacgcgtctctactacgctgggtaa

SEQ ID NO: 542859 - DNA, 75 bp, synthetic construct
  source 1..75: mol_type = other DNA
gattacccttacaagatctggtgttcggtgcatccatctactttcctccgtttttcaaagcgttcgcgcttggat

SEQ ID NO: 542860 - DNA, 75 bp, synthetic construct
  source 1..75: mol_type = other DNA
atccacgcaaagccgccgtcgaagcggctattgcccgtgccaaagcacgcaagctggaacagcaacaggctaatg

SEQ ID NO: 542861 - DNA, 75 bp, synthetic construct
  source 1..75: mol_type = other DNA
gaactccattacctcgcccaatttgttcggggtatggggaatcattctggcctatcaacacggtctgccctggct

SEQ ID NO: 542862 - DNA, 75 bp, synthetic construct
  source 1..75: mol_type = other DNA
aacggtaattgtagtaatgaaagctatcagagccgctggaattaaagagaagaatttcgatgaagcaaatataca

SEQ ID NO: 542863 - DNA, 75 bp, synthetic construct
  source 1..75: mol_type = other DNA
tgggtgagcgtgaaatcgcccgtactatgctggaactgcttgaaacgccaccggcgggggagggggggacggggg

SEQ ID NO: 542864 - DNA, 75 bp, synthetic construct
  source 1..75: mol_type = other DNA
accgccagtaccgtggtgttactgcgcgcacttgaagaacggcaattaattgacagtcagcgtgggcaaatcgcc

SEQ ID NO: 542865 - DNA, 75 bp, synthetic construct
  source 1..75: mol_type = other DNA
cagagaatatgttctatcccctgtccctgcggccggtttatgaggcagcagggcgctggccggaagacggtattg

SEQ ID NO: 542866 - DNA, 75 bp, synthetic construct
  source 1..75: mol_type = other DNA
tgttctttgtctccgtcggcatgttgtttgatccgttaattcttattcagcaaccgctggccgtgctggcaacac

SEQ ID NO: 542867 - DNA, 75 bp, synthetic construct
  source 1..75: mol_type = other DNA
tggcgttaggcattgcttttggtgcggtagaactgtttgacgtctcctttgcgctcggtgcattcttcgctggga

SEQ ID NO: 542868 - DNA, 75 bp, synthetic construct
  source 1..75: mol_type = other DNA
agacagtcagcgcgggcaaatcgccatcggctggttgattgtggaagatttggtgatggttctgacgctggtgtt

SEQ ID NO: 542869 - DNA, 75 bp, synthetic construct
  source 1..75: mol_type = other DNA
atgcgtggagaattttatcagcaattaactaacgatctggaaaccgcaaaggcggaagggttgtttaaagaagag

SEQ ID NO: 542870 - DNA, 75 bp, synthetic construct
  source 1..75: mol_type = other DNA
taatgaagaaaataaagaattcagtttttcttcagaagagcaaggcactgttgacggcgttgcataccatttaag

SEQ ID NO: 542871 - DNA, 75 bp, synthetic construct
  source 1..75: mol_type = other DNA
agtgagtatttaattaaaaaaacaattaccaccattgatggttttaccattttgtcggaggatatgttattcacc

SEQ ID NO: 542872 - DNA, 75 bp, synthetic construct
  source 1..75: mol_type = other DNA
gggcgctggccggaagacggtattgtggtggattatgtggtgtataaagtctttgcagcggatgctgcaccggca

SEQ ID NO: 542873 - DNA, 75 bp, synthetic construct
  source 1..75: mol_type = other DNA
cgcctgtgggccaacgcgcgtcagttccgtgagcagatgtcagccgcaggttttaccctggcaggtgctgaccac

SEQ ID NO: 542874 - DNA, 75 bp, synthetic construct
  source 1..75: mol_type = other DNA
cttcctgttttgatgccaacggcggtctgtttgaaacgctgctgggcgcagaagacgccattatctccgatgctc

SEQ ID NO: 542875 - DNA, 75 bp, synthetic construct
  source 1..75: mol_type = other DNA
agaaattactcgcctctgatattccgttagtggtgattgaaacatcacgaacccgcgtcgatgaactgcgtgagc

SEQ ID NO: 542876 - DNA, 75 bp, synthetic construct
  source 1..75: mol_type = other DNA
atacggcgtggagtcgctgcataaaaccttcgccctggcgcaaaaatacgaccgtctcatcgatgttcactgtga

SEQ ID NO: 542877 - DNA, 75 bp, synthetic construct
  source 1..75: mol_type = other DNA
atggcgtcctgggcaacccgtacgcctgctatccgcgatattctttctgtttcgatcgctgaaatgggcggagtc

SEQ ID NO: 542878 - DNA, 75 bp, synthetic construct
  source 1..75: mol_type = other DNA
tgcacggtttttatagcctgggcacgctggcaggcgctggtgtcgggatggcactgacggcctttggcgttccgg

SEQ ID NO: 542879 - DNA, 75 bp, synthetic construct
  source 1..75: mol_type = other DNA
tggggcatgaggatgggaaggacaaaacggtaattgcagtgatgaaagccatccgcgctgctggagtcaaagtga

SEQ ID NO: 542880 - DNA, 75 bp, synthetic construct
  source 1..75: mol_type = other DNA
tggcaggcatcgcgagcagctattgaactggatatcgactggccagaatcgaatgacgacttttggagagatggt

SEQ ID NO: 542881 - DNA, 75 bp, synthetic construct
  source 1..75: mol_type = other DNA
ggaagttgcgccgtggattgatctgcaaatcgtcgccttcccgcaggaagggattttgtcgtatcccaacggtga

SEQ ID NO: 542882 - DNA, 75 bp, synthetic construct
  source 1..75: mol_type = other DNA
tttatccgggctgtagacggaaaaaatgtggaaatggcacgctttgacctctccggcggtgtagcctttaatggt

SEQ ID NO: 542883 - DNA, 75 bp, synthetic construct
  source 1..75: mol_type = other DNA
tgacgatgaagtggcgtatatcaccgaacgtggtgcgaatcaggtagtgatgggtgagcgtgaaattgcccgtac

SEQ ID NO: 542884 - DNA, 75 bp, synthetic construct
  source 1..75: mol_type = other DNA
gcggcattcgcgccgtattaggtaacgcagcgaacgaagagatcatgcacctggcgcatctggaatgcgcgaaat

SEQ ID NO: 542885 - DNA, 75 bp, synthetic construct
  source 1..75: mol_type = other DNA
gcagttgcggcaggcacagcaggcgcaggaaagagaacaggttgctcttgcagaagcggagaacagttttgtggt

SEQ ID NO: 542886 - DNA, 75 bp, synthetic construct
  source 1..75: mol_type = other DNA
aaggaatcggatttatggagaagtaagccacagtaaggtaaaacaacaccttcgtcggctttggattgtctataa

SEQ ID NO: 542887 - DNA, 75 bp, synthetic construct
  source 1..75: mol_type = other DNA
tattcttatcgggcttgttgccacgtctatgttatgtttattacaaacaggcagacgattgttcaatattatcaa

SEQ ID NO: 542888 - DNA, 75 bp, synthetic construct
  source 1..75: mol_type = other DNA
ggtggcaggtttatcccatgcagcaacaactcacccaggtcagtgataccgcgcagggtgcggcaacagtctgga

SEQ ID NO: 542889 - DNA, 75 bp, synthetic construct
  source 1..75: mol_type = other DNA
ttctgcaatcctggaaagtgcatcaaaagttgcagcagaatcgaacatggtcacgatagctgcgcaagttcttct

SEQ ID NO: 542890 - DNA, 75 bp, synthetic construct
  source 1..75: mol_type = other DNA
catatgttgaccgatactgccgccctgcttttcgccctactcgccgtgcaattttcacgtcgtcctcccaccatt

SEQ ID NO: 542891 - DNA, 75 bp, synthetic construct
  source 1..75: mol_type = other DNA
tgtgaatgccatcgccctggtggtgattactattttgattgtctgggaggcgatagaacgcttccgcacgccgcg

SEQ ID NO: 542892 - DNA, 75 bp, synthetic construct
  source 1..75: mol_type = other DNA
agaaggaaaaataagacgtacacctcttcgtcgtggtgcccgtactttatgggaggtagcaagggaggtggaaaa

SEQ ID NO: 542893 - DNA, 75 bp, synthetic construct
  source 1..75: mol_type = other DNA
tggactggctgatcgccgagcgtcccggcaaggtaaaaaccttgaagcagcatccgcgcaagaacaaaacggcca

SEQ ID NO: 542894 - DNA, 75 bp, synthetic construct
  source 1..75: mol_type = other DNA
gaaaacatatggcaaatgttagataatttatggaaaagtgcaagagtattaggaaaaactctacatgacatggat

SEQ ID NO: 542895 - DNA, 75 bp, synthetic construct
  source 1..75: mol_type = other DNA
catatgctgaccgatactgccgccctgcttttcgccctacttgccgttcaattttcccgtcgtccccccaccatt

SEQ ID NO: 542896 - DNA, 75 bp, synthetic construct
  source 1..75: mol_type = other DNA
aaatatatttgcgggaatattaaccattctcctgtcctcattatcattaagaattgtaataagctatttaaattc

SEQ ID NO: 542897 - DNA, 75 bp, synthetic construct
  source 1..75: mol_type = other DNA
acactttatggcacaacgccaaggtattaggcaaaacattacatgatttagatgattcagaatttatcaaagatg

SEQ ID NO: 542898 - DNA, 75 bp, synthetic construct
  source 1..75: mol_type = other DNA
acgccaccattcagatggaatatcaaccttgtcatgggccagactgccacctgaatagaggggtgtctggccatt

SEQ ID NO: 542899 - DNA, 75 bp, synthetic construct
  source 1..75: mol_type = other DNA
gccgtggctgggctgctggcaaatatactttctttctggttacttcatcacggcagcgaagagaaaaacctcaac

SEQ ID NO: 542900 - DNA, 75 bp, synthetic construct
  source 1..75: mol_type = other DNA
gatcactatcagattgagcacgccaccattcagatggaatatcaaccttgtcatgggccagactgccacctgaat

SEQ ID NO: 542901 - DNA, 75 bp, synthetic construct
  source 1..75: mol_type = other DNA
tccccgatttagcagcaatattttacgcgtacaaaaccaggctattcttaaacaatatattgagcggacgttaaa

SEQ ID NO: 542902 - DNA, 75 bp, synthetic construct
  source 1..75: mol_type = other DNA
gataattttgatgtcgaagagttatttgttaaacaaaatagttaccccaaagtgatcaatgtcatgaaaataagc

SEQ ID NO: 542903 - DNA, 75 bp, synthetic construct
  source 1..75: mol_type = other DNA
atatgcatcgtcgtgaagaggtcaacatcaaccatagtcatcatgttgatcgtgatgatatcaatctggggagta

SEQ ID NO: 542904 - DNA, 75 bp, synthetic construct
  source 1..75: mol_type = other DNA
caggaactggcgcagcagtcagcggaacagggacaggacatgctgccggccggcatgaacgaggacggcgtcatc

SEQ ID NO: 542905 - DNA, 75 bp, synthetic construct
  source 1..75: mol_type = other DNA
ttgacgatttacgcgcatttccagaatcgtctcgacaggatgcaacaagggttaaacccatacgactggaaacct

SEQ ID NO: 542906 - DNA, 75 bp, synthetic construct
  source 1..75: mol_type = other DNA
agagcgacggctatccgatcaaccagtcacacatcagccgaatggaacaggcgctggagtacctgctaccctgca

SEQ ID NO: 542907 - DNA, 75 bp, synthetic construct
  source 1..75: mol_type = other DNA
tgaacgcctggatcattgaaggaaaggcattattgcgcaaaaagttgtcaaccctggtgttatcacggttgtttt

SEQ ID NO: 542908 - DNA, 75 bp, synthetic construct
  source 1..75: mol_type = other DNA
ttgagcaggcctggttaagccaacaggacgacgtacaggccatcgcccgtaagctggcatcggcaaactgctctg

SEQ ID NO: 542909 - DNA, 75 bp, synthetic construct
  source 1..75: mol_type = other DNA
gacagagcaaaaacattttttattgattgtaatccaagttttgccagctacacagaattgggagtagtcgcggca

SEQ ID NO: 542910 - DNA, 75 bp, synthetic construct
  source 1..75: mol_type = other DNA
tttcgcccaggtacaatggaaaaactggggttttcatgggaaacgctacaagaaatcaacccgcgcctcatctat

SEQ ID NO: 542911 - DNA, 75 bp, synthetic construct
  source 1..75: mol_type = other DNA
tggaaagagtgcctgacgctgccggacttcgacaacatctccaacacccttatcccgatgggtaccaaagaagac

SEQ ID NO: 542912 - DNA, 75 bp, synthetic construct
  source 1..75: mol_type = other DNA
tatggcctccgatattaaaattggcgatctgcctattcttaaaaactccgaaatccagaacttctgcctccacgg

SEQ ID NO: 542913 - DNA, 75 bp, synthetic construct
  source 1..75: mol_type = other DNA
cgcagggcggtcagatcgccaatatgcgctttcgcatgtttggtcagattgccaatattattttctacgtgctgt

SEQ ID NO: 542914 - DNA, 75 bp, synthetic construct
  source 1..75: mol_type = other DNA
gcacaattgctgaattatttgtatggggtggtgtctttgtcttaatgattatcacagcattcgtatctatgattg

SEQ ID NO: 542915 - DNA, 75 bp, synthetic construct
  source 1..75: mol_type = other DNA
aatatgactctcggttggatcgtctggcagcaacgagctggtatccatttctcaaaaatctcacagcaagaggtg

SEQ ID NO: 542916 - DNA, 75 bp, synthetic construct
  source 1..75: mol_type = other DNA
gacatttcaggtcggggaccttgaaaacttcaatatcactcactgggcagtaatgccaaaagcgccggaggctgg

SEQ ID NO: 542917 - DNA, 75 bp, synthetic construct
  source 1..75: mol_type = other DNA
ccagtgtcagctgaactgccgccagcgaatgaaagtgttctgttatttgatgctaatggagaaggctggctgatt

SEQ ID NO: 542918 - DNA, 75 bp, synthetic construct
  source 1..75: mol_type = other DNA
ctggcgttatggaatatgaggaaaaggatattcccgtgccagcaaataacgaagtgctattaaaaattaaagccg

SEQ ID NO: 542919 - DNA, 75 bp, synthetic construct
  source 1..75: mol_type = other DNA
cgcttttgccggcagacagcctttttttagctacccacgtgtattaggtcatgaaatatgcgccgaagcggtttc

SEQ ID NO: 542920 - DNA, 75 bp, synthetic construct
  source 1..75: mol_type = other DNA
agacgatattgagcgccgtgcttatgaaatcgcactcctatctctggaagtagaaccagatgaacgcgaagctta

SEQ ID NO: 542921 - DNA, 75 bp, synthetic construct
  source 1..75: mol_type = other DNA
gggcaacgcattccttacattatcagtattgctggcagtgtcgcggtggggaaaagtacaaccgcccgtgtattg

SEQ ID NO: 542922 - DNA, 75 bp, synthetic construct
  source 1..75: mol_type = other DNA
cctggttgattaaattctgggcgcctatccctgcggtcatcgcggcgggaattctctccacttactattttggta

SEQ ID NO: 542923 - DNA, 75 bp, synthetic construct
  source 1..75: mol_type = other DNA
gctgcgctgatgttgattatcggctgggaaaaacgcttcttccgccgtgcggcaccgcagactgctaaggagatc

SEQ ID NO: 542924 - DNA, 75 bp, synthetic construct
  source 1..75: mol_type = other DNA
tgcgcctgcgcggtaagcataaagcggaatacactccgcacgtagatactggtgattacatcatcgttctgaacg

SEQ ID NO: 542925 - DNA, 75 bp, synthetic construct
  source 1..75: mol_type = other DNA
ccccacaccggccacatcggtggtatcaaacaagcgacctttgaagagatgattgctcgccgtcctgagcgtgtg

SEQ ID NO: 542926 - DNA, 75 bp, synthetic construct
  source 1..75: mol_type = other DNA
cggagaatggcagtggacatttcaggtcggggaccttgaaaacgtcaatatcactcactgggcagtaatgccaaa

SEQ ID NO: 542927 - DNA, 75 bp, synthetic construct
  source 1..75: mol_type = other DNA
ggttgaatgtttcgccattggtgcacatgccgttcgtcgggcagagatcaaggctgaacaaaacgtactggtgat

SEQ ID NO: 542928 - DNA, 75 bp, synthetic construct
  source 1..75: mol_type = other DNA
accagccaccgacgctttcctggctgaagtacgggcgcagggcgtggagatgtttgcggagtgtgcatacacact

SEQ ID NO: 542929 - DNA, 75 bp, synthetic construct
  source 1..75: mol_type = other DNA
gcgactgccgactatgaagtgaccagaacgctggcagaagctgagcgtcagggccgcatcatgcgtggtgaaggc

SEQ ID NO: 542930 - DNA, 75 bp, synthetic construct
  source 1..75: mol_type = other DNA
gcggcagcggcgaaaccatctgggatatcaaaaagcatatcggttacgtcagcagtagtttgcatctggattacc

SEQ ID NO: 542931 - DNA, 75 bp, synthetic construct
  source 1..75: mol_type = other DNA
gcggaagacttcgggttcaatcatgcaatagaacggatgaggagacagatacctgaaacgccaaccactgatgct

SEQ ID NO: 542932 - DNA, 75 bp, synthetic construct
  source 1..75: mol_type = other DNA
tgacaatatggatgacgtatctctcgcggaagacttcgggttcaatcatgcaatagaacggatgaggagacagat

SEQ ID NO: 542933 - DNA, 75 bp, synthetic construct
  source 1..75: mol_type = other DNA
tgtttgcggagtgtgcatacacacttgaacatcatgatcacgcagtagcttttgccgccgagctacgtaaaggag

SEQ ID NO: 542934 - DNA, 75 bp, synthetic construct
  source 1..75: mol_type = other DNA
actggaaaacaaaataataccagtgtcagctgaactgccaccagcaaatgaaagtgttctgttatttgatgctaa

SEQ ID NO: 542935 - DNA, 75 bp, synthetic construct
  source 1..75: mol_type = other DNA
aaaccggagaatggcagtggacatttcaggtcggggaccttgaaaacgtcaatatcactcactgggcagtaatgc

SEQ ID NO: 542936 - DNA, 75 bp, synthetic construct
  source 1..75: mol_type = other DNA
ccagtgtcagctgaactgccaccagcaaatgaaagtgttctgttacttgatgctaacggagaaggctggctgatt

SEQ ID NO: 542937 - DNA, 75 bp, synthetic construct
  source 1..75: mol_type = other DNA
gcgcttatcgcgcaactggcgcacagcgagcaacttgatggtgtgcaactgccggaatcggatgagccatcagcg

SEQ ID NO: 542938 - DNA, 75 bp, synthetic construct
  source 1..75: mol_type = other DNA
ttttgttgatgtgctgattagcgaaggtgaaacgcaattgttgtttgtttcgcaccacgctgaagatgcgcctgc

SEQ ID NO: 542939 - DNA, 75 bp, synthetic construct
  source 1..75: mol_type = other DNA
cgcaccatgctgaagatgcacccgcttgtattacccatcgactggagttcgtgccggacgctggactctaccgct

SEQ ID NO: 542940 - DNA, 75 bp, synthetic construct
  source 1..75: mol_type = other DNA
attctaccagttctgtagctctgggccatggctcacaggtgtcgggagaaaataacgtggtatctgttggtgccg

SEQ ID NO: 542941 - DNA, 75 bp, synthetic construct
  source 1..75: mol_type = other DNA
caagatgccgcagagatgtttgtgtttctcgccgtcgagctttcgttgctgtttatagtgattagtgccggtgtc

SEQ ID NO: 542942 - DNA, 75 bp, synthetic construct
  source 1..75: mol_type = other DNA
taacggtaatattacagctgccagggcttctgcgcaggaatacacggatgcggtgaagtcggatgttctggacga

SEQ ID NO: 542943 - DNA, 75 bp, synthetic construct
  source 1..75: mol_type = other DNA
tgacacaagctatcgctgattatctttcaacttctgaacgctacgatctcgatgggatactgttcagttcagcac

SEQ ID NO: 542944 - DNA, 75 bp, synthetic construct
  source 1..75: mol_type = other DNA
atgtatctgcatcttgtgccccgtattcttcaccatatgaaaaacaagtgtactctcgtgtcagtttctgtacct

SEQ ID NO: 542945 - DNA, 75 bp, synthetic construct
  source 1..75: mol_type = other DNA
tgaaggcagagggagacagtctgcgtggtgagataggcggtgtatacagagatgcccgtgctcatactgacagtc

SEQ ID NO: 542946 - DNA, 75 bp, synthetic construct
  source 1..75: mol_type = other DNA
ctcgcgggcgcacagccacaaacgcgcggggagatctggttcaatggcgaaacgctgccggtggacgactccccg

SEQ ID NO: 542947 - DNA, 75 bp, synthetic construct
  source 1..75: mol_type = other DNA
tcgaatataaggaagatgttatctataaaaactctgatggcagcacgcgcagaggggtaagtctggatatacgtt

SEQ ID NO: 542948 - DNA, 75 bp, synthetic construct
  source 1..75: mol_type = other DNA
gcaagaaggctcaaaagggaaatttgattatcgcaaccaccagtgagaatgatgaggatgtatgtaaagctgttg

SEQ ID NO: 542949 - DNA, 75 bp, synthetic construct
  source 1..75: mol_type = other DNA
atgcttaaaagacgtgatgcttttttaaagaaaagcgcgctggcagtgagtgtggccctgctgctctcatctcag

SEQ ID NO: 542950 - DNA, 75 bp, synthetic construct
  source 1..75: mol_type = other DNA
aacctgtccgtttgtcggtgaaggggttaagccgggaaaaaccgccgctggatccacatggcatcgccctgcatg

SEQ ID NO: 542951 - DNA, 75 bp, synthetic construct
  source 1..75: mol_type = other DNA
aaggccgggtcaccggcgagatccacggcgatgatgccaacgaagagcggctgatgacgatgatggccatcaacc

SEQ ID NO: 542952 - DNA, 75 bp, synthetic construct
  source 1..75: mol_type = other DNA
ttcagtcagaggatgcacttgaaatcgcattacgtatgcccgagtcgagtttcggtcctcctcctcctgaactga

SEQ ID NO: 542953 - DNA, 75 bp, synthetic construct
  source 1..75: mol_type = other DNA
tgaactgaccccaccggataccagcacagggcgcgacgttatcgaactggttaaacgtggtgatatatccggcat

SEQ ID NO: 542954 - DNA, 75 bp, synthetic construct
  source 1..75: mol_type = other DNA
gtaatgacgttcgcggcctgtatgagcatgaccacagcatgttactggggcgcacccgttccggcacgctgaaac

SEQ ID NO: 542955 - DNA, 75 bp, synthetic construct
  source 1..75: mol_type = other DNA
cgctggaacagtctctctgaaattatctgggacgagttccgcgagcagtttgcgccgggagcgtttaaagacagc

SEQ ID NO: 542956 - DNA, 75 bp, synthetic construct
  source 1..75: mol_type = other DNA
ccgccgccggtaaaggccacttcaccacttcctggccaaacaaagtcctcagcggggatctttctcccgccttca

SEQ ID NO: 542957 - DNA, 75 bp, synthetic construct
  source 1..75: mol_type = other DNA
agtcctcagcggagatctttctcccgccttcatgatcgatcttgcccataaggatcttggcatcgcccttgatgt

SEQ ID NO: 542958 - DNA, 75 bp, synthetic construct
  source 1..75: mol_type = other DNA
ccgaagctgtgcggcatctggtagacaaaggtgcgactcccgccgccaacccggcgcaggccgctaaagatgccg

SEQ ID NO: 542959 - DNA, 75 bp, synthetic construct
  source 1..75: mol_type = other DNA
gctggattatctggacgcactggaactggttgatacctccagtgctccaaatattgaatggcctacgcctccggc

SEQ ID NO: 542960 - DNA, 75 bp, synthetic construct
  source 1..75: mol_type = other DNA
gatattcctcgctcgctttcattgccgccagctacggcgctttggcttaatcaccagagcgccggaagcgattac

SEQ ID NO: 542961 - DNA, 75 bp, synthetic construct
  source 1..75: mol_type = other DNA
ctagcatatcgccagctggaaatgttaaccaggatgcatgagcaacataaaaaatacaggggtgaaaaatatctc

SEQ ID NO: 542962 - DNA, 75 bp, synthetic construct
  source 1..75: mol_type = other DNA
tttacccgccaatgccgggtgtacgctggaggaaacagccagaaaggtgattatgggctttcagcaagaagatgc

SEQ ID NO: 542963 - DNA, 75 bp, synthetic construct
  source 1..75: mol_type = other DNA
atgctgatgttaaaaaaaggaatgatgctggtggggctgatattcttttctttacccgccaatgccgggtgtacg

SEQ ID NO: 542964 - DNA, 75 bp, synthetic construct
  source 1..75: mol_type = other DNA
gtctgtatgagcatgactatacccgactgctggggcgtaccaaatccggctcactggtactgactgaggataaca

SEQ ID NO: 542965 - DNA, 75 bp, synthetic construct
  source 1..75: mol_type = other DNA
tggtggcgagatgaaattttagcaaatagtgcgatcgccggtgtttatgcaaaatctgatgacggaaaatcagcc

SEQ ID NO: 542966 - DNA, 75 bp, synthetic construct
  source 1..75: mol_type = other DNA
ttgggtacgttaactcccggtagaaaggaacattcccccttatccatagtatggaattgcactgacactcctgtc

SEQ ID NO: 542967 - DNA, 75 bp, synthetic construct
  source 1..75: mol_type = other DNA
tgtaccaatcccctgcccggataatccggaaaaatccctcgccatccagtctgaaatcgttcggattctggacac

SEQ ID NO: 542968 - DNA, 75 bp, synthetic construct
  source 1..75: mol_type = other DNA
ctatacaatgtcgttgatggcaatggtctttttacccagtacgtttctgacagggttatttggcgtcaaccttgg

SEQ ID NO: 542969 - DNA, 75 bp, synthetic construct
  source 1..75: mol_type = other DNA
cctggtgccggtgggggaagaccagaaacagcacctggaactgagccgcgatattgcccagcgtttcaatgcgct

SEQ ID NO: 542970 - DNA, 75 bp, synthetic construct
  source 1..75: mol_type = other DNA
cggacatcctgctgtatcaaaccaatctggtgccggtcggcgaagaccagaaacagcacctggaactgagccgcg

SEQ ID NO: 542971 - DNA, 75 bp, synthetic construct
  source 1..75: mol_type = other DNA
aagatgccgcagagatgtttgtttttctggctgttgagctttcattgctgtttattgtcattagtgccggtgtga

SEQ ID NO: 542972 - DNA, 75 bp, synthetic construct
  source 1..75: mol_type = other DNA
ctggacatcatcgaatttgcccatattgctcatttgctatctttggatcctgcagccgtactgaaaatggttttg

SEQ ID NO: 542973 - DNA, 75 bp, synthetic construct
  source 1..75: mol_type = other DNA
ggaccgtatttttgtgggtgaaacacgcggcccggaagctctcgatatgcttgatgcctggaacactggtcatga

SEQ ID NO: 542974 - DNA, 75 bp, synthetic construct
  source 1..75: mol_type = other DNA
ctggatgtgattgaatttgcgcatatggcacggttgctttctcttgatccggccgatgctctgagaatagtcatg

SEQ ID NO: 542975 - DNA, 75 bp, synthetic construct
  source 1..75: mol_type = other DNA
caccgactatttgcaacagtgcccgctacgtgaactggagaactggaaggtttccgtgatagccatgaatggaat

SEQ ID NO: 542976 - DNA, 75 bp, synthetic construct
  source 1..75: mol_type = other DNA
ttgacgcctggaacaccggtcatgagggcggcgcggcctcacttcacgccaataacacactttctgctctcacgc

SEQ ID NO: 542977 - DNA, 75 bp, synthetic construct
  source 1..75: mol_type = other DNA
ttcgtctgatcctgcgtatgcgacctgaccgtattttcgtaggcgagactcgcggtccagaagctctcgatatgc

SEQ ID NO: 542978 - DNA, 75 bp, synthetic construct
  source 1..75: mol_type = other DNA
tctgcagtgactggccagagcatcccggagctggaaaaacagttcgaaggcaaaatgtatggtcatttgaaaggc

SEQ ID NO: 542979 - DNA, 75 bp, synthetic construct
  source 1..75: mol_type = other DNA
tctcctgtttttggtttgttgttttatgagcaggaaaggttaacaggaggtgtttttcgttatgtgttgataagg

SEQ ID NO: 542980 - DNA, 75 bp, synthetic construct
  source 1..75: mol_type = other DNA
ggggaccggaacgggatcaccgttacagccaaaagggctggcagcgtcggtgacgggaatcatccagactgcagc

SEQ ID NO: 542981 - DNA, 75 bp, synthetic construct
  source 1..75: mol_type = other DNA
caaagagcaaaacgctatacccctgaaatgaaagaacaccgtgatggagtacagatcgaagagaatggtattatc

SEQ ID NO: 542982 - DNA, 75 bp, synthetic construct
  source 1..75: mol_type = other DNA
aagaagccattaccgttttcgattttaaaaccaaactggagctgcaaattagcggccttggctgcggctatttac

SEQ ID NO: 542983 - DNA, 75 bp, synthetic construct
  source 1..75: mol_type = other DNA
ctatcaaacttcatgaaggctgggaaaacgagttggtgattggggtagatgatacgtttcctttttccctgcttg

SEQ ID NO: 542984 - DNA, 75 bp, synthetic construct
  source 1..75: mol_type = other DNA
tgatccttgatgccttagaaaaagagggcagttttgccgcggcgtcagccaaactgtataagacgccatctgccc

SEQ ID NO: 542985 - DNA, 75 bp, synthetic construct
  source 1..75: mol_type = other DNA
tattaataggttcatttatttatggctttatcccttcagagtggattgcagctcatgccggagcagataatccct

SEQ ID NO: 542986 - DNA, 75 bp, synthetic construct
  source 1..75: mol_type = other DNA
tccttcttttcgggcaagaaaatggattggctacaaaattactcagagccttaatgttttctcattgcactaaag

SEQ ID NO: 542987 - DNA, 75 bp, synthetic construct
  source 1..75: mol_type = other DNA
cagatattttgctgtatcaaaccaacctggtgccggtcggtgaagatcagaaacagcatctggaactgagccgtg

SEQ ID NO: 542988 - DNA, 75 bp, synthetic construct
  source 1..75: mol_type = other DNA
gatacctatatagttaattcagaagaaattatggcgttggagatacctccactgaaacagtacgataattatctt

SEQ ID NO: 542989 - DNA, 75 bp, synthetic construct
  source 1..75: mol_type = other DNA
ccagcatcgtggttctttctgtgatgttgtctcgatctcgatccgtggttcagtgttaaaaatgactggaaaccc

SEQ ID NO: 542990 - DNA, 75 bp, synthetic construct
  source 1..75: mol_type = other DNA
gtcgtggtgttgttgacactactcgtgctgccaatactacagccatgtatgcaattcaatggtttcacggccata

SEQ ID NO: 542991 - DNA, 75 bp, synthetic construct
  source 1..75: mol_type = other DNA
aaatagcgcagcaactggcactcgagttctaccgtattctgaaaacccaaaataaatcacagctaaggagctagt

SEQ ID NO: 542992 - DNA, 75 bp, synthetic construct
  source 1..75: mol_type = other DNA
aaatagcgcagcaactggcactcgagttctaccgtattctgaaaacccaaaataaatcacagctaagaagctggt

SEQ ID NO: 542993 - DNA, 75 bp, synthetic construct
  source 1..75: mol_type = other DNA
agctggttcactcgagtccacgaaagcggttcagcagaatttcggcgcgtggcggcggggatggaagctgatgct

SEQ ID NO: 542994 - DNA, 75 bp, synthetic construct
  source 1..75: mol_type = other DNA
tcactcgagtccacgaaagcggatcagcagaatttcggcgcgtggcagcggggatggaagctgatgctgcagcta

SEQ ID NO: 542995 - DNA, 75 bp, synthetic construct
  source 1..75: mol_type = other DNA
tcactcgagtccacgaaagcggatcagcagaatttcggagcgtggccgcggggatggaagctgatgctgcagcta

SEQ ID NO: 542996 - DNA, 75 bp, synthetic construct
  source 1..75: mol_type = other DNA
tcactcgagtccacgaaagcggatcagcagaatttcggagcgtggcagcggggatggaagctgatgctgccgcta

SEQ ID NO: 542997 - DNA, 75 bp, synthetic construct
  source 1..75: mol_type = other DNA
aatgttcaaccagaggatgaagcaaaactgaaccactttgccggaaacttcagggtgcatacccgtgatggcatg

SEQ ID NO: 542998 - DNA, 75 bp, synthetic construct
  source 1..75: mol_type = other DNA
ctggctgaaccagtcgctgttgcaggtatctccctgccagtaaaaacactttatgatatcggagccacccttgac

SEQ ID NO: 542999 - DNA, 75 bp, synthetic construct
  source 1..75: mol_type = other DNA
atcagaagctccccgcgcccggacgcaggataactggctgatggatgcggcggtaagaaacggagaatggatgat

SEQ ID NO: 543000 - DNA, 75 bp, synthetic construct
  source 1..75: mol_type = other DNA
ttccttcagtctcccgggtaagccgctggttgatgccctggagaataaccagggatgaagaaaattatgcttccc

SEQ ID NO: 543001 - DNA, 75 bp, synthetic construct
  source 1..75: mol_type = other DNA
gtggcgctgttggtgttgacaccaaacgcagcgctagatcctgtcggcgtcgcagcgggcctggcgggggcggtt

SEQ ID NO: 543002 - DNA, 75 bp, synthetic construct
  source 1..75: mol_type = other DNA
tacattatcatgaagccagttacaacacagatattaccgacacaaatcatactggccggtgataatgaccatccg

SEQ ID NO: 543003 - DNA, 75 bp, synthetic construct
  source 1..75: mol_type = other DNA
tcactcgagtccacgaaagcggatcagcagaatttcggggcgtggcggcggggatggaagctgatgctgcggcta

SEQ ID NO: 543004 - DNA, 75 bp, synthetic construct
  source 1..75: mol_type = other DNA
actcgcttaacgacagtatcgtggtatcggaccgtattcgtgaaaacttccgcaagatccgtcgcggtacgcctt

SEQ ID NO: 543005 - DNA, 75 bp, synthetic construct
  source 1..75: mol_type = other DNA
gaagaaaattatgcgtcccgatttattagtctgatgtgtgaaaaagaaccggagctgaaaatagcgcagcaactg

SEQ ID NO: 543006 - DNA, 75 bp, synthetic construct
  source 1..75: mol_type = other DNA
cactcgagttctaccgtattctgaaaacccaaaataaatcacagctaagtagctggttcactcgagtccacgaaa

SEQ ID NO: 543007 - DNA, 75 bp, synthetic construct
  source 1..75: mol_type = other DNA
aaggctatgtcgaagtgcgtaaaggttcaggtattcatgtggtttccaaccagccgcgccatcagcaggcggctg

SEQ ID NO: 543008 - DNA, 75 bp, synthetic construct
  source 1..75: mol_type = other DNA
cctggaactgctggagatattggcggttctataggatctgagctaggtggaaaagtaacagataaagtatctgag

SEQ ID NO: 543009 - DNA, 75 bp, synthetic construct
  source 1..75: mol_type = other DNA
gcctctaccattaaatccaactcctggaattgctgggaatataggttcttcaattggttcagaaggatcaggagc

SEQ ID NO: 543010 - DNA, 75 bp, synthetic construct
  source 1..75: mol_type = other DNA
agcggtacccgtcccatagatccggagatgattcgtgggacgcaggatgacctagtttcgtcacagactcgtctg

SEQ ID NO: 543011 - DNA, 75 bp, synthetic construct
  source 1..75: mol_type = other DNA
atggcgggaaatggtggccaggggggtacaggcagtgaaaccatcgtcagggatgctgttgccaaatcgcgtaaa

SEQ ID NO: 543012 - DNA, 75 bp, synthetic construct
  source 1..75: mol_type = other DNA
gtaaatcgcctgaaggtgctgatacgccagatgtatggtcgagccggatttgaactactcaaacagagggtaatg

SEQ ID NO: 543013 - DNA, 75 bp, synthetic construct
  source 1..75: mol_type = other DNA
aaaaaaaaaaacagatggaccatctgtggtagaagatgccattatgaccactactgtcacaacagattcaggtga

SEQ ID NO: 543014 - DNA, 75 bp, synthetic construct
  source 1..75: mol_type = other DNA
atgcaaatcctgtggcaaaagaaaatacgctctcttttcgcgggctaccggaagagtttccgctcgcctttgatt

SEQ ID NO: 543015 - DNA, 75 bp, synthetic construct
  source 1..75: mol_type = other DNA
atttctctgggattaactgccgcttcggtagctttcccgccactaattattgccactggccccattgcggctatt

SEQ ID NO: 543016 - DNA, 75 bp, synthetic construct
  source 1..75: mol_type = other DNA
cgaccgcagatcattatcggtcagattgttctatctgcgtgaacagccaggtgtaagcgtacagcgagggccgta

SEQ ID NO: 543017 - DNA, 75 bp, synthetic construct
  source 1..75: mol_type = other DNA
tcaatggcgtactcggtggttcctgggatgccctgactcaggggcgagcggatattatcgttggcgcgatgcatg

SEQ ID NO: 543018 - DNA, 75 bp, synthetic construct
  source 1..75: mol_type = other DNA
acaacaaaacctgacgatcagtgccgatattctcaatgtactggatagcaaaaccgctgttgatacaacgaacac

SEQ ID NO: 543019 - DNA, 75 bp, synthetic construct
  source 1..75: mol_type = other DNA
ctggcaataggtttgcagcaaaagatcggtaataacgttattgcgcgggcaaactatgtttaccgtgaggcgcat

SEQ ID NO: 543020 - DNA, 75 bp, synthetic construct
  source 1..75: mol_type = other DNA
cttcatcacatattcgtctgcaacggcaaacgacacaggttaaacatcagctcgccagtgtacttgaaattctgc

SEQ ID NO: 543021 - DNA, 75 bp, synthetic construct
  source 1..75: mol_type = other DNA
ttattcaggaaaccagtcagcgatttaatactttagtacaggcaggtgctaaaaacgaaattgcttataacttct

SEQ ID NO: 543022 - DNA, 75 bp, synthetic construct
  source 1..75: mol_type = other DNA
accgcaaagcaattgttagtaaaggtataccacccgctctattaaataggctcaccaattcggatgttcaggtga

SEQ ID NO: 543023 - DNA, 75 bp, synthetic construct
  source 1..75: mol_type = other DNA
gtacatatggtgatatttcagggcgttgcacccgtggaggccttggacatatttcgcagtctgttgataattata

SEQ ID NO: 543024 - DNA, 75 bp, synthetic construct
  source 1..75: mol_type = other DNA
gttattgatcatttgatcaagtttcctgatttttatgactcggagatattcagggaggcagataaagaggaagat

SEQ ID NO: 543025 - DNA, 75 bp, synthetic construct
  source 1..75: mol_type = other DNA
gagttctggtttgtgtgccggttggcgctacccaggttgagcgccgtgctattcgtgaatccgcgcagggcgcag

SEQ ID NO: 543026 - DNA, 75 bp, synthetic construct
  source 1..75: mol_type = other DNA
atgacggtattgttgcaggtcgggcgcagtataaaaacgttatcgatacagcattaagtaaatttacctggtttg

SEQ ID NO: 543027 - DNA, 75 bp, synthetic construct
  source 1..75: mol_type = other DNA
ctatggtctggcatgggatatggatacgcaactcgcatgggccaaactgcgtaccaccgttggttgggatcatat

SEQ ID NO: 543028 - DNA, 75 bp, synthetic construct
  source 1..75: mol_type = other DNA
catcatccctacttcggtgcagaatacatctattctgatgcgtcgactgaacgccataaccagtccgaatcttat

SEQ ID NO: 543029 - DNA, 75 bp, synthetic construct
  source 1..75: mol_type = other DNA
ttataaagaacatctggatgtttatttaggtgataaaatactaaatcttgttgatattgtaatagaatacgccac

SEQ ID NO: 543030 - DNA, 75 bp, synthetic construct
  source 1..75: mol_type = other DNA
atttattatcctcgcgatgacagggaagatagtcctgaagggattgtcaaggaaattaaagaatggcgagctgct

SEQ ID NO: 543031 - DNA, 75 bp, synthetic construct
  source 1..75: mol_type = other DNA
atctggggaaaacgccgttaggccgttatctgtttacttcatcgacattgactcgggactttattgagataggcc

SEQ ID NO: 543032 - DNA, 75 bp, synthetic construct
  source 1..75: mol_type = other DNA
gtgatgccggattgtgggggcgccgttcccgcctgcgattaagcggtaagccgctattgctgactgaactgtttt

SEQ ID NO: 543033 - DNA, 75 bp, synthetic construct
  source 1..75: mol_type = other DNA
ttggtggaaaatgccattatgaccaccactttcacaacgaactcagggcataaattcccgcccttccacccgtgg

SEQ ID NO: 543034 - DNA, 75 bp, synthetic construct
  source 1..75: mol_type = other DNA
aggactctcattacgatagacttcttgatgctttttttaaaaaacataatgaaaatattcataataaaatacaaa

SEQ ID NO: 543035 - DNA, 75 bp, synthetic construct
  source 1..75: mol_type = other DNA
gtcggtctgggcaacgtgatcggctcaacgattctggcgtattactgggatgatttcgctccggcgctggccacc

SEQ ID NO: 543036 - DNA, 75 bp, synthetic construct
  source 1..75: mol_type = other DNA
ataattccttaatgacaagaacttatagtctgattgaaatgctacagtatcagggaaacaaatatattaccaacg

SEQ ID NO: 543037 - DNA, 75 bp, synthetic construct
  source 1..75: mol_type = other DNA
tcatggcctgagttttatcgtcatcatgcacagcgatggttcgaaatggctaaaggatatggaagccagaatatt

SEQ ID NO: 543038 - DNA, 75 bp, synthetic construct
  source 1..75: mol_type = other DNA
ttatagtgataaaactgaacgtaatacttttataaatcaattgttttcatttgctgttatggaaagggagttacg

SEQ ID NO: 543039 - DNA, 75 bp, synthetic construct
  source 1..75: mol_type = other DNA
cgggagaatatgacaccataattctgggctacggtcaccagtatcaggccaatacggaaatagaatatctgtcta

SEQ ID NO: 543040 - DNA, 75 bp, synthetic construct
  source 1..75: mol_type = other DNA
tccggatctgggggactggcaaattcgtgagaaggtggggtatgccaacagtatcagtccctactcttctctggc

SEQ ID NO: 543041 - DNA, 75 bp, synthetic construct
  source 1..75: mol_type = other DNA
agctacatcttattctgagacaatggctgcccgggtacagattgcgtttgattccatttctctgggattaactgc

SEQ ID NO: 543042 - DNA, 75 bp, synthetic construct
  source 1..75: mol_type = other DNA
aggggctgccggacggctcctttacccgcgaacaggctgaagccgttgccgcacagtaccggaatgtctttatcg

SEQ ID NO: 543043 - DNA, 75 bp, synthetic construct
  source 1..75: mol_type = other DNA
atggtctggcgtacctggaattttgaggacggtgccgggtactggatgaaccatgtcatcagggatttcggcatt

SEQ ID NO: 543044 - DNA, 75 bp, synthetic construct
  source 1..75: mol_type = other DNA
cactggaactgtttgccaccgacaaagccccggcacgcctgacccggctgcgggaaaaactgcgttatcttgccg

SEQ ID NO: 543045 - DNA, 75 bp, synthetic construct
  source 1..75: mol_type = other DNA
acgctggcttaaagaagcactgttgaatggaatgaagaaagaagattttcttgtgaaggacactgaagaagaaat

SEQ ID NO: 543046 - DNA, 75 bp, synthetic construct
  source 1..75: mol_type = other DNA
ccgcgaacaggctgaagccgttgccgcacagtaccggaatgtctttatcgaggaggatcagggaacgcattttcg

SEQ ID NO: 543047 - DNA, 75 bp, synthetic construct
  source 1..75: mol_type = other DNA
atggtctggcgtacctggaaatttgaggatggtgccgggtactggatgaaccatgccatccgtgatttcggcatt

SEQ ID NO: 543048 - DNA, 75 bp, synthetic construct
  source 1..75: mol_type = other DNA
aaaggcgaaacgccatccgcagtgacccgattaagtgtggttgccaaaagtgaaccgcaagatgagcagagtcgc

SEQ ID NO: 543049 - DNA, 75 bp, synthetic construct
  source 1..75: mol_type = other DNA
gccgctatccgcggctggtgcgcgacctggcgggtaaactcggcaaacaagtagaactcacgcttataggcagct

SEQ ID NO: 543050 - DNA, 75 bp, synthetic construct
  source 1..75: mol_type = other DNA
cgtacctggaattttgaggatggtgccgggtactggatgaatcatgccatcagggatttcgggatccttaagtaa

SEQ ID NO: 543051 - DNA, 75 bp, synthetic construct
  source 1..75: mol_type = other DNA
ctagggcgcactattggtttcccgacggcgaatgtgccgctgcgtcgtcaggtttccccggttaaaggggtttat

SEQ ID NO: 543052 - DNA, 75 bp, synthetic construct
  source 1..75: mol_type = other DNA
ctgcgcgccatcgcgcctgtactgaacggtattcccaaccgtattagcctttcaggtcataccgatgattttccc

SEQ ID NO: 543053 - DNA, 75 bp, synthetic construct
  source 1..75: mol_type = other DNA
gaacgggaaaaaccgccgcgcggcagcgaatccaccagtatccgtgtggctgtagagaaggttgatcaactgatt

SEQ ID NO: 543054 - DNA, 75 bp, synthetic construct
  source 1..75: mol_type = other DNA
tcaaaagcagattacttattacaatataaccctacaagagctgggatatactaatgtgcctgatgatggccttgc

SEQ ID NO: 543055 - DNA, 75 bp, synthetic construct
  source 1..75: mol_type = other DNA
atgaccacctttacccaaaaagaactgattaaagaaatgaaagatcgcatcagcagcctcgacgtacgagacgat

SEQ ID NO: 543056 - DNA, 75 bp, synthetic construct
  source 1..75: mol_type = other DNA
atgaccacctttacccaaaaagaactgattaaagaaatcaaagaccgcatcagcagcctcgacgttcgagacgat

SEQ ID NO: 543057 - DNA, 75 bp, synthetic construct
  source 1..75: mol_type = other DNA
atgaccacctttacccaaaaagaactgattaaagaaataaaagatcgcatcagcagcctcgacgtgcgagacgat

SEQ ID NO: 543058 - DNA, 75 bp, synthetic construct
  source 1..75: mol_type = other DNA
caccgctaacacaaaaaccagatcaggcacggcgtcgtttccgcctcgggatgctggtcttttttggcatgttgg

SEQ ID NO: 543059 - DNA, 75 bp, synthetic construct
  source 1..75: mol_type = other DNA
gtacagttaggtgtggagccgaaaatcatgtgggcaggcccgaatgccgtgatcggcgggttgctgtttggtttt

SEQ ID NO: 543060 - DNA, 75 bp, synthetic construct
  source 1..75: mol_type = other DNA
atgaccacctttacccaaaaagaactgattaaagaaatgaaagagcgcatcagcagcctcgacgttcgagacgat

SEQ ID NO: 543061 - DNA, 75 bp, synthetic construct
  source 1..75: mol_type = other DNA
ttgtcggcctgtttaaaggtgagttgcagttctccgatccggaattccataaaaaagaaacgacgatgatgggca

SEQ ID NO: 543062 - DNA, 75 bp, synthetic construct
  source 1..75: mol_type = other DNA
atttaagcgacaacgcgggagcactggtggagtgttttgccattggagcccatgcggtgcgtcgtgcagatattg

SEQ ID NO: 543063 - DNA, 75 bp, synthetic construct
  source 1..75: mol_type = other DNA
ttagactggctttattatattagtgggttacgtgatgcatatctagcatggacaactcctgatattctacctttc

SEQ ID NO: 543064 - DNA, 75 bp, synthetic construct
  source 1..75: mol_type = other DNA
atgaccacctttacccaaaaagaactgattaaagaaataaaagaacgcatcagcagcctcgacgttcgagacgat

SEQ ID NO: 543065 - DNA, 75 bp, synthetic construct
  source 1..75: mol_type = other DNA
ggaaatcaccgagataaacacagggcaaaaaccatctgagatacttgataaagcagcaacatttgattatatcaa

SEQ ID NO: 543066 - DNA, 75 bp, synthetic construct
  source 1..75: mol_type = other DNA
aatattcggacgagcagacgttactattaatagcgaaaatgtcgttaatattcacggtggaaaattaattaacgc

SEQ ID NO: 543067 - DNA, 75 bp, synthetic construct
  source 1..75: mol_type = other DNA
aggatgaccacggcgaacagtttcgcctggttgtccgtaataacggaacaatggtctggcgtacctggaattttg

SEQ ID NO: 543068 - DNA, 75 bp, synthetic construct
  source 1..75: mol_type = other DNA
gatttccgctttggcgctggtcgtgaaggcgatttcttgttattacagaaagctggcgcggaatacggcttcgat

SEQ ID NO: 543069 - DNA, 75 bp, synthetic construct
  source 1..75: mol_type = other DNA
ctcgcaaatggttagaactggcggcagagcaacattataaaaatgcggaaagattacttgcagagcttcccgcac

SEQ ID NO: 543070 - DNA, 75 bp, synthetic construct
  source 1..75: mol_type = other DNA
ggaattaatatcaacaattatgaagcacgcaaatggctaaaactggcagcggatcaacattataaaaatgcagaa

SEQ ID NO: 543071 - DNA, 75 bp, synthetic construct
  source 1..75: mol_type = other DNA
gcccgcatcttgcccgacggtgatagcggacaaaacctcagcttactgaacgttggttcgctggtcagtttgatg

SEQ ID NO: 543072 - DNA, 75 bp, synthetic construct
  source 1..75: mol_type = other DNA
cctgtacgcgctgcaactggcatggattgattaccaactgaagaacaagaagttggcgtttaatcaggaaatgcc

SEQ ID NO: 543073 - DNA, 75 bp, synthetic construct
  source 1..75: mol_type = other DNA
gcggtagaagtgctgggcctcggtgaaaagccgttacccggcgtggcaaacatcggaacacgcccaacggttgcc

SEQ ID NO: 543074 - DNA, 75 bp, synthetic construct
  source 1..75: mol_type = other DNA
caagatcatgttatttaacgaaaccagcgacgacttcgagttcaatgccgaccgctatctattcgccgaaaaccc

SEQ ID NO: 543075 - DNA, 75 bp, synthetic construct
  source 1..75: mol_type = other DNA
aaagatcctcatgctgctaagctggcaatgtggcagcatctggaaaacaccaagatcatgttatttaacgaaacc

SEQ ID NO: 543076 - DNA, 75 bp, synthetic construct
  source 1..75: mol_type = other DNA
gaacgtcagccgtacggtagttcgtgaagccatcatcatgctggaagttgaaggctatgtggaggtgcgtaaagg

SEQ ID NO: 543077 - DNA, 75 bp, synthetic construct
  source 1..75: mol_type = other DNA
atgaataaaaaattaatgtatatattcgcaatatttatagttgcagcaattacctgtattagccaacccaagaaa

SEQ ID NO: 543078 - DNA, 75 bp, synthetic construct
  source 1..75: mol_type = other DNA
cacttcaaattattcagcaatctgcgtccggcaaaactgtatcaggggctggaagcgttctgcccactgcgtgct

SEQ ID NO: 543079 - DNA, 75 bp, synthetic construct
  source 1..75: mol_type = other DNA
tacaggaaaatagcgcccttgccagcgcagcaacgggagaattggtagccagagcgattgctggaatgttgtatc

SEQ ID NO: 543080 - DNA, 75 bp, synthetic construct
  source 1..75: mol_type = other DNA
ggtctgccacgcaatcgctctggaagcccgcatcttgcccgacggtgatagcggacaaaacctcagcctgctgaa

SEQ ID NO: 543081 - DNA, 75 bp, synthetic construct
  source 1..75: mol_type = other DNA
atgattaaagtgcttagcgaaatcacctccagcctgaataaagactctctggtcgtttctattgctgcaggtgtc

SEQ ID NO: 543082 - DNA, 75 bp, synthetic construct
  source 1..75: mol_type = other DNA
cttcattcaggttgatttcgacacgccgtggtgtcagccggaaagcgacgttattgcagaattaagccgccgttt

SEQ ID NO: 543083 - DNA, 75 bp, synthetic construct
  source 1..75: mol_type = other DNA
gaccgaatgcgcagaacctgtcgcagaagctgaacgcacgccactggctcactacttccagttactgctcacccg

SEQ ID NO: 543084 - DNA, 75 bp, synthetic construct
  source 1..75: mol_type = other DNA
gcgttcaggctttgtgatgaaactcacagaatttgcggtgagtggcgcgatccgcatggttcatcaattccaatc

SEQ ID NO: 543085 - DNA, 75 bp, synthetic construct
  source 1..75: mol_type = other DNA
gcaactgccgactatgaagtgaccagaacgctggcagaagcagagcgtcagggtcgcatcatgcgcggtgaaggt

SEQ ID NO: 543086 - DNA, 75 bp, synthetic construct
  source 1..75: mol_type = other DNA
gacgcagaagctgccaaactgtttgctgatgcattcagcaaagatccggacttctatgcattcatccgtagcctg

SEQ ID NO: 543087 - DNA, 75 bp, synthetic construct
  source 1..75: mol_type = other DNA
aaaaacggcggctggcggcgaatggctattatttctgcggtcatcgcgctggtctgccacgctatcgctcttgaa

SEQ ID NO: 543088 - DNA, 75 bp, synthetic construct
  source 1..75: mol_type = other DNA
tcatgcccaatgaatacatcacccatctggaagcaacgcctgggatgctggtgcacattggcttatcgctctttt

SEQ ID NO: 543089 - DNA, 75 bp, synthetic construct
  source 1..75: mol_type = other DNA
gacgccgcgtcgtctggtttaacgttgcgggtgcggtcattctgacactggcctacttcggtagccgaattgtcc

SEQ ID NO: 543090 - DNA, 75 bp, synthetic construct
  source 1..75: mol_type = other DNA
cacgccgtggtgtcagccggaaagcgacgttgttgcagaattaagccgccgtttcagctgcacgctggagcactg

SEQ ID NO: 543091 - DNA, 75 bp, synthetic construct
  source 1..75: mol_type = other DNA
tgtttgatgacgagggaaacctcgtaccgattaatcgtccaccaatacactggaaacggctttactcaggcgcga

SEQ ID NO: 543092 - DNA, 75 bp, synthetic construct
  source 1..75: mol_type = other DNA
atgtttgctctggccggaaataaatggaataccacgttgcccggcggaaatatgcaatttcagggcgtcattatt

SEQ ID NO: 543093 - DNA, 75 bp, synthetic construct
  source 1..75: mol_type = other DNA
tacatgagcatcgcgctcaatgcgctgtcggctgaagccgccgtactgtgtgaagccctgaatcttcccttcgat

SEQ ID NO: 543094 - DNA, 75 bp, synthetic construct
  source 1..75: mol_type = other DNA
cagtttggtggcacggaactgcgcctcaaactggtctggctctgctggcttgacttaatgaccggaaacagcctt

SEQ ID NO: 543095 - DNA, 75 bp, synthetic construct
  source 1..75: mol_type = other DNA
gaagcagagcgcagcactgacggatctgatggatcagtacgtgctcctggcataccgcacaacggttgacgataa

SEQ ID NO: 543096 - DNA, 75 bp, synthetic construct
  source 1..75: mol_type = other DNA
ggctcaccatcccatgctggaggggattttgctgtctgagtgcgcgcgtttaaaacaacgcccactggcaaataa

SEQ ID NO: 543097 - DNA, 75 bp, synthetic construct
  source 1..75: mol_type = other DNA
gcaactgatcatgccgggcgaagtggcaccgagtcatcgtcataatcagtcggcgctgcgttttattgttgaagg

SEQ ID NO: 543098 - DNA, 75 bp, synthetic construct
  source 1..75: mol_type = other DNA
ggataaaatgggcgttttcgcctccatgcgcagcagtatgcggctgacatgggcgaatatgcgtctggtggcacc

SEQ ID NO: 543099 - DNA, 75 bp, synthetic construct
  source 1..75: mol_type = other DNA
ttaccgaagttattcttgctaatccttctgacgacgttaattgtgcaaataggcatcatgctggtggtcgttcct

SEQ ID NO: 543100 - DNA, 75 bp, synthetic construct
  source 1..75: mol_type = other DNA
aatatacgtgtgaccgacgccaaaacactggaactggtgaagcaggctgcgggaacattgcaactggatattact

SEQ ID NO: 543101 - DNA, 75 bp, synthetic construct
  source 1..75: mol_type = other DNA
ataccaccgtttactgtgcaggtcttgtctaaaagcgaggatgctatgtctactcaacttgatcccacccaactg

SEQ ID NO: 543102 - DNA, 75 bp, synthetic construct
  source 1..75: mol_type = other DNA
catcaacaagtcagggaagatatcgacgcagaacagttggctaccgaaaacttatcggagcggctgcaggacttg

SEQ ID NO: 543103 - DNA, 75 bp, synthetic construct
  source 1..75: mol_type = other DNA
atgaaagactataaaccgcgttacgaagaactgaagaaatattaccagacctggctgacgggttatacccggctg

SEQ ID NO: 543104 - DNA, 75 bp, synthetic construct
  source 1..75: mol_type = other DNA
ttatgcaccagtgaacatctgctggttcatcatccgatgctggaaggcattctgctgtctgaatgtgaacgtctg

SEQ ID NO: 543105 - DNA, 75 bp, synthetic construct
  source 1..75: mol_type = other DNA
cggcattctgctgcctgttatatccccgtgaggaatatgaaaatgaaacaacagtatcagacccgctacgaatgg

SEQ ID NO: 543106 - DNA, 75 bp, synthetic construct
  source 1..75: mol_type = other DNA
atcatcgaccgtcagaagcagaacacagcactgacggatctgatggatcagtacgtgctcctggcataccgcaca

SEQ ID NO: 543107 - DNA, 75 bp, synthetic construct
  source 1..75: mol_type = other DNA
ccattcgatcaaccgggaacttaactttttctaccgctttttaacgcgttttttcgctgctttccactaccgggg

SEQ ID NO: 543108 - DNA, 75 bp, synthetic construct
  source 1..75: mol_type = other DNA
tgtgaacgtctgaggcagcgttctctggcaaataaactgatcagcctcttccgtcagtttggtggcacggagttg

SEQ ID NO: 543109 - DNA, 75 bp, synthetic construct
  source 1..75: mol_type = other DNA
gctggaaggcattctcctgtctgaatgtgaacgtctgaggcagcgttctctggcaaataaactgatcagcctctt

SEQ ID NO: 543110 - DNA, 75 bp, synthetic construct
  source 1..75: mol_type = other DNA
atggctacatacggcggtcagtttacgcttacgacgcccggttgggtgtcattcaatggtgaaaaaccggagatt

SEQ ID NO: 543111 - DNA, 75 bp, synthetic construct
  source 1..75: mol_type = other DNA
aatgaccccctgacgtatctgatggatcagtatgtgcttctggcataccgcacaacggttgatacggctcactac

SEQ ID NO: 543112 - DNA, 75 bp, synthetic construct
  source 1..75: mol_type = other DNA
aacggaccacgccgcccctggatgatgatctgatagtgaatttatgcaccagtgaacatctgctggttcatcatc

SEQ ID NO: 543113 - DNA, 75 bp, synthetic construct
  source 1..75: mol_type = other DNA
aatggtgaaaaaccgaagattgccatcgtaccccggagtctgcaccggctgatttatggctctgacaaacgggcc

SEQ ID NO: 543114 - DNA, 75 bp, synthetic construct
  source 1..75: mol_type = other DNA
ggatcatcaaccgtcagaagcagaacgcagcactgacggatctgatggatcagtacgtgctcctggcataccgca

SEQ ID NO: 543115 - DNA, 75 bp, synthetic construct
  source 1..75: mol_type = other DNA
gtgtgccactacatttgctggcttgatttaatgaccggaaacagccttgaagactggacagagaacctgaaacgg

SEQ ID NO: 543116 - DNA, 75 bp, synthetic construct
  source 1..75: mol_type = other DNA
ggagaaggcgacgttattgcgattgttccccggtgtcttcaccggattatttatggcagagccgcagccccactg

SEQ ID NO: 543117 - DNA, 75 bp, synthetic construct
  source 1..75: mol_type = other DNA
actcatcagtttgttccgccagttcagcggtagcgagctgcgtctgaagctggtctggctgtgctggtacgattt

SEQ ID NO: 543118 - DNA, 75 bp, synthetic construct
  source 1..75: mol_type = other DNA
aagaactgaagaaatattaccagacctggctgacgggttatacccggctggcggtctgccagggaatgtgccatc

SEQ ID NO: 543119 - DNA, 75 bp, synthetic construct
  source 1..75: mol_type = other DNA
tgctggttggacagttcaacaagtttgagctgtgggatgaaacaacctggcatcaacaggtcaaggaagatatcg

SEQ ID NO: 543120 - DNA, 75 bp, synthetic construct
  source 1..75: mol_type = other DNA
gaggtggaaattattgcctgtggaaaaaatagcgcctataccctgaaaaagtatgacgccgaaatgaaggccgtg

SEQ ID NO: 543121 - DNA, 75 bp, synthetic construct
  source 1..75: mol_type = other DNA
ggctccaataaccgtgaaggcgtactggatgtgatcgataaagttcttaaacacgaagcgccatttgaccaataa

SEQ ID NO: 543122 - DNA, 75 bp, synthetic construct
  source 1..75: mol_type = other DNA
tgcgtgaaaatgaatttgtcacatcattgcagtctctgaaagaagctgagcttaaggctggtttttctgcttttg

SEQ ID NO: 543123 - DNA, 75 bp, synthetic construct
  source 1..75: mol_type = other DNA
tccatcacccatgatgtgaagggcacggcatcaaccggtaacccggatacggatgcggaagccgcgtttggtcag

SEQ ID NO: 543124 - DNA, 75 bp, synthetic construct
  source 1..75: mol_type = other DNA
atgtccagcaccaatgccctggcgctgtccatgcgtaaaaatgcgctgggtcagaaggaatacccggacatgacc

SEQ ID NO: 543125 - DNA, 75 bp, synthetic construct
  source 1..75: mol_type = other DNA
aaacgtaattacgatatttatcacaatgcgctggcggagctgatacaactgttaggtgcaggcaaaatcaacgag

SEQ ID NO: 543126 - DNA, 75 bp, synthetic construct
  source 1..75: mol_type = other DNA
acatccaatttctcaaggataacggcgtgaagatttgggacgcatgggccgatgagaatggtgatttggggccgg

SEQ ID NO: 543127 - DNA, 75 bp, synthetic construct
  source 1..75: mol_type = other DNA
gatcgcgttgtgttgtcccgtgaaattgaccagctacagcgtatcgttgacacgcttcgcaccaaccctacagat

SEQ ID NO: 543128 - DNA, 75 bp, synthetic construct
  source 1..75: mol_type = other DNA
aatcagaaagtagttcgcgtgacttatacgtggaagctggttgacgttccgggctggattgacaaaaagcattcg

SEQ ID NO: 543129 - DNA, 75 bp, synthetic construct
  source 1..75: mol_type = other DNA
gatggttatgtgacggacggatttctcttgcgtgaaggtgagtttgtcacttcattacagacattgaaagaggcc

SEQ ID NO: 543130 - DNA, 75 bp, synthetic construct
  source 1..75: mol_type = other DNA
actctaccaggcaaagctggctttaacggaagatctacgcctgaaggtggtgcgcaaaatgtatgaattacgttt

SEQ ID NO: 543131 - DNA, 75 bp, synthetic construct
  source 1..75: mol_type = other DNA
aaatagcagcgaggcaacccgcagaaccagataaagaagtcaggttggcctgtcgtgatattttccgtagcagta

SEQ ID NO: 543132 - DNA, 75 bp, synthetic construct
  source 1..75: mol_type = other DNA
ggtaaggccagacccctgacgaagtttgattttgaatccatcaccttcagtcatgcgaaggtgtcggccattgcg

SEQ ID NO: 543133 - DNA, 75 bp, synthetic construct
  source 1..75: mol_type = other DNA
ctggaagagcaggccagtcgcctgaccgaagcagtggcagtgttccggattcagcaacagcagcgtgaaacatcg

SEQ ID NO: 543134 - DNA, 75 bp, synthetic construct
  source 1..75: mol_type = other DNA
taaaagcctgattgaagactcggtggggaaagtggatgttggctctacgctggtcgaaagcgccggggaaacaat

SEQ ID NO: 543135 - DNA, 75 bp, synthetic construct
  source 1..75: mol_type = other DNA
atgttaaaacgtatcaaaattgtgaccagcctactgctggttttggccgtttttggccttttacaactgacttca

SEQ ID NO: 543136 - DNA, 75 bp, synthetic construct
  source 1..75: mol_type = other DNA
tgaacatctgcttgtgcatcatccgatgctggaaggtgttctgttgtctgaatgtgagcgcctgggacagcattc

SEQ ID NO: 543137 - DNA, 75 bp, synthetic construct
  source 1..75: mol_type = other DNA
ggcgaacgcacgccaatgaatgaaggcgattttatcctgaccccgcagtggcgctggcacgatcacggtaaccct

SEQ ID NO: 543138 - DNA, 75 bp, synthetic construct
  source 1..75: mol_type = other DNA
gtaaaaaccgtgacgccagctacgccgcgcaaaatggccatggcagatagcgaggagaactgggaaacgttttaa

SEQ ID NO: 543139 - DNA, 75 bp, synthetic construct
  source 1..75: mol_type = other DNA
atcatctggaagaacatcaacagggacggatcgtggtggatggcatcgaacttaatgaagatatccgcaatattg

SEQ ID NO: 543140 - DNA, 75 bp, synthetic construct
  source 1..75: mol_type = other DNA
aagaagtgctggatacgatgattgggctggcgcagtcgggtatgacaatgttgtgcgtaacgcacgagatgggat

SEQ ID NO: 543141 - DNA, 75 bp, synthetic construct
  source 1..75: mol_type = other DNA
atgccatcgcaactggctgcccggctggatgaggcctgggcggccattaagaccgggctggtcagggggctgtcc

SEQ ID NO: 543142 - DNA, 75 bp, synthetic construct
  source 1..75: mol_type = other DNA
gcagtgggcaggcagcctgtctgaatatcaggaatacgcacaggactttattgattacctgcgtccgcagaccat

SEQ ID NO: 543143 - DNA, 75 bp, synthetic construct
  source 1..75: mol_type = other DNA
gtagtaaccaaccagtctggcattgctcgcggtaaatttaccgaagcacagtttgaaacgctgaccgagtggatg

SEQ ID NO: 543144 - DNA, 75 bp, synthetic construct
  source 1..75: mol_type = other DNA
aaatcgacaaccattcgttgtattaatcatctggaagaacatcaacagggacggatcgtggtagatggcatcgag

SEQ ID NO: 543145 - DNA, 75 bp, synthetic construct
  source 1..75: mol_type = other DNA
ggcaggtgctgtcatgataatggcagattcggcgcgggaaattcttaaacaacgcagtaatgaatccagttcaac

SEQ ID NO: 543146 - DNA, 75 bp, synthetic construct
  source 1..75: mol_type = other DNA
cccagaactccccgcacacaaacaacggataacggtaagcagaacacgtatttctcgtcactggacaacatggtt

SEQ ID NO: 543147 - DNA, 75 bp, synthetic construct
  source 1..75: mol_type = other DNA
tgtgctgggggcggcagccatcgtgggctctttcttcacggccggggcatcaatggcgttatggggttcagccct

SEQ ID NO: 543148 - DNA, 75 bp, synthetic construct
  source 1..75: mol_type = other DNA
gacacacgaaggcgaatacaagccggaagcacgagcatggcaagttgccaataatacctatggtttttccaacgg

SEQ ID NO: 543149 - DNA, 75 bp, synthetic construct
  source 1..75: mol_type = other DNA
caccacgatgctgttctcactgggtgccagcatgatactgggtggtgtggcccagatgctggccccgaaggcaaa

SEQ ID NO: 543150 - DNA, 75 bp, synthetic construct
  source 1..75: mol_type = other DNA
cagacgctgaatttacgcgttatcggcgggcgttatcattacacggcggtagggcagttggctcagcatgaagac

SEQ ID NO: 543151 - DNA, 75 bp, synthetic construct
  source 1..75: mol_type = other DNA
ttaaccggtggttgggtttattgggaggactgatgtcatttgccacacctctggtaacactatcatttttaatca

SEQ ID NO: 543152 - DNA, 75 bp, synthetic construct
  source 1..75: mol_type = other DNA
tggtgttgaaagataccctgatgctggctggcgcagtcatgataatggctgattcggcgcgggaaatccttaaac

SEQ ID NO: 543153 - DNA, 75 bp, synthetic construct
  source 1..75: mol_type = other DNA
acgtatttttcgtcactggacaacatgattgcccagggtaacccggtgccggtgccttacggtgaaatgctggtt

SEQ ID NO: 543154 - DNA, 75 bp, synthetic construct
  source 1..75: mol_type = other DNA
cgcgtctggcgggtgccaaaagtggcggtgtttttcaggtggtgctgggggcggcgctgatggctgtggcatggt

SEQ ID NO: 543155 - DNA, 75 bp, synthetic construct
  source 1..75: mol_type = other DNA
gtgaaaacgggggccgaagccatccgggcgctggccatgcagatcccggcgtttcgtcagaaactgagtgacggc

SEQ ID NO: 543156 - DNA, 75 bp, synthetic construct
  source 1..75: mol_type = other DNA
atggtgccgtgatccacatcgttccgcgtcttgcgggagcaaaaagtggcggtgtgtttcaggcggtgctgggtg

SEQ ID NO: 543157 - DNA, 75 bp, synthetic construct
  source 1..75: mol_type = other DNA
aactggtggggcataaaccaggcgggctgggctacgtcggcgtgctggcggctatgattatggcaagcctttctg

SEQ ID NO: 543158 - DNA, 75 bp, synthetic construct
  source 1..75: mol_type = other DNA
gtgatccacattgtgccgcgtctggcgggagctaaaagtggcggtgtttttcaggcagtgctgggtgcggcgctg

SEQ ID NO: 543159 - DNA, 75 bp, synthetic construct
  source 1..75: mol_type = other DNA
agaagatcaaagcggcaatgcccatgctgtgctcgtctaatattgttggcctgcacaagtattggctcgagtttg

SEQ ID NO: 543160 - DNA, 75 bp, synthetic construct
  source 1..75: mol_type = other DNA
cagtgacattctcttttcaatgggtgcggcgatgacgcttggaggcgttgcgcagatgctggcaccgaaagccag

SEQ ID NO: 543161 - DNA, 75 bp, synthetic construct
  source 1..75: mol_type = other DNA
tcttgtagaaaaaaacggtgaaaaatcgttgttttctacaggaggatatgtatccggtgatatccatgcatatca

SEQ ID NO: 543162 - DNA, 75 bp, synthetic construct
  source 1..75: mol_type = other DNA
ggaagataacaacgactggtatctgcgatcgcaagaagtaacgccgccatcgccacctgatcccgacccgactcc

SEQ ID NO: 543163 - DNA, 75 bp, synthetic construct
  source 1..75: mol_type = other DNA
ggcacggcgtgtcgttccagaccacgcaagataccgttttattcagtttttcggacagaccggtacaagaagccc

SEQ ID NO: 543164 - DNA, 75 bp, synthetic construct
  source 1..75: mol_type = other DNA
cggcgctgcgttttattgttgaaggcaaaggggcatttaccgccgttgatggcgaacgcacgccaatgaatgagg

SEQ ID NO: 543165 - DNA, 75 bp, synthetic construct
  source 1..75: mol_type = other DNA
tgttagcgctggcgctgaacatctgttacgtgctgctgcgtcgcattaccggtattcgtaccatcatgctgactg

SEQ ID NO: 543166 - DNA, 75 bp, synthetic construct
  source 1..75: mol_type = other DNA
ttacgtgctgttgcgtcgcattaccggcattcgcacaatcatgttgaccggccacatcatgttccagcaggccgg

SEQ ID NO: 543167 - DNA, 75 bp, synthetic construct
  source 1..75: mol_type = other DNA
ttcggtatcgacaccgtgcaggcgatggcaggcaaagtgaactggacggtgtacatcctgcaaactggtttctcc

SEQ ID NO: 543168 - DNA, 75 bp, synthetic construct
  source 1..75: mol_type = other DNA
aaaaagagctggaggaatggatcatcaaccgtcagaagcagagcgcagcactgacggatctgatggatcagtacg

SEQ ID NO: 543169 - DNA, 75 bp, synthetic construct
  source 1..75: mol_type = other DNA
tcaaactggtctggctctgctggcttgacttaatgaccggaaacagccttgacgactggacggataacctgaaac

SEQ ID NO: 543170 - DNA, 75 bp, synthetic construct
  source 1..75: mol_type = other DNA
acaccgcctctggatgatgatctggtggtgagtttatgtaccagcgaacatctgctggtgcatcatccgatgctg

SEQ ID NO: 543171 - DNA, 75 bp, synthetic construct
  source 1..75: mol_type = other DNA
gcaagataccgttttattcagttttcggacagaccggtacaagaagccctggggctgttccgcgaagcgcgttat

SEQ ID NO: 543172 - DNA, 75 bp, synthetic construct
  source 1..75: mol_type = other DNA
tttcgtcagaaactgagcgatggttggtatcaggtgcgtattgccgggcgtgatacaggcgaaaacgaattatca

SEQ ID NO: 543173 - DNA, 75 bp, synthetic construct
  source 1..75: mol_type = other DNA
gaaggcattctcctgtctgaatgtgaacgtctgaggcagcgttctctggcaaataaactgatcgtaagcgtcaac

SEQ ID NO: 543174 - DNA, 75 bp, synthetic construct
  source 1..75: mol_type = other DNA
cagatacttacgcgtcgatgatggcaaccattgaacgcatgggcgatgcttatagctgggtaggttacgcggtgt

SEQ ID NO: 543175 - DNA, 75 bp, synthetic construct
  source 1..75: mol_type = other DNA
gcccaggggaatgttctgcccgttctgtacggtgaaatgcgcgtggggtcacgcgtggtatctcaggagatcagc

SEQ ID NO: 543176 - DNA, 75 bp, synthetic construct
  source 1..75: mol_type = other DNA
aggcgggtgttaacgtcgatagcgttatcctccctgacggcgagcagtataaaagcctggctgtactcgataccg

SEQ ID NO: 543177 - DNA, 75 bp, synthetic construct
  source 1..75: mol_type = other DNA
actggtgttgaacggtaatactgctggcaacacgaccgtggtaattaatcccattacgggtattggtgagccgac

SEQ ID NO: 543178 - DNA, 75 bp, synthetic construct
  source 1..75: mol_type = other DNA
cgtggcgagcaggtttatattgactggcttctgcgtatcctcgaaccgatcgtgaaacagcttgtacccggcgca

SEQ ID NO: 543179 - DNA, 75 bp, synthetic construct
  source 1..75: mol_type = other DNA
caggggctggttattctgccacaggcgttgaagctggtaattcctgggctggtaaataccatcatcgcactcttc

SEQ ID NO: 543180 - DNA, 75 bp, synthetic construct
  source 1..75: mol_type = other DNA
ccgtgttctttaaccaggtcatgaccaatgccccgttattgctgggtattgtgacctgcctgggctacatcctgc

SEQ ID NO: 543181 - DNA, 75 bp, synthetic construct
  source 1..75: mol_type = other DNA
cctggtcgcctgtggctcttcaatcctgattattccaggctttatcccgatgttcttctccaacgccactatcgg

SEQ ID NO: 543182 - DNA, 75 bp, synthetic construct
  source 1..75: mol_type = other DNA
catcactcagggcgtgcgcatgtttgtggcggaactctctgaagcgtttaacggtatctcccagcgcctgatccc

SEQ ID NO: 543183 - DNA, 75 bp, synthetic construct
  source 1..75: mol_type = other DNA
aactgagcgacggctggtatcaggtgcgtattgccggacaggatgtcagcacgtccggattaacggcgcagttac

SEQ ID NO: 543184 - DNA, 75 bp, synthetic construct
  source 1..75: mol_type = other DNA
ggttttatgttgctgcaagcagggtccggcatcctgaccagcacttttaaaccggtggtggcaaaaatgtcggaa

SEQ ID NO: 543185 - DNA, 75 bp, synthetic construct
  source 1..75: mol_type = other DNA
atgaccacgttcttgatgcggttctgccgcccgatattcctattccgagcattgctgaagtgcaacgtgcgcttt

SEQ ID NO: 543186 - DNA, 75 bp, synthetic construct
  source 1..75: mol_type = other DNA
taaaaccatctgcgatcatctggcagtgctacgcccggatgtctggttgatgattggtcactgtggcggattacg

SEQ ID NO: 543187 - DNA, 75 bp, synthetic construct
  source 1..75: mol_type = other DNA
gggtatcgcaacgctgatccctgtattgaatggtgttcatcaagctggtctgagtaccacaatacaattcactcg

SEQ ID NO: 543188 - DNA, 75 bp, synthetic construct
  source 1..75: mol_type = other DNA
aaatgatacgatccattggttcaaaacgacacgctgtcatcgggtcaaaatggcccaatgatcttacagagaata

SEQ ID NO: 543189 - DNA, 75 bp, synthetic construct
  source 1..75: mol_type = other DNA
ccaacagtgatttaagtaccttaaaggcaacggttgaggatggcagtggtaacctgatcgaaggtctcactgtgt

SEQ ID NO: 543190 - DNA, 75 bp, synthetic construct
  source 1..75: mol_type = other DNA
tgtttaccaactacacacgttatgtggatgagttcgttcgttggggatgcagccagatcctcgatcctgatagtc

SEQ ID NO: 543191 - DNA, 75 bp, synthetic construct
  source 1..75: mol_type = other DNA
agatatagagtttgtggatgtattcattgcaatatcctgggtagtaatctcaggtattctcttcttatttatccg

SEQ ID NO: 543192 - DNA, 75 bp, synthetic construct
  source 1..75: mol_type = other DNA
ggtaatacgggagttatcagatgggggaacacaagcgatgcaggattgccagcccctaattatggaacttttaaa

SEQ ID NO: 543193 - DNA, 75 bp, synthetic construct
  source 1..75: mol_type = other DNA
cgcgtgggataacacggtattggtgccaaatgacagagggggggatagtctgttgtcgacagataacgccgtccg

SEQ ID NO: 543194 - DNA, 75 bp, synthetic construct
  source 1..75: mol_type = other DNA
ttaacctctgtatactcattcgtcgtcagcacgaccgagggcgcaaccatgacggcaagcgtcactgacgctaac

SEQ ID NO: 543195 - DNA, 75 bp, synthetic construct
  source 1..75: mol_type = other DNA
acattcagtgcagcgccatcctcgcaaatgatcatcagccagaatacggtctctactaatacgcagggagtagcc

SEQ ID NO: 543196 - DNA, 75 bp, synthetic construct
  source 1..75: mol_type = other DNA
gcagttttacgtgacacagaatcacgggacggagccgccatttactggacgtttattgcataataagcgcgacgg

SEQ ID NO: 543197 - DNA, 75 bp, synthetic construct
  source 1..75: mol_type = other DNA
accggtacccgtattcacacgccgttcctgtttaccaaggaaattgattcctccagcccctacctttacaaggcg

SEQ ID NO: 543198 - DNA, 75 bp, synthetic construct
  source 1..75: mol_type = other DNA
ccgagccatttgtctttttaccgcggcgcaaaggccatgagtacagtctcgatcactatcaacatcggttttatt

SEQ ID NO: 543199 - DNA, 75 bp, synthetic construct
  source 1..75: mol_type = other DNA
catagtgagttttattcgatgggcggaatggcgattacgcccgataacaccattatggcgctggcagaagatttt

SEQ ID NO: 543200 - DNA, 75 bp, synthetic construct
  source 1..75: mol_type = other DNA
agctttgtctgggcaaatgactcctggactttctactatgttcgcaagcatccggtgacgctgctgccttatcag

SEQ ID NO: 543201 - DNA, 75 bp, synthetic construct
  source 1..75: mol_type = other DNA
gcacgctggtgagtaacttctggatgtcatacatggtcggcatgtgggcgttcagctttattcttcgcttctttg

SEQ ID NO: 543202 - DNA, 75 bp, synthetic construct
  source 1..75: mol_type = other DNA
tggatgtcgtacatggtcggcatgtgggccttcagctttattctgcgtttctttgacctgcaacgtattctgacc

SEQ ID NO: 543203 - DNA, 75 bp, synthetic construct
  source 1..75: mol_type = other DNA
tttatcatcgcaaacatttccgcaaagggcacaacccgctgctggtgtacggatatggttcttacggcgcaagta

SEQ ID NO: 543204 - DNA, 75 bp, synthetic construct
  source 1..75: mol_type = other DNA
ggaaattgctgctgattatttaagaggaaagaaagcaataaggatgcaagagttcttaggtgaatactcttatgc

SEQ ID NO: 543205 - DNA, 75 bp, synthetic construct
  source 1..75: mol_type = other DNA
attgagcaggcgaacaaacgtcgctctcagattctggacgaagcaaaagctgaagcagaacaggaacgtactaaa

SEQ ID NO: 543206 - DNA, 75 bp, synthetic construct
  source 1..75: mol_type = other DNA
cggcagaatttaagttttaccgcatcaacgatgccggtcaggaagtggagtacttcaacatcacgctggataacg

SEQ ID NO: 543207 - DNA, 75 bp, synthetic construct
  source 1..75: mol_type = other DNA
ttgtggtgattaaaaaaaaaaatactgtaacgcctgacgattttccccgttcccggttgctgtaccgggaacgta

SEQ ID NO: 543208 - DNA, 75 bp, synthetic construct
  source 1..75: mol_type = other DNA
cgccgcttccagtttttcaactggttaagtggattgctatgggtcagcgtggtgaccggtttcggctatgccttg

SEQ ID NO: 543209 - DNA, 75 bp, synthetic construct
  source 1..75: mol_type = other DNA
accatattaatagtgatttcaccttcgcatggcaaacgacgctatacagcaaacagaatgattatcgctatgcaa

SEQ ID NO: 543210 - DNA, 75 bp, synthetic construct
  source 1..75: mol_type = other DNA
aggccagtgttgggtcatcgacgatgtgcgctacttaggcggtagcgttcatgccacggcgggtacgctccgtca

SEQ ID NO: 543211 - DNA, 75 bp, synthetic construct
  source 1..75: mol_type = other DNA
tttatatggacggacggttaattgtctcgacccgacaacgtaaagtgttggcgttggatgatgtggttagcgatc

SEQ ID NO: 543212 - DNA, 75 bp, synthetic construct
  source 1..75: mol_type = other DNA
tgcaggaaaatttagcgcgtcgtacttatacgatgtcgttgatggcaatggtctttttacccagtacgtttttaa

SEQ ID NO: 543213 - DNA, 75 bp, synthetic construct
  source 1..75: mol_type = other DNA
gacagcgcccaatggctggcgacgacgccattgctgccaaataacgtgcgcgatgcgctgtcaggggaaagtacg

SEQ ID NO: 543214 - DNA, 75 bp, synthetic construct
  source 1..75: mol_type = other DNA
caacgccattggtttgagtctgtataacttcctcaacatcctcaatattaatcagatttggttgtacggtcgcag

SEQ ID NO: 543215 - DNA, 75 bp, synthetic construct
  source 1..75: mol_type = other DNA
gacacgcaaagcagcagcgatagctcgcccgtcgataccttcctgacgctgtttgtcgccgagatccaaaaccag

SEQ ID NO: 543216 - DNA, 75 bp, synthetic construct
  source 1..75: mol_type = other DNA
aatctttgccatgagatcataaccgaattagaggctcactctcccccagattcagtaattgtaagagaaccatca

SEQ ID NO: 543217 - DNA, 75 bp, synthetic construct
  source 1..75: mol_type = other DNA
aatgctagggctgcaattgttcaaagagccatggataaagctgtgaaacctaatggggaactgagcgttgagaat

SEQ ID NO: 543218 - DNA, 75 bp, synthetic construct
  source 1..75: mol_type = other DNA
cgaagccctgttacatcagcagcttcaggcgcagtggcaaactacctggcagcagcatttcaccacttcaccctg

SEQ ID NO: 543219 - DNA, 75 bp, synthetic construct
  source 1..75: mol_type = other DNA
cgaagctctgttgcagcagcagcttcaggcgcagtggcaaaccacgtggcaacagcattttgccgccgcaccgtg

SEQ ID NO: 543220 - DNA, 75 bp, synthetic construct
  source 1..75: mol_type = other DNA
cgatgttcgccaccatgttcgcgggtgagttcgtccgcagcggtgccaaaaactaccttgagctggattacaacg

SEQ ID NO: 543221 - DNA, 75 bp, synthetic construct
  source 1..75: mol_type = other DNA
ttaacgtcacaggccattctgattttcctttcaagtttacattgaaaggttatgcagaggatgcggtaggccaga

SEQ ID NO: 543222 - DNA, 75 bp, synthetic construct
  source 1..75: mol_type = other DNA
ataatgattgtgaaacggggattgccgaaaaattatacacccacaaaaaaggtattttacatcgggctgtttctg

SEQ ID NO: 543223 - DNA, 75 bp, synthetic construct
  source 1..75: mol_type = other DNA
ccttaattcaaaatgatggtgcttatctgctgtgtaaaatggccgacgatcgcggcgttttccccggacaatggg

SEQ ID NO: 543224 - DNA, 75 bp, synthetic construct
  source 1..75: mol_type = other DNA
gtgaatctttcgaaataaacgcatcaacaatttcaaataaaacaaactctaccgtaaaaacatttaccacagaac

SEQ ID NO: 543225 - DNA, 75 bp, synthetic construct
  source 1..75: mol_type = other DNA
gactatattgaagcccaagagtacctggctaatacgccatactttgttgtcgataagtacattccccacaagcca

SEQ ID NO: 543226 - DNA, 75 bp, synthetic construct
  source 1..75: mol_type = other DNA
atgttattaaacgaggtaatccctatgggttcgcttactaaacaaaccatcagcgcgcagatacctattgaattg

SEQ ID NO: 543227 - DNA, 75 bp, synthetic construct
  source 1..75: mol_type = other DNA
cagaccttcaatcattaattagaatggatcctgaatttaggggaatggttcaaagaaaattagctgcagacaaaa

SEQ ID NO: 543228 - DNA, 75 bp, synthetic construct
  source 1..75: mol_type = other DNA
tgttctctggcctgatttcgatgaacaagactttgaaggggcgttaaatgcctttgctaatcgagagcgtcgttt

SEQ ID NO: 543229 - DNA, 75 bp, synthetic construct
  source 1..75: mol_type = other DNA
atgttgtctgctactcaaccacttagcgaaaaattgccagcgcatggctgccgtcatgttgcgatcattatggac

SEQ ID NO: 543230 - DNA, 75 bp, synthetic construct
  source 1..75: mol_type = other DNA
gtcgccaaactgctgaagtcacgaattgaatttgcagcctcccagcgcttgcggcagttttacgacgaagtcagc

SEQ ID NO: 543231 - DNA, 75 bp, synthetic construct
  source 1..75: mol_type = other DNA
ctcatatgttacgtcatgcctgtggttttgctctggctgacaatggtgtcgatactcgactacttcaggattatc

SEQ ID NO: 543232 - DNA, 75 bp, synthetic construct
  source 1..75: mol_type = other DNA
acatcttttgtaagcgtttaaaagaagcgcggcttgcagctggtttatctcaaaaaaagctcggtatcgctgccg

SEQ ID NO: 543233 - DNA, 75 bp, synthetic construct
  source 1..75: mol_type = other DNA
taggtaagtttattatatgtagttcaattctcttattgtgttttattggcatgatcttagcggccataataacta

SEQ ID NO: 543234 - DNA, 75 bp, synthetic construct
  source 1..75: mol_type = other DNA
gtgcagtgatttttatcagaaatgcacaactagtgattaaggcaacagatggagatgttattgatatctctcccg

SEQ ID NO: 543235 - DNA, 75 bp, synthetic construct
  source 1..75: mol_type = other DNA
tagttacccaggttagaaaaagaatatttttttataacctggaagaaacagataaagaaatttttagacgactta

SEQ ID NO: 543236 - DNA, 75 bp, synthetic construct
  source 1..75: mol_type = other DNA
tgtgtgtaataactattattttttgggatgtggctaaagaatacaaagaggctataggttcacttgctacttttg

SEQ ID NO: 543237 - DNA, 75 bp, synthetic construct
  source 1..75: mol_type = other DNA
gatatccgccggattggtgacctgcaacgcgaagcggcacgacttgaaacggaaatgaatgacgctatcgctgag

SEQ ID NO: 543238 - DNA, 75 bp, synthetic construct
  source 1..75: mol_type = other DNA
gatattcgctggattggtgacctccaacgcgaagcggtacgacttgaaacggaaatgaatgacgctattgctgaa

SEQ ID NO: 543239 - DNA, 75 bp, synthetic construct
  source 1..75: mol_type = other DNA
tgtttacgattattgcggtgcattataccggtaaaatagttgcgccctggattccacgcgaccatagttcagcta

SEQ ID NO: 543240 - DNA, 75 bp, synthetic construct
  source 1..75: mol_type = other DNA
atgattttatttaccgactataacgcaccttatctttttgctatttcctttgtactattgatcggtttgttggaa

SEQ ID NO: 543241 - DNA, 75 bp, synthetic construct
  source 1..75: mol_type = other DNA
gtgacaaggtgttaattatttgccggctttcttcaacgcggtatttagctgaaaaaaaaacctggccaaatatat

SEQ ID NO: 543242 - DNA, 75 bp, synthetic construct
  source 1..75: mol_type = other DNA
tttggttaacgcggcgaaaaccacttccgtggtgatgttcctggtggcttccgcagcggtatccgcatggctaat

SEQ ID NO: 543243 - DNA, 75 bp, synthetic construct
  source 1..75: mol_type = other DNA
ccgttggcttaatgtacgccgccgctatccccacctgtctgattatcgcattgctggaattgcgtcacttatacc

SEQ ID NO: 543244 - DNA, 75 bp, synthetic construct
  source 1..75: mol_type = other DNA
tgacatttgccacgctttaccatgtgttggtaaacgcagcgaaaacgacctccgtggtgatgttcctggtagcct

SEQ ID NO: 543245 - DNA, 75 bp, synthetic construct
  source 1..75: mol_type = other DNA
atggctaaaccagcaaaacgaatcaagaatgccgcagcggcttatgttccacagtcccgcgatgccgtggtatgt

SEQ ID NO: 543246 - DNA, 75 bp, synthetic construct
  source 1..75: mol_type = other DNA
atgcgcggaataagctattcagaacgaaataatttccatccggaagaagatggttttagtggaacattcatcatt

SEQ ID NO: 543247 - DNA, 75 bp, synthetic construct
  source 1..75: mol_type = other DNA
cgttgatgttggggatgggaacttccgttacccaggcggcgatgcgtgaatttgcccatgcgggggtgatggtag

SEQ ID NO: 543248 - DNA, 75 bp, synthetic construct
  source 1..75: mol_type = other DNA
taccggtaaaggaattgcgccctggttaccacgagatcatagcactgctattacagaagacgattatattggctg

SEQ ID NO: 543249 - DNA, 75 bp, synthetic construct
  source 1..75: mol_type = other DNA
aaatcgacaaccattcgttgtattaatcatctggaagaacatcaacagggacggatcgtagtagatggcatcgaa

SEQ ID NO: 543250 - DNA, 75 bp, synthetic construct
  source 1..75: mol_type = other DNA
atagatcttgtacagcaaggtattgggccagccaaatcgatgggatgtggcttgctatccctggctccactggga

SEQ ID NO: 543251 - DNA, 75 bp, synthetic construct
  source 1..75: mol_type = other DNA
tatcttatcggtcatttttatcgagttctggcgcggcgtaccgctgattaccgttctgtttatgtcttcggtcat

SEQ ID NO: 543252 - DNA, 75 bp, synthetic construct
  source 1..75: mol_type = other DNA
acaaatactgcttctcgctggataacaataacaccagcttccccatccgtcttgccaagccactacttgattcga

SEQ ID NO: 543253 - DNA, 75 bp, synthetic construct
  source 1..75: mol_type = other DNA
atacatggaagttggttgacgttccgggctggattgacaaaaaagccttcgccagcgttaaaggaatgaatgatt

SEQ ID NO: 543254 - DNA, 75 bp, synthetic construct
  source 1..75: mol_type = other DNA
gattttatcgccgcttacaaacgcgccgaagaagagggcagggaagccgcttttatcgcctgggcggagtatacc

SEQ ID NO: 543255 - DNA, 75 bp, synthetic construct
  source 1..75: mol_type = other DNA
gcaacaaggtattctggtacgccgttctcgcgagcagctggagatggaaatcgacaaattcaccattattcagcg

SEQ ID NO: 543256 - DNA, 75 bp, synthetic construct
  source 1..75: mol_type = other DNA
gtgtcgatcgcaccaatgttctggaaaatactcccgcatcgcggtcgctatattgcggtctgggcagtgatttac

SEQ ID NO: 543257 - DNA, 75 bp, synthetic construct
  source 1..75: mol_type = other DNA
gtgccgactgcacaaaagccggtgcctgttgggtcttcatccacgaacgatttggtcagtttatgtatgggcttt

SEQ ID NO: 543258 - DNA, 75 bp, synthetic construct
  source 1..75: mol_type = other DNA
ccagcccatgaactgaaggaagtgggcgatcagtggcgcacgccggacaacattttctggggaattaacaccctg

SEQ ID NO: 543259 - DNA, 75 bp, synthetic construct
  source 1..75: mol_type = other DNA
gaaaactcaccgatcaatttggccaaatacattatttactactggagcctgaagaaggaaaaattttcactaaag

SEQ ID NO: 543260 - DNA, 75 bp, synthetic construct
  source 1..75: mol_type = other DNA
atgctgcgccaggcccgttccgttggcctgaaaacccagtttatggggccggaaggtgtcggtaatgcgtcactg

SEQ ID NO: 543261 - DNA, 75 bp, synthetic construct
  source 1..75: mol_type = other DNA
attggcgcaatcgttgcttatatggacaacagccatgtgcaggttacttttttagtcgaaaaactctcaccggct

SEQ ID NO: 543262 - DNA, 75 bp, synthetic construct
  source 1..75: mol_type = other DNA
gaaatttgcccaggagatgggcttcctacccccagtggtgcacatccgcgataacatggatttgcaaccagcccg

SEQ ID NO: 543263 - DNA, 75 bp, synthetic construct
  source 1..75: mol_type = other DNA
caaacctggtatttttactgttcacggcgggactgctggggctggcgtggtggatccgtggacgcgaacaaaaag

SEQ ID NO: 543264 - DNA, 75 bp, synthetic construct
  source 1..75: mol_type = other DNA
gcagttagtggtgctgtcgaatctggaactatcagataaccgacatatccgaatgacggcgacgattggcggtaa

SEQ ID NO: 543265 - DNA, 75 bp, synthetic construct
  source 1..75: mol_type = other DNA
gcagaaaaaaccgcagagaaagcagccgcagcaaaagccagggtaacggcaataatagcggcagaacggaaggca

SEQ ID NO: 543266 - DNA, 75 bp, synthetic construct
  source 1..75: mol_type = other DNA
gcgattttatcctcactccgcagtggcgctggcacgatcacggtaaccctggcgacgaaccagttatctggctcg

SEQ ID NO: 543267 - DNA, 75 bp, synthetic construct
  source 1..75: mol_type = other DNA
catcactatcgcccggcattcgatgagggaatgcagcaaaagcgggcagaaattgctgccatcgcgcttaacccg

SEQ ID NO: 543268 - DNA, 75 bp, synthetic construct
  source 1..75: mol_type = other DNA
tgtttctctctattgccgcactgtgctacatcctcggccagttaggttttatctcctgggtgccggaatatgcta

SEQ ID NO: 543269 - DNA, 75 bp, synthetic construct
  source 1..75: mol_type = other DNA
gcggcgatgttcatccttggggtggttagcggtatcactatgtctatcggcacgttcctcataacacaaatgtat

SEQ ID NO: 543270 - DNA, 75 bp, synthetic construct
  source 1..75: mol_type = other DNA
gtcaccgggatggtgatgggaaatatcgccgattatttcaatctgcctgtttccagtatgagtaataccttcacc

SEQ ID NO: 543271 - DNA, 75 bp, synthetic construct
  source 1..75: mol_type = other DNA
ttggcctgaatgctatctggattgaaagtgcgctaaaagaacaggcgcagattcaggggtacaccgtggttgagg

SEQ ID NO: 543272 - DNA, 75 bp, synthetic construct
  source 1..75: mol_type = other DNA
taaccatcttattagccaacatgccgcagagttgtttggtcgtcaggaggcgcaacagctactggagcgcgtcgg

SEQ ID NO: 543273 - DNA, 75 bp, synthetic construct
  source 1..75: mol_type = other DNA
ggcagcgcttcgtggtgcgtgccgcacagaatcgccggctggaagaggcacccggcaagctcttcgaactgccgg

SEQ ID NO: 543274 - DNA, 75 bp, synthetic construct
  source 1..75: mol_type = other DNA
tacaacgtcacccgaccatgcgcgtgttccacaagttaatggattaccacctgaatgaagcagaagaagggcgcg

SEQ ID NO: 543275 - DNA, 75 bp, synthetic construct
  source 1..75: mol_type = other DNA
aatatgttacgttcagttctggaaaaatcagctagcttccatggtttctcaaatttctcagcctgcattgcgcag

SEQ ID NO: 543276 - DNA, 75 bp, synthetic construct
  source 1..75: mol_type = other DNA
acttcgttttgctcgcatgtactggcggaaaagttgctagtgatggtttttattttgtcccagacttgtcttctg

SEQ ID NO: 543277 - DNA, 75 bp, synthetic construct
  source 1..75: mol_type = other DNA
cgctatgtcgttggtgagcttcttcaagatgagtctgaaggctacgagtttaattatcttactgatagcaaagat

SEQ ID NO: 543278 - DNA, 75 bp, synthetic construct
  source 1..75: mol_type = other DNA
cctaacttatacaggcgcgacaccattctttcatcatgttgcgatactaactgagttgtataaagcggagcaatc

SEQ ID NO: 543279 - DNA, 75 bp, synthetic construct
  source 1..75: mol_type = other DNA
aggtttcacgaggagaagaaaatatcttcatttggtgtttcttcttagctatcgtacaattagcacttgatggtg

SEQ ID NO: 543280 - DNA, 75 bp, synthetic construct
  source 1..75: mol_type = other DNA
ggaaatggacaaccgtatacgcccgttattgcagcgttatacagacttcgactttcgaattgatacagaagaatg

SEQ ID NO: 543281 - DNA, 75 bp, synthetic construct
  source 1..75: mol_type = other DNA
ggaggcacgccagcaatccccggctggctgcgtgatggtattcgccgcccgtattcgtcaggggtcacatcatgc

SEQ ID NO: 543282 - DNA, 75 bp, synthetic construct
  source 1..75: mol_type = other DNA
ggaagctcgccagcaatctcctgatggctgcgtgatggtatttactgcccgtattcgtcagggggtgttccatgc

SEQ ID NO: 543283 - DNA, 75 bp, synthetic construct
  source 1..75: mol_type = other DNA
taccaggctaccagcgagtggcagaaagcaattgatgttgccgaacgcctggtgaagctgggtaaagataagcag

SEQ ID NO: 543284 - DNA, 75 bp, synthetic construct
  source 1..75: mol_type = other DNA
ggaagcccgcgcccagctgccgcgcgcacatctgatttttgtcgcccgcattcgccagggggtgagtcatgcata

SEQ ID NO: 543285 - DNA, 75 bp, synthetic construct
  source 1..75: mol_type = other DNA
atgcaaggtgcagaaacgacgaaaccccgcactgtaggagcagtaacggggcttctaaccaccaacgataacgag

SEQ ID NO: 543286 - DNA, 75 bp, synthetic construct
  source 1..75: mol_type = other DNA
ggaagaccgccagcaatccccaactggctgcgtgatgatattcgccgcccgtattcgtcaggaggtgtgccatga

SEQ ID NO: 543287 - DNA, 75 bp, synthetic construct
  source 1..75: mol_type = other DNA
atgtctccggtaccgtctggataccggcagaaagtcgcactgccgcctgatgctgtgctgaccgtgacactttct

SEQ ID NO: 543288 - DNA, 75 bp, synthetic construct
  source 1..75: mol_type = other DNA
gtttagcggttgcgattgcgttggcggcttgcgcggataaaagcgcggatatccagacgccagcaccggctgcaa

SEQ ID NO: 543289 - DNA, 75 bp, synthetic construct
  source 1..75: mol_type = other DNA
ggcttgcgcagataaaagcgcggatattcagacgccagccccggctgcaaatacgtctatttcagcaacacaaca

SEQ ID NO: 543290 - DNA, 75 bp, synthetic construct
  source 1..75: mol_type = other DNA
tgcttctgcttgcgcggatgcggctgacaggttcgcagccctgcttcgtaaaggacaatcctgcctgcgcccgaa

SEQ ID NO: 543291 - DNA, 75 bp, synthetic construct
  source 1..75: mol_type = other DNA
ttataatactttttggtttgattgctctcgccccaaaagaccctgattatgtagaaagagcaaaatttctttcca

SEQ ID NO: 543292 - DNA, 75 bp, synthetic construct
  source 1..75: mol_type = other DNA
gttgagtgcggcggttaccgtgaacgacaaattggtgtttatcaccgataccgttcaaccggtgatcaatcaggg

SEQ ID NO: 543293 - DNA, 75 bp, synthetic construct
  source 1..75: mol_type = other DNA
cacacatgagtacagcgtgccggtggtgcagggccaacccggaaaagttcaccgtgttcattgaacgtggcggga

SEQ ID NO: 543294 - DNA, 75 bp, synthetic construct
  source 1..75: mol_type = other DNA
catttgagggcatgggttctctgagggatatttatttaaaggggatgttgattttagacttccttcctcacttgg

SEQ ID NO: 543295 - DNA, 75 bp, synthetic construct
  source 1..75: mol_type = other DNA
caagcaatccctaatttatcatctatcaagactttaaggagcatcaagttatctggattatctaaggcttcggac

SEQ ID NO: 543296 - DNA, 75 bp, synthetic construct
  source 1..75: mol_type = other DNA
tttgtctctgacggctccgctgaatggaggcgtaaagtggggattttttgccattacattgctgaaaacactggg

SEQ ID NO: 543297 - DNA, 75 bp, synthetic construct
  source 1..75: mol_type = other DNA
aactcgcagcgggtattgcagtcgcagccgggggagctaaatcccgcccggcagcaaatgctgcccaacaccaac

SEQ ID NO: 543298 - DNA, 75 bp, synthetic construct
  source 1..75: mol_type = other DNA
atgttcgtgatggactacacgggcgatctggacaacctgacgcttccactgattgtctggctggcagagaaccag

SEQ ID NO: 543299 - DNA, 75 bp, synthetic construct
  source 1..75: mol_type = other DNA
ttaacttcacgctatctgttttagaaaaaacagaagcaagcaaattaataaaagaacaagaaaaacaagaacata

SEQ ID NO: 543300 - DNA, 75 bp, synthetic construct
  source 1..75: mol_type = other DNA
gccaagaaaaggcaaattatggtcagtgatttgatgttaggaatcattactgaagcagcagagaatatcaaacaa

SEQ ID NO: 543301 - DNA, 75 bp, synthetic construct
  source 1..75: mol_type = other DNA
tcagtgatttgatgttagaaatcattactgaagcagcagagaacatcaaacaaaaaagggtaagtgatcctcatt

SEQ ID NO: 543302 - DNA, 75 bp, synthetic construct
  source 1..75: mol_type = other DNA
atatgcagtagcgaacagcaagaaagcattacagatcatcactcacttgctgagatatgccaaaaatttaatatt

SEQ ID NO: 543303 - DNA, 75 bp, synthetic construct
  source 1..75: mol_type = other DNA
ggcgcttggtggcggactggcagcgggtctgacgctttccctgaaatcttatgccgatcaggaaaacgccgccac

SEQ ID NO: 543304 - DNA, 75 bp, synthetic construct
  source 1..75: mol_type = other DNA
acatgatggggctgttcgacacaattcagaaggcgttttatctgggcgttgacgacaccaacatgctgtcattct

SEQ ID NO: 543305 - DNA, 75 bp, synthetic construct
  source 1..75: mol_type = other DNA
gtgggtaaagcgacagcttatcttgcggtacaactgaaaaaaacaccggaagcggctgctgagtttgctgcaaag

SEQ ID NO: 543306 - DNA, 75 bp, synthetic construct
  source 1..75: mol_type = other DNA
caaaagcatttgatattcagtcggcaattcctgatgaaaaggctaccaggctggagttgctttgtaagggagggc

SEQ ID NO: 543307 - DNA, 75 bp, synthetic construct
  source 1..75: mol_type = other DNA
gtcaggtgctaaatatcatcggtcctcctgtagcaaatgcgaccggcactcgcctggaaatcctttgcaaaacgg

SEQ ID NO: 543308 - DNA, 75 bp, synthetic construct
  source 1..75: mol_type = other DNA
gggtaaaaattctcaccttcacgacttcgcgcgatccatctggtcagccggttgaatcgtggacaggtggcaacc

SEQ ID NO: 543309 - DNA, 75 bp, synthetic construct
  source 1..75: mol_type = other DNA
aggctgagattgcaaagaaattgagtatcagtttatcgactgtgaagcggcactggaataacggaatcatcggtt

SEQ ID NO: 543310 - DNA, 75 bp, synthetic construct
  source 1..75: mol_type = other DNA
tcgataaaggaaaggatggctacgatcagatccagcagaagatgaataaacaggccagcctgaataaacgtgttc

SEQ ID NO: 543311 - DNA, 75 bp, synthetic construct
  source 1..75: mol_type = other DNA
aacaacagtgacagagtcgaaatccagaggcatcaacgtgagtaccgatgttggttataccagaattggtagaac

SEQ ID NO: 543312 - DNA, 75 bp, synthetic construct
  source 1..75: mol_type = other DNA
atgcgctgtaccgggaagattttaagcccaccagacagtccagggcgaagagtctgctgttgctggagcagaaat

SEQ ID NO: 543313 - DNA, 75 bp, synthetic construct
  source 1..75: mol_type = other DNA
aaacggtttatacccagtcccgtaacgggagttatcgcccggtcggcactagcgatctgtttcgcgatctgactg

SEQ ID NO: 543314 - DNA, 75 bp, synthetic construct
  source 1..75: mol_type = other DNA
cgcgcgaacagcacagtcgtctcgatacgctgattcgttcctatgctgcgcaggatattaaaacaggcctcaata

SEQ ID NO: 543315 - DNA, 75 bp, synthetic construct
  source 1..75: mol_type = other DNA
atgagattaacgacgaaattttcggcctttgtcacgctgctcaccgggttaacaatttttgtgactttgctgggc

SEQ ID NO: 543316 - DNA, 75 bp, synthetic construct
  source 1..75: mol_type = other DNA
caggacatgaaaaccggcctcaataaccgactctttttcgataatcagttagcaacgttactggaagatcaggag

SEQ ID NO: 543317 - DNA, 75 bp, synthetic construct
  source 1..75: mol_type = other DNA
tgctcttcctggcggtacgctggttacaacggcaacttgccgggcaagaattgctggaaacccgggctactcgta

SEQ ID NO: 543318 - DNA, 75 bp, synthetic construct
  source 1..75: mol_type = other DNA
aatctgttttcacgtagaataacgcgcgctgcgtctcatgggagtgtgcttgtctgctcgccagattgttgcagc

SEQ ID NO: 543319 - DNA, 75 bp, synthetic construct
  source 1..75: mol_type = other DNA
ccgcgctgggcgcggctctcattggctgaacgtcaggccgttgtcgaacgctttgccggattgctggaaagcaat

SEQ ID NO: 543320 - DNA, 75 bp, synthetic construct
  source 1..75: mol_type = other DNA
tattggcgggctgatatcagagcaggccgcgcagcaggttgtttctgcctggcaggaactggaagcaatgggggg

SEQ ID NO: 543321 - DNA, 75 bp, synthetic construct
  source 1..75: mol_type = other DNA
ctggagtcggactcgttaacattgcccgccacgcttaaccccgggctggatttttccgatgaggtggtgcgatga

SEQ ID NO: 543322 - DNA, 75 bp, synthetic construct
  source 1..75: mol_type = other DNA
gaccagagtaccgtagaaaaagaaaccatcgacaatatatctggtaacgtacgccgagcctttatcgggctgtac

SEQ ID NO: 543323 - DNA, 75 bp, synthetic construct
  source 1..75: mol_type = other DNA
aaagccgaattaaccgcgattattgccagagaaaccggtaagccgcgctgggaagcggcaaccgaagtgacggcg

SEQ ID NO: 543324 - DNA, 75 bp, synthetic construct
  source 1..75: mol_type = other DNA
gtcagccagcgattaacgccgggcaactgggatgacgaaccacagccgtttattggcgggctgatttctgaacag

SEQ ID NO: 543325 - DNA, 75 bp, synthetic construct
  source 1..75: mol_type = other DNA
attgcaggcgctggagtacagtctgatttattcccttttcccgctgtataatgcgctgtaccgggaagattttaa

SEQ ID NO: 543326 - DNA, 75 bp, synthetic construct
  source 1..75: mol_type = other DNA
gttcagtacaccgctgattttttcggtccaggaggttaaggggctggaatacgagacggtgattctctacaacat

SEQ ID NO: 543327 - DNA, 75 bp, synthetic construct
  source 1..75: mol_type = other DNA
ctggtggaaaaagcgcgaacgctttataacgcgtcgggggaagggagtgatgcgcagaatattgactttctgtca

SEQ ID NO: 543328 - DNA, 75 bp, synthetic construct
  source 1..75: mol_type = other DNA
acgaaacggtgatcctctacaacatggtcagcggtgtccggcaggcgtttgatgatatctgtgaggggatttttc

SEQ ID NO: 543329 - DNA, 75 bp, synthetic construct
  source 1..75: mol_type = other DNA
cgctggcagagccccgttacgatgccatttttgtcgatgaagttcaggatatgacgcctgttcagttgcaactgg

SEQ ID NO: 543330 - DNA, 75 bp, synthetic construct
  source 1..75: mol_type = other DNA
cttcagggcattcagcgactggctgccccgcaacaggaccaccgttgcgctggggtctgcccataccctgtatga

SEQ ID NO: 543331 - DNA, 75 bp, synthetic construct
  source 1..75: mol_type = other DNA
gatgttgacgctgagaatcatgaagcatatccgggacatttgaatgagattaaacgcattctgaatttcgctatt

SEQ ID NO: 543332 - DNA, 75 bp, synthetic construct
  source 1..75: mol_type = other DNA
taataccctgggcaataaaaccacatgtaaggtttgtcataaatattttatccttatcctctcgattatgaacaa

SEQ ID NO: 543333 - DNA, 75 bp, synthetic construct
  source 1..75: mol_type = other DNA
tgtaatgtttgtcataaatattttatccatatcctcacagttatgaacaacctgacgattaactatggtactgaa

SEQ ID NO: 543334 - DNA, 75 bp, synthetic construct
  source 1..75: mol_type = other DNA
tactccgctgatgtcagcagcccgggcaggtaacatcgcactggttcagctactgcttgatcgtggcgcagatcc

SEQ ID NO: 543335 - DNA, 75 bp, synthetic construct
  source 1..75: mol_type = other DNA
ctactgccatcaatcaaattacaaattggcgatcgcgatcattacggtaattactgggacggtggtcactggcgc

SEQ ID NO: 543336 - DNA, 75 bp, synthetic construct
  source 1..75: mol_type = other DNA
ccgccctgatggcatttaccccgcttgcagcaaacgcaggtgaaatcaccctactgccatcaatcaaattacaaa

SEQ ID NO: 543337 - DNA, 75 bp, synthetic construct
  source 1..75: mol_type = other DNA
tttgaagatgccgattttggcatacaggccgctcgcgccgcaggcatggacgccgtggatgttcgcttgctgtga

SEQ ID NO: 543338 - DNA, 75 bp, synthetic construct
  source 1..75: mol_type = other DNA
acctggcgtatagcccaggcgattattgagctgaatcaggccgatctcgatccccatgcattagcccgcgagaaa

SEQ ID NO: 543339 - DNA, 75 bp, synthetic construct
  source 1..75: mol_type = other DNA
cctgaaaaaatacattgctgagctggaggtgcagaccggcatgacactgcgacgcaggggacccgcaggatttta

SEQ ID NO: 543340 - DNA, 75 bp, synthetic construct
  source 1..75: mol_type = other DNA
cgcccatagcagtgtttattgctcgattcttgaagctcttgaacaaggggcgagtggtgttaagagtggctgttg

SEQ ID NO: 543341 - DNA, 75 bp, synthetic construct
  source 1..75: mol_type = other DNA
tccatttcggataatgtcttcgtgggaacgatctatatcaacgaagcaaaggcagccatggagagtggcgttatc

SEQ ID NO: 543342 - DNA, 75 bp, synthetic construct
  source 1..75: mol_type = other DNA
tttgcgtggcggcggcgttcctctccgcgttcctcgatgccttaaccgtcgtggcggtggtgatcagcgttgcag

SEQ ID NO: 543343 - DNA, 75 bp, synthetic construct
  source 1..75: mol_type = other DNA
ttgatgatgaaaaccgcagtagcggctggcgtcatcagcgtttaccagattacaaagcgggtcgaccgccaatgc

SEQ ID NO: 543344 - DNA, 75 bp, synthetic construct
  source 1..75: mol_type = other DNA
ttactttcagaaacgctggctggacgcaccgtttattgataaagaatttggcgttcaacctcagcaattgcccga

SEQ ID NO: 543345 - DNA, 75 bp, synthetic construct
  source 1..75: mol_type = other DNA
atgacttagccgccacgctggcggtcaaagtgacgcaggccgggcatcaggcaacgattgtttcgacagataaag

SEQ ID NO: 543346 - DNA, 75 bp, synthetic construct
  source 1..75: mol_type = other DNA
gcacggctgcggcgctgggtggcgcgacggtaacggtacagaaagacggacggcgagtggagtttacggccactt

SEQ ID NO: 543347 - DNA, 75 bp, synthetic construct
  source 1..75: mol_type = other DNA
ctgtttatcgatcctgatgtgcgcggctgcggcgtaggtcggatgctggtggagcatgcgctctcgatggcaccg

SEQ ID NO: 543348 - DNA, 75 bp, synthetic construct
  source 1..75: mol_type = other DNA
ccctactaaaagagcgccgctcggcctttatcaccgccgctgtcaccggccagattgatttgcgaggaaaacaat

SEQ ID NO: 543349 - DNA, 75 bp, synthetic construct
  source 1..75: mol_type = other DNA
gccgggcaggtgggggctgagtcccgaaatgtcgagcgggaagcgcttattgacagtgaaattctgcgtggtcag

SEQ ID NO: 543350 - DNA, 75 bp, synthetic construct
  source 1..75: mol_type = other DNA
taatgagcaaaattctgaccggtgtaagcacttgcttacataacaatatacaattgctcgttgaaagagtgagct

SEQ ID NO: 543351 - DNA, 75 bp, synthetic construct
  source 1..75: mol_type = other DNA
ggcccgttcactgcagcatggccattcgtgatcagtttccttttgctggccgctcttacttacatcatggcaacc

SEQ ID NO: 543352 - DNA, 75 bp, synthetic construct
  source 1..75: mol_type = other DNA
gttgtccaacccgcgaaacattgcagcgtctggggctggaagatattgccgccgatctggcagcacacaatctac

SEQ ID NO: 543353 - DNA, 75 bp, synthetic construct
  source 1..75: mol_type = other DNA
aggacgtaatggttattcctgcgagaaatgattcaccggatttgagatggcaggagccggagtgggatgtggcaa

SEQ ID NO: 543354 - DNA, 75 bp, synthetic construct
  source 1..75: mol_type = other DNA
gcatagcgctcacattatggtgctggacgtcagaacgaacaggatttgtcttctggtttaccgcactggggcttc

SEQ ID NO: 543355 - DNA, 75 bp, synthetic construct
  source 1..75: mol_type = other DNA
acgttcactaccggcctgaactacgaaaacatgagtgaaaaccgcaagggctacaataacttccgcctgaatcgc

SEQ ID NO: 543356 - DNA, 75 bp, synthetic construct
  source 1..75: mol_type = other DNA
atgggcaaagcggtatgaactttgggttaaaaccctccaccaacgatacaattgagatcggcagtaaaacgcgta

SEQ ID NO: 543357 - DNA, 75 bp, synthetic construct
  source 1..75: mol_type = other DNA
ggtgtcacgctgggattgttcgattatctggcggatctgtttaagattgataactcccacggcgggcgtttcaaa

SEQ ID NO: 543358 - DNA, 75 bp, synthetic construct
  source 1..75: mol_type = other DNA
gaggggataacgagctattaccagggcatgctgaaagacagtggcgaacagcggaatacagacaaactccgccac

SEQ ID NO: 543359 - DNA, 75 bp, synthetic construct
  source 1..75: mol_type = other DNA
cggggcgccgtaatcgggttttttgtattgtcggcgacggagagcttaatgaaggccagtgctgggaagccttcc

SEQ ID NO: 543360 - DNA, 75 bp, synthetic construct
  source 1..75: mol_type = other DNA
tcaaccacgcgttttacgacccacggctatcgtgaccatagtggcgcacagaaaaatttagccaatgccaaactg

SEQ ID NO: 543361 - DNA, 75 bp, synthetic construct
  source 1..75: mol_type = other DNA
gtggctgttcatttgcttattgtcgatgcactgaatcttattcgtcgcattcatgccgttcagggctcgccctgc

SEQ ID NO: 543362 - DNA, 75 bp, synthetic construct
  source 1..75: mol_type = other DNA
atgcggcaaaacatttactcagggagatacgggggggctgagtacgtcatcatcagtaagggaacgctgtatggc

SEQ ID NO: 543363 - DNA, 75 bp, synthetic construct
  source 1..75: mol_type = other DNA
acaaaaccaagtagaagctgttaaacgtgctggttatgaagtcaaaccttcacgagtaattgaggaagttattag

SEQ ID NO: 543364 - DNA, 75 bp, synthetic construct
  source 1..75: mol_type = other DNA
agtgacggcctggagcgaaacccgcgagattatggggattcgccatcgccagtgggatctggaaggtgtgcagtt

SEQ ID NO: 543365 - DNA, 75 bp, synthetic construct
  source 1..75: mol_type = other DNA
gcccttgatcacttgcgttataccatcccaaaacattatttcgacgaagcattaagcggcggtaagccgggtgat

SEQ ID NO: 543366 - DNA, 75 bp, synthetic construct
  source 1..75: mol_type = other DNA
agcggagtaggggctaacgccacggcgctaattggtttctcacaaggcgcgattatggcgctggagagcattaaa

SEQ ID NO: 543367 - DNA, 75 bp, synthetic construct
  source 1..75: mol_type = other DNA
ccgggctatgtgcaacgggaatttgaagaatttctccaaatgcgggcggctggagcatggctttctacgggttcg

SEQ ID NO: 543368 - DNA, 75 bp, synthetic construct
  source 1..75: mol_type = other DNA
gcttggccccacctacgactacacccatcgcctgctcgatttcaccctgctggcaaacggcgaagcgccgacgct

SEQ ID NO: 543369 - DNA, 75 bp, synthetic construct
  source 1..75: mol_type = other DNA
cgctggcaaaactggcggtaagcgagccgctcgacaccaccgagatgcgtctcgaacgccgtatctccgccgttt

SEQ ID NO: 543370 - DNA, 75 bp, synthetic construct
  source 1..75: mol_type = other DNA
tggctgcgggattaattatcactaactgggatgttgtcggaccttatttcaagaagctctgggaaaccattggtc

SEQ ID NO: 543371 - DNA, 75 bp, synthetic construct
  source 1..75: mol_type = other DNA
caatggcgcaggcatttggcggcaaagttgtgcgcgccgcaaaggtgatgcacggcaaaacctcgccgatcacac

SEQ ID NO: 543372 - DNA, 75 bp, synthetic construct
  source 1..75: mol_type = other DNA
attcttttacctggaacctctaccagtacttttgtgaactgggggcggatgtgctggttaagcgcaacgatgcgt

SEQ ID NO: 543373 - DNA, 75 bp, synthetic construct
  source 1..75: mol_type = other DNA
ctcgaacggcgtatctccgccgtttataaagacattcccggcggccagctgcttggcccaacctacgactacacc

SEQ ID NO: 543374 - DNA, 75 bp, synthetic construct
  source 1..75: mol_type = other DNA
atatcgtggaggatttaggccatgcgatcgacaatcgcagtatgcaatttgccctggatcacttgcgttatacca

SEQ ID NO: 543375 - DNA, 75 bp, synthetic construct
  source 1..75: mol_type = other DNA
gattggcgacaagttgaaagtggtgtttatcccgaactacagcgtcagcctggcgcagttgatcatcccggcggc

SEQ ID NO: 543376 - DNA, 75 bp, synthetic construct
  source 1..75: mol_type = other DNA
cctgatgcgaaatgggttccgcgtgtgaatatttttgccggtaaggcagcatcggcctattacatggcgaagcac

SEQ ID NO: 543377 - DNA, 75 bp, synthetic construct
  source 1..75: mol_type = other DNA
tcgattctctggcgacgttagggttgccggggcgcggttacggcatccgctatgactacggtatgttcaagcaga

SEQ ID NO: 543378 - DNA, 75 bp, synthetic construct
  source 1..75: mol_type = other DNA
atccagccatagcctgttctggcatcgaatgttacccttatcacctgatctttaagggggttatcgtggctgttc

SEQ ID NO: 543379 - DNA, 75 bp, synthetic construct
  source 1..75: mol_type = other DNA
ttgcgaggcctcttcccgatttctcatccagccgtagcctgttccggcatcgaatgttacccttatcgcctgatc

SEQ ID NO: 543380 - DNA, 75 bp, synthetic construct
  source 1..75: mol_type = other DNA
ttccgatggtcaatcatgctgttcatcaggcgaaactggagaacaaaaagcgtctggcggagtacatcgcccaac

SEQ ID NO: 543381 - DNA, 75 bp, synthetic construct
  source 1..75: mol_type = other DNA
aaaacgggcggcaacaaaaccgaagccgcccgtcagttagggatcacgcgcaaaacgctattggcaaaactgtcg

SEQ ID NO: 543382 - DNA, 75 bp, synthetic construct
  source 1..75: mol_type = other DNA
ctactggcagaaacagagcggagtaggggctaacgccacggcgctaatcggtttctcacaaggcgcgattatggc

SEQ ID NO: 543383 - DNA, 75 bp, synthetic construct
  source 1..75: mol_type = other DNA
ttactgacggcaaagggagttttggcggtcttgataacatgttcaggcaactggcaaagctgcgaaaactgaccg

SEQ ID NO: 543384 - DNA, 75 bp, synthetic construct
  source 1..75: mol_type = other DNA
agctatcgcgccaaaagttgatggcgagatcaaggtttcatttatgaatatgccaccaggtatgcgggttacgga

SEQ ID NO: 543385 - DNA, 75 bp, synthetic construct
  source 1..75: mol_type = other DNA
tcaaatgttttgatgaagtatttttgtccctatccaacttaacgttattgacggggtttaatgctgcaggtaagt

SEQ ID NO: 543386 - DNA, 75 bp, synthetic construct
  source 1..75: mol_type = other DNA
gttcatgaagcaaaattgcatggcgcgcacaccgtggaactcaatcttgagccgagccaggttggtaacgaattt

SEQ ID NO: 543387 - DNA, 75 bp, synthetic construct
  source 1..75: mol_type = other DNA
cgatcaaaaattactgcatattgattgccgtagtacaaatgaaatcaagataaatatcttttttggtcaacaacg

SEQ ID NO: 543388 - DNA, 75 bp, synthetic construct
  source 1..75: mol_type = other DNA
ttcgtcggtgcgattctctggctggcgggggcccgtgttggcgggcatgaacaggtgtgcgaccgttactggtgg

SEQ ID NO: 543389 - DNA, 75 bp, synthetic construct
  source 1..75: mol_type = other DNA
cgcatcttgcgctggctaaactgcaagacgccctcggcgatcgctttttgctggtgacgcagaatatcgacaacc

SEQ ID NO: 543390 - DNA, 75 bp, synthetic construct
  source 1..75: mol_type = other DNA
agtactcgtactgacaggggcaggcatttctgcggaatcaggtattcgtacctttcgcgctgcagacggcctgtg

SEQ ID NO: 543391 - DNA, 75 bp, synthetic construct
  source 1..75: mol_type = other DNA
tgcatggggaattgctgaaagttcgttgttcgcaaagtggtcaggttctcgactggaccggagacgttacgccag

SEQ ID NO: 543392 - DNA, 75 bp, synthetic construct
  source 1..75: mol_type = other DNA
ggtggggcatctgcgggagaatatggcgtccgatgaattagtgctaacggatgacgtgctggcaacgctggacag

SEQ ID NO: 543393 - DNA, 75 bp, synthetic construct
  source 1..75: mol_type = other DNA
gcgtcaatcatattgataccagcgacttttatggtccgcacgtcaccaatcagattatccgcgaagcgctttatc

SEQ ID NO: 543394 - DNA, 75 bp, synthetic construct
  source 1..75: mol_type = other DNA
acgataatctacgtaatctcggcctggacgtactggatgtggttaacctgcgcgttatgatgggggatggtcatg

SEQ ID NO: 543395 - DNA, 75 bp, synthetic construct
  source 1..75: mol_type = other DNA
gttacagcgttcaccgaatattttgctgattcctggaacatcttctgttgcgcatttacgggagaatatggctgc

SEQ ID NO: 543396 - DNA, 75 bp, synthetic construct
  source 1..75: mol_type = other DNA
gccttaatgcgacaccaatgcaggtggcgctggcgtggctgttacagcgttcaccgaatattttgctgattcctg

SEQ ID NO: 543397 - DNA, 75 bp, synthetic construct
  source 1..75: mol_type = other DNA
agatgcaacaacaaggcctggtaaaacatattggcctgagtaacgtcacaccgacgcaggttgcagaggcgcgaa

SEQ ID NO: 543398 - DNA, 75 bp, synthetic construct
  source 1..75: mol_type = other DNA
attatgtcgacacccaaatctggcgagctatatggcgatggtgtgtaagacggcatccccggaaaggattgcggt

SEQ ID NO: 543399 - DNA, 75 bp, synthetic construct
  source 1..75: mol_type = other DNA
aaggaaaaattattatctattgagctatatattgtgcctctatctcgagagcaatatttaacagaagaaagatca

SEQ ID NO: 543400 - DNA, 75 bp, synthetic construct
  source 1..75: mol_type = other DNA
ggagaacattaccattctggccgaagcagcagcactggcaacctctccggcgttaacagatgaactggtcagcca

SEQ ID NO: 543401 - DNA, 75 bp, synthetic construct
  source 1..75: mol_type = other DNA
tactacgtccgaagtgagcgtggcattaactcttgatactactggttcaacttccaccggcgacacattgttgac

SEQ ID NO: 543402 - DNA, 75 bp, synthetic construct
  source 1..75: mol_type = other DNA
tcattatccaggataaacggctggataactttggtacgccagaatacaacgaaccgggaagcggcggctttgttg

SEQ ID NO: 543403 - DNA, 75 bp, synthetic construct
  source 1..75: mol_type = other DNA
cggaatgattcaataagatcgcattttaaacgggcacttcagaagtatgcttttgattggaattatgatgatagt

SEQ ID NO: 543404 - DNA, 75 bp, synthetic construct
  source 1..75: mol_type = other DNA
tttagattccttagcaaaaactattcattgtgcgcagaatagtcaggtatggaaaagtcgctatgagacaaccat

SEQ ID NO: 543405 - DNA, 75 bp, synthetic construct
  source 1..75: mol_type = other DNA
gtggaaacgcgggcagaaagttaccattcacggctgggcctacggcattcacgacggcttgctgcgtgatctgga

SEQ ID NO: 543406 - DNA, 75 bp, synthetic construct
  source 1..75: mol_type = other DNA
tgcgggaaagtcataccatagatgtactgatgggacgtctgcgcaaaaaaatacaggcacaatatccgcaagaag

SEQ ID NO: 543407 - DNA, 75 bp, synthetic construct
  source 1..75: mol_type = other DNA
gtctgtcactgatttgccgctggcgtagcaatgatgtttcactgccgattctggtattaaccgcccgtgaaagct

SEQ ID NO: 543408 - DNA, 75 bp, synthetic construct
  source 1..75: mol_type = other DNA
ttggcggtaccagcgtagctgattttgacgccatgaaccgcagcgctgatattgtgctttctgatgccaacgtac

SEQ ID NO: 543409 - DNA, 75 bp, synthetic construct
  source 1..75: mol_type = other DNA
ttgatctctcccgccgtgaattatctattaatgacgaagtgatcaaactgaccgcgttcgaatacaccatcatgg

SEQ ID NO: 543410 - DNA, 75 bp, synthetic construct
  source 1..75: mol_type = other DNA
gccactccaccattatgcaatcagcgtggaaacgcgggcagaaagtcaccattcacggctgggcctacggcattc

SEQ ID NO: 543411 - DNA, 75 bp, synthetic construct
  source 1..75: mol_type = other DNA
aaccgcgaaactcttgagcaacgttaccgtcacgggatctccaacctcaagctgaaacacgccaaccacaaataa

SEQ ID NO: 543412 - DNA, 75 bp, synthetic construct
  source 1..75: mol_type = other DNA
ctggagtcaatcgttcttgagcatggcggtgattcgttgggtattgtcggttcgtcactgggcggctattacgct

SEQ ID NO: 543413 - DNA, 75 bp, synthetic construct
  source 1..75: mol_type = other DNA
agctcgaccacgccagtgagcaaagagtataagcagcagttgatgggatcccctgtctacatccagatcttcaag

SEQ ID NO: 543414 - DNA, 75 bp, synthetic construct
  source 1..75: mol_type = other DNA
aaaaattgtcgtttccggttgctctcccgacgcgtggaacggcgaatatactgctaccgtcgcggatgaaaaaac

SEQ ID NO: 543415 - DNA, 75 bp, synthetic construct
  source 1..75: mol_type = other DNA
ctggaatccattgtgctggaacatggtggtgattctctgggtatcgttggttcgtcacttgggggttattacgct

SEQ ID NO: 543416 - DNA, 75 bp, synthetic construct
  source 1..75: mol_type = other DNA
atgtctacgcttctttatttacacggtttcaacagctcgccgcgttctgcaaaagcgagcttgttgaaaaactgg

SEQ ID NO: 543417 - DNA, 75 bp, synthetic construct
  source 1..75: mol_type = other DNA
atgctgcccgcagtggtggtaaacccggcggtgcgcccgtttgaactgctgacggactatctcggtcagaacgag

SEQ ID NO: 543418 - DNA, 75 bp, synthetic construct
  source 1..75: mol_type = other DNA
aagagcactattcaaatatagaaaatctcatgatgtaattttgaaaaaatcaggaatacctgcgtttatattaaa

SEQ ID NO: 543419 - DNA, 75 bp, synthetic construct
  source 1..75: mol_type = other DNA
ggcagcgtcggtgtgttctggcgcaataacgaaacgccttcttatgctttaagtcagtttctgcactttattaca

SEQ ID NO: 543420 - DNA, 75 bp, synthetic construct
  source 1..75: mol_type = other DNA
ataatattccactctcgtatgccttaagtagatttatcgattgtttaattcatgataaaatcgaagcaagtcgat

SEQ ID NO: 543421 - DNA, 75 bp, synthetic construct
  source 1..75: mol_type = other DNA
gatctggttaaaaatccgattgctgcgttgtcggcggctgccgcaggaaaatctgcggcaaacgtcaccgttacg

SEQ ID NO: 543422 - DNA, 75 bp, synthetic construct
  source 1..75: mol_type = other DNA
tgggccagttttccattgctggcagtgaaaatctggtgacggcggtgaacacattttttgcccagggaaattcag

SEQ ID NO: 543423 - DNA, 75 bp, synthetic construct
  source 1..75: mol_type = other DNA
ctgttttgctactcggccattcctgtttccggagcagatgcaacccgcgccctgctgcctggacacacgccaacg

SEQ ID NO: 543424 - DNA, 75 bp, synthetic construct
  source 1..75: mol_type = other DNA
gtacccttccgatgcggcagaactgctggaatccattgtcctggaacatggcggcgattcgctggggatcgtcgg

SEQ ID NO: 543425 - DNA, 75 bp, synthetic construct
  source 1..75: mol_type = other DNA
cgtgcagttcacctatattcccggcacctacaataacggcaacttgctgtttgcgtggctgcgctacggttttta

SEQ ID NO: 543426 - DNA, 75 bp, synthetic construct
  source 1..75: mol_type = other DNA
gctaccatggcaggatgtagagaaaacttccacctggctgaatatatggcccgatgaaatctatggtagtaccga

SEQ ID NO: 543427 - DNA, 75 bp, synthetic construct
  source 1..75: mol_type = other DNA
atcaaaaatagataaaagacatccatataataaaaagaaaatggctgctggtatgtatcacctgaagggaatgat

SEQ ID NO: 543428 - DNA, 75 bp, synthetic construct
  source 1..75: mol_type = other DNA
gcttacgaggcggcgttgaaagccaataataaggtctatgaggcgtatatctatccgggggttaatcacggattc

SEQ ID NO: 543429 - DNA, 75 bp, synthetic construct
  source 1..75: mol_type = other DNA
gaacgcggcagcggtggcatacccggaactggcctgcgcggtgccgttttatggtcgccaggcgcccaccgccga

SEQ ID NO: 543430 - DNA, 75 bp, synthetic construct
  source 1..75: mol_type = other DNA
catcagcaaatcagcccggatctagccaacagccagcgagctgcacttgctgcctggctggaagagtatcccgat

SEQ ID NO: 543431 - DNA, 75 bp, synthetic construct
  source 1..75: mol_type = other DNA
atacttgaacaagagaatctttcagaactaccatctcagatattaaacccagtaaacaaagaggtatcaaaatga

SEQ ID NO: 543432 - DNA, 75 bp, synthetic construct
  source 1..75: mol_type = other DNA
agaaataaggtagtgcatgaagaaataaaggaaagcataaaaaaaagaggattaagcaagcctataagcgtaaga

SEQ ID NO: 543433 - DNA, 75 bp, synthetic construct
  source 1..75: mol_type = other DNA
atgaagtttaaacagtataaagattggaagattccagaagaagcaacaaaggcagcgcccggaagtttttcgggc

SEQ ID NO: 543434 - DNA, 75 bp, synthetic construct
  source 1..75: mol_type = other DNA
aacgtctgctggcgctggacggcattcgcgaggcggcggctgttcccgttacacgcggcgggcgtcagagcatcg

SEQ ID NO: 543435 - DNA, 75 bp, synthetic construct
  source 1..75: mol_type = other DNA
gtctcttttcaccgctgatggcggaagatagcggcctgttactcgacgatatcttacagtttaccgatgacggcc

SEQ ID NO: 543436 - DNA, 75 bp, synthetic construct
  source 1..75: mol_type = other DNA
ttattatcacaaaccatcaaaaagaatgactgctgaggagttaattgagctttatgaaaatagtatcgctgaaca

SEQ ID NO: 543437 - DNA, 75 bp, synthetic construct
  source 1..75: mol_type = other DNA
tggcgatgtagacttcgaaaagacaaaaaacaatgctgaaataattagatattacatacatttttatattcctag

SEQ ID NO: 543438 - DNA, 75 bp, synthetic construct
  source 1..75: mol_type = other DNA
cgaacatagcaaaactattcttggcgacctggaagcattaaagcgcaacacagtgctgattcacgatggtattga

SEQ ID NO: 543439 - DNA, 75 bp, synthetic construct
  source 1..75: mol_type = other DNA
tatttgacctcgttgataatcccacagatccatcgcttgctatgcgaataattatggaaagcgctggcgcaatag

SEQ ID NO: 543440 - DNA, 75 bp, synthetic construct
  source 1..75: mol_type = other DNA
agatgacaaacatgatctcatatcagggacttgttcgcaccttccctaacgcagatgagtggatgacaacgttta

SEQ ID NO: 543441 - DNA, 75 bp, synthetic construct
  source 1..75: mol_type = other DNA
taacgagcgaccgtggggtggcggttttggcctgtcgcgttgggatgaaaaaggaaactggcatggcctgtatgc

SEQ ID NO: 543442 - DNA, 75 bp, synthetic construct
  source 1..75: mol_type = other DNA
ttagagaaaatattgcacaaacctggcaacagcctgaacattatgatttatatattcctgccatcacctggcatg

SEQ ID NO: 543443 - DNA, 75 bp, synthetic construct
  source 1..75: mol_type = other DNA
aaattactttgcaacaaaaagcgttaactcctgtgatttaaagcatcccgccacagacgggagtgttacagttag

SEQ ID NO: 543444 - DNA, 75 bp, synthetic construct
  source 1..75: mol_type = other DNA
atgaaatggtctccagagcaaatatcaggatggttaaggcgaacaaaaccacgtcacaaaacgctgcgaatatca

SEQ ID NO: 543445 - DNA, 75 bp, synthetic construct
  source 1..75: mol_type = other DNA
accggatatcaccacttatctgctcggttctaacgccgcagctgtcgtgcgtcacgcagagtgctccgtgctggt

SEQ ID NO: 543446 - DNA, 75 bp, synthetic construct
  source 1..75: mol_type = other DNA
ggcacctggagctggctgagaaaatcgaaccatgcgcactgcggggggcctatgggccggtcttcgataacacta

SEQ ID NO: 543447 - DNA, 75 bp, synthetic construct
  source 1..75: mol_type = other DNA
aaacagccaaggcctcctcaaatagtcgattaccaggaagacaagcgatacacgcttgaggaagcggaagctatc

SEQ ID NO: 543448 - DNA, 75 bp, synthetic construct
  source 1..75: mol_type = other DNA
aaacggtcgatgggcacaacgagctggtagtcagctttttgtccagaatggtaagcctgagtgacgaggaaaagc

SEQ ID NO: 543449 - DNA, 75 bp, synthetic construct
  source 1..75: mol_type = other DNA
cgcaagagccgtcaacgatgatgagaagtacccactggtatttatccgcccacgtcaccctgatatggggagatg

SEQ ID NO: 543450 - DNA, 75 bp, synthetic construct
  source 1..75: mol_type = other DNA
ggtgcggcgagcctgcgacatcgcccgcacggcgtgctggcggtgtttgggccgtataatttccctggtcatttg

SEQ ID NO: 543451 - DNA, 75 bp, synthetic construct
  source 1..75: mol_type = other DNA
tgtgaagcgtaatccggtatcgggcgaggtgttatggcaaggcaatgatgccgatgccgctcaggtcgagcaggc

SEQ ID NO: 543452 - DNA, 75 bp, synthetic construct
  source 1..75: mol_type = other DNA
tgtcagcagatatgccgcttgttggctgtgttttgactttgttactgttggttttgcttatatttatggcagcaa

SEQ ID NO: 543453 - DNA, 75 bp, synthetic construct
  source 1..75: mol_type = other DNA
gcgaataacactcgctttggcctctcttgcggtctggtttcccccgagcgggaaaaattcgatcaactgttgctg

SEQ ID NO: 543454 - DNA, 75 bp, synthetic construct
  source 1..75: mol_type = other DNA
ggcagcaggctggcttgccgccgggcgtgctgaacctggtgcagggcgggcgtgaaacgggtcaggcgctgagtg

SEQ ID NO: 543455 - DNA, 75 bp, synthetic construct
  source 1..75: mol_type = other DNA
cgcacggcgtgctggcggtgtttgggccgtataatttccctggtcatttgccgaacggacatatcgttccggcat

SEQ ID NO: 543456 - DNA, 75 bp, synthetic construct
  source 1..75: mol_type = other DNA
cctgtatggcaatggtctggttggtcatttatttcgggatggaattactttttatcgctgatcggattcatccgg

SEQ ID NO: 543457 - DNA, 75 bp, synthetic construct
  source 1..75: mol_type = other DNA
tgtatgacagcccgatgggctacgtcatcaaaatgctcgtttcagtcttcggcccgcgtgattttgccctgaccg

SEQ ID NO: 543458 - DNA, 75 bp, synthetic construct
  source 1..75: mol_type = other DNA
atggtctggttggttatttatttcggaatggaattactttttatctccgatcgggttcatccggtattaagaata

SEQ ID NO: 543459 - DNA, 75 bp, synthetic construct
  source 1..75: mol_type = other DNA
caacgtaaaatgataatcgcgcagttaatttattattttgggattgctgttagcaccagttatttaacggtgtcg

SEQ ID NO: 543460 - DNA, 75 bp, synthetic construct
  source 1..75: mol_type = other DNA
atttacagcaatttatggaaatgcaacgtaaaatgataatcgcgcagttaatctattattttgggattgctgtta

SEQ ID NO: 543461 - DNA, 75 bp, synthetic construct
  source 1..75: mol_type = other DNA
atattctgcctgatattcgtcatcacagcgttaccgtgatgctgacggaaaacctgccggttgagactcgccagc

SEQ ID NO: 543462 - DNA, 75 bp, synthetic construct
  source 1..75: mol_type = other DNA
atggaatttaaagatttaccaataccattccaagaaatggcatcgaatatagttcgttctcaactggcgactctt

SEQ ID NO: 543463 - DNA, 75 bp, synthetic construct
  source 1..75: mol_type = other DNA
ttctgggccgctggttatcggaagagatgaaggtcattttgctggatgaacctacgcgtggcattgatgttggtg

SEQ ID NO: 543464 - DNA, 75 bp, synthetic construct
  source 1..75: mol_type = other DNA
ccgttacatgtgatttctggcgatcagggattcctgcctgctcctgtatcggtgaagcaactttcgttggcaccg

SEQ ID NO: 543465 - DNA, 75 bp, synthetic construct
  source 1..75: mol_type = other DNA
agcaccaggcgtgcgtacgccaataagtctggcggttcgcagtggagaaattgtcggtcggtctgtttggtctgg

SEQ ID NO: 543466 - DNA, 75 bp, synthetic construct
  source 1..75: mol_type = other DNA
cggcaatggatgatctgaaagcggaagccaaatcgcaactggaagagatcattaaaaaatttaaactgccaaccg

SEQ ID NO: 543467 - DNA, 75 bp, synthetic construct
  source 1..75: mol_type = other DNA
tctgccctgcgtaataccggcaagcttcaacatattgaacaggttatcgccgttacgcttaccgactggagtggc

SEQ ID NO: 543468 - DNA, 75 bp, synthetic construct
  source 1..75: mol_type = other DNA
tgtactgagacacctgcagaaagtattgacacgcggcttcttaaagcgctggctgaggttgcacccgtcgtggag

SEQ ID NO: 543469 - DNA, 75 bp, synthetic construct
  source 1..75: mol_type = other DNA
agaatgctgcattggcattagatgatggcgatgaagaaccggggagttttagttgtgccgaatggtcttcaaaat

SEQ ID NO: 543470 - DNA, 75 bp, synthetic construct
  source 1..75: mol_type = other DNA
cacggcaggctgatggcggggacgctggacagtcagagcagttgcccgtgtaaggcgcgatttattgcgtcaatg

SEQ ID NO: 543471 - DNA, 75 bp, synthetic construct
  source 1..75: mol_type = other DNA
atgggaacaggctactttctggtcaggggcgataagaccacctgcggcggcaaaattattgaaggcgcggacgac

SEQ ID NO: 543472 - DNA, 75 bp, synthetic construct
  source 1..75: mol_type = other DNA
ggaattaatggacatcattaataagggatttggcctgttaatgaaaaagaaagggattcgaatagccccccttaa

SEQ ID NO: 543473 - DNA, 75 bp, synthetic construct
  source 1..75: mol_type = other DNA
ggggcgataagaccacctgcggcgggaagattattgaaggcgcggacgaccatacgatcatgggtatcccacagg

SEQ ID NO: 543474 - DNA, 75 bp, synthetic construct
  source 1..75: mol_type = other DNA
tgatatttatacgctgccaaattcactatgggaagcggttgttaaagaaaaagaaaaaagaataaagttaaatgg

SEQ ID NO: 543475 - DNA, 75 bp, synthetic construct
  source 1..75: mol_type = other DNA
gatggacgccttaacgcacgccatcgaagcgtatgtttctattgcggcaacgccgatcaccgacgcttgcgcatt

SEQ ID NO: 543476 - DNA, 75 bp, synthetic construct
  source 1..75: mol_type = other DNA
atggcgcgatgcaactggcaggtcctggggttttttggtcccccaagagatcgccacgtcgctataactgtgctg

SEQ ID NO: 543477 - DNA, 75 bp, synthetic construct
  source 1..75: mol_type = other DNA
gctaaacaacagatcgagaaagacactgaagttcaaaacaccgaaagagataattgaaaggggtgttgcattgac

SEQ ID NO: 543478 - DNA, 75 bp, synthetic construct
  source 1..75: mol_type = other DNA
agtttacgacgtaacttcctggaccgacgttctgccagaattcggtggtgacacctacggttctgacaacttcat

SEQ ID NO: 543479 - DNA, 75 bp, synthetic construct
  source 1..75: mol_type = other DNA
gctggcgtggctgttacaacgttcaccgaatattttgctgatcccagggacgtcttctgttgcgcatttacggga

SEQ ID NO: 543480 - DNA, 75 bp, synthetic construct
  source 1..75: mol_type = other DNA
ttggcctgagcaacgtcacaccgacgcaggttgcagaggcgcgcaagattgccgaaatcgtctgtgtgcagaacg

SEQ ID NO: 543481 - DNA, 75 bp, synthetic construct
  source 1..75: mol_type = other DNA
aaattggtgcgcggcgtggagaggacgcttcctggttgcccgccttttctccggcagagttgcaaaaagcggtgc

SEQ ID NO: 543482 - DNA, 75 bp, synthetic construct
  source 1..75: mol_type = other DNA
ccagaacatcaccaccgcagccgaacagttaaataaagtcccttctactatcagttacaccctgaagaaagcgga

SEQ ID NO: 543483 - DNA, 75 bp, synthetic construct
  source 1..75: mol_type = other DNA
tggttgcagccaacggcggtgacatccgcgattatgaaggcgttgaccgctctgcaaaaccgcagttgccgatga

SEQ ID NO: 543484 - DNA, 75 bp, synthetic construct
  source 1..75: mol_type = other DNA
ttgccgccacgccgatcactgacgcttgtgcactgaaagccgtgaccatgattgccgaaaacctgccgttagccg

SEQ ID NO: 543485 - DNA, 75 bp, synthetic construct
  source 1..75: mol_type = other DNA
ggtaacggtttcgcgacctaccgtaacactgacttcttcggtctggttgacggcctgaactttgctgttcagtac

SEQ ID NO: 543486 - DNA, 75 bp, synthetic construct
  source 1..75: mol_type = other DNA
atttcactggtcatggcatcaccaacaatggtcgtaaagctctgcgtcagaacggcgacggcgttggcggatcta

SEQ ID NO: 543487 - DNA, 75 bp, synthetic construct
  source 1..75: mol_type = other DNA
tgctgatctggtctacggtgctcctcatgcagtaccaagcagtgaaggcatcattagcgaaccggtcggacaaat

SEQ ID NO: 543488 - DNA, 75 bp, synthetic construct
  source 1..75: mol_type = other DNA
cctgctgaagagtatgcggaaattcgctgggatcaactggaagcgggtgacgttaacttcattaaagatttttac

SEQ ID NO: 543489 - DNA, 75 bp, synthetic construct
  source 1..75: mol_type = other DNA
ggaaaacgggctgcaacggcagcgggtctccgttgcagtgctgatactcttcttcgcagggtagacgaaacagtc

SEQ ID NO: 543490 - DNA, 75 bp, synthetic construct
  source 1..75: mol_type = other DNA
atggtcgacatgaaaactacgcataccgccctcccctttgcaggacatacgctgcattttgttgagtttgatccg

SEQ ID NO: 543491 - DNA, 75 bp, synthetic construct
  source 1..75: mol_type = other DNA
tgcaatcggcgagctacgccaacctgtgtggcctgcgggggtatacggcagcattagtcactgtgggactacggc

SEQ ID NO: 543492 - DNA, 75 bp, synthetic construct
  source 1..75: mol_type = other DNA
catgtccttcaggtgttgcccatacctatatggcggcagaggcgctggaaagcgccgcgaaagcgaaaggctggg

SEQ ID NO: 543493 - DNA, 75 bp, synthetic construct
  source 1..75: mol_type = other DNA
ctatatggcggcagaggcgctggaaagcgccgcgaaagcgaaaggctgggaagtgaaagtagaaactcaggggtc

SEQ ID NO: 543494 - DNA, 75 bp, synthetic construct
  source 1..75: mol_type = other DNA
tgcagctatatgtgaggcaatcagtagtcgctggagtaatggtgttgtcgaaggtcatgtaaatcgcctgaagat

SEQ ID NO: 543495 - DNA, 75 bp, synthetic construct
  source 1..75: mol_type = other DNA
gacagaaacgcaaaacagagcatttagccggacggatcgctgctgtttatgccttgcgggaatgtggccttaaat

SEQ ID NO: 543496 - DNA, 75 bp, synthetic construct
  source 1..75: mol_type = other DNA
tattagtctgatgtgtgaaaaagaaccggagttgaaaatagcgcagcaactggtactcgagttctaccgtattct

SEQ ID NO: 543497 - DNA, 75 bp, synthetic construct
  source 1..75: mol_type = other DNA
tccgttgcagtgctgatactctccttcgcagggttatcaataccccggagacgaaacagtcaggcgcgcctcatg

SEQ ID NO: 543498 - DNA, 75 bp, synthetic construct
  source 1..75: mol_type = other DNA
tagtaaggggtaataatgttattaccttgtgcctggtagataaacacccgcacactgcagcatgcgggttatctg

SEQ ID NO: 543499 - DNA, 75 bp, synthetic construct
  source 1..75: mol_type = other DNA
accagcagaacacgagcgactcgcagaatgcggtttagccttttctctggcgctgacactggcattttccgccaa

SEQ ID NO: 543500 - DNA, 75 bp, synthetic construct
  source 1..75: mol_type = other DNA
gtgaacgccttatccggcctacaaaaatcttgccaattcaatatattgcaggaccatgtaggcctgataagcgta

SEQ ID NO: 543501 - DNA, 75 bp, synthetic construct
  source 1..75: mol_type = other DNA
catcaagtttgaagagcgttttgctggcaagaccatcgtgcgcgtcaacatcagcgatgcggttaaacgcgctga

SEQ ID NO: 543502 - DNA, 75 bp, synthetic construct
  source 1..75: mol_type = other DNA
gggattaatcgccggaggtgaggccgggaaacgggctgcaacggcagtgggtctccgttgcagtgctgatactct

SEQ ID NO: 543503 - DNA, 75 bp, synthetic construct
  source 1..75: mol_type = other DNA
aatgatgtacagacatatacctctgatacgtcttgttgccagtgagttgtcaccaaagaaatcacctgagccaga

SEQ ID NO: 543504 - DNA, 75 bp, synthetic construct
  source 1..75: mol_type = other DNA
attacggcaccaatacgccgattgatgagtgttacgagtgtggttttaccggtgagtttgagtgcaccagtaaag

SEQ ID NO: 543505 - DNA, 75 bp, synthetic construct
  source 1..75: mol_type = other DNA
cggcgttaaccggagccggatgttcgcttatctttcctgcgctgggcgtggaggtggttaaacgcgtcccctcac

SEQ ID NO: 543506 - DNA, 75 bp, synthetic construct
  source 1..75: mol_type = other DNA
tgagagtagtgttgaatggaaaacgttacttgaggcttgtgactatgtagattatcgagggaaaaccccaaaaaa

SEQ ID NO: 543507 - DNA, 75 bp, synthetic construct
  source 1..75: mol_type = other DNA
tatgattgccctggctaaagggatttctatgcacgcacgccaccacgccacctactacaccactcccagccctaa

SEQ ID NO: 543508 - DNA, 75 bp, synthetic construct
  source 1..75: mol_type = other DNA
aaacgaaaacggcgaacagatccacgatggccgcaacaaccttggcgtcatcagtctgaacttgccgcgtattgc

SEQ ID NO: 543509 - DNA, 75 bp, synthetic construct
  source 1..75: mol_type = other DNA
tgagtgctacgagtgtggctttactggcgagttcgagtgcaccagcaaaggcttcacttgcccgaaatgtggtaa

SEQ ID NO: 543510 - DNA, 75 bp, synthetic construct
  source 1..75: mol_type = other DNA
ctacgatcaggtagtgaaagtcaccggttcgtttaaaaccccgatgggctgccgcagcttcctcggcgtgtggga

SEQ ID NO: 543511 - DNA, 75 bp, synthetic construct
  source 1..75: mol_type = other DNA
ctacgatcaggtggttaaagttaccgggtcgtttaaaacgccaatgggttgccgcagcttcctcggcgtgtggga

SEQ ID NO: 543512 - DNA, 75 bp, synthetic construct
  source 1..75: mol_type = other DNA
atgatgcagattattgtgccactgttgccgctgtcgtcagcgagcaaatgcaaggccgcacccaggtcgatatca

SEQ ID NO: 543513 - DNA, 75 bp, synthetic construct
  source 1..75: mol_type = other DNA
aggtaaacccgtacgacaagatcgactttgaagcgccttacccgccgctggcgaacggtggtttcatttgctacg

SEQ ID NO: 543514 - DNA, 75 bp, synthetic construct
  source 1..75: mol_type = other DNA
atgtacagatatatgcctctgatacgtcttgttgtcagagagttatcactgaagaaatcacctgagccagaaata

SEQ ID NO: 543515 - DNA, 75 bp, synthetic construct
  source 1..75: mol_type = other DNA
cctgccgagcataacgtcggtcatttgtataaagcaccggagacgttgcagaagttttatcgcgagaacgatccg

SEQ ID NO: 543516 - DNA, 75 bp, synthetic construct
  source 1..75: mol_type = other DNA
ttgccgaaactggcgacatccgcgcagcagtgcgtcagtatatagctgaagtggagtccggtgtttatccgggcg

SEQ ID NO: 543517 - DNA, 75 bp, synthetic construct
  source 1..75: mol_type = other DNA
cctaaattcgccaaaaatttccttgccgaagcgggagacatccgcgctgctgtacggcagtatatggctgaagtg

SEQ ID NO: 543518 - DNA, 75 bp, synthetic construct
  source 1..75: mol_type = other DNA
ttctcggcaagggcgaacaagtgctggcatatcctggcaccacgctctattcgctggaaaaagctctcaaaccgc

SEQ ID NO: 543519 - DNA, 75 bp, synthetic construct
  source 1..75: mol_type = other DNA
tggatcatcgtgtataggcgcatcggtcatcggcggtatttgtaacaactccggcggctcgctggtgcaacgtgg

SEQ ID NO: 543520 - DNA, 75 bp, synthetic construct
  source 1..75: mol_type = other DNA
caccggagacgttgcagaagttttatcgcgagaacgatccgaccaacagtatgaatccggggatcggtaaaacca

SEQ ID NO: 543521 - DNA, 75 bp, synthetic construct
  source 1..75: mol_type = other DNA
gcttctggacccatggagggagtggttaaaagagcaacgagaaagcggtaattataacgccagccggatatggcg

SEQ ID NO: 543522 - DNA, 75 bp, synthetic construct
  source 1..75: mol_type = other DNA
agttaccctgcggatggcgatgcagtcgacaaattattagctctgacggtataaccctccatctccacggaaaac

SEQ ID NO: 543523 - DNA, 75 bp, synthetic construct
  source 1..75: mol_type = other DNA
tgaagttcatccctcgcttcgagaaattcacccgttctgacgtgattcgcgcagccattttccatctggcagaga

SEQ ID NO: 543524 - DNA, 75 bp, synthetic construct
  source 1..75: mol_type = other DNA
aaaccaaaagaatttgccctgctggaattactgatacgtaacgctggtcgggtactgccgcgcaaactgattgaa

SEQ ID NO: 543525 - DNA, 75 bp, synthetic construct
  source 1..75: mol_type = other DNA
ccgccaggctggaagctctgatgcgccgaaccaacggccaggccagcaacgagctgcgccacggcaacgtcatgc

SEQ ID NO: 543526 - DNA, 75 bp, synthetic construct
  source 1..75: mol_type = other DNA
ctgtagccaaatggcgtaaaggctggatcccaccggttactactgccgccagacttccttcagtgtcccgggtaa

SEQ ID NO: 543527 - DNA, 75 bp, synthetic construct
  source 1..75: mol_type = other DNA
ttcgcgcgcataaatgaagacggtaaactgacgctggttaaccatctggggattgatttgggtgaaacgccggag

SEQ ID NO: 543528 - DNA, 75 bp, synthetic construct
  source 1..75: mol_type = other DNA
gggctgcaacggcagcgggtctccgttgcagtgctgatactcttcttcgcagggttatcaataccccggagacga

SEQ ID NO: 543529 - DNA, 75 bp, synthetic construct
  source 1..75: mol_type = other DNA
atgcctgggctgactcccccaaaaatatgattgcgctcgccaaaagcctgtccatgcacgcgcgctatcacgcta

SEQ ID NO: 543530 - DNA, 75 bp, synthetic construct
  source 1..75: mol_type = other DNA
atcgcagtggagtctatgcgacagcagcacgtgaaggtgcacctcaggccagacaggtggccgatcgatggcacc

SEQ ID NO: 543531 - DNA, 75 bp, synthetic construct
  source 1..75: mol_type = other DNA
gtgttgtcgaaggtcatgtaaatcgcctgaagatgctgaaacgccagatgtatggtcgagcaggatttgaactac

SEQ ID NO: 543532 - DNA, 75 bp, synthetic construct
  source 1..75: mol_type = other DNA
tcgagttctaccgtattctgaaaacccaaaataaatcacagctaagcagttggttcactcgagtccacgaaagcg

SEQ ID NO: 543533 - DNA, 75 bp, synthetic construct
  source 1..75: mol_type = other DNA
gtgcctgcagcatcgctccgtcgtccggaacgccttaaacagcaaacccgcaaaaaacggcatcagcgttggaca

SEQ ID NO: 543534 - DNA, 75 bp, synthetic construct
  source 1..75: mol_type = other DNA
agttgtcgtcggcgccggatacagcatctaccctgctaagggcaaacgctatggcttgtattttccgtccgccac

SEQ ID NO: 543535 - DNA, 75 bp, synthetic construct
  source 1..75: mol_type = other DNA
gtcggatacagcatctcccctgttcagggcagacgctatggcttgtattttccgtccgccacaggtacagccgta

SEQ ID NO: 543536 - DNA, 75 bp, synthetic construct
  source 1..75: mol_type = other DNA
gatgtagtttcagggaaatatcccgtattacaggcctgtcgcgagtgacagtcagtcgctggggggggtcaggaa

SEQ ID NO: 543537 - DNA, 75 bp, synthetic construct
  source 1..75: mol_type = other DNA
agttgtcgtcggcgccggatacagcatctaccctgctgagggcagacgctatggcttgtattttccgtccgccac

SEQ ID NO: 543538 - DNA, 75 bp, synthetic construct
  source 1..75: mol_type = other DNA
agttgtcgtcggcgccggatacagcatctaccctgctcagggcacacgctatggcttgtattttccgtccgccac

SEQ ID NO: 543539 - DNA, 75 bp, synthetic construct
  source 1..75: mol_type = other DNA
agttgtcgtcggcgccggatacagcatctaccctgcttagggcatacgctatggcttgtattttccgtccgccac

SEQ ID NO: 543540 - DNA, 75 bp, synthetic construct
  source 1..75: mol_type = other DNA
gcaaacaccaaagcaggaacaccagcctatgaaagagcgataaataacgctgcgaatgccatcagaccgctgttt

SEQ ID NO: 543541 - DNA, 75 bp, synthetic construct
  source 1..75: mol_type = other DNA
gtatccgtattgaggctattgaccctgaaaagggcgacggtttccgttacatcgtgaagtacatcaccaaaatgg

SEQ ID NO: 543542 - DNA, 75 bp, synthetic construct
  source 1..75: mol_type = other DNA
tgtcacccgttttctgcgggttgtccgtgaccagcgggtcaatgaggtctgtcgtatgctcggcatactgaaccg

SEQ ID NO: 543543 - DNA, 75 bp, synthetic construct
  source 1..75: mol_type = other DNA
ccgtggcgcaatggcgataccacgacgcgagagtatcgctggcagggcgataacctcacacttatcaatatcaac

SEQ ID NO: 543544 - DNA, 75 bp, synthetic construct
  source 1..75: mol_type = other DNA
ccaatgatcagatcgatttataccgttatcgtgccgcgcagatccgcgagattagcgatgccttacgccagggga

SEQ ID NO: 543545 - DNA, 75 bp, synthetic construct
  source 1..75: mol_type = other DNA
ccgtggcgcagtggcgataccacgacgcgagagtatcgctggcagggcgataacctcacgctcatcaatatcaat

SEQ ID NO: 543546 - DNA, 75 bp, synthetic construct
  source 1..75: mol_type = other DNA
tcgctgaaacgggcgacatccgcgcggctgtgcggcagtatatggctgaagtggagtccggcgtttatccgggcg

SEQ ID NO: 543547 - DNA, 75 bp, synthetic construct
  source 1..75: mol_type = other DNA
gcaacggtaatgcgtgccggagccaacatggtcaaaattgaaggcggtgagtggctggtagaaaccgtacaaatg

SEQ ID NO: 543548 - DNA, 75 bp, synthetic construct
  source 1..75: mol_type = other DNA
ccacactgccgccgtacgtcgtggcgcgccaaactgcctgctgttggctgacctgccgtttatggcgtatgccac

SEQ ID NO: 543549 - DNA, 75 bp, synthetic construct
  source 1..75: mol_type = other DNA
tatctgcacagctcgcattgccacgtaacacacaggttgaccgtgtgatttacggaattaactgcacggatttat

SEQ ID NO: 543550 - DNA, 75 bp, synthetic construct
  source 1..75: mol_type = other DNA
cggttgaactggcaaaacgcattaccgaagcactggcgatcccggttattggcattggcgcaggcaacgtcactg

SEQ ID NO: 543551 - DNA, 75 bp, synthetic construct
  source 1..75: mol_type = other DNA
tcacaccgccgctgtgcgtcgcggcgcgccaaactgccttctgttagcagacctgccatttatggcgtatgccac

SEQ ID NO: 543552 - DNA, 75 bp, synthetic construct
  source 1..75: mol_type = other DNA
ctaacgaccaaatcgatttataccgttatcgcgctgaccaaatccgccagattagcgatgctttacgccagggga

SEQ ID NO: 543553 - DNA, 75 bp, synthetic construct
  source 1..75: mol_type = other DNA
tctgatgtggaacgtcgatccctatttacaaacccagtggcaactgaccgacaaactttcgctggatgctggcgt

SEQ ID NO: 543554 - DNA, 75 bp, synthetic construct
  source 1..75: mol_type = other DNA
ttatatgggcgatattatggcaggaaaatacggcaaaagcgccgtcttatactctcgtcggcttattcaccgggt

SEQ ID NO: 543555 - DNA, 75 bp, synthetic construct
  source 1..75: mol_type = other DNA
taccgctgcgttattccagactgataccgatgatgaaatcgttgttgatagcagtagcggcgggcgtaccacgta

SEQ ID NO: 543556 - DNA, 75 bp, synthetic construct
  source 1..75: mol_type = other DNA
cgctgcaagagccgttgaccggtatcgttagcgcggtgatggttgctctggaacagtgcccgccggaactggctt

SEQ ID NO: 543557 - DNA, 75 bp, synthetic construct
  source 1..75: mol_type = other DNA
atggcactggtcgttattgacggtaatcagcgcgtctttcgcagttatggggaaacgcgtcccggtaataacgtt

SEQ ID NO: 543558 - DNA, 75 bp, synthetic construct
  source 1..75: mol_type = other DNA
ttacaaacccagtggcaactgaccgacaaactttcgctggatgctggcgtgcgctacagctccgtgtggtttgat

SEQ ID NO: 543559 - DNA, 75 bp, synthetic construct
  source 1..75: mol_type = other DNA
ccggagatttccgcgtaaaagcgtcgtggacctggcttgatgcaacatatcgcagcaacgtttgtaacgatcaga

SEQ ID NO: 543560 - DNA, 75 bp, synthetic construct
  source 1..75: mol_type = other DNA
ttacagaatcctttcatggtatggtggcggcagatatttcattatcccgtccggtttcatcttctgatgaatacg

SEQ ID NO: 543561 - DNA, 75 bp, synthetic construct
  source 1..75: mol_type = other DNA
ttgttaacgctgacggcgattcctattcattctctctgttctgctctgatgacgaactgtcatcagttgctgcca

SEQ ID NO: 543562 - DNA, 75 bp, synthetic construct
  source 1..75: mol_type = other DNA
cccagaccggacaacagccaccaaccattgaagccagtagttactacggcagttttggcagctggcgctatgggc

SEQ ID NO: 543563 - DNA, 75 bp, synthetic construct
  source 1..75: mol_type = other DNA
atcagtcgatcccgatgaccccgcagcttaacccgtcacacgcaggcggtgtaattaccctgcaacgtcattacc

SEQ ID NO: 543564 - DNA, 75 bp, synthetic construct
  source 1..75: mol_type = other DNA
actacaattttctcaattacttaacgtattgtgccgtttcattttccataaatttacaatttcattaccatgacg

SEQ ID NO: 543565 - DNA, 75 bp, synthetic construct
  source 1..75: mol_type = other DNA
ctgatgaaggacttaacgtcatgctggtaggcgattcgctgggcatgacggttcagggccacgactccacccttc

SEQ ID NO: 543566 - DNA, 75 bp, synthetic construct
  source 1..75: mol_type = other DNA
acggggatgtacaccttcatgagttcatgtcagcgtgatgagtggaacagccagctgatgagcgacacctgtcct

SEQ ID NO: 543567 - DNA, 75 bp, synthetic construct
  source 1..75: mol_type = other DNA
ctgccgtctgggcaagaaaatcattattgaaaacctgctgtaccgctggactgcagcggacgggaggcactggat

SEQ ID NO: 543568 - DNA, 75 bp, synthetic construct
  source 1..75: mol_type = other DNA
ggtacgatgcatatcaccttccgccgtccggaccttgttgagcgactgaatgacatcattgcccgccattatccc

SEQ ID NO: 543569 - DNA, 75 bp, synthetic construct
  source 1..75: mol_type = other DNA
atgcgaattttactgatagaagatgacatgctgattggcgacggcatcaaaacgggccttagtaaaatgggtttt

SEQ ID NO: 543570 - DNA, 75 bp, synthetic construct
  source 1..75: mol_type = other DNA
tctctgttggtacgcgtggcgcatccaacacctatgaccacctgatccattcgcggctttgcggcagaaggccaa

SEQ ID NO: 543571 - DNA, 75 bp, synthetic construct
  source 1..75: mol_type = other DNA
gaagcgcttagctacacgccgggtgtctctgttggtacgcgtggcgcatccaacacctatgaccacctgatccat

SEQ ID NO: 543572 - DNA, 75 bp, synthetic construct
  source 1..75: mol_type = other DNA
actggcatgtacaccttcatgagttcatgccagcgtgatgagtggaacagccagctgatgagcgacacctgtcct

SEQ ID NO: 543573 - DNA, 75 bp, synthetic construct
  source 1..75: mol_type = other DNA
ttcagtttctggctacggtgctgacgcgtggttacgccgggcgactggccgatcaatatggtgcaaaacgttcgg

SEQ ID NO: 543574 - DNA, 75 bp, synthetic construct
  source 1..75: mol_type = other DNA
tgacctggggattaggcattgtcgggccaaaacattccggcaaagtgatgtcgtggaacggaatggcaatttacg

SEQ ID NO: 543575 - DNA, 75 bp, synthetic construct
  source 1..75: mol_type = other DNA
aaacaagagcacatccatgcaatgaaaaaaggtgcgggtgtgcctcatgtccgagtgaaagagtttgaaacctat

SEQ ID NO: 543576 - DNA, 75 bp, synthetic construct
  source 1..75: mol_type = other DNA
ctgccgtctgggcaagaaaatcattattgaaaacctgctgtaccgctggagtaacgggcgtgtgacgctggactg

SEQ ID NO: 543577 - DNA, 75 bp, synthetic construct
  source 1..75: mol_type = other DNA
aatctgggatcgcctgatgacagatacgggcatgtacaccttcatgagttcatgccagcgtgatgagtggaacag

SEQ ID NO: 543578 - DNA, 75 bp, synthetic construct
  source 1..75: mol_type = other DNA
aggtcaccagtaatgccgttgaagtgcatgtgcatcatctgcgacgcaaactcggtagtgattttattcgtaccg

SEQ ID NO: 543579 - DNA, 75 bp, synthetic construct
  source 1..75: mol_type = other DNA
aagaaaattgccacatcagaatcgatgggcgtgacaccaatgacatctgatgttatcccgccgaaaaatgctttc

SEQ ID NO: 543580 - DNA, 75 bp, synthetic construct
  source 1..75: mol_type = other DNA
ggttctctgaagtcaaggaaggattcggccggaagcgttattgaagacattacaaccaaaatgggagacacacct

SEQ ID NO: 543581 - DNA, 75 bp, synthetic construct
  source 1..75: mol_type = other DNA
agccaattccccgtagataaatggtacggactgatggaaaacccgacgacagccaacgcaatcctagacaggctg

SEQ ID NO: 543582 - DNA, 75 bp, synthetic construct
  source 1..75: mol_type = other DNA
gtcagtgaatattttcggtggctacaaagttcaggggcgcggcgatgaagcgagcgatcgactgcttagcgatgc

SEQ ID NO: 543583 - DNA, 75 bp, synthetic construct
  source 1..75: mol_type = other DNA
tggtgttaagttatcaacgactttgtgccaccgcccagcctacggaaaaaaagaagaagagtgggatccggcaat

SEQ ID NO: 543584 - DNA, 75 bp, synthetic construct
  source 1..75: mol_type = other DNA
tcttcaataaggttctcaataaaaggattgcgaataatctcaacaaagctaaaaaagagtttactccagagctaa

SEQ ID NO: 543585 - DNA, 75 bp, synthetic construct
  source 1..75: mol_type = other DNA
ggctgatggcagaccattgtcggatgagcctgtcacacttttccttcccggaggtatccggatgtgctgccagcc

SEQ ID NO: 543586 - DNA, 75 bp, synthetic construct
  source 1..75: mol_type = other DNA
tcgacccgggcaaacggatcgccaccctggcaggtgaatccttaacactcaagccaaaagaatttgccctgctgg

SEQ ID NO: 543587 - DNA, 75 bp, synthetic construct
  source 1..75: mol_type = other DNA
tcgatccgggcaaacgaatcgccactctggcaggcgaatctttaacactcaaacccaaagaatttgccctgctgg

SEQ ID NO: 543588 - DNA, 75 bp, synthetic construct
  source 1..75: mol_type = other DNA
atgtcggtattgatgagtgggcgtggcatcgggggccaccgttacggtacgttaatcgtcaatcttgatactcac

SEQ ID NO: 543589 - DNA, 75 bp, synthetic construct
  source 1..75: mol_type = other DNA
gccctggagaatactgtcgcatccacatttccggtcagtcctgtctgtacatccgttccctgtggcttcagggga

SEQ ID NO: 543590 - DNA, 75 bp, synthetic construct
  source 1..75: mol_type = other DNA
ttgttgtcagagagttatcactgaagaaatcacctgagccagaaatatctgtgcctgtagcatcgctccgtcgtc

SEQ ID NO: 543591 - DNA, 75 bp, synthetic construct
  source 1..75: mol_type = other DNA
cgtcgtacactgctaaaccttgaggctagtggagagttcccggagcgtgtgcaggttacggaagggcgtaaggcc

SEQ ID NO: 543592 - DNA, 75 bp, synthetic construct
  source 1..75: mol_type = other DNA
aatatctcttcctgagggggttgtcttggggagcattcttgtcagtgaaataaaacgtgctggttttgatattaa

SEQ ID NO: 543593 - DNA, 75 bp, synthetic construct
  source 1..75: mol_type = other DNA
gattttgaatttccttaaaaataatgttaagagctgccccgatgataccaataaaatgagaaaaatgagatttat

SEQ ID NO: 543594 - DNA, 75 bp, synthetic construct
  source 1..75: mol_type = other DNA
acgtgccggggcgcgctggttactggctgaaatgctgctgttttttgttcctgccgtggtggcggtggtgaacta

SEQ ID NO: 543595 - DNA, 75 bp, synthetic construct
  source 1..75: mol_type = other DNA
gcaaatctcagtccatttcggtaagtctggctggtcagcaatgtaatataaaacttgttcagcgacagagtttta

SEQ ID NO: 543596 - DNA, 75 bp, synthetic construct
  source 1..75: mol_type = other DNA
cctgagcgtgtgcaggttacggaagggcgtaaggcttggtatttaagcgaggttgttgagtggattaacaatatc

SEQ ID NO: 543597 - DNA, 75 bp, synthetic construct
  source 1..75: mol_type = other DNA
tttatctgaaggaaaaacccaggcatttctttgggatgcggacgtaacttccctggcatgtcgggcaactcgcgg

SEQ ID NO: 543598 - DNA, 75 bp, synthetic construct
  source 1..75: mol_type = other DNA
ctgccattcaccgcactgttgacggtctttttctcggtagtggcggtgattatcgaccaacaactgttctcccca

SEQ ID NO: 543599 - DNA, 75 bp, synthetic construct
  source 1..75: mol_type = other DNA
ggaacagttccgtggctttctgcgtagcctgatgatgcatgccggtgtcggcactgcattaggcggcgtgatgac

SEQ ID NO: 543600 - DNA, 75 bp, synthetic construct
  source 1..75: mol_type = other DNA
cactgcaaaattgaattcgagagaaaaagcctacagttattttctatactataaaaattttcatggaatggaaat

SEQ ID NO: 543601 - DNA, 75 bp, synthetic construct
  source 1..75: mol_type = other DNA
caattagttttgaaaagtttaaagttatttttgatggtattgaggaaattattgcagattattcaaagaggtgca

SEQ ID NO: 543602 - DNA, 75 bp, synthetic construct
  source 1..75: mol_type = other DNA
ttgaagttcccactggtattgttgctcaaattatgggacacaaacccagcgctcttgccgaaaaacactatcgcc

SEQ ID NO: 543603 - DNA, 75 bp, synthetic construct
  source 1..75: mol_type = other DNA
atcctgatgctggcgctgattgtttgtcgcattcttcctctgcaatgggttcgagccggggcgcgttggctattg

SEQ ID NO: 543604 - DNA, 75 bp, synthetic construct
  source 1..75: mol_type = other DNA
gagcgtctttttcaaaaagttgagtttctggatctgtcagttgccacaactgacgcttatgctgacattggtacg

SEQ ID NO: 543605 - DNA, 75 bp, synthetic construct
  source 1..75: mol_type = other DNA
agaatgatcggcagatgctggaaaaacagttacaggcgttgccggaagaagccgcaatatcgattgtgcagcaac

SEQ ID NO: 543606 - DNA, 75 bp, synthetic construct
  source 1..75: mol_type = other DNA
gcagcaactgcatcaccggcaacacagccagcccggcacggcactgcgcagtggattgatttacgccggcaatgt

SEQ ID NO: 543607 - DNA, 75 bp, synthetic construct
  source 1..75: mol_type = other DNA
gcgtgacggcagatcctgccaggtgcatctggtatggcataaggcgcaaatgaaaacggcaaaatcgctggccgt

SEQ ID NO: 543608 - DNA, 75 bp, synthetic construct
  source 1..75: mol_type = other DNA
ctgaaagccctaggaaaatgccgttttcgtacgctgctactttcggcgacttacagcaaaagcacccgggacatt

SEQ ID NO: 543609 - DNA, 75 bp, synthetic construct
  source 1..75: mol_type = other DNA
gcgatatctctgtaacattatttgagccatataacccaacttatacttcatcagatcgtgttaaccagttcaatg

SEQ ID NO: 543610 - DNA, 75 bp, synthetic construct
  source 1..75: mol_type = other DNA
ttgctaagacagtgtaatcatctgcacattgtgggttcatcactgttctcatttcgtatgatcgatgtcatgcgc

SEQ ID NO: 543611 - DNA, 75 bp, synthetic construct
  source 1..75: mol_type = other DNA
atcgacagccgcgtacgcgatgccagcgcggcatacatgcgcggagttgatttcccgaacgcgcctacgcagaac

SEQ ID NO: 543612 - DNA, 75 bp, synthetic construct
  source 1..75: mol_type = other DNA
cgcgctgatgttgctcaggctcaggatgcatcattgcaactcagccagatttccagtgatctgctgactaacccg

SEQ ID NO: 543613 - DNA, 75 bp, synthetic construct
  source 1..75: mol_type = other DNA
gcggtaatgcggcaaggtccgatggaagggatatcctcactggctgacattgaagactttttgcaggagcactga

SEQ ID NO: 543614 - DNA, 75 bp, synthetic construct
  source 1..75: mol_type = other DNA
atccaacgggtgcaggcgactgctttggcgcaacgtttatcactcttttcttatccggtttcccggcacacaagg

SEQ ID NO: 543615 - DNA, 75 bp, synthetic construct
  source 1..75: mol_type = other DNA
gattgaatatacggatatttttatccccagcgaaagcgaactccctttcttcgcgcgtcacaaaaatctgtcaga

SEQ ID NO: 543616 - DNA, 75 bp, synthetic construct
  source 1..75: mol_type = other DNA
aatctgcaatgaaacgctcacgcagagaatgcaacaaattaattctgcaacaacaggaacctgaaatgaataacc

SEQ ID NO: 543617 - DNA, 75 bp, synthetic construct
  source 1..75: mol_type = other DNA
atgaataaaactaaaactaaaacaaaaaaattgaaagaaagtgagtttataagacatatagaaaacaatcctgtt

SEQ ID NO: 543618 - DNA, 75 bp, synthetic construct
  source 1..75: mol_type = other DNA
gctggattatctggacgcgctggaagctgtggacacatccagcgcaccggatatcaactggccaacacctccggc

SEQ ID NO: 543619 - DNA, 75 bp, synthetic construct
  source 1..75: mol_type = other DNA
tattgatgatgaagtatcaaaaggctttcctgaacctgattgggcgcatcagctacgaaacgctatcgcagaaat

SEQ ID NO: 543620 - DNA, 75 bp, synthetic construct
  source 1..75: mol_type = other DNA
ccgcaggatgttcaccgcccggcatgtaataaaaatgccccagcggcaatacggaaaatcgtggttaaagtagcc

SEQ ID NO: 543621 - DNA, 75 bp, synthetic construct
  source 1..75: mol_type = other DNA
tgaaggaaagtgagtttataagacatatagaaaacaatcctgttgtctcaacggctctatgcgagaaatatggaa

SEQ ID NO: 543622 - DNA, 75 bp, synthetic construct
  source 1..75: mol_type = other DNA
gagtatagatcatttttcagtagagcatgagaatgttatcaactgctttaatattttaaaagaaaagctcccatc

SEQ ID NO: 543623 - DNA, 75 bp, synthetic construct
  source 1..75: mol_type = other DNA
aattgcagcgtgaagtggcgaaagagctttttggctctgaagatgcttacgacgaaaccaaaaactacacgccga

SEQ ID NO: 543624 - DNA, 75 bp, synthetic construct
  source 1..75: mol_type = other DNA
gtcgctgttgcgggtctgtttgcataacgccgtcaccctgtgcaactgggtctggccaatgaccgtttcgccgct

SEQ ID NO: 543625 - DNA, 75 bp, synthetic construct
  source 1..75: mol_type = other DNA
tttattggttccggcttgccattgaaactgcaacgtgaagtggcgaaagaactttttggttctgaagatgcttac

SEQ ID NO: 543626 - DNA, 75 bp, synthetic construct
  source 1..75: mol_type = other DNA
gcggcgattggtcgtctgaaaggagaggaactggcgcaatataattcgtggctggattatctggacgcactggaa

SEQ ID NO: 543627 - DNA, 75 bp, synthetic construct
  source 1..75: mol_type = other DNA
atgcagcacattcgtccatcaccctgaatcctgataaaccggtggttggggggtacagttacggcaatctggacg

SEQ ID NO: 543628 - DNA, 75 bp, synthetic construct
  source 1..75: mol_type = other DNA
cgtaaatatcacctcactttctacttttaccaaaggaaatttagtcgtcgatgcccatatgggtggcttttttgc

SEQ ID NO: 543629 - DNA, 75 bp, synthetic construct
  source 1..75: mol_type = other DNA
ccgcaggatgttcaccgaccaggttgtattttgcaaacagcctctgagatacgaaaaattgtggttaaagtcgca

SEQ ID NO: 543630 - DNA, 75 bp, synthetic construct
  source 1..75: mol_type = other DNA
aaagcggttaggcgtaaagagattttattggttggtaccttagaacctagaaaaaatatagagtttattattaat

SEQ ID NO: 543631 - DNA, 75 bp, synthetic construct
  source 1..75: mol_type = other DNA
gcaagccacgcagtgaaatgggtgtgacttgtgttggtcgccagaagcaacgcggaaaatcaattccagcttatt

SEQ ID NO: 543632 - DNA, 75 bp, synthetic construct
  source 1..75: mol_type = other DNA
cgcaagaatcatcgagtttggtatagcaagccaagtgagttcggtataacttgtcaaggaagacaaaaggttaaa

SEQ ID NO: 543633 - DNA, 75 bp, synthetic construct
  source 1..75: mol_type = other DNA
catcaaatggttttaccgttgctgactggcgagatggggatggaacctattagtccggaagagggaaattactca

SEQ ID NO: 543634 - DNA, 75 bp, synthetic construct
  source 1..75: mol_type = other DNA
taagaagaaggatttaagacaggctgaagctatccagtcattaaggtcagacaatgatatccaagacagtgaccg

SEQ ID NO: 543635 - DNA, 75 bp, synthetic construct
  source 1..75: mol_type = other DNA
accagaaggacgctaccctagaggctatcttgaatgtcgtaatcgtcaacttggacgttgtaattctaaggcatt

SEQ ID NO: 543636 - DNA, 75 bp, synthetic construct
  source 1..75: mol_type = other DNA
tggcgtgggcatcgattatgaacgatccgcaaaagtgcctgagctacaaacaagtgcgtgggcgcggcgggttta

SEQ ID NO: 543637 - DNA, 75 bp, synthetic construct
  source 1..75: mol_type = other DNA
aatcggcattgctattgatacgggaaataataaagtcagcgaatcactattagagcagcgcgatattatttttta

SEQ ID NO: 543638 - DNA, 75 bp, synthetic construct
  source 1..75: mol_type = other DNA
ctattgatacgggaaataataaagtcagcgaatcactattagggaaggtgcgaataagcaggtcatttcttccca

SEQ ID NO: 543639 - DNA, 75 bp, synthetic construct
  source 1..75: mol_type = other DNA
tttatttgcgatcgctgcggcgcggtgaaagaagagtgtgcagaaggcgtggaagacattatgcatacgctggcg

SEQ ID NO: 543640 - DNA, 75 bp, synthetic construct
  source 1..75: mol_type = other DNA
gttatgtgctctgtcatctgttcgatcagcccacccatacgtcagccatgtttatttgcgatcgctgcggcgcag

SEQ ID NO: 543641 - DNA, 75 bp, synthetic construct
  source 1..75: mol_type = other DNA
aaattaggcagcaaaccacttatttgggggggtatatggaagaagaatttgaagagttcgaagagcatcctcagg

SEQ ID NO: 543642 - DNA, 75 bp, synthetic construct
  source 1..75: mol_type = other DNA
gttagtttagatcagttaaccgaatctgaaatttctgattttgttgatttgatagaaaatcaaggtctgtggtca

SEQ ID NO: 543643 - DNA, 75 bp, synthetic construct
  source 1..75: mol_type = other DNA
gttcgacttcggtctgcgtccgtccgttgcttacctgcaatctaaaggaaaagacttgggtgcgtggggtgatca

SEQ ID NO: 543644 - DNA, 75 bp, synthetic construct
  source 1..75: mol_type = other DNA
attcaatgcctccggcaaaaatgcggaagtatgggctgcaggcctgaaatatgatgcgaacaatatctatctggc

SEQ ID NO: 543645 - DNA, 75 bp, synthetic construct
  source 1..75: mol_type = other DNA
aactgaacctcccgaaggttgatatagaagaaatgcttcgaaggataaattcaggaaaagccattttatttaccg

SEQ ID NO: 543646 - DNA, 75 bp, synthetic construct
  source 1..75: mol_type = other DNA
gattatcatacggaaaatattgatacgcagcaggctagattgctaataatgaagtgtttaaaagaacctgactct

SEQ ID NO: 543647 - DNA, 75 bp, synthetic construct
  source 1..75: mol_type = other DNA
tagcattatgtgacataattgatgtaagaaaaacatcttctattatttctgaaatggcagggaatgatagtattt

SEQ ID NO: 543648 - DNA, 75 bp, synthetic construct
  source 1..75: mol_type = other DNA
ttgcgaagaagagaaaatgctctgatggcacaattaggaaggaactgcaaactgcaatgggatttgttgagggat

SEQ ID NO: 543649 - DNA, 75 bp, synthetic construct
  source 1..75: mol_type = other DNA
gttatcgggatttcactccgtacaatcgcaaagaagcggaaatgctcggatggaactattagaaaggagttgcaa

SEQ ID NO: 543650 - DNA, 75 bp, synthetic construct
  source 1..75: mol_type = other DNA
atgcgtgatatgtatgaagtgatggatcgttggggagcttgggctgcttcagacaatagcggagtggactggcaa

SEQ ID NO: 543651 - DNA, 75 bp, synthetic construct
  source 1..75: mol_type = other DNA
ggtaaagaccttggtgttcatggtgaccgagacttagtcaagtatgtcgatgtcggtgctacttactactttaat

SEQ ID NO: 543652 - DNA, 75 bp, synthetic construct
  source 1..75: mol_type = other DNA
tcgaaagaattcatattatctcagtgagctctatagtatcaaaatcattatatacaatattaatatgtctgtttg

SEQ ID NO: 543653 - DNA, 75 bp, synthetic construct
  source 1..75: mol_type = other DNA
agataacagtggcgtggactggcagccgatagctgcaggcttcaaggggcttttacctcatggcaaaaagtcccg

SEQ ID NO: 543654 - DNA, 75 bp, synthetic construct
  source 1..75: mol_type = other DNA
cttacaaactcatcttatctttcccctcaatctttcattagctcccaatggaattacgtttttaaaagagatctt

SEQ ID NO: 543655 - DNA, 75 bp, synthetic construct
  source 1..75: mol_type = other DNA
atgtccatgaaaatgggtgacctagcaaagcgcaaagagcctgatgcaccggctaagaacacaactcctttgcgc

SEQ ID NO: 543656 - DNA, 75 bp, synthetic construct
  source 1..75: mol_type = other DNA
ttgcaacgtgatcccggtgctggaagtacctccatccgcctttacgccaccaccaaaagtggattccgccgtcgt

SEQ ID NO: 543657 - DNA, 75 bp, synthetic construct
  source 1..75: mol_type = other DNA
taatacatgtcgcaaaacgcgatctacagcttgaccatgaaacctatacatccgtgctgctggcagccaccggca

SEQ ID NO: 543658 - DNA, 75 bp, synthetic construct
  source 1..75: mol_type = other DNA
aagccgcacaatgtcactggaggacgaatacttcgaactgctggaaatgatgaagttcatccctcgtttcgagaa

SEQ ID NO: 543659 - DNA, 75 bp, synthetic construct
  source 1..75: mol_type = other DNA
cgtgaaattgaatgaggcgatcaccgctgccgatgtcacgatgcgtaccgatgaaatcaaacgagagttgatgaa

SEQ ID NO: 543660 - DNA, 75 bp, synthetic construct
  source 1..75: mol_type = other DNA
aagccgcacaatgtcactggaagacgaatacttcgaactgctggagatgatgaagttcatccctcgtttcgagaa

SEQ ID NO: 543661 - DNA, 75 bp, synthetic construct
  source 1..75: mol_type = other DNA
atgagaggaaaactgatatccgccattcatgtggcaaagcgcgagcttgccctggatgatgagacttatacatcc

SEQ ID NO: 543662 - DNA, 75 bp, synthetic construct
  source 1..75: mol_type = other DNA
ccggcgaactggttcagttgattgccgacgatttggatggtcaggacaccggctactgcgcatttaccgaaaaaa

SEQ ID NO: 543663 - DNA, 75 bp, synthetic construct
  source 1..75: mol_type = other DNA
tcaatccaaaaataatattcttattcatagtgagttaggaaatggtaaaaccgtttttcttaaaatgataactta

SEQ ID NO: 543664 - DNA, 75 bp, synthetic construct
  source 1..75: mol_type = other DNA
tgagttatcccgcgtgctggatgttttcaaaaaacgcggttttaaagtgcgtcagaaaccggttaaccgggcctt

SEQ ID NO: 543665 - DNA, 75 bp, synthetic construct
  source 1..75: mol_type = other DNA
gcagtggctggagcaacaccccgccctggcctcagatgtgctggagcgtctcaagcgatggcaccgccgcaaaat

SEQ ID NO: 543666 - DNA, 75 bp, synthetic construct
  source 1..75: mol_type = other DNA
tgcggaaaccgcccttaaccgctgggtgaaatcgcagacggccgcgcagaacggcggcgaaggtgtggcaaactg

SEQ ID NO: 543667 - DNA, 75 bp, synthetic construct
  source 1..75: mol_type = other DNA
atgcgtgatatgtatgaagttttggaccgctggggagcatgggcggcagcagataacagtggtgtggactggcag

SEQ ID NO: 543668 - DNA, 75 bp, synthetic construct
  source 1..75: mol_type = other DNA
attgagttattttcaaaagaagatcagcccctttcgggggaaagctatattcgttatcaggttgaggtttattta

SEQ ID NO: 543669 - DNA, 75 bp, synthetic construct
  source 1..75: mol_type = other DNA
aaaggcgagccgagcgaacacctcattaaagatttgttcgcggatggcgttattgttgctgttaatccgattggc

SEQ ID NO: 543670 - DNA, 75 bp, synthetic construct
  source 1..75: mol_type = other DNA
caggtgcagcgcaaaacactggagaaatcattgaggcatttaatggggaggaaatgcccactttattcagaaaag

SEQ ID NO: 543671 - DNA, 75 bp, synthetic construct
  source 1..75: mol_type = other DNA
atgtgtgcactggatcctagagaaaggccacttaacagtcaatctgtaaataaatacattcttaacgttcagaat

SEQ ID NO: 543672 - DNA, 75 bp, synthetic construct
  source 1..75: mol_type = other DNA
cctgactatccattctttcgtgtggaaaaagaaaattattatcatcgtgatagctatgtacagtctgttatatcg

SEQ ID NO: 543673 - DNA, 75 bp, synthetic construct
  source 1..75: mol_type = other DNA
atgggggaagctggacctgaagccattctgccactgcgtcgtggtgctgacggtaagctgggggttgtggcggat

SEQ ID NO: 543674 - DNA, 75 bp, synthetic construct
  source 1..75: mol_type = other DNA
agggggcattaatccagactgtatgcgatatgcaggttcaatactgccgccagatgttcgccgctgtggtcgatg

SEQ ID NO: 543675 - DNA, 75 bp, synthetic construct
  source 1..75: mol_type = other DNA
tcaggctctccagaatcgcaccgtccgctttaagcataatggcgcgtttaatccagctaaggatgctccgtctac

SEQ ID NO: 543676 - DNA, 75 bp, synthetic construct
  source 1..75: mol_type = other DNA
cgaacaattcaaagattaaacacaccgacgaactccgcgctcacctgctggataaagaaggcaacaagattccgc

SEQ ID NO: 543677 - DNA, 75 bp, synthetic construct
  source 1..75: mol_type = other DNA
ataagaaagaatcattaacgctgtcgaataaatgggaattctttattaccacggtggaagataatgtaacgggca

SEQ ID NO: 543678 - DNA, 75 bp, synthetic construct
  source 1..75: mol_type = other DNA
aatggcatacgagatcgcaaaggactattacgctggtgtgatggcgaaaaaaggcgtggtatcaggcgaaattga

SEQ ID NO: 543679 - DNA, 75 bp, synthetic construct
  source 1..75: mol_type = other DNA
aaaggtattccgatgcctaaagatgctgatcttcgccttgagttttctgacatggtgaaggatgcatttgctggt

SEQ ID NO: 543680 - DNA, 75 bp, synthetic construct
  source 1..75: mol_type = other DNA
ttatggcaaattaatccgtttcctgattatccattttttgcgttaaatcagagtggaagtaatacaaatacttct

SEQ ID NO: 543681 - DNA, 75 bp, synthetic construct
  source 1..75: mol_type = other DNA
agtacggttaatgctgctctctatgttgtgcgatatggtcaacaacaaaccgcagcaagataagaccttccgata

SEQ ID NO: 543682 - DNA, 75 bp, synthetic construct
  source 1..75: mol_type = other DNA
tgagacagcgaaagagacacacacctgtccacaggaaacctgcgcagccattgaacgactgattgcaatactcgc

SEQ ID NO: 543683 - DNA, 75 bp, synthetic construct
  source 1..75: mol_type = other DNA
gtatgactatagaatataagctcgaaatacttgcaaggtttttttattacatagaacaagataaagatatagctt

SEQ ID NO: 543684 - DNA, 75 bp, synthetic construct
  source 1..75: mol_type = other DNA
atgagccagctcgtctacttctccagtagctccgaaaatacgcagcgttttatcgaacgtttaggactgcccgcg

SEQ ID NO: 543685 - DNA, 75 bp, synthetic construct
  source 1..75: mol_type = other DNA
ttgcgaagaggcgaaaatgttcggacggtacgattagaaaggaattgcaaactgctttaggttttattgaagggt

SEQ ID NO: 543686 - DNA, 75 bp, synthetic construct
  source 1..75: mol_type = other DNA
ccttcagtgtgatgatgatgaaggcatcatgatagacggctgtgttgcccgcctgtgtaagtataaaccagagga

SEQ ID NO: 543687 - DNA, 75 bp, synthetic construct
  source 1..75: mol_type = other DNA
gtaacgctgggtttgtttgactatctggcagacctgtttggttttgacgactcggctatgggccgtttgaaaaca

SEQ ID NO: 543688 - DNA, 75 bp, synthetic construct
  source 1..75: mol_type = other DNA
atgcgattattttctcctcttcctcccctgtgtgcactggtggtcagtgcctgtctggtgtgcccggcactggcc

SEQ ID NO: 543689 - DNA, 75 bp, synthetic construct
  source 1..75: mol_type = other DNA
caggggattgcccgttatctggagccgtcccgtgcccagccttccgtgccggtgaatgtggcagagccgctgcgc

SEQ ID NO: 543690 - DNA, 75 bp, synthetic construct
  source 1..75: mol_type = other DNA
tcgccgagaagggcggtaatattgatgtgctggtacaggcgttaagcggcgtactgaacagccgtagtctggatc

SEQ ID NO: 543691 - DNA, 75 bp, synthetic construct
  source 1..75: mol_type = other DNA
tgatggcactggcgctgtataccatctggttgctggcgacgatgggcaacattcctcgtccggagtttattggca

SEQ ID NO: 543692 - DNA, 75 bp, synthetic construct
  source 1..75: mol_type = other DNA
gcaagccgatgattgtcctgattctggtgtttggcattggcaatgctctgatccatattttatcgagctttaatt

SEQ ID NO: 543693 - DNA, 75 bp, synthetic construct
  source 1..75: mol_type = other DNA
ccgtgctggcactgctggatgaacgggaaagaaacctgcaatacatcaaaagcagcgatcaggagaacgaggaga

SEQ ID NO: 543694 - DNA, 75 bp, synthetic construct
  source 1..75: mol_type = other DNA
acaaccagcgtcatcggagatgcttcatcggattcaattaaaggtggttatgcaaagcgagtaacattcgatgct

SEQ ID NO: 543695 - DNA, 75 bp, synthetic construct
  source 1..75: mol_type = other DNA
atgacagaagaggaatagatactagccgtagcttgctttcatcacagggcgatgccattcgaaatataattggtg

SEQ ID NO: 543696 - DNA, 75 bp, synthetic construct
  source 1..75: mol_type = other DNA
ggctctcgaaaaccttcgtttgggggcaggcgctccagctatcggaattccgttcttctggccgtccacagcgat

SEQ ID NO: 543697 - DNA, 75 bp, synthetic construct
  source 1..75: mol_type = other DNA
tttctctcgatttcagtacaccagtaactcagtaggagatggtgttaattttattgccgtcagaccgcgaaatat

SEQ ID NO: 543698 - DNA, 75 bp, synthetic construct
  source 1..75: mol_type = other DNA
ctctcgaaaaccttggtttgggagaaggctctgcattacctgttggtgtgcctgttccgtggccttccgccactc

SEQ ID NO: 543699 - DNA, 75 bp, synthetic construct
  source 1..75: mol_type = other DNA
ttaaacaacaaaaattagctaagggattagagctagctataaacgctttgaataaccaactcacttcacaacacc

SEQ ID NO: 543700 - DNA, 75 bp, synthetic construct
  source 1..75: mol_type = other DNA
tccgattgcctttgacgatcgctacggtgaccgtgaatttgacagacagctcactgaagcaggcacgggattaaa

SEQ ID NO: 543701 - DNA, 75 bp, synthetic construct
  source 1..75: mol_type = other DNA
gggctgcgagcgttgcgcccggaagcgcgttttcttgaactggtgcatcgactcgatcgggacacttcaggcgta

SEQ ID NO: 543702 - DNA, 75 bp, synthetic construct
  source 1..75: mol_type = other DNA
aaactcaacgaacagcgtgagtattacgagggcgttatctcggatggaagtaagcgcatagcagagttagaaagt

SEQ ID NO: 543703 - DNA, 75 bp, synthetic construct
  source 1..75: mol_type = other DNA
attcagacaacagcggttccgctggaggctcagatagcggcggatttagcggcgggggggggtttttttgggggg

SEQ ID NO: 543704 - DNA, 75 bp, synthetic construct
  source 1..75: mol_type = other DNA
ccaaaattatacttatttttttctgtgttcgtttttaattataacgaatctcaaattaccgatgccgccgtcaat

SEQ ID NO: 543705 - DNA, 75 bp, synthetic construct
  source 1..75: mol_type = other DNA
gaaggttctccagctattggcgttccgttcttctggccgtccgctgcaatgccaaatactgtaatcgacagctgg

SEQ ID NO: 543706 - DNA, 75 bp, synthetic construct
  source 1..75: mol_type = other DNA
agccgcgaccaggagaacgaggagattgcgcttacggttgggaggctgcgcgttgagctggaagccgcagagaat

SEQ ID NO: 543707 - DNA, 75 bp, synthetic construct
  source 1..75: mol_type = other DNA
cgcacggcgcgccagaccgtggagattcaggacggtaaaattgttgcgctacatgagaacaagcagcatccggac

SEQ ID NO: 543708 - DNA, 75 bp, synthetic construct
  source 1..75: mol_type = other DNA
aaaggcactaccattgcccgcagccactgcaatatcgaaccggtttccggcctgaaaaatctgcaaaatttgcag

SEQ ID NO: 543709 - DNA, 75 bp, synthetic construct
  source 1..75: mol_type = other DNA
ttaccgcttttggctctggaaatttgacaatgaatggtgttacttcttatttcggtgtccgtccacgcaacatcg

SEQ ID NO: 543710 - DNA, 75 bp, synthetic construct
  source 1..75: mol_type = other DNA
cagagttcgatcctctgctggatgacagccgtctgctttaccagacgttagcggcacatcagcagccttgtaagt

SEQ ID NO: 543711 - DNA, 75 bp, synthetic construct
  source 1..75: mol_type = other DNA
taatttgcaatactacggtccttctgctggtactggaacaagaacggttttcgccctccagcgtaattcgaacgg

SEQ ID NO: 543712 - DNA, 75 bp, synthetic construct
  source 1..75: mol_type = other DNA
ggtcttctcgcataccttggtttgggagaaggctcagcattacccgttggtgtgcctgttccgtggccttccgcc

SEQ ID NO: 543713 - DNA, 75 bp, synthetic construct
  source 1..75: mol_type = other DNA
atgccagttgcccgttatctctgcattttcataaacgttggtttgggagaaggctcagcattacccgttggtgtg

SEQ ID NO: 543714 - DNA, 75 bp, synthetic construct
  source 1..75: mol_type = other DNA
tcacacacaattatggatcatgcacacaatatggaattgtggacgggggacgggcttgctgcaggaagtgcacgg

SEQ ID NO: 543715 - DNA, 75 bp, synthetic construct
  source 1..75: mol_type = other DNA
cgaaaatggcgtggctgtgcagactcgcacggcacgccagaccgtggagattcaggacggcaaaattgttgcttt

SEQ ID NO: 543716 - DNA, 75 bp, synthetic construct
  source 1..75: mol_type = other DNA
atgccagttagccgtaatctctgcattttcttaaacgttggtttgggagaaggtgctccagctattggcgttccg

SEQ ID NO: 543717 - DNA, 75 bp, synthetic construct
  source 1..75: mol_type = other DNA
acgtatcagcatgcttcatcgaacagattttcacgatgattaccaaacggtaatggcatacaaagtttctgaagt

SEQ ID NO: 543718 - DNA, 75 bp, synthetic construct
  source 1..75: mol_type = other DNA
gaggtgatgcgtatcgaagcgccgatggatgaaggtttgaagcgttgtttgcaaaagctgcgtaacgcgcgctaa

SEQ ID NO: 543719 - DNA, 75 bp, synthetic construct
  source 1..75: mol_type = other DNA
ccgatcacctgccaggtgaatgatgaaccgagcatggcggcactggaacagtgtgcacatagcccgcaggtgatt

SEQ ID NO: 543720 - DNA, 75 bp, synthetic construct
  source 1..75: mol_type = other DNA
atctgcccaataccggaagtggtgctggcagcgccagaagatttggtcgactctgcgcagcggcttagcgaggta

SEQ ID NO: 543721 - DNA, 75 bp, synthetic construct
  source 1..75: mol_type = other DNA
aggggaagtgtcagtgcgcatccaacatattgacggcagtgaaagtgaaattcaggaggcgatcttctgcggatt

SEQ ID NO: 543722 - DNA, 75 bp, synthetic construct
  source 1..75: mol_type = other DNA
gcgcgcgcttctctcggcgcagtccgatttatttaaagcgcaccaccacgaatttaagttttttaaagcctgggc

SEQ ID NO: 543723 - DNA, 75 bp, synthetic construct
  source 1..75: mol_type = other DNA
gtgcagcggcgatttctacggctctcacaaaccttggtttgggagaaggttcggcattacccgttggtgtgcctg

SEQ ID NO: 543724 - DNA, 75 bp, synthetic construct
  source 1..75: mol_type = other DNA
accgacacttcattcacgagggagtatcggtaatactggcgggagtgaaacccgtccacgaaatattgcatttaa

SEQ ID NO: 543725 - DNA, 75 bp, synthetic construct
  source 1..75: mol_type = other DNA
ccgttggtgtgcctgttccgtggcccaccgccacaccgccagcaggctggttaaagtgcgacgggcgcgccttta

SEQ ID NO: 543726 - DNA, 75 bp, synthetic construct
  source 1..75: mol_type = other DNA
gcggagttcatacttattgtgatgtatgatggcgttcttgaagtcccgcgtaatccacttccggaggtattatcc

SEQ ID NO: 543727 - DNA, 75 bp, synthetic construct
  source 1..75: mol_type = other DNA
ggtaatgaccagtccgtgtcgggtacagtggccgttaaccccgtcgatacccgtccacgcaacattgcatttaac

SEQ ID NO: 543728 - DNA, 75 bp, synthetic construct
  source 1..75: mol_type = other DNA
ccagagcctacccgaccctccgtcttcccgatttacgcggtgaatttattcgtggctgggatgacggacgtggtg

SEQ ID NO: 543729 - DNA, 75 bp, synthetic construct
  source 1..75: mol_type = other DNA
aagttagttgaagcaatcattgttgcgatagaaaacgaacaggaaaggctttttgatgaagattacctaatggat

SEQ ID NO: 543730 - DNA, 75 bp, synthetic construct
  source 1..75: mol_type = other DNA
gttgcaggaggagctttgcagcgttgtggaggcatccggtgccagcctggagaaggggcggcacgaccagctgct

SEQ ID NO: 543731 - DNA, 75 bp, synthetic construct
  source 1..75: mol_type = other DNA
gcttatctcttcaatgaacgcgcagatgaaagcggaacgtaccaaacgcgcttacatccttgaagcggaagggat

SEQ ID NO: 543732 - DNA, 75 bp, synthetic construct
  source 1..75: mol_type = other DNA
gatgaaatgctctcccagcgcgatagcattaactcgcgcctgctgcatattgtcgatgaagccactaacccgtgg

SEQ ID NO: 543733 - DNA, 75 bp, synthetic construct
  source 1..75: mol_type = other DNA
ggcgtttttacaggctgaagcgcgagaacgttccgccgaagcggaagctcgcgcgacccaaatggtgtctgaagc

SEQ ID NO: 543734 - DNA, 75 bp, synthetic construct
  source 1..75: mol_type = other DNA
tggtctttttgctgttcaacaaacaaatactgaaggttgtgcttctgtaaagaaaagtgtaaatactgaaaatgt

SEQ ID NO: 543735 - DNA, 75 bp, synthetic construct
  source 1..75: mol_type = other DNA
cggcgttacccgttggtgtacctgttccgtggccttcagccactcctccaacaggctggctgaaatgcaatggtg

SEQ ID NO: 543736 - DNA, 75 bp, synthetic construct
  source 1..75: mol_type = other DNA
gatgtacaaaccaactgtgcgcatcgtggaagttaatgtgccacgcgccgctggcattcgcatcaaaggagagtg

SEQ ID NO: 543737 - DNA, 75 bp, synthetic construct
  source 1..75: mol_type = other DNA
caacgaacaatagttatttctccttaatcagaagtatggtgactgaaagagcagatggcgctgtttacccaaaag

SEQ ID NO: 543738 - DNA, 75 bp, synthetic construct
  source 1..75: mol_type = other DNA
acgtgctttattgaatattcagagtgatgatattaaaaagttcgaacttaagtattttgggcaaggtggtgggcc

SEQ ID NO: 543739 - DNA, 75 bp, synthetic construct
  source 1..75: mol_type = other DNA
tcaaatcggatggcacggtgaaaacggctctcgaaaaccttggtttgggagaaggctcagcgttacccgttggtg

SEQ ID NO: 543740 - DNA, 75 bp, synthetic construct
  source 1..75: mol_type = other DNA
gcgccaccaaaatggtatcggaagccatcgcctctggtgatattcaggcggtgaactactttgtggcgcagaaat

SEQ ID NO: 543741 - DNA, 75 bp, synthetic construct
  source 1..75: mol_type = other DNA
atgatgccattagaggccagcagcctgatggggtcgattgccgggattgccgagctggtgaaagacagcgccaac

SEQ ID NO: 543742 - DNA, 75 bp, synthetic construct
  source 1..75: mol_type = other DNA
acggagccacattctcagcgtcgaattatccaaaactcgctctggtgtttcctgcattaacactgcctgaagcac

SEQ ID NO: 543743 - DNA, 75 bp, synthetic construct
  source 1..75: mol_type = other DNA
ctgttggtgtgcctgttccatggcccaccgccacgccgccagcaggctggttgaagtgcgacggacgctccttta

SEQ ID NO: 543744 - DNA, 75 bp, synthetic construct
  source 1..75: mol_type = other DNA
gatgatgggcgcggggtggatgctggccgcgctctgcttaattggcagccacacacaattttggatcatgcacac

SEQ ID NO: 543745 - DNA, 75 bp, synthetic construct
  source 1..75: mol_type = other DNA
gtagtgttaaacgttatggtgaaattagtggaaatgtaggtacagaaactcgccctcgcaacgttgcatttaatt

SEQ ID NO: 543746 - DNA, 75 bp, synthetic construct
  source 1..75: mol_type = other DNA
ttttcttctgaaaagtacccaaatctggcaaaggtttacccaacgttaaaattacctgatttacgcggtgagttt

SEQ ID NO: 543747 - DNA, 75 bp, synthetic construct
  source 1..75: mol_type = other DNA
ggatggcgtggtgaaaaccatgcatgaaatcgccgacagttcgaagaaaatcgccgacattattagcgtaatcga

SEQ ID NO: 543748 - DNA, 75 bp, synthetic construct
  source 1..75: mol_type = other DNA
ctaaaatcccggcctgccagtgagcaatcaccagcacagtcgcggcggcgtatcgcggaacaagagccaaactgg

SEQ ID NO: 543749 - DNA, 75 bp, synthetic construct
  source 1..75: mol_type = other DNA
atttaccggaagatcgctgcctgattcataaaccggaaggagccattttcctctggctatggtttaaggatttgc

SEQ ID NO: 543750 - DNA, 75 bp, synthetic construct
  source 1..75: mol_type = other DNA
ttgctgaagctggatgcgctggcgaatcaacacggtattccgctggtgattgataatgcctatggcgtaccgttc

SEQ ID NO: 543751 - DNA, 75 bp, synthetic construct
  source 1..75: mol_type = other DNA
ccgggtatcatcttcagcgaagcgcgcccgctgtggaatccgaatatcgtactgtgcatgagtctttccaagctg

SEQ ID NO: 543752 - DNA, 75 bp, synthetic construct
  source 1..75: mol_type = other DNA
gtataggtagggataaaaacgaaaacgttggtttgggggaaggctctgcattgcctgttggtgtaccggttccat

SEQ ID NO: 543753 - DNA, 75 bp, synthetic construct
  source 1..75: mol_type = other DNA
ttttcataaacgttggtttgggagaaggctctgcattaccggttggggtgcctgttccgtggccttcagccacac

SEQ ID NO: 543754 - DNA, 75 bp, synthetic construct
  source 1..75: mol_type = other DNA
ttcaagactgtaaacaccgaaaattattcaatatgggaagcagcaagctcgtttaagggagcagtggtgcctttg

SEQ ID NO: 543755 - DNA, 75 bp, synthetic construct
  source 1..75: mol_type = other DNA
ttggtaagaccagtattcagagcgttcttgattaccttggtttgggggaaggctctgcactgcctgttggtgtgc

SEQ ID NO: 543756 - DNA, 75 bp, synthetic construct
  source 1..75: mol_type = other DNA
aaccgctggacaatacgcttaccaatttgagtggaaaggatgtagctggtcttctcacataccttggtttgggag

SEQ ID NO: 543757 - DNA, 75 bp, synthetic construct
  source 1..75: mol_type = other DNA
atttcagtacaccagtaactcagtaggagatggtgttaattttgttgctgtcagaccgcgaaatattgcatttaa

SEQ ID NO: 543758 - DNA, 75 bp, synthetic construct
  source 1..75: mol_type = other DNA
cgagcattattaagctggcaggcagcaacatctttatcgcaatttggcggtaattatccagaagggtccggccat

SEQ ID NO: 543759 - DNA, 75 bp, synthetic construct
  source 1..75: mol_type = other DNA
ctcgtttaagggggcagtagtgcctttgaacccctcaacgaacaatagttatttctccttaatcagaagtatggt

SEQ ID NO: 543760 - DNA, 75 bp, synthetic construct
  source 1..75: mol_type = other DNA
gagttcaagactgtaaacaccgaaaattattcaatatgggaatcagtaggctcgtttaagggggcagtagtgcct

SEQ ID NO: 543761 - DNA, 75 bp, synthetic construct
  source 1..75: mol_type = other DNA
ttcacctacgccgccgacaggctggctgaaatgcaacggggctgctttttcggctgaagaatacccggaactggc

SEQ ID NO: 543762 - DNA, 75 bp, synthetic construct
  source 1..75: mol_type = other DNA
acggggttgagtaccagtattgtcggtgcagcagagacacgcccacgtaatatttcatttaattacattgtgagg

SEQ ID NO: 543763 - DNA, 75 bp, synthetic construct
  source 1..75: mol_type = other DNA
gattccgtgactcgtcgtctgttgggcggtgtctgggatggcttaacgcaacaggatttgcagatgtatgaagag

SEQ ID NO: 543764 - DNA, 75 bp, synthetic construct
  source 1..75: mol_type = other DNA
gccaagaggctacaaacttttctcagcgtgccggaaatataggtgatggtgcggggcacgcaattaattttcatg

SEQ ID NO: 543765 - DNA, 75 bp, synthetic construct
  source 1..75: mol_type = other DNA
gtaccccaatctggcaaaagcctaccccaccaataaattaccggatttacggggcgaatttattcgtggctggga

SEQ ID NO: 543766 - DNA, 75 bp, synthetic construct
  source 1..75: mol_type = other DNA
tacgattttcaaaaaaacatatacacaaggcagggggcttgatgccacaaatacaggagggagtttgattccatc

SEQ ID NO: 543767 - DNA, 75 bp, synthetic construct
  source 1..75: mol_type = other DNA
aaattcagcaccaccattaacaatgcgctggcaggtaaacaaccgctggacaatacgctgactcatttgagtgga

SEQ ID NO: 543768 - DNA, 75 bp, synthetic construct
  source 1..75: mol_type = other DNA
gccggggcacaacttcttccctgggctggataaaccgtggccgcatacgcatcaatgtatgcgcatgaactatgt

SEQ ID NO: 543769 - DNA, 75 bp, synthetic construct
  source 1..75: mol_type = other DNA
gcaacaggatttgcagatgtatgaagaagcgtatttaagcaacaaagcagaccgtgagtcgccgtattactgcct

SEQ ID NO: 543770 - DNA, 75 bp, synthetic construct
  source 1..75: mol_type = other DNA
tgggtctctggatttctttccgattcgactggagtagcaaccgtgacattacctatggcatttcctaacgctctg

SEQ ID NO: 543771 - DNA, 75 bp, synthetic construct
  source 1..75: mol_type = other DNA
ggggttgaacaaaatatcattttccagtgggtctctggatttctttccgattcgactggagtagcaaccgtgaca

SEQ ID NO: 543772 - DNA, 75 bp, synthetic construct
  source 1..75: mol_type = other DNA
tcagcattacctgttggtgcacctgttccgtggccttcagagacacctccaacaggctggctgaaatgcaacgga

SEQ ID NO: 543773 - DNA, 75 bp, synthetic construct
  source 1..75: mol_type = other DNA
tggtgcggctttttctgttgaagaatacccggaactggcaaaggcttacccgaccaataaattgcctgatttacg

SEQ ID NO: 543774 - DNA, 75 bp, synthetic construct
  source 1..75: mol_type = other DNA
acagaacggagttatctggggggaatgaaacccgcccacgtaacattgccttcaattatattgtgagagcagcat

SEQ ID NO: 543775 - DNA, 75 bp, synthetic construct
  source 1..75: mol_type = other DNA
cgttgcctgttggcataccagttccttggccttcagctacgccgccaacaggctggctgaaatgcaacggggctg

SEQ ID NO: 543776 - DNA, 75 bp, synthetic construct
  source 1..75: mol_type = other DNA
ctgttggtgtccctgttccgtggccttcagccactccgccaacaggctggctgaaatgcaacggtgcggcttttt

SEQ ID NO: 543777 - DNA, 75 bp, synthetic construct
  source 1..75: mol_type = other DNA
agctaatttaggtactgctggcttagaaacccgccctcgtaatattgcatttaattatattgtgagggcggatta

SEQ ID NO: 543778 - DNA, 75 bp, synthetic construct
  source 1..75: mol_type = other DNA
tcaaatcggatggcacggtgaaaacagctctcgaaaaccttggtttgggagaagcggcaaaacttggcgctgctg

SEQ ID NO: 543779 - DNA, 75 bp, synthetic construct
  source 1..75: mol_type = other DNA
ttcacgaactaacgaccagactctgggaagttttacaggcaccacgattttaaaacaaatcacgcccctgtctcc

SEQ ID NO: 543780 - DNA, 75 bp, synthetic construct
  source 1..75: mol_type = other DNA
agccgcaagaatccgtttggcgatatcaaatcggatggcacggtgaaaacagctctcgaaaaccttggttttgga

SEQ ID NO: 543781 - DNA, 75 bp, synthetic construct
  source 1..75: mol_type = other DNA
aaataaattgcctgatttacgtggtgagtttattcgtggctgggatgattctagagggattgatacggggcgttc

SEQ ID NO: 543782 - DNA, 75 bp, synthetic construct
  source 1..75: mol_type = other DNA
gtcgctgtttgttggcatcatctttatgctggcggtgacggcgatttataaagtttttggccttaatcgccacgg

SEQ ID NO: 543783 - DNA, 75 bp, synthetic construct
  source 1..75: mol_type = other DNA
ttagtggatgtcaggtttaatacctatccttctgattctggtgcttttacaaccagcgtcatcggagatgcttca

SEQ ID NO: 543784 - DNA, 75 bp, synthetic construct
  source 1..75: mol_type = other DNA
cggtgaatttattcgtggctgggatgacggacgtggagtggatacaggtcgctctattttaagtattcaggggta

SEQ ID NO: 543785 - DNA, 75 bp, synthetic construct
  source 1..75: mol_type = other DNA
ttggtccggcgatgatgtgtgaaatgattaagcgtaacgatctgctgcgcctgtcagaaacggtcatcaagccgt

SEQ ID NO: 543786 - DNA, 75 bp, synthetic construct
  source 1..75: mol_type = other DNA
ggggtgaagattctggcggaagagatagaaagagcctggctgaaagtcactaaaaattgcctgatgcgctacgct

SEQ ID NO: 543787 - DNA, 75 bp, synthetic construct
  source 1..75: mol_type = other DNA
ccgccattggcgtttatgtccagttctggttcccggagatggcgcagtggatacccgcattgatcgcggtggcgc

SEQ ID NO: 543788 - DNA, 75 bp, synthetic construct
  source 1..75: mol_type = other DNA
atgccagttgcccgttatctctgcattttcataaacgttggtttaggagaaggctcagcattgcctgttggcgta

SEQ ID NO: 543789 - DNA, 75 bp, synthetic construct
  source 1..75: mol_type = other DNA
atggcgaaaaatgactttaaagcgtttgcaactgatcgaaatgccaatgttatgtcgcaggaagaatgggaagcg

SEQ ID NO: 543790 - DNA, 75 bp, synthetic construct
  source 1..75: mol_type = other DNA
ccgttggtgtgcctgttccgtggccgtcagccacaccgccagcgggctggctgaaatgtaacggcgcagcatttt

SEQ ID NO: 543791 - DNA, 75 bp, synthetic construct
  source 1..75: mol_type = other DNA
cgacaaataaattgcctgatttacgtggtgagtttattcgtggctgggatgacgggcgtggtgtggatgcgggac

SEQ ID NO: 543792 - DNA, 75 bp, synthetic construct
  source 1..75: mol_type = other DNA
cctgatttacgcggtgaattcattcgtggctgggatgacgggcgtggtgtggattcagggcgaacaatcctttcg

SEQ ID NO: 543793 - DNA, 75 bp, synthetic construct
  source 1..75: mol_type = other DNA
tcaaatcggatggcacggtgaaaacggctctcgaaaaccttggtttgggagaaggttcagcattacccgttggcg

SEQ ID NO: 543794 - DNA, 75 bp, synthetic construct
  source 1..75: mol_type = other DNA
gcaacgcgcgatgtggctgactggctgaagtgtgacttcatgctcgatcaggttggtaacgtatttaaaggtgta

SEQ ID NO: 543795 - DNA, 75 bp, synthetic construct
  source 1..75: mol_type = other DNA
gttgccgatcgtcctgatgcagaaatgctgcaaaccatgctgctgcgctcgatgaaacaggcgatttacgatcca

SEQ ID NO: 543796 - DNA, 75 bp, synthetic construct
  source 1..75: mol_type = other DNA
tcgctggacaatgactactatcgctttgaccaggtagggcaacgcctgatgggtgaatccagcggccagacttat

SEQ ID NO: 543797 - DNA, 75 bp, synthetic construct
  source 1..75: mol_type = other DNA
tactaagagcaagctcagagaaaactttagaagttccaaacaagcccctaccgcaaaaattaactatttcaggcc

SEQ ID NO: 543798 - DNA, 75 bp, synthetic construct
  source 1..75: mol_type = other DNA
gtctataatttcaagtttaaacctttatgatttcagtcaaataaataacttagagcttggtgtgctattaaatcg

SEQ ID NO: 543799 - DNA, 75 bp, synthetic construct
  source 1..75: mol_type = other DNA
gaataatctgatggtcattgatggtattgaagttcgtcgtgatgcttatggtcgttacagcctgaacgatctgca

SEQ ID NO: 543800 - DNA, 75 bp, synthetic construct
  source 1..75: mol_type = other DNA
tgggcgttacagcctgaacgatctgcacagggcagccgggggagaacaaatgccagaaccgcccgaaatactggc

SEQ ID NO: 543801 - DNA, 75 bp, synthetic construct
  source 1..75: mol_type = other DNA
aattaacccagacgttgcaacgcgacgatggttctcaggttcgtattgtagcgcagcggggatatggaagtgggc

SEQ ID NO: 543802 - DNA, 75 bp, synthetic construct
  source 1..75: mol_type = other DNA
aactttccctacaccacaatttaataaatcttttagttcaaattctgattattttgttgatgcaataccattaat

SEQ ID NO: 543803 - DNA, 75 bp, synthetic construct
  source 1..75: mol_type = other DNA
tctggtccatgtctcttcgctggacaatgactactatcgctttgaccaggtagggcaacgcctgatgggtgaatc

SEQ ID NO: 543804 - DNA, 75 bp, synthetic construct
  source 1..75: mol_type = other DNA
gacgtcagctactatgtgcgtccgccaacaccgctggacagagaagcgcgtaaccgtggtacgtcggtgtacttc

SEQ ID NO: 543805 - DNA, 75 bp, synthetic construct
  source 1..75: mol_type = other DNA
agcaataacctctttccgttcagtgctggcggagctggggctggaattgcctggcggtaacaagccggaaccgcg

SEQ ID NO: 543806 - DNA, 75 bp, synthetic construct
  source 1..75: mol_type = other DNA
gtggatttgcgcctcgaaggcacctgggttaaggctgacggtcagcagggatacttcctgcaacgtatgactcca

SEQ ID NO: 543807 - DNA, 75 bp, synthetic construct
  source 1..75: mol_type = other DNA
cagcagcagaagcggctgcgtgaaagtgaaatccgccagcagctcatccgggaaggtgtactgcgtgaggatgaa

SEQ ID NO: 543808 - DNA, 75 bp, synthetic construct
  source 1..75: mol_type = other DNA
catgcctatcaccgtctggtgaaaaaggacccggtgactggcgaacagagcctgcgcatgcacatgtcgttgcat

SEQ ID NO: 543809 - DNA, 75 bp, synthetic construct
  source 1..75: mol_type = other DNA
agagcaaatccgtttctgggaagaatatgaggcgggaagggcgaccactttcctggttgaaccggaaaggaagcg

SEQ ID NO: 543810 - DNA, 75 bp, synthetic construct
  source 1..75: mol_type = other DNA
aagcagtttttgtccagcccagcggtaaacgagcgtaccgatgatgataaaacgttagcactggctatgtggaca

SEQ ID NO: 543811 - DNA, 75 bp, synthetic construct
  source 1..75: mol_type = other DNA
atgaagcctactggtgcacgccggaacgcctgcagcaactggccatcagggagctgtatcagcttgaactgacgc

SEQ ID NO: 543812 - DNA, 75 bp, synthetic construct
  source 1..75: mol_type = other DNA
ccagcagatttatgagatgtcacagcatatcctgaagcgtatgccgccggatgaagcctactggtgcacgccgga

SEQ ID NO: 543813 - DNA, 75 bp, synthetic construct
  source 1..75: mol_type = other DNA
tgcactgaaacaccgtcgtgcgaaagcggcggcccgcaagcgtgctaatcgcctgaagaaattacctgccgacca

SEQ ID NO: 543814 - DNA, 75 bp, synthetic construct
  source 1..75: mol_type = other DNA
atgggtaaaatcttgcttgtcgtatcagataagggtggtgtaggcaaaagcacctacgtggctaatacaggctca

SEQ ID NO: 543815 - DNA, 75 bp, synthetic construct
  source 1..75: mol_type = other DNA
acacgtatttcagatttagatatttttgaagcggcctgtaatgaaggcgctggcgttcatgatgtacgtcgcgca

SEQ ID NO: 543816 - DNA, 75 bp, synthetic construct
  source 1..75: mol_type = other DNA
taaggcgctgagtgggcagctcgggcacgcctatcaccgtctggtgaaaaaggacccggtgactggcgaacagag

SEQ ID NO: 543817 - DNA, 75 bp, synthetic construct
  source 1..75: mol_type = other DNA
gcgtatgcgcatgtccctgcatccgttctatgtacagaagcgcgaatttgccggtcgtaaatatgctttccgacc

SEQ ID NO: 543818 - DNA, 75 bp, synthetic construct
  source 1..75: mol_type = other DNA
acgttcgtcggtcgcaaatatgctttccggccggaaaaacaatgcctcctcgataccatctggccggttctggtc

SEQ ID NO: 543819 - DNA, 75 bp, synthetic construct
  source 1..75: mol_type = other DNA
tttgatgatgtcggcattaggcacgttgctggtcgtgcaatcttcctcgccagctcaggctgtagcgtttatctc

SEQ ID NO: 543820 - DNA, 75 bp, synthetic construct
  source 1..75: mol_type = other DNA
ggtattggtgctcatacgcactccgttgcgattggttcacatggacataccatcaccgttaacgctgctggtaac

SEQ ID NO: 543821 - DNA, 75 bp, synthetic construct
  source 1..75: mol_type = other DNA
gctgcgcgatatcatcaaacacacgccggatttgctcagcgtgcgctggaagcgggaagggtttatttccgatca

SEQ ID NO: 543822 - DNA, 75 bp, synthetic construct
  source 1..75: mol_type = other DNA
ttgctcagcgtgcgctggaagcgggaagggtttatttccgaccacgcagcgcgtagtaaaggcaaagagacgccg

SEQ ID NO: 543823 - DNA, 75 bp, synthetic construct
  source 1..75: mol_type = other DNA
tcatcaaaagctgaatcatcccgaattctggcagaagattatttctctttttgccagtcattaaatatagcagat

SEQ ID NO: 543824 - DNA, 75 bp, synthetic construct
  source 1..75: mol_type = other DNA
gttatggtgaagaatgtcgtgaggataatttttcttccgtccgtcccgcagaaactatgaatataagggcagaac

SEQ ID NO: 543825 - DNA, 75 bp, synthetic construct
  source 1..75: mol_type = other DNA
ctttcatgctctgtctcttatacacaaatccccacccggggatttgtgatgtctgtcagtctgctttagggggac

SEQ ID NO: 543826 - DNA, 75 bp, synthetic construct
  source 1..75: mol_type = other DNA
ctacggctgatgtgacgcatgttaacggctctccggtattagtgaatgatgaggcgatagcgagatttgcctgtc

SEQ ID NO: 543827 - DNA, 75 bp, synthetic construct
  source 1..75: mol_type = other DNA
gaaatgaaaatcagcgtccgctccctgagtcgtgaaacccgacaacttcttcagactcgtctccccgctttagca

SEQ ID NO: 543828 - DNA, 75 bp, synthetic construct
  source 1..75: mol_type = other DNA
accatacacaacatgaatataatattgaaacttcattagattttagttctcctttgccagagccggagcgagagc

SEQ ID NO: 543829 - DNA, 75 bp, synthetic construct
  source 1..75: mol_type = other DNA
gcgtttgatgtgcttgccagcgataaagccgatcttgagcggttgtttcgcttgttgactcagcgttttgctttt

SEQ ID NO: 543830 - DNA, 75 bp, synthetic construct
  source 1..75: mol_type = other DNA
atgcagtataaagatgaaaacggcgtgaatgaaccgtcacgccgacgtttactgaaagtgataggtgcactggcg

SEQ ID NO: 543831 - DNA, 75 bp, synthetic construct
  source 1..75: mol_type = other DNA
atgagcaaacgtaacgatattactgatggaatatttgcaacaacgaaaaagtatggattagtttataccgaagag

SEQ ID NO: 543832 - DNA, 75 bp, synthetic construct
  source 1..75: mol_type = other DNA
tggtatgaacaactcagcaatcagtcatacccgggacatattcgggtacatgaacttgcacaacaggaactggga

SEQ ID NO: 543833 - DNA, 75 bp, synthetic construct
  source 1..75: mol_type = other DNA
aaagaaggctctgtgaagggctacgcgggtgacaccgccaccaccagtgaaatcaaagccaaactgctggcggac

SEQ ID NO: 543834 - DNA, 75 bp, synthetic construct
  source 1..75: mol_type = other DNA
gtgacaccgccactaccagtgaaatcaaagccaaactgctggcagatgacattgtcccttcccgtcatgtgaaag

SEQ ID NO: 543835 - DNA, 75 bp, synthetic construct
  source 1..75: mol_type = other DNA
caacacactccgttcaggtgtgacgtggcgagatcgtttatcaccagacaaactgatttgccttgtatccgcaga

SEQ ID NO: 543836 - DNA, 75 bp, synthetic construct
  source 1..75: mol_type = other DNA
cgcgtaaaacggctattgtctgcggtttgatgatgtcggcattaggcacgttgctggtcgtgcaatcttcctcgc

SEQ ID NO: 543837 - DNA, 75 bp, synthetic construct
  source 1..75: mol_type = other DNA
gacccgcactactatctcgacaacgtgctgctggaaaccggttttgactacgaaaacggtgtggcagtacagacc

SEQ ID NO: 543838 - DNA, 75 bp, synthetic construct
  source 1..75: mol_type = other DNA
gcggtgctggcgcgacgtcaggcgggcttcgagtgtgaaatcgtcgccttcccgcagcacggtttgctgctgtcg

SEQ ID NO: 543839 - DNA, 75 bp, synthetic construct
  source 1..75: mol_type = other DNA
aactttggcagttttgtttttgcttcctttgctccgatcgtaaccggttgggtcgtggataccacacactcgttt

SEQ ID NO: 543840 - DNA, 75 bp, synthetic construct
  source 1..75: mol_type = other DNA
atgcttaactatcacgacaactcgcgttctatgcagataatccgcaccaatacagcggtagtcgatagcttttct

SEQ ID NO: 543841 - DNA, 75 bp, synthetic construct
  source 1..75: mol_type = other DNA
gtgcatactcaaggccgtgaagataccgtggaagtgcgacgcatgttgtgtcgccggtcaccaggccaccagcac

SEQ ID NO: 543842 - DNA, 75 bp, synthetic construct
  source 1..75: mol_type = other DNA
gatctacgaaaccagaattaaacttgataaggctggtgtgaattttcatttaaacagttgcatcaggtacgttcc

SEQ ID NO: 543843 - DNA, 75 bp, synthetic construct
  source 1..75: mol_type = other DNA
agttgataaggtctactcaggcccggtggatgaaatactgcggaaacacagccgatttaaccatctctgcatggg

SEQ ID NO: 543844 - DNA, 75 bp, synthetic construct
  source 1..75: mol_type = other DNA
atggatcttaaacgcacgcgctgggttcgccgtcttgaagatggctcctacaccattgaatcaaacactagtctg

SEQ ID NO: 543845 - DNA, 75 bp, synthetic construct
  source 1..75: mol_type = other DNA
cggggctgattatttctgttctggccggctggcttgcctggaccatgctatgcgctgaaataccgatggtagcag

SEQ ID NO: 543846 - DNA, 75 bp, synthetic construct
  source 1..75: mol_type = other DNA
atttgctaacggcgcggtaagatcggctttgtggttgagtggtaaggaaagtggtctttttgatatgcgagatgt

SEQ ID NO: 543847 - DNA, 75 bp, synthetic construct
  source 1..75: mol_type = other DNA
gggccgccagttgattcaggcggcgctggcattagagggcgtgcagcttggcgcggcgctggagcgtgaaggatc

SEQ ID NO: 543848 - DNA, 75 bp, synthetic construct
  source 1..75: mol_type = other DNA
aaaggatatactgtaattttttatccccaccctaatcttgttgattatattgaggatttgaatatacctgattat

SEQ ID NO: 543849 - DNA, 75 bp, synthetic construct
  source 1..75: mol_type = other DNA
atacaatagataatttaatattaaatataaaaggttcttcaagtgctaatggggttgataacaaagaatatcttc

SEQ ID NO: 543850 - DNA, 75 bp, synthetic construct
  source 1..75: mol_type = other DNA
tttacgccagccagattgagtatgttgcattaattcctatcctgttgacctgtggtctgccggtctttatctggt

SEQ ID NO: 543851 - DNA, 75 bp, synthetic construct
  source 1..75: mol_type = other DNA
tcttgtacgggaagaggagacactgaaagcattcctgatcaaagcattgactacttaccaggacagagcgggagt

SEQ ID NO: 543852 - DNA, 75 bp, synthetic construct
  source 1..75: mol_type = other DNA
aaaagaacttttcaagatttttatcttactttccagggataaaaaaaataattaaaaaagcttacataaggataa

SEQ ID NO: 543853 - DNA, 75 bp, synthetic construct
  source 1..75: mol_type = other DNA
atgaaagatttaactttgaagtttcatgacaaactgcagtttaaggccttcctgtcatctcttgtctggggggaa

SEQ ID NO: 543854 - DNA, 75 bp, synthetic construct
  source 1..75: mol_type = other DNA
cgccgccgatattgcgattgtctttgccgccaattttagcgttggcgttaacgtcatgcttaagctgctggagaa

SEQ ID NO: 543855 - DNA, 75 bp, synthetic construct
  source 1..75: mol_type = other DNA
cgcttttacaaaatggggtgcgggacggcgcttgtttattcccgtgctggtggtggtgcttttgctgcgttttcg

SEQ ID NO: 543856 - DNA, 75 bp, synthetic construct
  source 1..75: mol_type = other DNA
tcttgtacgggaagaggaaacactgaaagcattcctgctcaaagcgttgactacttaccaggacagggcaggcgt

SEQ ID NO: 543857 - DNA, 75 bp, synthetic construct
  source 1..75: mol_type = other DNA
gcgctattaaacgagttacaacatcaactaagcgagcgccagccgccgctgggcgaggtgctggcagtcgatctg

SEQ ID NO: 543858 - DNA, 75 bp, synthetic construct
  source 1..75: mol_type = other DNA
cggcggcgatgattacccgtaaagctggtccggcgctggcggctggctgcaccatggtgctgaagcccgccagtc

SEQ ID NO: 543859 - DNA, 75 bp, synthetic construct
  source 1..75: mol_type = other DNA
ctacaaacttttctcagtttgccgggaatatagtcggaggtgcgggacacgcaattaactttcatgatggcatcg

SEQ ID NO: 543860 - DNA, 75 bp, synthetic construct
  source 1..75: mol_type = other DNA
atttacgaggtgaatttattcgtggctgggatgatgggcgcggtattgatgcaggacgtgctttattgagccttc

SEQ ID NO: 543861 - DNA, 75 bp, synthetic construct
  source 1..75: mol_type = other DNA
gtgaaggtttatattcctctgcaacagcatacccctctatcgaattgccaccaactggagcaggcgcaggggctg

SEQ ID NO: 543862 - DNA, 75 bp, synthetic construct
  source 1..75: mol_type = other DNA
agccgaattaaacggagcattctttaacataacccgcccccgcaatatcgcgtttaactatatcgtgagggcggc

SEQ ID NO: 543863 - DNA, 75 bp, synthetic construct
  source 1..75: mol_type = other DNA
atgccgggcaaacctgcgtctgcgctaaccgcttgtatgtgcaggacggcgtgtatgaccgctttgccgaaaaat

SEQ ID NO: 543864 - DNA, 75 bp, synthetic construct
  source 1..75: mol_type = other DNA
aggcggcaacgcaaaacgtcttgccgacagattcgctgttaccgccgcccattgatggcctgatgaatggcctac

SEQ ID NO: 543865 - DNA, 75 bp, synthetic construct
  source 1..75: mol_type = other DNA
tggggccaggaacgcagcctgatgatgatagttttagcatgaatccactgccgattacctgtcaggtgaatgatg

SEQ ID NO: 543866 - DNA, 75 bp, synthetic construct
  source 1..75: mol_type = other DNA
aggctggctgcgcgccgctggcgttgtggcaggcggcaacgcaaaacgtcttgccgacagactcgttgctacccc

SEQ ID NO: 543867 - DNA, 75 bp, synthetic construct
  source 1..75: mol_type = other DNA
aaaaacaccgccatattgttgtagctaacgatggatatgacacaaaagatgaatgggagttggctacgattttca

SEQ ID NO: 543868 - DNA, 75 bp, synthetic construct
  source 1..75: mol_type = other DNA
ctctgccggatacagccccgccagtattcccatgaacaacatattgaagaactccgcgcagccctggcccggatg

SEQ ID NO: 543869 - DNA, 75 bp, synthetic construct
  source 1..75: mol_type = other DNA
gtcagcaatctggagctggcgatcatcaacctgaccatgactaacatccgtaccgtgttgggttcaatggaactt

SEQ ID NO: 543870 - DNA, 75 bp, synthetic construct
  source 1..75: mol_type = other DNA
atgaaagatttaactttgaagtttcatgacaaactgcagtttaaggccttcctgtcatctcttgtctgggtggat

SEQ ID NO: 543871 - DNA, 75 bp, synthetic construct
  source 1..75: mol_type = other DNA
atcaacgccgggtatttcactgtgaaagaagtggtgctagatgatgaagatggctaccagatacggctgacgcct

SEQ ID NO: 543872 - DNA, 75 bp, synthetic construct
  source 1..75: mol_type = other DNA
tctgcgcatgcgcatgtcgcgacaccccttttacgtgcagaagcgggaattcgccggccgcaaatatgctttccg

SEQ ID NO: 543873 - DNA, 75 bp, synthetic construct
  source 1..75: mol_type = other DNA
cgaagatatttccgtgcatgcggccagaaaacgctggtatctgcagcgcagccaggatgcgctgaaacaccgtcg

SEQ ID NO: 543874 - DNA, 75 bp, synthetic construct
  source 1..75: mol_type = other DNA
acttcatgatcaccaaacaactttaccggagaaaggacaaacacgcggttcaccgcattctgctaaccgatatcc

SEQ ID NO: 543875 - DNA, 75 bp, synthetic construct
  source 1..75: mol_type = other DNA
tgcaaaggtcgttggacttaagcaaaacgcccttttctcatggttgcgccagaatggcattctcatggcttttgg

SEQ ID NO: 543876 - DNA, 75 bp, synthetic construct
  source 1..75: mol_type = other DNA
caagccctgcgagtcgccgcgcgcgagtcaaaagcggtccgccgttcgctgatcgacaagctggaggagttgcag

SEQ ID NO: 543877 - DNA, 75 bp, synthetic construct
  source 1..75: mol_type = other DNA
tagatttggggcacggtctgcaactgccgctcacgccgatggtgggtgaatatgccaatatgacacacttcatta

SEQ ID NO: 543878 - DNA, 75 bp, synthetic construct
  source 1..75: mol_type = other DNA
gactggcgtcagcaacgcaggaacaactcgatttattacctgaattgttaaagcagtttttgtccagcccggcgg

SEQ ID NO: 543879 - DNA, 75 bp, synthetic construct
  source 1..75: mol_type = other DNA
cagggaggagaaggcgcgaagctcgccgtcaatgaagcgatggcgtttatggtgcaaaaagtacaggacggtgaa

SEQ ID NO: 543880 - DNA, 75 bp, synthetic construct
  source 1..75: mol_type = other DNA
cggatattgtgctgaccgttcgtcagcgactttttgccgaggcggaagccaaagaattagcggttcgcgattttg

SEQ ID NO: 543881 - DNA, 75 bp, synthetic construct
  source 1..75: mol_type = other DNA
aagcaatttttgtcctgccccgcagtgaatgaacgcaccgatgatgataaaacgctggtgctggccatgtggttg

SEQ ID NO: 543882 - DNA, 75 bp, synthetic construct
  source 1..75: mol_type = other DNA
aagttgcagcatttacggatggtatccagcgactggcgttaaatatgctggataattctcctcatgtgcctttct

SEQ ID NO: 543883 - DNA, 75 bp, synthetic construct
  source 1..75: mol_type = other DNA
atgagaacgtcattagtcacccgtgaagagatgatcgaggcaattgaacagcataccgcctgtatcagtaccagg

SEQ ID NO: 543884 - DNA, 75 bp, synthetic construct
  source 1..75: mol_type = other DNA
tactcaatacggcttaggcaaatataaaacctttacgcatattgatagcaggtcgaaaaaatctcgatggaatgg

SEQ ID NO: 543885 - DNA, 75 bp, synthetic construct
  source 1..75: mol_type = other DNA
gggatcgtggcatggaacaagggacgggcctcaagaacaccgcataccggttattttcgtcaccagtgcgaatat

SEQ ID NO: 543886 - DNA, 75 bp, synthetic construct
  source 1..75: mol_type = other DNA
gctgtgccgccagcgctcgcagcacctgaaggactggttaaagcagtgcgcttttatgaacaggtaaagcgtgag

SEQ ID NO: 543887 - DNA, 75 bp, synthetic construct
  source 1..75: mol_type = other DNA
atgaaagatttaactttgaagtttcatgacaaactgcagtttaaggccttcctgtcatctcttgtctgggaggag

SEQ ID NO: 543888 - DNA, 75 bp, synthetic construct
  source 1..75: mol_type = other DNA
actgacgccgctctacatcacgctgatttatgacatcatgagtaagcgccgtctgcgctggggctatgcttttag

SEQ ID NO: 543889 - DNA, 75 bp, synthetic construct
  source 1..75: mol_type = other DNA
tttgccatcggcatggtgggttacaaacgcctgatggaaactcgcccgatgccgcagcataacgcctttgcgtgg

SEQ ID NO: 543890 - DNA, 75 bp, synthetic construct
  source 1..75: mol_type = other DNA
tgaggagacaaaatcaaaactcaacgagcagcgtgagtattacgaaggtgttatctcggatggaagtaagcgcat

SEQ ID NO: 543891 - DNA, 75 bp, synthetic construct
  source 1..75: mol_type = other DNA
agtcacttggttagcaaatatacaagtcaggtaattctctgggccgagcgcggagcggcacgcatgtctaagatc

SEQ ID NO: 543892 - DNA, 75 bp, synthetic construct
  source 1..75: mol_type = other DNA
ggaatggcagggagtacgcgtcgtaacgaccgaaactcttgctaaggggtatggaaccgaaactaataacatcaa

SEQ ID NO: 543893 - DNA, 75 bp, synthetic construct
  source 1..75: mol_type = other DNA
aaatgtggcgaaaacataatcctgtttaatcctgacactgttgaagcatacgcaaaacgtgcggagataacacct

SEQ ID NO: 543894 - DNA, 75 bp, synthetic construct
  source 1..75: mol_type = other DNA
aagcaattagtcagtcaactgaagaaagtgaagccggactgtaaattaccgggtaaggtgatggactacctgaag

SEQ ID NO: 543895 - DNA, 75 bp, synthetic construct
  source 1..75: mol_type = other DNA
gacactggagtcagcttccgccagaagaacaaatccgtttctgggaagcttatgaagcgggaagggcgacctctt

SEQ ID NO: 543896 - DNA, 75 bp, synthetic construct
  source 1..75: mol_type = other DNA
gatgcggggagaacaatattatccgctcaaggtgatgccatacgtaatatctatggtgagttcaagactgtaaac

SEQ ID NO: 543897 - DNA, 75 bp, synthetic construct
  source 1..75: mol_type = other DNA
gttaagaaaattgttcaaatgcttaaaatgcaagaacgttctgaatatctatcacatcgcgaggaatttcgtcct

SEQ ID NO: 543898 - DNA, 75 bp, synthetic construct
  source 1..75: mol_type = other DNA
gatagtttttatcatgttcagcaatttgttgaaaaacctaatcgctcaaaggcagaagagtatgtttcttcagaa

SEQ ID NO: 543899 - DNA, 75 bp, synthetic construct
  source 1..75: mol_type = other DNA
aggcacagcaaaagtaactttaaataataaaaccgtcttagttactgctaatgagtccgtttatattcctctggg

SEQ ID NO: 543900 - DNA, 75 bp, synthetic construct
  source 1..75: mol_type = other DNA
cgatgccgatggcggtaacttcggacgactgctggaatgggaagatacgtggggtgagtgtcgccgctgggcgat

SEQ ID NO: 543901 - DNA, 75 bp, synthetic construct
  source 1..75: mol_type = other DNA
attgatgtacctgaaaacggcaggcacggtccctgcccgaaatgtgggggcaaggatcgttttcgccttgatgac

SEQ ID NO: 543902 - DNA, 75 bp, synthetic construct
  source 1..75: mol_type = other DNA
ttcaaaaaaaactgatgttcaggatgtaaaaaaaatagttgaaatgcttaaggaacaggaacgttcagaatatat

SEQ ID NO: 543903 - DNA, 75 bp, synthetic construct
  source 1..75: mol_type = other DNA
ctttctttgcgtatgcatcaccaccgttctgaacattggattgttttgtctggcacagcaaaagtcattcttgaa

SEQ ID NO: 543904 - DNA, 75 bp, synthetic construct
  source 1..75: mol_type = other DNA
accagcgattgctttagccgctttttcagcccttaagcgtgataaaaataaagaccctatcttattagtgctcgc

SEQ ID NO: 543905 - DNA, 75 bp, synthetic construct
  source 1..75: mol_type = other DNA
ttctggggaacttccgcctgttctggttctgataaacaaacgcttcacaccgcgaatacgcgtgcaaatggtgac

SEQ ID NO: 543906 - DNA, 75 bp, synthetic construct
  source 1..75: mol_type = other DNA
tgatttcatacgattgcctaaacatattttccaagattgtccgtcggaatcaattgattttgcggttatggaaaa

SEQ ID NO: 543907 - DNA, 75 bp, synthetic construct
  source 1..75: mol_type = other DNA
caatgaaattggcgtttcaggcggctcactggcggcattgacttcccccttaacctcaacaactcccgtcgaaga

SEQ ID NO: 543908 - DNA, 75 bp, synthetic construct
  source 1..75: mol_type = other DNA
caatcgattttgctgtaatggaaaacacaaaacgttgtgttgtgtgtcctgttgatatcggatggagtgatgtgg

SEQ ID NO: 543909 - DNA, 75 bp, synthetic construct
  source 1..75: mol_type = other DNA
gctgcagctgcgttatacaccgggtaaagttgtgtttaacggacaggagatgagcgaagaagaatttatgtctcg

SEQ ID NO: 543910 - DNA, 75 bp, synthetic construct
  source 1..75: mol_type = other DNA
atgcaaaaacagcataacgtcgtagcgggcgtggatatgggggcaacgcatatccgcttttgtctgcggacagca

SEQ ID NO: 543911 - DNA, 75 bp, synthetic construct
  source 1..75: mol_type = other DNA
ttgaactgttcattgatgttctgtgtgataccggactgcaacatgtattttcagaggatgatcgtgaacaggtga

SEQ ID NO: 543912 - DNA, 75 bp, synthetic construct
  source 1..75: mol_type = other DNA
atgtcggggtttcgccataaaactgttgatgtgcctgaatgggagggagcaacggttgtattacgggaaccttct

SEQ ID NO: 543913 - DNA, 75 bp, synthetic construct
  source 1..75: mol_type = other DNA
ccgtcggggcaggaaaaacaacgttatttaatgcgttgcagggagattataccctcgccagaaaaacgcaggccg

SEQ ID NO: 543914 - DNA, 75 bp, synthetic construct
  source 1..75: mol_type = other DNA
tgcagcgggtgttcactccggacgaccgtgagcaggtgctggccgtctatggtccggtacatgcccgcttgctgc

SEQ ID NO: 543915 - DNA, 75 bp, synthetic construct
  source 1..75: mol_type = other DNA
gcgtgatggatatgcccgccttcccacgcgagactctcattgccatgacccaaaagtacctgcgccgtccactgc

SEQ ID NO: 543916 - DNA, 75 bp, synthetic construct
  source 1..75: mol_type = other DNA
acagacgggaacgggctctgaacttttcgcttgccagtgtggggattcaggcgcagggacgtacttccgtcctgc

SEQ ID NO: 543917 - DNA, 75 bp, synthetic construct
  source 1..75: mol_type = other DNA
aatctcgacgccaataactaccgcacgggcattgcggaacatatcaagcaggccattgttgagcaggaacgtttg

SEQ ID NO: 543918 - DNA, 75 bp, synthetic construct
  source 1..75: mol_type = other DNA
atggtgccggagttcgttaaaggccaacagttcaaactgacctggacgcagctgctggaggaagtggacgaggcg

SEQ ID NO: 543919 - DNA, 75 bp, synthetic construct
  source 1..75: mol_type = other DNA
gcagttctttgcccagcgtccgcaggtgcaggaacgtctgactcagcaaatcctcattgcgctacaaacgctgct

SEQ ID NO: 543920 - DNA, 75 bp, synthetic construct
  source 1..75: mol_type = other DNA
aggcgcgtggcatccgcgatgcaaccagtgccacaacaacgacctctcttggtggattgttcaaatccagtcaga

SEQ ID NO: 543921 - DNA, 75 bp, synthetic construct
  source 1..75: mol_type = other DNA
tgaccagcacctgtgaacaccattttgttaccatcgatggcaaagcgacggtggcctatatcccgaaagattcgg

SEQ ID NO: 543922 - DNA, 75 bp, synthetic construct
  source 1..75: mol_type = other DNA
cagaccagcgggtatatcgacctcaacggttcactattgccagagtacctttgcaacactctggttttgggaagc

SEQ ID NO: 543923 - DNA, 75 bp, synthetic construct
  source 1..75: mol_type = other DNA
ataacggtgtactgaaattactgatagaacgtatgcgcccggaagaaaagcagatggcgctggaattgctgcagg

SEQ ID NO: 543924 - DNA, 75 bp, synthetic construct
  source 1..75: mol_type = other DNA
tgagttttcacataccctcagccccagcgggctgaccggcaacaagctggttaaattcctgattgaccggctcaa

SEQ ID NO: 543925 - DNA, 75 bp, synthetic construct
  source 1..75: mol_type = other DNA
cgggtgatgcaatggtgcagaaaatattgaatgcactgtcacccgatcagcgtcaaatggcattagacctactga

SEQ ID NO: 543926 - DNA, 75 bp, synthetic construct
  source 1..75: mol_type = other DNA
atgggacggctggcaatattgagatcccggagaaattgctgaataccgggtcgctgggcggcattctgacattcc

SEQ ID NO: 543927 - DNA, 75 bp, synthetic construct
  source 1..75: mol_type = other DNA
cggcaactggaagctgagcttagcgatatcaatcagcttaaaaccggcgttttacggttggggatcccgccgatg

SEQ ID NO: 543928 - DNA, 75 bp, synthetic construct
  source 1..75: mol_type = other DNA
aacatggcgttaagccgaggattgcggttcgcagcgggcaatgggattttctcgccgcgatggttcaggccggtg

SEQ ID NO: 543929 - DNA, 75 bp, synthetic construct
  source 1..75: mol_type = other DNA
aatattagagctggtcgaggcgttacagcaggaaggtgcattagtaaactggaaaaataatcccgacggtacacg

SEQ ID NO: 543930 - DNA, 75 bp, synthetic construct
  source 1..75: mol_type = other DNA
acttccggaatgacagtgcattcacaccatgggtatctgcagggattggctacgccagaattcaccagaaaacaa

SEQ ID NO: 543931 - DNA, 75 bp, synthetic construct
  source 1..75: mol_type = other DNA
ctccctgtattacaaggatacagaaggggataaatataaatcagaggctgacgttaaaagtcacgacattatgtt

SEQ ID NO: 543932 - DNA, 75 bp, synthetic construct
  source 1..75: mol_type = other DNA
tggtcgggatctgattagtgaagttgatatattgggtaatgaaataacgctgcgcccctggcaggttatgtggat

SEQ ID NO: 543933 - DNA, 75 bp, synthetic construct
  source 1..75: mol_type = other DNA
tggtcgaggcgttacagcaggaaggtgcattagtaaactggaaaaataatcccgacggtacacgcagtccgtatg

SEQ ID NO: 543934 - DNA, 75 bp, synthetic construct
  source 1..75: mol_type = other DNA
tgcacggtcgggatctgattagtgaagttgatatattgggtaatgaaataacactgcatccctggcaggttatgt

SEQ ID NO: 543935 - DNA, 75 bp, synthetic construct
  source 1..75: mol_type = other DNA
cgatgccatcgtcaacatggatgtattaattaccgacgaagcgaaaatcgccatggcgagcgaagaagatgcagg

SEQ ID NO: 543936 - DNA, 75 bp, synthetic construct
  source 1..75: mol_type = other DNA
gattgcctgtaccaataaaaaccttgagcaggaagtcgccgaagggcgttttcgtgaagatctctattatcgtct

SEQ ID NO: 543937 - DNA, 75 bp, synthetic construct
  source 1..75: mol_type = other DNA
ggcggttattcctattaccatgccgccactgcgtgaacgtctgaacgatattattccgctggcagagtcatttat

SEQ ID NO: 543938 - DNA, 75 bp, synthetic construct
  source 1..75: mol_type = other DNA
ccacattgccgaaacccgcgatttaggccagcacggacgaagtgcgcagtatcaatatatcgccgacctgatgcg

SEQ ID NO: 543939 - DNA, 75 bp, synthetic construct
  source 1..75: mol_type = other DNA
aattaaaacagttgaattgccaactggcgaacgtgctcaattggttattcctcccgcatgtgagcgcggtactgt

SEQ ID NO: 543940 - DNA, 75 bp, synthetic construct
  source 1..75: mol_type = other DNA
ccggcgcaattgccagcgtgcctggaaaaatggaactggcgaataacggcaccttattgctcgatgaaattggcg

SEQ ID NO: 543941 - DNA, 75 bp, synthetic construct
  source 1..75: mol_type = other DNA
ctggcccggcaacgtgcgccagctggagaacgccattcagcggggaatgatcttaaaccgcgacggcgtaattta

SEQ ID NO: 543942 - DNA, 75 bp, synthetic construct
  source 1..75: mol_type = other DNA
gcgcactgcgcagggccattgagccgctgggatacctcattcgcgtgtctgagtggtgggagttcggcggagaac

SEQ ID NO: 543943 - DNA, 75 bp, synthetic construct
  source 1..75: mol_type = other DNA
gccgagcaaggtagctacgcgctggtggatctcttcacccgctaccaggtgacgaaaaacttctcgttacagggg

SEQ ID NO: 543944 - DNA, 75 bp, synthetic construct
  source 1..75: mol_type = other DNA
ggcagctgacatttggcgcaacgcgctatattgcagaggataacgaaggaaacgccgttaatcctaatctgccac

SEQ ID NO: 543945 - DNA, 75 bp, synthetic construct
  source 1..75: mol_type = other DNA
caaacagtttgttgaggcggcgcagccgctggaagccatcagcggaaaagtgaacgacttcctcgcccatatcga

SEQ ID NO: 543946 - DNA, 75 bp, synthetic construct
  source 1..75: mol_type = other DNA
aactggatatcggctgcgagcaccgccttgaacagtgcatgacagcactaaaagagaccctaacgccggagtcgc

SEQ ID NO: 543947 - DNA, 75 bp, synthetic construct
  source 1..75: mol_type = other DNA
aggtgatccgctgcgaactggcgctgcaaccgacgcagttgctggcgctggtggaagaggcgctggcggccttcc

SEQ ID NO: 543948 - DNA, 75 bp, synthetic construct
  source 1..75: mol_type = other DNA
ctgattgcaggcggtgcgctgctggcagtgactgcaaccgtaggctcgttgtcgcttgctcttggtgtgcttgct

SEQ ID NO: 543949 - DNA, 75 bp, synthetic construct
  source 1..75: mol_type = other DNA
ggctggcggtatggaccttggcgagacggcggatattggctcaaatatcctgacgcagttcggcctctccgctga

SEQ ID NO: 543950 - DNA, 75 bp, synthetic construct
  source 1..75: mol_type = other DNA
atgaaagcgggtaaacaatttaccgacgatctgattgcccgtaatctgcttaaagacgtgacccgcgtggtggtt

SEQ ID NO: 543951 - DNA, 75 bp, synthetic construct
  source 1..75: mol_type = other DNA
cccgcaaatacggggaagttgaccgggtatcgttctttaaggacattgccggagaagaggctttcacatcgttta

SEQ ID NO: 543952 - DNA, 75 bp, synthetic construct
  source 1..75: mol_type = other DNA
gaatgtcgtcagggtgctgccagcactatggggaatggtaacaggttccatctcgttgctgggtggcgctatcgg

SEQ ID NO: 543953 - DNA, 75 bp, synthetic construct
  source 1..75: mol_type = other DNA
gaacggcaaaatgcgcccgatggaggatgtgctggccgatctttataaagccacccgcaaatacggggaagttga

SEQ ID NO: 543954 - DNA, 75 bp, synthetic construct
  source 1..75: mol_type = other DNA
ggcggtattgagcgcggtatttctaccgaaggcgtgttgcctggcaaactgcgcgttccacgccgtgctgcggca

SEQ ID NO: 543955 - DNA, 75 bp, synthetic construct
  source 1..75: mol_type = other DNA
ccacggtcgtttactgctggcaaacggccagcacgaagtggagttcccggttgataagtgcatgaacttccatgc

SEQ ID NO: 543956 - DNA, 75 bp, synthetic construct
  source 1..75: mol_type = other DNA
ggctcactctccctcaccgggaaaggccaccataccgatatcgccatcatcatgggcctggcgggtaacctgccg

SEQ ID NO: 543957 - DNA, 75 bp, synthetic construct
  source 1..75: mol_type = other DNA
aacctcggtctgacgtgtgacccggtcgccggacaggtacaggtgccatgcatcgagcgtaacgccattgcggca

SEQ ID NO: 543958 - DNA, 75 bp, synthetic construct
  source 1..75: mol_type = other DNA
agttggcgtggcgtgctcaatggcggcggctggtctggcagaactgttaggcgcaagcccggcgcaggtgtgcat

SEQ ID NO: 543959 - DNA, 75 bp, synthetic construct
  source 1..75: mol_type = other DNA
gatttgcagcgtcattgcagcgagacgggcctttccctctcgggcctgatgatgcagaacgaactggcgttacac

SEQ ID NO: 543960 - DNA, 75 bp, synthetic construct
  source 1..75: mol_type = other DNA
atagcaggcggtgcgttgctggcaatgactgcaacggttggctcgttgtcgctggctattggtgtgcttgctggt

SEQ ID NO: 543961 - DNA, 75 bp, synthetic construct
  source 1..75: mol_type = other DNA
ctttcgttaccctgcaggacgtggggggccgcattcagctgtacgttgcccgtgacgatctgccggaaggcgttt

SEQ ID NO: 543962 - DNA, 75 bp, synthetic construct
  source 1..75: mol_type = other DNA
accacggttgtgatccgacctggaccggtactgaccacacgcgtgaacacattccggtactggtttacggcccga

SEQ ID NO: 543963 - DNA, 75 bp, synthetic construct
  source 1..75: mol_type = other DNA
actgtgcgaaatcgcccgtgaagagctgaccaacggcggctacaacatcggtcgtgttatcgctcgcccgtttat

SEQ ID NO: 543964 - DNA, 75 bp, synthetic construct
  source 1..75: mol_type = other DNA
caggatgaaacgcccggatttgccgatgacatgacctgggattttatcagcaacgtcaatagtataacccgcaat

SEQ ID NO: 543965 - DNA, 75 bp, synthetic construct
  source 1..75: mol_type = other DNA
aaataggtaataattcgtatgcaattcaagctggaaataatgtaaatgtttcagggatgtcgttttccgaggtta

SEQ ID NO: 543966 - DNA, 75 bp, synthetic construct
  source 1..75: mol_type = other DNA
ctaattgttgctggaatggtggtgttgtttttacgtcttccttcttacctgaagaggatcagggtgtctttctga

SEQ ID NO: 543967 - DNA, 75 bp, synthetic construct
  source 1..75: mol_type = other DNA
gcctgtggaaaatggcaatggcaccggaggtgataaacccaaagacaataaaccgctcacagacagcaataccgg

SEQ ID NO: 543968 - DNA, 75 bp, synthetic construct
  source 1..75: mol_type = other DNA
cgcaggccattcaggctgcgcttcccggagtgctgagcatggcaacggctggcggtatggatctcggcgagacgg

SEQ ID NO: 543969 - DNA, 75 bp, synthetic construct
  source 1..75: mol_type = other DNA
gttaaaacttggctctgaaacgcagttcaccgcaggcgatgccgccagtggacaggcatttcttgcaatggctgg

SEQ ID NO: 543970 - DNA, 75 bp, synthetic construct
  source 1..75: mol_type = other DNA
caagagctgctggataaactggttgaacacgctaacctgcctggttatctcggtaactgccactcttccggtacg

SEQ ID NO: 543971 - DNA, 75 bp, synthetic construct
  source 1..75: mol_type = other DNA
cgatatttgcatgggtgctggccattattctgatgatggcgggggcactggcgatcctacaattgcccgtcgctc

SEQ ID NO: 543972 - DNA, 75 bp, synthetic construct
  source 1..75: mol_type = other DNA
caaaagcattgatggattcactggcgtggatacttgaaaagctcggagtgcttccggatgaagcggaacgggcga

SEQ ID NO: 543973 - DNA, 75 bp, synthetic construct
  source 1..75: mol_type = other DNA
gctgctggcggacgcgtggtgactgcgccgactaacggtgcgtgcgggattatcccggcagtgctggcgtactac

SEQ ID NO: 543974 - DNA, 75 bp, synthetic construct
  source 1..75: mol_type = other DNA
tggctggagaagcgccatgccctgtgcggtcactggagtgatatggctgttctgtgtccggcagagttttcagtg

SEQ ID NO: 543975 - DNA, 75 bp, synthetic construct
  source 1..75: mol_type = other DNA
ccaggggtcgtccatttcgcgagccagcttcgacggggttgattactcattgccagaaaactcggggttccgcac

SEQ ID NO: 543976 - DNA, 75 bp, synthetic construct
  source 1..75: mol_type = other DNA
ttcgcgataaatgggatgagctggttatccgtctggggcgttcgcctgtacagcgttgtgtgaatcatatttctg

SEQ ID NO: 543977 - DNA, 75 bp, synthetic construct
  source 1..75: mol_type = other DNA
gtggttcgtcccaaagaacctaactggacagcctgggcaaacgaaattcgcctgatgtgtgtgcaggatggtcgt

SEQ ID NO: 543978 - DNA, 75 bp, synthetic construct
  source 1..75: mol_type = other DNA
catttagctggcgaagttgccgttaagatctatgattccctttgtcaacagcaatggatcactgaaaatggttca

SEQ ID NO: 543979 - DNA, 75 bp, synthetic construct
  source 1..75: mol_type = other DNA
aaaatcatcgccctgtacgagcaggccgccgaatgtgacggcgaggtggttcgtcccaaagaaccgaactggaca

SEQ ID NO: 543980 - DNA, 75 bp, synthetic construct
  source 1..75: mol_type = other DNA
ctcacaaatcaaaataatggatattcagcaggagattctggccagaaatattggtgatgggcatcgtgttattca

SEQ ID NO: 543981 - DNA, 75 bp, synthetic construct
  source 1..75: mol_type = other DNA
gagctaaacagccacgacccgcaaagcgtgcagcaactggtggattatctggcatctctcaccgaacaggaggaa

SEQ ID NO: 543982 - DNA, 75 bp, synthetic construct
  source 1..75: mol_type = other DNA
atgaaacgaattgcgtttgtgggtgctgtcggagcaggaaagacaacgttatttaatgcgttgcagggagattat

SEQ ID NO: 543983 - DNA, 75 bp, synthetic construct
  source 1..75: mol_type = other DNA
ctggttatccgcctggggcgttcgcccgcgcagcgttgcgtgaatcatatttctgaaccggataccgaaattccg

SEQ ID NO: 543984 - DNA, 75 bp, synthetic construct
  source 1..75: mol_type = other DNA
tatgggatggttgcgctgcatcaggcatgaaattatccagcgtggcaattatggcccgcctggctgatttcagta

SEQ ID NO: 543985 - DNA, 75 bp, synthetic construct
  source 1..75: mol_type = other DNA
atggcgaaactgataaatgtatcggcgtccactgaggagagaatgacgcccggagagaggagggtggctttacga

SEQ ID NO: 543986 - DNA, 75 bp, synthetic construct
  source 1..75: mol_type = other DNA
ccgccgaatgtgacggcgaggtggtacgtccgaaagaaccgaactggacagcctgggcaaatgaaattcgcctga

SEQ ID NO: 543987 - DNA, 75 bp, synthetic construct
  source 1..75: mol_type = other DNA
gtgattgaccactttgccattctgaaagttggcccggcgctgaccttcgccctgcgtgaagctctgttctctctg

SEQ ID NO: 543988 - DNA, 75 bp, synthetic construct
  source 1..75: mol_type = other DNA
cacgccggatgccgcccgcgccacgctggaagcccatcgtcacgcctttgaaaagcaaggtttgaatgccatctg

SEQ ID NO: 543989 - DNA, 75 bp, synthetic construct
  source 1..75: mol_type = other DNA
catcgtggctgaacgcgccgcacgtctggcgaaagtggcggaagaaacctgtcttgaacactttggcgaagccga

SEQ ID NO: 543990 - DNA, 75 bp, synthetic construct
  source 1..75: mol_type = other DNA
gacaagtttatccgcgaagtgaacgctaactcactggctcgttacctgctggtagccagcgccattggttctctt

SEQ ID NO: 543991 - DNA, 75 bp, synthetic construct
  source 1..75: mol_type = other DNA
cgctgattctgggtggcgaccatctggggccaaaccgctggcaaaacctgcctgccgctcaggcaatggccaatg

SEQ ID NO: 543992 - DNA, 75 bp, synthetic construct
  source 1..75: mol_type = other DNA
gtgaaacatctgacagaaatggtgagacagcacaaagcgggcaaaacaaatgggatttatgccgtttgttccgca

SEQ ID NO: 543993 - DNA, 75 bp, synthetic construct
  source 1..75: mol_type = other DNA
agtataacaatacattcaaaaaatgtattaatgagctagtaaactcatttcctgataacattgaactaatttctg

SEQ ID NO: 543994 - DNA, 75 bp, synthetic construct
  source 1..75: mol_type = other DNA
tctcttgaatctgcacctgtgtatattgaagagcgtgtgtggattggtgaaaacgtgacaatattaccaggtgcg

SEQ ID NO: 543995 - DNA, 75 bp, synthetic construct
  source 1..75: mol_type = other DNA
atggctaatttaatacgaaaagaggttacctttgagtcctcaatagccgcgataggggcggctatgtctgacatt

SEQ ID NO: 543996 - DNA, 75 bp, synthetic construct
  source 1..75: mol_type = other DNA
ttttctttattgggataatgaggcttcgatatccagaagcatcttttaatttaattttatattatttatataatt

SEQ ID NO: 543997 - DNA, 75 bp, synthetic construct
  source 1..75: mol_type = other DNA
gcagctatttgatgatcaatatcttacatggttatcaaactggatattgcttataattacaggctatataatgac

SEQ ID NO: 543998 - DNA, 75 bp, synthetic construct
  source 1..75: mol_type = other DNA
tttctttactggggggcgctatcggggcgttgttcagtccggttggtcttattgtggctgcgctcgccggagctg

SEQ ID NO: 543999 - DNA, 75 bp, synthetic construct
  source 1..75: mol_type = other DNA
cgctggcagcagaaggaagcagtaaacgggactggaatcgcttcctggacagtcattaccggcggatgtcaacgt

SEQ ID NO: 544000 - DNA, 75 bp, synthetic construct
  source 1..75: mol_type = other DNA
cggtgacaaaaatcatggcgtgcggaaccacgctgatggggtacacacagtggtgctgttcatctccggactgtt

SEQ ID NO: 544001 - DNA, 75 bp, synthetic construct
  source 1..75: mol_type = other DNA
gcagggtaaccgctggcttaactggctggagaaacagccggaaggttcagtgcgtccggtggtgactgagtcagt

SEQ ID NO: 544002 - DNA, 75 bp, synthetic construct
  source 1..75: mol_type = other DNA
catgtggcggataaggggttccgtatggtgaggtactacggtttcctgagtccgtcgaaacggcggttactgaag

SEQ ID NO: 544003 - DNA, 75 bp, synthetic construct
  source 1..75: mol_type = other DNA
ttggtgatgagtggcgatgaattcatggaaaggttctcctggcatgtggcggataaggggttccggatggtgagt

SEQ ID NO: 544004 - DNA, 75 bp, synthetic construct
  source 1..75: mol_type = other DNA
tcccgactgcccgtggcagcatattgtgttcacacttccgtgccaatactggtccctggtgtttcacaaccgctg

SEQ ID NO: 544005 - DNA, 75 bp, synthetic construct
  source 1..75: mol_type = other DNA
ggtttgagggccaaccgtacgaaaacgtacgatttcggacaccaaaaccgctgttgtcccgccattctggcgatt

SEQ ID NO: 544006 - DNA, 75 bp, synthetic construct
  source 1..75: mol_type = other DNA
tggaaaggttctcctggcatgtagcagataaggggttccgtatggtgaggtactacggtttcctgagtccggtga

SEQ ID NO: 544007 - DNA, 75 bp, synthetic construct
  source 1..75: mol_type = other DNA
atgagccgtatcgcagcgaatgtgatactggaaatctgccgtcaggcggacgtggagccggggatattcacggta

SEQ ID NO: 544008 - DNA, 75 bp, synthetic construct
  source 1..75: mol_type = other DNA
atattcatctgtcgaccactgccggtggcgtgacgtcagctcacacctggaaaaatcttcatttttacgcccgta

SEQ ID NO: 544009 - DNA, 75 bp, synthetic construct
  source 1..75: mol_type = other DNA
tggtgttgttcatcaccggactgttgccatacaaagaaggtctgtttccggtgtaaaagccgctcctgtccgcac

SEQ ID NO: 544010 - DNA, 75 bp, synthetic construct
  source 1..75: mol_type = other DNA
ccgtggcagcatattgtgttcacacttccctgccagtactggtccctggtgttccacaaccggtggttactggca

SEQ ID NO: 544011 - DNA, 75 bp, synthetic construct
  source 1..75: mol_type = other DNA
ggtgtctggttgcgtgagggacagactatcgaccgtgagggcaacataaccggagaagcccgacgctcgcgcatt

SEQ ID NO: 544012 - DNA, 75 bp, synthetic construct
  source 1..75: mol_type = other DNA
tcatcctcatctgtggtgcgctggcggttgttactctcagtctgaaaaaggccgggatcccgctgtacctcaata

SEQ ID NO: 544013 - DNA, 75 bp, synthetic construct
  source 1..75: mol_type = other DNA
catgatgctaaccagcaaagagacgcttttgcctctgtttggggcgttgattctggtcggttgcagtatttactc

SEQ ID NO: 544014 - DNA, 75 bp, synthetic construct
  source 1..75: mol_type = other DNA
atgtgcgcccgatgaccatcgcctggccgttggaaatcgcccaggatctgcgtcgtctgatctcgctggacacct

SEQ ID NO: 544015 - DNA, 75 bp, synthetic construct
  source 1..75: mol_type = other DNA
gtgcctcagttggggggcgtacgccgcgacggccccgatagcaaacaaatcactcaggaactggagcaggcaaaa

SEQ ID NO: 544016 - DNA, 75 bp, synthetic construct
  source 1..75: mol_type = other DNA
cgaagcgttgcgggcgcaggtggcacggctgccggaaatgccgaaaccacaacagcttgataccgaaatggcgca

SEQ ID NO: 544017 - DNA, 75 bp, synthetic construct
  source 1..75: mol_type = other DNA
aaggggcggttgaggtagatgaaagtgaagtcgatctcgatgccatcagtgcccagtccttgcgactggttcgtt

SEQ ID NO: 544018 - DNA, 75 bp, synthetic construct
  source 1..75: mol_type = other DNA
agcttgaggcggagcgggcgctggaaagtaccgaattactggcagaaaacagtgccgatttgccgaaagatatcg

SEQ ID NO: 544019 - DNA, 75 bp, synthetic construct
  source 1..75: mol_type = other DNA
gggacgtcatcgccgttttgtggttcaggtaacgggctatggcagccgtggcgaacgctggattattgatcgtta

SEQ ID NO: 544020 - DNA, 75 bp, synthetic construct
  source 1..75: mol_type = other DNA
gtggcggagaaagtcacctcacgaagctcctcccacgaccgggatcctgtctttatataaccgcggcgatcgtcg

SEQ ID NO: 544021 - DNA, 75 bp, synthetic construct
  source 1..75: mol_type = other DNA
ggcgcagctgtctgccaataaccgccaggaattagcgcgcttgcgctctgagctggcggaaaaagagagccagca

SEQ ID NO: 544022 - DNA, 75 bp, synthetic construct
  source 1..75: mol_type = other DNA
ctgatcatcctgttcgaaaaaccgattcgcattggcgatacggtaacgatccgcgatcttactggtagcgtgaca

SEQ ID NO: 544023 - DNA, 75 bp, synthetic construct
  source 1..75: mol_type = other DNA
attctcgtcgcgtcaccgctgccagtgctgtggatgacgctcggctacgggctgcgcgaggcgtggccttatccg

SEQ ID NO: 544024 - DNA, 75 bp, synthetic construct
  source 1..75: mol_type = other DNA
ttcagcagggaaaccgcaggcttaactggctggagaaacaaccggaaggttcagtgcgtccggtggtcattgagt

SEQ ID NO: 544025 - DNA, 75 bp, synthetic construct
  source 1..75: mol_type = other DNA
gtggaggcctccggtgccagcctggagaaggggcggcacgaccagctgcttaccgcgcttcgtgctctgctgtta

SEQ ID NO: 544026 - DNA, 75 bp, synthetic construct
  source 1..75: mol_type = other DNA
cattacctgttggggtgcctgttccgtggccttcagccacaccgccaacaggctggctgaaatgcaatggtgcgg

SEQ ID NO: 544027 - DNA, 75 bp, synthetic construct
  source 1..75: mol_type = other DNA
tgattcaggacggactctcctgtctcctcaggacgggagcattgaggcacacggccatgattacaatggggtcat

SEQ ID NO: 544028 - DNA, 75 bp, synthetic construct
  source 1..75: mol_type = other DNA
gtacgtcataacggagacggtgagaaaaacggcgatgcaaatcaggtggagagggatgtatcagaggttactgaa

SEQ ID NO: 544029 - DNA, 75 bp, synthetic construct
  source 1..75: mol_type = other DNA
tggaatgctggcgctccagaaatggaaaccagagcttacgcggttccgacaaaatatggtcaggtagaagcacgg

SEQ ID NO: 544030 - DNA, 75 bp, synthetic construct
  source 1..75: mol_type = other DNA
aggcagatgtggagccggggatattcacggtgatccacacatgggggagtgaccagcagtggcatccgcatatcc

SEQ ID NO: 544031 - DNA, 75 bp, synthetic construct
  source 1..75: mol_type = other DNA
attccatcaccaacgcttcattcacgaggaagtattggtaacacaggtggtagtgaaacccgcccccgcaatatt

SEQ ID NO: 544032 - DNA, 75 bp, synthetic construct
  source 1..75: mol_type = other DNA
aaaggcttaccccacaaataaattaccggatttacgcggagaatttatccgtggctgggatgatgggcgaggaat

SEQ ID NO: 544033 - DNA, 75 bp, synthetic construct
  source 1..75: mol_type = other DNA
cttgatgcttcaaaaattgttccaactgcaaacgaaaaccgcccacgcaacattgcgtttaattacatcgtaagg

SEQ ID NO: 544034 - DNA, 75 bp, synthetic construct
  source 1..75: mol_type = other DNA
cgacaaataaattgcctgatttacgtggtgagtttatgcgtggctgggatgatggaagaggcgttgatagtggca

SEQ ID NO: 544035 - DNA, 75 bp, synthetic construct
  source 1..75: mol_type = other DNA
cctgttccgtggccttcagagacacctccaacaggctggctgaaatgcaacggggcggctttttctgctgaagaa

SEQ ID NO: 544036 - DNA, 75 bp, synthetic construct
  source 1..75: mol_type = other DNA
ttttcataaacgttggtttgggagaaggctcagcattacctgttggggtgcctgttccgtggccttcagagacac

SEQ ID NO: 544037 - DNA, 75 bp, synthetic construct
  source 1..75: mol_type = other DNA
ttcagcagggaaatcgctggcttaactggctggagaagcagccggaagggtctgtgcgtccggtggtgattgagt

SEQ ID NO: 544038 - DNA, 75 bp, synthetic construct
  source 1..75: mol_type = other DNA
catggagggggatgtatcagtggttattgaaggttgacccgctgaaatgcgtgcggtgcggaagtcagatacgtt

SEQ ID NO: 544039 - DNA, 75 bp, synthetic construct
  source 1..75: mol_type = other DNA
gggctgaagcggggctaccgtctggcagagctggtcctgatgcatgagccgctggcccggatgcggtggtgcggc

SEQ ID NO: 544040 - DNA, 75 bp, synthetic construct
  source 1..75: mol_type = other DNA
ggctcttacctgaaaaagccgccggtgccaatgagccgtctggaacactatgccggtcaggatgaaactggtctg

SEQ ID NO: 544041 - DNA, 75 bp, synthetic construct
  source 1..75: mol_type = other DNA
gaaaaaaccgccggtgccgatgagccgtctggagcactatgctggtcaggatgaaattggtctgcgttacaacag

SEQ ID NO: 544042 - DNA, 75 bp, synthetic construct
  source 1..75: mol_type = other DNA
gatgaaatcggtctgcgttacaacagtcaccgtacaaaacgggaagaatacctgttgatgagtggagatgagttc

SEQ ID NO: 544043 - DNA, 75 bp, synthetic construct
  source 1..75: mol_type = other DNA
cggtgacgcgccggttactggaagatgttgtgtacgtcataacggagacggtgagaaagatggcgatgcaaatca

SEQ ID NO: 544044 - DNA, 75 bp, synthetic construct
  source 1..75: mol_type = other DNA
ggctgaagcggggctaccgtctgacagagctggtcctgatgcatgagccactggcgcaacagcgggtgtgcggct

SEQ ID NO: 544045 - DNA, 75 bp, synthetic construct
  source 1..75: mol_type = other DNA
aaggtgaagttctggtcgttgtatctggttttactggttgcggaaaaagcgccattgccggggaaatagaaatcg

SEQ ID NO: 544046 - DNA, 75 bp, synthetic construct
  source 1..75: mol_type = other DNA
agacggtgagaaagacggcgatgcaaatcacctggagagggatgtatcagcggttactgaaggttgacccgctga

SEQ ID NO: 544047 - DNA, 75 bp, synthetic construct
  source 1..75: mol_type = other DNA
tggtgtgacgtcagctcacacctggaaaaatcttcatttttacgcccgtaaggtgatgcgcatgtggcgttaccg

SEQ ID NO: 544048 - DNA, 75 bp, synthetic construct
  source 1..75: mol_type = other DNA
gatgaaattggtctgcgttacaacagccaccggacaaaacgggaagaatacctggtgatgagtggcgatgagttc

SEQ ID NO: 544049 - DNA, 75 bp, synthetic construct
  source 1..75: mol_type = other DNA
gttatgcacgtttcaacatcgactctacccaggttagtttgaccccggataaaaaaggtatttacgtcacggtca

SEQ ID NO: 544050 - DNA, 75 bp, synthetic construct
  source 1..75: mol_type = other DNA
tgttcgagagctgctgaaggatagccaaggcatatcagcactgaagctgtactcatttttagcggagcatatcga

SEQ ID NO: 544051 - DNA, 75 bp, synthetic construct
  source 1..75: mol_type = other DNA
agacggcaccaaaagccttgagagttaatggctatgaagctaatgatatgattcagtgccgtcgccagcgactgt

SEQ ID NO: 544052 - DNA, 75 bp, synthetic construct
  source 1..75: mol_type = other DNA
tgacttccaggcagatgacgccgacctgtccgactataccaacaagagttatggtacagacgtgacgttgggctt

SEQ ID NO: 544053 - DNA, 75 bp, synthetic construct
  source 1..75: mol_type = other DNA
accgttttactgcccgcgatgtatttaatgggcaacccggtgcaaaatgtcggtcgctgcctggggacagccgaa

SEQ ID NO: 544054 - DNA, 75 bp, synthetic construct
  source 1..75: mol_type = other DNA
aacaaaaagaagtactccagaaagttgccaacgacaataaaatatttcaacgccaacaggaaattgaacaagaaa

SEQ ID NO: 544055 - DNA, 75 bp, synthetic construct
  source 1..75: mol_type = other DNA
atcacgagatttatcaacgtcagcgggagatgaaggaagaactgaataatcttgatgatttacgcttaatccgag

SEQ ID NO: 544056 - DNA, 75 bp, synthetic construct
  source 1..75: mol_type = other DNA
tcagccattttgaatttggccaaggtgttgttatctcgactgcgggtggctacgcccgtgtattctttccccagg

SEQ ID NO: 544057 - DNA, 75 bp, synthetic construct
  source 1..75: mol_type = other DNA
ttgtaaaagatggcctcgaacaaatgctgtttaccacggatcgggaagaagcgaccaattcagaaaaattgcatt

SEQ ID NO: 544058 - DNA, 75 bp, synthetic construct
  source 1..75: mol_type = other DNA
gaaccgatctccatcgatgttactcaccgatctccttcacggtaatacgcattgcccttattgattatgagaact

SEQ ID NO: 544059 - DNA, 75 bp, synthetic construct
  source 1..75: mol_type = other DNA
gatgacctgttgtggtgagagggataatacataccatattatttcagcagataagggatatgacgggattataca

SEQ ID NO: 544060 - DNA, 75 bp, synthetic construct
  source 1..75: mol_type = other DNA
tgattatgaaaactgtggcagtctgaaaaatatttcccttgagcagtatggggaactgattatttttgtcgggcc

SEQ ID NO: 544061 - DNA, 75 bp, synthetic construct
  source 1..75: mol_type = other DNA
atggtagtgtccgctattgccagtacacctcacccgttatacaccatggatacatggtactctccgatggtcggt

SEQ ID NO: 544062 - DNA, 75 bp, synthetic construct
  source 1..75: mol_type = other DNA
gtgtccactattctctcaggaatttcaggatctgccagacggtgctgagacgacgcttacggattaccgtcgtgt

SEQ ID NO: 544063 - DNA, 75 bp, synthetic construct
  source 1..75: mol_type = other DNA
gacggggaaggggatgccttcaccctggcatcaaagcgtaccaccacctttatgtcctcggggatgaccctggtc

SEQ ID NO: 544064 - DNA, 75 bp, synthetic construct
  source 1..75: mol_type = other DNA
cagccacggaacagcgtaaaagtgaactgcttgaacagcgtgccgagccgtttccccggcgatctgtgccggatg

SEQ ID NO: 544065 - DNA, 75 bp, synthetic construct
  source 1..75: mol_type = other DNA
gactgaccaacgcttccgccaggactttggggatgatgcttataagtataagggcagcgataagaacgatactgt

SEQ ID NO: 544066 - DNA, 75 bp, synthetic construct
  source 1..75: mol_type = other DNA
ggttatgcacggatacatcataaggcaacatatactgatacctcctggaataaatctggtgaggtgagcgatttt

SEQ ID NO: 544067 - DNA, 75 bp, synthetic construct
  source 1..75: mol_type = other DNA
tggtcgagagttcacccgggcgggatatcactgacaccaaatggcgatgtggcggcacacatgaggcacccccaa

SEQ ID NO: 544068 - DNA, 75 bp, synthetic construct
  source 1..75: mol_type = other DNA
acccgggcaacccgtgaattactggtgacctgttaccgtgaaaacagtatcagtcgtcaccttgaggattttgca

SEQ ID NO: 544069 - DNA, 75 bp, synthetic construct
  source 1..75: mol_type = other DNA
gaaatccagcaaattaacattgttggtaaccatgctttcaccaccgacgaactgatctctcatttccaactgcgt

SEQ ID NO: 544070 - DNA, 75 bp, synthetic construct
  source 1..75: mol_type = other DNA
tatgcacgggttcatcataaaacttcgtacatatataccgataacagcccggcaggcagtgaagtatattcaact

SEQ ID NO: 544071 - DNA, 75 bp, synthetic construct
  source 1..75: mol_type = other DNA
ctgagacgaaggcgcgtgagcattccagaacgcgtctttccaggacgtttcgccacagtccggaggtcagcaagc

SEQ ID NO: 544072 - DNA, 75 bp, synthetic construct
  source 1..75: mol_type = other DNA
atttggtgcaggccttgcggtgggctatgatttttatcaacattacaatgttcctgtgcgcacggaagtggaatt

SEQ ID NO: 544073 - DNA, 75 bp, synthetic construct
  source 1..75: mol_type = other DNA
atgaaaaaggttattgcggtttcagcgcttgcaatggcgggcatgttatcgacccaggctctggctgatgagagc

SEQ ID NO: 544074 - DNA, 75 bp, synthetic construct
  source 1..75: mol_type = other DNA
gttgggatttgattgtttttgatgaagcgcatcactgcactgcctataagcaaggtggcaaaacccgcaagaccc

SEQ ID NO: 544075 - DNA, 75 bp, synthetic construct
  source 1..75: mol_type = other DNA
cgctttcctgaagatatcgacggggagggcgacgctttttcactggcgtcgaaacgtaccacgacatttatgtcc

SEQ ID NO: 544076 - DNA, 75 bp, synthetic construct
  source 1..75: mol_type = other DNA
tctaaatcaaaaccaaaacgtgagaagcccgtaaccgagcaggctaatccgtggtcttcgtcaggaggttgggtg

SEQ ID NO: 544077 - DNA, 75 bp, synthetic construct
  source 1..75: mol_type = other DNA
gcaccttatgtgattgagccgatgaattgcctgtcctcgcgtgaatacgatgcggttgtgtttgttggcccggcg

SEQ ID NO: 544078 - DNA, 75 bp, synthetic construct
  source 1..75: mol_type = other DNA
gggcttcggatttaatcccggtcgggtggcatggcagccggaactggaaaaatacgattaccgcagcgcccgcca

SEQ ID NO: 544079 - DNA, 75 bp, synthetic construct
  source 1..75: mol_type = other DNA
gaagctcgagcaaaacaaagaagttgcttatctctcataccagctggcgacgattaaaaccgacgttgaactgga

SEQ ID NO: 544080 - DNA, 75 bp, synthetic construct
  source 1..75: mol_type = other DNA
gaaacgatgtacgaaaccggtaaggacatgaacgctaaataccgcgaaacctcacgcggtggtctggcaatcaaa

SEQ ID NO: 544081 - DNA, 75 bp, synthetic construct
  source 1..75: mol_type = other DNA
acgtcatcgccgttttgtggttcaggtatcgaagatggcctgtcaatatccgcacctggtgctgatctcgttgtt

SEQ ID NO: 544082 - DNA, 75 bp, synthetic construct
  source 1..75: mol_type = other DNA
acttaatcaggcgcaaaatttcgcgttgcaggccgactccgcacgtttgaagtcattggtcgatgaactcgaact

SEQ ID NO: 544083 - DNA, 75 bp, synthetic construct
  source 1..75: mol_type = other DNA
cgataatctcgacgaccgcgagttttccggttcgctgggacggctttgctttatcctcatttgcggtgcgctggc

SEQ ID NO: 544084 - DNA, 75 bp, synthetic construct
  source 1..75: mol_type = other DNA
acgggatctggtactaccgtagggtctacctgacacctcggaaacgccgtgaaattcgtatttctcttcgcacac

SEQ ID NO: 544085 - DNA, 75 bp, synthetic construct
  source 1..75: mol_type = other DNA
tctgccggagccggaacgtcccccggccagaaaaaagaaacgaaaaaaaatggcacccgatgaggataacccctg

SEQ ID NO: 544086 - DNA, 75 bp, synthetic construct
  source 1..75: mol_type = other DNA
ggtacgggttatgctgttggtatcaacgggaccaaaaacgattaccagacctatgctgaactgtcggtaaccaac

SEQ ID NO: 544087 - DNA, 75 bp, synthetic construct
  source 1..75: mol_type = other DNA
cgctggtcggtggtgacggttgaggatgacgtgctgacagactgggttatgcaggacaccccggaggcatcatga

SEQ ID NO: 544088 - DNA, 75 bp, synthetic construct
  source 1..75: mol_type = other DNA
aaaacgtaccaccacatttatgtccagtggtatgacgctggtggagagttcccccggcagggatgtgaaggatgt

SEQ ID NO: 544089 - DNA, 75 bp, synthetic construct
  source 1..75: mol_type = other DNA
tacctgtttaagggagacagtatccgtcgcgcaaaactgataacccgtacatttccggataacaccggacgaacg

SEQ ID NO: 544090 - DNA, 75 bp, synthetic construct
  source 1..75: mol_type = other DNA
agtcgtcagattatgaaaaatgcaagtcgctatcttaaaggctttgccctcagtaatcgtgtttacatgaaatac

SEQ ID NO: 544091 - DNA, 75 bp, synthetic construct
  source 1..75: mol_type = other DNA
atgaatgatgacagacagacgcctccggcacccgatgcatggaaaatccgatttctggctgacggtacacccggc

SEQ ID NO: 544092 - DNA, 75 bp, synthetic construct
  source 1..75: mol_type = other DNA
gcggcggcaacttcttccagccgaccattctggtggacgttccggccaacgccaaagtgtcgaaagaagagacgt

SEQ ID NO: 544093 - DNA, 75 bp, synthetic construct
  source 1..75: mol_type = other DNA
atttatggcgacaccattcccggtcatcaggccgataaacgcctgattgttatcaagcagccgattggcgttacc

SEQ ID NO: 544094 - DNA, 75 bp, synthetic construct
  source 1..75: mol_type = other DNA
tggccagccaggccggattgacctgggaagggctggcacactcagcgatcgccgacgcacggatgacggctgggg

SEQ ID NO: 544095 - DNA, 75 bp, synthetic construct
  source 1..75: mol_type = other DNA
aaatacctttgtcacgcggtggtggaaatgagttaaccaattggcaagctctttgccacaattgcaatgaaccgc

SEQ ID NO: 544096 - DNA, 75 bp, synthetic construct
  source 1..75: mol_type = other DNA
ctcacctattcactattctcatttacccgtaaatgcggtcaggcaatcggaggttcaattcctgcctttattttg

SEQ ID NO: 544097 - DNA, 75 bp, synthetic construct
  source 1..75: mol_type = other DNA
atggggccaccaaccgctatggcacgatttcactggccagtgctgccagccaggccgggttgacttgggaagggc

SEQ ID NO: 544098 - DNA, 75 bp, synthetic construct
  source 1..75: mol_type = other DNA
cctaccgacaactacattcccttcgcaggggttcaccggggcgtattatcagttgaataatgacaactttgccca

SEQ ID NO: 544099 - DNA, 75 bp, synthetic construct
  source 1..75: mol_type = other DNA
ctggtcagcggctgattgtgaccgctggtgttggactcacccaacaagaaggccagccggtacaggtgatccgtg

SEQ ID NO: 544100 - DNA, 75 bp, synthetic construct
  source 1..75: mol_type = other DNA
gatatatgcagatgatgatgtaatatattcaccactatggttgcacgaattgatgataactttcgataaatacat

SEQ ID NO: 544101 - DNA, 75 bp, synthetic construct
  source 1..75: mol_type = other DNA
gcagagatgaccggcaaccgggcatttgatgcagactgggcggatgagtacgggcgttgtgtggaagcgcactgg

SEQ ID NO: 544102 - DNA, 75 bp, synthetic construct
  source 1..75: mol_type = other DNA
cggtcagtaactttaaggagttcgagggcacggtgctcaggaatattgccgctgcactgggtctgtccacccagc

SEQ ID NO: 544103 - DNA, 75 bp, synthetic construct
  source 1..75: mol_type = other DNA
atcatggccgatttttcccaggcgttgaatgatgcttatcggcagttacgcgagctgttgaccactttccgcctg

SEQ ID NO: 544104 - DNA, 75 bp, synthetic construct
  source 1..75: mol_type = other DNA
aatatcatgcgcgaacgcgcggaacggctgggtgggacgctgactttttcacaaccttccggcggcggcacgtta

SEQ ID NO: 544105 - DNA, 75 bp, synthetic construct
  source 1..75: mol_type = other DNA
gtgattgttaaacgacccgtctcggccagtctggcccgggcctttttttacattgtgctgctgtcgattctttcc

SEQ ID NO: 544106 - DNA, 75 bp, synthetic construct
  source 1..75: mol_type = other DNA
tttgacggacagaaaaacgcagagaacaacgctcgttatatcgcagctttcaaccctgcagtagtgcaggcgctg

SEQ ID NO: 544107 - DNA, 75 bp, synthetic construct
  source 1..75: mol_type = other DNA
actattctgattcaaaataaagcagctgaacgtctccgccagaatgttggatcactggaacacttcggactgtaa

SEQ ID NO: 544108 - DNA, 75 bp, synthetic construct
  source 1..75: mol_type = other DNA
ctgctaaaactgcttccgtgtctctggttgttgataacaccaaaccgctgaccatgtcttctcgtcagatcgctg

SEQ ID NO: 544109 - DNA, 75 bp, synthetic construct
  source 1..75: mol_type = other DNA
ttgaaattgatgctgacggcgcacctgtggcttatcacatacgtgaagcacatatcggtgactggtggagtggcg

SEQ ID NO: 544110 - DNA, 75 bp, synthetic construct
  source 1..75: mol_type = other DNA
ccagtatcgcaccgatcgccttggaccaggtaaggggcgttatgccacgacggtgcaggttgttgatcccgacag

SEQ ID NO: 544111 - DNA, 75 bp, synthetic construct
  source 1..75: mol_type = other DNA
atgagcgtggcgcgcagcaccgtggtaacggcatcctgactccggttattcagcgtctgaaaatgctggtgaagt

SEQ ID NO: 544112 - DNA, 75 bp, synthetic construct
  source 1..75: mol_type = other DNA
acaaccttccggcggcggtacgttagtgagcattagctttcgatccgcggagggtgaggaaagtcaactgatgta

SEQ ID NO: 544113 - DNA, 75 bp, synthetic construct
  source 1..75: mol_type = other DNA
aaattatattccactgtcaggcaggaaaacgcaccagtaataatgcacaaaaattagcagcgattgccgctcccg

SEQ ID NO: 544114 - DNA, 75 bp, synthetic construct
  source 1..75: mol_type = other DNA
tgatccggagcgtgacgaacccatcttattacgtccgggagacagcgtgcgctttgtaccccagaaggagggagt

SEQ ID NO: 544115 - DNA, 75 bp, synthetic construct
  source 1..75: mol_type = other DNA
taggccatacctcgctcagtttatttgacccgacgcgagacgaacccatcttattacgtccgggagacagcgtgc

SEQ ID NO: 544116 - DNA, 75 bp, synthetic construct
  source 1..75: mol_type = other DNA
gtatcgcgcaaggcatccccctacatcagccatgagtcactccaggaattccgggagaaacgccagcgcacccgt

SEQ ID NO: 544117 - DNA, 75 bp, synthetic construct
  source 1..75: mol_type = other DNA
cgcttttccgaagccggttttgccggctatgtgaatgctcttcaggcctccaacattctggacaccattaaaaag

SEQ ID NO: 544118 - DNA, 75 bp, synthetic construct
  source 1..75: mol_type = other DNA
aagcggctttgtcggtgcgggattaatgtttgcgggcatcagcggtttttgcgggatggcaaggttgttagataa

SEQ ID NO: 544119 - DNA, 75 bp, synthetic construct
  source 1..75: mol_type = other DNA
caaagatcagagccatattcgcgtagaccttttcattaacaaaatgcctgtattaggccagcagatttgccaatt

SEQ ID NO: 544120 - DNA, 75 bp, synthetic construct
  source 1..75: mol_type = other DNA
tgaccatgcaagagacggtttacggcgagctgcactggcaaaacagcaacgtgtcggcctccgaaccgctgctta

SEQ ID NO: 544121 - DNA, 75 bp, synthetic construct
  source 1..75: mol_type = other DNA
caatgcgcatcgccagttgttccagcaggcactgcattcaccggtattaaccaatctcaacgtctggtatgtgcc

SEQ ID NO: 544122 - DNA, 75 bp, synthetic construct
  source 1..75: mol_type = other DNA
tctgcgcgatctcgcaaaacttccgggagcaccagtcccacaaggacgtggtgattgggagctagacgcatggcg

SEQ ID NO: 544123 - DNA, 75 bp, synthetic construct
  source 1..75: mol_type = other DNA
cctatatggcccagcagattcgtgtgcagcagtctccggccagggtgatgacggtgatagatagtctgaagaagt

SEQ ID NO: 544124 - DNA, 75 bp, synthetic construct
  source 1..75: mol_type = other DNA
agcagaaagcgcagctcccggatgattgccaccgctgcccgtggcgctttgcctgccagggcggttgtccgaagc

SEQ ID NO: 544125 - DNA, 75 bp, synthetic construct
  source 1..75: mol_type = other DNA
tggagttggggccgcacacctacgttggcgagcaccagttgatttgtcgcaaaggtgaatccggtaatgtgcagc

SEQ ID NO: 544126 - DNA, 75 bp, synthetic construct
  source 1..75: mol_type = other DNA
attagatgatgcatcattaagacaatcagcgaagagaaaatgtttcgatttgggaaagataggatatggtttctt

SEQ ID NO: 544127 - DNA, 75 bp, synthetic construct
  source 1..75: mol_type = other DNA
tgatgtcactaacctccagcctgattgccgtgcgtgagcataaagtcggagagcctgtcggttatggtggaacct

SEQ ID NO: 544128 - DNA, 75 bp, synthetic construct
  source 1..75: mol_type = other DNA
ccggtcattttatggggcgaaggtttgcccgtagaacgtatcgctgaaatgacgaaagtaagcgcttacgaactt

SEQ ID NO: 544129 - DNA, 75 bp, synthetic construct
  source 1..75: mol_type = other DNA
gcgactggcgtgaactatcacgacagcggtgcgaccattcgcttcacctcaagctggggcgatggggaaatagaa

SEQ ID NO: 544130 - DNA, 75 bp, synthetic construct
  source 1..75: mol_type = other DNA
attgctgaagagtttgctgacgtggcggtggtaacggacgataacccgcgtaccgaagaaccgcgtgccatcatc

SEQ ID NO: 544131 - DNA, 75 bp, synthetic construct
  source 1..75: mol_type = other DNA
ggcgggtaacccaaaggtcgcaatggtcagtatgacaggcagcgtctctgcaggtgagaagatcatggcgactgc

SEQ ID NO: 544132 - DNA, 75 bp, synthetic construct
  source 1..75: mol_type = other DNA
cccgaaatataaccgcgtagccggtgcgcctgttcaggctgctggtaacaacgatctcgataacgaactggacta

SEQ ID NO: 544133 - DNA, 75 bp, synthetic construct
  source 1..75: mol_type = other DNA
tggcagtgctctacatccaacttagcccgaaatataaccgcgtagccggtgcgcctgttcaggctgctggtaaca

SEQ ID NO: 544134 - DNA, 75 bp, synthetic construct
  source 1..75: mol_type = other DNA
ttctctgttcctgcaagcgatgcgtgtggctatcccggccgtgattgttgcgctgtctgtaggcaccagtgaagt

SEQ ID NO: 544135 - DNA, 75 bp, synthetic construct
  source 1..75: mol_type = other DNA
accgccgcgctctgcgacacaacctgcaacgtctgcgtgaactggcccccgccagtaaactggttgcggtggtga

SEQ ID NO: 544136 - DNA, 75 bp, synthetic construct
  source 1..75: mol_type = other DNA
tcttgagaccgcgcgaacgctccccgatgctgacgcctttggcgtagcccgtctcgaagaagctctgcgactgcg

SEQ ID NO: 544137 - DNA, 75 bp, synthetic construct
  source 1..75: mol_type = other DNA
agacttcagggcagtctgtgacattttcgggattgacctccgccagcgtgttatccggctcagcagcggcaggtt

SEQ ID NO: 544138 - DNA, 75 bp, synthetic construct
  source 1..75: mol_type = other DNA
agggcgcgcagaagcggtaacgtgcgccgttatgcaggcgaaagaaaatgatgtcgtgttggtcgcgggtaaagg

SEQ ID NO: 544139 - DNA, 75 bp, synthetic construct
  source 1..75: mol_type = other DNA
cgccacggtggaaaaaggccacgcgatggcgcaacgctgtggcggtgaaatccagatagagctgttcggcaactg

SEQ ID NO: 544140 - DNA, 75 bp, synthetic construct
  source 1..75: mol_type = other DNA
gcagcaaatccggcgcaggtggctggcgatttccatgcgcaaatcgacgctatctggggaggcgcgcgtgcgtaa

SEQ ID NO: 544141 - DNA, 75 bp, synthetic construct
  source 1..75: mol_type = other DNA
cattaccggcgggattacccctgctgacctgccgctgtttaaagatatccgcgtgaaagcgtttattgccgggcg

SEQ ID NO: 544142 - DNA, 75 bp, synthetic construct
  source 1..75: mol_type = other DNA
aaggcgtcgtcatcacgacgctggctcgttatttgttaggtgaaaagtgtggtaatcgcctgaaaactatagatg

SEQ ID NO: 544143 - DNA, 75 bp, synthetic construct
  source 1..75: mol_type = other DNA
tacccaatgcaacaactgctgcgtgcagttgttgataaacatgccctgcttgctcatcaacagcgagtagtcagt

SEQ ID NO: 544144 - DNA, 75 bp, synthetic construct
  source 1..75: mol_type = other DNA
aaaggcgagtccgcaaacgtgaagcgcgtggggctggataaccgttcggcggatcagaaaatcatgaccgatgtt

SEQ ID NO: 544145 - DNA, 75 bp, synthetic construct
  source 1..75: mol_type = other DNA
gcgatcaccttgattatcatggtgatatggaacactacgaagctgcgaaatggctgctttattctgaacatcatt

SEQ ID NO: 544146 - DNA, 75 bp, synthetic construct
  source 1..75: mol_type = other DNA
ggcgcgactttttgcgcaatggaagtttcatcccacgggctggtacagcaccgtgtggcggcattgaaatttgcg

SEQ ID NO: 544147 - DNA, 75 bp, synthetic construct
  source 1..75: mol_type = other DNA
tatggaacactacgaagcggcgaaatggctgctttattctgaacatcattgcggtcaggcgattattaacgccga

SEQ ID NO: 544148 - DNA, 75 bp, synthetic construct
  source 1..75: mol_type = other DNA
gcgtttggcgcgggtgccaactggatgaccatcatctgcgccgcgccgctcgcgacggtggaaaaaggccacgcg

SEQ ID NO: 544149 - DNA, 75 bp, synthetic construct
  source 1..75: mol_type = other DNA
atgagccgaccacttctgcaactggccctcgaccactcatcacttgaagacgcacagcgcgacgtgatgctgtta

SEQ ID NO: 544150 - DNA, 75 bp, synthetic construct
  source 1..75: mol_type = other DNA
gcagcaaatccggcgcaggtggctggcgatttccatgcacaaattgatgccatctggggaggtgcgcgtgcgtaa

SEQ ID NO: 544151 - DNA, 75 bp, synthetic construct
  source 1..75: mol_type = other DNA
aattgattgaacatgtggatattgagtatgtgtttgttgccgaaaaaatagtgcaatatgcggagaaaaatctcg

SEQ ID NO: 544152 - DNA, 75 bp, synthetic construct
  source 1..75: mol_type = other DNA
tcaacccggaaatggagaaccgtctgagtgccgtacttgccgcaagggaagcagaaggtcgtcagatggccagcc

SEQ ID NO: 544153 - DNA, 75 bp, synthetic construct
  source 1..75: mol_type = other DNA
cgcctgggatttgtggaaggagtgcctgacacagccggattttgataatgtcgcgaacacgctgatcccgatggg

SEQ ID NO: 544154 - DNA, 75 bp, synthetic construct
  source 1..75: mol_type = other DNA
agatttatgatgcaccttaaatatttttcaagtcgcgtgttatgcaatgaaaaaaataaaacagaaagatattgg

SEQ ID NO: 544155 - DNA, 75 bp, synthetic construct
  source 1..75: mol_type = other DNA
ttgaagttgtttataacagaaaggtggacagaagttcatttaattattccaggttcatgatacaccttaaatatt

SEQ ID NO: 544156 - DNA, 75 bp, synthetic construct
  source 1..75: mol_type = other DNA
tgtcagaaatgaacaaaaaaacaaactctataaattgattgaacatgtagatattgagtatgtgtttgttgccga

SEQ ID NO: 544157 - DNA, 75 bp, synthetic construct
  source 1..75: mol_type = other DNA
tttccgttctcccagccataagattgcagagttcgctgccggtgaaattggtgagaaagagcacctgaaagccag

SEQ ID NO: 544158 - DNA, 75 bp, synthetic construct
  source 1..75: mol_type = other DNA
acgatgatctggcagcctgagttcacagataaaacactctccaggaaacccggggcggttcagattgcgtccatg

SEQ ID NO: 544159 - DNA, 75 bp, synthetic construct
  source 1..75: mol_type = other DNA
gtttattccgcgtgacatcaacccggaaatggagaaccgtctgagtgccgtacttgctgcaagggaagcagaagg

SEQ ID NO: 544160 - DNA, 75 bp, synthetic construct
  source 1..75: mol_type = other DNA
attcgttacctgcaggggattgagcataacggcgagtccttcaccattcgcgactggatgcgcggtgtccgggaa

SEQ ID NO: 544161 - DNA, 75 bp, synthetic construct
  source 1..75: mol_type = other DNA
tacagcaaactggtggacacactgctttccatcaaattgaaacacacaaacttgaaaactgcgtaccttcctgcg

SEQ ID NO: 544162 - DNA, 75 bp, synthetic construct
  source 1..75: mol_type = other DNA
tgaaattggtgagaaagagcacctgaaagccagcgagcagtattcctacggtgctgatccggtacgtgacggggt

SEQ ID NO: 544163 - DNA, 75 bp, synthetic construct
  source 1..75: mol_type = other DNA
atcaacagttgcgcaacaccctggttgccaacctgagtacgcaactgcccggctgggtggttgcctcccagcctc

SEQ ID NO: 544164 - DNA, 75 bp, synthetic construct
  source 1..75: mol_type = other DNA
acgttgcccgcgtggtgctgccgcgcgtgttgtcgattcatcaggtgaaacagctggcacgggtcacacctgtac

SEQ ID NO: 544165 - DNA, 75 bp, synthetic construct
  source 1..75: mol_type = other DNA
atgtcgcccgcgtggtgctaccacgcgtactgtcgattcaccaggtgaaacaactggcacgggtcacgccagttc

SEQ ID NO: 544166 - DNA, 75 bp, synthetic construct
  source 1..75: mol_type = other DNA
ttcggtgaaaattgaaggccgccagcgtagcccggcgtatgtcagccaggtggcgaaagtctggcgtcaggctat

SEQ ID NO: 544167 - DNA, 75 bp, synthetic construct
  source 1..75: mol_type = other DNA
atccaaattcagtatcgtggacgcaagattgacagggaaaaactgctgcgttatctggtttctttccgtcatcat

SEQ ID NO: 544168 - DNA, 75 bp, synthetic construct
  source 1..75: mol_type = other DNA
atcaaccgattaccgggatacctatgacgccagcctactgcaaggcgttccacgcagcctgaatcgcgacccgct

SEQ ID NO: 544169 - DNA, 75 bp, synthetic construct
  source 1..75: mol_type = other DNA
gtttacgctcgttatactcgccgtggtgggctggacattaatccctggcgcagcaataccgactttgtcccatcg

SEQ ID NO: 544170 - DNA, 75 bp, synthetic construct
  source 1..75: mol_type = other DNA
acggcctgacctcatcaatctatacccaaaatctgaacgtcgcgatgaaagccattaaagggctgaagtttggtg

SEQ ID NO: 544171 - DNA, 75 bp, synthetic construct
  source 1..75: mol_type = other DNA
ggttcaatttggtaaccccgctgaacgcaacgacattgcgatgggaccgttgattaacgccgcggcgctggaaag

SEQ ID NO: 544172 - DNA, 75 bp, synthetic construct
  source 1..75: mol_type = other DNA
gcggtgagtggctgttgaaccatcaggggcaactgataaaacgtccattccgtctggaaggcgtacaaaatcagg

SEQ ID NO: 544173 - DNA, 75 bp, synthetic construct
  source 1..75: mol_type = other DNA
ggaagatttactttcattcatgctttttgaagcagattgtagagttagtggcgaaggttgaggctttaaaagaag

SEQ ID NO: 544174 - DNA, 75 bp, synthetic construct
  source 1..75: mol_type = other DNA
atttaaagatataagggcaatattacaaagtgtacatccaagaggggagaagttaaacctgggtaatgttactca

SEQ ID NO: 544175 - DNA, 75 bp, synthetic construct
  source 1..75: mol_type = other DNA
ctggtttggatggaaaggatatcattgcaaaaattgttaatgaccaatcggctcgttacaattctttccttatta

SEQ ID NO: 544176 - DNA, 75 bp, synthetic construct
  source 1..75: mol_type = other DNA
tgactggatgcggggtgtccgtgaagataagaaaaacggctggctgtttatctcgtcaaatgccgacacccatgc

SEQ ID NO: 544177 - DNA, 75 bp, synthetic construct
  source 1..75: mol_type = other DNA
gtgaaatcagtgcgctgattgttgaagaagggggcaagatccagcagctggccgaagttgaggtagcatttactg

SEQ ID NO: 544178 - DNA, 75 bp, synthetic construct
  source 1..75: mol_type = other DNA
ggatggcgtaaatccggtattggcggagcagatggtaaacatggcttacatgaatatttgcaaacccaggtggtt

SEQ ID NO: 544179 - DNA, 75 bp, synthetic construct
  source 1..75: mol_type = other DNA
cttgctgtttattctaaatttgttactccattaataaaaggtgtgtcgcctctgcgaattatgagtccttcaagc

SEQ ID NO: 544180 - DNA, 75 bp, synthetic construct
  source 1..75: mol_type = other DNA
ggcgataagcgccgaacaacactatcttccaacttccgccccggcacaggctgcccaggccgttccgactctata

SEQ ID NO: 544181 - DNA, 75 bp, synthetic construct
  source 1..75: mol_type = other DNA
ggagtattgaaccatatatatgccaattaaaagataattatactactcaagttttgttctctgctgtaagactat

SEQ ID NO: 544182 - DNA, 75 bp, synthetic construct
  source 1..75: mol_type = other DNA
ggatggcgtaaatccggtattggcggcgcagatggtaaacatggcctgcatgaatatctgcagacccaggtggtt

SEQ ID NO: 544183 - DNA, 75 bp, synthetic construct
  source 1..75: mol_type = other DNA
gcagcactttccgtacacagaggtgcacgcgttcgcctgcctgacgggcggattgtgcactgggatgagaaatca

SEQ ID NO: 544184 - DNA, 75 bp, synthetic construct
  source 1..75: mol_type = other DNA
ccggcggccccaccacgcccgatgacgtcatacatgtgcgtacagcattgccgctgactgacgtcaccaccaccg

SEQ ID NO: 544185 - DNA, 75 bp, synthetic construct
  source 1..75: mol_type = other DNA
agaacaaaaactggtcgtcccgggaggtgatttgggtgagtggttaaggtcactgacccccacaaagcgaaaaca

SEQ ID NO: 544186 - DNA, 75 bp, synthetic construct
  source 1..75: mol_type = other DNA
cttgtacaacctttttatattaaggcgccacaactggataaagatggacttgataaagaggcccaagcgcgcgaa

SEQ ID NO: 544187 - DNA, 75 bp, synthetic construct
  source 1..75: mol_type = other DNA
gcgaagttgttggcgatcagcccacatccaaccgggtcatttattggatggaatcgaaaacggtgagccgaggtt

SEQ ID NO: 544188 - DNA, 75 bp, synthetic construct
  source 1..75: mol_type = other DNA
cgtttcttgccagtccgctcatccgggacctggctcgcctgagccgcaaacaggagagcgcacgccgggaagggc

SEQ ID NO: 544189 - DNA, 75 bp, synthetic construct
  source 1..75: mol_type = other DNA
cgttgcagcgccgggcataaatctctatggcacgaaagctggggtggcctgccgccagccagtttctttgatgag

SEQ ID NO: 544190 - DNA, 75 bp, synthetic construct
  source 1..75: mol_type = other DNA
attggttttatagcattgcatattttaaataattatgaaaattcagttgattatgaatcagtaaggattattgag

SEQ ID NO: 544191 - DNA, 75 bp, synthetic construct
  source 1..75: mol_type = other DNA
aatgcaatatcccgagtcgcttcaggtatacaaattaataatgttttccttgatgaaatcaaagcgttgtacaaa

SEQ ID NO: 544192 - DNA, 75 bp, synthetic construct
  source 1..75: mol_type = other DNA
agcgaagtgctggaacaggcacagaaggcggtttctctggttgccatcgtttctgaccgccgaagtttaacttaa

SEQ ID NO: 544193 - DNA, 75 bp, synthetic construct
  source 1..75: mol_type = other DNA
cagctgacagacaatccgaaagacgttgcccggatgctgaaaaaagacggcaaggactccgatatccggattggc

SEQ ID NO: 544194 - DNA, 75 bp, synthetic construct
  source 1..75: mol_type = other DNA
aatgaaaccggaagaagagatggaacagcaactgccacccgggatcagtgaatccggtgaagtggtggatatggc

SEQ ID NO: 544195 - DNA, 75 bp, synthetic construct
  source 1..75: mol_type = other DNA
gtgtactacgcggagtgtaatcttgaaagaaagttaaatccatcgctattgcttattcttgccgatcacatttca

SEQ ID NO: 544196 - DNA, 75 bp, synthetic construct
  source 1..75: mol_type = other DNA
aaacgcaaactgttaacagtacaaccgcgccgcaacccaactacattccagggctgattgcggtggtcgggtgcg

SEQ ID NO: 544197 - DNA, 75 bp, synthetic construct
  source 1..75: mol_type = other DNA
gatcaaacaaaatcattaacaggggccagcatctggcaggcaggtcccgggggatttaatgtggacattatagcg

SEQ ID NO: 544198 - DNA, 75 bp, synthetic construct
  source 1..75: mol_type = other DNA
gcgcatcgtggaagttaatgtgccacgcgccgctggaattcgcaccaaaggagatgcaggagagcaaagcgatga

SEQ ID NO: 544199 - DNA, 75 bp, synthetic construct
  source 1..75: mol_type = other DNA
gagttgcaggacaaaatcggcgttatgtcgaagattggctataacggcacaaaaattcttgagattgattccaga

SEQ ID NO: 544200 - DNA, 75 bp, synthetic construct
  source 1..75: mol_type = other DNA
gttctggtggttagcgatcgcttcccgcaggcggaaatttccggtttttattatgacggaccggggattggcgtc

SEQ ID NO: 544201 - DNA, 75 bp, synthetic construct
  source 1..75: mol_type = other DNA
caaacgattgccgttggttggcgtctggctcgaacggcgactggcggccaaatcctcgaaaacccaaagcatgaa

SEQ ID NO: 544202 - DNA, 75 bp, synthetic construct
  source 1..75: mol_type = other DNA
cgggtttatgcagaataaccggaccaaggaggaaacgcgctggtcttccaaaggctatgtacagtctgatgaaga

SEQ ID NO: 544203 - DNA, 75 bp, synthetic construct
  source 1..75: mol_type = other DNA
ttctggaagcgtaacagcacgtttgcagacgcattcaaacagaactggcctgatgcgcaggagaaaatccaaaaa

SEQ ID NO: 544204 - DNA, 75 bp, synthetic construct
  source 1..75: mol_type = other DNA
aacgggccgaagccattctggaggcgtcaggggccagaatttcacatgatcaggtggaccgggccttttaccgta

SEQ ID NO: 544205 - DNA, 75 bp, synthetic construct
  source 1..75: mol_type = other DNA
gtcatcctgcaggctttatgcagaacaaccgcaccaaagaagagttacgctggtcttccaaggggtatgtgcagt

SEQ ID NO: 544206 - DNA, 75 bp, synthetic construct
  source 1..75: mol_type = other DNA
gaattacctgggaaagacgaactcagccagattaaaccggcggcgtatcttgcacaccagaccgcctcgcgcaaa

SEQ ID NO: 544207 - DNA, 75 bp, synthetic construct
  source 1..75: mol_type = other DNA
cattttatgagattgtggctgaaaacctgatagcccagcttaaagaggggactgctccatggcagaaaccatgga

SEQ ID NO: 544208 - DNA, 75 bp, synthetic construct
  source 1..75: mol_type = other DNA
tggcaacagggaacaattcttgatgcaagtatcaaaaatgcgttgcagttctgtagccgaattattttagttacg

SEQ ID NO: 544209 - DNA, 75 bp, synthetic construct
  source 1..75: mol_type = other DNA
agaagatgaagaaataattttagatattgatacccccgaggactttatttatgcgcaaaagcggcatactaaatt

SEQ ID NO: 544210 - DNA, 75 bp, synthetic construct
  source 1..75: mol_type = other DNA
tttttagaaaaatctggtcgttacgaaatgatggcgcaatactgccactccataatggcatccccggccatccga

SEQ ID NO: 544211 - DNA, 75 bp, synthetic construct
  source 1..75: mol_type = other DNA
gaggcacatgccagtggtgaaaaacccctccctgattccgaggtgaagctactgcaggcagcgcagctttcggaa

SEQ ID NO: 544212 - DNA, 75 bp, synthetic construct
  source 1..75: mol_type = other DNA
gacaactactatgctacggccctgcatgagctgggacactggaccggtcaccctacacgtctgaatcgcgatctg

SEQ ID NO: 544213 - DNA, 75 bp, synthetic construct
  source 1..75: mol_type = other DNA
atcaatatgcgtcaggcattacgcatgggtgaacattattccgtcgagatggaaaatgaagaaataattttagat

SEQ ID NO: 544214 - DNA, 75 bp, synthetic construct
  source 1..75: mol_type = other DNA
acccgaacagcagcggcagtatcgtgctgagaaattcattctttctaatctcgatagtggcctttctaagcacgt

SEQ ID NO: 544215 - DNA, 75 bp, synthetic construct
  source 1..75: mol_type = other DNA
atggctaaacgcgttacaaaattaaaggccgcagccgaggctgcaccacagacccgtgaagaggttagccgcgat

SEQ ID NO: 544216 - DNA, 75 bp, synthetic construct
  source 1..75: mol_type = other DNA
gcaccgtgtgcaggaccccccttcgaaaggtcagtccatcaggaattcctcactgccagttcgtgcttgagcatc

SEQ ID NO: 544217 - DNA, 75 bp, synthetic construct
  source 1..75: mol_type = other DNA
tgatcctcaccggtccgaaagagagcgccgattacttccgcgtactggacgagtttgtcgtgcatacgctgggag

SEQ ID NO: 544218 - DNA, 75 bp, synthetic construct
  source 1..75: mol_type = other DNA
caaacaacgcaataggttacaccttccgttattacgcaacacaaatgaacgacgataaaaatataaaactgctag

SEQ ID NO: 544219 - DNA, 75 bp, synthetic construct
  source 1..75: mol_type = other DNA
atgacgctcaagcagatccagacgctgatttatcgcggcgagataaagtcgtgtaattatcgctgtggttattgc

SEQ ID NO: 544220 - DNA, 75 bp, synthetic construct
  source 1..75: mol_type = other DNA
gatggaaacgctggagcgccttggcctgcaacgctttattcgcacgaagcaggaaatcaacaaggaggcgatttt

SEQ ID NO: 544221 - DNA, 75 bp, synthetic construct
  source 1..75: mol_type = other DNA
atcattcagatgacggaggaaaaagcccgcgaacactccaaaaaacgactcgccagaacgtttcgcgtcagccct

SEQ ID NO: 544222 - DNA, 75 bp, synthetic construct
  source 1..75: mol_type = other DNA
acaattcatctgtcgtatctgtgaaagaagtaacgccaaaagtgggtgagcgtcagaatctggctgttccttata

SEQ ID NO: 544223 - DNA, 75 bp, synthetic construct
  source 1..75: mol_type = other DNA
gctgagaaattcattctttctaatctcgatagtggcctttctaagcacgtccagaatatgaaccgtcgccagctt

SEQ ID NO: 544224 - DNA, 75 bp, synthetic construct
  source 1..75: mol_type = other DNA
ccgtgaacgcggcgtaaagctggaactgattaatcccccggaagaggcttttgtcgatgggcgaattattcgcgc

SEQ ID NO: 544225 - DNA, 75 bp, synthetic construct
  source 1..75: mol_type = other DNA
atatggagatctgacaaatgctcaaatttagatttacgggcaatcttcgaagatattacggcaaagtgtgtttaa

SEQ ID NO: 544226 - DNA, 75 bp, synthetic construct
  source 1..75: mol_type = other DNA
cggtggcagggttagaaaattccgcccggtagcgcacctgttaggccgaaaatttgagcacgggaaaacagactg

SEQ ID NO: 544227 - DNA, 75 bp, synthetic construct
  source 1..75: mol_type = other DNA
cgctccggcacgtgatgccagcgcacaggagaaaaaagacgccgacatgctgaatgaatatctgcatgatgcggc

SEQ ID NO: 544228 - DNA, 75 bp, synthetic construct
  source 1..75: mol_type = other DNA
gtatcggtacctggctgtatcaccgttctggaaatccacgcgacctgatcccggggagaaaagacgatgaccagt

SEQ ID NO: 544229 - DNA, 75 bp, synthetic construct
  source 1..75: mol_type = other DNA
ccatcacgcaggactctttcgagaaagggatcgtcttctctgctggcgcatttgtgtcgtcaattgtcgctgtgc

SEQ ID NO: 544230 - DNA, 75 bp, synthetic construct
  source 1..75: mol_type = other DNA
atgaatatgaattgagtaataattatcactcattaattgagcattgcattaaagatcttgagatcatggctattc

SEQ ID NO: 544231 - DNA, 75 bp, synthetic construct
  source 1..75: mol_type = other DNA
cactgaatcaagggttaagcttgggtgcgctggcctctgtcgtctacggcgttccgccagaggtggctctcggtg

SEQ ID NO: 544232 - DNA, 75 bp, synthetic construct
  source 1..75: mol_type = other DNA
atcggcatagccaccctgatccctaccatcacacaggactcttttgagaaagggattgttttctctgctggtgca

SEQ ID NO: 544233 - DNA, 75 bp, synthetic construct
  source 1..75: mol_type = other DNA
atcggcatagccagcctgatccctaccatcacgcaggactcttttgaaaaagggattgttttctctgcaggcgca

SEQ ID NO: 544234 - DNA, 75 bp, synthetic construct
  source 1..75: mol_type = other DNA
aaaaaacttctccgtatttattcaggctggcggcagttatcggctcacaccattttatgacatcatttcggcatt

SEQ ID NO: 544235 - DNA, 75 bp, synthetic construct
  source 1..75: mol_type = other DNA
atattatgttaaatcatgtctgagtgatgcgaagtgcttttctggtagtcgttattcgttcagggttcaagaact

SEQ ID NO: 544236 - DNA, 75 bp, synthetic construct
  source 1..75: mol_type = other DNA
gcttttttgatggggtccagcgaggcgctgaaagatcgctatgattttatgaaattccaggtcttccagtggttg

SEQ ID NO: 544237 - DNA, 75 bp, synthetic construct
  source 1..75: mol_type = other DNA
gtagactgcttaagacacaacgtcgacgatttcaggtcttgcccagcggctggtattatcagttgcacaggtgga

SEQ ID NO: 544238 - DNA, 75 bp, synthetic construct
  source 1..75: mol_type = other DNA
ttagtgaaaggcaaaccacaaaagcactttgtggagacgctggatatttcacgcggggcggtatcacaggcagta

SEQ ID NO: 544239 - DNA, 75 bp, synthetic construct
  source 1..75: mol_type = other DNA
ctgaagaagagtggtactggttaatgggtacacatgattatacagaggcgttagaagcactcaaaacccatcctg

SEQ ID NO: 544240 - DNA, 75 bp, synthetic construct
  source 1..75: mol_type = other DNA
ctttattctgtgtatcacttatttcattttcagctgtcagtgccggaaataacacggataaatatacgggagatt

SEQ ID NO: 544241 - DNA, 75 bp, synthetic construct
  source 1..75: mol_type = other DNA
aacatccggcctcgggtatcaccccgaaccgggcggcgcagtgccttcgcggggctgaacgtggcgatctgattg

SEQ ID NO: 544242 - DNA, 75 bp, synthetic construct
  source 1..75: mol_type = other DNA
agccagactgccggaagcgaaaagcacgccgcgtgatgaactggatgatatgggggacgcggtgcctgcccgccg

SEQ ID NO: 544243 - DNA, 75 bp, synthetic construct
  source 1..75: mol_type = other DNA
aacaacattgcggcggcgattaacgcctcgtttggcggcattgccaccgcgcagagttccaccaacgttaccgtg

SEQ ID NO: 544244 - DNA, 75 bp, synthetic construct
  source 1..75: mol_type = other DNA
gcagtgcgcgaagtttgcgacttattactcctggcgcagggcaaactggatgaagccaaagggcaatcgatatga

SEQ ID NO: 544245 - DNA, 75 bp, synthetic construct
  source 1..75: mol_type = other DNA
ggaaaatgtggcttatgtcggcgatgatctcatcgactggccggtaatggaaaaagtgggtttaagcgtcgccgt

SEQ ID NO: 544246 - DNA, 75 bp, synthetic construct
  source 1..75: mol_type = other DNA
ttatatgggcaataacggcgaagagctgaaagcgttcaatgttcgtgacggttatggcattcgttgtgcgctcac

SEQ ID NO: 544247 - DNA, 75 bp, synthetic construct
  source 1..75: mol_type = other DNA
gggtggcgtttatgtcgcaactggacgatgtgcaggtgcaggcggagaaaatccgcgcccgtgtggtgttcaact

SEQ ID NO: 544248 - DNA, 75 bp, synthetic construct
  source 1..75: mol_type = other DNA
ggtggagcgcgagatccccagcgattttcagatgggcgataccatcaccctcaacctgaaacgcccgtcgtttaa

SEQ ID NO: 544249 - DNA, 75 bp, synthetic construct
  source 1..75: mol_type = other DNA
cggtgagcgccacattgccgccgatgtactcgcgcgggcagaccattgatgtcaccgtttcgtcgattggcgatg

SEQ ID NO: 544250 - DNA, 75 bp, synthetic construct
  source 1..75: mol_type = other DNA
acagagttccaccaacgttaccgtgcgtgcgcccaccagccccggcgcgcgggtggcgtttatgtcgcaactgga

SEQ ID NO: 544251 - DNA, 75 bp, synthetic construct
  source 1..75: mol_type = other DNA
cagcctggtggtcggcctcgacggcaccggtgataaaaaccaggtcaaatttaccaaccagaccatcaccaatat

SEQ ID NO: 544252 - DNA, 75 bp, synthetic construct
  source 1..75: mol_type = other DNA
atgcaaaactggataaaggccgcagcgatcgctgtaagtctgacgctgcccggcgtggcgctggcgcaatcgctg

SEQ ID NO: 544253 - DNA, 75 bp, synthetic construct
  source 1..75: mol_type = other DNA
gaacgcggcattgaagccttacgcgcaaccatcatttttagtatgtggtcgattattccctattttgtttacctg

SEQ ID NO: 544254 - DNA, 75 bp, synthetic construct
  source 1..75: mol_type = other DNA
ctgtggtatttcaccggaatgatgcgcttgcccgccgcttttgttggttctgttgcgtgttgggggataagcgca

SEQ ID NO: 544255 - DNA, 75 bp, synthetic construct
  source 1..75: mol_type = other DNA
ctgcgcacagcgccgtaagctatcaggatggcgactatctgatgttcggcccggaaacacgcggcttgccagcga

SEQ ID NO: 544256 - DNA, 75 bp, synthetic construct
  source 1..75: mol_type = other DNA
acctttcgcaaggctttcctgattttgatggtccgcgctatttacaggagcggctggcgtaccacgttgcccagg

SEQ ID NO: 544257 - DNA, 75 bp, synthetic construct
  source 1..75: mol_type = other DNA
gcttgtccgccgcttttatcggttctgtagtgtgctggggactaagcgcatgggtgttgattatatgctggatta

SEQ ID NO: 544258 - DNA, 75 bp, synthetic construct
  source 1..75: mol_type = other DNA
ttggtgcgctggtggtggtgttaattggtgtattagcaaaaacgaaaaattactatatcgccgggctgattccgc

SEQ ID NO: 544259 - DNA, 75 bp, synthetic construct
  source 1..75: mol_type = other DNA
gcgccaacgctggacgtctgggtggtgcgcaaagattttgccgagaaacatcctgaggtcgtgaaagcgttcgcc

SEQ ID NO: 544260 - DNA, 75 bp, synthetic construct
  source 1..75: mol_type = other DNA
acactggggcatcaagccgggtcaggtacaaatcatcaacctgcagccgccggcgattatcgcagcctggcagcg

SEQ ID NO: 544261 - DNA, 75 bp, synthetic construct
  source 1..75: mol_type = other DNA
aaaaagacggcaaggtgctgaccgattctgaacaggtcgggcagtggggcgcgccgacgctggatgtttgggtag

SEQ ID NO: 544262 - DNA, 75 bp, synthetic construct
  source 1..75: mol_type = other DNA
ccctcgaccactcatcacttgaagccgcgcagcgcgacgtgacgcggttaaaagacagcgtcgatattgtcgaag

SEQ ID NO: 544263 - DNA, 75 bp, synthetic construct
  source 1..75: mol_type = other DNA
aaaggctctgataaacctgaccaaacgcgcaacttgcgaagggaccagtaatgacggagcaggttttgcaaatgg

SEQ ID NO: 544264 - DNA, 75 bp, synthetic construct
  source 1..75: mol_type = other DNA
tatttctgaaattaatgccgaaactaaaattaaaaccttcaaattacagttcaaagactgtgcggggattcccgg

SEQ ID NO: 544265 - DNA, 75 bp, synthetic construct
  source 1..75: mol_type = other DNA
gcatctcaagaggtcactatctccaatgcagccaacgcggttgtttattatccgatgagtgctcgactggtcgtc

SEQ ID NO: 544266 - DNA, 75 bp, synthetic construct
  source 1..75: mol_type = other DNA
tgaagcaccaatgccaaccacgcacatacaatatatcaataaacccgcatataaccttgtcgattttattaatga

SEQ ID NO: 544267 - DNA, 75 bp, synthetic construct
  source 1..75: mol_type = other DNA
ccattaccaccagcggcgatgaaaatattaaccgccattcgcccggatgatgccagcggatacgttttcaccagc

SEQ ID NO: 544268 - DNA, 75 bp, synthetic construct
  source 1..75: mol_type = other DNA
cggaagcgtatacaaaacaggtgcggttaaatcttcgtgatgtactgaaagagataggcgcatttactgccgacc

SEQ ID NO: 544269 - DNA, 75 bp, synthetic construct
  source 1..75: mol_type = other DNA
tcgcgtgtaccctggtgggtatcgttcttggggatatgaaaaccggtattattatcggtggtacgctggaaatga

SEQ ID NO: 544270 - DNA, 75 bp, synthetic construct
  source 1..75: mol_type = other DNA
tcgccggtggcatgatcgtggtggttggttatgcaatggttatcaacatgatgcgtgctggctacctgatgccgt

SEQ ID NO: 544271 - DNA, 75 bp, synthetic construct
  source 1..75: mol_type = other DNA
agatcggggatatcattcgtcagcatgggcaacagctggtctggatgccgggaataagccgtattgacgggattc

SEQ ID NO: 544272 - DNA, 75 bp, synthetic construct
  source 1..75: mol_type = other DNA
ctgctgccaatgcggttgtttattacccgatgagtgctcgcctggtcgttgaaaaaaataaaaccgtaagtaatg

SEQ ID NO: 544273 - DNA, 75 bp, synthetic construct
  source 1..75: mol_type = other DNA
aagaggtaacaatctccactgcagccaatgcggtcgtttattatccgatgagtgcacgcctggtcgtggaaaaaa

SEQ ID NO: 544274 - DNA, 75 bp, synthetic construct
  source 1..75: mol_type = other DNA
cattcaaactcaaattcaaagactgtgcgggtatccccaataaaaaagcgcaaataaaattaaccaagcgagcca

SEQ ID NO: 544275 - DNA, 75 bp, synthetic construct
  source 1..75: mol_type = other DNA
taaagcgcggggattgataacccagggagttgactaccgcagctaccagaaagttgaacaacgccgtagggcgga

SEQ ID NO: 544276 - DNA, 75 bp, synthetic construct
  source 1..75: mol_type = other DNA
caacgcgcggacaggcgtctgtagttggcgattccgctatcgctacgacgggaaagaagtagaagtgacgtttgg

SEQ ID NO: 544277 - DNA, 75 bp, synthetic construct
  source 1..75: mol_type = other DNA
gaaaaaaataaaaccgtaagtaatgtcactgcaggtaaattttctgcacctgccacatttacagtaacctataac

SEQ ID NO: 544278 - DNA, 75 bp, synthetic construct
  source 1..75: mol_type = other DNA
tgggcgccggcggtaaatgcgctggaaaaagacggcaaggtgctgacagactcagaacaggtcgggcggtggggc

SEQ ID NO: 544279 - DNA, 75 bp, synthetic construct
  source 1..75: mol_type = other DNA
tggagttgacgccggccagtgattttaccgcccgggatgaaagaaaaaaaattcgcctgcgccaactgacaggca

SEQ ID NO: 544280 - DNA, 75 bp, synthetic construct
  source 1..75: mol_type = other DNA
gaaaacagctccccctcatcaggcagacagagtctgcggaatgtggtctggcatgtctggtcatgatggcctgct

SEQ ID NO: 544281 - DNA, 75 bp, synthetic construct
  source 1..75: mol_type = other DNA
atccggacattttcttgaaactctcaacgggatcctgagtctgagaattaacggtgtcactactcatcgtgaagc

SEQ ID NO: 544282 - DNA, 75 bp, synthetic construct
  source 1..75: mol_type = other DNA
ggtattcagggaatgacgctacaaaggttgatcgaatgtgcagcgtccatccatttatcatcacgtgcagttcgt

SEQ ID NO: 544283 - DNA, 75 bp, synthetic construct
  source 1..75: mol_type = other DNA
ttggcataccacatacacattctgattattttcaggttcgtcaacgaattggcactgtattgcaagatgactatc

SEQ ID NO: 544284 - DNA, 75 bp, synthetic construct
  source 1..75: mol_type = other DNA
ggaaacaactacccgttatccgtcaaaccgaatcagctgaatgcggtctggcgtgtctggctatgattgcctgct

SEQ ID NO: 544285 - DNA, 75 bp, synthetic construct
  source 1..75: mol_type = other DNA
atattagaaattgattttattgaggggggggcagaaaacaaatctgaagatttctgtaaaacacgaaaaaataca

SEQ ID NO: 544286 - DNA, 75 bp, synthetic construct
  source 1..75: mol_type = other DNA
cctcgctggtaatgacttttttcggcatccccatactgacgcaatttttggcagcggttgttgctatgctggggg

SEQ ID NO: 544287 - DNA, 75 bp, synthetic construct
  source 1..75: mol_type = other DNA
ttcacgcaaaactggccgcgacttgatggcgcaacggcggcgtaccccatttatgcctctgccttttatgcacta

SEQ ID NO: 544288 - DNA, 75 bp, synthetic construct
  source 1..75: mol_type = other DNA
gcagtagaggaagtattaatgcccgttttgaagcggtagataccatccagcaggcgctgaccacgcaggtactgg

SEQ ID NO: 544289 - DNA, 75 bp, synthetic construct
  source 1..75: mol_type = other DNA
gcgtcgcgctgcttcttatcctgatgatcgtctttaaagttaacggctttattgccctcgttctggtagctgccg

SEQ ID NO: 544290 - DNA, 75 bp, synthetic construct
  source 1..75: mol_type = other DNA
agcgcaggataaaataagtctctggcagacagaattgcgactggacatcatcagtgatggggataaggaaagtct

SEQ ID NO: 544291 - DNA, 75 bp, synthetic construct
  source 1..75: mol_type = other DNA
actctggctcaatgttgctgcctgcacctctgtacaccagaagaatgctgttcgcttcatgatcatcactggtgt

SEQ ID NO: 544292 - DNA, 75 bp, synthetic construct
  source 1..75: mol_type = other DNA
gcgtcgatatcctggttaccgaccacggtatcgccgttaacccggcacgtcctgaactggcagagcgtctgcagg

SEQ ID NO: 544293 - DNA, 75 bp, synthetic construct
  source 1..75: mol_type = other DNA
tcatcgcgaaaatgggctttaaaaacctgaccctggcatccagttccctgagtgattgccacgcgccactggtag

SEQ ID NO: 544294 - DNA, 75 bp, synthetic construct
  source 1..75: mol_type = other DNA
tcgtcgcgccgctggtacgcggtcgtattccgactctggtggataacgtgctgacctgcatcaccccgggctcca

SEQ ID NO: 544295 - DNA, 75 bp, synthetic construct
  source 1..75: mol_type = other DNA
ttctcgccgcactggcattcatcgcttttcaggcgcaggcggtgaacgttaccgttgcgtatcaaacctccgccg

SEQ ID NO: 544296 - DNA, 75 bp, synthetic construct
  source 1..75: mol_type = other DNA
tgccgagaaacatcctgaggtcgtgaaagcgttcgctaaaagcgccatcgatgctcagcaaccgtacattgctaa

SEQ ID NO: 544297 - DNA, 75 bp, synthetic construct
  source 1..75: mol_type = other DNA
cgaaaaaggtctgatccgcaaactgctggatgtgcagagctttgacagccatgctgcgcaatcgctggcccgtaa

SEQ ID NO: 544298 - DNA, 75 bp, synthetic construct
  source 1..75: mol_type = other DNA
tccggcaaacgcatggtatcgagctccacgattaccgggtggattatccctggtgggaaaacgcctatccggaca

SEQ ID NO: 544299 - DNA, 75 bp, synthetic construct
  source 1..75: mol_type = other DNA
ccgcctcaggaaggggacctcatcatcatgcaggtccaggccgataagtggaatcacgcggggatcctgcttgag

SEQ ID NO: 544300 - DNA, 75 bp, synthetic construct
  source 1..75: mol_type = other DNA
acagcccggacggggctgtaaaaggaataaaacatgatgggactgttaaagggaaagacggtgcatttaatacga

SEQ ID NO: 544301 - DNA, 75 bp, synthetic construct
  source 1..75: mol_type = other DNA
aacgacaagaacgggtagcggcctggaatcgtcgcgctgaatgcgatcttgccgctttccagaactcgccaaagc

SEQ ID NO: 544302 - DNA, 75 bp, synthetic construct
  source 1..75: mol_type = other DNA
ctcctctgcggtcattgcatctgaaaacgggaaaaaaccgatcccgggcaaatcagatgtgatggttgctaacta

SEQ ID NO: 544303 - DNA, 75 bp, synthetic construct
  source 1..75: mol_type = other DNA
tcctggcgcatgcagcgaaagaatatccccgcgaatgctgtggtgtgatagcgcagaaaagccgggtggaacgct

SEQ ID NO: 544304 - DNA, 75 bp, synthetic construct
  source 1..75: mol_type = other DNA
gtggcgttatatcgtcttgatgaactggaaggccagccgataggtcatttcaatggcacttgcattgatgaccag

SEQ ID NO: 544305 - DNA, 75 bp, synthetic construct
  source 1..75: mol_type = other DNA
atcgctgacaggtggcattgaagtgccgatgaacaccaatgtccgggatgatgttgtcggcatggcaggggatgt

SEQ ID NO: 544306 - DNA, 75 bp, synthetic construct
  source 1..75: mol_type = other DNA
ctggacggcccagtcgcaggacttgtgtcactggaaaaaggggctgcctatctgggggtaacaaaatctgcgcta

SEQ ID NO: 544307 - DNA, 75 bp, synthetic construct
  source 1..75: mol_type = other DNA
cccggaagatgaagattcagacggcgtatggtggtttaacgccaaagagtgggacaagttggccgacgaactacc

SEQ ID NO: 544308 - DNA, 75 bp, synthetic construct
  source 1..75: mol_type = other DNA
cgctgctggtgcagatcttcctgatttactacggaccgggccagttcccgacgttgcaggagtatccggcgctgt

SEQ ID NO: 544309 - DNA, 75 bp, synthetic construct
  source 1..75: mol_type = other DNA
cttacgatgtcatggtgttcggtgcggcggggattatttacctggttgtgaacggcctgctgacactgatgatgc

SEQ ID NO: 544310 - DNA, 75 bp, synthetic construct
  source 1..75: mol_type = other DNA
ggcatttgttgtcagaaccgtggttatgtgcgctgattgcgttatcgctgaacagtgcggcgtataccacgcagc

SEQ ID NO: 544311 - DNA, 75 bp, synthetic construct
  source 1..75: mol_type = other DNA
taaatgcttctgatgacaatattgaacctgatgctctatatatactaaatgaatttagaactcgaagccatttaa

SEQ ID NO: 544312 - DNA, 75 bp, synthetic construct
  source 1..75: mol_type = other DNA
gatggctcttttgaaccgcaacttgtgaagaaaaaccagacccggatcaccgggatggataaccagatcctgtcg

SEQ ID NO: 544313 - DNA, 75 bp, synthetic construct
  source 1..75: mol_type = other DNA
acgaagaaaacaagaaaaagcgttcctacaaaaaaggagcgactttgcggctggatggtccgatcgccgggcttt

SEQ ID NO: 544314 - DNA, 75 bp, synthetic construct
  source 1..75: mol_type = other DNA
cccggctgataaggaagattgccagaccgtcaatggaaaacgggtttacaaaggcagaaagtcaaagctggaaca

SEQ ID NO: 544315 - DNA, 75 bp, synthetic construct
  source 1..75: mol_type = other DNA
gctaacccggctaccgtgctggcactgctggatgaacgggaaagaaaccagcaatacatcaaacgccgcgaccag

SEQ ID NO: 544316 - DNA, 75 bp, synthetic construct
  source 1..75: mol_type = other DNA
ggcagggattatttacctgattgttaacggtctgctgacgctgatgatgcgtctgatcgagcgtaaagcactggc

SEQ ID NO: 544317 - DNA, 75 bp, synthetic construct
  source 1..75: mol_type = other DNA
agtatcagtttactgcgcgacgccctgcctaaggactgcctggtcggagccggaactgtgctttcggtagagcag

SEQ ID NO: 544318 - DNA, 75 bp, synthetic construct
  source 1..75: mol_type = other DNA
gggcaggtgatcgccaatcaggctttcaacttcaatcggttcaatcgggttgcagaacatgccaacaggcttaac

SEQ ID NO: 544319 - DNA, 75 bp, synthetic construct
  source 1..75: mol_type = other DNA
ctctggattgaacctttgctggctgttattgagaagggcaacaataacctggcgggtatacgagagattgagaag

SEQ ID NO: 544320 - DNA, 75 bp, synthetic construct
  source 1..75: mol_type = other DNA
atgtttgtgacccgtaatatcgactggtatgcgttttcactgccgaaaatgaaagccagtaaagaagttacaatg

SEQ ID NO: 544321 - DNA, 75 bp, synthetic construct
  source 1..75: mol_type = other DNA
attttttgcccgcaaaacgggaggtcagcgagaccggttttcaggcgcaatggcaaagtagttggtttgccaata

SEQ ID NO: 544322 - DNA, 75 bp, synthetic construct
  source 1..75: mol_type = other DNA
caccgggtattgcgctgctgttaacggcaatcctctggttgctgtttgtcgaagcgttacaggtgccattgcctg

SEQ ID NO: 544323 - DNA, 75 bp, synthetic construct
  source 1..75: mol_type = other DNA
ggtgaagtactgtttatagacgcgcgccagattggttatatgaaagatcgcgtgttgcgtgattttagccgtgaa

SEQ ID NO: 544324 - DNA, 75 bp, synthetic construct
  source 1..75: mol_type = other DNA
gtgctttcggctgcatggctgcacggagaggctaaccataatgccgaagaaggcacggcagatcttgaattccac

SEQ ID NO: 544325 - DNA, 75 bp, synthetic construct
  source 1..75: mol_type = other DNA
caggtggcattgaagtgccgatgaacaccaatgtccgggatgatgttgtcggcatggcaggggatgtggattaca

SEQ ID NO: 544326 - DNA, 75 bp, synthetic construct
  source 1..75: mol_type = other DNA
tacaacgccgctgagcagaagcgcaatatttccgtttacggccaggagtcgaatccgaccacctggaagctggcg

SEQ ID NO: 544327 - DNA, 75 bp, synthetic construct
  source 1..75: mol_type = other DNA
gaaatcgaaaaaaccaacccgaaactgaaaggtattctgaatcgcatcagccagtatcaactgagtaacgaggtg

SEQ ID NO: 544328 - DNA, 75 bp, synthetic construct
  source 1..75: mol_type = other DNA
ttctctgcaacgctggaagatattcagaaaaacgactttgtgttgacccctgggcgctatgttggtgctaccgag

SEQ ID NO: 544329 - DNA, 75 bp, synthetic construct
  source 1..75: mol_type = other DNA
aatccgattcatcttgtatatcgcgtgccaaagtccaactaccggtcatatgccgagggcggcctactattctat

SEQ ID NO: 544330 - DNA, 75 bp, synthetic construct
  source 1..75: mol_type = other DNA
acaccgttgagatcgccaaacgttgtaacgtaactgtgcgtctgggtgaatacttcttgccgcaattcccgaccg

SEQ ID NO: 544331 - DNA, 75 bp, synthetic construct
  source 1..75: mol_type = other DNA
gtacggctttgtcgatcgtatctcgaaactgatcccgcccgatccggggatgacgctggcgaaagcgtttgaagc

SEQ ID NO: 544332 - DNA, 75 bp, synthetic construct
  source 1..75: mol_type = other DNA
gaagcccgtaataaaggcggctacttccgcgaactgtttgatctctgcgcccgtaccgacaccaaaaagttaaac

SEQ ID NO: 544333 - DNA, 75 bp, synthetic construct
  source 1..75: mol_type = other DNA
atggtggataactttatcgaccgtaaacatggtcgcgaagagatctcctatccggacgtacagtggcagcatgaa

SEQ ID NO: 544334 - DNA, 75 bp, synthetic construct
  source 1..75: mol_type = other DNA
acgctggcgaaagcgtttgaagccgagccgcagctgccggaaatctacgaagcggatgaagaagttaaggcgctg

SEQ ID NO: 544335 - DNA, 75 bp, synthetic construct
  source 1..75: mol_type = other DNA
tctccgagcgatcgtttattaaacgatctccgtggcctcattggttcggagcagggggaactggagtttgactaa

SEQ ID NO: 544336 - DNA, 75 bp, synthetic construct
  source 1..75: mol_type = other DNA
cctacaagcgtcaggcggacaaattcataaaaactacaatcgctgggtccgcaatctcgacaaagatattcaact

SEQ ID NO: 544337 - DNA, 75 bp, synthetic construct
  source 1..75: mol_type = other DNA
gtgaaaactggtctgttcccttaacctactccgaaaatgatgacgaacgattctatgttccagagaatgtttata

SEQ ID NO: 544338 - DNA, 75 bp, synthetic construct
  source 1..75: mol_type = other DNA
ccggatacgcaatggcttaaggaaattgtgatgacggatatcgcccctttactcgaagaatatttctttgatgat

SEQ ID NO: 544339 - DNA, 75 bp, synthetic construct
  source 1..75: mol_type = other DNA
aaaagcgtatcagcgcgggtacggtgccgccgggccgatcatcgatcgcgactggcttatcgaattaaacgaagg

SEQ ID NO: 544340 - DNA, 75 bp, synthetic construct
  source 1..75: mol_type = other DNA
gtagagaatgaagacggttctcacgttcctgttgcacagccaatcatcattaacgctggcgggtatcctgtatat

SEQ ID NO: 544341 - DNA, 75 bp, synthetic construct
  source 1..75: mol_type = other DNA
tggtaagcatgccttcgcaactcttcactatggcccgctcatttaaagccaatgcaaatgggaaaatttatatcg

SEQ ID NO: 544342 - DNA, 75 bp, synthetic construct
  source 1..75: mol_type = other DNA
tcgaaagataacggcgtaccggtagggccaggccgtggctccggtgcgggttcactggtggcttatgcgctgaaa

SEQ ID NO: 544343 - DNA, 75 bp, synthetic construct
  source 1..75: mol_type = other DNA
tatgccattggtttatcgacactggcatcaatttccacacaactcgatttcaactcagcattgagtgtggtttcc

SEQ ID NO: 544344 - DNA, 75 bp, synthetic construct
  source 1..75: mol_type = other DNA
agctaaccgttcgcggatgaacgtgccgttccagttggcagacagtgcgcttgacaaattgttccttgaagagtc

SEQ ID NO: 544345 - DNA, 75 bp, synthetic construct
  source 1..75: mol_type = other DNA
tcttcaacgattctttcgcgtccgatagatgtcagtcgttatggagtaatttatgcgggcgcgcagaaaaatatc

SEQ ID NO: 544346 - DNA, 75 bp, synthetic construct
  source 1..75: mol_type = other DNA
ccttccgttgcagctctttcgatatgataactatctgggcggtccgagatccgcaaagctccgccagcgtggtgc

SEQ ID NO: 544347 - DNA, 75 bp, synthetic construct
  source 1..75: mol_type = other DNA
gcggtgtcagtctggctgcggtcgcaaactcagaagtcgatgcactgattaaggtgctgccgcgcatgacggcac

SEQ ID NO: 544348 - DNA, 75 bp, synthetic construct
  source 1..75: mol_type = other DNA
caactcagcattgagtgtggtttcccaaaagttagcctccgggttagatagttttacgttgttggcaatcccatt

SEQ ID NO: 544349 - DNA, 75 bp, synthetic construct
  source 1..75: mol_type = other DNA
agcgtatggcagaacaacaatctgatatggttaagaaaattgtctttgatacgcttaagaccatgtatagcaata

SEQ ID NO: 544350 - DNA, 75 bp, synthetic construct
  source 1..75: mol_type = other DNA
agaatcattggctaaacaaagctctgcatccgtttacattgacgatgcagagcgtatggcagaacaacaatctga

SEQ ID NO: 544351 - DNA, 75 bp, synthetic construct
  source 1..75: mol_type = other DNA
ggcgtgcttacaaggacatgacgagaacggtcgatcaaatcgacaaaatgagatgctggccgtttggccgacgca

SEQ ID NO: 544352 - DNA, 75 bp, synthetic construct
  source 1..75: mol_type = other DNA
tgcgcgcttctatttataacgcgatgccgctggaaggcgttaaagctttgacagatttcatggttgagttcgaac

SEQ ID NO: 544353 - DNA, 75 bp, synthetic construct
  source 1..75: mol_type = other DNA
aatgaaaccatcgacggtatcgccatcgacgaaacgccagacttcggcaaagatgtggtggtcgccgccgacttc

SEQ ID NO: 544354 - DNA, 75 bp, synthetic construct
  source 1..75: mol_type = other DNA
aaaaagcgccattgccggggaaatagaaatcgcgatgaaggctattggtgtaccggttaagtggactaatggcga

SEQ ID NO: 544355 - DNA, 75 bp, synthetic construct
  source 1..75: mol_type = other DNA
accacaaaccgttctactttactggctttggtcgtcatgaagatgcggatttgcgtggcaaaggattcgataacg

SEQ ID NO: 544356 - DNA, 75 bp, synthetic construct
  source 1..75: mol_type = other DNA
actgtaaccacgcgtctgttgactggcaggtggtggccaatggtgatgtcagcgttgaactgcgtgatgcggatc

SEQ ID NO: 544357 - DNA, 75 bp, synthetic construct
  source 1..75: mol_type = other DNA
tctctttaggcattggtttcgaagcgggcaacaagccgaaagaactgtacagcgaagaggcagtcaacggggaaa

SEQ ID NO: 544358 - DNA, 75 bp, synthetic construct
  source 1..75: mol_type = other DNA
ctctatacgccgaaaataaatgccataagtgagcattttaaccgaacactgagggaacaatttattgagtttaat

SEQ ID NO: 544359 - DNA, 75 bp, synthetic construct
  source 1..75: mol_type = other DNA
agagcatgatcgtgatattaacgcggcccgtaatataaaagctgccgggctggcagtgttagcccttggagagtc

SEQ ID NO: 544360 - DNA, 75 bp, synthetic construct
  source 1..75: mol_type = other DNA
atggaaagccggatttacccggcgatgacgccgatcccggcactggcaggactgattaccacgatggttacgcag

SEQ ID NO: 544361 - DNA, 75 bp, synthetic construct
  source 1..75: mol_type = other DNA
tcaaccgcaactggaggctattcttctgcattcggggtacagtccactgctattggtgccgctacccgtgcgtat

SEQ ID NO: 544362 - DNA, 75 bp, synthetic construct
  source 1..75: mol_type = other DNA
ttggagaaggtgcagcggcggaggaaaagaattcaacagctgttggttcatgggctagtgctcatgggagacaga

SEQ ID NO: 544363 - DNA, 75 bp, synthetic construct
  source 1..75: mol_type = other DNA
gttgctctgtccggcagaacagaccgtattgatgctgcagttggtagcgttgaccgccgggttactaaaaataca

SEQ ID NO: 544364 - DNA, 75 bp, synthetic construct
  source 1..75: mol_type = other DNA
gaaaactgtggaattgatcagcgttggtgggaaagcgcgttacaagaaagccgggcaattgctgtgccaggcagt

SEQ ID NO: 544365 - DNA, 75 bp, synthetic construct
  source 1..75: mol_type = other DNA
tcgtcaggttgaccgtgtaaaagacagtgttgagcaactggctcaggatacgaatacccgccttgtagtcgaagc

SEQ ID NO: 544366 - DNA, 75 bp, synthetic construct
  source 1..75: mol_type = other DNA
tcaaaaggggatgtaacaatcaatggcagtggcattacgtacacaattcatgacggtgcgctgaacgattttgct

SEQ ID NO: 544367 - DNA, 75 bp, synthetic construct
  source 1..75: mol_type = other DNA
ttgcatccgcagagtctagtgctggccagagaactggaaatccagtagacaaaaacggaaacaaactttcatctg

SEQ ID NO: 544368 - DNA, 75 bp, synthetic construct
  source 1..75: mol_type = other DNA
gcacccgagatggtcatgaagctgattgaactggaagtatcaatggaagggttaagccgtcgtcaggggattttt

SEQ ID NO: 544369 - DNA, 75 bp, synthetic construct
  source 1..75: mol_type = other DNA
atacgttgccggggatttaccgcgaggtgtatcaacgggatctggactgggtagttgatgatcaatcacgctttg

SEQ ID NO: 544370 - DNA, 75 bp, synthetic construct
  source 1..75: mol_type = other DNA
atgccagcgatgcagatctgttggtgcagatagcgcagggatttgacgttgtgcctgaaatggtgatgaaactca

SEQ ID NO: 544371 - DNA, 75 bp, synthetic construct
  source 1..75: mol_type = other DNA
accataaacaccatgaatataatattgaaacttcattagattttagttctcctttgccagagccggagcgagagc

SEQ ID NO: 544372 - DNA, 75 bp, synthetic construct
  source 1..75: mol_type = other DNA
acaatacacaccatgaatataatattgaaacttcattagattttagttctcctttgccagagccggagcgagagc

SEQ ID NO: 544373 - DNA, 75 bp, synthetic construct
  source 1..75: mol_type = other DNA
aatatcttaatgttttcttttttggttttcctgatgagtgcgatagttttttatttaagactagtttttttaaat

SEQ ID NO: 544374 - DNA, 75 bp, synthetic construct
  source 1..75: mol_type = other DNA
gcatggttcagtgacaccacaaagaatctgaacgaaaaattagacgccatcaaaaacttctttactgtcgataac

SEQ ID NO: 544375 - DNA, 75 bp, synthetic construct
  source 1..75: mol_type = other DNA
aaggtcagcacgcctcagccgggcgttatgcgcacggtaccactgtcaattgatgatccgttgatgaatgactac

SEQ ID NO: 544376 - DNA, 75 bp, synthetic construct
  source 1..75: mol_type = other DNA
tctaaccttggcgacaccatttctaccaagttcgaagattacacagcaaagattggtgatgctgtttcagcatgg

SEQ ID NO: 544377 - DNA, 75 bp, synthetic construct
  source 1..75: mol_type = other DNA
tttccgttggtgcactgagcgcatgaaaatcaacccggtgagtgactttattaaagataaggtcagccagtttga

SEQ ID NO: 544378 - DNA, 75 bp, synthetic construct
  source 1..75: mol_type = other DNA
cgtggatctgattaagaaaacgatgttgcagattgaggcgggagcgaagcgtaacggcttgccgatcactcaaca

SEQ ID NO: 544379 - DNA, 75 bp, synthetic construct
  source 1..75: mol_type = other DNA
tcaaataccgtcagcagtggcttaaagagttgctggagattgagcgagatttgaatgctcagggccacaccatca

SEQ ID NO: 544380 - DNA, 75 bp, synthetic construct
  source 1..75: mol_type = other DNA
acatatgcttatgcaaatgcatctacagccctgggaagcgttgcatttgttgattacacggctacatatggcacg

SEQ ID NO: 544381 - DNA, 75 bp, synthetic construct
  source 1..75: mol_type = other DNA
atctggtcaacaaattcatgaatggccggggtatgcgtcgggaagtcgttcagggaacgctcgaagaacgtgcac

SEQ ID NO: 544382 - DNA, 75 bp, synthetic construct
  source 1..75: mol_type = other DNA
accagatggaaagttaagtggtggcgcactcgggatgttccagttcacgagtattgctcgtaaagagacagggat

SEQ ID NO: 544383 - DNA, 75 bp, synthetic construct
  source 1..75: mol_type = other DNA
taccgtttcaacgagcagaccgcagcgaaagcaggcgtggcattcagtgatggcgatgcctcctggaacgttggt

SEQ ID NO: 544384 - DNA, 75 bp, synthetic construct
  source 1..75: mol_type = other DNA
taactacttcggcatggtgccggaaatcacccccgccaaactcaccaaaaaaaccgaagactaccaggcgggcgg

SEQ ID NO: 544385 - DNA, 75 bp, synthetic construct
  source 1..75: mol_type = other DNA
aaaaacgacgcaggaaggctataccagaggatataaaggcacaacggaccgaagcagccgaacacgctcgcgaaa

SEQ ID NO: 544386 - DNA, 75 bp, synthetic construct
  source 1..75: mol_type = other DNA
gtgtggatcactattgcaccgttcgtgacagtcggcacagtggctggaggtatttatgatgcggtaaccggttgg

SEQ ID NO: 544387 - DNA, 75 bp, synthetic construct
  source 1..75: mol_type = other DNA
ttggggcgttaatgaacggtatttatttgcaggcggtattgggtaatgactccaacttattgatagtgttttatg

SEQ ID NO: 544388 - DNA, 75 bp, synthetic construct
  source 1..75: mol_type = other DNA
gtggcatggataatcgccagtctgattggggcgttaatgaacggtatttatttgcaggcggtattgaaaggttgg

SEQ ID NO: 544389 - DNA, 75 bp, synthetic construct
  source 1..75: mol_type = other DNA
gtggcatggataatcgccagtctgattggggcgttaatgaacggtatttacttgcaggcagtattaaaaggctgg

SEQ ID NO: 544390 - DNA, 75 bp, synthetic construct
  source 1..75: mol_type = other DNA
ctgccctgggggggtacagtgataaacaggctgttgccgtgggtgttggttaccgtttcaacgagcagaccgcag

SEQ ID NO: 544391 - DNA, 75 bp, synthetic construct
  source 1..75: mol_type = other DNA
ggaagaaagcattcgttcctttgtatctctatatcttgatgcactcagggaaaaacaatccattgaggtacttaa

SEQ ID NO: 544392 - DNA, 75 bp, synthetic construct
  source 1..75: mol_type = other DNA
acccgtcgtggcttgccagccaagctgatgttgagagtaaaaaagcggcactgaaagcacaggagcttgcccggt

SEQ ID NO: 544393 - DNA, 75 bp, synthetic construct
  source 1..75: mol_type = other DNA
gtcggattgattgtcattcttatctataacaacgtcacgaatcatggcgcgcaaataacgacatggttattaagt

SEQ ID NO: 544394 - DNA, 75 bp, synthetic construct
  source 1..75: mol_type = other DNA
gtgttattttccgaagaaatgttatctggtttaggagaaggagttagatttgaactaattgctaagatcaaagag

SEQ ID NO: 544395 - DNA, 75 bp, synthetic construct
  source 1..75: mol_type = other DNA
cttcaagaaaagatcaggtgcagggaaagatagtgctttaaatttctttcaaaggcataaatcgttacaaccaga

SEQ ID NO: 544396 - DNA, 75 bp, synthetic construct
  source 1..75: mol_type = other DNA
tcatatcgttaacttaaattcagaaattatattcaatattgtagatcaagctgaaaaaaattactcaatcaatcg

SEQ ID NO: 544397 - DNA, 75 bp, synthetic construct
  source 1..75: mol_type = other DNA
tttgacgtcgataaattcaaaaacatcaacgacaccttcggtcatttgctgggcgatgaagtgttgatgaaagtg

SEQ ID NO: 544398 - DNA, 75 bp, synthetic construct
  source 1..75: mol_type = other DNA
gtgttcatgcctgaggcagatagcctcaagcacccgcagcaattctacttaactcacgtcacctcgccaatataa

SEQ ID NO: 544399 - DNA, 75 bp, synthetic construct
  source 1..75: mol_type = other DNA
atgttaactggggcttttctctatctgccgttggtgttcatgcctgaggcagatagcctcaagcacccgcagcaa

SEQ ID NO: 544400 - DNA, 75 bp, synthetic construct
  source 1..75: mol_type = other DNA
agacataaaagtgcttcccaaaacgatggtgcataagtacctgagctggtggcgcgttggcggggcgcaggtatc

SEQ ID NO: 544401 - DNA, 75 bp, synthetic construct
  source 1..75: mol_type = other DNA
ttagaacagcgccgtttgttaatccgcgtccgaaatatcgacgatctggaaaagatttataaacttctagtttca

SEQ ID NO: 544402 - DNA, 75 bp, synthetic construct
  source 1..75: mol_type = other DNA
ttagaacagcgccggctgttaattcgcgttcgaaatatcgacgatctagaaaaaatttataagcttctcgtttca

SEQ ID NO: 544403 - DNA, 75 bp, synthetic construct
  source 1..75: mol_type = other DNA
cattttcaacagttagcgaaagtccttatatatagagaatgtttccctaatgtgcataaatcactgatttatctg

SEQ ID NO: 544404 - DNA, 75 bp, synthetic construct
  source 1..75: mol_type = other DNA
gagcattttcaacaattatccaaagttattatatacagagaatgcttccctaatgtgggcaaatctttgctttat

SEQ ID NO: 544405 - DNA, 75 bp, synthetic construct
  source 1..75: mol_type = other DNA
taaactgtatggactgcttcaatgttaaaactaaaaatatattaatgagggtagagagtgggattcttagtgcaa

SEQ ID NO: 544406 - DNA, 75 bp, synthetic construct
  source 1..75: mol_type = other DNA
gcgtgggcatcgacaacagcgggcagaagaataccggtacggggcagttaaatggtgtcctttcctttaataatc

SEQ ID NO: 544407 - DNA, 75 bp, synthetic construct
  source 1..75: mol_type = other DNA
tgtcacgcattgttgtcagtggggccacccgactgacgtctgcagaaaccgacagactggtggcaccgtgggtga

SEQ ID NO: 544408 - DNA, 75 bp, synthetic construct
  source 1..75: mol_type = other DNA
cggtggcgttccacgggagacctgcagactcaccggctgggactgtcgcatgtcctgttccgtaacggggacatg

SEQ ID NO: 544409 - DNA, 75 bp, synthetic construct
  source 1..75: mol_type = other DNA
aaggcgctgaccttcctgcccgcaccctgaagatggttttcccgggaatggaggggaaggttctgaacctgcggg

SEQ ID NO: 544410 - DNA, 75 bp, synthetic construct
  source 1..75: mol_type = other DNA
cgtactgcacataacggtcatggaaggcaggctgcagcaaatccgggcggaaggcgctgaccttcctggccgcac

SEQ ID NO: 544411 - DNA, 75 bp, synthetic construct
  source 1..75: mol_type = other DNA
agaaaccgacagactggtggcaccgtgggtgaatcagtgtctgaatatcacggggctgaccgcggtcacggatgc

SEQ ID NO: 544412 - DNA, 75 bp, synthetic construct
  source 1..75: mol_type = other DNA
ggccagcgcaacaatattccggtgattgctcagcatactggtgccgattctgcctctgttatcttcgatgccatt

SEQ ID NO: 544413 - DNA, 75 bp, synthetic construct
  source 1..75: mol_type = other DNA
gcctctgttatcttcgatgccattcaggccgctaaggcgcgtaatgttgatgtcctgattgccgataccgccgga

SEQ ID NO: 544414 - DNA, 75 bp, synthetic construct
  source 1..75: mol_type = other DNA
agcagggcaagtcggtaatgctggcggcaggcgatactttccgtgcggcagcggttgagcagcttcaggtctggg

SEQ ID NO: 544415 - DNA, 75 bp, synthetic construct
  source 1..75: mol_type = other DNA
ttttttcctggctgggctttggtcaaaaagagcagaccccggaaaaagagacagaagttcagaatgaacaaccag

SEQ ID NO: 544416 - DNA, 75 bp, synthetic construct
  source 1..75: mol_type = other DNA
tggtcgttccgccggcagaagaagatcagccggtggaagaggtagcccaggagcaggaaaaaccaaccaaagaag

SEQ ID NO: 544417 - DNA, 75 bp, synthetic construct
  source 1..75: mol_type = other DNA
ccggacgcctgcagaacaaatcgcacctgatggaagagttgaagaaaatcgtccgcgtgatgaagaaactcgacg

SEQ ID NO: 544418 - DNA, 75 bp, synthetic construct
  source 1..75: mol_type = other DNA
gaggggaaggttctgaacctgcgggatattgagcaggggatggagcagattaatcgtctgcgtacggagccggta

SEQ ID NO: 544419 - DNA, 75 bp, synthetic construct
  source 1..75: mol_type = other DNA
tccttgatcactttctgggacttcatgctcctgtaaatagctttacccgcatgactacggccattgaaaatgaag

SEQ ID NO: 544420 - DNA, 75 bp, synthetic construct
  source 1..75: mol_type = other DNA
aaatatatatattcgtttgagcgatgatggtggaactaagtcaagcattatgacaggagatgtcctctcaattga

SEQ ID NO: 544421 - DNA, 75 bp, synthetic construct
  source 1..75: mol_type = other DNA
cttcggaaagcaacgatcttaaggaaaatatatatattcgtttgagcgatgatggtggaactaagtcaagcatta

SEQ ID NO: 544422 - DNA, 75 bp, synthetic construct
  source 1..75: mol_type = other DNA
cattcaacaatcatgtaatatattctggcatacttcatgttatcgtatgtcttctgaaagaagaaactttgatga

SEQ ID NO: 544423 - DNA, 75 bp, synthetic construct
  source 1..75: mol_type = other DNA
cgtaatctggccccccaatttttgtttcactacccttcatcatgtattgcttcatttgaaccggaccagaaatcc

SEQ ID NO: 544424 - DNA, 75 bp, synthetic construct
  source 1..75: mol_type = other DNA
taagcataaatctaaaactacctgccagtttcggacggtatatcctctgacaatagtcccggcaacagttaatga

SEQ ID NO: 544425 - DNA, 75 bp, synthetic construct
  source 1..75: mol_type = other DNA
gaacactgaatccggtattcacacgggggatgccctggttcggcgcagaaagcgaccacgggaaaaggggagacc

SEQ ID NO: 544426 - DNA, 75 bp, synthetic construct
  source 1..75: mol_type = other DNA
ctgacaactggtttgtcagcgggggacggagcagtgacttttcggtgtcacatgatgcgaggaattttgccgccg

SEQ ID NO: 544427 - DNA, 75 bp, synthetic construct
  source 1..75: mol_type = other DNA
ctgggactgtcgcatgtcctgttccgtaacggagacatgaagacagcactgaccggaggtctgcagcaccgcatt

SEQ ID NO: 544428 - DNA, 75 bp, synthetic construct
  source 1..75: mol_type = other DNA
ccagttgttaatcttttcagaaaaaaaacagaaccgttacgattatcggaggggcaggatgagtatcaagtgaat

SEQ ID NO: 544429 - DNA, 75 bp, synthetic construct
  source 1..75: mol_type = other DNA
tctctgaattttgtgttgcttagtggtactgatggggcaatgaaactgcgagaaatgttgtccgtatataactat

SEQ ID NO: 544430 - DNA, 75 bp, synthetic construct
  source 1..75: mol_type = other DNA
cagcgccccgtcacggacagggtgtggtggctgaccagcgcttatgcccagtggtcaccggaccgtcttcatggt

SEQ ID NO: 544431 - DNA, 75 bp, synthetic construct
  source 1..75: mol_type = other DNA
gtttgagcagcagggtaaatcggtgatgctggcggcgggcgatactttccgtgcagcagcggttgaacagcttca

SEQ ID NO: 544432 - DNA, 75 bp, synthetic construct
  source 1..75: mol_type = other DNA
tatgctcattcagccgctaattggcgcgctatcggataagattggtcgccgcacttcgatgttatgcttcggctc

SEQ ID NO: 544433 - DNA, 75 bp, synthetic construct
  source 1..75: mol_type = other DNA
atggcagaaagcactgtaacagcagatggcaaactgacaagtagtgatactcgtcgccgcatctgggcaattgta

SEQ ID NO: 544434 - DNA, 75 bp, synthetic construct
  source 1..75: mol_type = other DNA
cgtccaatcggcggctggttatttggacgcatagccgatagacatgggcgtaaaaaatcaatgctgttatcggtg

SEQ ID NO: 544435 - DNA, 75 bp, synthetic construct
  source 1..75: mol_type = other DNA
agcgattacctctttccgttcagtgctggcggagctggggctggagctgccgggtggtaacaagccggaaccgcg

SEQ ID NO: 544436 - DNA, 75 bp, synthetic construct
  source 1..75: mol_type = other DNA
tatgggcaccggcatggcggttgatatcgctctgcgtacccatgaaattccgtacatctggccgcaggctgttga

SEQ ID NO: 544437 - DNA, 75 bp, synthetic construct
  source 1..75: mol_type = other DNA
gttctgctccctctactttgctcacatatttttcccttcaggtaacactactacgcaactattacaaacagctgg

SEQ ID NO: 544438 - DNA, 75 bp, synthetic construct
  source 1..75: mol_type = other DNA
cagtttcaagccaccgccggagccggactggagccacaccgtgccagtcaataaaacgcttccagtagatacaca

SEQ ID NO: 544439 - DNA, 75 bp, synthetic construct
  source 1..75: mol_type = other DNA
cgcgtagtctgaatcgcgatcctctggacctgaaagcggataacctgccttttcacggcgcggatatctggacgc

SEQ ID NO: 544440 - DNA, 75 bp, synthetic construct
  source 1..75: mol_type = other DNA
atcaaccgattaccgggatacctatgacgccagtctgctgcaaggcgttccgcgtagtttgaatcgcgatccatt

SEQ ID NO: 544441 - DNA, 75 bp, synthetic construct
  source 1..75: mol_type = other DNA
atcttcttcccttcagataacacaaccactcaactactacaaactgccggtatttttgccgcaggatttctgatg

SEQ ID NO: 544442 - DNA, 75 bp, synthetic construct
  source 1..75: mol_type = other DNA
gcttcccgcaggctgaaatttcgggcttttattatgacggaccggggattggcgtcgaacgtgcgaccgggaaaa

SEQ ID NO: 544443 - DNA, 75 bp, synthetic construct
  source 1..75: mol_type = other DNA
aacgaaatcgccagcgctatgggcggcagtaattatgtactgcttttcactacggcgtatggcgaatctgcgtaa

SEQ ID NO: 544444 - DNA, 75 bp, synthetic construct
  source 1..75: mol_type = other DNA
ggctaccattattcgatggaagagatgttgcaactgggtcagcactgttcgatggcggaacgtcgtgccgacgaa

SEQ ID NO: 544445 - DNA, 75 bp, synthetic construct
  source 1..75: mol_type = other DNA
gattgaccagctgtatagcgttcagtgttcaggccgcgaatgttgatgagtacattactcaactccccgctggtg

SEQ ID NO: 544446 - DNA, 75 bp, synthetic construct
  source 1..75: mol_type = other DNA
gggtgacttagtggcgcgatttggtgccgatccgacgttaaaacgtcaggatattcgcaatatggtcgcgacttt

SEQ ID NO: 544447 - DNA, 75 bp, synthetic construct
  source 1..75: mol_type = other DNA
ctatgcagtagaaccggcggatcagcgtaatcgccgtattccgttagtgcgttttgaaagccgtttgtataaaga

SEQ ID NO: 544448 - DNA, 75 bp, synthetic construct
  source 1..75: mol_type = other DNA
ctggcggagctggggctggaactgccgggtggtaacaagccggaaccgcgtgactacgcggaactgctggagtcg

SEQ ID NO: 544449 - DNA, 75 bp, synthetic construct
  source 1..75: mol_type = other DNA
atgtgctcgttgatacttctattttcgccagccacgataaagcccccggctggccgtggaacgatatgacacaat

SEQ ID NO: 544450 - DNA, 75 bp, synthetic construct
  source 1..75: mol_type = other DNA
acgtgcttatagatacctccatttttgccagtcacgataaggctcccggctggccttggaacgacatgacacaat

SEQ ID NO: 544451 - DNA, 75 bp, synthetic construct
  source 1..75: mol_type = other DNA
atgagcaacatcaacaaacaggcgctgcgtgaagcggcggagaaagcaacgtgtggtgtgtggtcgctcgaatat

SEQ ID NO: 544452 - DNA, 75 bp, synthetic construct
  source 1..75: mol_type = other DNA
gtgtgttcgttctctggtcacgcttgcgtaacccggatcagaccattgttaacctcgacagcagcggcactaacg

SEQ ID NO: 544453 - DNA, 75 bp, synthetic construct
  source 1..75: mol_type = other DNA
cggcatcgaggatgagcgtcagggcttcagcggttcccccaaaaaacgtattgccggtgcgcgggcctttgtcgg

SEQ ID NO: 544454 - DNA, 75 bp, synthetic construct
  source 1..75: mol_type = other DNA
tctgcttaagattatgctgaaaaagtcggacaacatgatcgccgatacggttttccgcatgataggccatgcgcg

SEQ ID NO: 544455 - DNA, 75 bp, synthetic construct
  source 1..75: mol_type = other DNA
gagcgtttccgacaggcatttccaaaaacagaagaagagatggaagacggtatctggttttttgatgagagctgt

SEQ ID NO: 544456 - DNA, 75 bp, synthetic construct
  source 1..75: mol_type = other DNA
atcaaaaaaaagaaattgagcgtttatatgaaaaatatactgagtcattagagtgttacctatctggtaaatgtg

SEQ ID NO: 544457 - DNA, 75 bp, synthetic construct
  source 1..75: mol_type = other DNA
ttatgcgctgggaaccgagacgttccgtctggattactacagcgccatgcaagtgctggacagacttaattcact

SEQ ID NO: 544458 - DNA, 75 bp, synthetic construct
  source 1..75: mol_type = other DNA
tctaccagcgttacgctgacaggttcgctgctggcgattgatgccccagtgattgccagcggcgcgaccacgcca

SEQ ID NO: 544459 - DNA, 75 bp, synthetic construct
  source 1..75: mol_type = other DNA
gatcgccagcggcgcgaccacgccaaataaccgcgtcgcggatgaccagggctttttacgccagtggagcaaggt

SEQ ID NO: 544460 - DNA, 75 bp, synthetic construct
  source 1..75: mol_type = other DNA
gtcgaaaccggagcatggaaagacgctgttgactgggtactcaaagaggcttgcaaggctgtaaacattggcatc

SEQ ID NO: 544461 - DNA, 75 bp, synthetic construct
  source 1..75: mol_type = other DNA
gataagctgtagtgagcgaatgcctgtaatcggcgagctaaattggagaactagttttcctttactggttacgtg

SEQ ID NO: 544462 - DNA, 75 bp, synthetic construct
  source 1..75: mol_type = other DNA
ttatgcgctgggaaccgagacgttccgcctggattactacagcgccatgcaagtgctggatagacttaaggcgct

SEQ ID NO: 544463 - DNA, 75 bp, synthetic construct
  source 1..75: mol_type = other DNA
atgcaacgttctaaagactccttagccaaatggttaagcgccatcctccccgtggccattgttgggctggtgggg

SEQ ID NO: 544464 - DNA, 75 bp, synthetic construct
  source 1..75: mol_type = other DNA
ggcgcgggcgtgaaaatcagcgttaccgacagcggtaagggaattgcggcagatcagcttgaagccatcttcacc

SEQ ID NO: 544465 - DNA, 75 bp, synthetic construct
  source 1..75: mol_type = other DNA
tcttctggtatcgccgctatctgcgctcgcgccagctgttgcaggatgaaatgaagcgcaaagagaagctggtgg

SEQ ID NO: 544466 - DNA, 75 bp, synthetic construct
  source 1..75: mol_type = other DNA
ggtacaattcaggtcgcaagccaggaggggaaaggcgcaacgttcactctatggtttccggtcaatattacgcgt

SEQ ID NO: 544467 - DNA, 75 bp, synthetic construct
  source 1..75: mol_type = other DNA
ccctgattaaccactcattacagttggtaagccaggatgcaaacagccgggaaattcagttgcgctttaccgcca

SEQ ID NO: 544468 - DNA, 75 bp, synthetic construct
  source 1..75: mol_type = other DNA
tgcccatgaaattcgcaatccgctttcctcaattaaagggctggcgaaatattttgccgaacgagcaccagaggg

SEQ ID NO: 544469 - DNA, 75 bp, synthetic construct
  source 1..75: mol_type = other DNA
tgcgtgagttagcaaaacaggcaacacagggcgaatgggtcgcattcatttcgccgggcactgatacatatgcgg

SEQ ID NO: 544470 - DNA, 75 bp, synthetic construct
  source 1..75: mol_type = other DNA
ttggattcatcaatggtcagaagtttaccacccgcaatgccatgccatgccatgccatgccatgccagacggttt

SEQ ID NO: 544471 - DNA, 75 bp, synthetic construct
  source 1..75: mol_type = other DNA
gcaaatattccttttcagaacggtatccttcccgttgatccttccgggcatggcaccgtcaatatgcgcgcctag

SEQ ID NO: 544472 - DNA, 75 bp, synthetic construct
  source 1..75: mol_type = other DNA
cctgtatgtcaccaagccatttctcggctcgatgaccattccgaaaacggatattgccgtcattaaaggcgcgtg

SEQ ID NO: 544473 - DNA, 75 bp, synthetic construct
  source 1..75: mol_type = other DNA
atgcatcgacgagtgaaagtgttgctctatggtcaggtagtaggtgaactctctcagaacgacagtggttttttg

SEQ ID NO: 544474 - DNA, 75 bp, synthetic construct
  source 1..75: mol_type = other DNA
aaagcggcggcaggtcccatcagtgctgcattcgaaccacttaagcctgtgtttcagtggattggcgacaaagta

SEQ ID NO: 544475 - DNA, 75 bp, synthetic construct
  source 1..75: mol_type = other DNA
cgctgtaaacgtctcatcttgtattactggattactgataccgccctcaaacgtgttaattgtgttttccctgac

SEQ ID NO: 544476 - DNA, 75 bp, synthetic construct
  source 1..75: mol_type = other DNA
tgccgtattttacgatgcatttgaatcattttttaatgaaaaactcgacgctgttagcggcttcggaacatcgag

SEQ ID NO: 544477 - DNA, 75 bp, synthetic construct
  source 1..75: mol_type = other DNA
gatatacctcaaaaggcagttcctgccgcggtagataagggcggtgctattgccgtattttacgatgcatttgaa

SEQ ID NO: 544478 - DNA, 75 bp, synthetic construct
  source 1..75: mol_type = other DNA
gctggtagcgccaatgaatcgcctgattgacagcatccgtcatattgcaggcggcgatctggtgaaaccgattga

SEQ ID NO: 544479 - DNA, 75 bp, synthetic construct
  source 1..75: mol_type = other DNA
aaatataggggcaaatccactaactggcaatacgcctgttcctgctctgcgggtaaggcagttaaacttgtcttt

SEQ ID NO: 544480 - DNA, 75 bp, synthetic construct
  source 1..75: mol_type = other DNA
catcaatgactacggcggacgtccggtgctgcagttctcctgtggtggtagccgctgtaccgcagtgaagaaata

SEQ ID NO: 544481 - DNA, 75 bp, synthetic construct
  source 1..75: mol_type = other DNA
aaataaaactgttttatcggcctgaatccattaaagcaaagcccaatgcggtatggcaggatcagttggtgctga

SEQ ID NO: 544482 - DNA, 75 bp, synthetic construct
  source 1..75: mol_type = other DNA
actcaggtcctgttgaatctctatctcaatgctattcaggcgattggtcagcatggcgtgattagcgtgacggtc

SEQ ID NO: 544483 - DNA, 75 bp, synthetic construct
  source 1..75: mol_type = other DNA
tcgacgcagccgaagaagcgaaatcaccggttattatttcttttggcacaggttttgtcggcaacttattatcac

SEQ ID NO: 544484 - DNA, 75 bp, synthetic construct
  source 1..75: mol_type = other DNA
tcgtggattgaactttgcgactgggtgcccgccctgctcagtggcaccacgcgcccgcaggatattcgccgcgga

SEQ ID NO: 544485 - DNA, 75 bp, synthetic construct
  source 1..75: mol_type = other DNA
cggtcaggttgatggcagcgtggtgcctggatttatcggtctggaagcaggccaatcggcgtttggtgatatcta

SEQ ID NO: 544486 - DNA, 75 bp, synthetic construct
  source 1..75: mol_type = other DNA
agttgataatggaaatgttaaaatatagagcagacattgatgggcttcgcgctatcgcagttctactggttgttt

SEQ ID NO: 544487 - DNA, 75 bp, synthetic construct
  source 1..75: mol_type = other DNA
ccagcgattttgccagtaacccggaaccacgttgcccctgcattctgctgctggatgtttctggctcgatgagtg

SEQ ID NO: 544488 - DNA, 75 bp, synthetic construct
  source 1..75: mol_type = other DNA
tgatgcaataaatgaagcaacaattatttctcgtctgggccatcgcacagcattaatgagtcgtattggtaaaga

SEQ ID NO: 544489 - DNA, 75 bp, synthetic construct
  source 1..75: mol_type = other DNA
attgaattagaagaaacagttaaaggtttgattagcaattccaaccctaatagctttcggatcgcttcagatctc

SEQ ID NO: 544490 - DNA, 75 bp, synthetic construct
  source 1..75: mol_type = other DNA
atgattacagtaattgagcatgaagagaacactcgtcgtatatggccgataagagcaggaaagttaacatggctg

SEQ ID NO: 544491 - DNA, 75 bp, synthetic construct
  source 1..75: mol_type = other DNA
caaaaaaatgatgatatattatatggtgtaagaactgatatatccggtgcgggattttatgagggggaagtaaca

SEQ ID NO: 544492 - DNA, 75 bp, synthetic construct
  source 1..75: mol_type = other DNA
attatggaaagatcacaccgcggtcgaagaagcggaagagatcacccgcctgtgtcacgcgccgggcaacgttga

SEQ ID NO: 544493 - DNA, 75 bp, synthetic construct
  source 1..75: mol_type = other DNA
ttggacccgctcctcaatcgacatttgccctccccgctgtttactgacacctggactgccgatattccagttggc

SEQ ID NO: 544494 - DNA, 75 bp, synthetic construct
  source 1..75: mol_type = other DNA
atccccgttggcaaaaagggcaattttgtgatgccccgaataaccagttccgtcatcatccgcgtgactacattg

SEQ ID NO: 544495 - DNA, 75 bp, synthetic construct
  source 1..75: mol_type = other DNA
attcaggaaattaaaatcatggaaagtagcttatactgcattatatgcaacgccacttgcggtggtttttatttt

SEQ ID NO: 544496 - DNA, 75 bp, synthetic construct
  source 1..75: mol_type = other DNA
agtctcattttgaccgcttccgtccgcaggtgcgcgatcgttggcgtgaacagggcggcccaggcagcggtatct

SEQ ID NO: 544497 - DNA, 75 bp, synthetic construct
  source 1..75: mol_type = other DNA
ctacccacagcggcgggtcattttacacggcactatgttggcggcagcagagtcggcacgctatatcgttcatgg

SEQ ID NO: 544498 - DNA, 75 bp, synthetic construct
  source 1..75: mol_type = other DNA
gggactggggagtttttccaatggcaatgctgaaggcggcttaactacgcaggaagaaaaatccctcggtgctta

SEQ ID NO: 544499 - DNA, 75 bp, synthetic construct
  source 1..75: mol_type = other DNA
acgcatctggctttgcaggcggtggatctcaacacgctgattaaccactcattacagctggtaagccaggatgca

SEQ ID NO: 544500 - DNA, 75 bp, synthetic construct
  source 1..75: mol_type = other DNA
tcaaatcgattattgataaattaagcctggcaggcaaaagcggcgaaggtttgtattttatcgacaaagaactct

SEQ ID NO: 544501 - DNA, 75 bp, synthetic construct
  source 1..75: mol_type = other DNA
cagttacggcccggagcgcagtcgaccgattatttccacgccatcttgtcctatccgcagcggcgagtcatttta

SEQ ID NO: 544502 - DNA, 75 bp, synthetic construct
  source 1..75: mol_type = other DNA
accagcggcggtgactatttcatggttgatgcggacggcctcgccgtccgtgtggaaatcgtcaatggagtaaaa

SEQ ID NO: 544503 - DNA, 75 bp, synthetic construct
  source 1..75: mol_type = other DNA
tttgatgccagatgaacttatatcattctctaaaagtgcggtatacgctcttcttggcataagcaatttctattt

SEQ ID NO: 544504 - DNA, 75 bp, synthetic construct
  source 1..75: mol_type = other DNA
gctgaatacaggggtatcgatcttacggccttaaatgcgacggcgctcatacttatcgcattcatcatggcaagc

SEQ ID NO: 544505 - DNA, 75 bp, synthetic construct
  source 1..75: mol_type = other DNA
caacgtaggtggtgtactgattatttcgctggggtgcgagaatttcgatcgccgtcggctggagcaagaagtacg

SEQ ID NO: 544506 - DNA, 75 bp, synthetic construct
  source 1..75: mol_type = other DNA
cgtagtctgatatttttgcttggtctggaacgtttttctttactgtcaaaatcgctggcgatggatagcgagaac

SEQ ID NO: 544507 - DNA, 75 bp, synthetic construct
  source 1..75: mol_type = other DNA
aaatcgcacccaggcggcaatgatgttaaatatctcctcctgaagaggataattttacagccagcaggaagttag

SEQ ID NO: 544508 - DNA, 75 bp, synthetic construct
  source 1..75: mol_type = other DNA
ccagttttggcattacctgaacgaacaggatgaaacgcccggatttgccgatgacataacctgggattttatcag

SEQ ID NO: 544509 - DNA, 75 bp, synthetic construct
  source 1..75: mol_type = other DNA
gctgtcagtagtgagcgtcagacaggaatgcagatggtgcaatctgtgcttgagcgcatcaaggaggcgaaatga

SEQ ID NO: 544510 - DNA, 75 bp, synthetic construct
  source 1..75: mol_type = other DNA
gttcgaagaactgatggattcctaccggcgcgaggcaatggcaattatcgcccgctgggatctggctgatcagct

SEQ ID NO: 544511 - DNA, 75 bp, synthetic construct
  source 1..75: mol_type = other DNA
ctatatgaccgacaagttgaactgattgagagtatccggcttcatcaactggcctcaactttcgacgttgtaaca

SEQ ID NO: 544512 - DNA, 75 bp, synthetic construct
  source 1..75: mol_type = other DNA
accgcttgacgcaacgcattcgtcagttgggactgacgttgccggtaatcggagtaactgctaatgcgttggctg

SEQ ID NO: 544513 - DNA, 75 bp, synthetic construct
  source 1..75: mol_type = other DNA
atgctgcccttgccggggtggacagcacgattattgaagtgatgggactctgtgcgcagttcacctcgggggcac

SEQ ID NO: 544514 - DNA, 75 bp, synthetic construct
  source 1..75: mol_type = other DNA
attattgaagtgatgggactctgtgcgcagttcacctcgggggcacagtgtggcagcgaagttcagggggttttt

SEQ ID NO: 544515 - DNA, 75 bp, synthetic construct
  source 1..75: mol_type = other DNA
tgtagtgagcgaatgccagaaatgggagagcgacaatgctatgtgttagctgctgactttaaaaacaactaccca

SEQ ID NO: 544516 - DNA, 75 bp, synthetic construct
  source 1..75: mol_type = other DNA
gcggcaagggcaccagttgaagtcgtgagagcgatggcagcagagctacagaagcggcgcgaagctgatagtgca

SEQ ID NO: 544517 - DNA, 75 bp, synthetic construct
  source 1..75: mol_type = other DNA
aagttctttctaacattcgttcattgagagcgtttgcgcgtgaagttgattttgagttacttaaggatatggctc

SEQ ID NO: 544518 - DNA, 75 bp, synthetic construct
  source 1..75: mol_type = other DNA
aacgaagccgtcaatcgcgaacgccaggcaggaatgcagatggtgcaatctgtgcttgagcgtatcggggaggct

SEQ ID NO: 544519 - DNA, 75 bp, synthetic construct
  source 1..75: mol_type = other DNA
cgctctgcacatggaaatctcagatcagcaacagattcgaccagaagctattccagtcagtacaccctgagttat

SEQ ID NO: 544520 - DNA, 75 bp, synthetic construct
  source 1..75: mol_type = other DNA
aaccgaacctgataaaacctgagttaaggccattcaagccgttgccaatcccatctcatgataaaccgggagaat

SEQ ID NO: 544521 - DNA, 75 bp, synthetic construct
  source 1..75: mol_type = other DNA
acgagaaacgcaggcggatgtgcctgcgtttgaaccgctgtttgctgactctgattgttccgcaatgagtaacac

SEQ ID NO: 544522 - DNA, 75 bp, synthetic construct
  source 1..75: mol_type = other DNA
ttggtatgcaacttaacggattggcaaaatcatggcagagaaaaaaagaacccgctggcagcggcggccaggcac

SEQ ID NO: 544523 - DNA, 75 bp, synthetic construct
  source 1..75: mol_type = other DNA
ggagtatggcaaagcccggtgccggaggaattgtaccgacgcttaattccacaagcgccaatgattggtcactaa

SEQ ID NO: 544524 - DNA, 75 bp, synthetic construct
  source 1..75: mol_type = other DNA
gcgattcactattttatgttgtcgccctacagcgtggtgatggacgtaaaaatgctcgatttctttcgtcatatg

SEQ ID NO: 544525 - DNA, 75 bp, synthetic construct
  source 1..75: mol_type = other DNA
cccggttatcccgtatcctcaatggacatgcaccagtgacggctgatatggcgctgcgtctggcggcgctgctga

SEQ ID NO: 544526 - DNA, 75 bp, synthetic construct
  source 1..75: mol_type = other DNA
atggttgcaggtggtatccgtctggaagactccctgccgtccttgtttgtcagaacggcatcggtttccctgctg

SEQ ID NO: 544527 - DNA, 75 bp, synthetic construct
  source 1..75: mol_type = other DNA
cgttgtctggctggttaatgacgctactggttctggggattatgtttgcggtgattggttacgcaatgtatgcgg

SEQ ID NO: 544528 - DNA, 75 bp, synthetic construct
  source 1..75: mol_type = other DNA
accagatcgaacttcacccgctgatgcaacaacgccagctacatgcctggaacgcgacacacaaaatccagaccg

SEQ ID NO: 544529 - DNA, 75 bp, synthetic construct
  source 1..75: mol_type = other DNA
ttggtcaacggttaaatcgtaaaggctggattggcctggtgctgctgttggctggaatgatcatggtgaaacttg

SEQ ID NO: 544530 - DNA, 75 bp, synthetic construct
  source 1..75: mol_type = other DNA
ccgcctggctggcactggcaatcgtgctggaaatcattgctaacgtctttttgaaatattctgacggctttcgcc

SEQ ID NO: 544531 - DNA, 75 bp, synthetic construct
  source 1..75: mol_type = other DNA
atgcctggaacgcgacacacaaaatccagaccgaatcctggagcccattagcgcaaggagggaaaggcgttttcg

SEQ ID NO: 544532 - DNA, 75 bp, synthetic construct
  source 1..75: mol_type = other DNA
aatcaaaagcatcggcgtgtgcaacttccagatccatcacctgcaacgcctgattgatgaaactggcgtgacgcc

SEQ ID NO: 544533 - DNA, 75 bp, synthetic construct
  source 1..75: mol_type = other DNA
cctgaaaaaactccagcttgattatatagacctttacttaatgcactggcccgttcccgctatcgatcactatgt

SEQ ID NO: 544534 - DNA, 75 bp, synthetic construct
  source 1..75: mol_type = other DNA
tcactggctggaaacgaaaggttcagggtgaagtagcccttcagccattcgagcaagaattgctggagttgctcg

SEQ ID NO: 544535 - DNA, 75 bp, synthetic construct
  source 1..75: mol_type = other DNA
tgcagccattactgcagaacgtaactggctgatttcaaaacagtatcagggccaatggtcacctgctgagcgtgc

SEQ ID NO: 544536 - DNA, 75 bp, synthetic construct
  source 1..75: mol_type = other DNA
aggaaaaaggcgtttctccggaccgtaatgccttacattaccagccaaaatgcagccattactgcagaacgtaac

SEQ ID NO: 544537 - DNA, 75 bp, synthetic construct
  source 1..75: mol_type = other DNA
ttgatgttattggctgcattatcgattacgaggagccagaaaacgaaagatgtacaggcattgatcgcggtggtt

SEQ ID NO: 544538 - DNA, 75 bp, synthetic construct
  source 1..75: mol_type = other DNA
tcaggaagtggtttatatcgataacaacgttccccagtgttcgtctctggagcatgaaagtccgcccgatacctt

SEQ ID NO: 544539 - DNA, 75 bp, synthetic construct
  source 1..75: mol_type = other DNA
ataatggaatcatttacgatatcctgcccttaccggagatgaatatttcgatcatcacctgggcttcaacgaaaa

SEQ ID NO: 544540 - DNA, 75 bp, synthetic construct
  source 1..75: mol_type = other DNA
gtcttgtggaacactggcctgagttattcaaccgggaaaaacccaaccgcttaaagttgagatacctgacgacct

SEQ ID NO: 544541 - DNA, 75 bp, synthetic construct
  source 1..75: mol_type = other DNA
tattaagaggcgggattgctgccattatgtggtttggcctgcaatgttacgccggatcgctggcctgcttgatcc

SEQ ID NO: 544542 - DNA, 75 bp, synthetic construct
  source 1..75: mol_type = other DNA
acgcggtggttgcggtctgggcggcaccggcggtgagcgcatccgactttacgcaaaacgcccactcgtttcgtg

SEQ ID NO: 544543 - DNA, 75 bp, synthetic construct
  source 1..75: mol_type = other DNA
gcggggtcactggcctgcttgattctgattggcaaaatctggccgggatttttgactctcggtggcgatttcacg

SEQ ID NO: 544544 - DNA, 75 bp, synthetic construct
  source 1..75: mol_type = other DNA
gcgttttcagtaactctggtggccgttattttatctcttggcggtaagtttattccctttatggaaccgttatca

SEQ ID NO: 544545 - DNA, 75 bp, synthetic construct
  source 1..75: mol_type = other DNA
atggcgatttgggcgatttcgctggtcgggatcggtccaatctttgactacattccgggcggtattcagaaagca

SEQ ID NO: 544546 - DNA, 75 bp, synthetic construct
  source 1..75: mol_type = other DNA
ggcgcattattttgtggtgatgcgtgggcaaattaatcttgatgaactgtacaccgcacctggcgattataaata

SEQ ID NO: 544547 - DNA, 75 bp, synthetic construct
  source 1..75: mol_type = other DNA
tcatcatggcggtagcactggcgctcggcatcggcaccatgattggctggcgtcgtgtagcgatgaccatcggtg

SEQ ID NO: 544548 - DNA, 75 bp, synthetic construct
  source 1..75: mol_type = other DNA
ggcgttaggtatcggtacgatgattggctggcgtcgtgtggcaacgactatcggtgagaaaatcggtaagaaagg

SEQ ID NO: 544549 - DNA, 75 bp, synthetic construct
  source 1..75: mol_type = other DNA
agtggtggatgcactcaatatcccgaaagtattaagtattttcggttctctgatcgtttcccctattgtcggcct

SEQ ID NO: 544550 - DNA, 75 bp, synthetic construct
  source 1..75: mol_type = other DNA
cacaaaacattagagttatggcgtatcgaatctttgtttcatataaaaatggcgctaagagccactctctgaaca

SEQ ID NO: 544551 - DNA, 75 bp, synthetic construct
  source 1..75: mol_type = other DNA
gccggacggctcaaggggaattatttgcttaccccctgccgtactggagggaacagtagccatcgcgtttcgtaa

SEQ ID NO: 544552 - DNA, 75 bp, synthetic construct
  source 1..75: mol_type = other DNA
cggtatgggagatgcattgtcaacctggtttgaggcgagagccaatcaggcgtcaggaaaagccacaatggcagg

SEQ ID NO: 544553 - DNA, 75 bp, synthetic construct
  source 1..75: mol_type = other DNA
ttacctgaaaaaatcaggaaacagttggctgatgctcttcgagtgcgactttctgaccaattttctgaaatgtac

SEQ ID NO: 544554 - DNA, 75 bp, synthetic construct
  source 1..75: mol_type = other DNA
taaaacggtaaccagcatcctgatggcgtgggtgtttaccttaccggcggcgatttttctgtctggtagtttgta

SEQ ID NO: 544555 - DNA, 75 bp, synthetic construct
  source 1..75: mol_type = other DNA
cagcatcctgaattgccgcagaaattgattacgatggaacccccgctgcctgcgactcagacggatggcacacaa

SEQ ID NO: 544556 - DNA, 75 bp, synthetic construct
  source 1..75: mol_type = other DNA
ggttctttggtttaccggcctccagttcgcacaccttgattggtgcgattatcggcatcggtttaaccaacgcgc

SEQ ID NO: 544557 - DNA, 75 bp, synthetic construct
  source 1..75: mol_type = other DNA
cctataccgatgctaactacctcggtggtggtgacgtagatcaagactggtccgcgaacgtgggtgttaaatata

SEQ ID NO: 544558 - DNA, 75 bp, synthetic construct
  source 1..75: mol_type = other DNA
tggttgatggtggcgggttacagcgtaaaaccgtcaccagtattctgatggcgtgggtgtttaccttaccggcgg

SEQ ID NO: 544559 - DNA, 75 bp, synthetic construct
  source 1..75: mol_type = other DNA
tatgacgtatgctcaagggatggctgcgcagatgaccgctgcggtgtctatcggtcttgccagctatattgggat

SEQ ID NO: 544560 - DNA, 75 bp, synthetic construct
  source 1..75: mol_type = other DNA
gtgcaactggtcccgcgtctgtggggcaatgaacccggcgtcctggccggtcgcttgtgtaaccattcggtgacg

SEQ ID NO: 544561 - DNA, 75 bp, synthetic construct
  source 1..75: mol_type = other DNA
accggacggcgtggaaaatacgctgctgtttgtgggcaatgcacaaaacaacaaaggtaaggttctgccggttaa

SEQ ID NO: 544562 - DNA, 75 bp, synthetic construct
  source 1..75: mol_type = other DNA
aaccctgcgcgttgcggataaagctgcccgccgtgttcgtctgctggctatcagcaaaatcgcggatcgctcgct

SEQ ID NO: 544563 - DNA, 75 bp, synthetic construct
  source 1..75: mol_type = other DNA
cggcaataaacccgttgataaagacggtaacgagctggggctggataccctgcaggcactcagtaaggcgcgatt

SEQ ID NO: 544564 - DNA, 75 bp, synthetic construct
  source 1..75: mol_type = other DNA
gaccagtacggaactctggcgtaatgccatcctgaaagcacaggaaaccatctctgcggaaggcattgttctgac

SEQ ID NO: 544565 - DNA, 75 bp, synthetic construct
  source 1..75: mol_type = other DNA
gtggtgcgtacgtatgaagtaccgctgcagatcaccatcagtctgttactggatgcaagtctggaggccagcgca

SEQ ID NO: 544566 - DNA, 75 bp, synthetic construct
  source 1..75: mol_type = other DNA
aggtgacgctcatccgtaacggccaggacttcaccgtcaataacccgacgccgtactacgtgatcatcagcaacg

SEQ ID NO: 544567 - DNA, 75 bp, synthetic construct
  source 1..75: mol_type = other DNA
acatatcagccgcattatacatacaacatcaacatccccgtgcgtcataacgatcccgggagcatcgataatatt

SEQ ID NO: 544568 - DNA, 75 bp, synthetic construct
  source 1..75: mol_type = other DNA
atatatccctttgcggagcggattacggaatgctggcggtctattacgcataacagcggttcggtgcaccgttgt

SEQ ID NO: 544569 - DNA, 75 bp, synthetic construct
  source 1..75: mol_type = other DNA
aaagcgatgttctggcggcactggcaaacgccggtcagaactggtgggcatttattcatgtgctgcccgcagatg

SEQ ID NO: 544570 - DNA, 75 bp, synthetic construct
  source 1..75: mol_type = other DNA
gctgataatgcactatatgaagcgaaagaaaccggacgtaataagatagttgtaaaagaagcagaaattgttatc

SEQ ID NO: 544571 - DNA, 75 bp, synthetic construct
  source 1..75: mol_type = other DNA
gcgtgagatcccgccgaaatcgaacaaacccaacacgttacagattgcgctgcaaacgcgcatcaagctgttctg

SEQ ID NO: 544572 - DNA, 75 bp, synthetic construct
  source 1..75: mol_type = other DNA
gacatttgctgatgcggtgaaggctgcacaggcggtctgctcggttgaaggtgtgttgctctgtgatgatattgc

SEQ ID NO: 544573 - DNA, 75 bp, synthetic construct
  source 1..75: mol_type = other DNA
tacttcgtggttatcagtaacgctagtgcacaaaaaaatggcaatccggcagcgggattttcccccatggtgata

SEQ ID NO: 544574 - DNA, 75 bp, synthetic construct
  source 1..75: mol_type = other DNA
atctggctcaaagctggattgaagatgaaaagggtaacaagatcagttcaccgttaactgtgctgccgccggtgc

SEQ ID NO: 544575 - DNA, 75 bp, synthetic construct
  source 1..75: mol_type = other DNA
gctgacctacgttaacgacttcggggcgcggatgccgctgtatttcaaatgtggcggcgatacctgccaggtaga

SEQ ID NO: 544576 - DNA, 75 bp, synthetic construct
  source 1..75: mol_type = other DNA
taattgtgaaatcatatgccccactcctgatgttgtggcgttattcgagaataaaatgatgccaatttataataa

SEQ ID NO: 544577 - DNA, 75 bp, synthetic construct
  source 1..75: mol_type = other DNA
gattgttattgaaggtaacacggttcgctggtcaaacctgtatcagggattaggttcatatatttatacattctg

SEQ ID NO: 544578 - DNA, 75 bp, synthetic construct
  source 1..75: mol_type = other DNA
gaacggccgcaacgacgctggcgttactgataactgccgccagcctgtcagcacaggcctctgtcacgccggacc

SEQ ID NO: 544579 - DNA, 75 bp, synthetic construct
  source 1..75: mol_type = other DNA
atgatgaacagcactaataaactaagtgttattatcccgttatataatgcgggcgatgatttcagcgcttgcatg

SEQ ID NO: 544580 - DNA, 75 bp, synthetic construct
  source 1..75: mol_type = other DNA
attgttaaaaataacattaaatttattgccggattacatcatcaggatattgtctggacaacagaattcatgttt

SEQ ID NO: 544581 - DNA, 75 bp, synthetic construct
  source 1..75: mol_type = other DNA
gactggctgcggatggggctttcttcccgccgttggactcacgttgtctggatgggggtttatcgccgcgatgtt

SEQ ID NO: 544582 - DNA, 75 bp, synthetic construct
  source 1..75: mol_type = other DNA
ggcagcaacggtaagtttttctacccaggcgtcagtaacgcccgatcgtactcgcctgatttttaatgaaagcga

SEQ ID NO: 544583 - DNA, 75 bp, synthetic construct
  source 1..75: mol_type = other DNA
catgcggtgcgcaaagagccggatattattacccgccagcggatgattgccgagatatttacttccggcatgtat

SEQ ID NO: 544584 - DNA, 75 bp, synthetic construct
  source 1..75: mol_type = other DNA
attataaaaaataacattaaatttattgtcggactgcatcatcaggatattgtctggacaacagagtttatgttt

SEQ ID NO: 544585 - DNA, 75 bp, synthetic construct
  source 1..75: mol_type = other DNA
ccgtattacgtgatcctcagcaacgccagtacccagaaaaatggtaatccggcagccggatttacgccgctggta

SEQ ID NO: 544586 - DNA, 75 bp, synthetic construct
  source 1..75: mol_type = other DNA
ataaaggaatttgacgctcagggcgtggcagtccggttcattgatgacgggatcagtaccgacggtgatatgggg

SEQ ID NO: 544587 - DNA, 75 bp, synthetic construct
  source 1..75: mol_type = other DNA
ccgcatggtggcgctcaacctgcgccagcacatcagcgatcctgcccgttaccacgtggtgatggatgaacttaa

SEQ ID NO: 544588 - DNA, 75 bp, synthetic construct
  source 1..75: mol_type = other DNA
cgccaggctgccgtggttcgccgcgacactgccgatatgatccaactgataaaggaatttgacgctcagggcgtg

SEQ ID NO: 544589 - DNA, 75 bp, synthetic construct
  source 1..75: mol_type = other DNA
gatgaacactgacaatatgtcaattctcggattgacgctcgattacggaccgtttggttttcttgatgattacga

SEQ ID NO: 544590 - DNA, 75 bp, synthetic construct
  source 1..75: mol_type = other DNA
caatccggcgctggtattgcgcaactggctggcacaacgagccattgaggcggcggaacagggcgatatgacgga

SEQ ID NO: 544591 - DNA, 75 bp, synthetic construct
  source 1..75: mol_type = other DNA
cgtttggttttcttgatgattacgaacccggttttatttgtaatcactcggatcatcaagggcgttacagctttg

SEQ ID NO: 544592 - DNA, 75 bp, synthetic construct
  source 1..75: mol_type = other DNA
aaaaccgcgcctgacggtgaacacggtgttaatttagtccaccaggaagatgttattggcgctatcaccctgttg

SEQ ID NO: 544593 - DNA, 75 bp, synthetic construct
  source 1..75: mol_type = other DNA
agtgaaagcgatgctcgacgacgcggatgtcttcctgttgccatcggtaacgggcgcggatggcgatatggaagg

SEQ ID NO: 544594 - DNA, 75 bp, synthetic construct
  source 1..75: mol_type = other DNA
cgggagcggttcttcgtgattatctgggcggcacaagtattgtgcaggcagcttctgcgctgaacatttcccgct

SEQ ID NO: 544595 - DNA, 75 bp, synthetic construct
  source 1..75: mol_type = other DNA
gccagagatggcaattgatatccgtcatttactggacggcagcctgcaagcgatggttgcggataccttaggcca

SEQ ID NO: 544596 - DNA, 75 bp, synthetic construct
  source 1..75: mol_type = other DNA
ccaactgataaaagagtttgatgctcagggtgtagcggttcggtttattgacgacgggatcagtaccgacggtga

SEQ ID NO: 544597 - DNA, 75 bp, synthetic construct
  source 1..75: mol_type = other DNA
aagccgctgtttatgattggtcacagcgtcggcccgttccaggatgagcaatttaaccaactggcgaactacgtt

SEQ ID NO: 544598 - DNA, 75 bp, synthetic construct
  source 1..75: mol_type = other DNA
agcgtcagcaactgatgcaaagcgttaaccccgctctggtattgcgcaactggcgattgaagcggcagaaaaggg

SEQ ID NO: 544599 - DNA, 75 bp, synthetic construct
  source 1..75: mol_type = other DNA
tgcaaacacgcatcaaactgttctggcgccctaaagcgctggaaagcaccagtatgaaagatccatggcaataca

SEQ ID NO: 544600 - DNA, 75 bp, synthetic construct
  source 1..75: mol_type = other DNA
cgcaataacgatccgaaattgccctatctggcgcaaagctggatcgaggacgcaaagggtaacaaaatcagttca

SEQ ID NO: 544601 - DNA, 75 bp, synthetic construct
  source 1..75: mol_type = other DNA
attatctggcgaaagaagaacaaaaagacgggctgtgcgtctacggctgtagtgaagttcctgagcgtcctgctg

SEQ ID NO: 544602 - DNA, 75 bp, synthetic construct
  source 1..75: mol_type = other DNA
tgcaaacgcgtatcaaattgttctggcgaccaaaggcactggcaaaaattgacatgagggagccgtggcagcaca

SEQ ID NO: 544603 - DNA, 75 bp, synthetic construct
  source 1..75: mol_type = other DNA
tcaggtaaaagtccagggaatgccggatatcagcaagttacctgccgatcgtgagagcatgttctactttaacgt

SEQ ID NO: 544604 - DNA, 75 bp, synthetic construct
  source 1..75: mol_type = other DNA
ggtgcgcggatgccgctgttcttcaaatgtaatggtaatagctgccaggtggacgaagagcagagccgtaaaggc

SEQ ID NO: 544605 - DNA, 75 bp, synthetic construct
  source 1..75: mol_type = other DNA
gtggtcaccatcctgtcggctgtggcacaggctgaacgccggaggatcctagaacgcacgaatgagggccgacag

SEQ ID NO: 544606 - DNA, 75 bp, synthetic construct
  source 1..75: mol_type = other DNA
atggggcaaatggtggtcaccatcctgtcggctgtggcacaggctgaacgccggaggatcctagaacgcacgaat

SEQ ID NO: 544607 - DNA, 75 bp, synthetic construct
  source 1..75: mol_type = other DNA
gataaaggaatttgacgctcagggcgtggcagtccggttcattgatgacgggatcagtaccgacggtgatatggg

SEQ ID NO: 544608 - DNA, 75 bp, synthetic construct
  source 1..75: mol_type = other DNA
ggccaaaaaggtcgatcctgagcatccctggcaacatcaggtcactctgagtcgccagggagatcattacctggt

SEQ ID NO: 544609 - DNA, 75 bp, synthetic construct
  source 1..75: mol_type = other DNA
ggctggtcgatcaccacaccgaagacttcaccgccagctatgccgttcaacactggctggacgttgccgcacaac

SEQ ID NO: 544610 - DNA, 75 bp, synthetic construct
  source 1..75: mol_type = other DNA
cagaagggcactggtgcaacggaaattgctcatcagctcagtattgcccgctccacggtttataaaattcttgaa

SEQ ID NO: 544611 - DNA, 75 bp, synthetic construct
  source 1..75: mol_type = other DNA
tataaaggtcgctggggtaactttgacctctggttatataacgactggtttattgacccacttgataatgtcgag

SEQ ID NO: 544612 - DNA, 75 bp, synthetic construct
  source 1..75: mol_type = other DNA
tagtcggtatagtaatgttaaccggatgtgggccagaagagttaactccagaacagaaacaggaagtagcggctc

SEQ ID NO: 544613 - DNA, 75 bp, synthetic construct
  source 1..75: mol_type = other DNA
cagggatcgtttgcctgcattaccgtaggcttgatagttggggcgctggcggaacgaatccgtttctcagctgtg

SEQ ID NO: 544614 - DNA, 75 bp, synthetic construct
  source 1..75: mol_type = other DNA
cgccggcgatatcggccaggcagggctcggcggtggtgtcagttctgccgccaaaacactctccgattactacat

SEQ ID NO: 544615 - DNA, 75 bp, synthetic construct
  source 1..75: mol_type = other DNA
gcagacacaaatcgaagccgggaagaattttgactctctcagtgctgaaccgctgccaggggcactcgcctcaca

SEQ ID NO: 544616 - DNA, 75 bp, synthetic construct
  source 1..75: mol_type = other DNA
tgtatcatggatccggcgtttaattacggccagatggcctatgccccgaaaatgtgggatcagcaggatccggca

SEQ ID NO: 544617 - DNA, 75 bp, synthetic construct
  source 1..75: mol_type = other DNA
ctggcatttgtgaatactgtggtcgcaacggcggcggcaattcttggctggatcttcggtgaatgggcgctgcgt

SEQ ID NO: 544618 - DNA, 75 bp, synthetic construct
  source 1..75: mol_type = other DNA
cgctctcttacattccgattgcacacatggtctggggcggagggttgctggcttctcacggcgctctggattttg

SEQ ID NO: 544619 - DNA, 75 bp, synthetic construct
  source 1..75: mol_type = other DNA
ttatgaatacctccgcgattgtgctggcatggccaatgctttctatcatcgtagataaagctatgccccgagcac

SEQ ID NO: 544620 - DNA, 75 bp, synthetic construct
  source 1..75: mol_type = other DNA
tatggtctggggcggcggtttgctggcttctcacggtgcactggatttcgcgggtggcacggtggtgcacattaa

SEQ ID NO: 544621 - DNA, 75 bp, synthetic construct
  source 1..75: mol_type = other DNA
ttgacagttggcctgcgtgtaccagaagagcaggagcgcgaaggactggacgttaacagtcacggcgaaaatgct

SEQ ID NO: 544622 - DNA, 75 bp, synthetic construct
  source 1..75: mol_type = other DNA
ctgacggttggcctacgcgtaccggaagagcaggagcgcgaaggactggacgtcaacagtcacggcgaaaatgcc

SEQ ID NO: 544623 - DNA, 75 bp, synthetic construct
  source 1..75: mol_type = other DNA
gagagaaaaagcggggttaacaaagtctgcgctggccgaacgaatgggattacgcccgtcagccatcagccggct

SEQ ID NO: 544624 - DNA, 75 bp, synthetic construct
  source 1..75: mol_type = other DNA
atggtggcaaagctgcgtggcaacggtaacctacatttactcgacgctgaatcgctacgatcccacctcttttgc

SEQ ID NO: 544625 - DNA, 75 bp, synthetic construct
  source 1..75: mol_type = other DNA
ctgcgtggcaacggtaacctacatttactcgacgctgaatcgctacgatcccacctcttttgctgattctcaggc

SEQ ID NO: 544626 - DNA, 75 bp, synthetic construct
  source 1..75: mol_type = other DNA
atgccctggctggacaatattgtcgaattgctgtttgtgctggcaccgattttcctgttgggcgcatggattgcc

SEQ ID NO: 544627 - DNA, 75 bp, synthetic construct
  source 1..75: mol_type = other DNA
gcctgatgaacagctacgttaacgcgctgggtctgaaaaatacccacttccagactgtacatggtctggacgctg

SEQ ID NO: 544628 - DNA, 75 bp, synthetic construct
  source 1..75: mol_type = other DNA
cgccctgggcctgaaaaatacccacttccagacggtacatggtctggatgctgatggtcagtacagctccgcgcg

SEQ ID NO: 544629 - DNA, 75 bp, synthetic construct
  source 1..75: mol_type = other DNA
gttgtgttgcaagaaatcccggaaggtaacttcttcggcaaaatcattgattacattaaattaatgtttcatcac

SEQ ID NO: 544630 - DNA, 75 bp, synthetic construct
  source 1..75: mol_type = other DNA
cgcttaacgctgtggtgtatcgttgttggcctctatccaaccttgctgatgacgttaatcggcgtgctgtggttt

SEQ ID NO: 544631 - DNA, 75 bp, synthetic construct
  source 1..75: mol_type = other DNA
atggaaagttacgagccgttaagcgtgagtcagcgcagccagctgcgccgcattatgctgtgcatctctgatacc

SEQ ID NO: 544632 - DNA, 75 bp, synthetic construct
  source 1..75: mol_type = other DNA
acacggcgaatgcggtggcaaccgttatttatactcgtgccatgcaaccacagcttgccgtggtgatggcggcat

SEQ ID NO: 544633 - DNA, 75 bp, synthetic construct
  source 1..75: mol_type = other DNA
acactgctgatgaccttaattggcgtgctgtggtttcccagtcgggctatcagccagatgcatcaagcccttaat

SEQ ID NO: 544634 - DNA, 75 bp, synthetic construct
  source 1..75: mol_type = other DNA
tcttatatcggcacacagatggtggtcaccttcgcgctcgccacgctcgaaaacgtttttggcccggtgtacgac

SEQ ID NO: 544635 - DNA, 75 bp, synthetic construct
  source 1..75: mol_type = other DNA
atttactcgacgctgaatcgctacgatcccacctcttttgctgattctcaggcaatcattgaatttcggcaaaaa

SEQ ID NO: 544636 - DNA, 75 bp, synthetic construct
  source 1..75: mol_type = other DNA
gctggtgacgctgcgtattattcagggattgggtgcaggtgcggaaatttccggtgccggtacgatgctggcgga

SEQ ID NO: 544637 - DNA, 75 bp, synthetic construct
  source 1..75: mol_type = other DNA
taccatcaccatgatggggatctgtaccaccttaattggtgtgttaccgacctatgcacagattggtgtttttgc

SEQ ID NO: 544638 - DNA, 75 bp, synthetic construct
  source 1..75: mol_type = other DNA
tgagcaaagctgggcacttaaagagatagcttcattcgcagcgatacgtgatagagcgtgccactcaattaaact

SEQ ID NO: 544639 - DNA, 75 bp, synthetic construct
  source 1..75: mol_type = other DNA
gaaaggacttcgctatgacgatgcatacaatatgaaccgccccgggtttcctggagagtgttttatctgtgaact

SEQ ID NO: 544640 - DNA, 75 bp, synthetic construct
  source 1..75: mol_type = other DNA
tttctggttggcaacgggcttacgttttgggcaggcgggtaactctggcttaattcagactttcctcgcaggtta

SEQ ID NO: 544641 - DNA, 75 bp, synthetic construct
  source 1..75: mol_type = other DNA
gcactaaggatttggtgaaggctgccgtatcaggatggttaggcactgcacttgagttcatggatttccagttat

SEQ ID NO: 544642 - DNA, 75 bp, synthetic construct
  source 1..75: mol_type = other DNA
attcgctcggcgcagcgttagtgtttcatgaaatattttttcctgaatcatcaacggcaatggcgttaattttgg

SEQ ID NO: 544643 - DNA, 75 bp, synthetic construct
  source 1..75: mol_type = other DNA
taagtatgagagcgattttcaaatgttattctctaatgattttatttgtgctatcaggctgttcaatggcgaaaa

SEQ ID NO: 544644 - DNA, 75 bp, synthetic construct
  source 1..75: mol_type = other DNA
ttataaaaatcaatacaggagagttaaatggttatgaccagcatgtaattaactccaatatcttacgaaacattt

SEQ ID NO: 544645 - DNA, 75 bp, synthetic construct
  source 1..75: mol_type = other DNA
agcagggacgatggtggtggacggcggtgggttacagcgtaaaacggtaaccagcatcctgatggcatgggtgtt

SEQ ID NO: 544646 - DNA, 75 bp, synthetic construct
  source 1..75: mol_type = other DNA
tatgggattatgccaaccgctcacaggcattattccgcgaactgtatccggcattaaaacaaattcaatcgaact

SEQ ID NO: 544647 - DNA, 75 bp, synthetic construct
  source 1..75: mol_type = other DNA
tcaggtgctgatactgaactcaccgggaggcacccggcaccatgcaatgaacggtacatagcgctactctccagc

SEQ ID NO: 544648 - DNA, 75 bp, synthetic construct
  source 1..75: mol_type = other DNA
ttctgagctgaacatttaccagtacggtggcggtaactctgcacttgctctgcaaactgatgcccgtaactctga

SEQ ID NO: 544649 - DNA, 75 bp, synthetic construct
  source 1..75: mol_type = other DNA
tttgctgtttaataaagcaattcccgcagatgcattaatgatcagttctattatcggttttatgacgattccttt

SEQ ID NO: 544650 - DNA, 75 bp, synthetic construct
  source 1..75: mol_type = other DNA
gcagtcgtcaataaatggagtacctgtgatctgccctctaagcctgatgctgatgttttccctacagattcaatg

SEQ ID NO: 544651 - DNA, 75 bp, synthetic construct
  source 1..75: mol_type = other DNA
tcactgtcctttctcgggctcgcggtgatggatgaactttgcgcccgtcacatcacatcgcctgtactgcactga

SEQ ID NO: 544652 - DNA, 75 bp, synthetic construct
  source 1..75: mol_type = other DNA
aacacgatctgccgcgtattgtcaccattcagaacccttacagtctgttaaaccgcagttttgaagtaggtctgg

SEQ ID NO: 544653 - DNA, 75 bp, synthetic construct
  source 1..75: mol_type = other DNA
aaatacgggctttaggaaaaaatattgatactgatagctatggattggctcttaaatccaagtttgaagaattga

SEQ ID NO: 544654 - DNA, 75 bp, synthetic construct
  source 1..75: mol_type = other DNA
ggttcagcatcctgatggaacataagaagctgatgaacgtgcgctatagccgggatggcggcaacgattacgcat

SEQ ID NO: 544655 - DNA, 75 bp, synthetic construct
  source 1..75: mol_type = other DNA
gactgactttgtaccgccgccgacgttgcaaccaacgtttaacccgctgacggataatgttgtctcgctcgacct

SEQ ID NO: 544656 - DNA, 75 bp, synthetic construct
  source 1..75: mol_type = other DNA
tggtgaaatatcaggcagacggttcggtgatcccgtggctggcaaaaagctggacccattcggaagatggtaaaa

SEQ ID NO: 544657 - DNA, 75 bp, synthetic construct
  source 1..75: mol_type = other DNA
atgctctccacactccgccgcactctatttgcgctgctggcttgtgcgtcttttatcgtccatgccgctgcacca

SEQ ID NO: 544658 - DNA, 75 bp, synthetic construct
  source 1..75: mol_type = other DNA
taaaaatcgttttacccgaatggcaatatcaaaagaaatcggtggtcttattgcctcaggttttggccctattct

SEQ ID NO: 544659 - DNA, 75 bp, synthetic construct
  source 1..75: mol_type = other DNA
gagtacatccacagggtagtgcttgaaggtgagttcattggcaagcaagagaagaaagcaaacgagctttctgca

SEQ ID NO: 544660 - DNA, 75 bp, synthetic construct
  source 1..75: mol_type = other DNA
aaaaagatcaccttcaacgtgatcccggatccgaccactcgcgcagtagctttcgaaaccggtgatatcgacctg

SEQ ID NO: 544661 - DNA, 75 bp, synthetic construct
  source 1..75: mol_type = other DNA
tttcaacatagcgaatcgtcgccatacttatttcgccaaccatttatccattggggctactatgttctccacact

SEQ ID NO: 544662 - DNA, 75 bp, synthetic construct
  source 1..75: mol_type = other DNA
gcagtccgtccggtggtaattgaatcagtgacaaaaatcatggcctgcgggaccacactgacgggctacacgcag

SEQ ID NO: 544663 - DNA, 75 bp, synthetic construct
  source 1..75: mol_type = other DNA
cttagaacgccaattaatgcattacttggtcagaatcaggtcacgctcagtcaaacaagaagtatcgctgaatat

SEQ ID NO: 544664 - DNA, 75 bp, synthetic construct
  source 1..75: mol_type = other DNA
cggtctggccgcatatgccattggcggaattatgttggttgctaccgttgtgctgggtggcctcggtgcgggctt

SEQ ID NO: 544665 - DNA, 75 bp, synthetic construct
  source 1..75: mol_type = other DNA
ttgtcggtgccgcgctactgatggcgggttgtagctccagcaacgaattgagtgctgctggtcagagtgtacgca

SEQ ID NO: 544666 - DNA, 75 bp, synthetic construct
  source 1..75: mol_type = other DNA
tctttcatccacatgataaaacaccatttatgatctgtattgtaagcaaagtagaagatacagaacacggattga

SEQ ID NO: 544667 - DNA, 75 bp, synthetic construct
  source 1..75: mol_type = other DNA
tggtgttgttcctcaccggactgttgccacacaaaaaagcctgcttccggtgtaaaagtcgctcctgcccgcact

SEQ ID NO: 544668 - DNA, 75 bp, synthetic construct
  source 1..75: mol_type = other DNA
agtattacgcagcgcagagagggctatatcgccagcgctgtccttgcgggtgagacagaaacgcgggtagatatt

SEQ ID NO: 544669 - DNA, 75 bp, synthetic construct
  source 1..75: mol_type = other DNA
gtgaatttccctgtatccatccagcaaaaacgggtgtataagactgtacattcatacagcaaaataagttctact

SEQ ID NO: 544670 - DNA, 75 bp, synthetic construct
  source 1..75: mol_type = other DNA
gaaggtagaggctcagtttcaagcggtaaagagcctgaaatgatccggcggcttaagttccaaacattgatctgg

SEQ ID NO: 544671 - DNA, 75 bp, synthetic construct
  source 1..75: mol_type = other DNA
atgatttcagaagaacgcttgttactgtcacgaacggtgcaatagtgatccacacccaacgcctgaaatcagatc

SEQ ID NO: 544672 - DNA, 75 bp, synthetic construct
  source 1..75: mol_type = other DNA
atcgatgccgccgactaccaggtacaggggcactatcagacccccgttattcaacattgtcacatggaaagcgta

SEQ ID NO: 544673 - DNA, 75 bp, synthetic construct
  source 1..75: mol_type = other DNA
cgctggtaactgctttgcgattgaagcgtgctggcgagtggcaaccagcacaactcatcttaatttatcctatgc

SEQ ID NO: 544674 - DNA, 75 bp, synthetic construct
  source 1..75: mol_type = other DNA
gcgacaaagggtgggcagccgccgttatttggcggacaagggatgtccattcatgatgtcgtccgccaggaaatg

SEQ ID NO: 544675 - DNA, 75 bp, synthetic construct
  source 1..75: mol_type = other DNA
taatatttatattgccatcacgttctggtattgggtgcgctattacgaaacggcaggtagtacgacatttgtcac

SEQ ID NO: 544676 - DNA, 75 bp, synthetic construct
  source 1..75: mol_type = other DNA
tcacagagaagtacacattttaattcaatggccagaaggggagttattgctgaatgttatgcgcaaaaaataaga

SEQ ID NO: 544677 - DNA, 75 bp, synthetic construct
  source 1..75: mol_type = other DNA
ccgtggttatgtggcgataccacatggtactggaaaacagaatatccggaaacttatgcctgtatatacggaaat

SEQ ID NO: 544678 - DNA, 75 bp, synthetic construct
  source 1..75: mol_type = other DNA
atgttgacaagaaatatagagtcaggacgatcttttgatgactatagtgtgttggactgggatatggacataaat

SEQ ID NO: 544679 - DNA, 75 bp, synthetic construct
  source 1..75: mol_type = other DNA
agaaaggtttcgacgaaggttttaaagaaagttttaaagaaagttttaaagaaggctttaaagaaggctttaaag

SEQ ID NO: 544680 - DNA, 75 bp, synthetic construct
  source 1..75: mol_type = other DNA
cgcgcctgcactctgccattatctcgatgaatttctccactccggcaattgccatcaactacgaacataaatccg

SEQ ID NO: 544681 - DNA, 75 bp, synthetic construct
  source 1..75: mol_type = other DNA
actcgtagcctcaattttcttgcctttgcggccgtaggtgcttgtgccgtacaagagatatctcaacaagaaaag

SEQ ID NO: 544682 - DNA, 75 bp, synthetic construct
  source 1..75: mol_type = other DNA
tcaagatcagattgctgaaaaattaagtggccaattttcgcgctttgagattaatgctgacccacacatttatca

SEQ ID NO: 544683 - DNA, 75 bp, synthetic construct
  source 1..75: mol_type = other DNA
actgtttcttgccagggcagacaaaaacaatgttttggtgaaactggatgcgctttctctcaacaaggaagttga

SEQ ID NO: 544684 - DNA, 75 bp, synthetic construct
  source 1..75: mol_type = other DNA
gccaggctcgacgaggtgtggtggctggaagttttgcaaacgtgatagtcagattaatgaaagcaaatgataaca

SEQ ID NO: 544685 - DNA, 75 bp, synthetic construct
  source 1..75: mol_type = other DNA
atgaaaaaaagaatttttcaagggaaaataccctgtgttaatgcacatcctgttgataataaagttaattatggg

SEQ ID NO: 544686 - DNA, 75 bp, synthetic construct
  source 1..75: mol_type = other DNA
tgacggggcgcgacgtgctccaatatcgccgcaaacatttcgacatcttcaccggtctggccctcgctactgcgt

SEQ ID NO: 544687 - DNA, 75 bp, synthetic construct
  source 1..75: mol_type = other DNA
agccaatggcggcattcctgacaagcaaacttggcggcattccggtgaaagtttctcttagccgtgaagagtgtt

SEQ ID NO: 544688 - DNA, 75 bp, synthetic construct
  source 1..75: mol_type = other DNA
ctcaccactacatcaagacaaaacgcagcatcggtgtagcagctggtgagagtaaatctgcaacagaaatcatcg

SEQ ID NO: 544689 - DNA, 75 bp, synthetic construct
  source 1..75: mol_type = other DNA
actgatttcatgaaagcggtatatttcctgtatcttaatcgtcacggttaccgtggtttatgtcgctataacaag

SEQ ID NO: 544690 - DNA, 75 bp, synthetic construct
  source 1..75: mol_type = other DNA
ggggcgcgctgctgggtgggatttgatccatcgcgtggcgtagatagttctgctgtgtacgaggtgcgtgtatga

SEQ ID NO: 544691 - DNA, 75 bp, synthetic construct
  source 1..75: mol_type = other DNA
cggaaattttcaacgtggatccacgaacgattgaacgctggcagtctcaagggctctcttgtgtctctggtggta

SEQ ID NO: 544692 - DNA, 75 bp, synthetic construct
  source 1..75: mol_type = other DNA
cggtgacatgacgttacccgatctggcgtggcttaataccattccggtgattggcgcgaagctgtatgcaggctg

SEQ ID NO: 544693 - DNA, 75 bp, synthetic construct
  source 1..75: mol_type = other DNA
catttcaccatcacaccttgatgtggtgaaaactgaaatcgcgaaagcctccaatgttgcagctaaggccggtga

SEQ ID NO: 544694 - DNA, 75 bp, synthetic construct
  source 1..75: mol_type = other DNA
cggtatccggcgttccttacgcaacgctgctgacggtgttaatgatcctctcctgccttgtccagcttggcccgc

SEQ ID NO: 544695 - DNA, 75 bp, synthetic construct
  source 1..75: mol_type = other DNA
gggaaggatttagggtttgaggttattaagattgccgtgccggatggcgaaaaaacattgaacgcgatcgacagc

SEQ ID NO: 544696 - DNA, 75 bp, synthetic construct
  source 1..75: mol_type = other DNA
cgccaaaggtaagccaatggataccgttcctctggtgatgatggcggcgactaaaattggcgaacgtcagggcta

SEQ ID NO: 544697 - DNA, 75 bp, synthetic construct
  source 1..75: mol_type = other DNA
ctcaccactacatcaaggcaaaacgcagcatcggcgtgtcagctggcgagagtaaatctgcaacagaaatcattg

SEQ ID NO: 544698 - DNA, 75 bp, synthetic construct
  source 1..75: mol_type = other DNA
tggtgtattgcgatccgccgtatgacggcacgttttccggttatcacactgacggcttcactgaagatgaccagt

SEQ ID NO: 544699 - DNA, 75 bp, synthetic construct
  source 1..75: mol_type = other DNA
actgaaaaaacatcttcctgctggcccgcgactggttgaacctttcgcgggttcctgtgcagtgatgatggagac

SEQ ID NO: 544700 - DNA, 75 bp, synthetic construct
  source 1..75: mol_type = other DNA
atgatccactatctacatccagttggtcgggcacaccttattatatgctaaaggcattatcgaagagaaatattt

SEQ ID NO: 544701 - DNA, 75 bp, synthetic construct
  source 1..75: mol_type = other DNA
tgggcgatcagcattctctgcaggacgttaaagcattgggtattgccggccagatgcacggagcaaccttactgg

SEQ ID NO: 544702 - DNA, 75 bp, synthetic construct
  source 1..75: mol_type = other DNA
ccggcgagcgtacgccgcacaataacccacaggcaaagggcgttttcttcggtctgacccatcagcacggccccg

SEQ ID NO: 544703 - DNA, 75 bp, synthetic construct
  source 1..75: mol_type = other DNA
tattacaggcaacctgatgatgcccggatttaccgcgcctaaattactgtggattcagcgaaacgagccagagat

SEQ ID NO: 544704 - DNA, 75 bp, synthetic construct
  source 1..75: mol_type = other DNA
agccgtgcgtctacgtcaaataagctccttcatcagatgcttatgctgtggggggcgaggctctcagagcttagg

SEQ ID NO: 544705 - DNA, 75 bp, synthetic construct
  source 1..75: mol_type = other DNA
aattgaaacataattacccactttcccacctgtatatacccaaaaaagtggggagtaaaaaacatattgaaaaac

SEQ ID NO: 544706 - DNA, 75 bp, synthetic construct
  source 1..75: mol_type = other DNA
gaaacgacacctgtactggaagccgctaacctgcagcaggatctacgccgagctggcatcgagccgtgggcatgg

SEQ ID NO: 544707 - DNA, 75 bp, synthetic construct
  source 1..75: mol_type = other DNA
tggccattgctaacaagttccaggcaatgatcgacagcggcaatattccgtcgcagtatactgagtcacagctgg

SEQ ID NO: 544708 - DNA, 75 bp, synthetic construct
  source 1..75: mol_type = other DNA
gtgaacagtcgatcatttctcgtgcgggcggtgcgccgaccctggcggtggggatggcctacattctgcacggtg

SEQ ID NO: 544709 - DNA, 75 bp, synthetic construct
  source 1..75: mol_type = other DNA
aaaaaattgatggtttggattttattattgcacctgcaggttcttcacaaattgcttttttagaaacaaatatac

SEQ ID NO: 544710 - DNA, 75 bp, synthetic construct
  source 1..75: mol_type = other DNA
cgcagcgttatgccgcttatcagccacgacgtgaaacgttccgtcgcctctatcagcaacttctgccattaatgg

SEQ ID NO: 544711 - DNA, 75 bp, synthetic construct
  source 1..75: mol_type = other DNA
atgcagctggtgcggttggtgtgggaatggttgatgctaatcaggcaatgttatcgctggggacgtcgggggtct

SEQ ID NO: 544712 - DNA, 75 bp, synthetic construct
  source 1..75: mol_type = other DNA
tcaacaggctgatgaaagtgccgagccagtttggtttctgccttatctttccggcgagcgtacaccacacaataa

SEQ ID NO: 544713 - DNA, 75 bp, synthetic construct
  source 1..75: mol_type = other DNA
ggcgctgcactggccccgctggcaaaattgttacgccacgagcttctgacacgggatgttattcatgcagatgaa

SEQ ID NO: 544714 - DNA, 75 bp, synthetic construct
  source 1..75: mol_type = other DNA
tgtttctacggatgacgggggcagctgttatctctggctcaaccgtgggcaaccacccgctgttaaccggcgacg

SEQ ID NO: 544715 - DNA, 75 bp, synthetic construct
  source 1..75: mol_type = other DNA
tacgattgttgaagtgatgggcatcagtgcgcagttcacctccggtgcacagcgtggcggcgaagttcagggggt

SEQ ID NO: 544716 - DNA, 75 bp, synthetic construct
  source 1..75: mol_type = other DNA
atgcgaaataaaaatataatcatgttgcttatgagtagtttgattttgtcaggatgtgggccggaatctgagaat

SEQ ID NO: 544717 - DNA, 75 bp, synthetic construct
  source 1..75: mol_type = other DNA
agcaggcaaaaggggaagatccacagggttacagggcggaatttattcgcctggttgaactggcgggtggtgtga

SEQ ID NO: 544718 - DNA, 75 bp, synthetic construct
  source 1..75: mol_type = other DNA
ccggtggggaaaaaatcagtcgtgatggaaaggaagggtatgaggttgctcatattcagctagataaagaaaaaa

SEQ ID NO: 544719 - DNA, 75 bp, synthetic construct
  source 1..75: mol_type = other DNA
cgcctgaatgaaggtattcgcttatggcgcgaaaatccgggatcaaaactgatctttacgggaggcgtagctaaa

SEQ ID NO: 544720 - DNA, 75 bp, synthetic construct
  source 1..75: mol_type = other DNA
atgcgtgattttcagaatgcctttgatgccgcccttgcgggggtggacagtacgatcgttgaagtgatggggctc

SEQ ID NO: 544721 - DNA, 75 bp, synthetic construct
  source 1..75: mol_type = other DNA
tgtatctccggatgacgggggcagttgttatctctggctcaaccgtggggaaccaccggctgttaaccggcgacg

SEQ ID NO: 544722 - DNA, 75 bp, synthetic construct
  source 1..75: mol_type = other DNA
aaggaagctgcccgtcattatttgtgcggacggatacggttcgtgctgtgcggcgtggtgacacgctgaccatta

SEQ ID NO: 544723 - DNA, 75 bp, synthetic construct
  source 1..75: mol_type = other DNA
gcttaatccgtgggaacgggcaattccctctccggtctggttgatgcatagcgaccgtgtaggctatgaaacgct

SEQ ID NO: 544724 - DNA, 75 bp, synthetic construct
  source 1..75: mol_type = other DNA
gcgaccgagtcggctatgaaacgcttggtcgcatctggcagtggctgaaaggttcgtcaggcgagccagggaagg

SEQ ID NO: 544725 - DNA, 75 bp, synthetic construct
  source 1..75: mol_type = other DNA
agatatgcgttttcgcgcagcagtagctgcatatgggcaaaagttacgcggttctgaatacctgaacaatacctc

SEQ ID NO: 544726 - DNA, 75 bp, synthetic construct
  source 1..75: mol_type = other DNA
gagccggaacataatatttaccagaaacagggaaaaggcgtggtgtacctgcgcccttatgaaaagaccaatctt

SEQ ID NO: 544727 - DNA, 75 bp, synthetic construct
  source 1..75: mol_type = other DNA
tgttgtcttgttcgttgttcttatcgtcggcatggggatgtcggcttgatgagccggaacataatatttaccaga

SEQ ID NO: 544728 - DNA, 75 bp, synthetic construct
  source 1..75: mol_type = other DNA
gaattcgacgttcagacgcaagtcctgttacggactcgtgaaaaactggcgttactggagcagcgcatcagcgaa

SEQ ID NO: 544729 - DNA, 75 bp, synthetic construct
  source 1..75: mol_type = other DNA
ggcggcggtaatccgctgaccagtaaagtcgccattattagccattccagcgatccgcgtgctgatgtcgattat

SEQ ID NO: 544730 - DNA, 75 bp, synthetic construct
  source 1..75: mol_type = other DNA
cgatatggcgatgccagtcgtcattattccggctgaatatctgggaaaacaggttatgaattaccggcggaactg

SEQ ID NO: 544731 - DNA, 75 bp, synthetic construct
  source 1..75: mol_type = other DNA
ctatttccagtagttgtgcattggaaggcaccgtcacccgacaaatcgtcccttctgtaggatatggcaatatca

SEQ ID NO: 544732 - DNA, 75 bp, synthetic construct
  source 1..75: mol_type = other DNA
caatcgcattttattggccactgacggtgactttaacgttggcattgacgatccaaaatcgattgaatcaatggt

SEQ ID NO: 544733 - DNA, 75 bp, synthetic construct
  source 1..75: mol_type = other DNA
gctaccagcagttcgatgataatccgattaagcaggtagcgcaaaacccactcgtgacgtttagccttgacgtcg

SEQ ID NO: 544734 - DNA, 75 bp, synthetic construct
  source 1..75: mol_type = other DNA
gtggctgagcaaagcgccgccaaagccgctgcagacgcgaaagccttagcccagcaagaagtgcaacaatattca

SEQ ID NO: 544735 - DNA, 75 bp, synthetic construct
  source 1..75: mol_type = other DNA
gccaaaccctacaagcgcagctgacgcgtctcgatctggtgagccgcgaagaattcgacgtacagacgcaagtcc

SEQ ID NO: 544736 - DNA, 75 bp, synthetic construct
  source 1..75: mol_type = other DNA
ggcggaatgtgacgatctgctggccttcctgaaagcctccctcacgcagatatcggaaatcgtccaccgggatac

SEQ ID NO: 544737 - DNA, 75 bp, synthetic construct
  source 1..75: mol_type = other DNA
gggcaaaaagcatcaattgataagttacgctatgccccggataacaaatcagcgaaatcggacaaaacgaaagaa

SEQ ID NO: 544738 - DNA, 75 bp, synthetic construct
  source 1..75: mol_type = other DNA
ataccaatatcgtcgacgaagaaattttgtgatgaattcgatattatgattggtaggtatggtcccccaattttt

SEQ ID NO: 544739 - DNA, 75 bp, synthetic construct
  source 1..75: mol_type = other DNA
gggcgtggaagccattaacttcctgctgatgatggttagtggcctgctggcactggcgttggtcaaacgcaactg

SEQ ID NO: 544740 - DNA, 75 bp, synthetic construct
  source 1..75: mol_type = other DNA
gccgctcggctatctcatcaacgtgacggagtggtgggaaaacagtgacccgccaggcaccttccggcttgatat

SEQ ID NO: 544741 - DNA, 75 bp, synthetic construct
  source 1..75: mol_type = other DNA
agaaatcacgatctatccgtatatcaacgaaacaattatttccggtggcaccgcgcatgaaggcggggcggtcca

SEQ ID NO: 544742 - DNA, 75 bp, synthetic construct
  source 1..75: mol_type = other DNA
ctgtttgtcctccccttcccgctgcgttacatccagtggtttacaccacacccggagaaaaccatccaggtctca

SEQ ID NO: 544743 - DNA, 75 bp, synthetic construct
  source 1..75: mol_type = other DNA
cagcaccaacaacggcattacggcggtgattggcccgcagggggagattcaggcgatgatcccgcagttcacccg

SEQ ID NO: 544744 - DNA, 75 bp, synthetic construct
  source 1..75: mol_type = other DNA
cacgtaccggcaactggccgctgtgggtgctgacggcactgtttggttttgctgctgtgttgatgagtctgcgtc

SEQ ID NO: 544745 - DNA, 75 bp, synthetic construct
  source 1..75: mol_type = other DNA
agcacgcagaggacttcagaaaaatatgtcttctgtttatccggttaatgagcaatgtattaaaactgtttcctt

SEQ ID NO: 544746 - DNA, 75 bp, synthetic construct
  source 1..75: mol_type = other DNA
gtgcgtaagctgcgttttctcgataaactgcggagcagtgccgaacaactcgaagaaaaactgctcgatttttaa

SEQ ID NO: 544747 - DNA, 75 bp, synthetic construct
  source 1..75: mol_type = other DNA
ataaattcgccagcggaagccaggcggaacaactcgccgccgtacagcaatccgcaaccattaaccaggcctggc

SEQ ID NO: 544748 - DNA, 75 bp, synthetic construct
  source 1..75: mol_type = other DNA
cggctttctgatccgcattattgagtggtggcaaaccggagaggcaccgggcatgtttcgcctggatatcggcgt

SEQ ID NO: 544749 - DNA, 75 bp, synthetic construct
  source 1..75: mol_type = other DNA
ggaaaaccgtataaaacctccggcgggaagatggagtataacgccacgctgaaacgggaaattccggcaggttgg

SEQ ID NO: 544750 - DNA, 75 bp, synthetic construct
  source 1..75: mol_type = other DNA
attcttacagtggtgggtgttgttatttcatatctttcttcagataagtttatgcccgttaagcgcaggaaatga

SEQ ID NO: 544751 - DNA, 75 bp, synthetic construct
  source 1..75: mol_type = other DNA
tggccgctgtgggtgctgacggcactgtttggttttgccgctgtgttgatgagtctgcgtcagcgacgtaaataa

SEQ ID NO: 544752 - DNA, 75 bp, synthetic construct
  source 1..75: mol_type = other DNA
atgcgctggtgaatcggggtgtcgacagacatctgcgcctcgctgtaaccggacttagccgcagcggcaaaacag

SEQ ID NO: 544753 - DNA, 75 bp, synthetic construct
  source 1..75: mol_type = other DNA
tacgatcgttgaagtgatggggctctgtgcgcagttcacctcgggggcacagtgtggcagcgaagttcagggggt

SEQ ID NO: 544754 - DNA, 75 bp, synthetic construct
  source 1..75: mol_type = other DNA
tgtttctccggatgacgggggcagctgttatctctggctgaaccgcgggcaaccaccggcagttaaccggcgacg

SEQ ID NO: 544755 - DNA, 75 bp, synthetic construct
  source 1..75: mol_type = other DNA
gtaaaaatgtggcctgggcacagtctgaggtcaacgcatggatgtcggaccgtatcagggcccgtgggcggagac

SEQ ID NO: 544756 - DNA, 75 bp, synthetic construct
  source 1..75: mol_type = other DNA
tggttttggtgaatagttggtttaatcagccaggcgttgaggaagttgttccacgatcaacctatctgatggtaa

SEQ ID NO: 544757 - DNA, 75 bp, synthetic construct
  source 1..75: mol_type = other DNA
tatcaactggctgataacgcactttacgaggcgaaagagaccgggcgtaataaggtggtagtaaaagaggcagaa

SEQ ID NO: 544758 - DNA, 75 bp, synthetic construct
  source 1..75: mol_type = other DNA
acattacaatttacggaaaaaagaagtttaattaaaagagagctacaaattaaaggctataaacgattattgttc

SEQ ID NO: 544759 - DNA, 75 bp, synthetic construct
  source 1..75: mol_type = other DNA
agttgtatcacggtaaccgggtgccgttcgtaccacgttatggcgcgggaagcagcgtgaacggcgtgattgata

SEQ ID NO: 544760 - DNA, 75 bp, synthetic construct
  source 1..75: mol_type = other DNA
aaagttccgtccggatggcaagtccaccataagattccacttgatgacagcggcacaaatgccctggataatttg

SEQ ID NO: 544761 - DNA, 75 bp, synthetic construct
  source 1..75: mol_type = other DNA
acggttattgtcgccgcgctttcgtaaccgtcagtttgctggattactgctcgatcaggcgtttctggctgggct

SEQ ID NO: 544762 - DNA, 75 bp, synthetic construct
  source 1..75: mol_type = other DNA
attctgctttatagcgcctcggatattgagatgttgacgccggaacaactgaccacgcatccgtttttacaacgc

SEQ ID NO: 544763 - DNA, 75 bp, synthetic construct
  source 1..75: mol_type = other DNA
gcagactcacttgaggtaaattggaatcgcattactgcagtagctatgccagagattagtgttcccgtattatgt

SEQ ID NO: 544764 - DNA, 75 bp, synthetic construct
  source 1..75: mol_type = other DNA
aatctgagtgttacctatgaaggtatcaagtccggcagaaagatcgagtctgttgtgttcacatatcttgtagag

SEQ ID NO: 544765 - DNA, 75 bp, synthetic construct
  source 1..75: mol_type = other DNA
ccacagcctgcaaatgaatatacattgtttgcgaaggaatacagggacactttttctttagattcgaaaaattgt

SEQ ID NO: 544766 - DNA, 75 bp, synthetic construct
  source 1..75: mol_type = other DNA
gacccgttcaacctgccgcaggtgatgtgggcgctctcctcgaaagtaaacccggcaggggatttggtgcagtag

SEQ ID NO: 544767 - DNA, 75 bp, synthetic construct
  source 1..75: mol_type = other DNA
tcacaatggcttcagggatggagccttcgaacccggctccaggtacatatacgtttaaacaagaatacggtacat

SEQ ID NO: 544768 - DNA, 75 bp, synthetic construct
  source 1..75: mol_type = other DNA
tacgaaatggcaggcgcgctgcgtgaaagcccgtacccgatcgccaccgccccgctgaccggttttgatgtgccg

SEQ ID NO: 544769 - DNA, 75 bp, synthetic construct
  source 1..75: mol_type = other DNA
aggtatatgaaaaaaaatatactttttctaatgttaaactttccgacaaaaaatacaaagaagccaaacaagata

SEQ ID NO: 544770 - DNA, 75 bp, synthetic construct
  source 1..75: mol_type = other DNA
acttctggcgcgcatggttgaacggctttatctagggcagaacgcaggcaatactttcccgacagaaaacacgcc

SEQ ID NO: 544771 - DNA, 75 bp, synthetic construct
  source 1..75: mol_type = other DNA
tgcgcagatgtcgcaccaacatcgcccagtcgtttaccaatcccaacttccgcaatcagctcacttaccgcgtta

SEQ ID NO: 544772 - DNA, 75 bp, synthetic construct
  source 1..75: mol_type = other DNA
cgcaatcatgcttgtgccgggttcagatattgtcactacgcgaaggcagttcgggacaaagtcagacgaagcaag

SEQ ID NO: 544773 - DNA, 75 bp, synthetic construct
  source 1..75: mol_type = other DNA
aagtgatcctcgaaggggttatcgaaagccgtaaacgcgaaatcgaagggccgttcggtgagtttaccgggcact

SEQ ID NO: 544774 - DNA, 75 bp, synthetic construct
  source 1..75: mol_type = other DNA
ccgctcgacccggataacttcggcaagcagaacgtcggcatctaccgcatggaagtgaagggcaagcgtaagctc

SEQ ID NO: 544775 - DNA, 75 bp, synthetic construct
  source 1..75: mol_type = other DNA
accggccactactccggcgggcgcaacatgaccgtggtgcgcatcgataaagtctcttaccgcaccaaaccgatt

SEQ ID NO: 544776 - DNA, 75 bp, synthetic construct
  source 1..75: mol_type = other DNA
gtcgaaggggataaagctagtggtggtgctggaattaaaactgctgatggctctaaagtagacatgtacattggg

SEQ ID NO: 544777 - DNA, 75 bp, synthetic construct
  source 1..75: mol_type = other DNA
tgggcaagctgaagaagagcgttcgcggactggtggtggttcacccgatgactgcgctgggtcgtgaaatgggcc

SEQ ID NO: 544778 - DNA, 75 bp, synthetic construct
  source 1..75: mol_type = other DNA
cgcctgcgtgaagttcatagccaaaaactgagtaaagaagcacagaagctgatgaagatgccgtttcagcgcgca

SEQ ID NO: 544779 - DNA, 75 bp, synthetic construct
  source 1..75: mol_type = other DNA
gggcaagccgccagcaggagagcaccggctggtctgcgtggttggcgttggttcgccagaactggcgctttctgg

SEQ ID NO: 544780 - DNA, 75 bp, synthetic construct
  source 1..75: mol_type = other DNA
gcacttaaagatattcaggaagagatgacccccatcggtattcaggtcatgagcctctcttatgtcggtaaaccg

SEQ ID NO: 544781 - DNA, 75 bp, synthetic construct
  source 1..75: mol_type = other DNA
atgaaaaaaattatttttgctttagccattattctgccgactattggccttgtcggttgcgatcgcgttgaacca

SEQ ID NO: 544782 - DNA, 75 bp, synthetic construct
  source 1..75: mol_type = other DNA
gatgaagatgccattccagcgcgcgattaccaaaaaagagcaggctgatatgggcaagctgaagaaaagtgttcg

SEQ ID NO: 544783 - DNA, 75 bp, synthetic construct
  source 1..75: mol_type = other DNA
gtactgacaaattcatcgatggtggcaagggcgagttactggaaaactccctgaaagaaattcaggcagagatgg

SEQ ID NO: 544784 - DNA, 75 bp, synthetic construct
  source 1..75: mol_type = other DNA
aagtactctggattctgctattaattacgcaatatcacgatcacaccatgaagtcgattgtttgcattttctgtg

SEQ ID NO: 544785 - DNA, 75 bp, synthetic construct
  source 1..75: mol_type = other DNA
gtctgtacgactggacgggagccataattgcgctttgtggtatgttgattattgtcgctggctggtggcgtgcat

SEQ ID NO: 544786 - DNA, 75 bp, synthetic construct
  source 1..75: mol_type = other DNA
gaaaaccctgcaacgcgaacaggaagtaaaacagcgcgaagcggaagctaacatgttgcgcgcggaagctgccgg

SEQ ID NO: 544787 - DNA, 75 bp, synthetic construct
  source 1..75: mol_type = other DNA
tacccgcctactgttatcgacagcattaatgccaaagtcacggcgaaccagaaaaccctgcaacgcgagcaggaa

SEQ ID NO: 544788 - DNA, 75 bp, synthetic construct
  source 1..75: mol_type = other DNA
acaggctgatgcgattcgcacaaaagcccaggccgaatccgacgccattcgtttacgcggcgaagcactgcgcca

SEQ ID NO: 544789 - DNA, 75 bp, synthetic construct
  source 1..75: mol_type = other DNA
accattattcctgaagtcactcttactcaatcttgtctgtgcagagtacaaatattgtccctgcgcgaaggcagt

SEQ ID NO: 544790 - DNA, 75 bp, synthetic construct
  source 1..75: mol_type = other DNA
tgaaagatatggctgaagttattgttgagccacgtcttgataagaacaataacaaggagtggtatgtagccgcag

SEQ ID NO: 544791 - DNA, 75 bp, synthetic construct
  source 1..75: mol_type = other DNA
gaaatggcccgggaacgtctgcttaacgaaatgggtaaaaaccacacaccaacaaataaaaatatcccgtctcat

SEQ ID NO: 544792 - DNA, 75 bp, synthetic construct
  source 1..75: mol_type = other DNA
caataaaaataccccgcctcatatctatgctggaaacggaaacataacaggtgatgcaattcgtcaggggcttta

SEQ ID NO: 544793 - DNA, 75 bp, synthetic construct
  source 1..75: mol_type = other DNA
tgatgaggcgaccattcgcgcccgcgttatggctgagcagaaagcccgcatgtcaggcattaacgatctgtttgc

SEQ ID NO: 544794 - DNA, 75 bp, synthetic construct
  source 1..75: mol_type = other DNA
tttacatatgccggaaaccattaagggaatgattcccccgccgaaatcacaggcaaaaaacaccattacaggcga

SEQ ID NO: 544795 - DNA, 75 bp, synthetic construct
  source 1..75: mol_type = other DNA
aatatccatctatgaagaaattggcggcttcggtattaccgcgaagcagtttgcggaagacctgaaagccctggg

SEQ ID NO: 544796 - DNA, 75 bp, synthetic construct
  source 1..75: mol_type = other DNA
gtggtgttactgccggagtgtcgggcgacgttcgccgctttgctgacctgatggacaagctgggcgacacgatgg

SEQ ID NO: 544797 - DNA, 75 bp, synthetic construct
  source 1..75: mol_type = other DNA
gcgatgatgatgatacatgcgccccgtggtgttactgccggagtgtcgggcgacgttcgccgctttgctgacctg

SEQ ID NO: 544798 - DNA, 75 bp, synthetic construct
  source 1..75: mol_type = other DNA
aaggcggggcaattaatgtgcgttattttatgccgcattcttgccatcgcgctggcgataaccggtgctattgct

SEQ ID NO: 544799 - DNA, 75 bp, synthetic construct
  source 1..75: mol_type = other DNA
atggacaagctgggcgacacgatggcggaaacctacgccggaagaacgggcaggagcaaacaggaaatcaccgcc

SEQ ID NO: 544800 - DNA, 75 bp, synthetic construct
  source 1..75: mol_type = other DNA
tgaattgtttggcaccttcaacggaagatataacgacctggctataagttgtcttgcggattcagaatgtagcgt

SEQ ID NO: 544801 - DNA, 75 bp, synthetic construct
  source 1..75: mol_type = other DNA
ccggaaaatattaaaaacatgatcagccagaaaactggcagcggagaacaggaacgactcaacgggatacgtgaa

SEQ ID NO: 544802 - DNA, 75 bp, synthetic construct
  source 1..75: mol_type = other DNA
tggtagtaaggagcatgtagggaagaatggcgtgtattatttcgaaaagaaacatgcatttggcgcattttgttc

SEQ ID NO: 544803 - DNA, 75 bp, synthetic construct
  source 1..75: mol_type = other DNA
ttacctggttgctggataaccaaaaagagttgtcgtgcctgactgggaatcatcggcaacctgtatctcggcagg

SEQ ID NO: 544804 - DNA, 75 bp, synthetic construct
  source 1..75: mol_type = other DNA
acatttcgccaaaccgtggcttaatgaggggaagtgggtggcattagaactggaaacccctttccggattcggca

SEQ ID NO: 544805 - DNA, 75 bp, synthetic construct
  source 1..75: mol_type = other DNA
ccatttcgctaaaccgtggctgaacgaggggaagtgggtagcattagaactggaaaatccattccctgattcggc

SEQ ID NO: 544806 - DNA, 75 bp, synthetic construct
  source 1..75: mol_type = other DNA
gctgcccagattgtttcagctgtttacggtgcgcagggggtcaaagtgccactgaatgatgcgcttcttcagtgg

SEQ ID NO: 544807 - DNA, 75 bp, synthetic construct
  source 1..75: mol_type = other DNA
tatgcaggttaccgtcagctggtggcgaaaacgggtatgtcagatgcgaaatgccgcaatctggtgaacgcatat

SEQ ID NO: 544808 - DNA, 75 bp, synthetic construct
  source 1..75: mol_type = other DNA
aattctctggatggtaccgctattttgtttattgatgaggcccattcccttatcggtgcaggaggacttcccgga

SEQ ID NO: 544809 - DNA, 75 bp, synthetic construct
  source 1..75: mol_type = other DNA
ggattactccaacgccattgttgaagcagtgaaaaagaaactcaacaaaccggacttgcaggtaaaactgattcc

SEQ ID NO: 544810 - DNA, 75 bp, synthetic construct
  source 1..75: mol_type = other DNA
gcgcctcgaccttgtaagccgtgaagagttcgacgtccaaacgcaagtcctgttacggactcgtgagaaactggc

SEQ ID NO: 544811 - DNA, 75 bp, synthetic construct
  source 1..75: mol_type = other DNA
cgcgaatcgctgagttattgcctgtttgggaagataagatcggcgttaaagctgcagattggggaattaaaaaga

SEQ ID NO: 544812 - DNA, 75 bp, synthetic construct
  source 1..75: mol_type = other DNA
cagtacgcaatttctatctgaagtatgcctttgtaccttcaccattccagtcacttaccttactgtatcccatta

SEQ ID NO: 544813 - DNA, 75 bp, synthetic construct
  source 1..75: mol_type = other DNA
tgagcgtcacgggcgtcacgaagtaaaagttgcaggaaataataagctccagctttatgttcaaccgggaacccg

SEQ ID NO: 544814 - DNA, 75 bp, synthetic construct
  source 1..75: mol_type = other DNA
ggtggtgatgattgtgctctggttctcggtgataatatcttctacggtcatgatctgccgaagttaatggatgtc

SEQ ID NO: 544815 - DNA, 75 bp, synthetic construct
  source 1..75: mol_type = other DNA
tcctgaacgctacggtgtcgttgagtttgataaaaacggtacggcaataagcctggaagaaaaaccgctacaacc

SEQ ID NO: 544816 - DNA, 75 bp, synthetic construct
  source 1..75: mol_type = other DNA
gacattttgatcatcagtacgccacaagatacgccgcgctttgaacaattattaggagatggtagtcagtggggg

SEQ ID NO: 544817 - DNA, 75 bp, synthetic construct
  source 1..75: mol_type = other DNA
gcacattcggcggtaacgctgtacggcagcgccaattttctggggcgcacaaagtcagactttatctatatttgt

SEQ ID NO: 544818 - DNA, 75 bp, synthetic construct
  source 1..75: mol_type = other DNA
atgcaatatctgataaagcgttatcaagttactttcgtagttcaggtaatttgttagaagaagagtctgctgtgt

SEQ ID NO: 544819 - DNA, 75 bp, synthetic construct
  source 1..75: mol_type = other DNA
gctgggtgatggtagccagtggggccttaatcttcagtataaagtacaacctagtccagatggtttggcacaagc

SEQ ID NO: 544820 - DNA, 75 bp, synthetic construct
  source 1..75: mol_type = other DNA
accgatattaaccgtatctatatggaacaggggcgtttatctgttgccatgatgggtcgtggttatgcatggttg

SEQ ID NO: 544821 - DNA, 75 bp, synthetic construct
  source 1..75: mol_type = other DNA
cgacctgccgaagttaatggacgcagcggttaacaaagaaggtggtgcaacagtatttgcttatcacgtaaatga

SEQ ID NO: 544822 - DNA, 75 bp, synthetic construct
  source 1..75: mol_type = other DNA
tccggaaagggtttattgatgctgagcaggtgaaagtgttagccgaaccgctgaagaaaaatgcttatggtcagt

SEQ ID NO: 544823 - DNA, 75 bp, synthetic construct
  source 1..75: mol_type = other DNA
accgtaaagggtttattggaaaagagcaactagagctattagctaagtcgcttatgaaaaatcaatatggaaaat

SEQ ID NO: 544824 - DNA, 75 bp, synthetic construct
  source 1..75: mol_type = other DNA
tcgaaatggcgaaaaaccttaagccttctgcccgtggtgaactggaaattaccgatattaaccgtatttatatgg

SEQ ID NO: 544825 - DNA, 75 bp, synthetic construct
  source 1..75: mol_type = other DNA
accgtaaagggtttattgattctgagcaggtgaaagtattagctgaaccgctgaaaaaaaatgcttatggtcagt

SEQ ID NO: 544826 - DNA, 75 bp, synthetic construct
  source 1..75: mol_type = other DNA
gctttcaggcgataatgttaataataaaaatattatcttaagtctgatacacccctggaaacaacaagtgatatt

SEQ ID NO: 544827 - DNA, 75 bp, synthetic construct
  source 1..75: mol_type = other DNA
ggagacaccagtcactctaccaataccttctgtctcagaggaaaccatcgcacctgttcaaaaggaagcacaggc

SEQ ID NO: 544828 - DNA, 75 bp, synthetic construct
  source 1..75: mol_type = other DNA
tcgagtcgctgcttgaccggcttccggcaacgctggctggctatgttcgcgatcttttgggtatcctcaccgagg

SEQ ID NO: 544829 - DNA, 75 bp, synthetic construct
  source 1..75: mol_type = other DNA
gtatgccgggaacttaggcgaatttggcctgacggaaacatatttatactcggcagtcatgaccaagaaggcatg

SEQ ID NO: 544830 - DNA, 75 bp, synthetic construct
  source 1..75: mol_type = other DNA
ttgtcgcgtagcggcgtggatgttgcaacatacaaaggccagaaaccggcgccagaggatgtattaatcaccgat

SEQ ID NO: 544831 - DNA, 75 bp, synthetic construct
  source 1..75: mol_type = other DNA
ggtcataccctgatttcgttgaccggaccagaaagcaaaatcgaggctgaaccgcgttggatgcaggaacgttcc

SEQ ID NO: 544832 - DNA, 75 bp, synthetic construct
  source 1..75: mol_type = other DNA
ggcgttaatggtagttcaccgcagtacggattgctcggagaggtttccggacggaaaatcgcgctggacctcaat

SEQ ID NO: 544833 - DNA, 75 bp, synthetic construct
  source 1..75: mol_type = other DNA
gctttcaggcgataatgttaataataaaaatattatcttaagtctgatacactccctggaaacaacaagtgatat

SEQ ID NO: 544834 - DNA, 75 bp, synthetic construct
  source 1..75: mol_type = other DNA
ataacaccaaacaataagtttagatactttattaatacattccttcaatccgaatggtttaagtcctatataaac

SEQ ID NO: 544835 - DNA, 75 bp, synthetic construct
  source 1..75: mol_type = other DNA
atgcttgaagatactactattcataacgcaataactgataaggcgttatcaagttactttcgcagttcggggaat

SEQ ID NO: 544836 - DNA, 75 bp, synthetic construct
  source 1..75: mol_type = other DNA
gctctatctcgaatatcaaggcgcgttaagcaatcagatcattgtgccattagacgcacacacggacctctaccg

SEQ ID NO: 544837 - DNA, 75 bp, synthetic construct
  source 1..75: mol_type = other DNA
cgaccagcttgtgtccatgacctcagttgaaattgctgagctgacaggaaaagaacataaacacgttttacgaga

SEQ ID NO: 544838 - DNA, 75 bp, synthetic construct
  source 1..75: mol_type = other DNA
aacaagaaatcagcatcattaacctcgaccagcttgtgtccatgacctcagttgaaattgctgagctgacaggaa

SEQ ID NO: 544839 - DNA, 75 bp, synthetic construct
  source 1..75: mol_type = other DNA
tgacggtgagcggttatgttcttgaagtacagaccaccgagcggaacgccagcgggttacagattattgctgacc

SEQ ID NO: 544840 - DNA, 75 bp, synthetic construct
  source 1..75: mol_type = other DNA
aaattgatgaagctgctctatctgtctaaccgccagtcgattttgaagcatggcaggatgatcggcgaagatagc

SEQ ID NO: 544841 - DNA, 75 bp, synthetic construct
  source 1..75: mol_type = other DNA
tgatcagtgagggtaaaagcgaggatgaggctaatcgcataattggcaaaatggaagaatctcagaaacttaagg

SEQ ID NO: 544842 - DNA, 75 bp, synthetic construct
  source 1..75: mol_type = other DNA
aaattgttatctgacttcgaaacagtaatagccccattgttgccattgcatattgtttttgatggcgcctcgttt

SEQ ID NO: 544843 - DNA, 75 bp, synthetic construct
  source 1..75: mol_type = other DNA
gaacgccttatcaaacttaaagcggaaggagtattaaataaggtatatagggctctttgtaatcgtgcttttgca

SEQ ID NO: 544844 - DNA, 75 bp, synthetic construct
  source 1..75: mol_type = other DNA
gcacaaaaagaccttctaacgctcacccgtcagatagcagaagagtgtacacaagaaaattataatcgggtcatt

SEQ ID NO: 544845 - DNA, 75 bp, synthetic construct
  source 1..75: mol_type = other DNA
gggatgcgctttccgacgggcgcgtggaactggcgattggcgcaacacgcgcgattccggtaggcggtcgttatg

SEQ ID NO: 544846 - DNA, 75 bp, synthetic construct
  source 1..75: mol_type = other DNA
ccagacgatgttggcaggatattactgggtaatggaatatacaccagacaaagggcttcatattcattttatcgg

SEQ ID NO: 544847 - DNA, 75 bp, synthetic construct
  source 1..75: mol_type = other DNA
aggttacgccatcattaacggttactgtggctaaattggcctcagcacgacataacatgcttgaacaatataaaa

SEQ ID NO: 544848 - DNA, 75 bp, synthetic construct
  source 1..75: mol_type = other DNA
atgaaaagattatctataaccgtccgtttaaccttgctttttatattgctactgtctgtcactggcgctggaatt

SEQ ID NO: 544849 - DNA, 75 bp, synthetic construct
  source 1..75: mol_type = other DNA
ctacctggatgggcaacgttacaagaaatcttatcggttatccaggcaactgggggatatctggaagcgaatcac

SEQ ID NO: 544850 - DNA, 75 bp, synthetic construct
  source 1..75: mol_type = other DNA
tgggagatatctggaggcggatcacggaaggggagggttactttcacctttgccgggctaaagacaaatacccgg

SEQ ID NO: 544851 - DNA, 75 bp, synthetic construct
  source 1..75: mol_type = other DNA
ccagacgatgttggcgggatattactgggtaatggaatatacaccagacaaagggcttcatattcattttgtcgg

SEQ ID NO: 544852 - DNA, 75 bp, synthetic construct
  source 1..75: mol_type = other DNA
ctccctgtaagtaccacagggcgacgccctgctgcgggtcgttataatgccctggctgttttgcgggtggaatac

SEQ ID NO: 544853 - DNA, 75 bp, synthetic construct
  source 1..75: mol_type = other DNA
ttggcgataatatcttctatggacacgacttgccgaaattaatggaagctgctgttaacaaagaaagcggtgcaa

SEQ ID NO: 544854 - DNA, 75 bp, synthetic construct
  source 1..75: mol_type = other DNA
gcaggtcaaagtattagccgaaccgcttatcaagaatcaatatggtcaatatttgctgaaaatgatcagcgaata

SEQ ID NO: 544855 - DNA, 75 bp, synthetic construct
  source 1..75: mol_type = other DNA
atcgtaaagggtttattgatgctgagcaggtaaaagtattagccgaaccgttgaagaaaaatgcttatggtcagt

SEQ ID NO: 544856 - DNA, 75 bp, synthetic construct
  source 1..75: mol_type = other DNA
ggggcgaagcggattttcgtttctgccaggatttacaggcagctctgaggacagcgataaaacggatattatcgt

SEQ ID NO: 544857 - DNA, 75 bp, synthetic construct
  source 1..75: mol_type = other DNA
gatgggacgtggttatgcatggctggacacggggacacatcaaagtcttattgaagcaagcaacttcattgcaac

SEQ ID NO: 544858 - DNA, 75 bp, synthetic construct
  source 1..75: mol_type = other DNA
atttatcatcggtgaagagtttatcggtggtgatgattgtgctttggttcttggtgataatatcttctacggtca

SEQ ID NO: 544859 - DNA, 75 bp, synthetic construct
  source 1..75: mol_type = other DNA
tatttagtcgatgggcgctcaagaaagttcgtttgcgaatgctataatataagtaatggatatttaacagtgagt

SEQ ID NO: 544860 - DNA, 75 bp, synthetic construct
  source 1..75: mol_type = other DNA
gccgtgcggctgatgcgattgaagcctccgggctggattataccatcctgcgaccggcctggctgacggatgaag

SEQ ID NO: 544861 - DNA, 75 bp, synthetic construct
  source 1..75: mol_type = other DNA
tggtacttggcgccagcgggcagattgcccgccatgttatcgaccaactggccgataaaccaggcgtcacacaga

SEQ ID NO: 544862 - DNA, 75 bp, synthetic construct
  source 1..75: mol_type = other DNA
gatggggcgtggctatgcatggctggatacagggacgcatcaaagtcttattgaagcaagcaacttcattgccac

SEQ ID NO: 544863 - DNA, 75 bp, synthetic construct
  source 1..75: mol_type = other DNA
ggaaaaccgtataaaacctccggcgggaaaatggaatataacgctacgctgaaacgggaaattccggtgggttgg

SEQ ID NO: 544864 - DNA, 75 bp, synthetic construct
  source 1..75: mol_type = other DNA
atgattacttatgccggatataaagtgaaaattatttttataatttttttatttttagggtaccatgtcgtagcc

SEQ ID NO: 544865 - DNA, 75 bp, synthetic construct
  source 1..75: mol_type = other DNA
aggaggcaacaagcatggcagccccatcctcagtacagcaggcacagaaagcgattagcgatatcaaacagcagt

SEQ ID NO: 544866 - DNA, 75 bp, synthetic construct
  source 1..75: mol_type = other DNA
gctctcaatgccattacatgaagccagctggcgtctatgtatgcccgaaatgtgggcataagccgctgggcggtg

SEQ ID NO: 544867 - DNA, 75 bp, synthetic construct
  source 1..75: mol_type = other DNA
agcgtattcgcggcgtgcgacaggtgatatccgacggcaacggcgtgctgctgccggagatccgcattcgggaaa

SEQ ID NO: 544868 - DNA, 75 bp, synthetic construct
  source 1..75: mol_type = other DNA
accttagacgcgatgcccggtaagcagatggcgattgatgccgatcttaacgccgggttgatcaatcaggcgcag

SEQ ID NO: 544869 - DNA, 75 bp, synthetic construct
  source 1..75: mol_type = other DNA
cgaataatgaagatcttattttaaatatcattgtgttatgcgcactgtgtggtgtcggaacacctgttgttacgc

SEQ ID NO: 544870 - DNA, 75 bp, synthetic construct
  source 1..75: mol_type = other DNA
acgttttggcgaatggccgaacggactgagcgattacccgatggacatcacgccaacagtttcaaacttcattac

SEQ ID NO: 544871 - DNA, 75 bp, synthetic construct
  source 1..75: mol_type = other DNA
ggtgtatgttcaggcggatgccaaattccgtatgctgccagaagatgtcgataaactttatgtccgcagcgccaa

SEQ ID NO: 544872 - DNA, 75 bp, synthetic construct
  source 1..75: mol_type = other DNA
ttggtgtactgttggcagccacgctttttaaccagaaaaatgatgtttactttatggtgggcttgttaaccacta

SEQ ID NO: 544873 - DNA, 75 bp, synthetic construct
  source 1..75: mol_type = other DNA
ctggtgatgtatctgttcttgcagaatatgcgagcaacgctgatccccaccattgcggtacccgtggtgttgtta

SEQ ID NO: 544874 - DNA, 75 bp, synthetic construct
  source 1..75: mol_type = other DNA
tattcgcggcgtgcgacaggtgatttccgacggcaacggcgtattgttgccggagatccgcattcgggaaaattt

SEQ ID NO: 544875 - DNA, 75 bp, synthetic construct
  source 1..75: mol_type = other DNA
cctgcttggctttaccggctggcgaatgagcaaacgcccgcaggcagcagaagcggaagagaaaagcctcgaaac

SEQ ID NO: 544876 - DNA, 75 bp, synthetic construct
  source 1..75: mol_type = other DNA
gtctctgcaacattgctggctattttcttcgtaccggtgttctttgtcgtgatccgccgttgctttaaagggtaa

SEQ ID NO: 544877 - DNA, 75 bp, synthetic construct
  source 1..75: mol_type = other DNA
tgatgttcagcgccctgcttggttttaccggctggcggatgagcaagcgcccgcaagcggcggaggcggaagaga

SEQ ID NO: 544878 - DNA, 75 bp, synthetic construct
  source 1..75: mol_type = other DNA
atcatcaaatagttacctctatcgaaagcttaggtattattgaaccaataatagtattctatgacaaagataaag

SEQ ID NO: 544879 - DNA, 75 bp, synthetic construct
  source 1..75: mol_type = other DNA
tgtatctgaagacggttcttattctgacagtggtaagcgttgttgtcttgtatctttcgtcagataagtttatgc

SEQ ID NO: 544880 - DNA, 75 bp, synthetic construct
  source 1..75: mol_type = other DNA
ttttatctttgccctgaacatattatctcagacattgttaacgactggcaggatgcagatacactggaaaaaata

SEQ ID NO: 544881 - DNA, 75 bp, synthetic construct
  source 1..75: mol_type = other DNA
tccgtaaaatgcacaaaggccgtaaccgcggtctggcgcagggcacggatgttagcttcggcagcttcggtctga

SEQ ID NO: 544882 - DNA, 75 bp, synthetic construct
  source 1..75: mol_type = other DNA
ggtgtgctgcagtttgatgtggtggtagcgcgcctgaagagcgaatacaacgttgaagcagtgtatgagtcagtc

SEQ ID NO: 544883 - DNA, 75 bp, synthetic construct
  source 1..75: mol_type = other DNA
agggctgaacaacccggatctcgatgctgcggttggtgaagatctggcgcaacaattgcgcgatgaactggaact

SEQ ID NO: 544884 - DNA, 75 bp, synthetic construct
  source 1..75: mol_type = other DNA
gatgaacgcggttcagctttatcgcccatcagtggctcagcgtcagaaagagatgctgaatctctcgctgcaaaa

SEQ ID NO: 544885 - DNA, 75 bp, synthetic construct
  source 1..75: mol_type = other DNA
ctgctgcaaaacggcactttcgattttgaatgcggttctaccaccaacaacgtcgaacgccaaaaacaggcggct

SEQ ID NO: 544886 - DNA, 75 bp, synthetic construct
  source 1..75: mol_type = other DNA
atggtttgtcagcaggtaagaaaatatcattttaaacaaagcgtaagttgtatttctctgctgagtgttattgtt

SEQ ID NO: 544887 - DNA, 75 bp, synthetic construct
  source 1..75: mol_type = other DNA
gtgattgagagcaatattactggttttgcagccagccagattagctttaacgagttacaagagttaaagaaaatc

SEQ ID NO: 544888 - DNA, 75 bp, synthetic construct
  source 1..75: mol_type = other DNA
aaggcgtgctgaatgtgaagcaaggggcagggatcttctttgttgattccaccgataagctcaatcagaaatcat

SEQ ID NO: 544889 - DNA, 75 bp, synthetic construct
  source 1..75: mol_type = other DNA
gcgctccaacgtcaacctgtacgacttcctgctgaacggtaaactggggctttcgcagttcgccgatggtgacac

SEQ ID NO: 544890 - DNA, 75 bp, synthetic construct
  source 1..75: mol_type = other DNA
atggctttgtcatcccatttaacatgccagcgattatcgaactcggcactgcaacaggttttgactttgagctga

SEQ ID NO: 544891 - DNA, 75 bp, synthetic construct
  source 1..75: mol_type = other DNA
ttgaaacagatcgctttctacaggcgttctggaaggcccggtaccttccgtgggttaaaagaacgcgtcacttgg

SEQ ID NO: 544892 - DNA, 75 bp, synthetic construct
  source 1..75: mol_type = other DNA
gattaatcaactggcagataaacaaaccattaaacaaactttatttgcccgtcagccagcaaaaatccacaaacc

SEQ ID NO: 544893 - DNA, 75 bp, synthetic construct
  source 1..75: mol_type = other DNA
atgccattctatttcaggaaggagtgtccgttaaactcaggctacctcaatgtgattaatcaactggcagataaa

SEQ ID NO: 544894 - DNA, 75 bp, synthetic construct
  source 1..75: mol_type = other DNA
gattgcctgctggctatgtggtgggtgccgacgcagccggttgaggcactgaaggtagtcgaggcgtggggcttc

SEQ ID NO: 544895 - DNA, 75 bp, synthetic construct
  source 1..75: mol_type = other DNA
ctaccagacaagaatatgtggcacgttttataatccggagacgcaacagatacaggaatttaagtactgcggcgt

SEQ ID NO: 544896 - DNA, 75 bp, synthetic construct
  source 1..75: mol_type = other DNA
cagcaaccagggacttgtcgtttccgttctgtcaacgctgattgccattgccatcacggtggcgggaacggaagc

SEQ ID NO: 544897 - DNA, 75 bp, synthetic construct
  source 1..75: mol_type = other DNA
atgcgcttaatgttcttagcaagaatcacattgatatcgtgcttagtgacgttaacatgccgaatatggatggtt

SEQ ID NO: 544898 - DNA, 75 bp, synthetic construct
  source 1..75: mol_type = other DNA
gggaactggtgctgaagaaaaacctgccaccttcatcgttaagcatcgtctattcgatgccggttgataaggtgc

SEQ ID NO: 544899 - DNA, 75 bp, synthetic construct
  source 1..75: mol_type = other DNA
gccgccatcatcgttaagtattgtttactcggtgcccgtagatcaggtgctggaacgcattcgtatgctgatact

SEQ ID NO: 544900 - DNA, 75 bp, synthetic construct
  source 1..75: mol_type = other DNA
gggttgaaggcgcgcactccggtgaacatgccatggtactgccttatggttccactatgcgtgcggttctggaaa

SEQ ID NO: 544901 - DNA, 75 bp, synthetic construct
  source 1..75: mol_type = other DNA
ttgatggtgcgttacaggttgatcccaaaggtaatattttcctgccgaacgttggtccggtgaaagttgctggcg

SEQ ID NO: 544902 - DNA, 75 bp, synthetic construct
  source 1..75: mol_type = other DNA
ttaccccctggatctgatttcaggcgttgggtgtggatcactattgcaccgttcgtgacaattgctgagctgaca

SEQ ID NO: 544903 - DNA, 75 bp, synthetic construct
  source 1..75: mol_type = other DNA
cgggtgggatatgtggggaaatcagtgcgactccgattttgaactggctccaggcatggcgattaaaccatgcaa

SEQ ID NO: 544904 - DNA, 75 bp, synthetic construct
  source 1..75: mol_type = other DNA
gtggtggtggagaacgtcgagcgcgtgatgatggaggataagctcccgccaaaagaagcgacggaaaaatcgatg

SEQ ID NO: 544905 - DNA, 75 bp, synthetic construct
  source 1..75: mol_type = other DNA
tcctgtgccttgctgcactctatgaaagctggtcaattcctgtctcggttatgttggtcgtgccgttagggattg

SEQ ID NO: 544906 - DNA, 75 bp, synthetic construct
  source 1..75: mol_type = other DNA
ctgccagcttagtcagcgtgcgtcctaatggcctggaagacaccgcgcagtttaaactggaagttgaccaggaaa

SEQ ID NO: 544907 - DNA, 75 bp, synthetic construct
  source 1..75: mol_type = other DNA
acaaactccagctcgctacgccgttgctgccgcaggaagttcaacagcaggggatcagcgttgaaaagtccagta

SEQ ID NO: 544908 - DNA, 75 bp, synthetic construct
  source 1..75: mol_type = other DNA
ccttatgacaccacaccattcgtgcagctttctattcacgaagtggtcaaaactctgttcgaagcaattttactg

SEQ ID NO: 544909 - DNA, 75 bp, synthetic construct
  source 1..75: mol_type = other DNA
gcgcgtgatgatggaggataagctcccgccaaaagaagcgacggaaaaatcgatgtcgcaaattcagggcgcact

SEQ ID NO: 544910 - DNA, 75 bp, synthetic construct
  source 1..75: mol_type = other DNA
cagatccaccctgggtataccgggacaaagccgcagatggtaatcgcggtgccggttttaaatatccggttatga

SEQ ID NO: 544911 - DNA, 75 bp, synthetic construct
  source 1..75: mol_type = other DNA
atgcttggcaccagcgtactgacagcaaccagcgaccaggcaattatgcgggcaaatgcgcaggcgctgggcttt

SEQ ID NO: 544912 - DNA, 75 bp, synthetic construct
  source 1..75: mol_type = other DNA
ggagacggaggaataaagagccgtggttctcagcacagggtgatggcgttcaaggatgcgcagtcacacttcgcc

SEQ ID NO: 544913 - DNA, 75 bp, synthetic construct
  source 1..75: mol_type = other DNA
acagtggaagctgtacaagctggtcgggctgagcctgtcgtaattatcggtgcacggggccaaggtaaatcacac

SEQ ID NO: 544914 - DNA, 75 bp, synthetic construct
  source 1..75: mol_type = other DNA
tgcaaccctactttaaacataaaattaatctttctgatagttcatattttgtttcatttgattatcgggatggca

SEQ ID NO: 544915 - DNA, 75 bp, synthetic construct
  source 1..75: mol_type = other DNA
tggtagtcgacaaccagataaactggttatgggtatgggacacatgactcgcgccaatagtgaagattgcctgtt

SEQ ID NO: 544916 - DNA, 75 bp, synthetic construct
  source 1..75: mol_type = other DNA
gctatggtgccattaaggatgcacaggcgttgtctgaaggagtggtggcttcttcccgttacccgaaacactggc

SEQ ID NO: 544917 - DNA, 75 bp, synthetic construct
  source 1..75: mol_type = other DNA
taacctcaaacaggaagagcacgccattgtccaggtggaagaaatgcaggcggtgaatgccgtgctgtatggcaa

SEQ ID NO: 544918 - DNA, 75 bp, synthetic construct
  source 1..75: mol_type = other DNA
tggattatcagcaggcggtggagcgtcttccgggggaagatccggcccgtcttaatgacccggcctaccgtcgcc

SEQ ID NO: 544919 - DNA, 75 bp, synthetic construct
  source 1..75: mol_type = other DNA
tatcccgacgagtcgggttatagcgcaacttaccgaggagcaacattggcaattattttctgaacagttggaatt

SEQ ID NO: 544920 - DNA, 75 bp, synthetic construct
  source 1..75: mol_type = other DNA
cctgcgatcaggtttttttaagtgatgccgacacctatgttccgcccgatcaagacggaatgggctatatgctgg

SEQ ID NO: 544921 - DNA, 75 bp, synthetic construct
  source 1..75: mol_type = other DNA
cttgcccgatccgttgtatgacccaaatgaatattcctcgggtgaaagagtttgggtgcccagcacaggtggtaa

SEQ ID NO: 544922 - DNA, 75 bp, synthetic construct
  source 1..75: mol_type = other DNA
cggtgaaacccgcgtactgcgtccgggttacgtcaagccgaaacacgaatttaattaccagcaggcggtggagcg

SEQ ID NO: 544923 - DNA, 75 bp, synthetic construct
  source 1..75: mol_type = other DNA
gaggtcgatttcggcagatcaacgaaaaacaatattacacaggcaggtgggagtgagtggtcaaatcagaaccgc

SEQ ID NO: 544924 - DNA, 75 bp, synthetic construct
  source 1..75: mol_type = other DNA
ttgtaccgtggcgtttgcccaggccgtgttcgatggcgaaatgacggtcgaaggcgtcactgctcgcctggcaac

SEQ ID NO: 544925 - DNA, 75 bp, synthetic construct
  source 1..75: mol_type = other DNA
cacgaatttaattaccagcaggcggttgagcgtcttcccggtgaagatccggctcagctgaacgacccggcctac

SEQ ID NO: 544926 - DNA, 75 bp, synthetic construct
  source 1..75: mol_type = other DNA
ggggtattacggcgatctggccattgtggtggcgaaaacgtcttatatagcagaagacggtaccgaaaaacgtta

SEQ ID NO: 544927 - DNA, 75 bp, synthetic construct
  source 1..75: mol_type = other DNA
ggaaatacggccgcagagggtattcgttgctacggtgccattcaggatgcgcaggcattgtctgaaggcgtggtg

SEQ ID NO: 544928 - DNA, 75 bp, synthetic construct
  source 1..75: mol_type = other DNA
tcgtattgatggcgagcgcaggatacagcgagctgccggaagagattaccgacagcccgatgattgatcgtaatg

SEQ ID NO: 544929 - DNA, 75 bp, synthetic construct
  source 1..75: mol_type = other DNA
aatggtgggtgggattggcccaagaatttggggtttgaaggtgatccaatcaaaactataattccggtaggcaca

SEQ ID NO: 544930 - DNA, 75 bp, synthetic construct
  source 1..75: mol_type = other DNA
tgtccggcagagttttcagtgaaacaactgaaagacgttatgacacaacgcgggataccatttaccacctgcttt

SEQ ID NO: 544931 - DNA, 75 bp, synthetic construct
  source 1..75: mol_type = other DNA
tggtgagaaagtctcagcggatgtgggtaataacctgaccatttcgagccttcaggacagtgaccgttacgacag

SEQ ID NO: 544932 - DNA, 75 bp, synthetic construct
  source 1..75: mol_type = other DNA
agaagcgtctgcaggaagcgcaggttatcagccagattagcggtcagatgagtaacatcgtcatgacgtatggcg

SEQ ID NO: 544933 - DNA, 75 bp, synthetic construct
  source 1..75: mol_type = other DNA
ttccgtccacggacccggacagtccgtatctgattacggtgaacccgaaactggatggtctcggacaggtggaca

SEQ ID NO: 544934 - DNA, 75 bp, synthetic construct
  source 1..75: mol_type = other DNA
cggagatatcagtatcaccggtgccgctgtttctgccggtgacagcgtgttactgtccgccggtaatgacctgaa

SEQ ID NO: 544935 - DNA, 75 bp, synthetic construct
  source 1..75: mol_type = other DNA
atgttttttattggggggaaaatcctgagttcaggaaattatcccctattgtaaaattagccgaacaattatatt

SEQ ID NO: 544936 - DNA, 75 bp, synthetic construct
  source 1..75: mol_type = other DNA
gaaaactctaaacctaatcaagggttaattgattttaagaaaaatattgggtgtagtctaactaagaaaatcaca

SEQ ID NO: 544937 - DNA, 75 bp, synthetic construct
  source 1..75: mol_type = other DNA
taaatttcaacaaaatatcaaacttcctgttgctgataaaacagagcagaaaacagatgtattagtattctggaa

SEQ ID NO: 544938 - DNA, 75 bp, synthetic construct
  source 1..75: mol_type = other DNA
acaacatcaccctggccagttatctgcgggaatgcattgaagccagaggactgatgtcacgggttacggtatctc

SEQ ID NO: 544939 - DNA, 75 bp, synthetic construct
  source 1..75: mol_type = other DNA
taggagcaagcagtttaaaggtcgtagggccagataataggctttgctctaattttggtactagttttgctgctc

SEQ ID NO: 544940 - DNA, 75 bp, synthetic construct
  source 1..75: mol_type = other DNA
cagatataaaagtctggaatttgtctttgggaggcggaccatgtaatgagcagacgtttagtgattttgcgatgg

SEQ ID NO: 544941 - DNA, 75 bp, synthetic construct
  source 1..75: mol_type = other DNA
ggctggctgtcgtcggcggttttaaaatcggtgatatcgaccctcgtggcgaaacggctgatttcaccagcgttt

SEQ ID NO: 544942 - DNA, 75 bp, synthetic construct
  source 1..75: mol_type = other DNA
gaggtgatgctggacaaaattaccggaaaaacgccggtggcggcctatgtctccccggttgttgaaggaaaagtg

SEQ ID NO: 544943 - DNA, 75 bp, synthetic construct
  source 1..75: mol_type = other DNA
gcggtggtgtccttcaaagggtattacggcgatctggccattgtggtggcaaaaacgtcttatgtggcagaggac

SEQ ID NO: 544944 - DNA, 75 bp, synthetic construct
  source 1..75: mol_type = other DNA
ctgaacgatccggcttaccgccgtctgcgtatcattaccgataacctcaaacaggaagagcacgcgattgtccag

SEQ ID NO: 544945 - DNA, 75 bp, synthetic construct
  source 1..75: mol_type = other DNA
ccgatcattattgatgttaaaaacgcgggcgcggaattttacgatcaggaagtggtggtcgataaagatcagctg

SEQ ID NO: 544946 - DNA, 75 bp, synthetic construct
  source 1..75: mol_type = other DNA
ttttgtgaacagcggcaaacctgttttcgccatctgtcacggtccccagttgctgatcagcgccgatgtgatccg

SEQ ID NO: 544947 - DNA, 75 bp, synthetic construct
  source 1..75: mol_type = other DNA
ggatgaccgtgggcgatccggcccgtgaattcaccatgacgcagtccgcaccgctgatggtgctgccggatccgg

SEQ ID NO: 544948 - DNA, 75 bp, synthetic construct
  source 1..75: mol_type = other DNA
tgatagcgtgatgttcgccaccgatgaagatgttctgcttccggccaggagtttgcatatcgccgttcctgccac

SEQ ID NO: 544949 - DNA, 75 bp, synthetic construct
  source 1..75: mol_type = other DNA
cccagggaacgcgggccagtgcctctgatagcgtgatgttcgccaccgatgaagatgttctgcttccggccagga

SEQ ID NO: 544950 - DNA, 75 bp, synthetic construct
  source 1..75: mol_type = other DNA
cccaaggaacacgagccagcgcctctgacagcgtgatgtttgctaccgatgaagatgttctgattccggcgggaa

SEQ ID NO: 544951 - DNA, 75 bp, synthetic construct
  source 1..75: mol_type = other DNA
gcatcccggcattgtcgacgttgctgttctttctcccgctcccggcactgtcgagctgtatccgctgctcagcac

SEQ ID NO: 544952 - DNA, 75 bp, synthetic construct
  source 1..75: mol_type = other DNA
taccaacaataaaagcagataatggcacctattatgattttaacaatggtgcaaggatattattcccgaaaggag

SEQ ID NO: 544953 - DNA, 75 bp, synthetic construct
  source 1..75: mol_type = other DNA
tcgatggcgtctatgacgttgcgctgaatatgcctacaaaacgtattttgcaggcgcatgaatgggcggaatgca

SEQ ID NO: 544954 - DNA, 75 bp, synthetic construct
  source 1..75: mol_type = other DNA
aactgaaattatcttcccagagatcaatgttcaaaaagatttttgcaatactttcagaaaaacaataaatttgaa

SEQ ID NO: 544955 - DNA, 75 bp, synthetic construct
  source 1..75: mol_type = other DNA
tcttcccggtgaagatccagctcaactgaacgatccggcttaccgtcgtctgcgtatcatcaccgataatctcaa

SEQ ID NO: 544956 - DNA, 75 bp, synthetic construct
  source 1..75: mol_type = other DNA
ctggctgacccggcttaccgtcgtcgccgtattattcggcagaatatgctggatgaaaatctggcgattgcccag

SEQ ID NO: 544957 - DNA, 75 bp, synthetic construct
  source 1..75: mol_type = other DNA
actctggcgcagcttgacgaggcgctggcaacggcagatgtgctggtgatgctggtcgatcatagtcagttcaaa

SEQ ID NO: 544958 - DNA, 75 bp, synthetic construct
  source 1..75: mol_type = other DNA
gggcattatgcgttcgaacgtgaaattgggcgatctggtgaaagagggcgatgttattgcctggattggcgagca

SEQ ID NO: 544959 - DNA, 75 bp, synthetic construct
  source 1..75: mol_type = other DNA
accgaagaggtgatgctggacaaaattaccggaaaaacgccggtggcggcctatgtctccccgatcgttgaagga

SEQ ID NO: 544960 - DNA, 75 bp, synthetic construct
  source 1..75: mol_type = other DNA
acggtgatctggccattgtggtggcaaaaacgtcttatgtggcagaagacggtaccgaaaaacgttatctgccgg

SEQ ID NO: 544961 - DNA, 75 bp, synthetic construct
  source 1..75: mol_type = other DNA
cccggaaagattctggtgttgtgctacaacattaccctggccagctatctgcgggaatgcattgaggccagaggg

SEQ ID NO: 544962 - DNA, 75 bp, synthetic construct
  source 1..75: mol_type = other DNA
aggggattcgttgctatggagccattaaggatgcacaggcgttgtctgaaggagtggtggcttcttcccgttacc

SEQ ID NO: 544963 - DNA, 75 bp, synthetic construct
  source 1..75: mol_type = other DNA
ttagccaaggattgattaagtcattagaagttcccctaccttctttagatgaacaaaagcgtatcgcagatattc

SEQ ID NO: 544964 - DNA, 75 bp, synthetic construct
  source 1..75: mol_type = other DNA
tgcgcaggcgttgtccgaaggtgtggtggcttcttcccgttacccgaaacactggctgaccgtgggcgatcggcc

SEQ ID NO: 544965 - DNA, 75 bp, synthetic construct
  source 1..75: mol_type = other DNA
aatggctttaagctgttccgcgaaaaactggatacccgtcgcggctcaaattcacaactcgaaacggcagtgaaa

SEQ ID NO: 544966 - DNA, 75 bp, synthetic construct
  source 1..75: mol_type = other DNA
tctgccggtgggcacactggtcctggggaatacggcagcagagggcattcgttgctatggtgccattcaggatgc

SEQ ID NO: 544967 - DNA, 75 bp, synthetic construct
  source 1..75: mol_type = other DNA
aagcgactgcagaatttaaagagaaaaattgcgtcggactcagtgcttctgcatgctctgtcaaaatggaggaac

SEQ ID NO: 544968 - DNA, 75 bp, synthetic construct
  source 1..75: mol_type = other DNA
cgctgagcgtcagggcgaccacgctggatggtgacggcctgttgcagggcgccggtgcactggcgcttgctggcg

SEQ ID NO: 544969 - DNA, 75 bp, synthetic construct
  source 1..75: mol_type = other DNA
gccgcagatggtggtacaggccatcacgggcgtgctgggcggactgaatgcagggaatccgggtcaggcactggc

SEQ ID NO: 544970 - DNA, 75 bp, synthetic construct
  source 1..75: mol_type = other DNA
tgataccccagggaaaatcgacccaatcccgcatccgtatggcgaagatctgccgtgcgcggataacaaacctgt

SEQ ID NO: 544971 - DNA, 75 bp, synthetic construct
  source 1..75: mol_type = other DNA
tcgtatgctggaagcgcagggctttcgcgtcgggatcatcgcccagccggactggagcagcaaagacgactttat

SEQ ID NO: 544972 - DNA, 75 bp, synthetic construct
  source 1..75: mol_type = other DNA
aggcggtgaagcctgtaagcgaggagaagcagtcaataaagcgtatgccggagcgttggccactggtagtgtagc

SEQ ID NO: 544973 - DNA, 75 bp, synthetic construct
  source 1..75: mol_type = other DNA
aaaagcgatcaaaggtgctgagaaggcacttaaagctggtgatcttgaaactgcgtctaagctgatcaacaaggc

SEQ ID NO: 544974 - DNA, 75 bp, synthetic construct
  source 1..75: mol_type = other DNA
ggtcgcgaaagaacgcgttgaagcagaaaacgaacgctacaggaaagaaaattgtgagggaatgagtgctgatgc

SEQ ID NO: 544975 - DNA, 75 bp, synthetic construct
  source 1..75: mol_type = other DNA
agcatcaacgccagagatgcacgtcttgcaggtacgctggcagcacaacagaccatggtggtgaacgccagtgaa

SEQ ID NO: 544976 - DNA, 75 bp, synthetic construct
  source 1..75: mol_type = other DNA
aaccatcagcagtcgaagtctgagacgaaatatcagcacgatatcgtctccggctcaaccctcagcgccggtaac

SEQ ID NO: 544977 - DNA, 75 bp, synthetic construct
  source 1..75: mol_type = other DNA
caggtatagcgggtggtgttgcaggtgggaatactgcgggtgtggctaccggagctgctgccgggaagaatgttg

SEQ ID NO: 544978 - DNA, 75 bp, synthetic construct
  source 1..75: mol_type = other DNA
aatatgctggaacgaggatatgatcctaaacttgtcgatgatgcaataaaacaacttaaggaaaggaactctcaa

SEQ ID NO: 544979 - DNA, 75 bp, synthetic construct
  source 1..75: mol_type = other DNA
cataccgaagaagggccgttgtcgaagatgatgaagccgggcatgggcagctatgaccgctttaaagagctgttc

SEQ ID NO: 544980 - DNA, 75 bp, synthetic construct
  source 1..75: mol_type = other DNA
gcgtgattccatagacggtaaacgccgcgttattcagtgctttgacgagttccacgcctatcttgacgatccggt

SEQ ID NO: 544981 - DNA, 75 bp, synthetic construct
  source 1..75: mol_type = other DNA
cttaaaggtgagtccggttctggcaagactgaaatggtaatgtacattagccacatgatgaattggccgctgaca

SEQ ID NO: 544982 - DNA, 75 bp, synthetic construct
  source 1..75: mol_type = other DNA
acgcgcggaattgatgttggtgcccacgccgagatcatccgcctgattgaaacgctgtgcgccgatgggctggcg

SEQ ID NO: 544983 - DNA, 75 bp, synthetic construct
  source 1..75: mol_type = other DNA
gctcaacgtcgctgataccgtcccgccgactgctcacgcttattctaaagcgctggagtttctttattttctggt

SEQ ID NO: 544984 - DNA, 75 bp, synthetic construct
  source 1..75: mol_type = other DNA
cgatattgatgcagatattaagacaatggacaacgtacttagcgtgttgtccggtgaaccacaaaacgccgaaat

SEQ ID NO: 544985 - DNA, 75 bp, synthetic construct
  source 1..75: mol_type = other DNA
gccttcctcactgatgcggaatacgatgcgctgatgtcgattactgaacactccaggcagttcctggttaaacag

SEQ ID NO: 544986 - DNA, 75 bp, synthetic construct
  source 1..75: mol_type = other DNA
tttacccggatatttgtccgcatatggacactaaccacgaaccgacgatcaacctctatcgccgtgcgcgcgatc

SEQ ID NO: 544987 - DNA, 75 bp, synthetic construct
  source 1..75: mol_type = other DNA
ggacactaaccacgaaccgacgatcaacctctatcgccgtgcgcgtgatctgaaaggcattaaaaaaatacctca

SEQ ID NO: 544988 - DNA, 75 bp, synthetic construct
  source 1..75: mol_type = other DNA
atgcttcgcgtattctgcaccacgaaactaacccaggctgcgcccgcgcattgatgcaaaaacacggcgaccgct

SEQ ID NO: 544989 - DNA, 75 bp, synthetic construct
  source 1..75: mol_type = other DNA
atcgtgaaagaggcgctgcctggctggagcggcgtggattccacccgtcttgataccccagggaaaatagacccg

SEQ ID NO: 544990 - DNA, 75 bp, synthetic construct
  source 1..75: mol_type = other DNA
aaagcgtcgtctacgcaatctcgtccggtgaatactggtgcgaagaaacgccctaaagcggcggttggacgttaa

SEQ ID NO: 544991 - DNA, 75 bp, synthetic construct
  source 1..75: mol_type = other DNA
tcggcggtattgaagccagcctgcggcgtaccgcgcattatgattactggtctgataccgtgcgccgttcagtgc

SEQ ID NO: 544992 - DNA, 75 bp, synthetic construct
  source 1..75: mol_type = other DNA
ttagcgggtgctctggccggagcttcggccccggaactggcgcacctgctgaaatcaacagaaaaagacccggca

SEQ ID NO: 544993 - DNA, 75 bp, synthetic construct
  source 1..75: mol_type = other DNA
cacgcaggtggtgaccgccatgaacgccacccaccagctcggcggcgaaaactatgttctgtggggcggtcgcga

SEQ ID NO: 544994 - DNA, 75 bp, synthetic construct
  source 1..75: mol_type = other DNA
gggaacgctggcgggattaatcacgccccctcgcctgatacggatgctggaacagacggctcttgaacacaacgt

SEQ ID NO: 544995 - DNA, 75 bp, synthetic construct
  source 1..75: mol_type = other DNA
tctatcgctcgctaaatcaatactggcgatacggtcaagaaatcaatgctctactgccagcatacaaacattgtg

SEQ ID NO: 544996 - DNA, 75 bp, synthetic construct
  source 1..75: mol_type = other DNA
ttttgatcccgctagattgcacacttatgaacttgatcagtttgttttgcgctatgaactgggactggttgacgc

SEQ ID NO: 544997 - DNA, 75 bp, synthetic construct
  source 1..75: mol_type = other DNA
gtattcagcgttacgcaaaccgtaaagcacctgaactgagtacccaaaaagaagagttctttttaggcgaatttg

SEQ ID NO: 544998 - DNA, 75 bp, synthetic construct
  source 1..75: mol_type = other DNA
gctatgagcttggattagttgatcccgaactggatgattttctgagtacacttgcgaaattacatcttacgtttg

SEQ ID NO: 544999 - DNA, 75 bp, synthetic construct
  source 1..75: mol_type = other DNA
ttcataaaaagcagtaataaggcgaacatgatgtttattcatgagcatagtaacggatacaatgctctcagattg

SEQ ID NO: 545000 - DNA, 75 bp, synthetic construct
  source 1..75: mol_type = other DNA
gacaaagcccgagatgccgcaatagcagaggcgtgtccaccaggaagcaagggaagcggtgcctgtggcgcattg

SEQ ID NO: 545001 - DNA, 75 bp, synthetic construct
  source 1..75: mol_type = other DNA
gaaacaatgcggcttccggtgctgctggggcattcagtggtgaacttgctgcccggtatatcattgataactact

SEQ ID NO: 545002 - DNA, 75 bp, synthetic construct
  source 1..75: mol_type = other DNA
ctgatacagagaatatgggcggtggttcgccgtctttacagttaaggcacaattcaaaagaggttccgcacccaa

SEQ ID NO: 545003 - DNA, 75 bp, synthetic construct
  source 1..75: mol_type = other DNA
gtggtgtgcatacattaaaactccatcagttatcaggtaacccaggaacaattactgtttatgctttttccgata

SEQ ID NO: 545004 - DNA, 75 bp, synthetic construct
  source 1..75: mol_type = other DNA
aactatagacgaaccgattacgacagacctgtctatgtaacaatgacaggtgcaactggaaaccaagtatataac

SEQ ID NO: 545005 - DNA, 75 bp, synthetic construct
  source 1..75: mol_type = other DNA
atcgccagtgcgttaagccaggcgatgcaacttcattgatccggcttttttggctactacaacacgaatcattgg

SEQ ID NO: 545006 - DNA, 75 bp, synthetic construct
  source 1..75: mol_type = other DNA
gaatgcttgtacgagaagcgatagatcgtgtgctaggtacagatgtaccgtctgcaatgaagaatgatatgtctt

SEQ ID NO: 545007 - DNA, 75 bp, synthetic construct
  source 1..75: mol_type = other DNA
aagtatggcactggcagtgagattcagcgaggtatacaggccgcgacagccgcgcttcagggactggcgggtggt

SEQ ID NO: 545008 - DNA, 75 bp, synthetic construct
  source 1..75: mol_type = other DNA
cggggcatattcccgagcatgggctgagagcaacgcagaggcacgccgagaggctgagcgtcagcgcattgagaa

SEQ ID NO: 545009 - DNA, 75 bp, synthetic construct
  source 1..75: mol_type = other DNA
gagcagaagaaaagcgggctgacggttgccctttccggcacagtgggcagtgccatcaataatgcggtcaccagt

SEQ ID NO: 545010 - DNA, 75 bp, synthetic construct
  source 1..75: mol_type = other DNA
tcagaggtattactcaggttcagtatgaaatccccacaaaagatgctgctgggaatacgactggtaattataaag

SEQ ID NO: 545011 - DNA, 75 bp, synthetic construct
  source 1..75: mol_type = other DNA
cctgatagttttagtgtaacatactctattgatggaggccgtcctgttatcaaagacatcagcaacgcacctgga

SEQ ID NO: 545012 - DNA, 75 bp, synthetic construct
  source 1..75: mol_type = other DNA
cttatccgtccgccgcgtccgccgcagcctccgctggctgaacgggaaatggcctggcggttgatccgccagtta

SEQ ID NO: 545013 - DNA, 75 bp, synthetic construct
  source 1..75: mol_type = other DNA
acaagagattgagactgaattacaacgttatttagaaattgctaaacctggcgaaatcatttttctgtgcggtag

SEQ ID NO: 545014 - DNA, 75 bp, synthetic construct
  source 1..75: mol_type = other DNA
ggtatcaataccggaatgctcgctaattttgccagagaaggagctaaatgccatcaggtgatccgatcggctatt

SEQ ID NO: 545015 - DNA, 75 bp, synthetic construct
  source 1..75: mol_type = other DNA
gtcataacctgctgcacgaatattttgcctgcccggagcgcttttattttttcacccccacaggcctgtctgccg

SEQ ID NO: 545016 - DNA, 75 bp, synthetic construct
  source 1..75: mol_type = other DNA
acaaccgcgaactgagctatctgcgggaaacgggagccgaatttgccgcccgtcatcctaaagtcgccgcccggc

SEQ ID NO: 545017 - DNA, 75 bp, synthetic construct
  source 1..75: mol_type = other DNA
gccgggacgatctgaccgtggatgcggccatccctgtggcaggtgtggggcttatccgtccacctcgtccaccac

SEQ ID NO: 545018 - DNA, 75 bp, synthetic construct
  source 1..75: mol_type = other DNA
ttgcccgcgaagacggccaccttttctcctgcactgttcaggacttctctgacggcggtctggggatcaagatca

SEQ ID NO: 545019 - DNA, 75 bp, synthetic construct
  source 1..75: mol_type = other DNA
tgcgttacccagccgtttaacccgctggcgcagtttatcttcctgatgctgctgtggggtgtagcgctgatcgta

SEQ ID NO: 545020 - DNA, 75 bp, synthetic construct
  source 1..75: mol_type = other DNA
atcgccactccttctggagtgaaatctacgaaacggtactggcgtggtatatcgcgccaccgacgttggtagcgc

SEQ ID NO: 545021 - DNA, 75 bp, synthetic construct
  source 1..75: mol_type = other DNA
tcgtcgcccatcgtggtggcggtaagctggccccggagaacaccctggcggcaatcgacgtcggggcaaaatacg

SEQ ID NO: 545022 - DNA, 75 bp, synthetic construct
  source 1..75: mol_type = other DNA
taccaacaataaaagcagataatggcgtgtgttatgattttaataatggcgcaagaatattatttccgaaagggg

SEQ ID NO: 545023 - DNA, 75 bp, synthetic construct
  source 1..75: mol_type = other DNA
atgaacgagctgcctgagcgcgttagccataaaacacagcatctcgatgagaaaaaagaactcggccatttgagc

SEQ ID NO: 545024 - DNA, 75 bp, synthetic construct
  source 1..75: mol_type = other DNA
cgcgtggattgtgctggtgctcggctacttccaggtggtatggccgctgaatcgtcagccggtgccattgccgaa

SEQ ID NO: 545025 - DNA, 75 bp, synthetic construct
  source 1..75: mol_type = other DNA
aggtggactggtggaagaagagtacgtcgactgggtgatctcgcggccctacatcttccttgtcctgctcaacct

SEQ ID NO: 545026 - DNA, 75 bp, synthetic construct
  source 1..75: mol_type = other DNA
tatatgcgtattccgcaggcagcggggctggcgaccgaaagtctctcggcgcatatcggtcagcgtattcgctgg

SEQ ID NO: 545027 - DNA, 75 bp, synthetic construct
  source 1..75: mol_type = other DNA
acagaaggtgaatttgctgctcaaacgcggacagcaagaatatgtcttcccgacgcaggtggcgcgtgtaatggg

SEQ ID NO: 545028 - DNA, 75 bp, synthetic construct
  source 1..75: mol_type = other DNA
ctcgtgtaccgttcaggatttctccgacggtggtttggggatcaagatcaacggtcaggcgcagattctggaagg

SEQ ID NO: 545029 - DNA, 75 bp, synthetic construct
  source 1..75: mol_type = other DNA
tcgactgtgaccatgtccccacacgttcattcctgcaaatgaccatgggctggttcctgaaagagaaacagctgg

SEQ ID NO: 545030 - DNA, 75 bp, synthetic construct
  source 1..75: mol_type = other DNA
aacgcaccagcaacggctggggcgtcgcgggtgaactgaactggcaggatttactgcgcgtggatgcaggcagtt

SEQ ID NO: 545031 - DNA, 75 bp, synthetic construct
  source 1..75: mol_type = other DNA
ctgacgtcatcactatcgaaacctcgcgttccgacatggagttgctggagtcattcgaagagtttgattatccga

SEQ ID NO: 545032 - DNA, 75 bp, synthetic construct
  source 1..75: mol_type = other DNA
gccaggtgaaactgctgctgaccacctattttgaaggcgtaacgccaaacctcgacacgattacggcgctgcctg

SEQ ID NO: 545033 - DNA, 75 bp, synthetic construct
  source 1..75: mol_type = other DNA
gcaggttctggcagaactggccaaacgtggtattgagtgggtacagattgatgaaccggcgctggtgctggaact

SEQ ID NO: 545034 - DNA, 75 bp, synthetic construct
  source 1..75: mol_type = other DNA
tacacgataatctctgctttcgcattagcagcccgcagcgcctggcgcatggtttcaacgctctcctgcggaatg

SEQ ID NO: 545035 - DNA, 75 bp, synthetic construct
  source 1..75: mol_type = other DNA
ctgcacaagcgtctgccttctgactggctgctgtctgcgggtcttatcaatggtcgtaacgtctggcgcgccgat

SEQ ID NO: 545036 - DNA, 75 bp, synthetic construct
  source 1..75: mol_type = other DNA
gagcagttcgaccgtctgagtctgctgaacgatattctgccggtttaccagcaggtgctggcggaactggcaaaa

SEQ ID NO: 545037 - DNA, 75 bp, synthetic construct
  source 1..75: mol_type = other DNA
agcagttcaaactgacctggactcaactgctggacgaagtcgacgaagcgctggcgctgggtcataaggtgaaac

SEQ ID NO: 545038 - DNA, 75 bp, synthetic construct
  source 1..75: mol_type = other DNA
gctgaccgacaaaccggtgaaagggatgctgactggcccggtgaccattctctgctggtcgttcccgcgtgaaga

SEQ ID NO: 545039 - DNA, 75 bp, synthetic construct
  source 1..75: mol_type = other DNA
gcgtgcgcgttttaaactgccagcgtggccgaccaccacgattggttccttcccgcaaactacggaaattcgtac

SEQ ID NO: 545040 - DNA, 75 bp, synthetic construct
  source 1..75: mol_type = other DNA
tttgtcttcacacaaaacggttgggtacagagctacggttcccgctgcgttaagccgccgattgtcattggtgac

SEQ ID NO: 545041 - DNA, 75 bp, synthetic construct
  source 1..75: mol_type = other DNA
tctgctggtcgttcccgcgtgaagatgtcagccgtgaaaccatcgccaaacagattgcgctggcgctgcgtgatg

SEQ ID NO: 545042 - DNA, 75 bp, synthetic construct
  source 1..75: mol_type = other DNA
ccaccttcttctgcggttcatgtgcggtgattcgccgtaagccgctggatgagattggcggcattgctgtcgaaa

SEQ ID NO: 545043 - DNA, 75 bp, synthetic construct
  source 1..75: mol_type = other DNA
atggctggaaaccttccaggcgaaagagctggaagcgaccgaaaaaatgctctctcttgagcagaaaatgagcat

SEQ ID NO: 545044 - DNA, 75 bp, synthetic construct
  source 1..75: mol_type = other DNA
gtcacctggcagagcaggttcaaccgttgcggatgcgcttaagtgaactggaacagcgtctgcgcgagcagcaag

SEQ ID NO: 545045 - DNA, 75 bp, synthetic construct
  source 1..75: mol_type = other DNA
caactggcggcagagcagtacaaacacgtcgatatggcgcgtgagctggcagagcacaacggtgccgaaggcgat

SEQ ID NO: 545046 - DNA, 75 bp, synthetic construct
  source 1..75: mol_type = other DNA
gttctatcgccacgctgtttgaattgtgtgaacgtttgcaaatgcagctcatcatcgcagcgccggaaaatatca

SEQ ID NO: 545047 - DNA, 75 bp, synthetic construct
  source 1..75: mol_type = other DNA
cttattcctgacctgaccctgctgcacttccgtaacaccacggaagccggggccaccagtggttcgcgcgataaa

SEQ ID NO: 545048 - DNA, 75 bp, synthetic construct
  source 1..75: mol_type = other DNA
tcgattctggtgatggtggtacagagttgggaagatgaatctcgccgcctgcgcggtaaagatatctctccttgc

SEQ ID NO: 545049 - DNA, 75 bp, synthetic construct
  source 1..75: mol_type = other DNA
atgattgaacgcggtaaatttcgctcactgacgctgattaactggaacggcttttttgcccgaacttttgacctt

SEQ ID NO: 545050 - DNA, 75 bp, synthetic construct
  source 1..75: mol_type = other DNA
gaaatggccgcagcagaatcagaaatcatggagacacgtaatacgccacgcggactgttacgaatcgatgccgcg

SEQ ID NO: 545051 - DNA, 75 bp, synthetic construct
  source 1..75: mol_type = other DNA
ccagttctggcattacctgaacgaacaggatgaaacgcccggatttgccgatgatataacctgggattttatcag

SEQ ID NO: 545052 - DNA, 75 bp, synthetic construct
  source 1..75: mol_type = other DNA
gaacgctacgaagcggatctcgatgagctgcagatccgtctggaagagcaaaacgaagtggtggcagaagccatc

SEQ ID NO: 545053 - DNA, 75 bp, synthetic construct
  source 1..75: mol_type = other DNA
agttcttatgacaccaaaaaagagctgcttaacgatctgcaacgcgaactgcaggatattggcgtgcgtgccgat

SEQ ID NO: 545054 - DNA, 75 bp, synthetic construct
  source 1..75: mol_type = other DNA
ggtctgcacggtaagctgaaagcgggtgtctgttattcgatgctcgacaccattaactcgcgccaccagcgcgta

SEQ ID NO: 545055 - DNA, 75 bp, synthetic construct
  source 1..75: mol_type = other DNA
accgaacacgttcacgtcgtcggcctgcgaggatttgcgccgcaactccctgaaacgcttccaggaagtgacgaa

SEQ ID NO: 545056 - DNA, 75 bp, synthetic construct
  source 1..75: mol_type = other DNA
gttacacagaatccccgcgaactggcgaaactggtcggtgaaatggtcagggcagaaatggaacggcgcgcccgt

SEQ ID NO: 545057 - DNA, 75 bp, synthetic construct
  source 1..75: mol_type = other DNA
acaaaagcattgatggattcactggcgtggatacttgaaaagctcggagtgcttccggatgaagcggaacgggcg

SEQ ID NO: 545058 - DNA, 75 bp, synthetic construct
  source 1..75: mol_type = other DNA
tgtacagaagccagatatatttgtcctgtgcaacaaattatagatacccccctgttacgcaaactcaaccagttt

SEQ ID NO: 545059 - DNA, 75 bp, synthetic construct
  source 1..75: mol_type = other DNA
ccagctcccgcccggtggcggaggccatacgatcgccagtggcatcagttcctgtaacttcccgtaaccgggagc

SEQ ID NO: 545060 - DNA, 75 bp, synthetic construct
  source 1..75: mol_type = other DNA
catccagcaggccatcagacgcaccgaacagtacaacaaccagcttgaacgcgaacggcaggcgcttgcgcgtgt

SEQ ID NO: 545061 - DNA, 75 bp, synthetic construct
  source 1..75: mol_type = other DNA
caaaggtgacggcgctggcgcaggcccatcccgcactgacgcgccagctactgattgcaggcggtgcactgctgg

SEQ ID NO: 545062 - DNA, 75 bp, synthetic construct
  source 1..75: mol_type = other DNA
cactgacgctgattaactggaacggcttttttgcccgtacctttgaccttgatgagctggtcacgacgctttccg

SEQ ID NO: 545063 - DNA, 75 bp, synthetic construct
  source 1..75: mol_type = other DNA
agttcttatgacactaaaaaagaactgcttaacgatctgcaacgcgaattgcaggatatcggtgtgcgtgccgat

SEQ ID NO: 545064 - DNA, 75 bp, synthetic construct
  source 1..75: mol_type = other DNA
gtcaggagcaggagcaactgcaatcacgcattcagagtttgatgcagcgcgcgccggtttggctggcggcgcaaa

SEQ ID NO: 545065 - DNA, 75 bp, synthetic construct
  source 1..75: mol_type = other DNA
aagagctggcgacccatcacgtcggcggttatctgaagattgccccggaacataccgaagaagggccgttatcga

SEQ ID NO: 545066 - DNA, 75 bp, synthetic construct
  source 1..75: mol_type = other DNA
gtgcggcgaagagttcacctccagccaggacgtcaccgaattcctgcaacagctgctggagcgtgagcgcgaagc

SEQ ID NO: 545067 - DNA, 75 bp, synthetic construct
  source 1..75: mol_type = other DNA
ttcgccgtgacgagctgcatgcgcaactgagcaataaccgttcacgccgcaatcaactggaaaaagcgctcacct

SEQ ID NO: 545068 - DNA, 75 bp, synthetic construct
  source 1..75: mol_type = other DNA
cagataaccagcctgtagatttccgtctggttggttttcatcgtaatgccggatatatcctgggagtatctcctc

SEQ ID NO: 545069 - DNA, 75 bp, synthetic construct
  source 1..75: mol_type = other DNA
atagcaaatacgacatcagcctcggcggttattgctgttttgacaggtagcgatccacatgatgttgttgggatt

SEQ ID NO: 545070 - DNA, 75 bp, synthetic construct
  source 1..75: mol_type = other DNA
gcaatatagccaggggcccggcgatgtcgcgtcaggacgctgaacatcttctactgaccagtgccagacttgtaa

SEQ ID NO: 545071 - DNA, 75 bp, synthetic construct
  source 1..75: mol_type = other DNA
cgacagtacgcagccacgatcagtacaacacgacgatttatggtatggatgatcgctatcgaggggtattcggtc

SEQ ID NO: 545072 - DNA, 75 bp, synthetic construct
  source 1..75: mol_type = other DNA
gcactaccccagagcgtggtagcctgggagtatctggtggaagattatgatcgcattcgcaacgacattgaagct

SEQ ID NO: 545073 - DNA, 75 bp, synthetic construct
  source 1..75: mol_type = other DNA
cctttcagatattattcgtaaaatgcctggcgtcaatcttaccggcaatagcgcctcgggcacacgcggtaataa

SEQ ID NO: 545074 - DNA, 75 bp, synthetic construct
  source 1..75: mol_type = other DNA
tggcgggagctactatcagcctaccgataattgcggctgttgggtttgtcgcaggtaaggcaattttctctgata

SEQ ID NO: 545075 - DNA, 75 bp, synthetic construct
  source 1..75: mol_type = other DNA
atattgatcggaatgtctacaggcatggcgggagctactatcagcctaccaatcattgcggttgttgggtttgtg

SEQ ID NO: 545076 - DNA, 75 bp, synthetic construct
  source 1..75: mol_type = other DNA
cattttgcctgaaagagagccagcgcggtgttcatgtctgcaccggatgcatggcgactgttttatatggcgcct

SEQ ID NO: 545077 - DNA, 75 bp, synthetic construct
  source 1..75: mol_type = other DNA
ttcctctaccagcctgacggtgaatgacagagatatcagcggtatttctggctctgctgcggatcgcagcagtaa

SEQ ID NO: 545078 - DNA, 75 bp, synthetic construct
  source 1..75: mol_type = other DNA
gctaatatttgctgttgggtatgttgtaggcaaggctatattttctaacagtattatatttagaagaagaatgta

SEQ ID NO: 545079 - DNA, 75 bp, synthetic construct
  source 1..75: mol_type = other DNA
gttaatcgctatcgtaggatttgtagctggtaaggttatttttgctgacaatgtagtgttttggcgaagaatgta

SEQ ID NO: 545080 - DNA, 75 bp, synthetic construct
  source 1..75: mol_type = other DNA
tagtgaagagttcataacactattctcagataattatccggaaataaagtttacagcagctcaggataaatatga

SEQ ID NO: 545081 - DNA, 75 bp, synthetic construct
  source 1..75: mol_type = other DNA
atatccggcagaagtgtcgccgctggcgcgccgtaatgatgttaacccggaaatcaccgaccgttttgaattctt

SEQ ID NO: 545082 - DNA, 75 bp, synthetic construct
  source 1..75: mol_type = other DNA
tgattcagcctaccttgattacggaatatccggcagaagtgtccccgctggcgcggcgtaaggatgttaacccgg

SEQ ID NO: 545083 - DNA, 75 bp, synthetic construct
  source 1..75: mol_type = other DNA
tgattcagcctaccttgattacggaatatccggcagaagtgtccccgctggcgcgccgtaacgatgttaacccgg

SEQ ID NO: 545084 - DNA, 75 bp, synthetic construct
  source 1..75: mol_type = other DNA
ttacattgaaacaacttcattccattggcattactaatgtcataaataccggttgtccgacaatgtgggatttga

SEQ ID NO: 545085 - DNA, 75 bp, synthetic construct
  source 1..75: mol_type = other DNA
tggtggtgtgtgtgcaacaaccgatgtttaccgaaatgtttggtgccagttaccgctatagtggtgctggagtcg

SEQ ID NO: 545086 - DNA, 75 bp, synthetic construct
  source 1..75: mol_type = other DNA
gcgcgccgtaatgatgttaacccggaaatcaccgaccgttttgaattcttcatcggtggtcgtgaaatcggtaat

SEQ ID NO: 545087 - DNA, 75 bp, synthetic construct
  source 1..75: mol_type = other DNA
tgattcagcctaccttgattacggaatatccggcagaagtatccccgctggcgcggcgtaaagatgttaacccgg

SEQ ID NO: 545088 - DNA, 75 bp, synthetic construct
  source 1..75: mol_type = other DNA
agccgcatggtgagcaaaatcgctcgccctgacgccagcagtgaaacattaattcgcgaagccctacgcgccgcg

SEQ ID NO: 545089 - DNA, 75 bp, synthetic construct
  source 1..75: mol_type = other DNA
gctgggctataaaccacaagaagcaagccgcatggtgagcaaaatcgctcgccctgacgccagcagtgaaacatt

SEQ ID NO: 545090 - DNA, 75 bp, synthetic construct
  source 1..75: mol_type = other DNA
tgattcagcctaccttgattacggaatatccggcagaagtgtccccgctggcgcgacgtaaagatgttaacccgg

SEQ ID NO: 545091 - DNA, 75 bp, synthetic construct
  source 1..75: mol_type = other DNA
tgattcagcctaccttgattacggaatatccggcagaagtctccccgctggcgcggcgtaacgatgttaacccgg

SEQ ID NO: 545092 - DNA, 75 bp, synthetic construct
  source 1..75: mol_type = other DNA
tgattcagcctaccttgattacggaatatccggcagaagtttccccgctggcgcggcgtaatgatgttaacccgg

SEQ ID NO: 545093 - DNA, 75 bp, synthetic construct
  source 1..75: mol_type = other DNA
agtggttctcaggcacaaaagttagttgaagcaatcattgttgcgatagaaaacgaacaggaacgtctttttgat

SEQ ID NO: 545094 - DNA, 75 bp, synthetic construct
  source 1..75: mol_type = other DNA
cacatctgattcagcctaccttaattactgaatatccggcagaagtctcaccgctggcccgccgtaatgaggtta

SEQ ID NO: 545095 - DNA, 75 bp, synthetic construct
  source 1..75: mol_type = other DNA
cacatctgattcagcctaccttaattactgaatatccggcagaagtatccccgctggcccgccgtaatgaggtta

SEQ ID NO: 545096 - DNA, 75 bp, synthetic construct
  source 1..75: mol_type = other DNA
atccacgttgagaagagctggggtctgggccgtattgttaccgagatcttcgaagaagtggcagaagcacatctg

SEQ ID NO: 545097 - DNA, 75 bp, synthetic construct
  source 1..75: mol_type = other DNA
catcataacgcgctggatctcgacatgtacctgcgtattgcgccggaactgtatcttaagcgtctggtggttggc

SEQ ID NO: 545098 - DNA, 75 bp, synthetic construct
  source 1..75: mol_type = other DNA
cacatctgattcagcctaccttgattactgaatatccggcagaagtgtcgccgctggcccgccgtaatgaggtta

SEQ ID NO: 545099 - DNA, 75 bp, synthetic construct
  source 1..75: mol_type = other DNA
cacatctgattcagcctaccttcattactgaatatccggcagaagtatcaccgctggcccgccgtaatgaggtta

SEQ ID NO: 545100 - DNA, 75 bp, synthetic construct
  source 1..75: mol_type = other DNA
acccgtcgtattatgggtaaagcctccttcgttactctgcaggacgttggcggccgcattcagctgtacgttgcc

SEQ ID NO: 545101 - DNA, 75 bp, synthetic construct
  source 1..75: mol_type = other DNA
ttgccttcccgaacgatttccgtcgcgatcatacctctgaccaattgcacgcagaattcgacggtaaagagaacg

SEQ ID NO: 545102 - DNA, 75 bp, synthetic construct
  source 1..75: mol_type = other DNA
ctggcgaacctgcgtgagcaggggattgccttcccgaacgatttccgtcgcgatcatacctctgaccaattgcac

SEQ ID NO: 545103 - DNA, 75 bp, synthetic construct
  source 1..75: mol_type = other DNA
atatccggcagaagtttctccgctggcgcgtcgtaacgacgttaacccggaaatcacagaccgctttgagttctt

SEQ ID NO: 545104 - DNA, 75 bp, synthetic construct
  source 1..75: mol_type = other DNA
ggtaagctgttcaaaaccaaaaccggcgaactgtctatccactgcaccgagttgcgtctgctgaccaaagcactg

SEQ ID NO: 545105 - DNA, 75 bp, synthetic construct
  source 1..75: mol_type = other DNA
cgaggcgctgtatgctgatatggggcactttggtaagttccctattcgcctggcgtggttcaccgtcgtattacc

SEQ ID NO: 545106 - DNA, 75 bp, synthetic construct
  source 1..75: mol_type = other DNA
attctggtgattatggggctaataggcggcagctttttctatggtgaagttgtcataacacccgccatttcggta

SEQ ID NO: 545107 - DNA, 75 bp, synthetic construct
  source 1..75: mol_type = other DNA
tctacgcgataagcaggcgttacttgaagcctcagaaaagcgcaacgcaaaattacaaagcgagaatgcatacat

SEQ ID NO: 545108 - DNA, 75 bp, synthetic construct
  source 1..75: mol_type = other DNA
ctggtcatgcaggctgccattatcgaatggcaatcgactggcgacgctaaaagcggactggcatggatttataac

SEQ ID NO: 545109 - DNA, 75 bp, synthetic construct
  source 1..75: mol_type = other DNA
accgctgtgtatatgtcgcgtgcaattaatgtcattccctttgcgctgatgcataaccttaaacataacaaggtg

SEQ ID NO: 545110 - DNA, 75 bp, synthetic construct
  source 1..75: mol_type = other DNA
gcagccagtccagttaccgtgctggcattgttggatgaacgggaaagaaaccagcaatacatcaaatcacgcgac

SEQ ID NO: 545111 - DNA, 75 bp, synthetic construct
  source 1..75: mol_type = other DNA
atggcttttgtatcatcaacagaaactccaacccaagaaggagacaaaggtattctgtatgattttaatgatgga

SEQ ID NO: 545112 - DNA, 75 bp, synthetic construct
  source 1..75: mol_type = other DNA
tgtggatattgatgcgctcaacgccttcaaatttctggccggaccagaaaccgtgctggcattactggatgaacg

SEQ ID NO: 545113 - DNA, 75 bp, synthetic construct
  source 1..75: mol_type = other DNA
gactggcatggatttataacacactgtttggcccaggcgaattgccggacgaatctgagaaagatgctcaggcct

SEQ ID NO: 545114 - DNA, 75 bp, synthetic construct
  source 1..75: mol_type = other DNA
gtgccgcgacctcattgctcgcaatggtgagattgaagggcttcgaaaactggttgctgagcttgaagagacaaa

SEQ ID NO: 545115 - DNA, 75 bp, synthetic construct
  source 1..75: mol_type = other DNA
tatatgaacttgcatgtaacgccagaagatgaaatgtctttcggtaagcgaccgctggcgcatacgttaatgctt

SEQ ID NO: 545116 - DNA, 75 bp, synthetic construct
  source 1..75: mol_type = other DNA
cagtccaacaaaagaagacggacttcaggcaaaaccgatcagtttttgggccagctttgctttgcagtttgtgaa

SEQ ID NO: 545117 - DNA, 75 bp, synthetic construct
  source 1..75: mol_type = other DNA
tctggctggcgtggaaaatcgctaccagtccaacaaaagaagacggacttcaggcaaaaccgatcagtttttggg

SEQ ID NO: 545118 - DNA, 75 bp, synthetic construct
  source 1..75: mol_type = other DNA
tctggctggcgtggaaaatcgctaccagtccaacaaaggaagacgggcttcagacaaaaccaatcagtttttggg

SEQ ID NO: 545119 - DNA, 75 bp, synthetic construct
  source 1..75: mol_type = other DNA
attaaaagaagcatgtgatagagttatagactcaggctggtatataatgggcaatgagttaaaaaattttgaaaa

SEQ ID NO: 545120 - DNA, 75 bp, synthetic construct
  source 1..75: mol_type = other DNA
tcagcgactgtttcgccattatggtcgccaattgaatatcgtactggcgctgttgctggtctattgtgcggtacg

SEQ ID NO: 545121 - DNA, 75 bp, synthetic construct
  source 1..75: mol_type = other DNA
tcagcgattgtttaaccgctatggccgtcagttgaatatcgtgctggcgctgttgctggtctattgtgcggtacg

SEQ ID NO: 545122 - DNA, 75 bp, synthetic construct
  source 1..75: mol_type = other DNA
cgttgatgaaattctcactgcactgaacagaatgcatgctgtatttattaaacactattttgagccgcttaaatc

SEQ ID NO: 545123 - DNA, 75 bp, synthetic construct
  source 1..75: mol_type = other DNA
agtgagttcgacaggattgctgctgagctcctggcgcgtctggaaaaagagggcaataaagacctgaaactgagt

SEQ ID NO: 545124 - DNA, 75 bp, synthetic construct
  source 1..75: mol_type = other DNA
gcagttgtaagcttgagtaatcagtgtataagcctccggcgaaatgatatttctcaaactatccagcaaagttca

SEQ ID NO: 545125 - DNA, 75 bp, synthetic construct
  source 1..75: mol_type = other DNA
gctggcagggatgagtctgggatttttaatcgtcatgttgctgtgtgcgggcatttcgttttcactggctgttat

SEQ ID NO: 545126 - DNA, 75 bp, synthetic construct
  source 1..75: mol_type = other DNA
ccgctattccggcggtaatggcttataaccgtctcaaccaacgtgtaaacaaactggaactgaattacgacaact

SEQ ID NO: 545127 - DNA, 75 bp, synthetic construct
  source 1..75: mol_type = other DNA
ttcaattccaatggatcccacacttacagaagagcaagttagctatgtcattaatgtactgaataaatttaactg

SEQ ID NO: 545128 - DNA, 75 bp, synthetic construct
  source 1..75: mol_type = other DNA
tatttagaacaaaaaggtattcaaacgttaattcattatccggtaccaccacataagcaagaatgttatcaggat

SEQ ID NO: 545129 - DNA, 75 bp, synthetic construct
  source 1..75: mol_type = other DNA
aaataaacaatcaatataaagatgaattaaaggaagcttgtgcaaaagttattgattctggttggtatgttttag

SEQ ID NO: 545130 - DNA, 75 bp, synthetic construct
  source 1..75: mol_type = other DNA
tgatgaaatattatcacttccaattggtagctttttatctattgaagatgctgactatatagtatcattaattaa

SEQ ID NO: 545131 - DNA, 75 bp, synthetic construct
  source 1..75: mol_type = other DNA
taatacggcgggctttgttaccgacgccacgctggataacgctaaagaacgcccgcgttatggcatggtttaccc

SEQ ID NO: 545132 - DNA, 75 bp, synthetic construct
  source 1..75: mol_type = other DNA
acgaagaattcattcgtcagatgaaagaattaatcggcaacgaaggagatattcatgtcacttgcaaccacagtg

SEQ ID NO: 545133 - DNA, 75 bp, synthetic construct
  source 1..75: mol_type = other DNA
acttgcaaccacagtgaaggagagcaagttacagagacgcatgtacacgcagaaagctctctggtatcgccataa

SEQ ID NO: 545134 - DNA, 75 bp, synthetic construct
  source 1..75: mol_type = other DNA
tggttcacatacaaaatataaaaacttatatgagggagtaaatagtagactagatgagattcaggcagcaatgct

SEQ ID NO: 545135 - DNA, 75 bp, synthetic construct
  source 1..75: mol_type = other DNA
ctgtccatctctatggaagcatatgtaatatgtctgaaataatggatattgcaaaagaaaatgatttgcttgtac

SEQ ID NO: 545136 - DNA, 75 bp, synthetic construct
  source 1..75: mol_type = other DNA
aactattctggctataagtgaaaatgggttaaagcctgtttttgtagagcctgatatacagacttataatatttc

SEQ ID NO: 545137 - DNA, 75 bp, synthetic construct
  source 1..75: mol_type = other DNA
atataaactcacgctataatgaggaattaaaaaaagcatgtgcaagagttattgactctggctggtatgtaatgg

SEQ ID NO: 545138 - DNA, 75 bp, synthetic construct
  source 1..75: mol_type = other DNA
tttgagaccattaatcagataggtaaaaatccagacattgaaaaacaaatgtatggtaagttcttaaagtataaa

SEQ ID NO: 545139 - DNA, 75 bp, synthetic construct
  source 1..75: mol_type = other DNA
gctcctttaagttcaccttcacgcgcagggctattaaccggccggatgccatttcgtactggaattcgctcatgg

SEQ ID NO: 545140 - DNA, 75 bp, synthetic construct
  source 1..75: mol_type = other DNA
catcagatcgttaaaacccccaatattgacaggcttgcccaggagggcgtcaaatttactgactactatgcacca

SEQ ID NO: 545141 - DNA, 75 bp, synthetic construct
  source 1..75: mol_type = other DNA
catcagattgttaaaacccctaatatcgacaggcttgctcaggaaggggtcaaatttactgactactatgctcct

SEQ ID NO: 545142 - DNA, 75 bp, synthetic construct
  source 1..75: mol_type = other DNA
tgcttacggcagaatgacggtcagtataaggggcggctgaacctggcctgggcgtatggtgtggtgttcacccgc

SEQ ID NO: 545143 - DNA, 75 bp, synthetic construct
  source 1..75: mol_type = other DNA
tggagtcattaccccgaattacacttaaaacgactcaacagcttaacgttggcttgccacgcattacttgactgt

SEQ ID NO: 545144 - DNA, 75 bp, synthetic construct
  source 1..75: mol_type = other DNA
tggaaaaagagattaaactgaatattgaagcgaaccacgcgacgcttgcgggtcactctttccaccatgaaattg

SEQ ID NO: 545145 - DNA, 75 bp, synthetic construct
  source 1..75: mol_type = other DNA
ccaaatatgctcaggaacataatttgtctccggtgcatcagagtggtcgccaggagcaactggaaaatctggtaa

SEQ ID NO: 545146 - DNA, 75 bp, synthetic construct
  source 1..75: mol_type = other DNA
ctggcaggcaagcaagaagagagcggcgtgaagctgctgtggggaaccgccaactgctttacaaaccctcgctac

SEQ ID NO: 545147 - DNA, 75 bp, synthetic construct
  source 1..75: mol_type = other DNA
tctcattccttctcacctgtcggcagaaaaaggagcgcgtatagcgctgtcgcatttggggctggagccttatct

SEQ ID NO: 545148 - DNA, 75 bp, synthetic construct
  source 1..75: mol_type = other DNA
aatctggcgacacttacctgcatacggtgccgaaatattatccgcatctgtacggcgagaaagagggcggcggta

SEQ ID NO: 545149 - DNA, 75 bp, synthetic construct
  source 1..75: mol_type = other DNA
cgtatcttattccttcccatttgtcggcagaaaaaggggcgcgtattgcgctggcacatttggagctggagccat

SEQ ID NO: 545150 - DNA, 75 bp, synthetic construct
  source 1..75: mol_type = other DNA
gacccgcggaacaaccggcgtgtgtgtgctggcagcacaagcgggcgctaacgtccacgtaattgatgttggtat

SEQ ID NO: 545151 - DNA, 75 bp, synthetic construct
  source 1..75: mol_type = other DNA
cgatatacaacaacatgggcgaacttgctgccagcaacattattctaccggggaatacaacttctgaattgaaca

SEQ ID NO: 545152 - DNA, 75 bp, synthetic construct
  source 1..75: mol_type = other DNA
cgccatcggggcgcaggccgccgctgtgcatggtatcagtgagcaggctctctgcggcgcaccattatggacaga

SEQ ID NO: 545153 - DNA, 75 bp, synthetic construct
  source 1..75: mol_type = other DNA
aacaaccctggttgtcgggattgtgttgattaaatctggtacacgcaaagtacgtaaaccctcgctggaggtgaa

SEQ ID NO: 545154 - DNA, 75 bp, synthetic construct
  source 1..75: mol_type = other DNA
atgtatatttattggattttattaggtctggctattgctacagaaattaccggtacgctgtcaatgaaatgggcg

SEQ ID NO: 545155 - DNA, 75 bp, synthetic construct
  source 1..75: mol_type = other DNA
gggattgtgttgatcaaatcaggtacccgtaaagcgcgtaaacctgaactggaggtgaaccatggcgcagtttga

SEQ ID NO: 545156 - DNA, 75 bp, synthetic construct
  source 1..75: mol_type = other DNA
gaaacggatggattacgcggtcgcaaggataacctttgggaaggcggaattcgtgttccagcgattattaaatat

SEQ ID NO: 545157 - DNA, 75 bp, synthetic construct
  source 1..75: mol_type = other DNA
tatcgctgatgaaaattgccgggttaaccaccctggtggccgggattgtgttgatcaaatcaggtacccgtaaag

SEQ ID NO: 545158 - DNA, 75 bp, synthetic construct
  source 1..75: mol_type = other DNA
atgtatatttattgggttttattaggtctggctattgccacagaaattaccggcacgctgtcaatgaaatgggcg

SEQ ID NO: 545159 - DNA, 75 bp, synthetic construct
  source 1..75: mol_type = other DNA
atgctacagtcagcaatggaattatcaagaaagtggaataatgtaagttacacagactctgaaaaagaggaaatt

SEQ ID NO: 545160 - DNA, 75 bp, synthetic construct
  source 1..75: mol_type = other DNA
agactgctgccgcacatagagatccggctgactggctggaagaaatgacggtatattgtgcgatggagctggcag

SEQ ID NO: 545161 - DNA, 75 bp, synthetic construct
  source 1..75: mol_type = other DNA
attgacctgggaagggctggcacactcagcgatcgccgacgcacggatgacggctggggtggtaaacgctattgc

SEQ ID NO: 545162 - DNA, 75 bp, synthetic construct
  source 1..75: mol_type = other DNA
taagcctccggcgaaatgatatttctcaaactatccagcaaagttcaccgttatggctaaccaatcagcaaagcg

SEQ ID NO: 545163 - DNA, 75 bp, synthetic construct
  source 1..75: mol_type = other DNA
ggcgatgaaagataacctcgaatttattaatacccacccgaatctggtcggattcctgatggggttattaatttc

SEQ ID NO: 545164 - DNA, 75 bp, synthetic construct
  source 1..75: mol_type = other DNA
ttacctgggcgatgttgccgatcctgaaaaagatttataaggacgacaaaccgggcttaagcgcggcgatgaaag

SEQ ID NO: 545165 - DNA, 75 bp, synthetic construct
  source 1..75: mol_type = other DNA
cgtcatttttctcgcgtcatgcgactggaaggtggtgtagtgagggaggtcaatctgccagacagtattcaccgt

SEQ ID NO: 545166 - DNA, 75 bp, synthetic construct
  source 1..75: mol_type = other DNA
agcgtggtgcaagcgtggtggcaatcagccatgacgccgcgtttacccggcgtcatttttctcgcgttgtgagac

SEQ ID NO: 545167 - DNA, 75 bp, synthetic construct
  source 1..75: mol_type = other DNA
cacgaaagcgaaccgtaaggcgggcatgtatcgcgagcaggaagaacgggcggcacatcgtaacgactggatgta

SEQ ID NO: 545168 - DNA, 75 bp, synthetic construct
  source 1..75: mol_type = other DNA
gcggctatcacaaagtgcgtaaaggcgatgctgcggaagggtatcaccagagtttgatcgacattacgcctcagc

SEQ ID NO: 545169 - DNA, 75 bp, synthetic construct
  source 1..75: mol_type = other DNA
gcgcgtttagccggtaacgcaccttttattattgataaagacagtggtgaaattcattcccttggaacggcaaag

SEQ ID NO: 545170 - DNA, 75 bp, synthetic construct
  source 1..75: mol_type = other DNA
ctgggaacggcaaagccgctggaagaatatctacaggattatgaaataaaaaaggctaccttcggcttgccctga

SEQ ID NO: 545171 - DNA, 75 bp, synthetic construct
  source 1..75: mol_type = other DNA
atgaagccaggattcgtctcttatatacgaacattattgaccataatatttcttagctggggcgtcattcctgag

SEQ ID NO: 545172 - DNA, 75 bp, synthetic construct
  source 1..75: mol_type = other DNA
ggatgtaaaagttgattaccgctttacttcatcaggctctacggggataacgggtaatagtattcttaatattga

SEQ ID NO: 545173 - DNA, 75 bp, synthetic construct
  source 1..75: mol_type = other DNA
ccggtagtttctgatgataggttttcaattcatattgaaaattgttcccaggatgtaaaggttgattaccgtttc

SEQ ID NO: 545174 - DNA, 75 bp, synthetic construct
  source 1..75: mol_type = other DNA
attttctgcaccatgacggaatcctggtatccgatcgccattatgatcatggcatattctgtgattggtttaatc

SEQ ID NO: 545175 - DNA, 75 bp, synthetic construct
  source 1..75: mol_type = other DNA
tatttgctctggaaaacattaccatggcagaaatgttcggctgtaaaaaccgctttacccgaatggctatttcta

SEQ ID NO: 545176 - DNA, 75 bp, synthetic construct
  source 1..75: mol_type = other DNA
gatgtgtttcagactaatgtgccaggaatcggttttcgcgcggcgtgggcgaataacaccagtgcgcaactcacc

SEQ ID NO: 545177 - DNA, 75 bp, synthetic construct
  source 1..75: mol_type = other DNA
cgaaagatcatgaagcgggcaatgagattcttgccgctttgaataccgagcagcaggcatggtgtcggaacctgg

SEQ ID NO: 545178 - DNA, 75 bp, synthetic construct
  source 1..75: mol_type = other DNA
gacaaacttgcctttatggctgcgacagctgacgcgcaattgttgaattatgtcgcctggccgcaggcaacgctt

SEQ ID NO: 545179 - DNA, 75 bp, synthetic construct
  source 1..75: mol_type = other DNA
atgacgcccggcgagcgcagtctcattctgcgggccctgaaaaccctggaccgccatcttcatgaacccggcgtg

SEQ ID NO: 545180 - DNA, 75 bp, synthetic construct
  source 1..75: mol_type = other DNA
tttaccggcacgctcagccataccgaagtgcatccccgcgaagtagttaaatcagccctgaaacataacgctgct

SEQ ID NO: 545181 - DNA, 75 bp, synthetic construct
  source 1..75: mol_type = other DNA
cgagccgttaagcgtgagtcagcgcagccagctgcgccgcattatgctgtgcatctcagatacctccgcgaagct

SEQ ID NO: 545182 - DNA, 75 bp, synthetic construct
  source 1..75: mol_type = other DNA
tgattgcgatggaacctccattgcctgcagcatcgactgatggcacgcaagtacccggctgctcgccgagttgtc

SEQ ID NO: 545183 - DNA, 75 bp, synthetic construct
  source 1..75: mol_type = other DNA
cagaaactgattcaaaacgcactcagctattcctgcaatctgtttcaattgggcagaacgaaatccctcgcgaaa

SEQ ID NO: 545184 - DNA, 75 bp, synthetic construct
  source 1..75: mol_type = other DNA
cctacgtcttacccaactcctttaaatccgcattagtgcctttcttcgcgggaattccacatcgcaccggctggc

SEQ ID NO: 545185 - DNA, 75 bp, synthetic construct
  source 1..75: mol_type = other DNA
ctgccgcagccactgctatggccgcagctacaggtgagcgaaggtgaaaaatcgtatacctgtaatcaattttcc

SEQ ID NO: 545186 - DNA, 75 bp, synthetic construct
  source 1..75: mol_type = other DNA
cgaacgccgcaagctgggacatagcctgcgcgaaaaacgttacgaccgcgcctacgtcttacccaactcctttaa

SEQ ID NO: 545187 - DNA, 75 bp, synthetic construct
  source 1..75: mol_type = other DNA
tccgggcgatgggggcaggagatggaggcctttaaggagcgggtgaagaccaacagccagcgcccggctcccgtc

SEQ ID NO: 545188 - DNA, 75 bp, synthetic construct
  source 1..75: mol_type = other DNA
taaaaccgtaccgtttgtccagaccctgtacttcatcaatggtgacgatgccgaccagctggcctggatgaagcg

SEQ ID NO: 545189 - DNA, 75 bp, synthetic construct
  source 1..75: mol_type = other DNA
ggagatgacggcagcagcatggctgcgggttttatgcagtgggataacgccttcttcccgtggaagctgaactac

SEQ ID NO: 545190 - DNA, 75 bp, synthetic construct
  source 1..75: mol_type = other DNA
gacagcttcgttttatttctgtgccggtaaatattataccagggacatgtgatcttattaataagaatattaccg

SEQ ID NO: 545191 - DNA, 75 bp, synthetic construct
  source 1..75: mol_type = other DNA
aacgcaagcccgacgcttaatgacgctggaagatatcgtcagtggttattccaatgtgttgatctccctggcaga

SEQ ID NO: 545192 - DNA, 75 bp, synthetic construct
  source 1..75: mol_type = other DNA
cgaaggtagcggcattggcctggcgatagtgaaatcgattgttgtcgcgcataaaggcacagttgcagtaacgtc

SEQ ID NO: 545193 - DNA, 75 bp, synthetic construct
  source 1..75: mol_type = other DNA
aacagcaaactgcgggagttgctccactgctcaccgaaaccggataccctgcccgacgatacaacgctttatcga

SEQ ID NO: 545194 - DNA, 75 bp, synthetic construct
  source 1..75: mol_type = other DNA
ggtgaaagtgatcaacgaaccggtgaaatattccgtggaacctaacgggatgcgttatgttgaagtacatcgacc

SEQ ID NO: 545195 - DNA, 75 bp, synthetic construct
  source 1..75: mol_type = other DNA
gtcgcgcataaaggcacggttgcggtaacgtcagatgcgcgggggacaaggtttgttatcacattacccgcttaa

SEQ ID NO: 545196 - DNA, 75 bp, synthetic construct
  source 1..75: mol_type = other DNA
tcaggttgcgggcgatccgctgatgttgcgtcgggcgttaagcaacctactttctaatgccctgcgttatacgcc

SEQ ID NO: 545197 - DNA, 75 bp, synthetic construct
  source 1..75: mol_type = other DNA
aatttaccgtaagctgtcgaaaaatatcacacaattgttattccactgcccttttggtgatgctgccaacttact

SEQ ID NO: 545198 - DNA, 75 bp, synthetic construct
  source 1..75: mol_type = other DNA
tatctcctttccggcccgacgattatgatgccgggccacggtcacgggcatatggaacacagcaactggcggatg

SEQ ID NO: 545199 - DNA, 75 bp, synthetic construct
  source 1..75: mol_type = other DNA
gctgtttgccgatgacccaaaggcgcaaacccgccacgttctggaaattatccgcaaggtgatcgagacggcggg

SEQ ID NO: 545200 - DNA, 75 bp, synthetic construct
  source 1..75: mol_type = other DNA
atggtgatcccgctggccagcgcccggctgctgtcggataaggtctcccgtgaactctatccggtggtgcacatc

SEQ ID NO: 545201 - DNA, 75 bp, synthetic construct
  source 1..75: mol_type = other DNA
atagtgaaatcgattgttgtcgcgcataaaggcacggttgcagtaacgtcagatgcgcgggggacaaggtttgtt

SEQ ID NO: 545202 - DNA, 75 bp, synthetic construct
  source 1..75: mol_type = other DNA
tgtggatcctgtgctctgaaattcagccgctgaaatgccgcgatttcggtattacctgttcgaccaccacgaact

SEQ ID NO: 545203 - DNA, 75 bp, synthetic construct
  source 1..75: mol_type = other DNA
ttaccggtatgaacatcatcatgtactacgcgccacgtatcttcaaaatggcgggctttacgaccacagaacaac

SEQ ID NO: 545204 - DNA, 75 bp, synthetic construct
  source 1..75: mol_type = other DNA
atgtagtgatggatattagtggtttaaaacaagcagcatcaattaaactcctaaaaacagatgacggctggcaat

SEQ ID NO: 545205 - DNA, 75 bp, synthetic construct
  source 1..75: mol_type = other DNA
gccaaggttctgatgacagctcaatcgatctgactcagcgtggtttcggcaacagcgctactcttgatcagtgga

SEQ ID NO: 545206 - DNA, 75 bp, synthetic construct
  source 1..75: mol_type = other DNA
taaatcccgtggtaaccgctataaccgtgatgatatcactcaggccataaatgctggtcaatctcagcgatacat

SEQ ID NO: 545207 - DNA, 75 bp, synthetic construct
  source 1..75: mol_type = other DNA
cgaaagcgaacaattaccttgatgatgcaaatctcccggtcgtcattactctacatggacgctttagccagggct

SEQ ID NO: 545208 - DNA, 75 bp, synthetic construct
  source 1..75: mol_type = other DNA
aacggcgaaaatccatcagactaatcacgctgtacatctgatttgcgcggcggcatggtttggtggcttgctgcc

SEQ ID NO: 545209 - DNA, 75 bp, synthetic construct
  source 1..75: mol_type = other DNA
ttgacccttcccgccagcgaaaaggcgaaggtagcggcattgggctggcgggtgatgctgccaacttactgattt

SEQ ID NO: 545210 - DNA, 75 bp, synthetic construct
  source 1..75: mol_type = other DNA
ttttgccgagcaggatattaatgatttaaaagagattagcgccacccttgaacgggtactaaatcaccctgacga

SEQ ID NO: 545211 - DNA, 75 bp, synthetic construct
  source 1..75: mol_type = other DNA
cacgcgattcacctgatctgtgcggcggcgtggtttgggggattactgccggtgctctggtgtatgcaactcatc

SEQ ID NO: 545212 - DNA, 75 bp, synthetic construct
  source 1..75: mol_type = other DNA
tacggtgcctggctggcccccttaacgattcgtcgcttgctgacgaagcgttttctgcgtttacaacagcacgct

SEQ ID NO: 545213 - DNA, 75 bp, synthetic construct
  source 1..75: mol_type = other DNA
cattattcatcaccggatttcccccaacacttgcgacttactgggggcagcttttatttctaaaggtcatattgg

SEQ ID NO: 545214 - DNA, 75 bp, synthetic construct
  source 1..75: mol_type = other DNA
cgctcgctatcgccagaatggtaatggccctgcttatatccagtaccaagcagaagacagcaaagcacggaatca

SEQ ID NO: 545215 - DNA, 75 bp, synthetic construct
  source 1..75: mol_type = other DNA
tgtcctgccggtcaattaccgtaatccgaaacgcattctacactttgcttatgcattctcccgcgagtattttga

SEQ ID NO: 545216 - DNA, 75 bp, synthetic construct
  source 1..75: mol_type = other DNA
ataacaccttcgctagacgtagacgtggtcacagaaaactcaaaatcgattcaatcctctggaaatttattgttg

SEQ ID NO: 545217 - DNA, 75 bp, synthetic construct
  source 1..75: mol_type = other DNA
catttggatgtacgagccgaggccaggctcaccgagttggtttgtggctgttgtataccgccagaatggagtcgg

SEQ ID NO: 545218 - DNA, 75 bp, synthetic construct
  source 1..75: mol_type = other DNA
acttcgtaagcggacgagccggatggagatttggcaaaaacggaacgcttgagattaacggtaacagtggcggaa

SEQ ID NO: 545219 - DNA, 75 bp, synthetic construct
  source 1..75: mol_type = other DNA
tcctcgatagagcgagaatcgacatctcgtacaagtcaggattctgccattgcaaaagacttgacgagttttaaa

SEQ ID NO: 545220 - DNA, 75 bp, synthetic construct
  source 1..75: mol_type = other DNA
gaagaaggcaaattcaccatctgggcagtagacgatgtgactgacgcactgccgttattattaaatctggtgtgg

SEQ ID NO: 545221 - DNA, 75 bp, synthetic construct
  source 1..75: mol_type = other DNA
ccttcacaccctgaatttgtctttgtgtttgcggctgtccgtcgcgcagaccgtcatccccgtatctgcatgctt

SEQ ID NO: 545222 - DNA, 75 bp, synthetic construct
  source 1..75: mol_type = other DNA
caaacatcaataatttcctcacttatgcaggctataaatacagggtggatatagccggcgagggagagcagagaa

SEQ ID NO: 545223 - DNA, 75 bp, synthetic construct
  source 1..75: mol_type = other DNA
ctatgaaccattgcccgacactaccggatttacaaattactcagggcatagctttaggtttgaagatcaacaacg

SEQ ID NO: 545224 - DNA, 75 bp, synthetic construct
  source 1..75: mol_type = other DNA
tgaagctacagcagatgcaggatggtcgtcgctatattgccggtatcggtgccggtattgagaacacccctgacg

SEQ ID NO: 545225 - DNA, 75 bp, synthetic construct
  source 1..75: mol_type = other DNA
ttcctcgccgagcgcatgcaggatgaaatccttcaggagcagatcctgattgaaaccgaaggtgaacgcgtcggt

SEQ ID NO: 545226 - DNA, 75 bp, synthetic construct
  source 1..75: mol_type = other DNA
ggtattactgggttagatcagcaaataagcgtggcatgttgagtcgtccaaactcaaatcttggtacagaggcca

SEQ ID NO: 545227 - DNA, 75 bp, synthetic construct
  source 1..75: mol_type = other DNA
gatgatgctgtcaggtgtgtttctgacgctgacggtgctgttctgcgtgtatgggctcgtgccggcttccgcaga

SEQ ID NO: 545228 - DNA, 75 bp, synthetic construct
  source 1..75: mol_type = other DNA
acattgaggcattggctaaaacaaacatcgatcttgctttgcgtcaggatgaagatcagcacaagcagatggtga

SEQ ID NO: 545229 - DNA, 75 bp, synthetic construct
  source 1..75: mol_type = other DNA
tcacagacacatatttattcgcccgtgatgctaatcagccgtggaagtggcgcattttccatgtcgggcatcagt

SEQ ID NO: 545230 - DNA, 75 bp, synthetic construct
  source 1..75: mol_type = other DNA
gacaatggtgcaacgcttatcccgcaaaatacgacggtattggacccgacttactccaagccgtctaatttgcaa

SEQ ID NO: 545231 - DNA, 75 bp, synthetic construct
  source 1..75: mol_type = other DNA
cgtgcgagcggagactctgcgttagctaaacaaataaaccagcttcaagcaaaggttgacggtgatatatccgcc

SEQ ID NO: 545232 - DNA, 75 bp, synthetic construct
  source 1..75: mol_type = other DNA
cggtaatagcggcggcaatgggcgattggttataaatggtcagcggattgacgtttatgacgataacaacgtcct

SEQ ID NO: 545233 - DNA, 75 bp, synthetic construct
  source 1..75: mol_type = other DNA
aggaagagtaagttcagaaatcacaactaatcttgaagcaatttctaagacaaatatcgatcttgcgttgcggca

SEQ ID NO: 545234 - DNA, 75 bp, synthetic construct
  source 1..75: mol_type = other DNA
gtgtcgtagaagcagcaaatgcggcacttgaaaatgcatcatctttaattgccgaagagcgtgaagctcgtgcac

SEQ ID NO: 545235 - DNA, 75 bp, synthetic construct
  source 1..75: mol_type = other DNA
cttggccaggctttaaatgaggaaattgacagtaaggcttctcaacaagctgttgatgaaatcaataatcatatc

SEQ ID NO: 545236 - DNA, 75 bp, synthetic construct
  source 1..75: mol_type = other DNA
gccctggcaacctgtcagtaaaactgactgcaacatgggaagggaaatctccagagtattggatcagttggcgac

SEQ ID NO: 545237 - DNA, 75 bp, synthetic construct
  source 1..75: mol_type = other DNA
gttttcaaaagccctgtcgtcagcggaaacgcctgttttgaacggtgtctggacaattacagaaccagatctcga

SEQ ID NO: 545238 - DNA, 75 bp, synthetic construct
  source 1..75: mol_type = other DNA
accacaccatttgttatcgaaaacagcgttgcatacatgaatggtgcgtatattaaggatggtactatcacaaat

SEQ ID NO: 545239 - DNA, 75 bp, synthetic construct
  source 1..75: mol_type = other DNA
ggatatagccggcgagggagagcagagaaaactcaggctacgacacatagattttgacgggtacgtcagcggcgg

SEQ ID NO: 545240 - DNA, 75 bp, synthetic construct
  source 1..75: mol_type = other DNA
tgccgttgcctcagcgatacggcgcgattttaaccattattattggtatttcgatggcggtcctcgacggcgcta

SEQ ID NO: 545241 - DNA, 75 bp, synthetic construct
  source 1..75: mol_type = other DNA
gccagttccatttgggtggtcaatgcctaccaaattgccattgtcgtttccctactgtcgttctcttttttaggc

SEQ ID NO: 545242 - DNA, 75 bp, synthetic construct
  source 1..75: mol_type = other DNA
gtaatcaacgcatcgccgcgactattcgtcataatcgcgctcgtggacgccatcaaatcaccgccatgtcggaaa

SEQ ID NO: 545243 - DNA, 75 bp, synthetic construct
  source 1..75: mol_type = other DNA
ttcgacctgcccagcgccgtgatgaacgcgttaaccttcggcctgcttatcactgcgttgagtggtttcgctcag

SEQ ID NO: 545244 - DNA, 75 bp, synthetic construct
  source 1..75: mol_type = other DNA
actgcggctattctggctgtgattgctgcctgcgtcagtgggttacggattacccagccacgatcccaggcataa

SEQ ID NO: 545245 - DNA, 75 bp, synthetic construct
  source 1..75: mol_type = other DNA
tcgcgccagtaaaccccgtttcgacctgcccagcgccgtgatgaacgcgttaaccttcggcctgcttatcactgc

SEQ ID NO: 545246 - DNA, 75 bp, synthetic construct
  source 1..75: mol_type = other DNA
ccactccttcagccacaggcgggcggtgaagagggcacagagccgaaaatcctgcgttgtgtttctgaacgtgat

SEQ ID NO: 545247 - DNA, 75 bp, synthetic construct
  source 1..75: mol_type = other DNA
tgattgggccgatctgggggcacctgcgcccacactcaccatcaaaaaccccgagaacggacatgctcacctgtt

SEQ ID NO: 545248 - DNA, 75 bp, synthetic construct
  source 1..75: mol_type = other DNA
aaaccatcatgcagcagtgcgtaacgaaaattcttctggaaaacccggatgcggattatgaggactacgttactc

SEQ ID NO: 545249 - DNA, 75 bp, synthetic construct
  source 1..75: mol_type = other DNA
agatcatcagtattctccgcgaggccgaagccggagtttctgcccgtgagctatgccgtaagcacgccatttccg

SEQ ID NO: 545250 - DNA, 75 bp, synthetic construct
  source 1..75: mol_type = other DNA
atgaatcagtcgcttacccttgcctttttgattgccgcagggattggtctggtcgtccagaacacgctaatggtg

SEQ ID NO: 545251 - DNA, 75 bp, synthetic construct
  source 1..75: mol_type = other DNA
tctattttgtggtttaaacaagggatggcggggtttggcgaactggtctccagcgtgcgttggtggacgctgatc

SEQ ID NO: 545252 - DNA, 75 bp, synthetic construct
  source 1..75: mol_type = other DNA
cttgaatcatcgccgacaaataatgttaagtatgaatcaaagagtaaaggttacggcgtatacagccaaactgaa

SEQ ID NO: 545253 - DNA, 75 bp, synthetic construct
  source 1..75: mol_type = other DNA
gctggtaagcatgtttgcggaggaggcgagggcgccggaaaagggggaggatgacttgccatctggcgaggtggt

SEQ ID NO: 545254 - DNA, 75 bp, synthetic construct
  source 1..75: mol_type = other DNA
acgtctatggggcgtgtgggtattatcgagaaatctatagcattcacggcaggttataatatccgttatatgatt

SEQ ID NO: 545255 - DNA, 75 bp, synthetic construct
  source 1..75: mol_type = other DNA
agccagggatttctgtgcctgacgaacctttccgtttccggttcaggaagacggcgccgcagggtacggaagcgc

SEQ ID NO: 545256 - DNA, 75 bp, synthetic construct
  source 1..75: mol_type = other DNA
ttatcccggagtacgttattttggaatgtgacaagcttatcgccctgccaccggcagcaaaccagagctcggttg

SEQ ID NO: 545257 - DNA, 75 bp, synthetic construct
  source 1..75: mol_type = other DNA
acaaagggactcgagttttcgcccctttcagatggctgctgtccgttctgtaccggtgatatcagggaaaaggaa

SEQ ID NO: 545258 - DNA, 75 bp, synthetic construct
  source 1..75: mol_type = other DNA
agagagcctgaaagaagaatctgacagcgtctttatgcgggtgattaaagaaagcttgtggcaggagctggcaga

SEQ ID NO: 545259 - DNA, 75 bp, synthetic construct
  source 1..75: mol_type = other DNA
accccgtacatatcactattcagactcggtagaatagggcgtgcacaatttctcactatcattaagacgatgaaa

SEQ ID NO: 545260 - DNA, 75 bp, synthetic construct
  source 1..75: mol_type = other DNA
attaaagcgttctgatgttcgtcttgatgatgattcccagcgttactacatcatgattgatgataccaaaactga

SEQ ID NO: 545261 - DNA, 75 bp, synthetic construct
  source 1..75: mol_type = other DNA
cggatcttccacgcgataagagacaacttggaaattgattatcttaatgatttcaaagaaaggcgcattgtacat

SEQ ID NO: 545262 - DNA, 75 bp, synthetic construct
  source 1..75: mol_type = other DNA
aggtgaagactgagagcgtgcagacagagactgaaggtggtggtgagtccgccggggcgtcagaggtgccgtccg

SEQ ID NO: 545263 - DNA, 75 bp, synthetic construct
  source 1..75: mol_type = other DNA
gccgcagctatggtaactatagccttactgagatgcgaaagctggtggcgcactttgcaacgcttgaggactgga

SEQ ID NO: 545264 - DNA, 75 bp, synthetic construct
  source 1..75: mol_type = other DNA
tgaacaatgaaaagcctacgccgatagagtttagagaggcgtgtaacttattttttcagcgacattatcagaatg

SEQ ID NO: 545265 - DNA, 75 bp, synthetic construct
  source 1..75: mol_type = other DNA
atggctcttaacagtctgcaatatgcaggggtgagagaaaccgaattacttctgcttgataaagtaaaaatagac

SEQ ID NO: 545266 - DNA, 75 bp, synthetic construct
  source 1..75: mol_type = other DNA
aagagagtcattatcaggtaatgcggcttttgctttactggtgtattcattattgcactcccccccattaaaacc

SEQ ID NO: 545267 - DNA, 75 bp, synthetic construct
  source 1..75: mol_type = other DNA
atgtggcttatgaagacattactaacatcggggtgtactaatcaacggggagcaggtcactgccccgaattacac

SEQ ID NO: 545268 - DNA, 75 bp, synthetic construct
  source 1..75: mol_type = other DNA
agacgatagcttgtttactgcaaaagtgacggaagcgtacttgtctttattagcgcatggcgcgaaagcgaccgt

SEQ ID NO: 545269 - DNA, 75 bp, synthetic construct
  source 1..75: mol_type = other DNA
gtgcgtggctttaaggagcagtatatctccggtaataacggtggttatctgcgaaatgagctgtcctggtctctg

SEQ ID NO: 545270 - DNA, 75 bp, synthetic construct
  source 1..75: mol_type = other DNA
atggctcttaacagtctgcaatatgcaggggtgagagaaaccgaacttctgttacttgataaagtaaaaatagac

SEQ ID NO: 545271 - DNA, 75 bp, synthetic construct
  source 1..75: mol_type = other DNA
ggaggcaataccggaagcggtaggctcattcactcattacggtaaagagttgcagggaccaacggttgacggcaa

SEQ ID NO: 545272 - DNA, 75 bp, synthetic construct
  source 1..75: mol_type = other DNA
ccgccgtgacgggcttacttgttcagttcgcccgtgaaacagatgatcgcgttaccgcgctggaagaggaaaaca

SEQ ID NO: 545273 - DNA, 75 bp, synthetic construct
  source 1..75: mol_type = other DNA
tattcacaaagtgaatcttttaaccctgccgttgcaacaggggctggcactgtctgcaatcccggtgatttttac

SEQ ID NO: 545274 - DNA, 75 bp, synthetic construct
  source 1..75: mol_type = other DNA
gcgttattctgttggtggaaggcttcccgccatcgcatgccgggaccatcaccgtgtatgaagactcacaaccgg

SEQ ID NO: 545275 - DNA, 75 bp, synthetic construct
  source 1..75: mol_type = other DNA
cagcaggcacccggatcagcactctggaaaatcaggtaagcgaactggttgcacttgtccggcagttaacaggaa

SEQ ID NO: 545276 - DNA, 75 bp, synthetic construct
  source 1..75: mol_type = other DNA
ttgtggacgccatcaatactggtatcgttatatggccacggctggtaactatgctgtcgcgccgccaaaagagta

SEQ ID NO: 545277 - DNA, 75 bp, synthetic construct
  source 1..75: mol_type = other DNA
gtgcctgataccgaaagctatcaggaagtatttgcacagccacatttgattgacgaaaacgatcctttattcagt

SEQ ID NO: 545278 - DNA, 75 bp, synthetic construct
  source 1..75: mol_type = other DNA
tgagtatctgaatcttattgccgatgccgcgcgtgcgctacaaagcgatgcaggccaactggtgggcggtcacta

SEQ ID NO: 545279 - DNA, 75 bp, synthetic construct
  source 1..75: mol_type = other DNA
ggagatggagccagagctttcagagcaggctatttatagcgaatttgaagatactctgcagattgtcgatgcgga

SEQ ID NO: 545280 - DNA, 75 bp, synthetic construct
  source 1..75: mol_type = other DNA
ttcgtgattctgagctgccatcaatatgtttggctgtttgatgtccgttcctggcacaaagcagaccatgagaag

SEQ ID NO: 545281 - DNA, 75 bp, synthetic construct
  source 1..75: mol_type = other DNA
tgtgtatcccgaagtgttgtcgttggtatttgatgcagctaacacatacaacgctgagcttggtgtactggaaca

SEQ ID NO: 545282 - DNA, 75 bp, synthetic construct
  source 1..75: mol_type = other DNA
cgctgagcctggtgtactggaacagacagcccgggcttacattgaatcgcatggtgctgttgaacgtcatcttgg

SEQ ID NO: 545283 - DNA, 75 bp, synthetic construct
  source 1..75: mol_type = other DNA
caaagatagcgccacggacaacgttcgccggttgttaaaaaagctcgcaccacggcaaacaggaagaatgccgaa

SEQ ID NO: 545284 - DNA, 75 bp, synthetic construct
  source 1..75: mol_type = other DNA
cattcctcagccttgggaaaaagaaagatggcacctactttacgccagaagatatacgcagcttcaacacctcaa

SEQ ID NO: 545285 - DNA, 75 bp, synthetic construct
  source 1..75: mol_type = other DNA
ttccgatggaagcataataagctttttctgcttctgccggaggagtatggcccagccttcccagcaatcgtcgat

SEQ ID NO: 545286 - DNA, 75 bp, synthetic construct
  source 1..75: mol_type = other DNA
tgaaaccgaaggcgaacgtatcgggcaaatcaatgccctttcggtcattgaatttccgggtcatccacgcgcttt

SEQ ID NO: 545287 - DNA, 75 bp, synthetic construct
  source 1..75: mol_type = other DNA
acgctgagcctggtgtactggaacagacagcccgggcttacattgaatcgcatggtgctgttgaacgtcatcttg

SEQ ID NO: 545288 - DNA, 75 bp, synthetic construct
  source 1..75: mol_type = other DNA
ttaattatatttatagacccgaaaagttaattaaaagtatacttgacctgattaagtcaagatgcagcgaaagta

SEQ ID NO: 545289 - DNA, 75 bp, synthetic construct
  source 1..75: mol_type = other DNA
tgtcggcgatcccggtaatttttacgtcatttggcttccacggtagtgtaccgagcatcgtcagttatatggatg

SEQ ID NO: 545290 - DNA, 75 bp, synthetic construct
  source 1..75: mol_type = other DNA
ttatttttactgtggctttgctctgttgtatggctgaacggtgcaaatggtgcgatccccatgctggccggtatg

SEQ ID NO: 545291 - DNA, 75 bp, synthetic construct
  source 1..75: mol_type = other DNA
tacacaccggaagtgctgacgctatgcccgaaatgcggtcatgaccagttccagagacgcccgttcgagccgtaa

SEQ ID NO: 545292 - DNA, 75 bp, synthetic construct
  source 1..75: mol_type = other DNA
tcccgatctacacgccggaagtcctaacgctatgcccgaaatgtggtcatgaccagttccagagacgcccgttcg

SEQ ID NO: 545293 - DNA, 75 bp, synthetic construct
  source 1..75: mol_type = other DNA
cgttatgcctgtgatacggttaatgccttacctgcaaacccgtgcttacggcagaatgacggtcagtataaggga

SEQ ID NO: 545294 - DNA, 75 bp, synthetic construct
  source 1..75: mol_type = other DNA
caaggtcaataaaaacgtcctggaatatctaaaaaaacactatccggatgaagaccaaaaaagtatgggtaaagg

SEQ ID NO: 545295 - DNA, 75 bp, synthetic construct
  source 1..75: mol_type = other DNA
gacgttgaaaatggaaacttcaacgagcggagggcagaagtatgttgccggtattgcgcttggtattgacaccac

SEQ ID NO: 545296 - DNA, 75 bp, synthetic construct
  source 1..75: mol_type = other DNA
gcgcaagatctatttttatcgacgatctgccgattgtaaatgaagacggttcctccaacttcagcggaatcacat

SEQ ID NO: 545297 - DNA, 75 bp, synthetic construct
  source 1..75: mol_type = other DNA
gatcaccaagctgacctctcaatacaaagaggatattaaagcggctgtagcaaccgaaacgaaaacgcgtacaga

SEQ ID NO: 545298 - DNA, 75 bp, synthetic construct
  source 1..75: mol_type = other DNA
ggatatcactgataaaacgcagctggagtggcgcgaagtgttccaggatctcaatcatcacggggtttatcacag

SEQ ID NO: 545299 - DNA, 75 bp, synthetic construct
  source 1..75: mol_type = other DNA
ttcgtcttacggatgataacagtagccagtacctctacaacgatacttgggttgattccatcggtgagattgtag

SEQ ID NO: 545300 - DNA, 75 bp, synthetic construct
  source 1..75: mol_type = other DNA
gcgtggattctctttgatttgctgaccaatgctcgatatggccttggtcagtatgtgtcggaatctatgattgac

SEQ ID NO: 545301 - DNA, 75 bp, synthetic construct
  source 1..75: mol_type = other DNA
ttgccgggatgtttacgatgggattcagaacccgggtgacaccacaggttagagatattctgcgtgctcatctgt

SEQ ID NO: 545302 - DNA, 75 bp, synthetic construct
  source 1..75: mol_type = other DNA
gctgtcgatggcgctcggtacgtttattgcgggcgtgttgctggcagaaagcgaatatcgccacgaactggaaac

SEQ ID NO: 545303 - DNA, 75 bp, synthetic construct
  source 1..75: mol_type = other DNA
attgcgggcgtgctgctggcggaaagtgaatatcgccatgaactggaaacggctatcgatcccttcaaaggcttg

SEQ ID NO: 545304 - DNA, 75 bp, synthetic construct
  source 1..75: mol_type = other DNA
tcatcccaatgcatgccgataccgtacaaatttctcgcgccagggaagcccgacgcgaactggaagagattttcc

SEQ ID NO: 545305 - DNA, 75 bp, synthetic construct
  source 1..75: mol_type = other DNA
agtgtcggcaaccactggcgtgttgttgttcacttttgttgccggtggtgtggtttgtgtcgggacgtcgctggt

SEQ ID NO: 545306 - DNA, 75 bp, synthetic construct
  source 1..75: mol_type = other DNA
gcgctggtggtggtgtttctctgtggtattgctgtgattagcgtgcaatttttgattgcggcagggttgttacca

SEQ ID NO: 545307 - DNA, 75 bp, synthetic construct
  source 1..75: mol_type = other DNA
gatcttttacgttctgcgggtgcagaggccgctgagtctatcgtcattacctgtaacgagccggaagacaccatg

SEQ ID NO: 545308 - DNA, 75 bp, synthetic construct
  source 1..75: mol_type = other DNA
atgaatgaatttgagaagatttttaatgaaatgaatctggaccgggcgctgcttcccatcctttttcgttcgaac

SEQ ID NO: 545309 - DNA, 75 bp, synthetic construct
  source 1..75: mol_type = other DNA
cccggaaagattctggtgctgtgctacaacattactttggccagttatctgcgggaatgcattgatgtcagaggg

SEQ ID NO: 545310 - DNA, 75 bp, synthetic construct
  source 1..75: mol_type = other DNA
acaaatgccgcaattgcaggtagatattgatagtaataaagcggtgtcattagggttgagcttgaatgatgtcac

SEQ ID NO: 545311 - DNA, 75 bp, synthetic construct
  source 1..75: mol_type = other DNA
gaacatttcgactggatgaagatcggcatgaaggtgctggcgtttgtcggcatgctgattggcgggcgctattta

SEQ ID NO: 545312 - DNA, 75 bp, synthetic construct
  source 1..75: mol_type = other DNA
ggcgttcgatttttggcgtaggcgcggcacaggtgctgttaagcgcggcgttgctggcgggattattgatgctga

SEQ ID NO: 545313 - DNA, 75 bp, synthetic construct
  source 1..75: mol_type = other DNA
ggaaagggtgggtgtatacccaacataaggtcaataaaaacgtcctggaatatttaaaaaaacattatccggatg

SEQ ID NO: 545314 - DNA, 75 bp, synthetic construct
  source 1..75: mol_type = other DNA
caacggcaataaatcagtctgcgtcacaggttgcccgtgagacaaaggtacgccggaaactggtaaaggaaaggg

SEQ ID NO: 545315 - DNA, 75 bp, synthetic construct
  source 1..75: mol_type = other DNA
cagcatacttaaagccggtcagcatcggtatcagcgggcatttattcagcgattaaaaaatggtcgctggcatgt

SEQ ID NO: 545316 - DNA, 75 bp, synthetic construct
  source 1..75: mol_type = other DNA
gttgaaggcgctaaccatatggacctctatgacggcaaagcctatgtggctgaagcgatttcagtattagctcca

SEQ ID NO: 545317 - DNA, 75 bp, synthetic construct
  source 1..75: mol_type = other DNA
gtacgagaaatcatcagcgaagctgaaaaggcacgccaggttaatggcgatgaaccctatatcgaaattatttgt

SEQ ID NO: 545318 - DNA, 75 bp, synthetic construct
  source 1..75: mol_type = other DNA
atttaaaacgcgataagggctggattggcgtgttactggagatctggctaggtgccagcgcagggagtaaacctg

SEQ ID NO: 545319 - DNA, 75 bp, synthetic construct
  source 1..75: mol_type = other DNA
ggcgaacgaattctgacattgccgcgcggattttatctgaagaagaagttcaccagcgcactgctggcccgtcat

SEQ ID NO: 545320 - DNA, 75 bp, synthetic construct
  source 1..75: mol_type = other DNA
ttacgaaatattgatcttaaccttctgactatttttgaagctgtatatgtacataaagggatcgttaatgcagcg

SEQ ID NO: 545321 - DNA, 75 bp, synthetic construct
  source 1..75: mol_type = other DNA
gagatttgcaggaatgccattaaacgaggcggacagcgaggtgaacatctgagggctaatatcgacagagccagt

SEQ ID NO: 545322 - DNA, 75 bp, synthetic construct
  source 1..75: mol_type = other DNA
ccgccggaaaaccgctggagttcagcaagcctgccgcctggcaaaataacctgccactgacgccagcagataaag

SEQ ID NO: 545323 - DNA, 75 bp, synthetic construct
  source 1..75: mol_type = other DNA
aaaacaaaccggaaagcacacctgggcgattggcgacactggcatcgttattcacaaaagttttcgcagccctgt

SEQ ID NO: 545324 - DNA, 75 bp, synthetic construct
  source 1..75: mol_type = other DNA
tgtgcaatcggggattcggccccatcaaaaccaaaggagaagcctgcaatgtcatggctgaaaaaactggctcag

SEQ ID NO: 545325 - DNA, 75 bp, synthetic construct
  source 1..75: mol_type = other DNA
gtggtcatctatcgcaccgaggacgaggttttctctccagagactatggcgagcttcgagggcatggcggtaacg

SEQ ID NO: 545326 - DNA, 75 bp, synthetic construct
  source 1..75: mol_type = other DNA
gtcactgtctggcgaacggaagatgaggtgttctctcctgaaacgatggcgagctttgagggcgtcgccgtcacg

SEQ ID NO: 545327 - DNA, 75 bp, synthetic construct
  source 1..75: mol_type = other DNA
gtttctgcgcgtgcgcgtaataaacgtgatgttggcaaagcgacactgctggcggttctctccgctctgggcgtt

SEQ ID NO: 545328 - DNA, 75 bp, synthetic construct
  source 1..75: mol_type = other DNA
atgtactgaatcgtcaggaaatggtgttaattagcatgttgttaattgccgcagttccggcgacctggatgctgg

SEQ ID NO: 545329 - DNA, 75 bp, synthetic construct
  source 1..75: mol_type = other DNA
gactcgacttctctggccttgcacttggtgtaccggtgtgggaacaggtgaaaaacaccatgctgatcaccctgt

SEQ ID NO: 545330 - DNA, 75 bp, synthetic construct
  source 1..75: mol_type = other DNA
gcaccgaaacggaacaccaagctaaccgtttcgctaccagcgcatcacgcagcaacatccgctacagcctgagcg

SEQ ID NO: 545331 - DNA, 75 bp, synthetic construct
  source 1..75: mol_type = other DNA
tcgtggttcacagatgccagcgcaacccatttaccggaaaccgcatttttgctctgagcaacggcgacaatcagt

SEQ ID NO: 545332 - DNA, 75 bp, synthetic construct
  source 1..75: mol_type = other DNA
cgcagcaacatccgctacagcctgagtgatacacacgcaacgccggatggctacccagtaaaacaaatcggcgag

SEQ ID NO: 545333 - DNA, 75 bp, synthetic construct
  source 1..75: mol_type = other DNA
cacattcagaacgtccggcgcggcaccggcgataaatcggatctgctcattgctgacgtgctgattaaacggcag

SEQ ID NO: 545334 - DNA, 75 bp, synthetic construct
  source 1..75: mol_type = other DNA
atgaaacagcaacgtaattcacgctttcgtaatggggctgaacgccaggctaaccgtttcgctaccagtgcatca

SEQ ID NO: 545335 - DNA, 75 bp, synthetic construct
  source 1..75: mol_type = other DNA
ctggcgcagaacgccacgcagcccgtttctcaaccagcgcatcacgcagcaactcgcactacagcctgcaggaaa

SEQ ID NO: 545336 - DNA, 75 bp, synthetic construct
  source 1..75: mol_type = other DNA
ctctatccactacaacaaattcagcctgcgtgatcccatcctgcacggagtaatagatgttatccgtaatgcatt

SEQ ID NO: 545337 - DNA, 75 bp, synthetic construct
  source 1..75: mol_type = other DNA
agatatgcgttgtggcttcaacggcctggcttcgaaggtgcagaacacgctgaaagatgacccgttcaccgggca

SEQ ID NO: 545338 - DNA, 75 bp, synthetic construct
  source 1..75: mol_type = other DNA
gctatgaattgacgaaaggcggcgggatggtgaccgtgaagctggaaggggaagtgggcgcaattaacgcggcgg

SEQ ID NO: 545339 - DNA, 75 bp, synthetic construct
  source 1..75: mol_type = other DNA
aaatctggatcatcgctggcatcacagatatgcgttgtggtttcaatggtctggcctcaaaagtacagaacacac

SEQ ID NO: 545340 - DNA, 75 bp, synthetic construct
  source 1..75: mol_type = other DNA
acctttgactggggcatccgtgacgctgacggttatcactttattctcgggcgcactgacgatgtaattaacgtt

SEQ ID NO: 545341 - DNA, 75 bp, synthetic construct
  source 1..75: mol_type = other DNA
ggcgctggcgctgattgccgtctcttcggaaacagaagaagagcgcacctttacctttcgtcagctgcatgacga

SEQ ID NO: 545342 - DNA, 75 bp, synthetic construct
  source 1..75: mol_type = other DNA
gaccttgtacaaactgacttggaaggtgcgaactacacctctgcaggtaccgatatttgcgctgcgggcttcggt

SEQ ID NO: 545343 - DNA, 75 bp, synthetic construct
  source 1..75: mol_type = other DNA
ataaattagaaaaagaaaatgcgagattactaaatgagaataatagacttcttgttatggttagagaccttcaga

SEQ ID NO: 545344 - DNA, 75 bp, synthetic construct
  source 1..75: mol_type = other DNA
ctacttatggttagagatcttcaaatggtcgcatatagtaaatgtattagagaagatcggattttccccgaaaac

SEQ ID NO: 545345 - DNA, 75 bp, synthetic construct
  source 1..75: mol_type = other DNA
attactaaatgagaataatagacttcttgttatggttagagaccttcagatggtcgcatacagcaaaggtcttag

SEQ ID NO: 545346 - DNA, 75 bp, synthetic construct
  source 1..75: mol_type = other DNA
cattggttgatctgaaattcatcatggcagatactggtttcggaaagaccttcatctatgaccgcatcaaagacg

SEQ ID NO: 545347 - DNA, 75 bp, synthetic construct
  source 1..75: mol_type = other DNA
ttcatctatgaccggattaagtcaggcgacctgccaaaagccaaagttatccacgggcgagcaagatggttatat

SEQ ID NO: 545348 - DNA, 75 bp, synthetic construct
  source 1..75: mol_type = other DNA
ctgaaaactcagggcgctgctgcattcgaaggtgcagtaatcgcttacgaacccgtatgggcaatcggcactggc

SEQ ID NO: 545349 - DNA, 75 bp, synthetic construct
  source 1..75: mol_type = other DNA
ctgacggttatcactttattctcgggcgcactgacgatgtaattaacgttgccgggcatcggctgggcacgcgcg

SEQ ID NO: 545350 - DNA, 75 bp, synthetic construct
  source 1..75: mol_type = other DNA
ttgatgagaatgttgaccgtatccggtgtgaacgcctgcccggagaactggcatccgcgctgaaacaacaactga

SEQ ID NO: 545351 - DNA, 75 bp, synthetic construct
  source 1..75: mol_type = other DNA
ttaataatcaacttctggcacaacataatgcgctgcttgaacgtcttatccgcacaatggcatcaggtattgtta

SEQ ID NO: 545352 - DNA, 75 bp, synthetic construct
  source 1..75: mol_type = other DNA
gatgcgaagttatattgaaaattctttaaaatcaatcggttgcttactagatccttcaatacttgaagaaaaatc

SEQ ID NO: 545353 - DNA, 75 bp, synthetic construct
  source 1..75: mol_type = other DNA
tcggtcggagccctggtccttcctgtcatctatcgggcgattaaaactcactatccgcagcttttactgcgcaac

SEQ ID NO: 545354 - DNA, 75 bp, synthetic construct
  source 1..75: mol_type = other DNA
ggctgattgtgccgtggaaatatggctttaaagggattaaatcaattgtcagtattaagctgacccgggagcgtc

SEQ ID NO: 545355 - DNA, 75 bp, synthetic construct
  source 1..75: mol_type = other DNA
agtgaacgcggtggcctcaatgttgcgctcactgggcgtgcagcgcggcgatcgggtgctggtgtatatgccgat

SEQ ID NO: 545356 - DNA, 75 bp, synthetic construct
  source 1..75: mol_type = other DNA
ggcctggacgacaggccgacgcgtctgggaagccccggcgtgccgatgtatggctacaatgtgcagttgctcaac

SEQ ID NO: 545357 - DNA, 75 bp, synthetic construct
  source 1..75: mol_type = other DNA
attccctaccgctgaaattcgcaaacacgatctctcgtcgctggaagtgctctatctggcgggggaaccgctgga

SEQ ID NO: 545358 - DNA, 75 bp, synthetic construct
  source 1..75: mol_type = other DNA
atggaaaccgttaaattaagtaaagaatatcgttttgaagactttgagccggtgactgaactcaaccttgattta

SEQ ID NO: 545359 - DNA, 75 bp, synthetic construct
  source 1..75: mol_type = other DNA
ggaagggccgctgccgccgggctgtattcagaccatctggggtgacgacgaccgctttgtgaagacgtactggtc

SEQ ID NO: 545360 - DNA, 75 bp, synthetic construct
  source 1..75: mol_type = other DNA
cagccagattggcaactttggtcgcccggcgcacgtctggtttgtctcgcaattgccgaaaacgcgatcctgggg

SEQ ID NO: 545361 - DNA, 75 bp, synthetic construct
  source 1..75: mol_type = other DNA
tccttcacatctggctctatagacagggtgatgatcacttctggagtgaatccagattaaacatctcattgctga

SEQ ID NO: 545362 - DNA, 75 bp, synthetic construct
  source 1..75: mol_type = other DNA
gagggtgaaaataattcatcccccagttctactctacttactatacatcagcctgaaaggcaggaactattacaa

SEQ ID NO: 545363 - DNA, 75 bp, synthetic construct
  source 1..75: mol_type = other DNA
accatgcgtaagctgaacgggatgctggtcgtcggtactcaatccccggcagagatcatcaaagatgatatcgcc

SEQ ID NO: 545364 - DNA, 75 bp, synthetic construct
  source 1..75: mol_type = other DNA
atgtctactactgcatttttggacaaacttgattaccgtcagctgcagttttgccgggatgaatgcgatcgacgc

SEQ ID NO: 545365 - DNA, 75 bp, synthetic construct
  source 1..75: mol_type = other DNA
tgacaggatccaggcagctgtcatgcgtaaacagaacgaaatgcggcaacgttacggaatacaacaggaaagtca

SEQ ID NO: 545366 - DNA, 75 bp, synthetic construct
  source 1..75: mol_type = other DNA
aacagcacaacgtccggcggtggacggaacgtgatggagacacagcactaccgggatttactgcgggctgacaat

SEQ ID NO: 545367 - DNA, 75 bp, synthetic construct
  source 1..75: mol_type = other DNA
tacccgtcttgttcgtgatgcacagggacagtggtgcagggacccgcgttttattccccctctgctgacgctgtc

SEQ ID NO: 545368 - DNA, 75 bp, synthetic construct
  source 1..75: mol_type = other DNA
cagcactgaaaccatcaccgggctgtatgactcgcttctttatgcccgctgccggtacgtgttcacgcagtccta

SEQ ID NO: 545369 - DNA, 75 bp, synthetic construct
  source 1..75: mol_type = other DNA
cgacgccatagacgttacggagtttataaaacatatgcggctcaacgagagtatcccgctgtcccgctatctccc

SEQ ID NO: 545370 - DNA, 75 bp, synthetic construct
  source 1..75: mol_type = other DNA
gacgccatgaaactgaatcaatgtgccaccatcaagaagtacatcccgtactcctcgcatattcatcagcatgtg

SEQ ID NO: 545371 - DNA, 75 bp, synthetic construct
  source 1..75: mol_type = other DNA
caatgcggttcaatctgattgccgtttggctgagagtgaagggaaaaccggtagcaaaccgtttatttggcgcaa

SEQ ID NO: 545372 - DNA, 75 bp, synthetic construct
  source 1..75: mol_type = other DNA
acgaaagaagcccaggaaaacggccttagcattcggttgtcacagtgggcgcagggcggtgagttcggctgggtg

SEQ ID NO: 545373 - DNA, 75 bp, synthetic construct
  source 1..75: mol_type = other DNA
aacgtgcggcgcgcggtgctgatttacgctataacatggagctcaccctcgaagaagctgtacgtggcgtgacca

SEQ ID NO: 545374 - DNA, 75 bp, synthetic construct
  source 1..75: mol_type = other DNA
attatgtttataaattaggtgctcgtgctgatatgagtacccggtggtatcttgatggtgataaaagttttggct

SEQ ID NO: 545375 - DNA, 75 bp, synthetic construct
  source 1..75: mol_type = other DNA
atcagatcatcgctgtgattaagtcagttgaagccggacgaaccgttaaagatgtctgccgggaggccggtattt

SEQ ID NO: 545376 - DNA, 75 bp, synthetic construct
  source 1..75: mol_type = other DNA
ttgaggacgagaatcgtcgtctgaaacagatgtttgccgacctgagtctggaaaatcgcgcgttaaaagacgtca

SEQ ID NO: 545377 - DNA, 75 bp, synthetic construct
  source 1..75: mol_type = other DNA
gcttaccgaagccattggtgcccggggcgaacggattctgacgctgccgcgcggattttatttgaagaagaattt

SEQ ID NO: 545378 - DNA, 75 bp, synthetic construct
  source 1..75: mol_type = other DNA
atgtgaaaatgagtattcagtatgactttatgctgaagtcagaaataacgccggagagaaaaacctccggcgttt

SEQ ID NO: 545379 - DNA, 75 bp, synthetic construct
  source 1..75: mol_type = other DNA
ggcagtacgctgggcgatcgcctgaattactgggatgtgaaaatgagtattcagtatgactttatgctgaagtaa

SEQ ID NO: 545380 - DNA, 75 bp, synthetic construct
  source 1..75: mol_type = other DNA
catgcctcaccacccggtaccggcacatcaccacaaccacgtctgcaggaggccagtctggcaaccccggcagct

SEQ ID NO: 545381 - DNA, 75 bp, synthetic construct
  source 1..75: mol_type = other DNA
gcaaaacgctgtccgttaaaattccggcaggggtggacactggagaccgcatccgtcttgcgggcgaaggtgaag

SEQ ID NO: 545382 - DNA, 75 bp, synthetic construct
  source 1..75: mol_type = other DNA
gatcaaagatccgtgcaacaaatgtcatggtcatgggcgtgttgagcgcagcaaaacgctgtccgttaaaattcc

SEQ ID NO: 545383 - DNA, 75 bp, synthetic construct
  source 1..75: mol_type = other DNA
ctgcagtggattctgataacccgtcatccaaggttatcgcaaccattcccgctggcccctgggcaggggcaacgc

SEQ ID NO: 545384 - DNA, 75 bp, synthetic construct
  source 1..75: mol_type = other DNA
agaaacaacagggcagaatggtacgcagcaattcgcattacagaatgccagcctgtccacgcctgtagcagaaaa

SEQ ID NO: 545385 - DNA, 75 bp, synthetic construct
  source 1..75: mol_type = other DNA
tacctgccggcccatggccggggccgtcctctacagccaggacgccagactcgcaggtcagggaatggatatcca

SEQ ID NO: 545386 - DNA, 75 bp, synthetic construct
  source 1..75: mol_type = other DNA
cacggccagctactcttctcggcataccgttagtaccattagttatagtgttgggttcaatcacgctgttagcga

SEQ ID NO: 545387 - DNA, 75 bp, synthetic construct
  source 1..75: mol_type = other DNA
agcatcgttatcagcgggcatttattcagcgattaaaaaatggtcgctggcatgtcatgcagcgtgtggccggga

SEQ ID NO: 545388 - DNA, 75 bp, synthetic construct
  source 1..75: mol_type = other DNA
cgtaaaaacgccattccggcggcttcagcaatggccattaaccgcgtggccacaacggcgattaatcagtcttca

SEQ ID NO: 545389 - DNA, 75 bp, synthetic construct
  source 1..75: mol_type = other DNA
atcccgatggcggtgccgcttaccacggcgtttaaacagaatattgaacggatacggcgtgaatgtcttccgaaa

SEQ ID NO: 545390 - DNA, 75 bp, synthetic construct
  source 1..75: mol_type = other DNA
ttcagttgccagggagctggccgttccccgtcgtcttatccgtgcccgcatccggttaagtccggcacgaccgga

SEQ ID NO: 545391 - DNA, 75 bp, synthetic construct
  source 1..75: mol_type = other DNA
tatccggcgtgaacgtctgcccggagaactggcatacgcgctgaaacaacagctgaggattgcgataaaacgatg

SEQ ID NO: 545392 - DNA, 75 bp, synthetic construct
  source 1..75: mol_type = other DNA
gcgctcgcgggtcactgtaaagaaattatcgtcaccattcatgccgacaactctgtctctgtacaggacgacggg

SEQ ID NO: 545393 - DNA, 75 bp, synthetic construct
  source 1..75: mol_type = other DNA
gcgccactggtgacgatgcgcgtgaaggcctgattgcggtcgtttccgtaaaagtgccggacccgaaattctcct

SEQ ID NO: 545394 - DNA, 75 bp, synthetic construct
  source 1..75: mol_type = other DNA
gttgaccgtatccggcgtgaacgtctgcctggagaactggcatccgcgctgaaacaacaactgaggattgcgata

SEQ ID NO: 545395 - DNA, 75 bp, synthetic construct
  source 1..75: mol_type = other DNA
tcaggcagaacctgagcaatatcagtaaaaatgccattcctcgggcgacatcccagtccattaaccgggtggctg

SEQ ID NO: 545396 - DNA, 75 bp, synthetic construct
  source 1..75: mol_type = other DNA
acttcaaactggcggcctccgcagagtttattgaacgcgccgatgcgttacccgcttttgaaaaagcttacgact

SEQ ID NO: 545397 - DNA, 75 bp, synthetic construct
  source 1..75: mol_type = other DNA
cgcgcctgatgatgccgctgagttttgcagggttgattagcggcatgatgacgctggtggcgacgccgcctaacc

SEQ ID NO: 545398 - DNA, 75 bp, synthetic construct
  source 1..75: mol_type = other DNA
gccatggtcgtggcaatggctgcatccgctgcctttatgacgccagtttcttctcccgttaacacgttggtttta

SEQ ID NO: 545399 - DNA, 75 bp, synthetic construct
  source 1..75: mol_type = other DNA
ttgcagcaactgaatgccagtattgccgtagaagggctggatgctaaaaaagtggctgccgactacctgaaacaa

SEQ ID NO: 545400 - DNA, 75 bp, synthetic construct
  source 1..75: mol_type = other DNA
aaatggcgcagtggttacagcctgttttcgccagtctcgacgaaaaaacgctgcagaaactgaacgccagcattg

SEQ ID NO: 545401 - DNA, 75 bp, synthetic construct
  source 1..75: mol_type = other DNA
gcggcgctggggctgcaaaccttaagcgatccgcaaggcgtgcaacctatctacgcgcctgcaccagtggtgcgt

SEQ ID NO: 545402 - DNA, 75 bp, synthetic construct
  source 1..75: mol_type = other DNA
caaacgcgtgctgtggataccggttgaaggcgagcgcagcatcccgctggcgcagcgtcgcgtaggatcaccgtt

SEQ ID NO: 545403 - DNA, 75 bp, synthetic construct
  source 1..75: mol_type = other DNA
gggaatgacagttatgaccgatgctattcgcacgtttaagttgctgggttgtgaactgttgttctgcactaatgc

SEQ ID NO: 545404 - DNA, 75 bp, synthetic construct
  source 1..75: mol_type = other DNA
acccgtggtattgcgcagatatcattcgtcgtcataaaccagactttaccccacgcgttgcgtttattttgggtt

SEQ ID NO: 545405 - DNA, 75 bp, synthetic construct
  source 1..75: mol_type = other DNA
actttgtgaagttgggggtaccgttcaccattatcgtgatggcggtttgtgtggtgatgatcccgatgctgtttc

SEQ ID NO: 545406 - DNA, 75 bp, synthetic construct
  source 1..75: mol_type = other DNA
tcatcggtgttgaacgctggcggcgttttcgtcgcgttatcgtgaacgttaatggggtttctgaatttcgcgcgc

SEQ ID NO: 545407 - DNA, 75 bp, synthetic construct
  source 1..75: mol_type = other DNA
cttcccctctgtaaaccacaacgctaatcacatttctgacatttttcccggactttacataacaggattgtttca

SEQ ID NO: 545408 - DNA, 75 bp, synthetic construct
  source 1..75: mol_type = other DNA
acaaaccacatttaaaatctgcttatattgatccgattagaactgtgacagtcatcgatgatgaatacccaacta

SEQ ID NO: 545409 - DNA, 75 bp, synthetic construct
  source 1..75: mol_type = other DNA
ggaatacagcgggaagaatgccgacaaggattttaaacgggcattcatgccagcgctgaaacaggtgctttcagt

SEQ ID NO: 545410 - DNA, 75 bp, synthetic construct
  source 1..75: mol_type = other DNA
ttacatgtgctgaaaggctctgcactggcacttgatatatacgcgtggcttgctcaccgtctccaccgcattgag

SEQ ID NO: 545411 - DNA, 75 bp, synthetic construct
  source 1..75: mol_type = other DNA
gtaagctgggctgggatgtttatctgatttcacagcatgaagatatgattgattcccagataattaaggcgatgg

SEQ ID NO: 545412 - DNA, 75 bp, synthetic construct
  source 1..75: mol_type = other DNA
gttatttcattcgttgaatgcaattagactatttggtataacacagtgtagaccttttttattagccttactaaa

SEQ ID NO: 545413 - DNA, 75 bp, synthetic construct
  source 1..75: mol_type = other DNA
ttctctgaagataaaataatagcactaaaatatgccaagcccactgaaaatgaaatgaacataatatccgtagaa

SEQ ID NO: 545414 - DNA, 75 bp, synthetic construct
  source 1..75: mol_type = other DNA
acccgcgaaataccgatcggtaagagtgcaaacgaatttctgcaattaatgggcttatcaggtggcggcagacaa

SEQ ID NO: 545415 - DNA, 75 bp, synthetic construct
  source 1..75: mol_type = other DNA
tccggccgctaaagttcagcaggttaagggtggtattttactttattcgtcacctccccctataccgtacaaaat

SEQ ID NO: 545416 - DNA, 75 bp, synthetic construct
  source 1..75: mol_type = other DNA
tgagtgcagtatttttgatatccgcgtcagctgtacaggcagcggaagttgcccataatctgcagttcagtggaa

SEQ ID NO: 545417 - DNA, 75 bp, synthetic construct
  source 1..75: mol_type = other DNA
gccatagcgctaatgagtttcttcaccttatggggatggactcacagggaacccgtcataaaacgctgcgtacac

SEQ ID NO: 545418 - DNA, 75 bp, synthetic construct
  source 1..75: mol_type = other DNA
gttgacgtctgcccgaccggtgcgtcttttcgcgatgctgccagtgggattgtcgatgttaatccggatctctgc

SEQ ID NO: 545419 - DNA, 75 bp, synthetic construct
  source 1..75: mol_type = other DNA
gtcggttgtcagtactgcatcgccgcctgtccgtaccgcgtgcgctttatccatccggtcacgaagacggcggac

SEQ ID NO: 545420 - DNA, 75 bp, synthetic construct
  source 1..75: mol_type = other DNA
ctgttttgcccgggcgcacacttaaaacaatgaatccgttatctcaacaacccgaaaaaaaggccaccccacaga

SEQ ID NO: 545421 - DNA, 75 bp, synthetic construct
  source 1..75: mol_type = other DNA
ggtcaggatgcggccaatacggcaaaagcattcaatgaagcgttaccgcttaccggcgtagtgttgaccaaagtg

SEQ ID NO: 545422 - DNA, 75 bp, synthetic construct
  source 1..75: mol_type = other DNA
atcacgatggacgaagccatcaagcgccgttcggctgaatggtcagtgagtaacaccggattaaccggatacatt

SEQ ID NO: 545423 - DNA, 75 bp, synthetic construct
  source 1..75: mol_type = other DNA
gggcgctggagggcaaagggattatgttgcgttccgagtgggatgtgttgccgtttctggagagtggcaaactgg

SEQ ID NO: 545424 - DNA, 75 bp, synthetic construct
  source 1..75: mol_type = other DNA
ggcgagaaaactgaggcgctggagccgttccatccggaccgcatcgcgtcgcgtattctcggcatgggcgacgta

SEQ ID NO: 545425 - DNA, 75 bp, synthetic construct
  source 1..75: mol_type = other DNA
caaaccgatcaagttccttggcgttggtgagaaaactgaggcgctggagccgttccacccggatcgtatcgcttc

SEQ ID NO: 545426 - DNA, 75 bp, synthetic construct
  source 1..75: mol_type = other DNA
aacgttaaagatacgctgcgcgaagtgcgcatggcgctgttggaggcggacgtcgctctgccggtagtgcgtgag

SEQ ID NO: 545427 - DNA, 75 bp, synthetic construct
  source 1..75: mol_type = other DNA
cggtaatcagttggcgaagtggaacggttggaattacttccaccggaaggaaccttgcgataacgggagcgaata

SEQ ID NO: 545428 - DNA, 75 bp, synthetic construct
  source 1..75: mol_type = other DNA
atgaacctgacaacgaagggtgatttagtccttgcggcattacgtaagctcggtgtggcatcaaatgccacgtta

SEQ ID NO: 545429 - DNA, 75 bp, synthetic construct
  source 1..75: mol_type = other DNA
tttatcaaataacgctatcaatgccgtcattttcaaccttgcctgccgcattgctccagattatgcgctggaagc

SEQ ID NO: 545430 - DNA, 75 bp, synthetic construct
  source 1..75: mol_type = other DNA
cgacccaaggccgcaccctggccgtgatgcaggtatccggcggctcgcagagcttcaacgccgtgaacaccttgc

SEQ ID NO: 545431 - DNA, 75 bp, synthetic construct
  source 1..75: mol_type = other DNA
gtgaaatttactctgctaacccgaggtaactcagcctatctcgttgatcgctacagcgaacgaaaagagtcggca

SEQ ID NO: 545432 - DNA, 75 bp, synthetic construct
  source 1..75: mol_type = other DNA
atccaaaccgcatgcctgttggtagcggaaatcgtcttgcaacctggaatgggtggaacttctttcaccgtaaga

SEQ ID NO: 545433 - DNA, 75 bp, synthetic construct
  source 1..75: mol_type = other DNA
attgagtattcctgtaaaatgcccatattctctcgggacaccaaaaatgaaagttactggggctgcgcatacagc

SEQ ID NO: 545434 - DNA, 75 bp, synthetic construct
  source 1..75: mol_type = other DNA
caggcacaggctacagagcaggcacagaccacagagcaggcacagaccacagagcaggcacagaccacagagcaa

SEQ ID NO: 545435 - DNA, 75 bp, synthetic construct
  source 1..75: mol_type = other DNA
acgagcgggaggttacaagtcgtgtcctaaaaagtttgccagaatccgtcaatctgaagcaacagtcggattgtc

SEQ ID NO: 545436 - DNA, 75 bp, synthetic construct
  source 1..75: mol_type = other DNA
tcagtagaactaaaacaagagtcggcgtgccacgtttgccccaacgcggtttggtttacggaatccacgggagag

SEQ ID NO: 545437 - DNA, 75 bp, synthetic construct
  source 1..75: mol_type = other DNA
tctaaagatgttggaatttcaaacggcctaagaatccagttaacttttcaggaaattaactttaaagctattgtg

SEQ ID NO: 545438 - DNA, 75 bp, synthetic construct
  source 1..75: mol_type = other DNA
tagcgttaaaaatggtgagagcaccttctcagatgccgctaatgagcaagcttcaaaggttcttaagtcgggtaa

SEQ ID NO: 545439 - DNA, 75 bp, synthetic construct
  source 1..75: mol_type = other DNA
ctggcggcccctgccgccgtcagcgaaagcctgcgcaatatccgccatcacgaagaggccaaccgggcggcgatt

SEQ ID NO: 545440 - DNA, 75 bp, synthetic construct
  source 1..75: mol_type = other DNA
aggaacaggccaccgaacaggcgcaggccaccgaacaggcgcaggctacagagcaggcacagaccacagagcaag

SEQ ID NO: 545441 - DNA, 75 bp, synthetic construct
  source 1..75: mol_type = other DNA
atacctggttaaataaaacaagccatgagattaagcatatttttaaccaggcggagaaaacaagggaactttaca

SEQ ID NO: 545442 - DNA, 75 bp, synthetic construct
  source 1..75: mol_type = other DNA
gaaggactgaagttcgaaagggagaaggccgaatccgatttgcttaatcacggattcactcgtgaaatggcagaa

SEQ ID NO: 545443 - DNA, 75 bp, synthetic construct
  source 1..75: mol_type = other DNA
gaaaagtttcctaaaaaacaggattgatgactatgacaaaaaatacaaacttaacacaaaaaattctgaaagaac

SEQ ID NO: 545444 - DNA, 75 bp, synthetic construct
  source 1..75: mol_type = other DNA
atgtgctgtcacgagtaaaaggcgatttataccgtgaacggaataatgaagtaaaaaaggaagtcttctccagag

SEQ ID NO: 545445 - DNA, 75 bp, synthetic construct
  source 1..75: mol_type = other DNA
aaatggaagaaaagcggagcgtgagtatacccgtgatgagcttgaccatagatttatcattgacggcgatctggc

SEQ ID NO: 545446 - DNA, 75 bp, synthetic construct
  source 1..75: mol_type = other DNA
gccaggggaaacaaagaaatactgctttgagctgggaattgttgatggcgatgctgaaattagcgcgttgaaagc

SEQ ID NO: 545447 - DNA, 75 bp, synthetic construct
  source 1..75: mol_type = other DNA
gcgggtatttaacaataatggagaaatgctgattgccgcaaaagtgactccgcgtattctgcctggcgttaccgc

SEQ ID NO: 545448 - DNA, 75 bp, synthetic construct
  source 1..75: mol_type = other DNA
atggaagcaaatagagacggtggaaggaacgggccaccactaccgcctgctggtgcatgtacgtcaaagcagcat

SEQ ID NO: 545449 - DNA, 75 bp, synthetic construct
  source 1..75: mol_type = other DNA
atagtggcaaagatggcatctatttccacttaagagacaatgtagatgccttcttaaccttatcagcaactgaaa

SEQ ID NO: 545450 - DNA, 75 bp, synthetic construct
  source 1..75: mol_type = other DNA
aatcaggagtttgtgtttgcagagtgttattccaccgccatcgcagcactgattctggctgccgtcaccctgtat

SEQ ID NO: 545451 - DNA, 75 bp, synthetic construct
  source 1..75: mol_type = other DNA
gaaatttattctgaacgactggcgaagattgcggatacctgggaattgaaaaaagatgaaattattcatcccctt

SEQ ID NO: 545452 - DNA, 75 bp, synthetic construct
  source 1..75: mol_type = other DNA
gctgggacgatcccctgcggaaaacctatccactgcagttaacgggcttccactacaaagcgcgtacccactcca

SEQ ID NO: 545453 - DNA, 75 bp, synthetic construct
  source 1..75: mol_type = other DNA
ccaacgtcaccaatgctaacagtaacgctggtcgggtagcttcaaagcttaatatgaaccgccccggaaatcctg

SEQ ID NO: 545454 - DNA, 75 bp, synthetic construct
  source 1..75: mol_type = other DNA
gtaaagacggaattaaaattgatgattccattatcacaagttttaaagcctctaaagatgttggtatttcaaatg

SEQ ID NO: 545455 - DNA, 75 bp, synthetic construct
  source 1..75: mol_type = other DNA
acagtggcaaagatggcatctatttccacttaagagataatgtagatgccttcttaaccttatcagcaactgaaa

SEQ ID NO: 545456 - DNA, 75 bp, synthetic construct
  source 1..75: mol_type = other DNA
ggagctatataatcgctctacgagtgaacttactaatgagcaacttcaagcccgtatcaattgtggtaaaagtgt

SEQ ID NO: 545457 - DNA, 75 bp, synthetic construct
  source 1..75: mol_type = other DNA
tctaaagatgttggaatttcaaacggattaagaatccaactaacttttcaggaaattaacttcaaagccattgtg

SEQ ID NO: 545458 - DNA, 75 bp, synthetic construct
  source 1..75: mol_type = other DNA
gtcttcgtatccagctaacttttcaggaaattaactttaaagcaatcgtaggtcaaactgacatttcagcagcta

SEQ ID NO: 545459 - DNA, 75 bp, synthetic construct
  source 1..75: mol_type = other DNA
ggacgaccacagcacagattaaaaagcgaagccattgaactggctgatcgtttttttactgaaaacccgacagcg

SEQ ID NO: 545460 - DNA, 75 bp, synthetic construct
  source 1..75: mol_type = other DNA
gcacgtgattttttcaatatgatgatgcggccgctaatcgtggcgtaccggttcaaacaactggcgcgttacctg

SEQ ID NO: 545461 - DNA, 75 bp, synthetic construct
  source 1..75: mol_type = other DNA
agaatggaacgaaaaagatcattaatacggttgctgaagtaaacaaactcagtgatgccagcgggagttctatta

SEQ ID NO: 545462 - DNA, 75 bp, synthetic construct
  source 1..75: mol_type = other DNA
cctccaccagcccgttctatccgctgtttgccgcactggatatcaacgccaaaatgcatgaaggtgtcagcggtc

SEQ ID NO: 545463 - DNA, 75 bp, synthetic construct
  source 1..75: mol_type = other DNA
gcagggcaaccagcctggatatgtaacggttaaccggttggttttgtcccaggatgacataaacagggacgcttc

SEQ ID NO: 545464 - DNA, 75 bp, synthetic construct
  source 1..75: mol_type = other DNA
gttgccgagcaccctgaaatcgatgtgagtaaactcgatatcgggccgctgtatcgctattacaaacgtggagaa

SEQ ID NO: 545465 - DNA, 75 bp, synthetic construct
  source 1..75: mol_type = other DNA
gaagcgaacagtaaatctctacgcgatttttctgaaaaccatcaggaacgcagagaagtacgttcagatgacagg

SEQ ID NO: 545466 - DNA, 75 bp, synthetic construct
  source 1..75: mol_type = other DNA
agctaacgccctgagaaaaaaaccaatccttgaaagaatcaaaaaggagtttacagacgcaccatttgatctaat

SEQ ID NO: 545467 - DNA, 75 bp, synthetic construct
  source 1..75: mol_type = other DNA
caggatctgggcatggctgaggcagaaggagaggaaaaggataaaaaagtttttcatcttatgcttctcgctgat

SEQ ID NO: 545468 - DNA, 75 bp, synthetic construct
  source 1..75: mol_type = other DNA
tttcacaatgtatacgccaaattcatcggctatcatccagcgcttttttgaaaataaagctgtgttcgatagcct

SEQ ID NO: 545469 - DNA, 75 bp, synthetic construct
  source 1..75: mol_type = other DNA
actacactggtggggtattacgatccaaaaaacacattgtctagctacatctatcctgcactgcatggcgcttat

SEQ ID NO: 545470 - DNA, 75 bp, synthetic construct
  source 1..75: mol_type = other DNA
ggtagaggtaaccaggagcgcaatatatttccacgatggaacccgttccaacaagcagaacgaatacaaggttaa

SEQ ID NO: 545471 - DNA, 75 bp, synthetic construct
  source 1..75: mol_type = other DNA
tactatcagccgctgatcaaattgcttaaaccttacgttggcggtttcccgctgcataatccccaggattatgtc

SEQ ID NO: 545472 - DNA, 75 bp, synthetic construct
  source 1..75: mol_type = other DNA
cgtatgaaacagcgcaaattgcggttgatctgcgcttcttccagtttgtaccaggggaacactggcattcttttg

SEQ ID NO: 545473 - DNA, 75 bp, synthetic construct
  source 1..75: mol_type = other DNA
gtcaccggctataaccgctatcgtgcgggtgaagtcgatctcacctgggttccggcacaacaaattcctgctatt

SEQ ID NO: 545474 - DNA, 75 bp, synthetic construct
  source 1..75: mol_type = other DNA
ctggcagcgcgcggttgaccccaaaacggcaagcccttttgctggctatctggcgcaggcgcatattaaaaatgc

SEQ ID NO: 545475 - DNA, 75 bp, synthetic construct
  source 1..75: mol_type = other DNA
tgggatgaggataaaaacaatatccgcacgttttaccgggatgacatcgaccgttttctggaaatacgcacccgg

SEQ ID NO: 545476 - DNA, 75 bp, synthetic construct
  source 1..75: mol_type = other DNA
atggataaggcattcattcgcgtggatgaaacttttgaggccatccgcgacagcctgaatcagcaggccatcaat

SEQ ID NO: 545477 - DNA, 75 bp, synthetic construct
  source 1..75: mol_type = other DNA
ggtgactgaactcaaccttgatttagacaacctaaaaggcagtgatattttagaggtatcggacttactgcaatc

SEQ ID NO: 545478 - DNA, 75 bp, synthetic construct
  source 1..75: mol_type = other DNA
actaaaccaggccgctcagaccactgacgcgacaaagcgtaatgcgttgtatcagcaggcagaagagatcatcaa

SEQ ID NO: 545479 - DNA, 75 bp, synthetic construct
  source 1..75: mol_type = other DNA
acggcgcctttgtgcttgataagtgggtagtcaacgaaaaaattaccgcacgtaaaaatccaaactaccgtgatg

SEQ ID NO: 545480 - DNA, 75 bp, synthetic construct
  source 1..75: mol_type = other DNA
acggcaagcccttttgccggatatctggcgcaggcgcatattcaaaatgcagccgctattgtggcgggaaaagcg

SEQ ID NO: 545481 - DNA, 75 bp, synthetic construct
  source 1..75: mol_type = other DNA
ggcagcctgagttcacagataaaacactctccaggaaacccggggcggttcatacagtattgcaacaggttgagt

SEQ ID NO: 545482 - DNA, 75 bp, synthetic construct
  source 1..75: mol_type = other DNA
gtgcggctcctctctacgctgctgacgttcccgcccacaccgctcgccccgcaacaagtctttcgttacaacaat

SEQ ID NO: 545483 - DNA, 75 bp, synthetic construct
  source 1..75: mol_type = other DNA
tactatcagccgttaatcaaactgcttaaaccctacgttggcggttttccgctgcataatccccaggattatgtc

SEQ ID NO: 545484 - DNA, 75 bp, synthetic construct
  source 1..75: mol_type = other DNA
accgcaaggagaaccgggcaaggcatgaagcaaatatgcggcttcgcctgtttgtgagaaatcacggcagggctt

SEQ ID NO: 545485 - DNA, 75 bp, synthetic construct
  source 1..75: mol_type = other DNA
tgaacctggtgctgtattgcgacatgcagagcaaaggccaacggctgaacaggccggagatatggatctgcgtat

SEQ ID NO: 545486 - DNA, 75 bp, synthetic construct
  source 1..75: mol_type = other DNA
ccttggctgctcgctgtattggtcgtccaatagagtatctgaatggattgccagcgaaagactttgttaaagttt

SEQ ID NO: 545487 - DNA, 75 bp, synthetic construct
  source 1..75: mol_type = other DNA
ttgtggcggtcaataccgaccctgaaacggtcaggatcaacgatctgctggcaaaacatcagataacctatccgg

SEQ ID NO: 545488 - DNA, 75 bp, synthetic construct
  source 1..75: mol_type = other DNA
atgaataagccagtttcagaaattattaagcgttggacccgtctggcaacgaaggccaagcagctggggctcacc

SEQ ID NO: 545489 - DNA, 75 bp, synthetic construct
  source 1..75: mol_type = other DNA
tgggtccccggcttgaagttatggtcagggaagggaattatgatcgcagcgttgccctgatgcgaaacagcatcc

SEQ ID NO: 545490 - DNA, 75 bp, synthetic construct
  source 1..75: mol_type = other DNA
tggtgtggcatttggtggtgtaggtaggttcctgaacgcccgcggtgagagcgctgcaactcctgaattttcccc

SEQ ID NO: 545491 - DNA, 75 bp, synthetic construct
  source 1..75: mol_type = other DNA
gaagggtatgatgccccaggcttccctggtcgctaatcggcctggcttgtttgccattttggcaccgggatgtgc

SEQ ID NO: 545492 - DNA, 75 bp, synthetic construct
  source 1..75: mol_type = other DNA
ggcgagaaaaccgaggcgctggagccattccatccggaccgtattgcctcccgtattcttggcatgggcgacgtg

SEQ ID NO: 545493 - DNA, 75 bp, synthetic construct
  source 1..75: mol_type = other DNA
ctgtcgctgatcgaagatatcgaaagcaaagttgaccgcgcgcaggcagagaaattagccagcaagctgaaaaaa

SEQ ID NO: 545494 - DNA, 75 bp, synthetic construct
  source 1..75: mol_type = other DNA
gattccaaagtggtgtattgaccgtatcccttcggatgctcaaatcataggtgaaacggaactacattatcttgt

SEQ ID NO: 545495 - DNA, 75 bp, synthetic construct
  source 1..75: mol_type = other DNA
cgttccatccggaccgcatcgcttcccgtattctcggtatgggcgatgttctgtcgctgatcgaagatatcgaaa

SEQ ID NO: 545496 - DNA, 75 bp, synthetic construct
  source 1..75: mol_type = other DNA
ctgaaagaagccaaactgaaattctacgacgtgttgctggtggataccgccggtcgtttgcacgttgacgaagcg

SEQ ID NO: 545497 - DNA, 75 bp, synthetic construct
  source 1..75: mol_type = other DNA
ctggctgcagcaaaccggtttcacctgggtccccggcttgaagttatggtcagggaagggaattatgatcgcagc

SEQ ID NO: 545498 - DNA, 75 bp, synthetic construct
  source 1..75: mol_type = other DNA
catcacccccgtctggcgggcgctgacagcaataacgtcttcattattacgccggagggcaagactgtcgtcgca

SEQ ID NO: 545499 - DNA, 75 bp, synthetic construct
  source 1..75: mol_type = other DNA
ttccctgtgattattctctttttcttcctgctctgattctgactactgcagtgttgtcctgtctgccggcgcacc

SEQ ID NO: 545500 - DNA, 75 bp, synthetic construct
  source 1..75: mol_type = other DNA
atgagacggttacgattattctctttttcctcctgttctgactctgattactgctgccctgattcctgtctgttt

SEQ ID NO: 545501 - DNA, 75 bp, synthetic construct
  source 1..75: mol_type = other DNA
ccagcatcctggcagggtactctcagtctaatcaattgtccgattattttgttgaacaatggcgcgaaaagcact

SEQ ID NO: 545502 - DNA, 75 bp, synthetic construct
  source 1..75: mol_type = other DNA
ctccatgccagccgagcgggcgcacgaggaggcattgccgtgaacgcccctgacaaactgccgcccgagacgcgc

SEQ ID NO: 545503 - DNA, 75 bp, synthetic construct
  source 1..75: mol_type = other DNA
cgacagattaaacgaccgctggctttaccgggaatggatatccgcagccgaatcctttgtcctgccgctcgtctt

SEQ ID NO: 545504 - DNA, 75 bp, synthetic construct
  source 1..75: mol_type = other DNA
tgaggaaatggccactcccgaaaccatcgtcaccaatcgcgatatgctcacggataccctgctgtcaacggaggg

SEQ ID NO: 545505 - DNA, 75 bp, synthetic construct
  source 1..75: mol_type = other DNA
atggattacgccaccgcgctcgacgtaatgtttgccgaaggtaaaagcccggtacatttggcggctcccgccgcc

SEQ ID NO: 545506 - DNA, 75 bp, synthetic construct
  source 1..75: mol_type = other DNA
tggctgaaccaggcaaaagtcacagcaacatcagacctggtacagctgcgtcagggcgatgagatccaggtagga

SEQ ID NO: 545507 - DNA, 75 bp, synthetic construct
  source 1..75: mol_type = other DNA
aagtgaacttaatgctcaggctgtttcattctataaaacagcagaggtcaggacgccagacgaagtagctccttt

SEQ ID NO: 545508 - DNA, 75 bp, synthetic construct
  source 1..75: mol_type = other DNA
atgagttactttggccttaatccagtaaaccagaatcagcagcttgacgaagcagcatcaaatccagctggcttt

SEQ ID NO: 545509 - DNA, 75 bp, synthetic construct
  source 1..75: mol_type = other DNA
accaatcgcgatatgctcacggataccctgctatcaacggagggtgcgccacactatccgggaatgactcaccgg

SEQ ID NO: 545510 - DNA, 75 bp, synthetic construct
  source 1..75: mol_type = other DNA
ccggctcacggatacggcggatcctgcttcgtctgccgtgggaatatgacaacgccttcagcagcagaaagatct

SEQ ID NO: 545511 - DNA, 75 bp, synthetic construct
  source 1..75: mol_type = other DNA
cgcaggaagtgctggctaccgctaatgaagtggccgatcacgccgatgcctttgcgagctggattacaacatatt

SEQ ID NO: 545512 - DNA, 75 bp, synthetic construct
  source 1..75: mol_type = other DNA
atggcagccgacgaagtgaataatttctgggaaacctctggtttaaatatccttgaaacactggcgcgactggat

SEQ ID NO: 545513 - DNA, 75 bp, synthetic construct
  source 1..75: mol_type = other DNA
gacgaaacaatggctgtctgcgtcgcctgacggcaaagtggcaccggttgcgcagaccggtgaggaatcgcaggc

SEQ ID NO: 545514 - DNA, 75 bp, synthetic construct
  source 1..75: mol_type = other DNA
cgcaaccttctttgccggaacttgcagaattcatgccttacctggaaaaaatatggaaaaataaatggttgacaa

SEQ ID NO: 545515 - DNA, 75 bp, synthetic construct
  source 1..75: mol_type = other DNA
gctaacaataaaatcaattggtattaatggaaaaatgagtgaggtcaatgcagcatttggccttgtacagttgaa

SEQ ID NO: 545516 - DNA, 75 bp, synthetic construct
  source 1..75: mol_type = other DNA
agccggggcgtcggcgttatctgacgctggtgatgatctttattacggtagtcatttgttatgtcgaccgcgcca

SEQ ID NO: 545517 - DNA, 75 bp, synthetic construct
  source 1..75: mol_type = other DNA
ataccagtactccgactccacagatcgccatcgacagtcacgacgacaaaacctggcgcgacacactgttaaaag

SEQ ID NO: 545518 - DNA, 75 bp, synthetic construct
  source 1..75: mol_type = other DNA
ggcagcttcgcccgacggcaaagttgcaccggttgcgcaaatcggtgaggaatcgcaggcagccagagcctgttt

SEQ ID NO: 545519 - DNA, 75 bp, synthetic construct
  source 1..75: mol_type = other DNA
gtgatgaagttgtctgctttctggcgcgtttgcccgcacttgcagagctgcggtttaacgactgcacaccattta

SEQ ID NO: 545520 - DNA, 75 bp, synthetic construct
  source 1..75: mol_type = other DNA
ccgatatggtggcggattaccagtcccggcttgccagcgcggatatggcgctgtggcagcaggtggagaaaagcg

SEQ ID NO: 545521 - DNA, 75 bp, synthetic construct
  source 1..75: mol_type = other DNA
gacggatgatctttttgccctgtaccagcgcgcgtttaatggtactgcgcccgtgtcaccggcctctccggcaaa

SEQ ID NO: 545522 - DNA, 75 bp, synthetic construct
  source 1..75: mol_type = other DNA
accggatgttgttcaggatgggattgcagatgatggtggcagactgggagccgtccctgcttgagcagctagaac

SEQ ID NO: 545523 - DNA, 75 bp, synthetic construct
  source 1..75: mol_type = other DNA
agttttatgtttgcctatttttaacgagttaagcgaggaagattgttgtggtataattgaaataataaagaattg

SEQ ID NO: 545524 - DNA, 75 bp, synthetic construct
  source 1..75: mol_type = other DNA
ggaagagcgtctcagcgatcagcaggattattatgcaaaggctgatgctttacgcagtaactggaatgccggact

SEQ ID NO: 545525 - DNA, 75 bp, synthetic construct
  source 1..75: mol_type = other DNA
gcgcggagatactgcgactgattaacgaagtgggagagaaactggtcgggtatgcctgggtaatggaatatacgg

SEQ ID NO: 545526 - DNA, 75 bp, synthetic construct
  source 1..75: mol_type = other DNA
caatctcattgctcgaaaaagggcttcttattcggataccttctgctactggatatcctgaaatcgaccgttttg

SEQ ID NO: 545527 - DNA, 75 bp, synthetic construct
  source 1..75: mol_type = other DNA
tgtctcatggctggcaagccaggaacgtaaagcgtttcactggatggcgagccataagcctgatctggtcatcaa

SEQ ID NO: 545528 - DNA, 75 bp, synthetic construct
  source 1..75: mol_type = other DNA
ctggtggatctgatcgacagcagggttgtgtcaattatgcagtcatcacgtcgggacggaggattatgcagtgcc

SEQ ID NO: 545529 - DNA, 75 bp, synthetic construct
  source 1..75: mol_type = other DNA
ctacgattccagtctggaaaccgccatcgatcatgataattaccttgagtttcaacaggttttatctgacatcgg

SEQ ID NO: 545530 - DNA, 75 bp, synthetic construct
  source 1..75: mol_type = other DNA
ctgctaccgtagcaatgatgggagcgacggcaattgtcgcacccatgctgccgctgtatcccgacattagcccgg

SEQ ID NO: 545531 - DNA, 75 bp, synthetic construct
  source 1..75: mol_type = other DNA
gtgtttgtcgcctattatgtgttgggtatacgccagcatatgagcatggggacgatgctcacacatacggaaaat

SEQ ID NO: 545532 - DNA, 75 bp, synthetic construct
  source 1..75: mol_type = other DNA
agttatcgaaaataaatggcataacaataccgaagccatcatctaattcaaatagtaattactcatattttcctg

SEQ ID NO: 545533 - DNA, 75 bp, synthetic construct
  source 1..75: mol_type = other DNA
ccttagaggcttcatccaaagccgcttggttcgttgactttcccggtgttgaaatctcgcctaattcattgatga

SEQ ID NO: 545534 - DNA, 75 bp, synthetic construct
  source 1..75: mol_type = other DNA
gagggacgcttccatcattaccgtgcatttcattactggttgccactcatcggattctttaccggagcaaggatt

SEQ ID NO: 545535 - DNA, 75 bp, synthetic construct
  source 1..75: mol_type = other DNA
ttcttcgaaatcagcaatgagcgtgcagatcagtcgctaaaaactattcattcgcgacgaaaaataccgttgcat

SEQ ID NO: 545536 - DNA, 75 bp, synthetic construct
  source 1..75: mol_type = other DNA
gctgatgagtcagttacgtttgcaaggcttcgataccctggttttgcaatggatccgttacggcgatgcattcac

SEQ ID NO: 545537 - DNA, 75 bp, synthetic construct
  source 1..75: mol_type = other DNA
ttaccgaaaaaacaccctcagctacaggtgtgcctgcaggtacgccatgtgcgcggagatactgcgactgattaa

SEQ ID NO: 545538 - DNA, 75 bp, synthetic construct
  source 1..75: mol_type = other DNA
acctggccaaacgggaacagaaagaatgtggcatcatcctgaaatgcagcgggcttcctgaaaaaagtaaccggg

SEQ ID NO: 545539 - DNA, 75 bp, synthetic construct
  source 1..75: mol_type = other DNA
attaccgcaggctggggaaaaattactggttacgcgggtacccaacaatatatggaagcgatgggcgtcccgggt

SEQ ID NO: 545540 - DNA, 75 bp, synthetic construct
  source 1..75: mol_type = other DNA
tgtcttaccgacaaccaggagccctctccctgccttatctggctaccggcgccggatatcactgcaacgttcccc

SEQ ID NO: 545541 - DNA, 75 bp, synthetic construct
  source 1..75: mol_type = other DNA
attacagcggaagctggtatctgatcgcgttacagaagggaaaactgcgggtctttcccctggcagacatcaaat

SEQ ID NO: 545542 - DNA, 75 bp, synthetic construct
  source 1..75: mol_type = other DNA
tgtgggctatctgaacggtcagagccacaggagttcgtatctggtatccagattgatgggtgtagtggtcaagta

SEQ ID NO: 545543 - DNA, 75 bp, synthetic construct
  source 1..75: mol_type = other DNA
atactcttcagaacaggattacacatgatgctgtccgaatgggaaccgtccctgctggaagcactggaacaaaaa

SEQ ID NO: 545544 - DNA, 75 bp, synthetic construct
  source 1..75: mol_type = other DNA
gtactggctggacggccattacctctcagcacagaccgcgttgcgcctcggttataaacaggtggcggatgctat

SEQ ID NO: 545545 - DNA, 75 bp, synthetic construct
  source 1..75: mol_type = other DNA
agccagcttgatatcccggaacttcagcgccggggcctgatgcttctggcctcagaaaccaaagattttcgcctg

SEQ ID NO: 545546 - DNA, 75 bp, synthetic construct
  source 1..75: mol_type = other DNA
ttcatcctgtttaacctggtgcgtctggcaacccgttactacggcgtagcgtatggttactccaaaggtatcgat

SEQ ID NO: 545547 - DNA, 75 bp, synthetic construct
  source 1..75: mol_type = other DNA
tactgaaaacatcaatgatggtttccaatatgaagaagcattcaccgtaaataaagatagctcgggtaattttga

SEQ ID NO: 545548 - DNA, 75 bp, synthetic construct
  source 1..75: mol_type = other DNA
caatcacattactaattcttacgcttaatattgctgcaacaattgtagttataaacaacagtgaattattgattg

SEQ ID NO: 545549 - DNA, 75 bp, synthetic construct
  source 1..75: mol_type = other DNA
cacaggagttcgtatctggtatccagattgatgggagatatctggaggcgggttaccggggggggatggttacta

SEQ ID NO: 545550 - DNA, 75 bp, synthetic construct
  source 1..75: mol_type = other DNA
gtggcggcagttgccgcccttgatgtgttacagcgaatgagtaaggagttattcaacactgagttaatttttaaa

SEQ ID NO: 545551 - DNA, 75 bp, synthetic construct
  source 1..75: mol_type = other DNA
ttcagcatggtgataagtatctggcggatatttatctccttgcccggcagcgtctggcgaacgtcggtgtcgaac

SEQ ID NO: 545552 - DNA, 75 bp, synthetic construct
  source 1..75: mol_type = other DNA
tgagcaggtacacggcaaagatgtgcttaagcttactggcgaaccttatgcctcaaaacgagcggatgcctctta

SEQ ID NO: 545553 - DNA, 75 bp, synthetic construct
  source 1..75: mol_type = other DNA
accgttggtggtttcacaaacgcatgccgccgatggctccaccgtcaccatgaccgtgcagaacattctcgacca

SEQ ID NO: 545554 - DNA, 75 bp, synthetic construct
  source 1..75: mol_type = other DNA
gcaacattctcggcccgctgctgtttttctttattttcaatgcagttcgtctggccatgaaatggtatgggctgc

SEQ ID NO: 545555 - DNA, 75 bp, synthetic construct
  source 1..75: mol_type = other DNA
gcgatctggtgagcatgtttctgcgctccaacctgcaacaggcgtcctttaactttgaacgtattcacgggctgg

SEQ ID NO: 545556 - DNA, 75 bp, synthetic construct
  source 1..75: mol_type = other DNA
ataccttgcttgagtttattggcaaccctattactgccatgtttatcgccgtgtttgtcgcctattatgtgttgg

SEQ ID NO: 545557 - DNA, 75 bp, synthetic construct
  source 1..75: mol_type = other DNA
gacaatgctcacacatacggaaaatggcttcggttctattgctaatattttgctgattatcggggccggaggcgc

SEQ ID NO: 545558 - DNA, 75 bp, synthetic construct
  source 1..75: mol_type = other DNA
ccccacatccggctgctttatatgttgccaataagcttggcgcagatatcggttcggtgatcgtctacggtttgc

SEQ ID NO: 545559 - DNA, 75 bp, synthetic construct
  source 1..75: mol_type = other DNA
cgtaaacggctttttgctgcgggacatttgccttcaaaaccggtctggcttgaacaggtgcatggcaaagacgtg

SEQ ID NO: 545560 - DNA, 75 bp, synthetic construct
  source 1..75: mol_type = other DNA
gtctatgttcctgaacccggccaaattcactggaaaagtccggagcataaggaactggcagagtacagcctgatc

SEQ ID NO: 545561 - DNA, 75 bp, synthetic construct
  source 1..75: mol_type = other DNA
gaaacggattgcgccgatgttcatgactcgctggcctacattggcgatgatttcgttttgctgcatgtggtcgga

SEQ ID NO: 545562 - DNA, 75 bp, synthetic construct
  source 1..75: mol_type = other DNA
cgtgccgatgtcgctacacatattgctgaactggccagtcagccgacactcaacaagcagatctacagtctgatt

SEQ ID NO: 545563 - DNA, 75 bp, synthetic construct
  source 1..75: mol_type = other DNA
agataatgaagaaaagacgcggcaggcacttgatgagcaaaacaggttaattgacgagcataaaagtaagattaa

SEQ ID NO: 545564 - DNA, 75 bp, synthetic construct
  source 1..75: mol_type = other DNA
agcccaggtcatctctcccaccaatgaatttggcagggcactgaaaggctattatggcagaacgcgtaaggagta

SEQ ID NO: 545565 - DNA, 75 bp, synthetic construct
  source 1..75: mol_type = other DNA
ctgaccgccgataaggttgttcctgcactgattagtcagcttggggcgttgcgtgatgaatatgcagcaatgcct

SEQ ID NO: 545566 - DNA, 75 bp, synthetic construct
  source 1..75: mol_type = other DNA
aaccgataacggttttatgattaaccacatgacgtcggtaaaaactgtcacagaagggcttgcagaagcaacaaa

SEQ ID NO: 545567 - DNA, 75 bp, synthetic construct
  source 1..75: mol_type = other DNA
ggtggtctgcttgacggcgcagcaacaggcaaagcacaacgggtacaaaatcaggagtgtcatggttttgtccgc

SEQ ID NO: 545568 - DNA, 75 bp, synthetic construct
  source 1..75: mol_type = other DNA
atgggcagtgaatattaccggaccctgcagaatggcggacgtcatgccgctgctgccgcacgggaacagcgccgc

SEQ ID NO: 545569 - DNA, 75 bp, synthetic construct
  source 1..75: mol_type = other DNA
tgctgtcggaatggctggcgcatttgccggtgcctttgccaccggacacctgatttcactggcggatgagtggag

SEQ ID NO: 545570 - DNA, 75 bp, synthetic construct
  source 1..75: mol_type = other DNA
gaagctatcatgccactgacacgggcagcggacggctctcttggggtcagagccattggcaatgtgaatggtggc

SEQ ID NO: 545571 - DNA, 75 bp, synthetic construct
  source 1..75: mol_type = other DNA
gcgctgacagagcaaaaccggctgattgatgagcaggccagccgggtgaaatccctgcaggaaaaaatcgccggg

SEQ ID NO: 545572 - DNA, 75 bp, synthetic construct
  source 1..75: mol_type = other DNA
gaaaaagcccttgatgatttttgtcagagcctggtcgattacttgtctgccggacatttcagtatttatgagcgc

SEQ ID NO: 545573 - DNA, 75 bp, synthetic construct
  source 1..75: mol_type = other DNA
tgactggtgcgttgggactggttggtggcgtacccggactggtgatgctgggggcagcagcatggtatacgctgt

SEQ ID NO: 545574 - DNA, 75 bp, synthetic construct
  source 1..75: mol_type = other DNA
ctcttggggtcagggctattggcaatgtgaatggtggtggcggatttgtctattctcccgtgtatcacatcaata

SEQ ID NO: 545575 - DNA, 75 bp, synthetic construct
  source 1..75: mol_type = other DNA
cggagatgctgaacggaaacaaagtggaatggcgcaactgggcctcatccgtactgcaggaaatctcaaaagttc

SEQ ID NO: 545576 - DNA, 75 bp, synthetic construct
  source 1..75: mol_type = other DNA
aagcggcgggcacccttgtgcaactgattgaccagcgggtacaggcggtgatgttatccatgcgtcgtgacggag

SEQ ID NO: 545577 - DNA, 75 bp, synthetic construct
  source 1..75: mol_type = other DNA
gtaatgccctggaagcctggcgcaataacgaggcgaataaacccaaatcccggggtggaaaatcagagacggaaa

SEQ ID NO: 545578 - DNA, 75 bp, synthetic construct
  source 1..75: mol_type = other DNA
atcagtgaggatttttacagacaggcgctggcgcagaatgcgcagtatctgagtgaacgccttaaagaccaggag

SEQ ID NO: 545579 - DNA, 75 bp, synthetic construct
  source 1..75: mol_type = other DNA
acccagttcagccaggcgctggcacagggtgtgttacgcggtgaggaatttaattcggtcaatgaaagcggagac

SEQ ID NO: 545580 - DNA, 75 bp, synthetic construct
  source 1..75: mol_type = other DNA
ttccgtaaatgcccgtctgaaacaggcgtcgcagtcatccgatgaattttcgtcatcacagaaagtgctgatgga

SEQ ID NO: 545581 - DNA, 75 bp, synthetic construct
  source 1..75: mol_type = other DNA
aaaaaatccgggaacagttgcagtcccgggaggagacactgaagaatgagaatgcggctgcgcgtgcgtcaaatg

SEQ ID NO: 545582 - DNA, 75 bp, synthetic construct
  source 1..75: mol_type = other DNA
aacgcagattgccacggcgcgggcaagagcagccgtgtaccgtgctcagcaggccgtggcggcagcccgcgggac

SEQ ID NO: 545583 - DNA, 75 bp, synthetic construct
  source 1..75: mol_type = other DNA
tgggcggtgcggtggccaatgcaaaaggcggcgtgtatacctcggcaaacctgagcgcgtacagcaacagtattg

SEQ ID NO: 545584 - DNA, 75 bp, synthetic construct
  source 1..75: mol_type = other DNA
aacgcagattgccacggcgcgggcaagggcagccgtgtaccgtgcacagcaggctgtggcggcagcccgcgggac

SEQ ID NO: 545585 - DNA, 75 bp, synthetic construct
  source 1..75: mol_type = other DNA
gtccggtgcgggaggatttctcggcagcattggtgactggctgggcggtgcggtggccaatgcaaaaggcggcgt

SEQ ID NO: 545586 - DNA, 75 bp, synthetic construct
  source 1..75: mol_type = other DNA
ggtgggcggtgcgaatgaggccagcggggtgacgaaaacgctctccggtgcgctgaacggtgttgccggcaatat

SEQ ID NO: 545587 - DNA, 75 bp, synthetic construct
  source 1..75: mol_type = other DNA
aaactggctgctgcccaggcatcacttacccgtaatattgcggccagaacagcagcacagacaacgctgaatact

SEQ ID NO: 545588 - DNA, 75 bp, synthetic construct
  source 1..75: mol_type = other DNA
tgaacagaaatattgctgccagaatcgcggcccagaatgagctgaacagtacaacggcggtgggctcacgtctga

SEQ ID NO: 545589 - DNA, 75 bp, synthetic construct
  source 1..75: mol_type = other DNA
tgaacagaaatattgctgccagaatcgcagcccagaatgggctgaacagtacaacggcggtgggctcacgtctga

SEQ ID NO: 545590 - DNA, 75 bp, synthetic construct
  source 1..75: mol_type = other DNA
tgaacagaaatattgctgccagaaacgctgcccagaatgggctgaacagtacaacggcggtgggctcacgtctga

SEQ ID NO: 545591 - DNA, 75 bp, synthetic construct
  source 1..75: mol_type = other DNA
cagagcgtgagctggccctgtccagactgaaaggggacgaaaaagagcggggccgcctggggtatgcggcggatg

SEQ ID NO: 545592 - DNA, 75 bp, synthetic construct
  source 1..75: mol_type = other DNA
tgctgaacggtgttgccggacagattgataatgtggcaacagctgtgggtgcgctggttgccgtcggggttgccc

SEQ ID NO: 545593 - DNA, 75 bp, synthetic construct
  source 1..75: mol_type = other DNA
tgaacagaaatattgctgccagaagcgctgcccagaatgagctgaacagtacaacggcggtgggctcacgtctga

SEQ ID NO: 545594 - DNA, 75 bp, synthetic construct
  source 1..75: mol_type = other DNA
aacgcagattgccacggcgcgggcaagtgcagccgtgtaccgtgcacagcaggcagtggcggcagcccgcgggac

SEQ ID NO: 545595 - DNA, 75 bp, synthetic construct
  source 1..75: mol_type = other DNA
gtaccgctgcgactgccacaggccactctggatgataaacagcagagcgccctgaataacacagagcgtcaactg

SEQ ID NO: 545596 - DNA, 75 bp, synthetic construct
  source 1..75: mol_type = other DNA
ccttgaagttgcctgcgcgcgtaagcctgaccacaaaagggagtcgctggcaagaaagatagccataacgccaca

SEQ ID NO: 545597 - DNA, 75 bp, synthetic construct
  source 1..75: mol_type = other DNA
gacgcagattgccacggcgcgggcaagtgcagccgtgtaccgtgcgcagcaggcagtggcggcagcccgcgggac

SEQ ID NO: 545598 - DNA, 75 bp, synthetic construct
  source 1..75: mol_type = other DNA
cacgcagattgccacggcgcgggcaagtgcagccgtgtaccgtgcccagcaggcagtggcggcagcccgcgggac

SEQ ID NO: 545599 - DNA, 75 bp, synthetic construct
  source 1..75: mol_type = other DNA
tacgcagattgccacggcgcgggcaagtgcagccgtgtaccgtgctcagcaggcagtggcggcagcccgcgggac

SEQ ID NO: 545600 - DNA, 75 bp, synthetic construct
  source 1..75: mol_type = other DNA
cagagcgtgagctggccctgtccagactgaacggggacgaaaaagagcggggccgactggggtatgcggcggatg

SEQ ID NO: 545601 - DNA, 75 bp, synthetic construct
  source 1..75: mol_type = other DNA
cgctggcgcagaatgcgcagtatctgagtgaacgactgaaagagcaggaagctttttatgccaggtcggatgaac

SEQ ID NO: 545602 - DNA, 75 bp, synthetic construct
  source 1..75: mol_type = other DNA
accttggtctggtgggggatatgtatcaggaggcgaggcagcgttacatccgtaattcgatggaagcctggcgca

SEQ ID NO: 545603 - DNA, 75 bp, synthetic construct
  source 1..75: mol_type = other DNA
gtatgggcgtggcccgtaaagaccttaaggcgatggcggacgacggcaaactgacggcggataaagtcgttcctg

SEQ ID NO: 545604 - DNA, 75 bp, synthetic construct
  source 1..75: mol_type = other DNA
gccggggctttttctaccggtcatcttatttctctcgccgatgagtggaattcagtaaatgcccgtctgaagcag

SEQ ID NO: 545605 - DNA, 75 bp, synthetic construct
  source 1..75: mol_type = other DNA
caagatttgtttgattcgttaactcttggagaaagagcgtatttggcattcgctgtagcggtaatgactccaact

SEQ ID NO: 545606 - DNA, 75 bp, synthetic construct
  source 1..75: mol_type = other DNA
cctgaagccataatgcccctgactcgggcagcggatggttcactcggcgtgcgtgcggtgggccgcatgaacggc

SEQ ID NO: 545607 - DNA, 75 bp, synthetic construct
  source 1..75: mol_type = other DNA
ggcgtacccggactggtgatgctgggggctgcagcatggtacacgctgtaccagaatcaggagcaggccagggag

SEQ ID NO: 545608 - DNA, 75 bp, synthetic construct
  source 1..75: mol_type = other DNA
cagagcgtgagctggccctgtccggactgaagggggacgaaaaagagcggggccggctggggtatgcggcggatg

SEQ ID NO: 545609 - DNA, 75 bp, synthetic construct
  source 1..75: mol_type = other DNA
cagagcgtgagctggccctgtcccgactgaaaggggacgaaaaagagcggggccgactggggtatgcggcggatg

SEQ ID NO: 545610 - DNA, 75 bp, synthetic construct
  source 1..75: mol_type = other DNA
actgaagggggaggaaaaagagcgggcccgcctggggtatgcggcggatgacctcggttttgtgggggatccgta

SEQ ID NO: 545611 - DNA, 75 bp, synthetic construct
  source 1..75: mol_type = other DNA
actgaacggggaggaaaaagagcgggcccggctggggtatgcggcggatgacctcggttttgtgggggatccgta

SEQ ID NO: 545612 - DNA, 75 bp, synthetic construct
  source 1..75: mol_type = other DNA
actgaacggggaggaaaaagagcgggcccgcctggggtatgcggcggatgacctgggttttgtgggggatccgta

SEQ ID NO: 545613 - DNA, 75 bp, synthetic construct
  source 1..75: mol_type = other DNA
ctggcgcatggcgaaatgccctttccatctgggaacctgtctgtaatgaaatttttgatcgactgattaaacctc

SEQ ID NO: 545614 - DNA, 75 bp, synthetic construct
  source 1..75: mol_type = other DNA
gttatgcaatctgtcgttctgtgaatttaaattcatgggaatatgtgccagaccatcgcggtaaaatcgtctata

SEQ ID NO: 545615 - DNA, 75 bp, synthetic construct
  source 1..75: mol_type = other DNA
gatgctcctggcacacataaggctggttatgcaatctgccgttcggcagatttaaactcatgggaatatgtgtca

SEQ ID NO: 545616 - DNA, 75 bp, synthetic construct
  source 1..75: mol_type = other DNA
caactgaatatcttgctgttggtgtcggcattccggcatattcctgtttagatgctccaggcacctacaaagctg

SEQ ID NO: 545617 - DNA, 75 bp, synthetic construct
  source 1..75: mol_type = other DNA
aaccagcctgatgctggacgtcttcacggaggaatcgggacgcgtgcgtctggttgctaaaggcgcacgttcaaa

SEQ ID NO: 545618 - DNA, 75 bp, synthetic construct
  source 1..75: mol_type = other DNA
gtttcttctcaggctatcagggatgcagagaaagcaggccgactaccgcacccggatatggaaatacgaggacgg

SEQ ID NO: 545619 - DNA, 75 bp, synthetic construct
  source 1..75: mol_type = other DNA
gaaaatacaaccactatcgccccgttaacgccatacgatgaatgggatggtgagaaatgggtaacagatactgtg

SEQ ID NO: 545620 - DNA, 75 bp, synthetic construct
  source 1..75: mol_type = other DNA
gaacgttttggtgagcgcttcttctcgctggcgaatgcctacgatgcggaataccgcgcactgttacaaaaagtg

SEQ ID NO: 545621 - DNA, 75 bp, synthetic construct
  source 1..75: mol_type = other DNA
attcgtactttcaaattgctgggctgtgaactgctgttctgcaccaatgcggcgggctcactgcgtccggaagtc

SEQ ID NO: 545622 - DNA, 75 bp, synthetic construct
  source 1..75: mol_type = other DNA
gcacagcatagcgccgcagtagaagcggcagaagcacagcgccagtcactgattgatgcagcaatggcttccatc

SEQ ID NO: 545623 - DNA, 75 bp, synthetic construct
  source 1..75: mol_type = other DNA
aacttattgccacgaaggcggggaatattactgtctataactatgatggtgaaacacgggaatatatttccacat

SEQ ID NO: 545624 - DNA, 75 bp, synthetic construct
  source 1..75: mol_type = other DNA
acggaggaatcgggacgcgtgcgtctggttgctaaaggcgcacgttcaaaacgttctaccctgaaaggcgcattg

SEQ ID NO: 545625 - DNA, 75 bp, synthetic construct
  source 1..75: mol_type = other DNA
gatgcccctggcacacataaggctggttatgcaatctgccgttctacagattttaactcatgggaatatgtgcca

SEQ ID NO: 545626 - DNA, 75 bp, synthetic construct
  source 1..75: mol_type = other DNA
gataatacaaccactatcgccccattaacgccatacgataaatgggatggtgagaaatgggtgacggatactgag

SEQ ID NO: 545627 - DNA, 75 bp, synthetic construct
  source 1..75: mol_type = other DNA
gaaacacgggaatatatttccacatcaactgaatatcttgctgtgggtgtcggtatccctgcatattcctgttta

SEQ ID NO: 545628 - DNA, 75 bp, synthetic construct
  source 1..75: mol_type = other DNA
gtgcttgatttcatagatacgcttaatgcgactgacatcagcactgcaccggatatcaactggccggaaatgcct

SEQ ID NO: 545629 - DNA, 75 bp, synthetic construct
  source 1..75: mol_type = other DNA
gcgttatgtcatcaggttatcgtactgcgacaaggggaagtagtggaacaaggaccgtgcgcgcgcgtgtttgcc

SEQ ID NO: 545630 - DNA, 75 bp, synthetic construct
  source 1..75: mol_type = other DNA
agcttattgccacgaaggcagggaatattaccgtctataactatgatggtaaaactcgggaatatatttctactt

SEQ ID NO: 545631 - DNA, 75 bp, synthetic construct
  source 1..75: mol_type = other DNA
gggatggagccatgaagaggaccatcgcaatgagactgtttactcaatcgaaaatggcgcagctgttacagtgga

SEQ ID NO: 545632 - DNA, 75 bp, synthetic construct
  source 1..75: mol_type = other DNA
gcaccgaaacaggagaatcaaaagaaatcacagcaccgggtgattaccctgataatacaaccactctcgcaccgt

SEQ ID NO: 545633 - DNA, 75 bp, synthetic construct
  source 1..75: mol_type = other DNA
gcacagcatagcgccgcagtagatgcagcagaagcacagcgccagtcactgattgatactgcaatggcttcaatc

SEQ ID NO: 545634 - DNA, 75 bp, synthetic construct
  source 1..75: mol_type = other DNA
gaaactcgggaatatatttccacttcaaatgaatatcttgtcgttggtgttggtatcccggcatattcctgtctg

SEQ ID NO: 545635 - DNA, 75 bp, synthetic construct
  source 1..75: mol_type = other DNA
tgcattgacgcgccaccagaaaaacgccccggcttcgctgtctgtcgtgatacggaccagaacatctggaaatat

SEQ ID NO: 545636 - DNA, 75 bp, synthetic construct
  source 1..75: mol_type = other DNA
tcttggcggtaaaccattaaagagcagggaactgttccggcagtttatgcctaagcgaacggtgaaaacacatta

SEQ ID NO: 545637 - DNA, 75 bp, synthetic construct
  source 1..75: mol_type = other DNA
agtctgattcaactgaaattgcagaccgggcggaagctgacgcagacagaaaacacccgacttaacgctgtgctg

SEQ ID NO: 545638 - DNA, 75 bp, synthetic construct
  source 1..75: mol_type = other DNA
tggaatgaccattatgactgacgcaattcgtacctttaagctgctgggctgcgagctactgttctgcaccaatgc

SEQ ID NO: 545639 - DNA, 75 bp, synthetic construct
  source 1..75: mol_type = other DNA
gcggtaatctcggtcagggtgagcagactgaaagaccgctgcgctatcgtcaggaatggcaaaaggtgcaggata

SEQ ID NO: 545640 - DNA, 75 bp, synthetic construct
  source 1..75: mol_type = other DNA
tggaagccagcctgccgtcacgggtgatcgcgctggatctggaatccctgccgggcaaccgctggaaagccgacc

SEQ ID NO: 545641 - DNA, 75 bp, synthetic construct
  source 1..75: mol_type = other DNA
ccttatctgggcgttcagtgatttcgcccgcgatcgccgtggagtgtgcgatccggaagcccgttgccttgccgg

SEQ ID NO: 545642 - DNA, 75 bp, synthetic construct
  source 1..75: mol_type = other DNA
caccggaacagatgcctggccagcaggaccgctttatcggcggcgggctgaaatatccttatgtcgaaggattgc

SEQ ID NO: 545643 - DNA, 75 bp, synthetic construct
  source 1..75: mol_type = other DNA
atgaaaaagaatcaatttttaaaagaatcagatgttacggccgagtcggtattctttatgaagcgtcggcaggtg

SEQ ID NO: 545644 - DNA, 75 bp, synthetic construct
  source 1..75: mol_type = other DNA
atagcatggcacccttctggccgtcttatcagaacaaaatcatcggtgtccttgagcgtgcgctgcgtgagcagt

SEQ ID NO: 545645 - DNA, 75 bp, synthetic construct
  source 1..75: mol_type = other DNA
ataccacgtggtgctgtgcgtcagacaggagtatttcgatggccctgaactggaccggttgatactggatgcctg

SEQ ID NO: 545646 - DNA, 75 bp, synthetic construct
  source 1..75: mol_type = other DNA
ggaaaagccggaataccacgtggtgctgtgcgtcagacaggagtatttcgacggccccgaactggatcggttgat

SEQ ID NO: 545647 - DNA, 75 bp, synthetic construct
  source 1..75: mol_type = other DNA
aacaccttccgttgcagcagaacctggttcgggatggactttattgaaaccgtcagcgcgctgatgaatgcaacg

SEQ ID NO: 545648 - DNA, 75 bp, synthetic construct
  source 1..75: mol_type = other DNA
gatttcgcccgcgctcgtcgtgatgtgtgcgatccggaggcccgttgcctcgccggtaatcccgggtatcccgga

SEQ ID NO: 545649 - DNA, 75 bp, synthetic construct
  source 1..75: mol_type = other DNA
cattcagcgattttgcccgcgatcgtcgtggtgtttgtgatccggaagctcgttgccttgccggtaatcccgggt

SEQ ID NO: 545650 - DNA, 75 bp, synthetic construct
  source 1..75: mol_type = other DNA
gagcaacgtactgggcttcgcgtcaccgggggaagcggcaccgtaccagaaacagataacccgggatgtggtgct

SEQ ID NO: 545651 - DNA, 75 bp, synthetic construct
  source 1..75: mol_type = other DNA
cttaccaaatacagtaataataatggctcgcagtccccgtggatggaagaacaaattcgggatgcctggggaagc

SEQ ID NO: 545652 - DNA, 75 bp, synthetic construct
  source 1..75: mol_type = other DNA
gacaaccggaaagattgagaatattttgattgatattattatagccatgctttctctttcgtatgtttgcctttc

SEQ ID NO: 545653 - DNA, 75 bp, synthetic construct
  source 1..75: mol_type = other DNA
taatctccattgctacctttctttttctgtcagggttatgtttgctcttcatttattccttctttaaacgaaaaa

SEQ ID NO: 545654 - DNA, 75 bp, synthetic construct
  source 1..75: mol_type = other DNA
ttgattgatattattatagccatgctttctcttttgtatgtttgcctttccgggagggcaagacatatttttgtt

SEQ ID NO: 545655 - DNA, 75 bp, synthetic construct
  source 1..75: mol_type = other DNA
atcggcgtgttgctggagatctggctaggtgccagtgcagggagtaaaccagaacaagattttgctgctctgggt

SEQ ID NO: 545656 - DNA, 75 bp, synthetic construct
  source 1..75: mol_type = other DNA
gaccatcgcggtgaaatcgtctataacaccgaaacgggagacgccaaagaaatcacagctccgggtgattacccc

SEQ ID NO: 545657 - DNA, 75 bp, synthetic construct
  source 1..75: mol_type = other DNA
agcttattgctacaaaggcgggggatattaccgtttataattatgatggtgagacgcaggaatatatttcaacat

SEQ ID NO: 545658 - DNA, 75 bp, synthetic construct
  source 1..75: mol_type = other DNA
gctgacggtattaatctggggctgacaaaaatggcagagtcctgccccggggtaacaaaatcgtccctcgaaggt

SEQ ID NO: 545659 - DNA, 75 bp, synthetic construct
  source 1..75: mol_type = other DNA
ctgggtggcgaaatcgaagtaccgacccttgatggtcgcgtcaaactgaaagtgcctggcgaaacccagaccggt

SEQ ID NO: 545660 - DNA, 75 bp, synthetic construct
  source 1..75: mol_type = other DNA
ccggcgcctggcgtaacgccctttctatctgggaacctgtttgcaatgagatttttgatcgtctgattaaaccac

SEQ ID NO: 545661 - DNA, 75 bp, synthetic construct
  source 1..75: mol_type = other DNA
attatactcctgatggaagtattgaaaacatatttattgatggcgttattgctgttctttttattttgtatattt

SEQ ID NO: 545662 - DNA, 75 bp, synthetic construct
  source 1..75: mol_type = other DNA
tactgacccacatctgatgctccgactggccattgaaaccgtcgctcatgactatgatgttattgttattgacag

SEQ ID NO: 545663 - DNA, 75 bp, synthetic construct
  source 1..75: mol_type = other DNA
gtattacgcttggcagcttcgattaaacaggggacagtcactgcatcgctgatgatgaaaaagttagccagttac

SEQ ID NO: 545664 - DNA, 75 bp, synthetic construct
  source 1..75: mol_type = other DNA
atgtttgattataagatttccaaacatccacactttgacgaagcctgccgggctttcgcgctgcgtcacaacatg

SEQ ID NO: 545665 - DNA, 75 bp, synthetic construct
  source 1..75: mol_type = other DNA
gaaaaaagcgtgttgctggcgccctggtggctggatggtcactgcctttctgcacaaatagcgcaccatcttggt

SEQ ID NO: 545666 - DNA, 75 bp, synthetic construct
  source 1..75: mol_type = other DNA
ggcactattgtgaaagcaacgcctacgtttgatcgcacccgcgcagatgatttgctgttggatagcgatgcgtga

SEQ ID NO: 545667 - DNA, 75 bp, synthetic construct
  source 1..75: mol_type = other DNA
tgatggcactgaccgcagtttcattgcaggcacgtctacaggcgaatccagcaatggcaagtgcggtggataccg

SEQ ID NO: 545668 - DNA, 75 bp, synthetic construct
  source 1..75: mol_type = other DNA
atccccattatgacgatgcgtgtcgtgctttcgctcaacgtcacaacatgacgaagcttgccgaacgtgcgggaa

SEQ ID NO: 545669 - DNA, 75 bp, synthetic construct
  source 1..75: mol_type = other DNA
gctggttgacggttttctggctcaaatccattgcctgccgtgtgtgccattgaatgaagtggcaaaagagaacct

SEQ ID NO: 545670 - DNA, 75 bp, synthetic construct
  source 1..75: mol_type = other DNA
aatttatcgccacccaagcaggaaatattactgtttataactatgatggtgaaacacgggaatatattttcacat

SEQ ID NO: 545671 - DNA, 75 bp, synthetic construct
  source 1..75: mol_type = other DNA
atggataacgctgcattaaatagcgagtttattgctacaaaggcgggaaatattaccgtctataactatgatggc

SEQ ID NO: 545672 - DNA, 75 bp, synthetic construct
  source 1..75: mol_type = other DNA
gcacagcataatgccgcagtagacgcggcagaagcactgcgccagtcacttattgatgcagcaatggcttccatt

SEQ ID NO: 545673 - DNA, 75 bp, synthetic construct
  source 1..75: mol_type = other DNA
aggcattccggcatgttcctgtttagatgctccagactcatacaaaactggttatgcaatttgccgttctgaaga

SEQ ID NO: 545674 - DNA, 75 bp, synthetic construct
  source 1..75: mol_type = other DNA
atgaataaagttgtcttaaataacgaactcattgccataaaagctggagacataaccgtttataattataatggt

SEQ ID NO: 545675 - DNA, 75 bp, synthetic construct
  source 1..75: mol_type = other DNA
gacgctcctggcacacataaggctggttatacaatttgccgttctgtggatttaaaatcatgggaatatgtgtca

SEQ ID NO: 545676 - DNA, 75 bp, synthetic construct
  source 1..75: mol_type = other DNA
atccacattttgacgaagcctgtcgtgcattcgcactgcgccacaacctggtgcaactggcagaacgtgcaggca

SEQ ID NO: 545677 - DNA, 75 bp, synthetic construct
  source 1..75: mol_type = other DNA
agcagcattaactctgtaacacgattgatggcgctggcggctgtttcattacaggcccgtttacaggctaatcct

SEQ ID NO: 545678 - DNA, 75 bp, synthetic construct
  source 1..75: mol_type = other DNA
gctgaacccagctcagcctcatttattaaccgcaccagaaatctggctacttaccgatctgacggaagattcaac

SEQ ID NO: 545679 - DNA, 75 bp, synthetic construct
  source 1..75: mol_type = other DNA
gcagagatcgggcgtgtagctgcaggcgcggtgtctggcgatgtaaaaaccagtgcaggccgtcgtgatgctatc

SEQ ID NO: 545680 - DNA, 75 bp, synthetic construct
  source 1..75: mol_type = other DNA
gctgtcgccggcgtcccacgttatggtctggatggtcaccccaaagggcaggtctcagactctgaagcacagagt

SEQ ID NO: 545681 - DNA, 75 bp, synthetic construct
  source 1..75: mol_type = other DNA
cgaggaaacggagaaagtccaaatgtatgcggcagaaagtgaagtggtttatcagtttcgttacagaggggagag

SEQ ID NO: 545682 - DNA, 75 bp, synthetic construct
  source 1..75: mol_type = other DNA
atgtttgattatcgcgtttccaaacatccacactttgacgaagcctgccgggctttcgcactgcgtcacaacatg

SEQ ID NO: 545683 - DNA, 75 bp, synthetic construct
  source 1..75: mol_type = other DNA
atactcacgagtgcgtggaaaaaataaagatcctgtttcctcatcttcgtgctgaaggtggtggatttattcccc

SEQ ID NO: 545684 - DNA, 75 bp, synthetic construct
  source 1..75: mol_type = other DNA
gtggtgaaaaacatcagttttacgctacgggcgggtgaaacgctgggtttagtgggcgagtccggttccgggaaa

SEQ ID NO: 545685 - DNA, 75 bp, synthetic construct
  source 1..75: mol_type = other DNA
gctgaacccagcgcaacctcatttattaaccgcaccagatatctggctgcttactgatctgacagaagactcaac

SEQ ID NO: 545686 - DNA, 75 bp, synthetic construct
  source 1..75: mol_type = other DNA
gtgcaactggcagaacgtgcaggcatgaaagtgcagattctgcggaacaagctgaatccagctcaacctcattta

SEQ ID NO: 545687 - DNA, 75 bp, synthetic construct
  source 1..75: mol_type = other DNA
agcttttgcactacgtcacaatatggcaaagctggcagaacgtgcaggaatgaatgttcagacactgcgaaacaa

SEQ ID NO: 545688 - DNA, 75 bp, synthetic construct
  source 1..75: mol_type = other DNA
gctgtttcctcaacttcgtgccgaaggtggcggttttctgcctctgaaaacaggcataacccgtgacattactac

SEQ ID NO: 545689 - DNA, 75 bp, synthetic construct
  source 1..75: mol_type = other DNA
cggcattccggcatgttcctgtttagatgctccaggcgcatacaaagctggttatgcaatctgccgttctgcaga

SEQ ID NO: 545690 - DNA, 75 bp, synthetic construct
  source 1..75: mol_type = other DNA
taaggcgggttatgctatctgccgttcgatagatttaaactcatgggaatatgtgccagaccatcgcggtgaaat

SEQ ID NO: 545691 - DNA, 75 bp, synthetic construct
  source 1..75: mol_type = other DNA
agattatcgccaccaaagcagggaatattaccgtctataactatgatggtgaaactcgagaatatatttccactt

SEQ ID NO: 545692 - DNA, 75 bp, synthetic construct
  source 1..75: mol_type = other DNA
aacggagaaacgcgggaatatatttccacatcaacagaatatcttgccattggtgtcggcattcccgcatattcc

SEQ ID NO: 545693 - DNA, 75 bp, synthetic construct
  source 1..75: mol_type = other DNA
taaaatggcagagaacaaacctgacctgccggatggcaaaacagagcaggctgtcagggagattgccgggcagga

SEQ ID NO: 545694 - DNA, 75 bp, synthetic construct
  source 1..75: mol_type = other DNA
ctgaagcaggatgaacggctgtccggtgagctgataaccggacgtcgtcagctgcaggagggcatggccttcaca

SEQ ID NO: 545695 - DNA, 75 bp, synthetic construct
  source 1..75: mol_type = other DNA
caactgaaattacaggccggacggaagctgactcaggcagaaacaacccgacttaacgccgtgctggattacatt

SEQ ID NO: 545696 - DNA, 75 bp, synthetic construct
  source 1..75: mol_type = other DNA
cgtttattgccaccgtggcaggtgaaatcactgtgtacaactaccggggcgacacccgcgaatacatatcctcat

SEQ ID NO: 545697 - DNA, 75 bp, synthetic construct
  source 1..75: mol_type = other DNA
aacaacccgccttaacgctgtgctggattacattgacgcggtgacggcaacagataccagcacagcgccggatgt

SEQ ID NO: 545698 - DNA, 75 bp, synthetic construct
  source 1..75: mol_type = other DNA
caaggggaagtggtagaacaagggccgtgtgcgcgtgtttttgccgcaccgcagcaggagtacacgcgtcagctg

SEQ ID NO: 545699 - DNA, 75 bp, synthetic construct
  source 1..75: mol_type = other DNA
gaacaaggaccgtgcgcgcgcgtgtttgccgcaccgcagcaggagtatacgcgtcagctactggcgttgagctga

SEQ ID NO: 545700 - DNA, 75 bp, synthetic construct
  source 1..75: mol_type = other DNA
gaaaaaacaaccactatcgccccgttaacgccatacgataaatgggatggtgaaaaatgggtgacagatactgag

SEQ ID NO: 545701 - DNA, 75 bp, synthetic construct
  source 1..75: mol_type = other DNA
cctgtttagatgctcctggctcatataaagctggttatgcaatttgccgttctgcagattttaactcatgggaat

SEQ ID NO: 545702 - DNA, 75 bp, synthetic construct
  source 1..75: mol_type = other DNA
gatgcgcagcgccggcgtggatgcacagacactggcgtcctttctgcatgacacgcagctgcagcagcgcagcgg

SEQ ID NO: 545703 - DNA, 75 bp, synthetic construct
  source 1..75: mol_type = other DNA
caccgttcacggcactgaagctggagaacggctgggtggaaacgcccgggcattccgtcagtgacagtgcgacgg

SEQ ID NO: 545704 - DNA, 75 bp, synthetic construct
  source 1..75: mol_type = other DNA
cggtgaaggtcgtccgtggaatcccggtgccatcaccggtggccgcgtgtggggggatatcccggacaacagcgt

SEQ ID NO: 545705 - DNA, 75 bp, synthetic construct
  source 1..75: mol_type = other DNA
gtcgtttgctgcagaaggaaccagttttgttgacttgggacgggaaatcgatgcgcagataaaacggggcgattt

SEQ ID NO: 545706 - DNA, 75 bp, synthetic construct
  source 1..75: mol_type = other DNA
cggcagaagtacagcgacagtcactaattgatactgcaatggcttccattagtctgattcaactgaaattgcagg

SEQ ID NO: 545707 - DNA, 75 bp, synthetic construct
  source 1..75: mol_type = other DNA
atgaaaacgggttcgccacggaagctggctttatcactgtttacaactacaacggagaaacgatggagtttactt

SEQ ID NO: 545708 - DNA, 75 bp, synthetic construct
  source 1..75: mol_type = other DNA
aaggaactgcccacgatgtgtttgagccgaaaccggaccgggaggtcatgaatgcgcagcggctgttcagtacgg

SEQ ID NO: 545709 - DNA, 75 bp, synthetic construct
  source 1..75: mol_type = other DNA
gcgcaaatatccgcagccgtatgtggcactgccggcttttgaccgtaacggcaagtcagctggtatctggctgaa

SEQ ID NO: 545710 - DNA, 75 bp, synthetic construct
  source 1..75: mol_type = other DNA
cacaggtcagcggggtacgggaacaggccatactgacacaggccattcgcagtgagctgaaaacacagggcgtgc

SEQ ID NO: 545711 - DNA, 75 bp, synthetic construct
  source 1..75: mol_type = other DNA
accgtaacggcaagtccgccggtatctggctgaacccgctgaccacggatgacggaaacgggctgcggggattca

SEQ ID NO: 545712 - DNA, 75 bp, synthetic construct
  source 1..75: mol_type = other DNA
gccgtgaaacggaacgccgcgcaggtaatgactccaacttactgatagtgttttatgttcagataatgcccgatg

SEQ ID NO: 545713 - DNA, 75 bp, synthetic construct
  source 1..75: mol_type = other DNA
cggctgtattcctcactggatgaaacccgtactgcggaaaaacttgcccgccatccctcctttacggtggtttct

SEQ ID NO: 545714 - DNA, 75 bp, synthetic construct
  source 1..75: mol_type = other DNA
gggacgcacttgccctggtggataatgtgtatcaccggattgccggtatcagtaaggatgacgggctgataaccc

SEQ ID NO: 545715 - DNA, 75 bp, synthetic construct
  source 1..75: mol_type = other DNA
tgaactcccggctatggatttcgtggtggtggcgaaaaaaggggttgccgacctcgataaccttgctctctcgga

SEQ ID NO: 545716 - DNA, 75 bp, synthetic construct
  source 1..75: mol_type = other DNA
acctcgataaccgtgctctctcggaagcgttggaaaattatggcgccgccactgtcgcctggctcgcgggtcctg

SEQ ID NO: 545717 - DNA, 75 bp, synthetic construct
  source 1..75: mol_type = other DNA
gcgtacagcctggatccacgagcaggcaaaatattatctcaatgctggcgttcccattgaaattaaagtggtctg

SEQ ID NO: 545718 - DNA, 75 bp, synthetic construct
  source 1..75: mol_type = other DNA
gggcaccctgaacttccgcgaaatggtggaactggcaccagcgcactttgctgacggcaataacatgctgatgtg

SEQ ID NO: 545719 - DNA, 75 bp, synthetic construct
  source 1..75: mol_type = other DNA
acaccagcatgaagccaccacgaccattgaactggtacagcggtacctggatgatcaggaagaaaagcaaatcat

SEQ ID NO: 545720 - DNA, 75 bp, synthetic construct
  source 1..75: mol_type = other DNA
gcgacggcgcatatgcagtttgttgaatgggtatggaataattttgctggccgttgcgcggtgactggctggcag

SEQ ID NO: 545721 - DNA, 75 bp, synthetic construct
  source 1..75: mol_type = other DNA
ttttgattttttatttagatttgttggcggtttttatttcggttcacctgttgttaattttaactatgttattca

SEQ ID NO: 545722 - DNA, 75 bp, synthetic construct
  source 1..75: mol_type = other DNA
gcacgaagctaatatatataatatatatattagcggtggtgtttctgctcaaacaatagagtctcagattgcttc

SEQ ID NO: 545723 - DNA, 75 bp, synthetic construct
  source 1..75: mol_type = other DNA
tgatggatctcgatgtaaccgacagctttggcgataacaccgaccgcaacggcgatgcgctgccggaagataacc

SEQ ID NO: 545724 - DNA, 75 bp, synthetic construct
  source 1..75: mol_type = other DNA
agcgcggctaccattcctgaggcgaacgatgaaatgctcttccctgtcccgtttaagtggcacgacgcacgccgg

SEQ ID NO: 545725 - DNA, 75 bp, synthetic construct
  source 1..75: mol_type = other DNA
tgcgcaattgctttctgcactggagagcatggacgatgatgaaaaacgccaattaattttcaaaatcataaacaa

SEQ ID NO: 545726 - DNA, 75 bp, synthetic construct
  source 1..75: mol_type = other DNA
cagggcgaacaggaaagggatgatatagcggtgacggtatgcgatgccgtggaaatggcgctttttaccggactg

SEQ ID NO: 545727 - DNA, 75 bp, synthetic construct
  source 1..75: mol_type = other DNA
gcgttggctctgtgggcctggcggcgctggtaaccgcctttatcggcgttgacttcttcgctaacggcgagcagg

SEQ ID NO: 545728 - DNA, 75 bp, synthetic construct
  source 1..75: mol_type = other DNA
agctacgctgaaaacgccgcattcaacccgactctgccaccgttgcagggagcgttaattctgttgaatctcaag

SEQ ID NO: 545729 - DNA, 75 bp, synthetic construct
  source 1..75: mol_type = other DNA
acgctggttggcggttgtattgggctaattttgtatttgctgtcgcagctcccggccttgtttcccctcggcaat

SEQ ID NO: 545730 - DNA, 75 bp, synthetic construct
  source 1..75: mol_type = other DNA
tctgcagtttatccgtgtcaacggtacgctggttggcggttgtattgggctaattttgtatttgctgtcgcagct

SEQ ID NO: 545731 - DNA, 75 bp, synthetic construct
  source 1..75: mol_type = other DNA
aaggtgaacggaaaggacgtggcactgaagagtgatgaagagcagaagctggccattctggcaccgttcggagaa

SEQ ID NO: 545732 - DNA, 75 bp, synthetic construct
  source 1..75: mol_type = other DNA
ctgtttaagcagtacctagttgtggagcgtgatgccagcgatccgaaccgcctgaacacgctgttcccgcctgac

SEQ ID NO: 545733 - DNA, 75 bp, synthetic construct
  source 1..75: mol_type = other DNA
ttgcccaacttgcggataacttacagtctgcactggagcctattctggcagataagtatttccccgcgttgttga

SEQ ID NO: 545734 - DNA, 75 bp, synthetic construct
  source 1..75: mol_type = other DNA
tctcaaaacggtaatggatcaagagcagcaacatctctctatggggcagatcaacggcagccagttgcaatggat

SEQ ID NO: 545735 - DNA, 75 bp, synthetic construct
  source 1..75: mol_type = other DNA
tccctgatgccgccgaggtggcaaaggcaagacttcgcgttgatacccgcaaatgggcgctggcccgaatgaatc

SEQ ID NO: 545736 - DNA, 75 bp, synthetic construct
  source 1..75: mol_type = other DNA
gcgctgatccacgccgcaacgatggtaaccgcgggtgtctacctgatcgcccgtacccacggcctgttcctagtg

SEQ ID NO: 545737 - DNA, 75 bp, synthetic construct
  source 1..75: mol_type = other DNA
agattctcgtgtgaaagaacgcatcgcacgagcgggtcaatggtttggcgaaacgttaattgccgatgatgcctt

SEQ ID NO: 545738 - DNA, 75 bp, synthetic construct
  source 1..75: mol_type = other DNA
agctaatttaccgccctgcctccattaagaatgggcgtcaagatgcagaaaaacagctaaagatggaactacgtg

SEQ ID NO: 545739 - DNA, 75 bp, synthetic construct
  source 1..75: mol_type = other DNA
taacggctggttactggaaggacagattgagcgcaatcaacaggcgctggaaatgttgaaaccgcatcaggaacc

SEQ ID NO: 545740 - DNA, 75 bp, synthetic construct
  source 1..75: mol_type = other DNA
ttcctgggttctgacatcggcgggctgaatgcctttatctatcgtgttggtgcggctaagcccgtgaatcttatc

SEQ ID NO: 545741 - DNA, 75 bp, synthetic construct
  source 1..75: mol_type = other DNA
agtgatgtgaatttaggtagagtggtacgtgataaaattagtgtagatgccgtaaatgactggggaggggttcag

SEQ ID NO: 545742 - DNA, 75 bp, synthetic construct
  source 1..75: mol_type = other DNA
ctccgggttacatcatcagcgttggcaataaaacgctgcgatgcgatatcagcaaggactacccgcaatggatcg

SEQ ID NO: 545743 - DNA, 75 bp, synthetic construct
  source 1..75: mol_type = other DNA
acggcttaccttatgagatagaacgcgaacctttaagtaacagttttacacccggcgaagcgaatacatatcagc

SEQ ID NO: 545744 - DNA, 75 bp, synthetic construct
  source 1..75: mol_type = other DNA
aaggtggtgaccaaccagcaggggattccaccctggaagattcaccacagtcgcattatccgcatggagggtgaa

SEQ ID NO: 545745 - DNA, 75 bp, synthetic construct
  source 1..75: mol_type = other DNA
agctcgaccgcatcaaagagggtcagtttaaaggggtgatgtgcctcgaccgatggcaggtcaacccgagctatt

SEQ ID NO: 545746 - DNA, 75 bp, synthetic construct
  source 1..75: mol_type = other DNA
tgaccagggggcacgggtagtactggataaggatataaaaacttccgtttccctgtcgataagacgccgtgttct

SEQ ID NO: 545747 - DNA, 75 bp, synthetic construct
  source 1..75: mol_type = other DNA
aaagacaacttgccggacaaaaggctgccggactgcagacacaacaggcaggtcatgttatgcacgacagccagc

SEQ ID NO: 545748 - DNA, 75 bp, synthetic construct
  source 1..75: mol_type = other DNA
tcgctggctgcctcatgcacaggcctatctggacggggaacgcgtgtaccagaacccgatcctgatgcactgcat

SEQ ID NO: 545749 - DNA, 75 bp, synthetic construct
  source 1..75: mol_type = other DNA
ccgctggctgccacacgcacaggcttatctggagggggaacgcgtctatcagaatcccattctggtgtactgcat

SEQ ID NO: 545750 - DNA, 75 bp, synthetic construct
  source 1..75: mol_type = other DNA
tatcgctcaggtaggccatgagtcgatggggtttagcgccgtagttgaaaattttaactacacaccatctgcgct

SEQ ID NO: 545751 - DNA, 75 bp, synthetic construct
  source 1..75: mol_type = other DNA
gatctacaggccgcgcgctcagctgcatggttctacacatctaaaggctgcatggtctacggtgccgatattaat

SEQ ID NO: 545752 - DNA, 75 bp, synthetic construct
  source 1..75: mol_type = other DNA
gaacgtattgctgacaaagttgaaatgaaacgcaccgttctgcttccacgctggctgccacatgcacaggcttac

SEQ ID NO: 545753 - DNA, 75 bp, synthetic construct
  source 1..75: mol_type = other DNA
agtgaagcggtagagaagctggctctgcactccgttgatgaactgataaaagaatacagcgctaaaaagtcctga

SEQ ID NO: 545754 - DNA, 75 bp, synthetic construct
  source 1..75: mol_type = other DNA
gaaaagcggaaccggtgcgcggatggtgtcgggtggtcgcgtctttggacgtgaccagactggcggaggaagttt

SEQ ID NO: 545755 - DNA, 75 bp, synthetic construct
  source 1..75: mol_type = other DNA
tgaacggcgcactcattcaggccagcgctgaaatcgacggttatctctgcggtcgctatccggtgccctgggctg

SEQ ID NO: 545756 - DNA, 75 bp, synthetic construct
  source 1..75: mol_type = other DNA
caagcagaatccagagttgtactggcaaattcttgctgaagccgccagcatcgcccagggaaaagagcagcagaa

SEQ ID NO: 545757 - DNA, 75 bp, synthetic construct
  source 1..75: mol_type = other DNA
caaaatcgttgctgcctcctggcaggcgaaaaacaatgctgcacgtacgctggtgatgccggttatcaaagaaaa

SEQ ID NO: 545758 - DNA, 75 bp, synthetic construct
  source 1..75: mol_type = other DNA
gttgtggctgaaagcggatgcgaccaacgagcatccagagtgcgtcattaaggacactcctgaagcggcggtcgg

SEQ ID NO: 545759 - DNA, 75 bp, synthetic construct
  source 1..75: mol_type = other DNA
atgctgcgatggaaacgctgtattatgctaacatttatctctggagctgcttttgcggctccagagataaatgtt

SEQ ID NO: 545760 - DNA, 75 bp, synthetic construct
  source 1..75: mol_type = other DNA
ctgttgttttaactgtaagtgcaaccgtcgcacaagcagaatcggcattgtggaagcgtaacagtgttgccggaa

SEQ ID NO: 545761 - DNA, 75 bp, synthetic construct
  source 1..75: mol_type = other DNA
aaaagcctactggcgatagtcgaccagataaatcaaatcgtcacgggttcctacgatggttcacaggcaagcgct

SEQ ID NO: 545762 - DNA, 75 bp, synthetic construct
  source 1..75: mol_type = other DNA
agtgagattgacccgaaacgtcgtggcgttctggaatcgcggttcgatgagcttcagctctgggattgcatcaac

SEQ ID NO: 545763 - DNA, 75 bp, synthetic construct
  source 1..75: mol_type = other DNA
caatcagcttgggcgaccgcgtgatgtaccggtaaccaacgtggtggcactgctggttatgttggtaacaacctt

SEQ ID NO: 545764 - DNA, 75 bp, synthetic construct
  source 1..75: mol_type = other DNA
ctccgtgaacttattgcgctgggtggtcccgcgttcgaagcgctgctgaagaacatcgatctgatccgccagttc

SEQ ID NO: 545765 - DNA, 75 bp, synthetic construct
  source 1..75: mol_type = other DNA
atgcagacctcgccaactattacgaccgggtgagctcattgcaggagcgccgcttacggctgccgatgcgccgga

SEQ ID NO: 545766 - DNA, 75 bp, synthetic construct
  source 1..75: mol_type = other DNA
gcttatctcaacgtgacgccgttcattaccacgctcggcacgatgatcatcgtctatggcatcaactcgctctat

SEQ ID NO: 545767 - DNA, 75 bp, synthetic construct
  source 1..75: mol_type = other DNA
aaaatactattgctgacattctcacataccttggtttgggaacggcatcgaaaaggaatgtcgggacgggggaaa

SEQ ID NO: 545768 - DNA, 75 bp, synthetic construct
  source 1..75: mol_type = other DNA
ttggcccggtagtgaaaggtgatgtgatcacgggtaacgtcgagggcttaacccctatcgcggtgaagattgtct

SEQ ID NO: 545769 - DNA, 75 bp, synthetic construct
  source 1..75: mol_type = other DNA
gaggcgggttttccagcagtcaggccaatatatgaattgccactaagtgaggatgtactcgatgagatgcgcgag

SEQ ID NO: 545770 - DNA, 75 bp, synthetic construct
  source 1..75: mol_type = other DNA
cgaggaaatgcgatcgttaggatcttacattgcgcttaatttagaaggtagctcgcaggaacgtacattttcatt

SEQ ID NO: 545771 - DNA, 75 bp, synthetic construct
  source 1..75: mol_type = other DNA
actatgccggatttgagtgccgaaaccttgcctacagcggcacggctattgttggcagtgccagctcatttatgt

SEQ ID NO: 545772 - DNA, 75 bp, synthetic construct
  source 1..75: mol_type = other DNA
cctgaacacgctgttcccgcctgactatgttaaccagctgcgtgtctttgccgtggttaaccagttccgtcttca

SEQ ID NO: 545773 - DNA, 75 bp, synthetic construct
  source 1..75: mol_type = other DNA
atgacgataagctttaacaccattccgtcgaatacgctggttccgattttttatgcggaaatggataaccaggcg

SEQ ID NO: 545774 - DNA, 75 bp, synthetic construct
  source 1..75: mol_type = other DNA
gaacggggaggttattacctgacagaatgtcagttgctggaaagaaacagagatacgggcttctggtcagggagg

SEQ ID NO: 545775 - DNA, 75 bp, synthetic construct
  source 1..75: mol_type = other DNA
gatcacgggtaacgtcgagggcttaacccctatcgcggtgaaattgtctgaggtgcatgatgaagctgtacagtt

SEQ ID NO: 545776 - DNA, 75 bp, synthetic construct
  source 1..75: mol_type = other DNA
gcgcgttccggcagtctggttctatggcgcgacgttctcggctatgcactttgtgcgtattctggataacgccat

SEQ ID NO: 545777 - DNA, 75 bp, synthetic construct
  source 1..75: mol_type = other DNA
cagtacctggttgtggagcgtgatgccagcgatccgaaccgcctgaacacgctgttcccgcctgactatgttaac

SEQ ID NO: 545778 - DNA, 75 bp, synthetic construct
  source 1..75: mol_type = other DNA
gaaatgcgatcgttaggatcttacattgcgcttaatttagaaggtagtgaaccgccccgggtttcctggagagtg

SEQ ID NO: 545779 - DNA, 75 bp, synthetic construct
  source 1..75: mol_type = other DNA
ctgaaatcccgggatgtggcggcactggatacgcgaaaatccaaacagcacgtcgatcctgaagtcagaatggct

SEQ ID NO: 545780 - DNA, 75 bp, synthetic construct
  source 1..75: mol_type = other DNA
ttttccgctcccaaaagtgtctccatgatggccatgctcgggggggacaaacgtcttattgaagcacataactag

SEQ ID NO: 545781 - DNA, 75 bp, synthetic construct
  source 1..75: mol_type = other DNA
agcagtgacaaagtggggaaaaccggattttccgagaacgtgctcgcgaaccggattgcgttcgggaaaatatat

SEQ ID NO: 545782 - DNA, 75 bp, synthetic construct
  source 1..75: mol_type = other DNA
tggatacgcgtaaatccaaacagcatgtcgatccggagatcaaaatggtcgagtggatgcagacgctgaaggaaa

SEQ ID NO: 545783 - DNA, 75 bp, synthetic construct
  source 1..75: mol_type = other DNA
tccaaacagcttgttccaggaaattcttgatgagtacggcatcccaaatgcctggcaaggggaaaccaacttctg

SEQ ID NO: 545784 - DNA, 75 bp, synthetic construct
  source 1..75: mol_type = other DNA
tcccggagccatcactggtggccgcgtgtggggggatatcccggataacagcgtccagccgggggccggaaatgg

SEQ ID NO: 545785 - DNA, 75 bp, synthetic construct
  source 1..75: mol_type = other DNA
cctgcagggcagccgtaacggagagagcctgctggctgataatatgcaggatggtgtccggattgcacgtgataa

SEQ ID NO: 545786 - DNA, 75 bp, synthetic construct
  source 1..75: mol_type = other DNA
gccggtgaaggtcgtccgtggaatcccggtaccatcaccggtggtcgcgtgtggggggatatcccggacaacagc

SEQ ID NO: 545787 - DNA, 75 bp, synthetic construct
  source 1..75: mol_type = other DNA
ggccatctttccagttattcgggcgcttgaattgcataaaattaagcatcttttaattgttacgtcgacaattaa

SEQ ID NO: 545788 - DNA, 75 bp, synthetic construct
  source 1..75: mol_type = other DNA
cagagcggctgttcagtacggcgcgggagctgcgggacgtggcggcaggccgtgccgttctccgtcaggcggggc

SEQ ID NO: 545789 - DNA, 75 bp, synthetic construct
  source 1..75: mol_type = other DNA
gaagcagcatgtgcaggtgtacaccgataaccgtcagggctggacggatgccatcaacaatgccgtacagaaagg

SEQ ID NO: 545790 - DNA, 75 bp, synthetic construct
  source 1..75: mol_type = other DNA
gacctggcctatgccatcaccgctcacggtgcgcagggggcgagtgaaacctttgccatcgcgcttgaaggcacg

SEQ ID NO: 545791 - DNA, 75 bp, synthetic construct
  source 1..75: mol_type = other DNA
ctgtcggcagtactttttctggcaagctgttttgccggatggcgggcgtttgcggtcatggtgctggcatacggc

SEQ ID NO: 545792 - DNA, 75 bp, synthetic construct
  source 1..75: mol_type = other DNA
ccgtccgacacagacgggggaactggtggggatgcttccggcaccgaaaggtaagcgattcatcatgacagagca

SEQ ID NO: 545793 - DNA, 75 bp, synthetic construct
  source 1..75: mol_type = other DNA
cggcaaatacgctggtgccactgttttatgctgagatggataattcggcggcgaatacaagtcaggagtcagcgc

SEQ ID NO: 545794 - DNA, 75 bp, synthetic construct
  source 1..75: mol_type = other DNA
cgatcgataaggtcgatctttccggcaccagtgcgttgatgctggagagtatgaccagaaacgatcgtcatcagg

SEQ ID NO: 545795 - DNA, 75 bp, synthetic construct
  source 1..75: mol_type = other DNA
gcttttttgccggcgacgccacgctgacccgcgccgccgtacgcctgactgacggcacgctcggctacagctggg

SEQ ID NO: 545796 - DNA, 75 bp, synthetic construct
  source 1..75: mol_type = other DNA
cgcattgccgcacgccaggccgaagtgaacgccagccgggtcgacttctttacgatggttcgcggagataacgca

SEQ ID NO: 545797 - DNA, 75 bp, synthetic construct
  source 1..75: mol_type = other DNA
caacgatgctgccattgaggttaacagcctggtgctgatgccgtcggcagattatgcccgtcagatttgtggggc

SEQ ID NO: 545798 - DNA, 75 bp, synthetic construct
  source 1..75: mol_type = other DNA
cggcaaccgaaaccggcacggtgaatgtctatgtgggacgtacccgcgtgcaggctccggtgaccaacggcgata

SEQ ID NO: 545799 - DNA, 75 bp, synthetic construct
  source 1..75: mol_type = other DNA
agacggcggtgcgctgccgtcagaccgtgaatcgctgttctggctgaatattcaggaaattccgccgaagccgaa

SEQ ID NO: 545800 - DNA, 75 bp, synthetic construct
  source 1..75: mol_type = other DNA
ggtgtgccaattctggtcgccggtcaggtaacgggaatcgatccgttcgacattggcgcaatggcgggacgttag

SEQ ID NO: 545801 - DNA, 75 bp, synthetic construct
  source 1..75: mol_type = other DNA
gcgagccgatgccgtaaaaagctatctgaaagaagatgaagcttttaaccgctatctcagtgaattgtgggggga

SEQ ID NO: 545802 - DNA, 75 bp, synthetic construct
  source 1..75: mol_type = other DNA
tatcgcccagcaaattgttcgctggctggagagcgagcatccactgaaagccaaaattttgcccactgaatggct

SEQ ID NO: 545803 - DNA, 75 bp, synthetic construct
  source 1..75: mol_type = other DNA
atgaccaaaaacgatcgtcatcaggtgctgctggatacgctgatcgcacagttgatcgcccttctccagcgcgat

SEQ ID NO: 545804 - DNA, 75 bp, synthetic construct
  source 1..75: mol_type = other DNA
gttgcggataacagctacctcgacagtgagacgctgcataccagcgcgtatgtactgcgcaaactgaaatccgtc

SEQ ID NO: 545805 - DNA, 75 bp, synthetic construct
  source 1..75: mol_type = other DNA
acagacaccccaagtcgagggttaaagttagttattcttcaaaaagataccacactgcaatgttactttggttac

SEQ ID NO: 545806 - DNA, 75 bp, synthetic construct
  source 1..75: mol_type = other DNA
taagattgaatatgcgaggtcgtttacgccctaaaaaggctggttttaactatcttaaaacctcagtcaccgacg

SEQ ID NO: 545807 - DNA, 75 bp, synthetic construct
  source 1..75: mol_type = other DNA
tatcttgcgcagtttcgaccttacgattgcagcgcctagaaacttcaataaagctaattacaatattaagaacga

SEQ ID NO: 545808 - DNA, 75 bp, synthetic construct
  source 1..75: mol_type = other DNA
cccgaaaaaacaaggttttaactatctaaaaacttctgtcaccgatgctattaaggaactacttgaactttttcc

SEQ ID NO: 545809 - DNA, 75 bp, synthetic construct
  source 1..75: mol_type = other DNA
gacgcgaaaatcctccatcgtcagccgaaatatctggggccatcggtcatgattggcccgtttagtgagcatggc

SEQ ID NO: 545810 - DNA, 75 bp, synthetic construct
  source 1..75: mol_type = other DNA
gtttggtgaaaaccatatcaccattatttcgcaagaatttcataaccaacgcgccatctggctggcaaaacagta

SEQ ID NO: 545811 - DNA, 75 bp, synthetic construct
  source 1..75: mol_type = other DNA
cgtcgaatacgctggttccgctgttttatgcggaaatggataaccaggcggcgaatactgcacaggacagcggag

SEQ ID NO: 545812 - DNA, 75 bp, synthetic construct
  source 1..75: mol_type = other DNA
caaatacgctggttccgattttttatgcggaaatggataactcggcggcgaatactgcacaggacagcggagcat

SEQ ID NO: 545813 - DNA, 75 bp, synthetic construct
  source 1..75: mol_type = other DNA
caggctccggtgaccaacggcgataacgtcgcgacgattgccagcagtatccaggatgccatcaatgccgttccg

SEQ ID NO: 545814 - DNA, 75 bp, synthetic construct
  source 1..75: mol_type = other DNA
atcaagaaaattgatgtcactgaacccacaaacaaaacgccgaaaagcctacttgatcaagtgttgatcggtaca

SEQ ID NO: 545815 - DNA, 75 bp, synthetic construct
  source 1..75: mol_type = other DNA
tttatgcttcaatattctggattggatctgtaataaccagttttatttgtctggtagttgacaggctccctcatc

SEQ ID NO: 545816 - DNA, 75 bp, synthetic construct
  source 1..75: mol_type = other DNA
acgtcccacgcagaccggtgagctggtgggtatgctgcctgcgccgaaggggaaacggttcacgatgaccgaaca

SEQ ID NO: 545817 - DNA, 75 bp, synthetic construct
  source 1..75: mol_type = other DNA
cctgacatgaaaatgtcctacttccacaccctgaaccgccccgggtttcctggagagtgttttatctgtgaactc

SEQ ID NO: 545818 - DNA, 75 bp, synthetic construct
  source 1..75: mol_type = other DNA
atgtctttgctgaacatacacatgatttttgtgagctggtgattgtctggcgcggtaatggtctgcatgtactca

SEQ ID NO: 545819 - DNA, 75 bp, synthetic construct
  source 1..75: mol_type = other DNA
ttcgttaccgccaacatccagcgaaacgttgctggataagctgattacccgactggcggccagcctgaaaagtcc

SEQ ID NO: 545820 - DNA, 75 bp, synthetic construct
  source 1..75: mol_type = other DNA
cgagtttatcgcggatgttaccgtctcggaaacgccaataatttttcgtgacgaaagcatgcgcaccgcctgctc

SEQ ID NO: 545821 - DNA, 75 bp, synthetic construct
  source 1..75: mol_type = other DNA
ccagtccacccacgttagtgtggccagttccacttctgcacggtttttccagctcttacggtgtattacctccgc

SEQ ID NO: 545822 - DNA, 75 bp, synthetic construct
  source 1..75: mol_type = other DNA
tacacttccgttaattctctggttttgcagaacattatttattgcccagagcgactaacgctaaatctcgactgg

SEQ ID NO: 545823 - DNA, 75 bp, synthetic construct
  source 1..75: mol_type = other DNA
gcattacccgtggcgatctcttttatattcacgctgatgataaacactcctacgcttccgttaacgatctggtgt

SEQ ID NO: 545824 - DNA, 75 bp, synthetic construct
  source 1..75: mol_type = other DNA
ccgctggcgattgcggcgctgaaagagatctaccgcgccaccagcgaaatgcccgtggaggaagcatatcgttat

SEQ ID NO: 545825 - DNA, 75 bp, synthetic construct
  source 1..75: mol_type = other DNA
atccagaatcgggcgacagaagctgttgtgaccggtgggagagcagaatattttgctaaagaaatagccgcatcg

SEQ ID NO: 545826 - DNA, 75 bp, synthetic construct
  source 1..75: mol_type = other DNA
cggcatgaccggtcatgctggcgagctcccgaattgtcgttgttataaagaaatcgtttttcccaccttccattc

SEQ ID NO: 545827 - DNA, 75 bp, synthetic construct
  source 1..75: mol_type = other DNA
aatggaacctgtggaaatcggtatcagaggaaatcggcgctggcctgcgcgatgtggtgggtaatacccccgtcg

SEQ ID NO: 545828 - DNA, 75 bp, synthetic construct
  source 1..75: mol_type = other DNA
cagccgattcactttgtccagtgctcgctggaagaagcattgaaagcgcgtcatgatcagcaacgatacttcgaa

SEQ ID NO: 545829 - DNA, 75 bp, synthetic construct
  source 1..75: mol_type = other DNA
cctgtatcattgaggctgatatgtaccatctggcgcaaattccgctcggtcagccgattcattttgtccagtgtt

SEQ ID NO: 545830 - DNA, 75 bp, synthetic construct
  source 1..75: mol_type = other DNA
tttactgaaggatggtgaccgactcccgattggcaaagcgaagcgtgattttatggaagcgcagggcgttaaaca

SEQ ID NO: 545831 - DNA, 75 bp, synthetic construct
  source 1..75: mol_type = other DNA
tcacctcccgcgatttcatgaaattccgcctcggcggtttcgaagccattaagtccgagtacatggctcaggtgc

SEQ ID NO: 545832 - DNA, 75 bp, synthetic construct
  source 1..75: mol_type = other DNA
atgagtgaatcattacatctgacccgcaatggatcaattctggaaattacccttgaccgtccaaaagctaatgca

SEQ ID NO: 545833 - DNA, 75 bp, synthetic construct
  source 1..75: mol_type = other DNA
ccggacggagcagggcgtgtggcagctcatgcagtagtgaatgccaccctgtctctggcacagggtaagaatgcc

SEQ ID NO: 545834 - DNA, 75 bp, synthetic construct
  source 1..75: mol_type = other DNA
tatgtataggacgatattttcaatgtcaattattcttttggcgacattgtgcgttgtaggacggtttactggcga

SEQ ID NO: 545835 - DNA, 75 bp, synthetic construct
  source 1..75: mol_type = other DNA
cgaacacgagaaattgaccctagcgtcatgatcaccagtgacatcagcactccggatggcacggcactgttgcaa

SEQ ID NO: 545836 - DNA, 75 bp, synthetic construct
  source 1..75: mol_type = other DNA
gcactatcccgatttttttattgatattccccgtgagcaggcattactgcgtgagcacgaggtgattgtttttca

SEQ ID NO: 545837 - DNA, 75 bp, synthetic construct
  source 1..75: mol_type = other DNA
aaatcgccttaacatgccgcaggtgacgacggaaaccgatgtcgccagcctgaaaaatcatctcgccggagagcc

SEQ ID NO: 545838 - DNA, 75 bp, synthetic construct
  source 1..75: mol_type = other DNA
gcggtgcgggggcagaagtgttgtatcgtccgctggatagcaactgggcgtttgggctggatgctaactatgtga

SEQ ID NO: 545839 - DNA, 75 bp, synthetic construct
  source 1..75: mol_type = other DNA
accactgaaacggatgtcgccagcctgaaaaatcatcttgccggagagccgctgggtcatgaaacaacgttggca

SEQ ID NO: 545840 - DNA, 75 bp, synthetic construct
  source 1..75: mol_type = other DNA
atgaaagtaactgcaaacggtaagacatttaccttccctgacggtacgagcacggaagatattggctccgccatt

SEQ ID NO: 545841 - DNA, 75 bp, synthetic construct
  source 1..75: mol_type = other DNA
cgtgataccgtcggaaacgaagagtttcagcgcttagcgagggttgggattgtggcatcgctaagcggaatggat

SEQ ID NO: 545842 - DNA, 75 bp, synthetic construct
  source 1..75: mol_type = other DNA
ctgatgctgcaaatcaggagggtgattttgcacaaaatgctgccattaacggtggtatcaatattggtgctcagg

SEQ ID NO: 545843 - DNA, 75 bp, synthetic construct
  source 1..75: mol_type = other DNA
gccatctgcatttttcgctgggagaggggatcggttctgcgcgaagaatcgacaatttgcggcaaaaaacactga

SEQ ID NO: 545844 - DNA, 75 bp, synthetic construct
  source 1..75: mol_type = other DNA
ccccccccccccccccgcggggggggggtgaacgagctggaaaaccgtattgccacgctgacagtacgtgacgat

SEQ ID NO: 545845 - DNA, 75 bp, synthetic construct
  source 1..75: mol_type = other DNA
acgagactatgcgcaccgcctgctctcccgatggcttatgcaacgacggtaacggccttgaactgaaatgcccgt

SEQ ID NO: 545846 - DNA, 75 bp, synthetic construct
  source 1..75: mol_type = other DNA
catgtatcagctgggcgtgatgggaacggcggatttgtggctgacggaccatctgctcaccaccggcagcctgtt

SEQ ID NO: 545847 - DNA, 75 bp, synthetic construct
  source 1..75: mol_type = other DNA
tcgatcccggcgagtttaaagtattgcggaaagccgcgcgccgtgaaggtatggacctgcttcccggcgtggagc

SEQ ID NO: 545848 - DNA, 75 bp, synthetic construct
  source 1..75: mol_type = other DNA
aacgaatctgactgaaagccagtttggtataggcacaccgcgcagcacgtttccgtggaatttgtccggcaccta

SEQ ID NO: 545849 - DNA, 75 bp, synthetic construct
  source 1..75: mol_type = other DNA
cgagttcacaacgaacgtaaaagtcacggagtctccgatcctgttccgtgacgagagcatgcgcactgcgtgctc

SEQ ID NO: 545850 - DNA, 75 bp, synthetic construct
  source 1..75: mol_type = other DNA
gtaccgggatcgacgtgataactgtcgaacagggagatgatgcgtggcacaaattacggctaggtgtcatcacag

SEQ ID NO: 545851 - DNA, 75 bp, synthetic construct
  source 1..75: mol_type = other DNA
tcgaaatcctgaagcggtgcctggtgatttgccattctcattagatcgactggacgacgacgttcgcgcatatct

SEQ ID NO: 545852 - DNA, 75 bp, synthetic construct
  source 1..75: mol_type = other DNA
ggtataggcacgccgcgcagcacctttccgtggaatttgtctggcacctatgtacaggtgatcccgtatatctat

SEQ ID NO: 545853 - DNA, 75 bp, synthetic construct
  source 1..75: mol_type = other DNA
gacctcaaggttaatggtgaaagtgctgttggaagaagtacagcgcctcgccattccagtgttgaccagtgcaac

SEQ ID NO: 545854 - DNA, 75 bp, synthetic construct
  source 1..75: mol_type = other DNA
ggtatcggcacaccgcgcagcacgtttccgtggaatttgtccgggacttatgtacaggtgatcccatatatctat

SEQ ID NO: 545855 - DNA, 75 bp, synthetic construct
  source 1..75: mol_type = other DNA
tcgaggcgctgacgcacgtcacctttccgaaaggttttacgccagcagaaccgcactcaattgtcaccgtggagg

SEQ ID NO: 545856 - DNA, 75 bp, synthetic construct
  source 1..75: mol_type = other DNA
cacttctcgtctgatggtgaaagtattgctcgaagaagtgcagcgtctttccatcccactgttgaccagtgcaac

SEQ ID NO: 545857 - DNA, 75 bp, synthetic construct
  source 1..75: mol_type = other DNA
gatgggggtgcagtttgcgctgatgtgggcagtactggcgtttttgctcaactacgtgcccaatatcggcgcggt

SEQ ID NO: 545858 - DNA, 75 bp, synthetic construct
  source 1..75: mol_type = other DNA
tcatcgtctggctggggctggagctgatgggggtgcagtttgcgctgatgtgggcagtactggcgtttttgctca

SEQ ID NO: 545859 - DNA, 75 bp, synthetic construct
  source 1..75: mol_type = other DNA
cgtcccttacaaaatgcgtttcgcgttgaataatccacaaattcacatcgccggactacaccgcgcacttaaagg

SEQ ID NO: 545860 - DNA, 75 bp, synthetic construct
  source 1..75: mol_type = other DNA
cgatgcgttgcgcttgtcgagcagattccagaaatcagagattcattcggcaaggttgcaaagcgcgttccggca

SEQ ID NO: 545861 - DNA, 75 bp, synthetic construct
  source 1..75: mol_type = other DNA
cactactattgtgaaatcaacgtcctgcatcccttccgtgtgggaagtggtctggcacagcggatcttcttcgag

SEQ ID NO: 545862 - DNA, 75 bp, synthetic construct
  source 1..75: mol_type = other DNA
attcaccagcagcagcggcttgagcaggctgcttacgaaatgacggcgctgcgtgccgcgaccattgagcttggt

SEQ ID NO: 545863 - DNA, 75 bp, synthetic construct
  source 1..75: mol_type = other DNA
tgaatttctcctctatcgtggctgatgaatatgggataccacgacaattgaatgaaaactccttcgcaataacga

SEQ ID NO: 545864 - DNA, 75 bp, synthetic construct
  source 1..75: mol_type = other DNA
tgcaccgcgccctcttcgaaagctgtaccagccctttgagcagctgtttttgcttcagcggatctttcaggcgga

SEQ ID NO: 545865 - DNA, 75 bp, synthetic construct
  source 1..75: mol_type = other DNA
gataccaccacatcaaactgcagcacaccaaccgcaccaacgatcagatcgttgttggagattggacggaacacc

SEQ ID NO: 545866 - DNA, 75 bp, synthetic construct
  source 1..75: mol_type = other DNA
cgtttcgcactatcttgcattgaagacgctactcagtttatggacaggtgtcatcgtctggctggggctggagct

SEQ ID NO: 545867 - DNA, 75 bp, synthetic construct
  source 1..75: mol_type = other DNA
aagagatgttaccgtttcttaatctgcatatgtcgcccgaacgaatgcttcagcggatggattcggaaaaagttg

SEQ ID NO: 545868 - DNA, 75 bp, synthetic construct
  source 1..75: mol_type = other DNA
ttgtgcaactattactggcgctctttttcgctatcgtcctcaatccgctggtcacatggtttattcgtcggggag

SEQ ID NO: 545869 - DNA, 75 bp, synthetic construct
  source 1..75: mol_type = other DNA
caggattatcagaaccaggaacaaaacttattgaaaaaataagtgatgccattggtgtgctttatgaacctacaa

SEQ ID NO: 545870 - DNA, 75 bp, synthetic construct
  source 1..75: mol_type = other DNA
tagacagcgacagttatcagttactgaaatccgcagacgtcaatatctccgccctggtgaacagggccatgcaga

SEQ ID NO: 545871 - DNA, 75 bp, synthetic construct
  source 1..75: mol_type = other DNA
gttgggcaaaaaattgacaatataagtctggatgaattcgcaaaggcattaaaaagtgttttggcgagaatttga

SEQ ID NO: 545872 - DNA, 75 bp, synthetic construct
  source 1..75: mol_type = other DNA
aaccgctggaatatcgttcttcccgcctggcagtacgcctctaccgaagccgaacaacaaaaactcaacacctgg

SEQ ID NO: 545873 - DNA, 75 bp, synthetic construct
  source 1..75: mol_type = other DNA
acgctggcaggaagaaaaccgggaaggtatggctgaggtggccagctttatcgaggctaacggatcgtttgctga

SEQ ID NO: 545874 - DNA, 75 bp, synthetic construct
  source 1..75: mol_type = other DNA
agtggaagtggatgatggaaagcgtgctgggcgttcccgcccgccgcacgcatcagtttgagctacaatccgtgc

SEQ ID NO: 545875 - DNA, 75 bp, synthetic construct
  source 1..75: mol_type = other DNA
caggaaggaatggccgaggttgcccgctttattgagatgaacggttcattcgccgacgaaaacagggactggtga

SEQ ID NO: 545876 - DNA, 75 bp, synthetic construct
  source 1..75: mol_type = other DNA
caaggaagccgcatcgaaatttgatgcagatgagcgtgatggcgtgcagggatatgggattcgtgtggtttatag

SEQ ID NO: 545877 - DNA, 75 bp, synthetic construct
  source 1..75: mol_type = other DNA
tttctattatgtgggcaagtgcttcatgggcatcagaaggaaaggtggaaccaacaaatatcagttctactgata

SEQ ID NO: 545878 - DNA, 75 bp, synthetic construct
  source 1..75: mol_type = other DNA
atttgagaacctgaccccagaagctctggaatctcaagcaagaagctatctgcaagggcaaatcacctcatctgc

SEQ ID NO: 545879 - DNA, 75 bp, synthetic construct
  source 1..75: mol_type = other DNA
ttctggcattaatcgacggtatggttgaccatgccagtgatgatgagttatttgccagtgggtatttgcgtggcc

SEQ ID NO: 545880 - DNA, 75 bp, synthetic construct
  source 1..75: mol_type = other DNA
tccaataacgatggcatttatcagcagtcggaaaaactgactgaagaagaaaaagcgcgttacgactatgagtgg

SEQ ID NO: 545881 - DNA, 75 bp, synthetic construct
  source 1..75: mol_type = other DNA
ttttatgactatgactttactcgcggtcatcgccgcttggggctgggtagcgaagcctggaccgactatctgaag

SEQ ID NO: 545882 - DNA, 75 bp, synthetic construct
  source 1..75: mol_type = other DNA
tgttaaacgctggcaacaagatccgctctggcagatgttaaccgccgcgcagaagcagcaggttgcttcggtcga

SEQ ID NO: 545883 - DNA, 75 bp, synthetic construct
  source 1..75: mol_type = other DNA
ggtgctggtgggtcttcctctcatatgagttccggtgcaactgctggtactatttccgctcctggtaaaggatct

SEQ ID NO: 545884 - DNA, 75 bp, synthetic construct
  source 1..75: mol_type = other DNA
tttagatttcccgagttcacttaccaactcttatatcagccttgtaatcaacgcaggtgtgactgtctatggacg

SEQ ID NO: 545885 - DNA, 75 bp, synthetic construct
  source 1..75: mol_type = other DNA
gaattgtgtgcgtttcgccttcaatgattaacttttataagaaaagattaattaatagaaatatattatctgttt

SEQ ID NO: 545886 - DNA, 75 bp, synthetic construct
  source 1..75: mol_type = other DNA
agtcattcaggcatggcaaacgcttaaacacgatgcggtgctcatcgaggcgatggaaagtcgctcgttacgtta

SEQ ID NO: 545887 - DNA, 75 bp, synthetic construct
  source 1..75: mol_type = other DNA
atcgacgctgcatgcaagattgcccgcgatcagcaaattccattactgatcagcggtggtatcggtcactcgaca

SEQ ID NO: 545888 - DNA, 75 bp, synthetic construct
  source 1..75: mol_type = other DNA
tctggcatattccacatgaaaaaatcttgattgaagaccagtcaacaaactgcggagaaaatgcccgcttcagta

SEQ ID NO: 545889 - DNA, 75 bp, synthetic construct
  source 1..75: mol_type = other DNA
cagggcgcgaatgatagctcgcactgagattggtcgcgctactggcgcactgactcaggcacgagcgctggccgt

SEQ ID NO: 545890 - DNA, 75 bp, synthetic construct
  source 1..75: mol_type = other DNA
tgtataccaccgtgcaggatggtggtcgtcacggttttcgccagtcgggtatcagccattgcggcgcactggata

SEQ ID NO: 545891 - DNA, 75 bp, synthetic construct
  source 1..75: mol_type = other DNA
cggatttgatgttccgtcggttatggggtcatgcagtaccgatcttaaagtggggattggcgggttagaaggccg

SEQ ID NO: 545892 - DNA, 75 bp, synthetic construct
  source 1..75: mol_type = other DNA
gataatatccctgatttagaaaataaaattgatgcagtaatcaaatcttatgatttttatgccaaggctgcttat

SEQ ID NO: 545893 - DNA, 75 bp, synthetic construct
  source 1..75: mol_type = other DNA
ggtccgaaccgtttccggaaaaaggataaaatcaactggttactggatttactgtatgaacaaaacagagttgta

SEQ ID NO: 545894 - DNA, 75 bp, synthetic construct
  source 1..75: mol_type = other DNA
acaaccctgccctgaccgtacctgtgcgactcattccagaggagcttgaacttttcaactggataaaaagctatt

SEQ ID NO: 545895 - DNA, 75 bp, synthetic construct
  source 1..75: mol_type = other DNA
gaccgcgaagcactggaagaattaaaagttattgtggccgaactgtttgaaggtgaaatcgttgagccttatttc

SEQ ID NO: 545896 - DNA, 75 bp, synthetic construct
  source 1..75: mol_type = other DNA
gtttaaagataaaaaaaggacatatgttcggtttcgaagagtcgaaacgaaaaattctgtccattagattgccgt

SEQ ID NO: 545897 - DNA, 75 bp, synthetic construct
  source 1..75: mol_type = other DNA
caaaaaaacaggaaggtgattcgcaaggattgtagagagaattcactctttacaatacagactatcgacgaagcg

SEQ ID NO: 545898 - DNA, 75 bp, synthetic construct
  source 1..75: mol_type = other DNA
aatcaagtccttccactataactgaagatatgcaatcccttgatgagcgacttgctttccttgatatgagaatgg

SEQ ID NO: 545899 - DNA, 75 bp, synthetic construct
  source 1..75: mol_type = other DNA
aggtttgtatcgagtcatgtcgagtgaccgaagcgcggctggtaagcgctttcagaagtggttattccatgaggt

SEQ ID NO: 545900 - DNA, 75 bp, synthetic construct
  source 1..75: mol_type = other DNA
atataacaaatgctcactggtatttatcattgtatgttgcaatgataataatatctgaagaatccaagtcaaaat

SEQ ID NO: 545901 - DNA, 75 bp, synthetic construct
  source 1..75: mol_type = other DNA
tgcgtggtacgcgccgtctggtgctgattatcgtcggttttctgatctttattttcgccagctactcctcacagc

SEQ ID NO: 545902 - DNA, 75 bp, synthetic construct
  source 1..75: mol_type = other DNA
gtcgcgcagctggtagcctcatctctgaatatagtcagagaagttatcgctcaggcactggcaaacgagaacgga

SEQ ID NO: 545903 - DNA, 75 bp, synthetic construct
  source 1..75: mol_type = other DNA
gtgggcgaagttgccgagctgtttatgtggcggcatatggcgctgacctctgccgccgtcttaactcaactgaca

SEQ ID NO: 545904 - DNA, 75 bp, synthetic construct
  source 1..75: mol_type = other DNA
cgctcagcaaaattggagcaaaacgtactgccctatctgatatcaccgggccgctcgaaatacgactcgttgacc

SEQ ID NO: 545905 - DNA, 75 bp, synthetic construct
  source 1..75: mol_type = other DNA
atgaaaaattagtagaagatgtatcacgagttaaaggtaaagttgccaacgttgaaaaccgtctgaaactgttag

SEQ ID NO: 545906 - DNA, 75 bp, synthetic construct
  source 1..75: mol_type = other DNA
aaaatggtgcttatcaagttgccatttatcagtatttgttggctaaacagggaggccgcaaattatttgtctaca

SEQ ID NO: 545907 - DNA, 75 bp, synthetic construct
  source 1..75: mol_type = other DNA
acacaaacaacgaccgcagcaaccactactctcgccctgttttcaagcaagttctgaaagtaaacagcctccaag

SEQ ID NO: 545908 - DNA, 75 bp, synthetic construct
  source 1..75: mol_type = other DNA
ctcgtatgaatatgttcctgcacgatattgaagagtttgatgtgctgcgtggtgatactttggctgagccaaagt

SEQ ID NO: 545909 - DNA, 75 bp, synthetic construct
  source 1..75: mol_type = other DNA
ccacaaggttgtgctgattatgcgttttatacccatataatcaaaagtttaaaacccgacaccggtcgtgctgcc

SEQ ID NO: 545910 - DNA, 75 bp, synthetic construct
  source 1..75: mol_type = other DNA
aggcaatagcacgcgttaaaaatccattaccagtgcccgccgaatgccatttttgtggtgggaatgtacggattg

SEQ ID NO: 545911 - DNA, 75 bp, synthetic construct
  source 1..75: mol_type = other DNA
ttttgccgatttaaacgcgcaggttgagcaactcagcaagcgttgctcagaggcttttggctcacatggccgtta

SEQ ID NO: 545912 - DNA, 75 bp, synthetic construct
  source 1..75: mol_type = other DNA
accctgaatattggcggcatggcctggcggcccggtaaaaaacagttaaccaaagcggtttcattagatgatgat

SEQ ID NO: 545913 - DNA, 75 bp, synthetic construct
  source 1..75: mol_type = other DNA
ggttcgccagggggtaaaaataggcaccctgaatattggcggcatgggccggggggccgggaaaaaaacagttaa

SEQ ID NO: 545914 - DNA, 75 bp, synthetic construct
  source 1..75: mol_type = other DNA
tgcgttaaaaaatggcgatagcaaaacggttattgttgatgagatcactcgtaatgcacattatgccaacaggcg

SEQ ID NO: 545915 - DNA, 75 bp, synthetic construct
  source 1..75: mol_type = other DNA
cgacgttttaagcgaagattatatgcgtaccgcgagggcgaaaggggtgagcgaaacctgggttgtcctcaaaca

SEQ ID NO: 545916 - DNA, 75 bp, synthetic construct
  source 1..75: mol_type = other DNA
cagccgcttcatgcctacgctgtggctgactatcgccagtatgagctgggcagtgttgtttggcatggcggcggg

SEQ ID NO: 545917 - DNA, 75 bp, synthetic construct
  source 1..75: mol_type = other DNA
tttgacgaccatccagcatccgccgaacgcgcccagcatattcgcgatcgtatgagcgcggatggagttaagtaa

SEQ ID NO: 545918 - DNA, 75 bp, synthetic construct
  source 1..75: mol_type = other DNA
cgccaacgcggcatcagcccggcaggtcttgccaccagctttgaaaaactggcgaaactggaagaaggccgccaa

SEQ ID NO: 545919 - DNA, 75 bp, synthetic construct
  source 1..75: mol_type = other DNA
agggatgcaggtggcacttggtacaaatgccgtgcgagtagctgcggcctctgcgggcgggattgtcggcagttt

SEQ ID NO: 545920 - DNA, 75 bp, synthetic construct
  source 1..75: mol_type = other DNA
tctggtcagctggtactaccggcacaagacctatcagctgcttgccagcggaaaaatcagccggggtgaatatga

SEQ ID NO: 545921 - DNA, 75 bp, synthetic construct
  source 1..75: mol_type = other DNA
atgatcatgctgattctcgcgcctctggtgggcgtgctgggggtgcttttgctggcgtatggtgcctggctgatt

SEQ ID NO: 545922 - DNA, 75 bp, synthetic construct
  source 1..75: mol_type = other DNA
ccggggggctgtgcctgttctggtcgtggctggtggcgcgatatctcgaccgtacattgccgtctgtcagcggag

SEQ ID NO: 545923 - DNA, 75 bp, synthetic construct
  source 1..75: mol_type = other DNA
tggcacgtaaaacaatagttaaacgcgccagcaaatactggcctaaagcatcacgtcttgatagtgctattcacg

SEQ ID NO: 545924 - DNA, 75 bp, synthetic construct
  source 1..75: mol_type = other DNA
gaactattggttgctttattcacaagtgtagagagtaaaatcaatacaataataaagtttcttaacactgaagag

SEQ ID NO: 545925 - DNA, 75 bp, synthetic construct
  source 1..75: mol_type = other DNA
gttatataggaaaaattttttccagtatttgggaatccagccctacgttttatccaggagctgcgggtgcgctta

SEQ ID NO: 545926 - DNA, 75 bp, synthetic construct
  source 1..75: mol_type = other DNA
gatccgcgtttctccgcagtatttttaatgtctcccaaacacccacaactggaagaaatccgtaaagctatgaag

SEQ ID NO: 545927 - DNA, 75 bp, synthetic construct
  source 1..75: mol_type = other DNA
acttccctgactgacataaacgctctggcttacgggcgcggccccggtagctttaccggcgtgcgcattggtatt

SEQ ID NO: 545928 - DNA, 75 bp, synthetic construct
  source 1..75: mol_type = other DNA
ttaccctgtccggtggtgaaccgctggcgcagccggaatttgcccgcgagctgcttaaagcctgtaaagccaaag

SEQ ID NO: 545929 - DNA, 75 bp, synthetic construct
  source 1..75: mol_type = other DNA
agcccagagttattatttaaaaagaatgattgcatccgctgtgggaaatgtattgatgcttgcccacaacaggct

SEQ ID NO: 545930 - DNA, 75 bp, synthetic construct
  source 1..75: mol_type = other DNA
ggatcaattaagtgggggcaatgcaaactggtgtactcaaacgacacctatgaatcaaatggccttgattcagca

SEQ ID NO: 545931 - DNA, 75 bp, synthetic construct
  source 1..75: mol_type = other DNA
cctgtgtcagtctccggaattgctgtacttattgtcggaacactggagatgctccttttaatggggttcagataa

SEQ ID NO: 545932 - DNA, 75 bp, synthetic construct
  source 1..75: mol_type = other DNA
aatgggtgacggtagggacgggctggcaagcctggccggatctcggtaaagagagcggtttggccctgcgcgatg

SEQ ID NO: 545933 - DNA, 75 bp, synthetic construct
  source 1..75: mol_type = other DNA
atgaaacgtgcgggtctcaacattcctgatggctatgaagtcactggtgattttgaatttaacggcgggtttgac

SEQ ID NO: 545934 - DNA, 75 bp, synthetic construct
  source 1..75: mol_type = other DNA
tgtcgatattgttgaaggtcgttttgatgccgggatacgtctgggtgaaactgtggataaagatatgattgcagt

SEQ ID NO: 545935 - DNA, 75 bp, synthetic construct
  source 1..75: mol_type = other DNA
cagtgtggactggaacgacaacctttgtcgtggcgatgagaagaacgcagcaaggatttatcgggccagttgcga

SEQ ID NO: 545936 - DNA, 75 bp, synthetic construct
  source 1..75: mol_type = other DNA
tcttgcctgtggagagatggtgcagtcaggccgcccgttgaagcaggaacccaccgaaatgattcaggcgacagc

SEQ ID NO: 545937 - DNA, 75 bp, synthetic construct
  source 1..75: mol_type = other DNA
agtggtgggagcaccgtcctattttgccgctaaccccgtaccagaaacaccgcacgagctacaaacccatcggtg

SEQ ID NO: 545938 - DNA, 75 bp, synthetic construct
  source 1..75: mol_type = other DNA
tgtcgatattgttgaagggcgttttgatgccgggatacgtctgggtgaaactgttgataaagatatgattgcagt

SEQ ID NO: 545939 - DNA, 75 bp, synthetic construct
  source 1..75: mol_type = other DNA
tgtcgatattgttgaaggccgttttgatgccgggatacgtctgggtgaaactgtcgataatgatatgattgcagt

SEQ ID NO: 545940 - DNA, 75 bp, synthetic construct
  source 1..75: mol_type = other DNA
ggcgcaatgtccgggcaaaatcaggtttaaaccgttcgatactggatcagggctggtatgaaatacgccgccagc

SEQ ID NO: 545941 - DNA, 75 bp, synthetic construct
  source 1..75: mol_type = other DNA
acgcatcgcggcagacatggcggcgtgtggtgtggtgggtgagtccaccaacctgacggcggcgtatctggcggc

SEQ ID NO: 545942 - DNA, 75 bp, synthetic construct
  source 1..75: mol_type = other DNA
tggcgagtatcgcgccgcaggccagcgcggagcctgcacacctcacttcgttagccgctgatgttgccgcgcttc

SEQ ID NO: 545943 - DNA, 75 bp, synthetic construct
  source 1..75: mol_type = other DNA
atgatagtcattgaggatttgaaggtcagcaacatttcaaagtcaacagcgggtacggtcagccagccggggcgc

SEQ ID NO: 545944 - DNA, 75 bp, synthetic construct
  source 1..75: mol_type = other DNA
gaaatgcgccgccagcttgagtacaagcagctctggcgtggcggtcaggtgcttgctgttccgccagcgtacaca

SEQ ID NO: 545945 - DNA, 75 bp, synthetic construct
  source 1..75: mol_type = other DNA
aagagagcggaaagcggtaaaaacgccggtcaggaatggctggcggtggttggttattacccgaaattaggccag

SEQ ID NO: 545946 - DNA, 75 bp, synthetic construct
  source 1..75: mol_type = other DNA
gggtgaaagtgtggataaggatatgattgcagtgcgaattgggccggatatgcggatggccatggtgggatcgcc

SEQ ID NO: 545947 - DNA, 75 bp, synthetic construct
  source 1..75: mol_type = other DNA
caaaaatggatcaatgcatattgacgtccaccctgatatcgccgagcggcttaacaatattttatcagctatcgt

SEQ ID NO: 545948 - DNA, 75 bp, synthetic construct
  source 1..75: mol_type = other DNA
gcaacagtattcgttttcgggtctacaaaaacggatcgatgcacattgatgtgcatcctgatatcgccgaacggc

SEQ ID NO: 545949 - DNA, 75 bp, synthetic construct
  source 1..75: mol_type = other DNA
ttttgctgatttaaatgcacaggttgagcaactcagcaggcgttgttcagaggcttttggctcatatggccgtta

SEQ ID NO: 545950 - DNA, 75 bp, synthetic construct
  source 1..75: mol_type = other DNA
gattggctatgacgatatcgaactggcaagctttatgacgccaccattaaccactatccatcaaccgaaagatga

SEQ ID NO: 545951 - DNA, 75 bp, synthetic construct
  source 1..75: mol_type = other DNA
aaggataaagcgacaggaaaatcacggagtgatgtgcagcaacgcattcagcagtttcacagccaggaattttta

SEQ ID NO: 545952 - DNA, 75 bp, synthetic construct
  source 1..75: mol_type = other DNA
tgcactctcaaaagacgaagttgatttggataccttagttttagaagcgtttcttcagtgccaagtttctgcgag

SEQ ID NO: 545953 - DNA, 75 bp, synthetic construct
  source 1..75: mol_type = other DNA
ggcggatttatcaggttcgacaaaaggacagctgcaggcgttcagtgagcatccaccagcagataagaacaaata

SEQ ID NO: 545954 - DNA, 75 bp, synthetic construct
  source 1..75: mol_type = other DNA
cgatgagaagaaggcagcaaggatttatcgggcaagttgtgaacaaaagcctggtgattacggtctgtggtcaat

SEQ ID NO: 545955 - DNA, 75 bp, synthetic construct
  source 1..75: mol_type = other DNA
aatttgctgccagaaagaattgatgcagcattatcaggatttggtatcgcctgtgttcccgaaaacgcggttcag

SEQ ID NO: 545956 - DNA, 75 bp, synthetic construct
  source 1..75: mol_type = other DNA
atttctcgcgcgttaggcgataacatcaatggtcagccggtgaattacaaagtgtatatggcgaaggatgtgaac

SEQ ID NO: 545957 - DNA, 75 bp, synthetic construct
  source 1..75: mol_type = other DNA
cccgtattgaattgcgccgcgcgctggccgatttctcaggatcgacgaagggacagctacaggcgttcagtgagc

SEQ ID NO: 545958 - DNA, 75 bp, synthetic construct
  source 1..75: mol_type = other DNA
tccgctttatgttcttgagacaaggagccgtcgccgacctttaccgcctattaaggatacggagttcgcttgttc

SEQ ID NO: 545959 - DNA, 75 bp, synthetic construct
  source 1..75: mol_type = other DNA
tgcccgttggttttgtgaaggccgaaccaacttgtgtcacaacgctatcgatcgctggctggagaaacagccaga

SEQ ID NO: 545960 - DNA, 75 bp, synthetic construct
  source 1..75: mol_type = other DNA
gcactttatttcagccgttcgccgattccgtatccgcgtaatgctgaaaaagcgcgctacctgaaacacgtcggt

SEQ ID NO: 545961 - DNA, 75 bp, synthetic construct
  source 1..75: mol_type = other DNA
gttggtaaaccgatgatccagcatgtttacgagcgtgcgttacaggtggcgggcgttgcggaagtttgggtggca

SEQ ID NO: 545962 - DNA, 75 bp, synthetic construct
  source 1..75: mol_type = other DNA
atgaagaaaaatgctattcctcccagacctaaacaccgcactggcacagaacgccacgctaaccgtttctcaacc

SEQ ID NO: 545963 - DNA, 75 bp, synthetic construct
  source 1..75: mol_type = other DNA
atctggtcaccccggcgtccgcggaagatgaacaggtgtccggagaacgggtcatccttcaggacgttctgaact

SEQ ID NO: 545964 - DNA, 75 bp, synthetic construct
  source 1..75: mol_type = other DNA
aaattactcgacgatgcgataagtcaggcgcagcatcagccgcgccacgttttactggtggatcgcgggctggcg

SEQ ID NO: 545965 - DNA, 75 bp, synthetic construct
  source 1..75: mol_type = other DNA
cgtgaaaagtcattagtgctggataaagtgttttcagccctacgcagcaaaggcgttaaaaggggagatattctc

SEQ ID NO: 545966 - DNA, 75 bp, synthetic construct
  source 1..75: mol_type = other DNA
ttaggccaggcggcaccgggtaaaagtaccggtgaagcaatggagctaatggaacaactggcgagcaaactgcct

SEQ ID NO: 545967 - DNA, 75 bp, synthetic construct
  source 1..75: mol_type = other DNA
ttttgagcagaacgttagctggagtcttggcgcactcaatgacgatgagcgcgagcggttacatcgctggtatca

SEQ ID NO: 545968 - DNA, 75 bp, synthetic construct
  source 1..75: mol_type = other DNA
gccgggtaagccactgctcgatattgttggtaaaccgatgatccagcatgtttacgagcgtgcgttacaggtggc

SEQ ID NO: 545969 - DNA, 75 bp, synthetic construct
  source 1..75: mol_type = other DNA
tgatgcataaagtcgaggcagatatctacattaacctgcagggcgacgaaccaatgattcgcccgcaggatgtag

SEQ ID NO: 545970 - DNA, 75 bp, synthetic construct
  source 1..75: mol_type = other DNA
atgcaacagcggctgtactgcacagggattatttatcagttgatatgctgtgccatgatattgctattgccgaaa

SEQ ID NO: 545971 - DNA, 75 bp, synthetic construct
  source 1..75: mol_type = other DNA
agagaagctcttttctattctcgataaaggtgaataccgcccacttggttcaagtgggccaacatattcaatttc

SEQ ID NO: 545972 - DNA, 75 bp, synthetic construct
  source 1..75: mol_type = other DNA
cgaaaaccatatgcctcgtgcgtttactgaagcgcaggctgaagccatggtgacgattgtcttcagtgcaggcgc

SEQ ID NO: 545973 - DNA, 75 bp, synthetic construct
  source 1..75: mol_type = other DNA
ctgaccgagccggacagcaacctgacggcggacggcgaagctgcgccggtggatgtccaactggtttacctgagc

SEQ ID NO: 545974 - DNA, 75 bp, synthetic construct
  source 1..75: mol_type = other DNA
atactcaacgaatcttacctatggtgcaggatatcctgaccaccagcggaacctccctgactgacataaatgcat

SEQ ID NO: 545975 - DNA, 75 bp, synthetic construct
  source 1..75: mol_type = other DNA
gaaaaactggaattgaaaaaattcgatccagttgttcgccagcacgtgatctacaaagaagcgaaaatcaaataa

SEQ ID NO: 545976 - DNA, 75 bp, synthetic construct
  source 1..75: mol_type = other DNA
tgcagttgccagagtggatgttacggagcagcaatttgccgcgatcactggaaaaacaccttctgaagttttaac

SEQ ID NO: 545977 - DNA, 75 bp, synthetic construct
  source 1..75: mol_type = other DNA
tgagtcattgcacgacgcatctgaatataaaaataagatgcttcaggagcacgggcttaaccaggatgatatctt

SEQ ID NO: 545978 - DNA, 75 bp, synthetic construct
  source 1..75: mol_type = other DNA
atgcgaattctggctatcgataccgcgacagaggcctgctctgtcgccctgtggaacgacggtactgtcaacgct

SEQ ID NO: 545979 - DNA, 75 bp, synthetic construct
  source 1..75: mol_type = other DNA
ggggaggggatgatggcctgatgattatcggggcccttctcatcatgatcacagtgatgtggtttggctttcgtg

SEQ ID NO: 545980 - DNA, 75 bp, synthetic construct
  source 1..75: mol_type = other DNA
cgactggcggagatgtcgtttaataccacgccagagcagcgtctgctggtcgatgcgttgtttggcggtaaagat

SEQ ID NO: 545981 - DNA, 75 bp, synthetic construct
  source 1..75: mol_type = other DNA
tggcttacgggcgcggccccggtagctttaccggcgtgcgcattggtattggcatcgcgcaagggctggcgcttg

SEQ ID NO: 545982 - DNA, 75 bp, synthetic construct
  source 1..75: mol_type = other DNA
ttttaccggcgtgcgcattggtataggcattgcgcaggggctggcacttggcgcggcgctgccgatgattggcgt

SEQ ID NO: 545983 - DNA, 75 bp, synthetic construct
  source 1..75: mol_type = other DNA
gtggcggtggaacatgccgaaccggtttatttacgtaacaacgtcgcatggaagaaacttccgggcaaagaatga

SEQ ID NO: 545984 - DNA, 75 bp, synthetic construct
  source 1..75: mol_type = other DNA
ctgaccgctaaaattgatctgcaaggcgcgcagaccttattcgatatgggctgcggaccgggtaccgtatcgctg

SEQ ID NO: 545985 - DNA, 75 bp, synthetic construct
  source 1..75: mol_type = other DNA
ggtgcgttatgaaaaaatttcaggtcagaaatttcccggacgatgcatatttcgccctggaacagttagcaaacg

SEQ ID NO: 545986 - DNA, 75 bp, synthetic construct
  source 1..75: mol_type = other DNA
accgtggcatttgaagagaagtatggttcccagctggagctgatatttcgttttatcgatcgtgcgctggcaata

SEQ ID NO: 545987 - DNA, 75 bp, synthetic construct
  source 1..75: mol_type = other DNA
cccctgtttatgcaggggcgtgtcctgctggagcctgagccggaacgttattcatctttcgccagtggtgctgtt

SEQ ID NO: 545988 - DNA, 75 bp, synthetic construct
  source 1..75: mol_type = other DNA
gcccgtcagctatcagccgcctggaaagcaatcctttaggggcaagcatgaaaactttatcaaaatatgcccaag

SEQ ID NO: 545989 - DNA, 75 bp, synthetic construct
  source 1..75: mol_type = other DNA
atgttatatatagataaggcaacaattttgaagtttgatctggagatgcttaaaaagcatcgcagagcaatccag

SEQ ID NO: 545990 - DNA, 75 bp, synthetic construct
  source 1..75: mol_type = other DNA
tgatttggctgatttctttgtcactcttcgggcgctgtacaagagttttgtcaaacttgatgtaaacgtcaaagg

SEQ ID NO: 545991 - DNA, 75 bp, synthetic construct
  source 1..75: mol_type = other DNA
acgtggcgttaggccatgtgaagaaagggatgcaggtggcacttggtacaaatgccgtgcgagtagctgcggcct

SEQ ID NO: 545992 - DNA, 75 bp, synthetic construct
  source 1..75: mol_type = other DNA
aaaagcttactggagtattaatagcagattatacgaagcaagcagactttgaaatcctaacggacttattcacaa

SEQ ID NO: 545993 - DNA, 75 bp, synthetic construct
  source 1..75: mol_type = other DNA
ttatttaaacatacccagattaaagcaaggagatagtttcagaacagaattttccgaattgtgcataggggataa

SEQ ID NO: 545994 - DNA, 75 bp, synthetic construct
  source 1..75: mol_type = other DNA
atgatccggtaatgcggcaggtcttcgggaatgagcgggttattcagcgtgccggcgggcttccttcccttgagc

SEQ ID NO: 545995 - DNA, 75 bp, synthetic construct
  source 1..75: mol_type = other DNA
gatccggagtcgccagaatctttcatgctcaggccaaaacgccgccgctgggtaaatgagacatacacccgctgg

SEQ ID NO: 545996 - DNA, 75 bp, synthetic construct
  source 1..75: mol_type = other DNA
tatctccaagattattgcgccagctcaactaaaaaaatgtacaaaaagataatgccagaactccggaaattgaat

SEQ ID NO: 545997 - DNA, 75 bp, synthetic construct
  source 1..75: mol_type = other DNA
aagcaatcctttaggggcaagtatgaaaactttggctaaatatgctcatgcctgcggcgcagccatcgatattcg

SEQ ID NO: 545998 - DNA, 75 bp, synthetic construct
  source 1..75: mol_type = other DNA
gccttatatcctgtcagcattaggtattaaagtaccgtccgcaggacatcatggggcttgccctgcctgtggtgg

SEQ ID NO: 545999 - DNA, 75 bp, synthetic construct
  source 1..75: mol_type = other DNA
gccggatgtgcaggaactgcccgttaagcccgccaggcaaaaagcccctaaacgcgatatgagccttaccgtggc

SEQ ID NO: 546000 - DNA, 75 bp, synthetic construct
  source 1..75: mol_type = other DNA
atcctttgattatccggtcgttattaccacgcatcaggcactacaggttttttgtgagagagcaacctttgatag

SEQ ID NO: 546001 - DNA, 75 bp, synthetic construct
  source 1..75: mol_type = other DNA
gcacggcttcgcgtctatacgactcatctggtcagcacctcgttcgtctctccagccattcagcgggcggctggt

SEQ ID NO: 546002 - DNA, 75 bp, synthetic construct
  source 1..75: mol_type = other DNA
tccactggatccagcgcgcctgggaagaggactggagtgacctgccacgctgcgatattgccgtggcttcccgct

SEQ ID NO: 546003 - DNA, 75 bp, synthetic construct
  source 1..75: mol_type = other DNA
tgtttgaagaacttcatggcttcagtagcgggaaaaccctggctgagcatcttgagcagcacgtagcgcattatc

SEQ ID NO: 546004 - DNA, 75 bp, synthetic construct
  source 1..75: mol_type = other DNA
tcaggacgatgtcatcattcggcgggtatcggtcgtttgttttagtttatttttcgcagcaatctgctggcagcg

SEQ ID NO: 546005 - DNA, 75 bp, synthetic construct
  source 1..75: mol_type = other DNA
acaagctgcgcaaattgttcattaccatatgcaaccggaattcaaaaaaaataatctcttctccgggttaacgca

SEQ ID NO: 546006 - DNA, 75 bp, synthetic construct
  source 1..75: mol_type = other DNA
aataaagatattgcattcatctcaacaattattgggctaattgatcattttatcggcccaataaccattgctggc

SEQ ID NO: 546007 - DNA, 75 bp, synthetic construct
  source 1..75: mol_type = other DNA
cactggatgctctggcaaatcatctgtttgcaaatccgcaacgctcgctgccgtgtcttgcctggacattgctga

SEQ ID NO: 546008 - DNA, 75 bp, synthetic construct
  source 1..75: mol_type = other DNA
aagcaatcctttaggggcaagcatgaaaactttatcaaaatatgcccaagcatgcggtgctacgattaatattaa

SEQ ID NO: 546009 - DNA, 75 bp, synthetic construct
  source 1..75: mol_type = other DNA
tattgaggttggctacgggctggaaggggtggttaccgacctgcaagcggcgaagattatcagggatatattgat

SEQ ID NO: 546010 - DNA, 75 bp, synthetic construct
  source 1..75: mol_type = other DNA
gaaagtaaaaacctggccttcagccaggtggacctgctgacagaggcgaagtcgtttgctgcagaaggaaccagt

SEQ ID NO: 546011 - DNA, 75 bp, synthetic construct
  source 1..75: mol_type = other DNA
ggccatccgccgtgaaacggaacgccgtgcagatgaaattgtccgtaaaatggcagagaacaaacctgacctgcc

SEQ ID NO: 546012 - DNA, 75 bp, synthetic construct
  source 1..75: mol_type = other DNA
atccgcagccgtatgtggcactgccggcgtttgaccgtaacggcaggtccgccggtatctggctgaacccactga

SEQ ID NO: 546013 - DNA, 75 bp, synthetic construct
  source 1..75: mol_type = other DNA
cggagaaaagtgtcccccggacggccggttacagcgatgccgtcagtgttctggcacaggaccgtccgtcgctgg

SEQ ID NO: 546014 - DNA, 75 bp, synthetic construct
  source 1..75: mol_type = other DNA
gccgtaacggagagagcctgctggctgataatatgcaggatggcgtccggattgcccgtgataatcctgacagcg

SEQ ID NO: 546015 - DNA, 75 bp, synthetic construct
  source 1..75: mol_type = other DNA
ggactccgcgtctccggcggtgaccgcttgcaggtggcatccgtcagcgaggacgcgatgacggttgttgtgccg

SEQ ID NO: 546016 - DNA, 75 bp, synthetic construct
  source 1..75: mol_type = other DNA
ttcttcgccatattctcgaaggtaaggaggcggtcacgccgctgatggagagagtacccggcgaactcatggaga

SEQ ID NO: 546017 - DNA, 75 bp, synthetic construct
  source 1..75: mol_type = other DNA
cagagcaggctgtcagggagattgccgggcaggagcgtgaccggactgtcacttctgaacgggaaaccgcgctgc

SEQ ID NO: 546018 - DNA, 75 bp, synthetic construct
  source 1..75: mol_type = other DNA
ggtgaccgtacatccggagaaaagtgtcccccggacggccggttacagcgatgccgtcagtgttctggcacagga

SEQ ID NO: 546019 - DNA, 75 bp, synthetic construct
  source 1..75: mol_type = other DNA
tgccattaacaatgccgtacagaaaggaactgcccacgatgtgtttgagccgaaaccggaccgggaggtcatgaa

SEQ ID NO: 546020 - DNA, 75 bp, synthetic construct
  source 1..75: mol_type = other DNA
tggtgtccggattgcccgtgataatcctgacagcggtgtggtggtgagaattgccggtgaaggtcgtccgtggaa

SEQ ID NO: 546021 - DNA, 75 bp, synthetic construct
  source 1..75: mol_type = other DNA
agagcaacatattgacctggcctatgccatcaccgcccacggtgcgcagggggcgagtgaaacctttgccatcgc

SEQ ID NO: 546022 - DNA, 75 bp, synthetic construct
  source 1..75: mol_type = other DNA
atgccgtacagaaaggaactgcccacgatgtgctggagccgaaaccggaccgggaggtcatgaatgcgcagcggc

SEQ ID NO: 546023 - DNA, 75 bp, synthetic construct
  source 1..75: mol_type = other DNA
gaatgcaaagcacctggcaaaccaccacgcaccgaccagctgcgcgagcatgaacggctgcgcgcgctgggcttt

SEQ ID NO: 546024 - DNA, 75 bp, synthetic construct
  source 1..75: mol_type = other DNA
attgatgtttccattcaggccgccaccaaatatctggtaggtcactcggatgcaatgatcggcactgcggtatgt

SEQ ID NO: 546025 - DNA, 75 bp, synthetic construct
  source 1..75: mol_type = other DNA
ccaaatatctggttgggcattcagatgcgatgattggcactgccgtgtgcaatgcccgttgctgggagcagctgc

SEQ ID NO: 546026 - DNA, 75 bp, synthetic construct
  source 1..75: mol_type = other DNA
tttcacaggaggggccggatgtgcagcaggcggtgacacaggccattgccggattaagtgaacgaaaagtgcagt

SEQ ID NO: 546027 - DNA, 75 bp, synthetic construct
  source 1..75: mol_type = other DNA
cttaaagattctccctcacagccattgcaacagtcactgaaagaccctgagcaggcctgcaaaaatttcttccgg

SEQ ID NO: 546028 - DNA, 75 bp, synthetic construct
  source 1..75: mol_type = other DNA
aaatgcatattgataccgatgaggccaacgccgcaggcgctgatagccctgacgtttttgccacactggtgtcag

SEQ ID NO: 546029 - DNA, 75 bp, synthetic construct
  source 1..75: mol_type = other DNA
aagagctatcacggtgaatggaaacgcaagccagggaacgatcgaggcgctaatcaatgtgatctatacctggca

SEQ ID NO: 546030 - DNA, 75 bp, synthetic construct
  source 1..75: mol_type = other DNA
tgcagagcggctgttcagtacggcgcgggagctgcgggacgtggcggcagggcgtgccgttcttcgtcaggcggg

SEQ ID NO: 546031 - DNA, 75 bp, synthetic construct
  source 1..75: mol_type = other DNA
atgaagcagcatgtgcaggtgtacaccgataaccgtcagggctggacggatgccattaacaatgccgtacagaaa

SEQ ID NO: 546032 - DNA, 75 bp, synthetic construct
  source 1..75: mol_type = other DNA
ataaccagccgtggcctgcgcactttgggtgttcgcctgcgtcaacatcatgaaagcagtctgaaagtggctgaa

SEQ ID NO: 546033 - DNA, 75 bp, synthetic construct
  source 1..75: mol_type = other DNA
tcgataacacctgggcggccggtgtgctgtttaaggcgctggattttggcattgatgtttccattcaggccgcta

SEQ ID NO: 546034 - DNA, 75 bp, synthetic construct
  source 1..75: mol_type = other DNA
gtgctgtttatctattttggctcctcgcagctgctgctgacgctttcggatggcttcactatcaatcttgggttc

SEQ ID NO: 546035 - DNA, 75 bp, synthetic construct
  source 1..75: mol_type = other DNA
gctgaaggtgtcacactgtacaccccggacaaaatccgggtggggaccggcgaccggatgcgcttcacgaagagt

SEQ ID NO: 546036 - DNA, 75 bp, synthetic construct
  source 1..75: mol_type = other DNA
ccgcatgcaggatggcagtaacaggcatcgtcccggctacgatctgaccttctccgcccccaaaagtgtctccat

SEQ ID NO: 546037 - DNA, 75 bp, synthetic construct
  source 1..75: mol_type = other DNA
tcgtgtacagggaaatcattaccccgtttctggcccggagattttttcccgacgttctatggctgtcatctggct

SEQ ID NO: 546038 - DNA, 75 bp, synthetic construct
  source 1..75: mol_type = other DNA
aacggtcggcatactgccgccggaaaatggtgtgattgaacgggcacgcgccggtatcgatgaggccatcagtcg

SEQ ID NO: 546039 - DNA, 75 bp, synthetic construct
  source 1..75: mol_type = other DNA
tatatcgaccatcgtcaatcaaagaagaacgtaaaggtgctgaaaagaaactaaagattgttcacaaaggcgatg

SEQ ID NO: 546040 - DNA, 75 bp, synthetic construct
  source 1..75: mol_type = other DNA
cctcctttacggtggtttctgagcagataaaggcgcgtgccggtgagacattgctggaaaccgctatcagtctgc

SEQ ID NO: 546041 - DNA, 75 bp, synthetic construct
  source 1..75: mol_type = other DNA
ggaagcggtccgggaggttgcccgggaaaatctgctgcaggagcgtctgcagcagatagagcgggatatggttcg

SEQ ID NO: 546042 - DNA, 75 bp, synthetic construct
  source 1..75: mol_type = other DNA
gcgggtagtctggtcccacaaaataaacggctggagagcggatatctgtatctcggtaggccccgtcaaacagat

SEQ ID NO: 546043 - DNA, 75 bp, synthetic construct
  source 1..75: mol_type = other DNA
agtagaagatgatgtgatgattggtgcgggtagcctggtcccacaaaataaacggctggagagcggatatctgta

SEQ ID NO: 546044 - DNA, 75 bp, synthetic construct
  source 1..75: mol_type = other DNA
tttccacaaatcggtcagcgcgtaatgatcgacgatagcagcgtcgtgattggtgacgttcgtctggctgatgat

SEQ ID NO: 546045 - DNA, 75 bp, synthetic construct
  source 1..75: mol_type = other DNA
aaaacctatggtggccaggtctggatcgataacactgaccagggagacgggatccacatgatcccgcaaccgcca

SEQ ID NO: 546046 - DNA, 75 bp, synthetic construct
  source 1..75: mol_type = other DNA
gcgtactgcctggatccatgagcaggcaaagtattatctcaacgctggcgtcccgattgaaattaaagtggtatg

SEQ ID NO: 546047 - DNA, 75 bp, synthetic construct
  source 1..75: mol_type = other DNA
agaaattcggcattaatgaaaacatgacgcacgtagaaaaagggggaaccgcagaattcggaaaaaatcgtacgc

SEQ ID NO: 546048 - DNA, 75 bp, synthetic construct
  source 1..75: mol_type = other DNA
gcgtgccggtgagacattgctggaaaccgctatcagtctgcagaaaaccgggcttcacacgccggcacagcaggc

SEQ ID NO: 546049 - DNA, 75 bp, synthetic construct
  source 1..75: mol_type = other DNA
gaactggtcatgatggcccgggaacaggggcgggaggtgcagattatcgctgctgaccgtcgctcgcagatggaa

SEQ ID NO: 546050 - DNA, 75 bp, synthetic construct
  source 1..75: mol_type = other DNA
caccgacaaggataattactatgtgctgggcagcatgggagaacgctgggccggtcagggggctgaacagcttga

SEQ ID NO: 546051 - DNA, 75 bp, synthetic construct
  source 1..75: mol_type = other DNA
aaacctgacctgccggatggcagaacagagcaggctgtcagggagattgccgggcaggaacgtgaccggactgcc

SEQ ID NO: 546052 - DNA, 75 bp, synthetic construct
  source 1..75: mol_type = other DNA
aaaatctgctgcaggagcgtctgcagcagatggagcgggatatggttcgtgacctgcagaaagagaaaaccctgg

SEQ ID NO: 546053 - DNA, 75 bp, synthetic construct
  source 1..75: mol_type = other DNA
ccgggtggggaccggcgaccggatgcgcttcacgaagagtgaccgggagcgcggttatgtggccaacagcgtctg

SEQ ID NO: 546054 - DNA, 75 bp, synthetic construct
  source 1..75: mol_type = other DNA
catgacacgcagctgcagcagcgcagcggagaaacgccggatttcagcaacacgctgttcctgctcgatgagagc

SEQ ID NO: 546055 - DNA, 75 bp, synthetic construct
  source 1..75: mol_type = other DNA
ggctggccggagattttgcggccagcgtgaaagccggagaagagagcgtggcacaggtcagcggggtacgggaac

SEQ ID NO: 546056 - DNA, 75 bp, synthetic construct
  source 1..75: mol_type = other DNA
ggatgcgcagttcgtggccctgcagggcagccgtaacggagaaagcctgttggctgataatatgcaggatggcgt

SEQ ID NO: 546057 - DNA, 75 bp, synthetic construct
  source 1..75: mol_type = other DNA
gctgatttcgccccgggaggcggtggctgaaggcgtcacactgtacaccccggacaccatccgggtgggaaccgg

SEQ ID NO: 546058 - DNA, 75 bp, synthetic construct
  source 1..75: mol_type = other DNA
ggtcacggcagaggtgctggcacagcggcaggctgaagaggccatccgccgtgaaacggaacgccgcgcagatga

SEQ ID NO: 546059 - DNA, 75 bp, synthetic construct
  source 1..75: mol_type = other DNA
ggcagccgtaacggagagagcctgctggctgataatatgcaggatggcgtccggattgcccgtgataatcctgac

SEQ ID NO: 546060 - DNA, 75 bp, synthetic construct
  source 1..75: mol_type = other DNA
agcaggtcatggtgcctgtcctgaacacagcgaatatacgcgacggggagttgcgtcgtctctccacctgggaga

SEQ ID NO: 546061 - DNA, 75 bp, synthetic construct
  source 1..75: mol_type = other DNA
ttgaggagtcatggccatgatgatgatctacggcatgtttggtttgagctgcgcacgctgccgcatcagcagtta

SEQ ID NO: 546062 - DNA, 75 bp, synthetic construct
  source 1..75: mol_type = other DNA
tttttatgctgcgcaccaccccttaccagcaactccagcactcgcaggaatggaggcacgtaaaaaacgagcggg

SEQ ID NO: 546063 - DNA, 75 bp, synthetic construct
  source 1..75: mol_type = other DNA
tgttattgctggtggtactgggtatcgctgctggtgtgggcgtctggaaagttcgccaccttgctgacagcaaat

SEQ ID NO: 546064 - DNA, 75 bp, synthetic construct
  source 1..75: mol_type = other DNA
agtacgctgctgctacggttgcctgtattaccgcccctttactgatggtgaccatcaggcggtgctggagagtgt

SEQ ID NO: 546065 - DNA, 75 bp, synthetic construct
  source 1..75: mol_type = other DNA
tttatcgtaacgccattacctcctgatgcaattctaatcagcaaagaatcgcacgcagattctgtaagccacttc

SEQ ID NO: 546066 - DNA, 75 bp, synthetic construct
  source 1..75: mol_type = other DNA
gttctttctggtgtgctttatcctgaaattacaggtggcgaagtgtcgctgtctctgctgaccacgcaggcgtat

SEQ ID NO: 546067 - DNA, 75 bp, synthetic construct
  source 1..75: mol_type = other DNA
gtacttagcggcacgctgtaccccgaaataagtggcggtgatgtgtcgcttgtcatgctggaaactatggccttt

SEQ ID NO: 546068 - DNA, 75 bp, synthetic construct
  source 1..75: mol_type = other DNA
catcgttcagcgatatgctgtccggcttcaaagataaagtgacatcatcccttaacagcgcggccagttcagtta

SEQ ID NO: 546069 - DNA, 75 bp, synthetic construct
  source 1..75: mol_type = other DNA
gatatgtcactgcaaatcgaactcaacattggtaaggatttacagtttattcgcgttaacggcacgctggttggt

SEQ ID NO: 546070 - DNA, 75 bp, synthetic construct
  source 1..75: mol_type = other DNA
gtcattaccgataaagccgaagttctgatgttttatgccgcgcgcgttcaactggtagaaacggtcatcaaacca

SEQ ID NO: 546071 - DNA, 75 bp, synthetic construct
  source 1..75: mol_type = other DNA
caattgcgtgaggctccgtatatcaagcacacgctgagcgacgataagtacgccaccgtagcgcaggcacttgaa

SEQ ID NO: 546072 - DNA, 75 bp, synthetic construct
  source 1..75: mol_type = other DNA
agcgatgtaaatctgattaagaaggtgagcggaaaaatcagcgtggatgccatcaatgactggggcggagttcag

SEQ ID NO: 546073 - DNA, 75 bp, synthetic construct
  source 1..75: mol_type = other DNA
gcaactcccgccttggccttgattcgtgctaaagcgcttgggtcgaatcccgtttggcaaaatatggtggctatg

SEQ ID NO: 546074 - DNA, 75 bp, synthetic construct
  source 1..75: mol_type = other DNA
ccgggtgaccgcagcggcgaagcgtacccttgcatccccgccagcccggctaagatggaggcacggcaccgcccg

SEQ ID NO: 546075 - DNA, 75 bp, synthetic construct
  source 1..75: mol_type = other DNA
acattttagcggcggggcacgccgttcttgcctgtggagagatggtgcagtcaggccgcccgttgaagcaggaac

SEQ ID NO: 546076 - DNA, 75 bp, synthetic construct
  source 1..75: mol_type = other DNA
gcagacgctggaaggtctgctggcgtcgaatgaaaaaagttacatcaccgcgctgcaccagaacgcacagcggct

SEQ ID NO: 546077 - DNA, 75 bp, synthetic construct
  source 1..75: mol_type = other DNA
cgctgatccaggcgatcgcgctgttgcaccagtaccagcgggagatcaaacgcgtggagcatcgcgggcaggtgg

SEQ ID NO: 546078 - DNA, 75 bp, synthetic construct
  source 1..75: mol_type = other DNA
tatgactccggcaagttggggcagaacgcggacaggttgcccttaagttgcccacatgttggggctaagttgggg

SEQ ID NO: 546079 - DNA, 75 bp, synthetic construct
  source 1..75: mol_type = other DNA
aagcgatccatgcggcgcagcgttacgcgcagacgctggaaggactgctggcggctaacgaaaaaagttacatca

SEQ ID NO: 546080 - DNA, 75 bp, synthetic construct
  source 1..75: mol_type = other DNA
acggcggcttacggggtgaacggcttcaccggtgagatgcgggccgcactgcgggcacacggcgttaagcaggta

SEQ ID NO: 546081 - DNA, 75 bp, synthetic construct
  source 1..75: mol_type = other DNA
atcactgcttcggctgtaacgcaggcggatcggtgctgaactgggtgatgcagacggaaaaactcagcctgcgta

SEQ ID NO: 546082 - DNA, 75 bp, synthetic construct
  source 1..75: mol_type = other DNA
gcgaagataagcatgtctttttttcacgtgaacaaatgatacaaataaaaagtctctacatcccttcaaaaatcc

SEQ ID NO: 546083 - DNA, 75 bp, synthetic construct
  source 1..75: mol_type = other DNA
gctgggcgacaatcccgccgtggtgccgctggtaaccaaagatgaaccggaaatcttcgcggaagatgaagcggg

SEQ ID NO: 546084 - DNA, 75 bp, synthetic construct
  source 1..75: mol_type = other DNA
cccggcagccaggaaaacatcacatcgtaacagtaatacgccggaaagccgcccgacaccccatgacggtgcgcc

SEQ ID NO: 546085 - DNA, 75 bp, synthetic construct
  source 1..75: mol_type = other DNA
agtgctggtacggatgtgccgcaagttggggaagatgaaaaaacactgttcccggcagccaggaaaacatcacat

SEQ ID NO: 546086 - DNA, 75 bp, synthetic construct
  source 1..75: mol_type = other DNA
catcagatccgccatgcgtttgatcgcgccacgtttaaactgatcgacaagctgaaaaacgatccggaaatggca

SEQ ID NO: 546087 - DNA, 75 bp, synthetic construct
  source 1..75: mol_type = other DNA
gtacccgtagtaaagccataggcattgcccgcaatgtcggcgctcattacgtgctgtactccagcgcctctggca

SEQ ID NO: 546088 - DNA, 75 bp, synthetic construct
  source 1..75: mol_type = other DNA
gatcaggaaaacagccgtatttttctgccgaaactgggctggatgctggcgtggctaaactcgccacgctgtcag

SEQ ID NO: 546089 - DNA, 75 bp, synthetic construct
  source 1..75: mol_type = other DNA
aaagagcaggtcatggtgcctgtcctgaacacagcgaatatacgtgacggggagctgcgtcgtctctccacctgg

SEQ ID NO: 546090 - DNA, 75 bp, synthetic construct
  source 1..75: mol_type = other DNA
tcggtgccgacgatcccgcagcagccagggccaattgagcacgaagatcaaactgcaccgcctgcgccgcatatt

SEQ ID NO: 546091 - DNA, 75 bp, synthetic construct
  source 1..75: mol_type = other DNA
atgacaaaaatgagtcgctacgccttaatcaccgcgctggcgatgtttctcgccgggtgtgtggggcctcgagaa

SEQ ID NO: 546092 - DNA, 75 bp, synthetic construct
  source 1..75: mol_type = other DNA
ggtttgtcgccgcaggacagtttaggcacccgtagtaaagccataggcattgcccgcaatgtcggcgctcattac

SEQ ID NO: 546093 - DNA, 75 bp, synthetic construct
  source 1..75: mol_type = other DNA
ctgctggtttcccgtgcgtcgtatgaggcagaaaagagcattcttcgccatattctcgaaggtaaggaggcggtc

SEQ ID NO: 546094 - DNA, 75 bp, synthetic construct
  source 1..75: mol_type = other DNA
cggaaacagatggccggctttgagtcagcctacgtggccctgtcgcgtatgaagcagcatgtgcaggtgtacacc

SEQ ID NO: 546095 - DNA, 75 bp, synthetic construct
  source 1..75: mol_type = other DNA
cgggagcagacgctgattgtcacgcacctgaatgaggaccggcgcgtactgaacagcatgattcatgatgcacgg

SEQ ID NO: 546096 - DNA, 75 bp, synthetic construct
  source 1..75: mol_type = other DNA
gtgaaacctttgccatcgcgcttgaaggcacggaaggtaaccggaaactgatggccggctttgagtcagcctacg

SEQ ID NO: 546097 - DNA, 75 bp, synthetic construct
  source 1..75: mol_type = other DNA
gggcccacgcaccgtgcggtcggtgagatgcgcagcgccggcgtggatgcacagacgctggcgtcctttctgcat

SEQ ID NO: 546098 - DNA, 75 bp, synthetic construct
  source 1..75: mol_type = other DNA
cgtaatgtccgctatgcccggctggccggggactttgcggccagcgtgaaagccggagaagagagcgtggcacag

SEQ ID NO: 546099 - DNA, 75 bp, synthetic construct
  source 1..75: mol_type = other DNA
aatttacccttgtttccgcccagcagctttctatggctaagcagcagctaggtttgtcgccgcaggacagcttag

SEQ ID NO: 546100 - DNA, 75 bp, synthetic construct
  source 1..75: mol_type = other DNA
gtcgtttgctgcagaaggaaccagttttgctgacctggggcgggaaatcgatgcgcagataaaacggggcgattt

SEQ ID NO: 546101 - DNA, 75 bp, synthetic construct
  source 1..75: mol_type = other DNA
atgaagccattgtccgcgactataccggcaggacaccggaagcacgggagcagacgctgattgtcacgcacctga

SEQ ID NO: 546102 - DNA, 75 bp, synthetic construct
  source 1..75: mol_type = other DNA
tgcgggatatgtaccgcccggggatggtgatggagcagtggaacccggagacacgcagtcatgaccgctatgtga

SEQ ID NO: 546103 - DNA, 75 bp, synthetic construct
  source 1..75: mol_type = other DNA
tctgaaagaagatgaagcttttaaccgctatctcagtgaattgtggggggatttacgggaatggctgaaagcgga

SEQ ID NO: 546104 - DNA, 75 bp, synthetic construct
  source 1..75: mol_type = other DNA
tttctcgaacttaccgatgatgcgcgtattcagcgtctgcttaagcgcgcggtgcatcgggcgattgataaagtg

SEQ ID NO: 546105 - DNA, 75 bp, synthetic construct
  source 1..75: mol_type = other DNA
cagtcctgcacggtttattgctccgggacgtaaatatccgcagccgtatgtggcactgccggcgtttgaccgtaa

SEQ ID NO: 546106 - DNA, 75 bp, synthetic construct
  source 1..75: mol_type = other DNA
gacgaggcgatgggcaggttgcgcgagttgctgccagagaagcgccgcaaggacgctgtgctggccgtcgagtac

SEQ ID NO: 546107 - DNA, 75 bp, synthetic construct
  source 1..75: mol_type = other DNA
gaaacccagcgccagaagctggccgaacgccagcggaatcgacccagcagggggcatgatcggggcggctacagc

SEQ ID NO: 546108 - DNA, 75 bp, synthetic construct
  source 1..75: mol_type = other DNA
aaatggcttcctggctggttgagtggaaaaaagccactgaaacgcaatggcttaaagattcgcccagtcacagcc

SEQ ID NO: 546109 - DNA, 75 bp, synthetic construct
  source 1..75: mol_type = other DNA
ttgactatgcacctgatgatgacggtataatcaccctgccattctccgagtttgccgatcgatgcggctatccac

SEQ ID NO: 546110 - DNA, 75 bp, synthetic construct
  source 1..75: mol_type = other DNA
caagagcattggcgactctctaacgcgtattcagcagacgttgctgaagttcaacttgcccaccagcaaagaaca

SEQ ID NO: 546111 - DNA, 75 bp, synthetic construct
  source 1..75: mol_type = other DNA
ggcggcgttcttcgaccaggcgcacaagtggctggccaacaagtacggcgccgatcgcatcatcacggccagcat

SEQ ID NO: 546112 - DNA, 75 bp, synthetic construct
  source 1..75: mol_type = other DNA
gaatgggggttgcccgtaaggatctgaaggccatggcggataacggaaaactgaccgccgataaggttgttcctg

SEQ ID NO: 546113 - DNA, 75 bp, synthetic construct
  source 1..75: mol_type = other DNA
gcttaccgccatggcgattcttggttagcagcattaaaagattatttggtcgaaaacaggagctgggttcaatca

SEQ ID NO: 546114 - DNA, 75 bp, synthetic construct
  source 1..75: mol_type = other DNA
gtacgccagctgagagcgccattaccgccatgttacgggtgcatgaagggctaaatacattacgtttgccgaata

SEQ ID NO: 546115 - DNA, 75 bp, synthetic construct
  source 1..75: mol_type = other DNA
atgttcccaaaaataatgaatgatgaaaactttttcaaaaaagcggcggcgcacggggggggaactcctttaact

SEQ ID NO: 546116 - DNA, 75 bp, synthetic construct
  source 1..75: mol_type = other DNA
tttatggagcaggcggacaacattgccgactgggtgatgatgtcgccaggcgcggcactgccggtgaacaaagcg

SEQ ID NO: 546117 - DNA, 75 bp, synthetic construct
  source 1..75: mol_type = other DNA
cgctgccggaagtgatcgaaaccagccatgactacgccaaagtgatggacaaagagcagcttatcgatcgcaaag

SEQ ID NO: 546118 - DNA, 75 bp, synthetic construct
  source 1..75: mol_type = other DNA
atttgtcacctttatggagcaggcagacaacattgccgactgggtgatgatgtcgccaggtgctgcgctgccggt

SEQ ID NO: 546119 - DNA, 75 bp, synthetic construct
  source 1..75: mol_type = other DNA
cggctcgcaaacagttggtggcccggtgcggtgattagcgaagagctggcaacggcggcggcattacggcagcag

SEQ ID NO: 546120 - DNA, 75 bp, synthetic construct
  source 1..75: mol_type = other DNA
tccgtctggagtaagacgcctgatgccctgaacgccgacattcttcagactctgacgcagcggataccccaataa

SEQ ID NO: 546121 - DNA, 75 bp, synthetic construct
  source 1..75: mol_type = other DNA
gtgttcagcaatggcagcagtgaggccaaaacgctaacgggcgcagagcatttaatcgatctggtaggccaaccg

SEQ ID NO: 546122 - DNA, 75 bp, synthetic construct
  source 1..75: mol_type = other DNA
catttcaaaagtatcaacgacacctggggccacgatgtgggcgatgaagcgatagttgctctcacccgtcagtta

SEQ ID NO: 546123 - DNA, 75 bp, synthetic construct
  source 1..75: mol_type = other DNA
ggaaatttacaacttaaaaaccgatgcagtattagcgggaatgtgggtaggcgtaatgggcgtaaacgtgctgcc

SEQ ID NO: 546124 - DNA, 75 bp, synthetic construct
  source 1..75: mol_type = other DNA
cgctccgtcaacggtcacgctgttcgggcttatcagtcgtcctggcaagcagccattcactccaggtcgcgacgt

SEQ ID NO: 546125 - DNA, 75 bp, synthetic construct
  source 1..75: mol_type = other DNA
atggtgcataacgtcaccgtgggtaaagccgatctctctaccacgctacaagcgagccagaaaaagctggatgaa

SEQ ID NO: 546126 - DNA, 75 bp, synthetic construct
  source 1..75: mol_type = other DNA
gcgggcggtatgtctggtacctggatgtttaacttactggacggtggtctggtggctggcccaagtccggggtct

SEQ ID NO: 546127 - DNA, 75 bp, synthetic construct
  source 1..75: mol_type = other DNA
actggatatggctgccacgctggcagtgcctttcacaggtgacggtcgggatgctgcggagatcctgcgtacact

SEQ ID NO: 546128 - DNA, 75 bp, synthetic construct
  source 1..75: mol_type = other DNA
cgacctcgcattactgctgaccaccctcagcctgaccgacggtgctgacgttcccgatatggtgcgcgctcgtct

SEQ ID NO: 546129 - DNA, 75 bp, synthetic construct
  source 1..75: mol_type = other DNA
caccatgtggaataccgggatccgtatcggtgaagcccggacgctcaccccggaatcgttcgacctggatggtct

SEQ ID NO: 546130 - DNA, 75 bp, synthetic construct
  source 1..75: mol_type = other DNA
atgtgctgatgaagccgctgaccattattgccatgattgcgggcggtatgtctggcacctggatgtttaacttac

SEQ ID NO: 546131 - DNA, 75 bp, synthetic construct
  source 1..75: mol_type = other DNA
cgaaaggctcgttccttgcgacaattgccggtgttacggtcggcaccctggtctcctttgtcatcacttctctga

SEQ ID NO: 546132 - DNA, 75 bp, synthetic construct
  source 1..75: mol_type = other DNA
aaaacccatgtatccatcgaatttatgcattcttcggtggagcaggagcgtcaggcagttatcagcaaattgatt

SEQ ID NO: 546133 - DNA, 75 bp, synthetic construct
  source 1..75: mol_type = other DNA
cagaaactgaatgacccggcgaataaaaaatatggcattgcactgccgacggcagaaagcgttctgacggagcaa

SEQ ID NO: 546134 - DNA, 75 bp, synthetic construct
  source 1..75: mol_type = other DNA
atggtgcataacgtcaccgtgggtaaagccgatctctcaactacgctgcaagcgagccagaaaaagctggatgaa

SEQ ID NO: 546135 - DNA, 75 bp, synthetic construct
  source 1..75: mol_type = other DNA
cgtgagctgctgccgttctatgcgccgtgggtcgccggtgtgctggctgatggccgtggtgcgcaggatgacatt

SEQ ID NO: 546136 - DNA, 75 bp, synthetic construct
  source 1..75: mol_type = other DNA
ctgagtgaaagcaacccggcttccgcccttaatcatctcaaccatgcgttacagctcgatccccgctgtggcgtg

SEQ ID NO: 546137 - DNA, 75 bp, synthetic construct
  source 1..75: mol_type = other DNA
gaaggcgatccgaaaatgaagatgcgcaggcgggcattgacgccattaacgccagcggtatgcgctcggtgggga

SEQ ID NO: 546138 - DNA, 75 bp, synthetic construct
  source 1..75: mol_type = other DNA
tgattatgagcgtgggagcgtcatcggtctttgcggcaggcaccgtcaaagtgttcagcaatggcagcaatgagg

SEQ ID NO: 546139 - DNA, 75 bp, synthetic construct
  source 1..75: mol_type = other DNA
gcacgccaccacggggcctggtgaaacccaatttgcccgagccatgcgctgcctcaatattaccccactatgcgc

SEQ ID NO: 546140 - DNA, 75 bp, synthetic construct
  source 1..75: mol_type = other DNA
tccatatctcttttggtatcctgtcatataactttccggtgattaattccgctaaccggtggtctgctgctgaat

SEQ ID NO: 546141 - DNA, 75 bp, synthetic construct
  source 1..75: mol_type = other DNA
cagaagaaagtggagcttccgctcaaactgctggttgccggtgatttcagtaacggacaggaagagcgtccacta

SEQ ID NO: 546142 - DNA, 75 bp, synthetic construct
  source 1..75: mol_type = other DNA
aagagcgtcgtaaagtattgcaggtcaaaacggaaaacctgcaagcggagcgtaactctcgatcgaaatccatcg

SEQ ID NO: 546143 - DNA, 75 bp, synthetic construct
  source 1..75: mol_type = other DNA
acctgacacttcaggaccgactggtcaaggaactcaggcttcagggcatcagctccatggaagctgcgaacgcat

SEQ ID NO: 546144 - DNA, 75 bp, synthetic construct
  source 1..75: mol_type = other DNA
ccagccgttgaaatctacagttacgtagctgggttcaatgaacaagggcaagaatgttacgccaatcaaaaaaca

SEQ ID NO: 546145 - DNA, 75 bp, synthetic construct
  source 1..75: mol_type = other DNA
cggcggggcacgccgtgcttgcctgtggagggatggtgcagtcagaccgcccgttgaagcaggaaccctccgaaa

SEQ ID NO: 546146 - DNA, 75 bp, synthetic construct
  source 1..75: mol_type = other DNA
aaacgatgtcaccacgttaatatgcacatacgaagcgatcagcccgccgattaccgtgatcccgaggatggttgc

SEQ ID NO: 546147 - DNA, 75 bp, synthetic construct
  source 1..75: mol_type = other DNA
cgccgccagcttgagtacaagcagctctggcgtggcggtcaggtgcttgctgttccgccagcgtatacaagccag

SEQ ID NO: 546148 - DNA, 75 bp, synthetic construct
  source 1..75: mol_type = other DNA
agcttttggttgccggtgatttcagtaacagacaggaagagcgtccactgtcagagcgcgtaaaaatggatatta

SEQ ID NO: 546149 - DNA, 75 bp, synthetic construct
  source 1..75: mol_type = other DNA
taactggcagaagcagaaacgcaaaatacagcgactgcattcccgtatcgcaaatatccgcagggactaccttca

SEQ ID NO: 546150 - DNA, 75 bp, synthetic construct
  source 1..75: mol_type = other DNA
gtcagtaacatgtcaaagtcagcagcgggtacggtcagccagccggggcgcaatgtccgggcaaaatcaggttta

SEQ ID NO: 546151 - DNA, 75 bp, synthetic construct
  source 1..75: mol_type = other DNA
tatcgagcctttacgtctggaagttaacaaactgggcgaagagctggatgcagcaaaagccgagctggatgcttt

SEQ ID NO: 546152 - DNA, 75 bp, synthetic construct
  source 1..75: mol_type = other DNA
cgaggccgcccatgagagcggtaaatacaagttaaccgccgtctattcccgcagccttgaacaggcccagcactt

SEQ ID NO: 546153 - DNA, 75 bp, synthetic construct
  source 1..75: mol_type = other DNA
cggaaagcgatgccattgacgcggtgtatattgccagcccgaatgccctgcatttttcccagacacaacttttcc

SEQ ID NO: 546154 - DNA, 75 bp, synthetic construct
  source 1..75: mol_type = other DNA
atagctacgcgctcagccggggtgtggatacgcagttccgccatatcaacattgcggaagccgatcacttcaaac

SEQ ID NO: 546155 - DNA, 75 bp, synthetic construct
  source 1..75: mol_type = other DNA
gtcgggcttctgttctggtttgcgttaacccacttcaaaaagggaaaggggacgtcctggctttttaatatgtgt

SEQ ID NO: 546156 - DNA, 75 bp, synthetic construct
  source 1..75: mol_type = other DNA
tgagaaaccactggcgtcgaatctggcggaagtggatgcagccattgcctgcgcgcgtgaaaatcaggtggtgct

SEQ ID NO: 546157 - DNA, 75 bp, synthetic construct
  source 1..75: mol_type = other DNA
ctgtttacttcgctggaagcaatggcggaaagtgacgctatcgacgcggtgtatattgccagcccgaacgccctg

SEQ ID NO: 546158 - DNA, 75 bp, synthetic construct
  source 1..75: mol_type = other DNA
gtgttatcgcagaaatgcccacggaacccctcgtacacgcttcttgttgccgggaagaaaaaaaacaccggggaa

SEQ ID NO: 546159 - DNA, 75 bp, synthetic construct
  source 1..75: mol_type = other DNA
gaattgagttgtgctcttggatcatcccgtaccaacgcgacgcgtattgccgatgagttaagaagatcgtggaga

SEQ ID NO: 546160 - DNA, 75 bp, synthetic construct
  source 1..75: mol_type = other DNA
ctggcctcaaaagttcagaacgtcctgaaggatgacccgttctccgggcatctgttcatcttccgcggacgccgg

SEQ ID NO: 546161 - DNA, 75 bp, synthetic construct
  source 1..75: mol_type = other DNA
gtcagggtgtggatacgcagttccgccatatcaacattgcggaagccgatcacttcaaacagttcctgcgtcaga

SEQ ID NO: 546162 - DNA, 75 bp, synthetic construct
  source 1..75: mol_type = other DNA
ccaatgatttgcctggcgccatcagattctacaacccattgatggaatggttgacaagttcactgactggcaaca

SEQ ID NO: 546163 - DNA, 75 bp, synthetic construct
  source 1..75: mol_type = other DNA
gcagcctgactgagctgaaaaaatatcgcaaaagccacccggaaaagatggccttcagttatagctacgcgctca

SEQ ID NO: 546164 - DNA, 75 bp, synthetic construct
  source 1..75: mol_type = other DNA
atggcaaaccgcaaacaacagcgcgcccgcgctgagcgtcttcacatccacacagaaatcaaccgcagactccat

SEQ ID NO: 546165 - DNA, 75 bp, synthetic construct
  source 1..75: mol_type = other DNA
ccgaactgaatcttaacgccgtgcgcggtctgattgtcagtggtgacgctttcatcaacggctccgttgctctgg

SEQ ID NO: 546166 - DNA, 75 bp, synthetic construct
  source 1..75: mol_type = other DNA
tgacgaaacacgttaccacgatgcagatgttacggcgtttggctatgaatacggtcagttacctggctgtccggc

SEQ ID NO: 546167 - DNA, 75 bp, synthetic construct
  source 1..75: mol_type = other DNA
agcaagcaatatgaccgctctgatgctatgtgggctatggaaatgttctccatgacgcctaaagcgttcgaggct

SEQ ID NO: 546168 - DNA, 75 bp, synthetic construct
  source 1..75: mol_type = other DNA
tctgtctggcgctgaatggctggaagaaccgaagcgtattccgggcgaacatattcctctcatcccggtatatgg

SEQ ID NO: 546169 - DNA, 75 bp, synthetic construct
  source 1..75: mol_type = other DNA
ttcgcatagagaaggtgaagctcacagcatggcgtaaccctgttagcggagaaacggcaatctatgatgaagatc

SEQ ID NO: 546170 - DNA, 75 bp, synthetic construct
  source 1..75: mol_type = other DNA
gactgaaatcgatcgcagactcacccgcgctgcacacatcgcctttatcatgcaatccaacacattgcacagact

SEQ ID NO: 546171 - DNA, 75 bp, synthetic construct
  source 1..75: mol_type = other DNA
agcatgaggagccactggtcgagagccgctacctctacgacccgctgggccgccggacggggaaacgggtgtggc

SEQ ID NO: 546172 - DNA, 75 bp, synthetic construct
  source 1..75: mol_type = other DNA
tcacgcgcagcgggtatgacgcggcaggaaggctcacggcgcagacggacgcggcgggacggaggacagagtacg

SEQ ID NO: 546173 - DNA, 75 bp, synthetic construct
  source 1..75: mol_type = other DNA
tgcatatcaacatgctgcatgagcgcacgcacgcactatcaaaccgttactgcgctgctgtcttcagctatctcg

SEQ ID NO: 546174 - DNA, 75 bp, synthetic construct
  source 1..75: mol_type = other DNA
atggcaaaccgcaggcaacagcgcgcccgcgctgagcgtcttcacacccggactgaaatcaaccgcagactctgg

SEQ ID NO: 546175 - DNA, 75 bp, synthetic construct
  source 1..75: mol_type = other DNA
atgaaaaagacccgctataccgaagaacagatcgcttttgcgctgaaacaggctgaaatcggcacccggggggag

SEQ ID NO: 546176 - DNA, 75 bp, synthetic construct
  source 1..75: mol_type = other DNA
atacacctccgacacaaatgcctcctgctcttgccgggctattgcagtacaccggaacggctattcagcaaatta

SEQ ID NO: 546177 - DNA, 75 bp, synthetic construct
  source 1..75: mol_type = other DNA
aaccgttactgcgctgccgtcttcagctatctcgccgaagatctggcagaactgcaaagcctcatcaaccagcac

SEQ ID NO: 546178 - DNA, 75 bp, synthetic construct
  source 1..75: mol_type = other DNA
ggcgctggagaaagtggcgctgggttttgttcagcaacgtaaaccgtcacaactttctggtggtcagcgccagcg

SEQ ID NO: 546179 - DNA, 75 bp, synthetic construct
  source 1..75: mol_type = other DNA
atgaattgcctgccacgcttacccccggtcaacaggtgatggcttcctggttgcgtaacgtgatggtgccactgg

SEQ ID NO: 546180 - DNA, 75 bp, synthetic construct
  source 1..75: mol_type = other DNA
acatcgcccgcggctttatcgtcgactaccccattctgctgctcgacgaacctaccgcctcgctggacgccaaaa

SEQ ID NO: 546181 - DNA, 75 bp, synthetic construct
  source 1..75: mol_type = other DNA
taccactgcgaccatcgcggcctgccgctggccttatcagcaaggaagggacaacagaatggtgcgcagaatacg

SEQ ID NO: 546182 - DNA, 75 bp, synthetic construct
  source 1..75: mol_type = other DNA
ccgcatccagacgatttatcagccggggagcttcacgccactcatcagagttgaaaccgccaccggtgagctggc

SEQ ID NO: 546183 - DNA, 75 bp, synthetic construct
  source 1..75: mol_type = other DNA
ccgcgcacgccgtttgttgccggattcgtcgggacatcgaatgtatttgatgcgctgatggcagagaaactttgt

SEQ ID NO: 546184 - DNA, 75 bp, synthetic construct
  source 1..75: mol_type = other DNA
caaattgcgtgagcagatgcagctggaactgaaaaaactgcaacagtctctcggtatcacttttatcttcgttac

SEQ ID NO: 546185 - DNA, 75 bp, synthetic construct
  source 1..75: mol_type = other DNA
tcctggtcctctcgccactcattgggcggagcgcaacaaaaagcgcccggcgttcctgccgatggtaagtctgaa

SEQ ID NO: 546186 - DNA, 75 bp, synthetic construct
  source 1..75: mol_type = other DNA
acgctcacgcccggacaacaggtgatggtttcctggtcgcgtgatgtgatggtaccgctggttgaggagaggtga

SEQ ID NO: 546187 - DNA, 75 bp, synthetic construct
  source 1..75: mol_type = other DNA
aagaactgcctgccacgctcacgcccggacaacaggtgatggtttcctggtcgcgcgatgtgatggtgccgctgg

SEQ ID NO: 546188 - DNA, 75 bp, synthetic construct
  source 1..75: mol_type = other DNA
acaacggtcgcattgagcaggtcgattcaccacgtgatctctacatgcgcccgcgcacgccgtttgttgccggat

SEQ ID NO: 546189 - DNA, 75 bp, synthetic construct
  source 1..75: mol_type = other DNA
cgaagcacgcgtacagtgaacaggggctggcgaaccgtcaggagccggacggtctgccgccggtggagtggctga

SEQ ID NO: 546190 - DNA, 75 bp, synthetic construct
  source 1..75: mol_type = other DNA
ttagcggcggggcacgccgtgcttgcctgtggagggatggtgcagtcagaccgcccgttgaagcaggaaccctcc

SEQ ID NO: 546191 - DNA, 75 bp, synthetic construct
  source 1..75: mol_type = other DNA
caggtgcttgctgttccgccagcgtagacaagccagcgttgcgcgtgctgtggtcatacagcgaaagagaatcgc

SEQ ID NO: 546192 - DNA, 75 bp, synthetic construct
  source 1..75: mol_type = other DNA
caggtgcttgctgttccgccagcgtagacaagccagcgttgcgcgtcctgtggtcatacagcgaaagacaatcgc

SEQ ID NO: 546193 - DNA, 75 bp, synthetic construct
  source 1..75: mol_type = other DNA
aacggaaaaaggtcacgagtttttgcgcgaggttttaccaccgcagcataactgcctgcatcaactctggtccgc

SEQ ID NO: 546194 - DNA, 75 bp, synthetic construct
  source 1..75: mol_type = other DNA
atgccactgaaacgcaatggcttaaagattctgccctcacagccattgcaacagtcactgaaagaccttgagcgg

SEQ ID NO: 546195 - DNA, 75 bp, synthetic construct
  source 1..75: mol_type = other DNA
cccgcagggcgttaagctcgatcaggaaaacagccgtatttttctgccgaaactgggctggatgcgctaccggaa

SEQ ID NO: 546196 - DNA, 75 bp, synthetic construct
  source 1..75: mol_type = other DNA
caggtgcttgctgttccgccagcgtaaacaagccagcgttgcgcgtgctgtggtcatacagcgaaagaaaatcgc

SEQ ID NO: 546197 - DNA, 75 bp, synthetic construct
  source 1..75: mol_type = other DNA
catttttcgattccggtcacaccacataccttccggcacagctatatcatgcacatgctctatcaccgccagccc

SEQ ID NO: 546198 - DNA, 75 bp, synthetic construct
  source 1..75: mol_type = other DNA
ggcgtcaaaaaagagattgaacgactggagcgggagctgaaaccgaagccgcagcccaaagcggctgcgtattac

SEQ ID NO: 546199 - DNA, 75 bp, synthetic construct
  source 1..75: mol_type = other DNA
caggtgcttgctgttccgccagcgtagacaagccagcgttgcgcgtactgtggtcatacagcgaaagaaaatcgc

SEQ ID NO: 546200 - DNA, 75 bp, synthetic construct
  source 1..75: mol_type = other DNA
caggtgcttgctgttccgccagcgtacacaagccagcgttgcgcgtgctgtggtcatacagcgaaagacaatcgc

SEQ ID NO: 546201 - DNA, 75 bp, synthetic construct
  source 1..75: mol_type = other DNA
caggtgcttgctgttccgccagcgtatacaagccagcgttgcgcgttctgtggtcatacagcgaaagaaaatcgc

SEQ ID NO: 546202 - DNA, 75 bp, synthetic construct
  source 1..75: mol_type = other DNA
tgatatgttaaaatcgagtgtcaaaaaatgggatattactgcagataaagctacagaccagtttgctgaaagaac

SEQ ID NO: 546203 - DNA, 75 bp, synthetic construct
  source 1..75: mol_type = other DNA
ccgcatacattccgtcacagctatatcatgcacatgctctatcaccgccagccgaggaaggtcatccaggcactg

SEQ ID NO: 546204 - DNA, 75 bp, synthetic construct
  source 1..75: mol_type = other DNA
tgaccacccgcccccgcaggcgggagccgctgtggtcagtaacggatgaaactatgcgtaactggctgaagcaag

SEQ ID NO: 546205 - DNA, 75 bp, synthetic construct
  source 1..75: mol_type = other DNA
cacgggcaggctggagagcgtgcgtaccctcgcaccggacctggacatccgcatcccgtatgccacggacccggc

SEQ ID NO: 546206 - DNA, 75 bp, synthetic construct
  source 1..75: mol_type = other DNA
tgaccaacgagaacggcagccagtccacgttcctgtatgacccggtggaccgcctggcagaacagcgtggctttg

SEQ ID NO: 546207 - DNA, 75 bp, synthetic construct
  source 1..75: mol_type = other DNA
aggaactaattgattgtggtgatattagtgctaaagatgcaaaaagcacacagaaagcctggaattgtcgtcact

SEQ ID NO: 546208 - DNA, 75 bp, synthetic construct
  source 1..75: mol_type = other DNA
ggtgggacggcgaccggctgacgacggtacagaccgacaccacgcgtatccagacggtatatcagccggggagct

SEQ ID NO: 546209 - DNA, 75 bp, synthetic construct
  source 1..75: mol_type = other DNA
aaaccacaaccatttatttttttaagaaacaattggctatttaaatggccaaaagaaatggataaacgttccaga

SEQ ID NO: 546210 - DNA, 75 bp, synthetic construct
  source 1..75: mol_type = other DNA
gctgtcagacgggccgaagctgacggagtacacttttcgattgtaagcgtacagcctgaaccgtctggtcagaat

SEQ ID NO: 546211 - DNA, 75 bp, synthetic construct
  source 1..75: mol_type = other DNA
aaatgggatattactgcagataaagctacagaccagtttgctgaaagaacattagcaacccggtctgttaatcgt

SEQ ID NO: 546212 - DNA, 75 bp, synthetic construct
  source 1..75: mol_type = other DNA
ggcaatacgccttctgaaagatgtcgccgagtcacaacaacagcaattccagtcaccaccacagtcaccggcaga

SEQ ID NO: 546213 - DNA, 75 bp, synthetic construct
  source 1..75: mol_type = other DNA
gaagatgaactggcaatagctggatttcaggaagtggcaaggcgctcagtgaagcgccgtcgtgtgtatgtatcc

SEQ ID NO: 546214 - DNA, 75 bp, synthetic construct
  source 1..75: mol_type = other DNA
tgctgtacccgttcatctgtcgggcgctggattaactggttcacgttgtcgggtgtagagggcctgaaatcatta

SEQ ID NO: 546215 - DNA, 75 bp, synthetic construct
  source 1..75: mol_type = other DNA
gtgttgtcaggatgttcctttctctgctgaaatctcagggtgaagggaaaaacggtcgtggtggctactgttatt

SEQ ID NO: 546216 - DNA, 75 bp, synthetic construct
  source 1..75: mol_type = other DNA
aaacatcacgcctaaacctgccagcgctgccgagggggtgatccgcttcttcaaggaggatgcaaaagccgtggt

SEQ ID NO: 546217 - DNA, 75 bp, synthetic construct
  source 1..75: mol_type = other DNA
cccgccgccgtcgcgggcgttattgaggtcacaacaaacgacgactggctgacaatgccgggggcggatcgtgaa

SEQ ID NO: 546218 - DNA, 75 bp, synthetic construct
  source 1..75: mol_type = other DNA
ggcttcgacattacagtgggcagacatacccaactggatggtgcggtgattgcctccactgccacaccggataaa

SEQ ID NO: 546219 - DNA, 75 bp, synthetic construct
  source 1..75: mol_type = other DNA
attactcaagcccctggaggggattgagcgtccggcgctggtgacggtattaccacatcagcaaaagggcaaaac

SEQ ID NO: 546220 - DNA, 75 bp, synthetic construct
  source 1..75: mol_type = other DNA
tccttgatttgggggctaacgtcgattgtgacagcactatgttggtgcaattcgccattatgggttctgttctgg

SEQ ID NO: 546221 - DNA, 75 bp, synthetic construct
  source 1..75: mol_type = other DNA
ttcttaatctccggatactcagacactggcgttgggggcgacagtgggacgctggtggcggatgtgggggcggtg

SEQ ID NO: 546222 - DNA, 75 bp, synthetic construct
  source 1..75: mol_type = other DNA
ttcttaatctccggctactcagacactggcgttgggggcgacagtggggacgctggtggcggatgtgggggcggt

SEQ ID NO: 546223 - DNA, 75 bp, synthetic construct
  source 1..75: mol_type = other DNA
cgcggatccgcctgccggaagggcaagccaatattatcaatttcaatgggccgggcactgtcaaccccgtggcga

SEQ ID NO: 546224 - DNA, 75 bp, synthetic construct
  source 1..75: mol_type = other DNA
cgactgattacagctatcaccacaaaacccgtgatgtggctgaaagatgcgctggttaatgtggtgatgaaaaac

SEQ ID NO: 546225 - DNA, 75 bp, synthetic construct
  source 1..75: mol_type = other DNA
tggttggctgggcgcagtcggtagtgaccttccacggtggcgcttctcaacatcttgatggcgtggcgtttatct

SEQ ID NO: 546226 - DNA, 75 bp, synthetic construct
  source 1..75: mol_type = other DNA
cggaattaaaaaattaccgtcttcgccttaagtacgccggtggcttcacccgcattggccgtttctatgaggtaa

SEQ ID NO: 546227 - DNA, 75 bp, synthetic construct
  source 1..75: mol_type = other DNA
gtatccggcagtacgctgaatgccgggaataatctgtctgttgtcgcaaccggtaaaaacaggggcgataaccgc

SEQ ID NO: 546228 - DNA, 75 bp, synthetic construct
  source 1..75: mol_type = other DNA
ctccagtggtggcagtgccacgagtaccaccattaacatcggcggggttcagcatgtttctagcggcggtagtgc

SEQ ID NO: 546229 - DNA, 75 bp, synthetic construct
  source 1..75: mol_type = other DNA
gatgcaggtaacccaggtacaggtaaccctgacgcaggtaagccagatgcaggtaacccaggtacaggtaaccct

SEQ ID NO: 546230 - DNA, 75 bp, synthetic construct
  source 1..75: mol_type = other DNA
ggtggacgtcagaatgtttacatcgacggaaatgtcacagaaacgactattacaagcggcggcatgctacaggtg

SEQ ID NO: 546231 - DNA, 75 bp, synthetic construct
  source 1..75: mol_type = other DNA
cgccatttcgaacaatttattgaaagcggttgcgcaaaatttgctgatatttttaatcaggtggaaaccggtcag

SEQ ID NO: 546232 - DNA, 75 bp, synthetic construct
  source 1..75: mol_type = other DNA
cgtcactttgagcaattcattgaaagtggctgcgccaaatttgccgatatttttaatcaggtggaaaccggccag

SEQ ID NO: 546233 - DNA, 75 bp, synthetic construct
  source 1..75: mol_type = other DNA
atgacgccagccttccaggcggtgtcgctggcgctcgggagcctgtcgggtagcgggacgttccagatgaacacg

SEQ ID NO: 546234 - DNA, 75 bp, synthetic construct
  source 1..75: mol_type = other DNA
tcttccctaccgcgctggatctggcagggcatcctggagcgaaagtggcgaatttagtgccgaaaaccaccttta

SEQ ID NO: 546235 - DNA, 75 bp, synthetic construct
  source 1..75: mol_type = other DNA
cctggtgggcggcaatatggcaggcgcgctggcaggtgcttcagcgccggagctggcgaacatcatcggtcatca

SEQ ID NO: 546236 - DNA, 75 bp, synthetic construct
  source 1..75: mol_type = other DNA
tgctggtctacttttgccgtcatcgcctgctctggcggcagattacagcgatcaggtgctggggaacggaggtac

SEQ ID NO: 546237 - DNA, 75 bp, synthetic construct
  source 1..75: mol_type = other DNA
aggcgtcgtggcgaccactgatcctactcatcctgcgaatgagacttacgcttacatggttggacgtatctttga

SEQ ID NO: 546238 - DNA, 75 bp, synthetic construct
  source 1..75: mol_type = other DNA
aaggaagaagaaaagccagcgaagaaaggtaaacgtaagccgaaagcaaaagaagcgcttgtaccgcgtgttatg

SEQ ID NO: 546239 - DNA, 75 bp, synthetic construct
  source 1..75: mol_type = other DNA
accgagtggatgctctatgcgcagaaagtcgaatctacagacacttccagcctgccagtaacgtttcccgaacaa

SEQ ID NO: 546240 - DNA, 75 bp, synthetic construct
  source 1..75: mol_type = other DNA
gcgctatagccgtgaccttgggtatcgggttgtagaacgccaaaagacagatatcgatacgctcagagcactacg

SEQ ID NO: 546241 - DNA, 75 bp, synthetic construct
  source 1..75: mol_type = other DNA
catatgatccggtctatgcaccgtcatgttcagaaaaaaaaaattatttatggaatattaatgcatcagtcgaat

SEQ ID NO: 546242 - DNA, 75 bp, synthetic construct
  source 1..75: mol_type = other DNA
caatcctcttctggagaggactcagtatttttacaatccattgttaaatggcagaaaggagatgatgaacaacgt

SEQ ID NO: 546243 - DNA, 75 bp, synthetic construct
  source 1..75: mol_type = other DNA
cagcagcactaaaccacttcacgaatagcaatccacacgaaccactgtccaatactatcaatgaaattgcaaaag

SEQ ID NO: 546244 - DNA, 75 bp, synthetic construct
  source 1..75: mol_type = other DNA
cggcagcactaaaccacttcacgattagcaatccacacgaaccactgtccaatactatcaatgaaatcgcgacag

SEQ ID NO: 546245 - DNA, 75 bp, synthetic construct
  source 1..75: mol_type = other DNA
cttgagaaaagcaaaaacaagattcgtcagatccgcaatattgccagccaaaaggcggatacagatgggcagaaa

SEQ ID NO: 546246 - DNA, 75 bp, synthetic construct
  source 1..75: mol_type = other DNA
cgcaggggtacgacacggaagttggcgagcgcggcgtgatgctttccggtgggcaaaaacagcgtatttccattg

SEQ ID NO: 546247 - DNA, 75 bp, synthetic construct
  source 1..75: mol_type = other DNA
gcgtgaagattattaccaccagctaagccgccagcatccagagttttacctgcgtcatcgtacgggcgacctcat

SEQ ID NO: 546248 - DNA, 75 bp, synthetic construct
  source 1..75: mol_type = other DNA
atggcgaacttgctggcgattggcggcggtagttggatggtggtgcagggcagtttaacgctgggccagctcacc

SEQ ID NO: 546249 - DNA, 75 bp, synthetic construct
  source 1..75: mol_type = other DNA
atctcaaggaagtattagccccccccatatgatccagtgtatgcaccgtcatattcagaaaagaaaattatttat

SEQ ID NO: 546250 - DNA, 75 bp, synthetic construct
  source 1..75: mol_type = other DNA
atgttggaagtgaataaaacggttgagcaaatgctggcaaaggacaaatggcaggacgctcttaatttctgggtt

SEQ ID NO: 546251 - DNA, 75 bp, synthetic construct
  source 1..75: mol_type = other DNA
gaaagtgtgccggaaggacgcggtaaactggatgtaaatattcgccagtttacctatccgcaaactcaccatcct

SEQ ID NO: 546252 - DNA, 75 bp, synthetic construct
  source 1..75: mol_type = other DNA
tccgtaggtttcgacttgctggttggtggtaagctgactcccaaagatccacagattagcgccgttgcggcagcc

SEQ ID NO: 546253 - DNA, 75 bp, synthetic construct
  source 1..75: mol_type = other DNA
gtggggacaacaaccatcaccgccgcattagcctggtcattacaaatgttgggagaaaatgtcctggtggtcgat

SEQ ID NO: 546254 - DNA, 75 bp, synthetic construct
  source 1..75: mol_type = other DNA
aaatgacaacgttgaagtcagtcgctggggcaccccgcgtgagtttgactttgaagttcgtgaccatgtgacgct

SEQ ID NO: 546255 - DNA, 75 bp, synthetic construct
  source 1..75: mol_type = other DNA
ataccgacataccgcgtcaatgatctgccgtttggatgcagcaataacttaacgctgatatttaaccagcttctg

SEQ ID NO: 546256 - DNA, 75 bp, synthetic construct
  source 1..75: mol_type = other DNA
aactctatattctgttgaaaaaccttcgtcacgtttattccggcggcgatgcggataagtatctggttcctgatg

SEQ ID NO: 546257 - DNA, 75 bp, synthetic construct
  source 1..75: mol_type = other DNA
accagctatggttgcaaagccagcggcgcttgttgccaatgttgatccatcgtgatgaagcgatggctgaatgtc

SEQ ID NO: 546258 - DNA, 75 bp, synthetic construct
  source 1..75: mol_type = other DNA
aggaaatccccagcactggcaatgccgattgggcgagatctgctccggccttcagcaactgaaggctagtggacg

SEQ ID NO: 546259 - DNA, 75 bp, synthetic construct
  source 1..75: mol_type = other DNA
attaaaaattttatttcagcatatgaacattataaaaatctacctcaagaaaattgggatgctggagagttatat

SEQ ID NO: 546260 - DNA, 75 bp, synthetic construct
  source 1..75: mol_type = other DNA
tgaggaggatgtgttagagaattttgcatctcttatcatccgggagaaacacagaagaacaggaggatcatcatt

SEQ ID NO: 546261 - DNA, 75 bp, synthetic construct
  source 1..75: mol_type = other DNA
gatactggagatgtttcgcgaccagttaggggcatttgaagtcaacggcgacgccgctgaacgcatcatctcaat

SEQ ID NO: 546262 - DNA, 75 bp, synthetic construct
  source 1..75: mol_type = other DNA
aatagctaagggtttaaacaaaaagacagcttcgatcgctggtgcattatcgcaactctatggcaccggccggat

SEQ ID NO: 546263 - DNA, 75 bp, synthetic construct
  source 1..75: mol_type = other DNA
atgaccgtatttgaatatctccaggctcatccgaataccaccagcggtgaaatcgccaaaggtatgaacaaaaag

SEQ ID NO: 546264 - DNA, 75 bp, synthetic construct
  source 1..75: mol_type = other DNA
tcgttagcgcgttggcctcttttgttctggtggggtgcggtgaagatgacgggccaaagcctgcaacgattaact

SEQ ID NO: 546265 - DNA, 75 bp, synthetic construct
  source 1..75: mol_type = other DNA
agcgacagttaagccgcaaggtcaaattcagcaataactggcagaagcagaaacgcaaaatacagcgactgcatt

SEQ ID NO: 546266 - DNA, 75 bp, synthetic construct
  source 1..75: mol_type = other DNA
aagcctatgcaagaagaaacagaaaattttataaaacgtgcactgacctcgaagaggataattcttgaagatgat

SEQ ID NO: 546267 - DNA, 75 bp, synthetic construct
  source 1..75: mol_type = other DNA
tgaattcactttcataccattcaaaaaaaattattgaagtagtgcttgaagaacataggaatattggcgggaaag

SEQ ID NO: 546268 - DNA, 75 bp, synthetic construct
  source 1..75: mol_type = other DNA
tgccgaaacttggctggatgcgctaccggaatagccgtcaggtcacgggtgttgtgaaaaatgtcactgtcagcc

SEQ ID NO: 546269 - DNA, 75 bp, synthetic construct
  source 1..75: mol_type = other DNA
gactttattcctgctgttcccgttctcgcgtttggtacacatctggagcgtaccggtagagtatttgacgcgtaa

SEQ ID NO: 546270 - DNA, 75 bp, synthetic construct
  source 1..75: mol_type = other DNA
tcgcgtctggtgcacatctggagcgtaccggtggagtatctgacacggaaatatcagctggtgcgtgctcgccac

SEQ ID NO: 546271 - DNA, 75 bp, synthetic construct
  source 1..75: mol_type = other DNA
ataggagaaaagaaacaagcattatattatagaagtcgcaacagtgccgtagccacattcaaagtaaagggtctg

SEQ ID NO: 546272 - DNA, 75 bp, synthetic construct
  source 1..75: mol_type = other DNA
atgacagcaggctggctgtgggggcttttgtatcctataccgataacagcatcagccataaccgtggtggcagca

SEQ ID NO: 546273 - DNA, 75 bp, synthetic construct
  source 1..75: mol_type = other DNA
aatggcggatacctgagtgttaatagtggtcatcaggccacaagcaccaccattaacagtggcggtgggctgtct

SEQ ID NO: 546274 - DNA, 75 bp, synthetic construct
  source 1..75: mol_type = other DNA
tgagaaacctgaactttttgaaaagtatcgtgatgagagattaatccgcttttcaattaaaagaccagatggaaa

SEQ ID NO: 546275 - DNA, 75 bp, synthetic construct
  source 1..75: mol_type = other DNA
tctcgataaaaggcactgatggcaaagtaggaaaaatagagatttatacagatacaggcgagcttatttttcaac

SEQ ID NO: 546276 - DNA, 75 bp, synthetic construct
  source 1..75: mol_type = other DNA
tctcgataaaaggcactgatggtaaagtaggtaaaatagaaatttatacagagacaggtgaacttatttttgaac

SEQ ID NO: 546277 - DNA, 75 bp, synthetic construct
  source 1..75: mol_type = other DNA
actgagcggcggtgaaaaactgctggtgagtcaggccaatatgacaggcgaagaactgcctgccacgctcacgcc

SEQ ID NO: 546278 - DNA, 75 bp, synthetic construct
  source 1..75: mol_type = other DNA
caacgatcatcagcaaaaaccacgcaatgattgtcattgaggatttgaaggttaaatacatgtcaaagtcagcgg

SEQ ID NO: 546279 - DNA, 75 bp, synthetic construct
  source 1..75: mol_type = other DNA
tattcagacagaaagtgaagtatccactcctgttcacccttcagcatcaatggtcggactggatgctggcgtggc

SEQ ID NO: 546280 - DNA, 75 bp, synthetic construct
  source 1..75: mol_type = other DNA
gtatgaaatgcgccgccagcttgcgtacaagcagctctggcgtggcggtcaggtgcttgctgttccgccagcgta

SEQ ID NO: 546281 - DNA, 75 bp, synthetic construct
  source 1..75: mol_type = other DNA
tgccgaaactgggctggatgcgctaccggaatagccgtcaggtcacgggtgttgtgaaaaatgtcacggtcagcc

SEQ ID NO: 546282 - DNA, 75 bp, synthetic construct
  source 1..75: mol_type = other DNA
tcacgggtgttgtgaaaaatgtcactgtcagccagtcctgcggtaagtggtacatcagtattcaggcagaaagtg

SEQ ID NO: 546283 - DNA, 75 bp, synthetic construct
  source 1..75: mol_type = other DNA
cagatgccaggtatgtggatacacagcgaacgccgatgtaaacggcgctcgtaacattttagcggcggggcacgc

SEQ ID NO: 546284 - DNA, 75 bp, synthetic construct
  source 1..75: mol_type = other DNA
ctgacacaaagtaaattcgtgtgtcaggcatgtggatatacagcgaacgccgatgtaaacggcgctcgtaacatt

SEQ ID NO: 546285 - DNA, 75 bp, synthetic construct
  source 1..75: mol_type = other DNA
atgcgctaccggaatagccgtcaggtcacgggtgttgtgaaaaatgtcactgtcagccagtcctgcggtaagtgg

SEQ ID NO: 546286 - DNA, 75 bp, synthetic construct
  source 1..75: mol_type = other DNA
actgagcggcggtgaaaaactgctggtgagtcaggccaatatgacaggcgaagagctacctgccacgctcacgcc

SEQ ID NO: 546287 - DNA, 75 bp, synthetic construct
  source 1..75: mol_type = other DNA
cgcctgtcacaaagtaaattcagatgccaggcatgtggatatacagcgaacgccgatgtaaatggcgctcgtaac

SEQ ID NO: 546288 - DNA, 75 bp, synthetic construct
  source 1..75: mol_type = other DNA
cagcgttgcgcgtgctgtggtcatacagcgaaagaaaatcgcctgtcacaaagtaaatttgagtgtcaggtatgt

SEQ ID NO: 546289 - DNA, 75 bp, synthetic construct
  source 1..75: mol_type = other DNA
agcaacaactggcagaagcagaaacgcaaaatacagcgactgcattcctgtatcgcaaatatccgcagggactac

SEQ ID NO: 546290 - DNA, 75 bp, synthetic construct
  source 1..75: mol_type = other DNA
ctggagattgctcaacaacaagaaggggcagggctgacgcgtaaagagatcctcaccaaatatgtgttgctgaat

SEQ ID NO: 546291 - DNA, 75 bp, synthetic construct
  source 1..75: mol_type = other DNA
ggcaacgcaacaggcaccacaattaatggcgggttccagaatatttccagtggtggcagtgctaccagcaccatt

SEQ ID NO: 546292 - DNA, 75 bp, synthetic construct
  source 1..75: mol_type = other DNA
ctaagcgatggggtgttatcattaggggcatttgtttccttctctgataacaatatcaggcataatcgaggaggg

SEQ ID NO: 546293 - DNA, 75 bp, synthetic construct
  source 1..75: mol_type = other DNA
tcagtggtaatttttctcaggatagcggtatttttatccaaaatcatggaacaatgataatggataatctacggg

SEQ ID NO: 546294 - DNA, 75 bp, synthetic construct
  source 1..75: mol_type = other DNA
accaaatccttgcaggctgaggctggcgtgaagctggggatgaccttggacgttacaggaaaagaggtcaaaccg

SEQ ID NO: 546295 - DNA, 75 bp, synthetic construct
  source 1..75: mol_type = other DNA
gtgaatgctcagttgacgccaatcgccggtatatgggcagaggctggctatcagaaagggaataagatggagtca

SEQ ID NO: 546296 - DNA, 75 bp, synthetic construct
  source 1..75: mol_type = other DNA
atgagcgacggtgtggcagtgaaaggtgattacacccagaatggttttggcggtagtctggaggcaggtaaaact

SEQ ID NO: 546297 - DNA, 75 bp, synthetic construct
  source 1..75: mol_type = other DNA
cgtgagcgcgatttgctggaaagattaattacgctcggtaaaacgcaccatctcgatgcccattacattactcgc

SEQ ID NO: 546298 - DNA, 75 bp, synthetic construct
  source 1..75: mol_type = other DNA
tcttgccgctcgtcagtacgcggctcgccacttcgaacaatttattgaaagtggttgtgcgaaatttgcggatat

SEQ ID NO: 546299 - DNA, 75 bp, synthetic construct
  source 1..75: mol_type = other DNA
accagcttatcgattgttggcgagatgacgctgaccatcgatcactgcctgctggtttctggtactacagattta

SEQ ID NO: 546300 - DNA, 75 bp, synthetic construct
  source 1..75: mol_type = other DNA
cgttatacggcttacaggtactggagcgaattgaggcaaaccagcgacaaaacttcacccggtttgtggtgctgg

SEQ ID NO: 546301 - DNA, 75 bp, synthetic construct
  source 1..75: mol_type = other DNA
taaattccttaatcgttatccacactggaaaatcgaatacaccgaaagcacatccgccgcaatggaaaaagtcgc

SEQ ID NO: 546302 - DNA, 75 bp, synthetic construct
  source 1..75: mol_type = other DNA
ccagcaacatctcaataaaattaatccacactcagcacgtattgcttttctcggtccgaaaggctcttattccca

SEQ ID NO: 546303 - DNA, 75 bp, synthetic construct
  source 1..75: mol_type = other DNA
ctacagtggtggcagtgccacgagtaccaccattaaccatggtcaccagtatgtctatggtagtgccacgagtac

SEQ ID NO: 546304 - DNA, 75 bp, synthetic construct
  source 1..75: mol_type = other DNA
ggggttctccggtgtgcgcccgtctgttaaccgcctggtattcgcgtaccgagcgcggcggctggtgggcgttat

SEQ ID NO: 546305 - DNA, 75 bp, synthetic construct
  source 1..75: mol_type = other DNA
gcagttgcgctgcattatagctggcgtatcgggatgatgattgccggaagtttagccattatagtgggggttttt

SEQ ID NO: 546306 - DNA, 75 bp, synthetic construct
  source 1..75: mol_type = other DNA
actcacgtacttctgggggagtatgggggcactatataggatcagataaacacatcagcagccaaggagcgggtt

SEQ ID NO: 546307 - DNA, 75 bp, synthetic construct
  source 1..75: mol_type = other DNA
tcggataacaacagggtccggataaatgccagctataactttactaacgatatctcaggcaccacagggaaatac

SEQ ID NO: 546308 - DNA, 75 bp, synthetic construct
  source 1..75: mol_type = other DNA
agatgtcatgcagaatacccgttcaccgggtggagtctggggacggtacaccgggtcagatacccgcatcagcgg

SEQ ID NO: 546309 - DNA, 75 bp, synthetic construct
  source 1..75: mol_type = other DNA
gacgatgtttgaactgggcggatttatcggtgcgctggttgccggttggggttcggacaaactatttaatggtaa

SEQ ID NO: 546310 - DNA, 75 bp, synthetic construct
  source 1..75: mol_type = other DNA
agaagagcttgttctcgaatcagcaacgtcaccgtacgaaaaatatccccttcctggcggtggataacccggcgg

SEQ ID NO: 546311 - DNA, 75 bp, synthetic construct
  source 1..75: mol_type = other DNA
cacaggcggtggtctgtacgcggcctggtttgataatgacggctactacgtggacggtgtgctgaaatacaacca

SEQ ID NO: 546312 - DNA, 75 bp, synthetic construct
  source 1..75: mol_type = other DNA
acccagtttctccacggtactgccacgagcactaccattaataatgggggagatcagattgtcttcagcggcggc

SEQ ID NO: 546313 - DNA, 75 bp, synthetic construct
  source 1..75: mol_type = other DNA
aaggccatcaggctatagatacccaggtatctaaaggtggtgaattacaggttgagagcggttctgagctattgg

SEQ ID NO: 546314 - DNA, 75 bp, synthetic construct
  source 1..75: mol_type = other DNA
atgagtattgccgcaggtggtagtggaacgggaataattcaaaacaatggtggcgctatcagagcgaacacatcg

SEQ ID NO: 546315 - DNA, 75 bp, synthetic construct
  source 1..75: mol_type = other DNA
gtcggccagcgtctggaaaaagacggcgttgcgctgactatcgcggacattaaggccaaaccaggaacgcagttt

SEQ ID NO: 546316 - DNA, 75 bp, synthetic construct
  source 1..75: mol_type = other DNA
ctggtcactgcgccagcgcgcaaagtggtggaaatccgcaaaaccaccgtcggctgggtgagccagtttctgcgc

SEQ ID NO: 546317 - DNA, 75 bp, synthetic construct
  source 1..75: mol_type = other DNA
ccagacgttagacggcaacatcggaggttatcgcccggcactgattagaaaaatcggcctcgccagggtggtagc

SEQ ID NO: 546318 - DNA, 75 bp, synthetic construct
  source 1..75: mol_type = other DNA
attcaggtagcaaaagaagcggcagaaaaagtcaatacacggctggatgatgccgggagatggccagacggaatt

SEQ ID NO: 546319 - DNA, 75 bp, synthetic construct
  source 1..75: mol_type = other DNA
ttaaagaaatacctgaaaatcaagttaaagttccatatacatgggataaattaaaaaagaaatacttaagttatg

SEQ ID NO: 546320 - DNA, 75 bp, synthetic construct
  source 1..75: mol_type = other DNA
ccggaagaggaagcagttaaatccgcgtagctactggattaaacaggcgcaaaacgtttttaacgcttatatacg

SEQ ID NO: 546321 - DNA, 75 bp, synthetic construct
  source 1..75: mol_type = other DNA
gcatatcgcccagcgctgattaggaaaattggccttgccagggtggaagcgctggagaacaacaacgaaactcat

SEQ ID NO: 546322 - DNA, 75 bp, synthetic construct
  source 1..75: mol_type = other DNA
atgcagaaccctaaaaaaccaataagacgccgttgcaagtgctgcggcgttttttttgagcctaaatatcacaat

SEQ ID NO: 546323 - DNA, 75 bp, synthetic construct
  source 1..75: mol_type = other DNA
aacgttctgcgtcgtgaaactctggaagatgcagttaagcatccggaaaaatatccgcagctcaccatccgtgta

SEQ ID NO: 546324 - DNA, 75 bp, synthetic construct
  source 1..75: mol_type = other DNA
attgtgcaaatttttgatatgggccgtatagataatgaatggttctatattgaaatggagtattttcccagccaa

SEQ ID NO: 546325 - DNA, 75 bp, synthetic construct
  source 1..75: mol_type = other DNA
ataaagtgccgatgaaattcgccaactacgacgaagcacgtttccagaaagaaggcttccgcgtggtgccacccg

SEQ ID NO: 546326 - DNA, 75 bp, synthetic construct
  source 1..75: mol_type = other DNA
tattttatcaggcgtatttatcattgtttttttatggtcattttcccgctcatggcaacttacggcattacgcat

SEQ ID NO: 546327 - DNA, 75 bp, synthetic construct
  source 1..75: mol_type = other DNA
ccagtcagtgagctatggcatgctttagctcatccgtttagtcgtgataccagcgtccatgtcattgtctgggaa

SEQ ID NO: 546328 - DNA, 75 bp, synthetic construct
  source 1..75: mol_type = other DNA
ggcggcgatggcgattgttttaccctggtcgctgcgtcgtgcctggcagcttaccgcgctacgcctcggcgaaga

SEQ ID NO: 546329 - DNA, 75 bp, synthetic construct
  source 1..75: mol_type = other DNA
agagcgcgacgcaaatttaccctgtatttcgtgtggcacttactacggcgatcaatgcggttgggacgcggggca

SEQ ID NO: 546330 - DNA, 75 bp, synthetic construct
  source 1..75: mol_type = other DNA
ttagaagtaatagcctatcttgatgcaatcgcgaataatatagaacattatataaataataatgaatacttagag

SEQ ID NO: 546331 - DNA, 75 bp, synthetic construct
  source 1..75: mol_type = other DNA
gatcccggaacacgtttacgatatgtcatggatgtttgagttggtccgaacggacggtaataaggggtctgacgc

SEQ ID NO: 546332 - DNA, 75 bp, synthetic construct
  source 1..75: mol_type = other DNA
taccgcaatgtgtttatccaggataacccgggaatgcatttccgtcgggttatccgcaacgcggaaggtcagcga

SEQ ID NO: 546333 - DNA, 75 bp, synthetic construct
  source 1..75: mol_type = other DNA
tctcgacccggagcagtttcacccgatcagtgacatcgtggcgcagtatcaggacaagttgtatgcaatcagtaa

SEQ ID NO: 546334 - DNA, 75 bp, synthetic construct
  source 1..75: mol_type = other DNA
cccggcctcgacccggagcagtttcacccgatcagtgacatcgtggcgcagtatcaggacaagttgttcgccatc

SEQ ID NO: 546335 - DNA, 75 bp, synthetic construct
  source 1..75: mol_type = other DNA
ctcacactaaacatggtgaaaaattagccactgtcaaacaacatcgtaatgatttatctcatggcaatgtatcat

SEQ ID NO: 546336 - DNA, 75 bp, synthetic construct
  source 1..75: mol_type = other DNA
ggggctggggcgtttccggcaacgcatcgtcaggcactgggcatgctgggaatgcacggtacctacgaagccaat

SEQ ID NO: 546337 - DNA, 75 bp, synthetic construct
  source 1..75: mol_type = other DNA
acctgaggaaagcgtgccgttatatctacaacgtctggaatattatcgccgactttatcggccgaatccggtaga

SEQ ID NO: 546338 - DNA, 75 bp, synthetic construct
  source 1..75: mol_type = other DNA
tcattcgtgagggcgaagagaaaatgtcgtttaccagcaaaaaggaagccgagcaacgtgaagccctttcgctat

SEQ ID NO: 546339 - DNA, 75 bp, synthetic construct
  source 1..75: mol_type = other DNA
ctgaaggatctttctcatacgggcaggcggttgctgtcataaccgcttaccgcaatgtgtttatccaggataacc

SEQ ID NO: 546340 - DNA, 75 bp, synthetic construct
  source 1..75: mol_type = other DNA
atcagccgtgaagagttgatagcgctcggcaagcgcttcggcgttacaccactagctagtgcgctggcgctggcg

SEQ ID NO: 546341 - DNA, 75 bp, synthetic construct
  source 1..75: mol_type = other DNA
atgcaaaacattacccagtcctggtttgtccagggaatgatcaaagccaccaccgatgcctggctgaaaggctgg

SEQ ID NO: 546342 - DNA, 75 bp, synthetic construct
  source 1..75: mol_type = other DNA
ctacgacgaagcgcgtttccagaaagaaggtttccgcgtagtaccgccagcggcagtgcgtcagggggcatttat

SEQ ID NO: 546343 - DNA, 75 bp, synthetic construct
  source 1..75: mol_type = other DNA
cgaagctaaacggctgggcattaaaatgggcgtcccctggttccagctgaagacggcacaattcccggagccggt

SEQ ID NO: 546344 - DNA, 75 bp, synthetic construct
  source 1..75: mol_type = other DNA
aaaagcgggttgcatgctcaatgatttcactcctaccggggtttcgcagttgaacctgttcgatgatactcagcc

SEQ ID NO: 546345 - DNA, 75 bp, synthetic construct
  source 1..75: mol_type = other DNA
ttggttcggacgttatgcaggaaatctatctgacagccattaaacgttacccgaacgaagcgtgtggctttctgg

SEQ ID NO: 546346 - DNA, 75 bp, synthetic construct
  source 1..75: mol_type = other DNA
ttggctctgacgttatgcagcaaatctatctctgcgccataaatcgctaccctaatgaagcgtgtggctttctgg

SEQ ID NO: 546347 - DNA, 75 bp, synthetic construct
  source 1..75: mol_type = other DNA
gaactttaatgttgttcttgaacggactgtacgggagcttaatggagagagctgcatttcgcttgaagaagcccc

SEQ ID NO: 546348 - DNA, 75 bp, synthetic construct
  source 1..75: mol_type = other DNA
aggcaatccaaagcgaacggataaactgctctcacgacagccggtggaagaaatctggggagtaggtcgcaggat

SEQ ID NO: 546349 - DNA, 75 bp, synthetic construct
  source 1..75: mol_type = other DNA
agccgctttatgccaaagaaaaaagtcgaactggatgctggcatagagcaaagcgccatagtgattaaagaacgg

SEQ ID NO: 546350 - DNA, 75 bp, synthetic construct
  source 1..75: mol_type = other DNA
tccgccagcacgccgccgcgccattccaggtgtgcagctttgcattatctgtcaggaaatcgcagagctgaaagg

SEQ ID NO: 546351 - DNA, 75 bp, synthetic construct
  source 1..75: mol_type = other DNA
cttacggcgaatgcagactcatttgagataattcgctggatacctcattcaggtaatgactccaacttattgata

SEQ ID NO: 546352 - DNA, 75 bp, synthetic construct
  source 1..75: mol_type = other DNA
cgttctatgacagctgcgagaaggtgtttcgccctgacctgcggggtaaaccggttgtcgtgctgagcaacaacg

SEQ ID NO: 546353 - DNA, 75 bp, synthetic construct
  source 1..75: mol_type = other DNA
ggctaccacattctttgggggttaaccaacgaagccgttcccacttctgaacttccggctcactttctctcccac

SEQ ID NO: 546354 - DNA, 75 bp, synthetic construct
  source 1..75: mol_type = other DNA
ttttatctgccttttgcccgggtgcagcattgacagcgacaccgtgccggacctgatgtcacagcgacttgatct

SEQ ID NO: 546355 - DNA, 75 bp, synthetic construct
  source 1..75: mol_type = other DNA
gctgtatttcgctggaagaagcgcctccgccgaaacaacagattgtctgcagccggtcctttggggagcgtatca

SEQ ID NO: 546356 - DNA, 75 bp, synthetic construct
  source 1..75: mol_type = other DNA
ccaagagacaaagagaacttcagcacaaattcatattatgcagacgctgaaataggatatcgctggggactgagt

SEQ ID NO: 546357 - DNA, 75 bp, synthetic construct
  source 1..75: mol_type = other DNA
atgtttattgagcctcagtttgaacttacttatggacggattggaggtagtaaacaaaatctggctaatcaaacc

SEQ ID NO: 546358 - DNA, 75 bp, synthetic construct
  source 1..75: mol_type = other DNA
aaacgtttatagctatttaagtccaagagacaaagagaacttcagcacaaattcatattatgcagacgctgaaat

SEQ ID NO: 546359 - DNA, 75 bp, synthetic construct
  source 1..75: mol_type = other DNA
tggcaaatacagcctctactgtgcggtgatcgttaagaaagttgacgcgaaaactcgcggcaaagttggcattaa

SEQ ID NO: 546360 - DNA, 75 bp, synthetic construct
  source 1..75: mol_type = other DNA
cccaaataccccctcatttcacccactaatcgtccgattaaaaaccctgcagaaacggataatcatgccgataac

SEQ ID NO: 546361 - DNA, 75 bp, synthetic construct
  source 1..75: mol_type = other DNA
cagacattgctcatctgaaaggtgatcttaaatgcgatattgcgaatctgaaaggtgagcttaaatctgatacag

SEQ ID NO: 546362 - DNA, 75 bp, synthetic construct
  source 1..75: mol_type = other DNA
taactttactcgcgcttagcgccactgccgtctctcacgcggaagaaaaacgctatgtttctgacgaactgaata

SEQ ID NO: 546363 - DNA, 75 bp, synthetic construct
  source 1..75: mol_type = other DNA
tacaaactgacgccaacaccaattatgcccaggtgaaagacagctctggccgtaccgcctggatcccgttgaaac

SEQ ID NO: 546364 - DNA, 75 bp, synthetic construct
  source 1..75: mol_type = other DNA
cgacgtacgatgccatgcgacaggctgtctgccagtatgctgaacgtgcggccgagaaactgcgcggggaaagac

SEQ ID NO: 546365 - DNA, 75 bp, synthetic construct
  source 1..75: mol_type = other DNA
gtaaaagaaaagtatggtaaaaatctgataacaatctcgattgttgcatcatcccttttatttatattgggcgtt

SEQ ID NO: 546366 - DNA, 75 bp, synthetic construct
  source 1..75: mol_type = other DNA
aaagccttgagtttagaagcgaactccagatattttgattggtataatagacgaacgcgagagcgagaattggat

SEQ ID NO: 546367 - DNA, 75 bp, synthetic construct
  source 1..75: mol_type = other DNA
cggtagccagatgttccacggtcctgcctcactgtttggcggcgtggaatacagacgccctggcaaccgctgcgc

SEQ ID NO: 546368 - DNA, 75 bp, synthetic construct
  source 1..75: mol_type = other DNA
gtcggcatggggatgtcggctttccgcgcctgaacataatatttaccagaaacagggaaaaggcgtggtgtacct

SEQ ID NO: 546369 - DNA, 75 bp, synthetic construct
  source 1..75: mol_type = other DNA
atttgacaaccgactacctctatgagggcgcacaggcctggtatcctcattactcctggcatagcgatggtcgct

SEQ ID NO: 546370 - DNA, 75 bp, synthetic construct
  source 1..75: mol_type = other DNA
gtaaacaggaagaattacccggactcgatccggaacagtttcaccccatcagtgatgctgtcgcccagtatcagg

SEQ ID NO: 546371 - DNA, 75 bp, synthetic construct
  source 1..75: mol_type = other DNA
ggtgaaaaatattcgcaaacaggacgccactattccattaaccctgattgccgccgacagcatggatgagtacaa

SEQ ID NO: 546372 - DNA, 75 bp, synthetic construct
  source 1..75: mol_type = other DNA
atggcggcagcgaagagaagcctgttggtacggtctggtttgctttcgcttctgccagcggcgaaggcattactc

SEQ ID NO: 546373 - DNA, 75 bp, synthetic construct
  source 1..75: mol_type = other DNA
gccgggaatgcttcagcggtgaccgtgatgcagtacgacgtcaggcgacggcttatgcattacagacgttgcgac

SEQ ID NO: 546374 - DNA, 75 bp, synthetic construct
  source 1..75: mol_type = other DNA
atgaaaatagcgcgggtgtatttgcgggttagtacagaagaacaggatttgaccaggcaaaatgagattatcgaa

SEQ ID NO: 546375 - DNA, 75 bp, synthetic construct
  source 1..75: mol_type = other DNA
ctcaatgccccctgatgaactgaaacagcgcgttcaggacgcggcagcactcaatattccggtggttatccgggg

SEQ ID NO: 546376 - DNA, 75 bp, synthetic construct
  source 1..75: mol_type = other DNA
caacctcgtccggtcgcaccacaggaacagtcttttctggatacgcaggcctcacagctgcgcaaggccatgcaa

SEQ ID NO: 546377 - DNA, 75 bp, synthetic construct
  source 1..75: mol_type = other DNA
gtactggctcaaaagtcatgggatcagcgcggtaaattctctacagcatttaatccctgccttcttgccccattt

SEQ ID NO: 546378 - DNA, 75 bp, synthetic construct
  source 1..75: mol_type = other DNA
gacccgcaccttcaaaaactattttgatgttccgccgcataaatatcggatggcgaatatacagggcgaatcgcg

SEQ ID NO: 546379 - DNA, 75 bp, synthetic construct
  source 1..75: mol_type = other DNA
atgaaaatagcgcgggtgtatttgcgggttagttcagaggaacaggatttgactaggcaaaatgagattgtcgaa

SEQ ID NO: 546380 - DNA, 75 bp, synthetic construct
  source 1..75: mol_type = other DNA
cggcgatgctggtgaaaatcaaaacgccggaattaccgctgcatctggcaggcgaaacccagcgtcaggatttac

SEQ ID NO: 546381 - DNA, 75 bp, synthetic construct
  source 1..75: mol_type = other DNA
tatcactcaggatccgattgggctgaaggggggatggaatttttatcagtatccgttgaatccgataactgatat

SEQ ID NO: 546382 - DNA, 75 bp, synthetic construct
  source 1..75: mol_type = other DNA
ttgatctggaaaaggaacaagaatactgggaaggcgtggctggctggcggttaaaaattgaagaagaaagcacgc

SEQ ID NO: 546383 - DNA, 75 bp, synthetic construct
  source 1..75: mol_type = other DNA
gtccacaggagtttgctgcggtcgaccttggttcaaacagtttccacatggtcattgcccgtgtggtggatggcg

SEQ ID NO: 546384 - DNA, 75 bp, synthetic construct
  source 1..75: mol_type = other DNA
atggcggtagcattgttcagggttcagccggggtgcgcatcggtgcccccaccggcgtggcctgttcggtgtgcc

SEQ ID NO: 546385 - DNA, 75 bp, synthetic construct
  source 1..75: mol_type = other DNA
gccgttacggccagttgctgagcttcaccgactgttccggctaccagacccgttatggccatgaccgcttcgggc

SEQ ID NO: 546386 - DNA, 75 bp, synthetic construct
  source 1..75: mol_type = other DNA
aggtgacggcggtgcaccgcgaggaagggctgagccagtaccgcgcatacgacagccgtggacagttaactgcgg

SEQ ID NO: 546387 - DNA, 75 bp, synthetic construct
  source 1..75: mol_type = other DNA
ggcgacatctacctgggcaaaatcaaaaagtgggatgatgaagccatcgccaaactgaatccgggtctgaaactg

SEQ ID NO: 546388 - DNA, 75 bp, synthetic construct
  source 1..75: mol_type = other DNA
gttcaggcttcgccgcccgccaactggtgaaaaatattcgtaaacaggataccggtattccattgaccctgattg

SEQ ID NO: 546389 - DNA, 75 bp, synthetic construct
  source 1..75: mol_type = other DNA
cggcgatgctggtaaaaatcaaaacgccggagttaccactgcatctggcaggggaaacccagcgtcgggatttac

SEQ ID NO: 546390 - DNA, 75 bp, synthetic construct
  source 1..75: mol_type = other DNA
ctggggccagataatatgttgagtgaagaggcaatcacacgcggattgaactgcctatcgttgtttgctgaacgc

SEQ ID NO: 546391 - DNA, 75 bp, synthetic construct
  source 1..75: mol_type = other DNA
ctggggccagataatatgttgagtgaagaggcaatgacgcgcggtttgaactgtctgtcgctgtttgccgaacgg

SEQ ID NO: 546392 - DNA, 75 bp, synthetic construct
  source 1..75: mol_type = other DNA
cctatcacttctaccaccttcattctgatccacaaagatcagaagaaacctgagcagggtgtagaagtgctgaag

SEQ ID NO: 546393 - DNA, 75 bp, synthetic construct
  source 1..75: mol_type = other DNA
caacggcgatatgcgggcgacggctaatgccgttgctggtctggtgaaagagagcaataccggcggggtacagat

SEQ ID NO: 546394 - DNA, 75 bp, synthetic construct
  source 1..75: mol_type = other DNA
ataaaataatcaaccaactggatatagcgattgataacgcgagaatattccaggcaattcagtatttgcctcctt

SEQ ID NO: 546395 - DNA, 75 bp, synthetic construct
  source 1..75: mol_type = other DNA
gagtatcagcgaggttaacggcgacgccaaactcatgaaatacgcgccagaggcactctataactacggtccgtc

SEQ ID NO: 546396 - DNA, 75 bp, synthetic construct
  source 1..75: mol_type = other DNA
cggaactaccatatatacttaacttataccgtctggcaaaattcattcaacttcaatccattgattataaaggtt

SEQ ID NO: 546397 - DNA, 75 bp, synthetic construct
  source 1..75: mol_type = other DNA
aattttccgaccaaacagcactggcgcgctgattcccgcatggagtggattgaagatggcttgcaggacttacgc

SEQ ID NO: 546398 - DNA, 75 bp, synthetic construct
  source 1..75: mol_type = other DNA
cgcgctctggatgagcagtatcagcgcctgcataacgaacgtatggacaaatttaaagattacttttcgtgggga

SEQ ID NO: 546399 - DNA, 75 bp, synthetic construct
  source 1..75: mol_type = other DNA
caatggaaggctgaaaaagaaaaaatcatgtatggcgatgacttgcataaactgtctccttcatttaaccgacct

SEQ ID NO: 546400 - DNA, 75 bp, synthetic construct
  source 1..75: mol_type = other DNA
ccgcagcaaaagcgtttggcaccgggatccgcaatggtctggcgtttaatcaatttgaagtattcaatgatgagc

SEQ ID NO: 546401 - DNA, 75 bp, synthetic construct
  source 1..75: mol_type = other DNA
tcggtgaggactccctggaaaccctaacgctcgactcttctgcacctttcctgaaccaacgaattaacgctggga

SEQ ID NO: 546402 - DNA, 75 bp, synthetic construct
  source 1..75: mol_type = other DNA
tgggcatcgcctcacagatcccgatagtttccgtgtactggcgcaaaagccctgggatcagcgaggaaagttttc

SEQ ID NO: 546403 - DNA, 75 bp, synthetic construct
  source 1..75: mol_type = other DNA
cggcggcaaaagcgtttggcaccgggatccgcaatggtctggcgtttaatcagtttgaagtatttaacgatgagc

SEQ ID NO: 546404 - DNA, 75 bp, synthetic construct
  source 1..75: mol_type = other DNA
atggcaatattaggtttaggtacggatattgtggagatcgctcgcatcgaagcggtgatcgcccgatccggtgag

SEQ ID NO: 546405 - DNA, 75 bp, synthetic construct
  source 1..75: mol_type = other DNA
gatccgtaatggcctggcatttaatcagtttgaagtgtttaacgatgagctcggcaagccaagactacggttgtg

SEQ ID NO: 546406 - DNA, 75 bp, synthetic construct
  source 1..75: mol_type = other DNA
agcgcggtaaattctctacagcatttaatccctgccttcctgccccatttggcccctgggatacgctagcccgca

SEQ ID NO: 546407 - DNA, 75 bp, synthetic construct
  source 1..75: mol_type = other DNA
gtgtaatggataaacactcgctatggcagcgttatgtcccgctggtgcgtcacgaagcattgcgcctgcaggttc

SEQ ID NO: 546408 - DNA, 75 bp, synthetic construct
  source 1..75: mol_type = other DNA
gcacaggcaatagggcaactggagcaggaacttggccgcaacgccacggaaactgaggtagcggaacgtttaggg

SEQ ID NO: 546409 - DNA, 75 bp, synthetic construct
  source 1..75: mol_type = other DNA
gatcgaggacaacctggaatcgccactgtcactggagaaagtgtcagagcgttcgggttactccaaatggcacct

SEQ ID NO: 546410 - DNA, 75 bp, synthetic construct
  source 1..75: mol_type = other DNA
acgacaaaccggttatctggacggtatctgtaacgcggctgttcgagctgtttcgcgatatcagcctcgagtttg

SEQ ID NO: 546411 - DNA, 75 bp, synthetic construct
  source 1..75: mol_type = other DNA
ctgcgcgccatcgtgcgtgatggacagcaacaggtgctcgaacagacgcccccttgggtgatacccgcacacacc

SEQ ID NO: 546412 - DNA, 75 bp, synthetic construct
  source 1..75: mol_type = other DNA
gctggcggattttgccgccacgctgcggaaaaccgacgtcccggtcgaacaaccattcgtccactcccctgaaga

SEQ ID NO: 546413 - DNA, 75 bp, synthetic construct
  source 1..75: mol_type = other DNA
tggaacaggaaaatactgactgtcacgaccactgcaacaccgccggttgacctcacagcaccgcagggttcacag

SEQ ID NO: 546414 - DNA, 75 bp, synthetic construct
  source 1..75: mol_type = other DNA
aacgtgaagccctttcgctatggctggcagaacaaaaagatgtgctgagcaccattctgaaaaccggcaaattac

SEQ ID NO: 546415 - DNA, 75 bp, synthetic construct
  source 1..75: mol_type = other DNA
aacggagaacaactggatgccgacccggacaccttttccgtcgtgcgctggatgcccggctcactcttgacctag

SEQ ID NO: 546416 - DNA, 75 bp, synthetic construct
  source 1..75: mol_type = other DNA
caacggtgctctgactgcccgtgcggttgtcagccagcgtgttccggcagggatgaccatgatgtaccacgcgca

SEQ ID NO: 546417 - DNA, 75 bp, synthetic construct
  source 1..75: mol_type = other DNA
atctgctgcgtaagctcaactacaccaaagcggaaggtccggcgaaaggccagccgatgctgaacaccgcaattg

SEQ ID NO: 546418 - DNA, 75 bp, synthetic construct
  source 1..75: mol_type = other DNA
aagtgctgccattatcgcccatacgcaaaaacgtctgcttccgccaccggtgacccgccctgtgacgccgccccg

SEQ ID NO: 546419 - DNA, 75 bp, synthetic construct
  source 1..75: mol_type = other DNA
gagtttgcgaccattcttgccggtatcagcgccggcggcatgtactgcccggagtgtggcacagttcactggccg

SEQ ID NO: 546420 - DNA, 75 bp, synthetic construct
  source 1..75: mol_type = other DNA
tgctgcgcagacctgaatattccgttctttgtggatgagggaaacaaaaagctggtcttctggtttgtacgtgtt

SEQ ID NO: 546421 - DNA, 75 bp, synthetic construct
  source 1..75: mol_type = other DNA
tgctgcgctgacctggggattccgttctttctggatgcaggaaacaaaaagctggtcttctggtttgttcgtgtc

SEQ ID NO: 546422 - DNA, 75 bp, synthetic construct
  source 1..75: mol_type = other DNA
ataaagtaacaaaagaaaatgatgtttatgatagtctaaatttttcaagcaaagatttaacgaattcttatatga

SEQ ID NO: 546423 - DNA, 75 bp, synthetic construct
  source 1..75: mol_type = other DNA
caaacttccccgctatgtcgtgaagcttcacgaagatgatttttttgacgaagaaaacgcagaagttctgcgctt

SEQ ID NO: 546424 - DNA, 75 bp, synthetic construct
  source 1..75: mol_type = other DNA
tgataattttgacgatgccgttgagtgctgcgcagacctgaatatttccttctttgtggatgcgggaaacaaaaa

SEQ ID NO: 546425 - DNA, 75 bp, synthetic construct
  source 1..75: mol_type = other DNA
agacccaacaaaccgcctacgcccgatccaagtaaatttccagacatagcgaaacaattaagactgccatatcct

SEQ ID NO: 546426 - DNA, 75 bp, synthetic construct
  source 1..75: mol_type = other DNA
ggccatccggtcaatcccctgctcggtgcaaaggtccttcccggtgaaaccgacatcgccctgcccggcccgctg

SEQ ID NO: 546427 - DNA, 75 bp, synthetic construct
  source 1..75: mol_type = other DNA
tgctgcgcagacctgaatatttccttctttgtggatgccggaaacaaaaagctggtcttctggtttgttcgtgtt

SEQ ID NO: 546428 - DNA, 75 bp, synthetic construct
  source 1..75: mol_type = other DNA
cgtgttgatgacgaagggtatccggaaatagcccgctgcacggagcgggaatttgcaaccattcttgccggtatc

SEQ ID NO: 546429 - DNA, 75 bp, synthetic construct
  source 1..75: mol_type = other DNA
tacaaagacagcaagtgattacctgccacagacaaattggccaacaactcaattaccaccaggatatacttgtgc

SEQ ID NO: 546430 - DNA, 75 bp, synthetic construct
  source 1..75: mol_type = other DNA
caccgcgaggaagggctgagccagtaccgcgcatacgacagccgtggacagttaattgccgtgaaagacacgcag

SEQ ID NO: 546431 - DNA, 75 bp, synthetic construct
  source 1..75: mol_type = other DNA
ccgcactctggcaggcgctgccggaagaactccgcttaagtccgcatcgttatctggcgacaaacagtccgcagg

SEQ ID NO: 546432 - DNA, 75 bp, synthetic construct
  source 1..75: mol_type = other DNA
atggggacaagtgcgttaaatcacagaagccaggaatatattgattcagctaaaggtaataactggattgcgaga

SEQ ID NO: 546433 - DNA, 75 bp, synthetic construct
  source 1..75: mol_type = other DNA
aaggttgggtgactaaccctaaaggtgtgataaacgaccttgagggggaagataccgaaggaaagactagagtcg

SEQ ID NO: 546434 - DNA, 75 bp, synthetic construct
  source 1..75: mol_type = other DNA
attccaaatattattagcttcgaagcgaccgatataccgcaaaataaaatagaacaaaaaaatgtacttgctgtg

SEQ ID NO: 546435 - DNA, 75 bp, synthetic construct
  source 1..75: mol_type = other DNA
cggcagaaatgatgaaaaaggcgagggaataccgggatcaggaagaggcaaggcggctggaacatcgggtgcaaa

SEQ ID NO: 546436 - DNA, 75 bp, synthetic construct
  source 1..75: mol_type = other DNA
gatactaaaatcaaatggtgagttcttatctgggtggaaaataaatccagatgcggataatgggcgaatttattt

SEQ ID NO: 546437 - DNA, 75 bp, synthetic construct
  source 1..75: mol_type = other DNA
gtctcgcccggctgctgtttcttttgcccgtctggagcctgcttccggaaatgagcaaaaaattattcgtcttat

SEQ ID NO: 546438 - DNA, 75 bp, synthetic construct
  source 1..75: mol_type = other DNA
cggatggcagggcatcggcattttactataaccaccacagccagttaacgtcagccaccgggcctgacgggctgg

SEQ ID NO: 546439 - DNA, 75 bp, synthetic construct
  source 1..75: mol_type = other DNA
aacagcagggatagatgatttgggtgaaattttagctaaaatgaaacagagaacatcgagaggaataagaaaatg

SEQ ID NO: 546440 - DNA, 75 bp, synthetic construct
  source 1..75: mol_type = other DNA
tggcagtgtggtgttcccgccggtgctggtgcagatgctcgaccggctggaaagtgaaatcctggctgaccgggt

SEQ ID NO: 546441 - DNA, 75 bp, synthetic construct
  source 1..75: mol_type = other DNA
aaagcaggcgcacaaacaacaattaagttcggacaagacgaaacaataaaagatgtcggaattggtgatccagaa

SEQ ID NO: 546442 - DNA, 75 bp, synthetic construct
  source 1..75: mol_type = other DNA
ggcaggcgctgccggaagacctgcgcttaagtccgcatcgttatctggcgacgaacagtccgcaggggccgtggt

SEQ ID NO: 546443 - DNA, 75 bp, synthetic construct
  source 1..75: mol_type = other DNA
ggcaggcgctgccggaagaccttcgcgtaagtccgcatcgttatctggcgacgaacagtccgcaggggccgtggt

SEQ ID NO: 546444 - DNA, 75 bp, synthetic construct
  source 1..75: mol_type = other DNA
attcttgccggtatcagcgccggcggcatgtactgcccggagtgtggcacggttcactggccggacggagtcccc

SEQ ID NO: 546445 - DNA, 75 bp, synthetic construct
  source 1..75: mol_type = other DNA
ccctgcgcaacggaagatgccaccggcagccggaaaaccatgacgtggagccgttacggccagttgctgagcttc

SEQ ID NO: 546446 - DNA, 75 bp, synthetic construct
  source 1..75: mol_type = other DNA
agcaaggtgaatatttccccatgaatccgataagttcaaatgataatgatagtgtagacttgcgaaatataaaat

SEQ ID NO: 546447 - DNA, 75 bp, synthetic construct
  source 1..75: mol_type = other DNA
accctatgatgcactgatttctcatcctcatgtcggggaaataaaaatacaaactaaaaaccaacgacttgaacg

SEQ ID NO: 546448 - DNA, 75 bp, synthetic construct
  source 1..75: mol_type = other DNA
ctgtctgcctgattgcgtatagccaccatgcctgccgtacagaatgtgacgcgatgaccgcacactattaccgcc

SEQ ID NO: 546449 - DNA, 75 bp, synthetic construct
  source 1..75: mol_type = other DNA
ttcgcctggatggaccgcttctgtgatgagtactgcgggggtatctggtccttttacacgctcagcaatggcgga

SEQ ID NO: 546450 - DNA, 75 bp, synthetic construct
  source 1..75: mol_type = other DNA
tcaccggcgtgacggatggtgccgggcgtcacttccggctggtattgaccacgcaggcacagcgggcagaagagg

SEQ ID NO: 546451 - DNA, 75 bp, synthetic construct
  source 1..75: mol_type = other DNA
gccatcgtaggcatcttccatgacgaagctgtacgtaatgacgtcgccgaccgcctgcacccaatgggagcctct

SEQ ID NO: 546452 - DNA, 75 bp, synthetic construct
  source 1..75: mol_type = other DNA
gccatcgtcggtatcttccatgacgaagccatacgcaatgacgtcgccgaccgcctgcacccaatgggagtctct

SEQ ID NO: 546453 - DNA, 75 bp, synthetic construct
  source 1..75: mol_type = other DNA
gccgctaaagccgcgcgtctgctcacccgcctgaacgtgccggaacgcctgtggcatctggcgccatcgaccttc

SEQ ID NO: 546454 - DNA, 75 bp, synthetic construct
  source 1..75: mol_type = other DNA
atgaatacacaaaaccttcagttcgctgagcaggcagcaattattgcctcagtcgtccctgacgagctacgcatc

SEQ ID NO: 546455 - DNA, 75 bp, synthetic construct
  source 1..75: mol_type = other DNA
accaaattaagccattggatatcgattatcgcgatccgcgcggtgtgattgtgcatgtcaccggctggaatcggg

SEQ ID NO: 546456 - DNA, 75 bp, synthetic construct
  source 1..75: mol_type = other DNA
taccggcgtaccgcgtgaagcctgtgccgctaaagccgcgcgtctgctcacgcgcctgaacgtgccggaacgtct

SEQ ID NO: 546457 - DNA, 75 bp, synthetic construct
  source 1..75: mol_type = other DNA
tcgcacccgctaaccaatccgaatttgaactgaccgtcacgcaggtacccgacgaacagcgtatcgatttctggc

SEQ ID NO: 546458 - DNA, 75 bp, synthetic construct
  source 1..75: mol_type = other DNA
atggcaaaccaaagtagcgggtgaagcactttctcgcccggtggtcagcgatggtctggtgttgattcacaccag

SEQ ID NO: 546459 - DNA, 75 bp, synthetic construct
  source 1..75: mol_type = other DNA
aaaatgccactgaaacccaatggcttaaagatgccccatcacagccattgcagcagtcactgaaagaccttgagc

SEQ ID NO: 546460 - DNA, 75 bp, synthetic construct
  source 1..75: mol_type = other DNA
ttagcggcggggcacgccgttcttgcctgtgggggggtggtgcagtcaggccgcccgttgaagcaggaacccacc

SEQ ID NO: 546461 - DNA, 75 bp, synthetic construct
  source 1..75: mol_type = other DNA
gatggctggttctctaaagagcctgcattactttctggcggcgtgaccgtgtctggtgggcatgtctacattggc

SEQ ID NO: 546462 - DNA, 75 bp, synthetic construct
  source 1..75: mol_type = other DNA
tgggtggcgataatggtcgcgtcagcgcagtgctgatggaacagggccagatgatttggcagcagcgtatttccc

SEQ ID NO: 546463 - DNA, 75 bp, synthetic construct
  source 1..75: mol_type = other DNA
atggcaacctggtggtgggtgatagcgaaggttatctgcactggattaatgtggaagatggacgtttcgttgccc

SEQ ID NO: 546464 - DNA, 75 bp, synthetic construct
  source 1..75: mol_type = other DNA
tggatggaccggttgtgtgcggattacagcggtggcgtctgggctttttacaccctcagcaacggcggtgccttt

SEQ ID NO: 546465 - DNA, 75 bp, synthetic construct
  source 1..75: mol_type = other DNA
gagcccgacggtgagaaatggacgttgttcaacccgatgaatggcaacgatgcggagatgagcggagaggctgcc

SEQ ID NO: 546466 - DNA, 75 bp, synthetic construct
  source 1..75: mol_type = other DNA
gcgatgaccgcacactattaccgcctgcgggactacaccctgcaacaccccgagtcacaggccattctgcgcatt

SEQ ID NO: 546467 - DNA, 75 bp, synthetic construct
  source 1..75: mol_type = other DNA
atggcccgttcagctaacccccgtaaacgtaaccccgcctctcaaagaagcaaacttccccgctatgttgtgaaa

SEQ ID NO: 546468 - DNA, 75 bp, synthetic construct
  source 1..75: mol_type = other DNA
aaccattcttgccggtatcagtgccggtggtatgtactgcccggaatgcggcacagttcactggccgggcggagt

SEQ ID NO: 546469 - DNA, 75 bp, synthetic construct
  source 1..75: mol_type = other DNA
ttggtgaatggtattaagctgcaagggcaaatcgagtcttttgatcaattcgtgatcctgttgaaaaacacggtc

SEQ ID NO: 546470 - DNA, 75 bp, synthetic construct
  source 1..75: mol_type = other DNA
tgaagtgatcaccggcaccaatttgcaactgctactggagatggtgctggagcgcgaagggttaagcggtgaaga

SEQ ID NO: 546471 - DNA, 75 bp, synthetic construct
  source 1..75: mol_type = other DNA
tttacccttttgtttcgacagatggagagcaatacagttgtaggattgcgggttgatgagagtggggtgatagac

SEQ ID NO: 546472 - DNA, 75 bp, synthetic construct
  source 1..75: mol_type = other DNA
atgagcgaagtacacaacgtaactattcaaatgatggatctggttattgatttacagaaagcagtaaacgcggct

SEQ ID NO: 546473 - DNA, 75 bp, synthetic construct
  source 1..75: mol_type = other DNA
gtccagcttatccacagcattttgtgcacggttctgtggacaaaatacctggttacccaggccgtgccggcacgt

SEQ ID NO: 546474 - DNA, 75 bp, synthetic construct
  source 1..75: mol_type = other DNA
gtattcaagcctgaagcagtaagttttatccgtggagagctgaagctaaagagaaagcctccgggcctttatact

SEQ ID NO: 546475 - DNA, 75 bp, synthetic construct
  source 1..75: mol_type = other DNA
ccggcatggaaatgaatcgccggatcattggttttgctggcgttgccgagctgaaacagattgaaaatacagagc

SEQ ID NO: 546476 - DNA, 75 bp, synthetic construct
  source 1..75: mol_type = other DNA
ctttattcctcagcggtatgctctttgccgcctcctcattacctttgatgacacaggtacgcgccatcagcactc

SEQ ID NO: 546477 - DNA, 75 bp, synthetic construct
  source 1..75: mol_type = other DNA
ggcctggtggagttcttacaacttacgggtaaacagaccgttatcgactggttaagcgccaatgcgacctgcccg

SEQ ID NO: 546478 - DNA, 75 bp, synthetic construct
  source 1..75: mol_type = other DNA
accttcgtcctgagatccgagctcctagtcgcgagttgcagcgacggcatccatgtctcgacgatgccagcggag

SEQ ID NO: 546479 - DNA, 75 bp, synthetic construct
  source 1..75: mol_type = other DNA
aacgttactggaagattcgttaatattattggcagaacttgagtataatcttctttcaggtgaaagaactattat

SEQ ID NO: 546480 - DNA, 75 bp, synthetic construct
  source 1..75: mol_type = other DNA
ctatatccagattaaaaacaatcgcttatgacatgaagaatactattctggagtatgatacaccagtgaatgtca

SEQ ID NO: 546481 - DNA, 75 bp, synthetic construct
  source 1..75: mol_type = other DNA
tatgaattattccgggtgttcggaaattacgccggattcaacagactcctggactcaactcagcaagaaaattga

SEQ ID NO: 546482 - DNA, 75 bp, synthetic construct
  source 1..75: mol_type = other DNA
gctcaggggctacttagtgatctcacctttcagttgtcggctcatagcactacgcaggttgatcacattctcgta

SEQ ID NO: 546483 - DNA, 75 bp, synthetic construct
  source 1..75: mol_type = other DNA
agcagcgcgttgaagaagaacgccagcgccatatccgtgctgcccgagccaaaacgccgggcgtgtcccgcgtgc

SEQ ID NO: 546484 - DNA, 75 bp, synthetic construct
  source 1..75: mol_type = other DNA
ccgggtgtgcagctttgcattacctgccaggaaattgcagagctgaaaggcaaacattacaacgtaggtgctgta

SEQ ID NO: 546485 - DNA, 75 bp, synthetic construct
  source 1..75: mol_type = other DNA
gcgccacatccgtgctgcccgtgccaaaacaccgggcgtgtctcgcgtgctttgcatagagtgtgaagcgccaat

SEQ ID NO: 546486 - DNA, 75 bp, synthetic construct
  source 1..75: mol_type = other DNA
catggaccgatacagaggtaaggattacgccctccctggatttgcccctatatttccagacacctgttatcactt

SEQ ID NO: 546487 - DNA, 75 bp, synthetic construct
  source 1..75: mol_type = other DNA
cactcatcctgttggggcacatatttctgacacctgctgtacaggccatagggttcgactattacaatgatcacg

SEQ ID NO: 546488 - DNA, 75 bp, synthetic construct
  source 1..75: mol_type = other DNA
gcaaagcgatacccgtagatgatgacgtctcttttgaagtaggggaaagtcgcgttcgctggcgtaaacagctca

SEQ ID NO: 546489 - DNA, 75 bp, synthetic construct
  source 1..75: mol_type = other DNA
agcagcgcgttgaagaagaacgccagcgccatattcgtgctgcccgtgccaaaacaccgagcgtgtctcgtgtgc

SEQ ID NO: 546490 - DNA, 75 bp, synthetic construct
  source 1..75: mol_type = other DNA
ggccatgctgttcgtcaggtctatggcgtgattcagccttaccgaacacttgcagtgactcgccgtgatattgca

SEQ ID NO: 546491 - DNA, 75 bp, synthetic construct
  source 1..75: mol_type = other DNA
ttgaagaggctgatattagtgattctgtgattcataaaaaaatcccggtaaaatatgttcaggcaccatcctata

SEQ ID NO: 546492 - DNA, 75 bp, synthetic construct
  source 1..75: mol_type = other DNA
gcgccatatccgtgctgcccgtaccaaaacgccgggcgtgtcccgtgtactttgcattgaatgtgaagcgccaat

SEQ ID NO: 546493 - DNA, 75 bp, synthetic construct
  source 1..75: mol_type = other DNA
agcagcgcgttgaagaagaacgccagcgtcatattcgtgctgcccgtgccaaaacaccgggcgtgtctcgcgtgc

SEQ ID NO: 546494 - DNA, 75 bp, synthetic construct
  source 1..75: mol_type = other DNA
atgattattgatttagacgctctatttccagtcagaaagacttttatagatctggtaagttattgtactgatccg

SEQ ID NO: 546495 - DNA, 75 bp, synthetic construct
  source 1..75: mol_type = other DNA
ggatggatatactgatgaagaaaccactaacgcacataatttcatcgtgtggaacatcaggacactggaaaaaca

SEQ ID NO: 546496 - DNA, 75 bp, synthetic construct
  source 1..75: mol_type = other DNA
atgcttcaaaatacccatgctaccgcccctggctttacagctaccagagcactgcatgcatgcctacgatgtgac

SEQ ID NO: 546497 - DNA, 75 bp, synthetic construct
  source 1..75: mol_type = other DNA
ttaccctactacagggagcgcatctgtatgcgcctgaagatcggggaatctgtgatctcctcatcgctaatggca

SEQ ID NO: 546498 - DNA, 75 bp, synthetic construct
  source 1..75: mol_type = other DNA
tacagcccatctatgacctcctggaaaactgcgatgtgccaatcagtaagttgctgccgacgcatgttaaccgca

SEQ ID NO: 546499 - DNA, 75 bp, synthetic construct
  source 1..75: mol_type = other DNA
atattgtgaccttgtttacccaacgcaggccggaaatcagcggatttttagaaattttcggcaacccacgcagtt

SEQ ID NO: 546500 - DNA, 75 bp, synthetic construct
  source 1..75: mol_type = other DNA
gctcaggcaggagagggcgcgtcagatgccgtggggtataccggggttataaaccacatggttcataccggtatc

SEQ ID NO: 546501 - DNA, 75 bp, synthetic construct
  source 1..75: mol_type = other DNA
gtagtgattgcataaaacacttcaaaaaaatcatttctgtatgtgataagtacaaaatagacagaaaacaaagct

SEQ ID NO: 546502 - DNA, 75 bp, synthetic construct
  source 1..75: mol_type = other DNA
tcaggtttgggcaaacagtttcctgcctaacgaagccgaacgtgaagaccgcctgcaaagagaatatttcgcagc

SEQ ID NO: 546503 - DNA, 75 bp, synthetic construct
  source 1..75: mol_type = other DNA
gcattgacggaaatcgtcaaaacctggcaggagcaaaccgcagagctgggaaaaacgtatccgtgggtgcaggta

SEQ ID NO: 546504 - DNA, 75 bp, synthetic construct
  source 1..75: mol_type = other DNA
aacagcgcctcgaagtggttatgcactatttagctactgatgaaggctatcgcttaacatcagctcgctttaacg

SEQ ID NO: 546505 - DNA, 75 bp, synthetic construct
  source 1..75: mol_type = other DNA
acgtaccgttttcagcagaacgaaatgcggcgagggtcatttggcggactgccacagatagccgtccggttgtgt

SEQ ID NO: 546506 - DNA, 75 bp, synthetic construct
  source 1..75: mol_type = other DNA
aggctgctgctcactttatgcttgctggtagtggttctgtagccaagtggctgaaagtctatgaggagcacggag

SEQ ID NO: 546507 - DNA, 75 bp, synthetic construct
  source 1..75: mol_type = other DNA
gaaaaagcggcatcagcattggagctgtcaaaagaccgacgcattgaggatcttgaaaggcaagttcgatttctt

SEQ ID NO: 546508 - DNA, 75 bp, synthetic construct
  source 1..75: mol_type = other DNA
ccaggccagagactggctgagctggctggaaagtatgcccagcgagctgcaacaggtgaatgatggcgtggaacg

SEQ ID NO: 546509 - DNA, 75 bp, synthetic construct
  source 1..75: mol_type = other DNA
cgctcagcgagtctgaagccgaagatatgaccgatttaacggcagtttttgtctttctgaagaacgattgtggtt

SEQ ID NO: 546510 - DNA, 75 bp, synthetic construct
  source 1..75: mol_type = other DNA
ctcagcggcattggcattcccgtcgccaaaaagtgcaaagccctggctcgcgactctttaagcctgcttgcctac

SEQ ID NO: 546511 - DNA, 75 bp, synthetic construct
  source 1..75: mol_type = other DNA
gtctttctgaagaacgattgtggttaccagaacttacctaacgggcaaattcgtcgcgcactggtctttttcgcc

SEQ ID NO: 546512 - DNA, 75 bp, synthetic construct
  source 1..75: mol_type = other DNA
ttggagtgtatgaacatttttacgatgataatttttctgaagcggaattttctacacactacgtagtgcttggat

SEQ ID NO: 546513 - DNA, 75 bp, synthetic construct
  source 1..75: mol_type = other DNA
gaagagcgcggtggcgcgcccgtgggatcggaagttcctcgggtacagtgtgacatggcacaaacaggcgaagct

SEQ ID NO: 546514 - DNA, 75 bp, synthetic construct
  source 1..75: mol_type = other DNA
tctgaagccgaagatatggccgatttaacggcagtgtttgtttttctgaagaacgattgcggttaccagaactta

SEQ ID NO: 546515 - DNA, 75 bp, synthetic construct
  source 1..75: mol_type = other DNA
gcaaagtggggtgagccaaaaacaattcatgcccatgaactggtcgggcagccgacatggatagcgccgtttacc

SEQ ID NO: 546516 - DNA, 75 bp, synthetic construct
  source 1..75: mol_type = other DNA
tggaatgaaccgactgttgcacccgggcttccgcttatgccagcgttttcgcctgtgtctccggcggtttccccg

SEQ ID NO: 546517 - DNA, 75 bp, synthetic construct
  source 1..75: mol_type = other DNA
ccgcaaatgcaggtgaggccgtggacctgatggcggcagggatgcagaaaatgtcttccgaaatgcgcggcgaac

SEQ ID NO: 546518 - DNA, 75 bp, synthetic construct
  source 1..75: mol_type = other DNA
gaaggtcaagccgcagacacaatttaatcgacaataatggtcgtcgcctcgctcgcagtgtgctaacgtttatct

SEQ ID NO: 546519 - DNA, 75 bp, synthetic construct
  source 1..75: mol_type = other DNA
gtggcgcagcttgctcaaaaacttcatgaaatggctcaggaaggacagcgaatgccttcttgcatcaatataatt

SEQ ID NO: 546520 - DNA, 75 bp, synthetic construct
  source 1..75: mol_type = other DNA
ttaaccctaaaacaggcaagccgccagtggatagcaacggaaaacctatcgggccttttgataccagtaagacac

SEQ ID NO: 546521 - DNA, 75 bp, synthetic construct
  source 1..75: mol_type = other DNA
ggcggacaaagttcctgccgatcaactacgtaaaggcgatatcgtactggtagaagctggcgatattatcccctg

SEQ ID NO: 546522 - DNA, 75 bp, synthetic construct
  source 1..75: mol_type = other DNA
ccggggaatcagcaccggtgatccgtgaatccggcggcgattttgcctccgtcactggcggtacgcgtattcttt

SEQ ID NO: 546523 - DNA, 75 bp, synthetic construct
  source 1..75: mol_type = other DNA
ttgccaatggcgatatcggttttaactttaccgatagcaatctgattaagaagatttttgtcgataagctcacac

SEQ ID NO: 546524 - DNA, 75 bp, synthetic construct
  source 1..75: mol_type = other DNA
ggtgatgattaccggcgataaccgtctgactgccgccgccattgctgcggaagcgggtgtcgatgattttctcgc

SEQ ID NO: 546525 - DNA, 75 bp, synthetic construct
  source 1..75: mol_type = other DNA
gaaagaagcgggcaatatggtggatctcgactccaacccgaccaagttgatcgaggtggtgcacattggcaaaca

SEQ ID NO: 546526 - DNA, 75 bp, synthetic construct
  source 1..75: mol_type = other DNA
tggtctgtctgatcccaaccactattggcggcctgttgtcagcgatcggcgtcgccgggatgagtcggatgctgg

SEQ ID NO: 546527 - DNA, 75 bp, synthetic construct
  source 1..75: mol_type = other DNA
ctcctgcggcaagtccggctattccggctggaactaaatttagcatcctgctttcagattcgatctctgtggatg

SEQ ID NO: 546528 - DNA, 75 bp, synthetic construct
  source 1..75: mol_type = other DNA
gcctttaacaattaatagaaaatttgttcagtcagggcgcaccatccacgaaccgataaccattaacaacataca

SEQ ID NO: 546529 - DNA, 75 bp, synthetic construct
  source 1..75: mol_type = other DNA
ggcaggtagattttttttctgaattaaataacaaggctcctctggaaagcccgtcgttttccggagcgccaacca

SEQ ID NO: 546530 - DNA, 75 bp, synthetic construct
  source 1..75: mol_type = other DNA
agaacggcgaaaaaatcgcgcgttcaggcgcgtgaagctcgggcggcggtagaagaaaataaaaaggcacagctt

SEQ ID NO: 546531 - DNA, 75 bp, synthetic construct
  source 1..75: mol_type = other DNA
tggacttatatcaaaagctcagcaactatttgtatcggtggtaaaacaaatactggagaacgtcatctatttggt

SEQ ID NO: 546532 - DNA, 75 bp, synthetic construct
  source 1..75: mol_type = other DNA
tacaacccttaatatggcagcagtttcaacctcggggggggtcgatgtatcaggcgataataagagtgtgacgac

SEQ ID NO: 546533 - DNA, 75 bp, synthetic construct
  source 1..75: mol_type = other DNA
gcaggccaacagtctgaaaggggtgaaaaaaaccgcctttgctcgcaagctgcgcgagccgaaatatggtgctgt

SEQ ID NO: 546534 - DNA, 75 bp, synthetic construct
  source 1..75: mol_type = other DNA
atcccggatgccgatttagcctcattaatgaaacaaatgcccggtatggtgctgatcaaccgtatcctgcctggc

SEQ ID NO: 546535 - DNA, 75 bp, synthetic construct
  source 1..75: mol_type = other DNA
acgatcgctacggtgcctggctggcgacacgccatttaattcagcaaggtcatacgcgtattggttatctctgct

SEQ ID NO: 546536 - DNA, 75 bp, synthetic construct
  source 1..75: mol_type = other DNA
aataaaacccgtctggcgttcgctggtctgaaatttgctgatgctggctcaatcgattacggtcgtaactatggt

SEQ ID NO: 546537 - DNA, 75 bp, synthetic construct
  source 1..75: mol_type = other DNA
gaactggctttggcgctggcggataatcgccctctcccggaaattactaatgtatttagtccgacgctggtacgt

SEQ ID NO: 546538 - DNA, 75 bp, synthetic construct
  source 1..75: mol_type = other DNA
tcgttaattggctttgatgatgtgctggtgtcacgctatgtgcgtccgcgcctgaccaccgtgcgttacccaatc

SEQ ID NO: 546539 - DNA, 75 bp, synthetic construct
  source 1..75: mol_type = other DNA
cgtttttagtccgacgctggtgcgtcgtcattcagtttcaacgccgccgctggatacaatccatcatgcatccag

SEQ ID NO: 546540 - DNA, 75 bp, synthetic construct
  source 1..75: mol_type = other DNA
gtaactccaacttctttggtctggttgatggtctgaacttcgctgttcagtacctgggtaaaaacgagcgtgaca

SEQ ID NO: 546541 - DNA, 75 bp, synthetic construct
  source 1..75: mol_type = other DNA
atgggcgacagataacgacgccttacgccatctctcaaccgaaattattcaggcgcgttttctcgcctctggcct

SEQ ID NO: 546542 - DNA, 75 bp, synthetic construct
  source 1..75: mol_type = other DNA
gaggctatcgacagctatcgtaaactcagccattacttcagcgatgttggcttttatcaggcggcaatcccgacc

SEQ ID NO: 546543 - DNA, 75 bp, synthetic construct
  source 1..75: mol_type = other DNA
taaaggggaaacacaaatcaattccgatctgaccggttatggtcagtgggaatataacttccagggtaacaactc

SEQ ID NO: 546544 - DNA, 75 bp, synthetic construct
  source 1..75: mol_type = other DNA
aacgtgctggtattcctgagcgttccaacggcgacggcgtcggtggctcagctacgaattcgaaggctttggtat

SEQ ID NO: 546545 - DNA, 75 bp, synthetic construct
  source 1..75: mol_type = other DNA
ctacctatcgtaactccaacttcttcggtctggttgacggcctgaactttgccgttcagtacctgggcaaaaacg

SEQ ID NO: 546546 - DNA, 75 bp, synthetic construct
  source 1..75: mol_type = other DNA
tgcaattagtattcaactcgagcaattaaaaaatcttcatgctactatcggcgaatacttagagctgaataaaga

SEQ ID NO: 546547 - DNA, 75 bp, synthetic construct
  source 1..75: mol_type = other DNA
tagcggaactgccgccagagattgaacaacgttcactgaacggagccattctctcccccggttttattgatgtgc

SEQ ID NO: 546548 - DNA, 75 bp, synthetic construct
  source 1..75: mol_type = other DNA
cgcatgcattattttcacgatacccagctggatatgcatttttccgggctgacgtacgctgtactcagcctgttt

SEQ ID NO: 546549 - DNA, 75 bp, synthetic construct
  source 1..75: mol_type = other DNA
tatctaccgtttattgctgattggcctcggatcaccaatggtgatttacggcctggttcgcccgctcaccatcga

SEQ ID NO: 546550 - DNA, 75 bp, synthetic construct
  source 1..75: mol_type = other DNA
aaagtcttcgacggcgagctgaattttgccctcagactggcgcgtgagatggggaggcctgactggcgcgccatg

SEQ ID NO: 546551 - DNA, 75 bp, synthetic construct
  source 1..75: mol_type = other DNA
cgcacgcattattttcacgatacccagctggatatgcatttttccgggctgatgtacgctgtactcagcctgttt

SEQ ID NO: 546552 - DNA, 75 bp, synthetic construct
  source 1..75: mol_type = other DNA
gcaccagcaggcgccaatattgaacagttcatttttgcgggtaaaacaatatactaccgcaacggactttgtgtg

SEQ ID NO: 546553 - DNA, 75 bp, synthetic construct
  source 1..75: mol_type = other DNA
tgcaggaaaaagcgcagtccattcaggatgtgcttgccgggctggaagaccgtcgtgtggcgttaattcgtcagc

SEQ ID NO: 546554 - DNA, 75 bp, synthetic construct
  source 1..75: mol_type = other DNA
catcaatgtctctgcctgaagcctcagataatgaagggcgaacacgggaggcgctgacagagcagaaccggctga

SEQ ID NO: 546555 - DNA, 75 bp, synthetic construct
  source 1..75: mol_type = other DNA
tatacctcggcaaacctgagcgcgtacagcaacagcattgtggacacgcccacgtactttgcgtttgcaaaaggg

SEQ ID NO: 546556 - DNA, 75 bp, synthetic construct
  source 1..75: mol_type = other DNA
tgccgataagatggtgactttcgcctttatttgggtggcgctggcaatttttgtgatggatgcgatttatacgca

SEQ ID NO: 546557 - DNA, 75 bp, synthetic construct
  source 1..75: mol_type = other DNA
caattcctgccgtcgaaggctgaccatttctcaggtgggaaaatcacgcgtacatttagtaccagcaagccaggt

SEQ ID NO: 546558 - DNA, 75 bp, synthetic construct
  source 1..75: mol_type = other DNA
caatgacggttaccctgatggcgggagtcaatcccgtaggggaagtatgtgggtcgacattgaggctccggaagg

SEQ ID NO: 546559 - DNA, 75 bp, synthetic construct
  source 1..75: mol_type = other DNA
gcgtcaacctgaagaagtttcagcaggaagtccgggcgaaagcggaagctgccgccagcaacgctgagaagatcg

SEQ ID NO: 546560 - DNA, 75 bp, synthetic construct
  source 1..75: mol_type = other DNA
atgacgaatgtgaagggggtcaaatcgtggcatacagcaacaaaatttttgatgctgtatggttttgagtttaaa

SEQ ID NO: 546561 - DNA, 75 bp, synthetic construct
  source 1..75: mol_type = other DNA
aacttccggaggatgtgcgccgctggctggaacgggcgctgacagacagtggtttcagcggttatgccgaactgg

SEQ ID NO: 546562 - DNA, 75 bp, synthetic construct
  source 1..75: mol_type = other DNA
tttactgcacgcattattttcaggatacccagctggatatgcatttttccgggctgacgtacgccgtactcagcc

SEQ ID NO: 546563 - DNA, 75 bp, synthetic construct
  source 1..75: mol_type = other DNA
ataaatcaggcggcagagaagaaagcgggtctgcttaaacagatgggagagcaaatcgccgttttacaggatgcc

SEQ ID NO: 546564 - DNA, 75 bp, synthetic construct
  source 1..75: mol_type = other DNA
ctcaatcacaagatcctcaggcaaaaaatttgcttaaggatttactaaataatagtacggtagccagtctcgttg

SEQ ID NO: 546565 - DNA, 75 bp, synthetic construct
  source 1..75: mol_type = other DNA
agaacgttgatgctgatgccattgtttttgaagacatggaccgttttaatagtaataacatctttgaacgtcttc

SEQ ID NO: 546566 - DNA, 75 bp, synthetic construct
  source 1..75: mol_type = other DNA
agaaagcggcaggagttgccggaggcgtccggttctgtggggtgggtgggggcgatatttcaccttctgcggatg

SEQ ID NO: 546567 - DNA, 75 bp, synthetic construct
  source 1..75: mol_type = other DNA
gcggatgaggaaaaaatgctgatgcagaaagcggcaggacttgccggaggcatccggtttggtggggaaggaggg

SEQ ID NO: 546568 - DNA, 75 bp, synthetic construct
  source 1..75: mol_type = other DNA
gaggatgatgttgcattaatgatggcttcagcggggatttccggaggtgtgagatatgtcccagccggttggtga

SEQ ID NO: 546569 - DNA, 75 bp, synthetic construct
  source 1..75: mol_type = other DNA
gcgatccggatatgcatccggcggatttcagtctgcttgctccagcgtgtgaggaagagcagacggagatgccgg

SEQ ID NO: 546570 - DNA, 75 bp, synthetic construct
  source 1..75: mol_type = other DNA
ctggcctggtctgcggttcgtcagcaagattcaacgctggcgatccgtgccgttcatcaaggcatgacgatgcca

SEQ ID NO: 546571 - DNA, 75 bp, synthetic construct
  source 1..75: mol_type = other DNA
atggggagacccgactggcgcgccatgcttgccgggatgacatccaccgaatatgccgactggcgcgccatgctt

SEQ ID NO: 546572 - DNA, 75 bp, synthetic construct
  source 1..75: mol_type = other DNA
caaacaccaatggcaagaaaagccgaaaagccaatctgatgggcacttacagctacgactttaaaaccggcgaat

SEQ ID NO: 546573 - DNA, 75 bp, synthetic construct
  source 1..75: mol_type = other DNA
cgagattgccctgactatcctgctgattgctctgaccatcgtctttttactggcaaccgccacgctgtggccgtt

SEQ ID NO: 546574 - DNA, 75 bp, synthetic construct
  source 1..75: mol_type = other DNA
ggtgatgattaccggcgataaccgtctgactgccgccgcgatagctgcggaagcgggcgtcgatgattttctcgc

SEQ ID NO: 546575 - DNA, 75 bp, synthetic construct
  source 1..75: mol_type = other DNA
gattggacagttaagcgagcgcgatctctcccgcctgatggcagcggtcagcctgctggataccgcgcttgccgg

SEQ ID NO: 546576 - DNA, 75 bp, synthetic construct
  source 1..75: mol_type = other DNA
gccgatccacgcactgccggactgacagaacaactggcaaagggctatgtggatctgcttgatggtctgccattt

SEQ ID NO: 546577 - DNA, 75 bp, synthetic construct
  source 1..75: mol_type = other DNA
gtcgccgggatgagtcggatgctgggcgcgaatgtgattgccaccagcggacgtgcagttgaagcggcaggtgac

SEQ ID NO: 546578 - DNA, 75 bp, synthetic construct
  source 1..75: mol_type = other DNA
atcagccagagcaattaaatgaaatatgttctgctataataactgtcaaaactttaatttggttatttgttactt

SEQ ID NO: 546579 - DNA, 75 bp, synthetic construct
  source 1..75: mol_type = other DNA
atatacatctcttatactttttgcgtacgaagctttttatcgttattcattctgtaaatggaagagaattttatg

SEQ ID NO: 546580 - DNA, 75 bp, synthetic construct
  source 1..75: mol_type = other DNA
tggcatcagcatccggagatggcattgattcgttcagtcctgaaaacagcggcagaagaggtggagagtccgctc

SEQ ID NO: 546581 - DNA, 75 bp, synthetic construct
  source 1..75: mol_type = other DNA
tcatcactgaagttaataagctgaaatctcagtcaggtggtgaaatttacaacactattttttctggaaagcaca

SEQ ID NO: 546582 - DNA, 75 bp, synthetic construct
  source 1..75: mol_type = other DNA
cgtgccaggcaaagagatgcccgatctcagtgcttttcaactggaaggttgtcaggtgctggagtatgcgcggca

SEQ ID NO: 546583 - DNA, 75 bp, synthetic construct
  source 1..75: mol_type = other DNA
tcagcctcagggacaatgggcctttgctgacagttatatggaagccaaagccgcgaggctaggtctggggctggc

SEQ ID NO: 546584 - DNA, 75 bp, synthetic construct
  source 1..75: mol_type = other DNA
cgttccgggaactgacagcgaaagacagtattgacgcagaagcagaagccgagcgcgtggtggagacaaacaatg

SEQ ID NO: 546585 - DNA, 75 bp, synthetic construct
  source 1..75: mol_type = other DNA
agtgccgaatccgacaatcaccgtagtcaaagaagggctgggtgtattccagaacagcggtgcggattacctgat

SEQ ID NO: 546586 - DNA, 75 bp, synthetic construct
  source 1..75: mol_type = other DNA
ttaccgcatgttatgcgctataacgccgaatttacaggcgagaagtatcgcgatattgcgcgcgtaatgggcgtg

SEQ ID NO: 546587 - DNA, 75 bp, synthetic construct
  source 1..75: mol_type = other DNA
tcaaagaagggctcggtgtattccagaatagcggcgcggattacctgatcgctattggtggtggttctccacagg

SEQ ID NO: 546588 - DNA, 75 bp, synthetic construct
  source 1..75: mol_type = other DNA
tatgtctggccctggatattgccgttttcagcggcaggcatgaaacatactggcatacagggtaatgactccaac

SEQ ID NO: 546589 - DNA, 75 bp, synthetic construct
  source 1..75: mol_type = other DNA
aaaattgatacgtatagagatacagatggctgaagggtttattgacggatgtatttcaatgcttggagtcaggct

SEQ ID NO: 546590 - DNA, 75 bp, synthetic construct
  source 1..75: mol_type = other DNA
tgatgcaggaagatgatttcgaaatatgcgaaaatattttcagacaacaggacgaattacggaaaagaatcgatg

SEQ ID NO: 546591 - DNA, 75 bp, synthetic construct
  source 1..75: mol_type = other DNA
aaaacagcactgtcgtttattccgacatgcgtcacgccgaagtcgcaaaagtctattcacgagatgaacatacta

SEQ ID NO: 546592 - DNA, 75 bp, synthetic construct
  source 1..75: mol_type = other DNA
aagagaacaaaagttatcagtatgtgttaatgagcacagaataaaggatattccagtggtggatcttaatgagtt

SEQ ID NO: 546593 - DNA, 75 bp, synthetic construct
  source 1..75: mol_type = other DNA
atgagcacacgtaagaaaaaaacggcggtttctgacgaggccgtgatggcggctatccgggatgcacttgaggac

SEQ ID NO: 546594 - DNA, 75 bp, synthetic construct
  source 1..75: mol_type = other DNA
atttccggaaacctggtttggctcgttgctggatgagtttgaagaactgattgatgcatacgatgcggatgaaat

SEQ ID NO: 546595 - DNA, 75 bp, synthetic construct
  source 1..75: mol_type = other DNA
cgggggagaaagggcagttctttgcggattatctattagccacgcagcctcagccgggcggtcacccggtgattt

SEQ ID NO: 546596 - DNA, 75 bp, synthetic construct
  source 1..75: mol_type = other DNA
ttactgggggagtttgaagaagtgcttgatgcatacgacactgatgaaatcagcgagacgagttacatcaacaaa

SEQ ID NO: 546597 - DNA, 75 bp, synthetic construct
  source 1..75: mol_type = other DNA
gaggaggacggatttacgctgcagccatctgtttcaggaaccgatgagaccgaagcagtagtcccggatacgttg

SEQ ID NO: 546598 - DNA, 75 bp, synthetic construct
  source 1..75: mol_type = other DNA
cactggagaaagaagccaaggcgcaggggctgggtgaagatcaggtgcgcttctggcgtgagaagattttgggga

SEQ ID NO: 546599 - DNA, 75 bp, synthetic construct
  source 1..75: mol_type = other DNA
ggatgtggacaacgccgatattaaccagcgcctgctggaagtcattgaacagattggcagttattccagacagat

SEQ ID NO: 546600 - DNA, 75 bp, synthetic construct
  source 1..75: mol_type = other DNA
ttcattagtaaatttcatagtgatgaatgccaaatatttcgaagtgagattggtaaaaatgcgtttatagttaca

SEQ ID NO: 546601 - DNA, 75 bp, synthetic construct
  source 1..75: mol_type = other DNA
tcgttaaactgatggcttacggcagcattggtgtcggcagcagctttctcccctggtgtttattttgtgtcctgc

SEQ ID NO: 546602 - DNA, 75 bp, synthetic construct
  source 1..75: mol_type = other DNA
tgaatccggcggtgattttgcctccgtcactggcggcacgcgtattctttctgactggctggtgattgagtgcag

SEQ ID NO: 546603 - DNA, 75 bp, synthetic construct
  source 1..75: mol_type = other DNA
tcactacattgcggatgctgtcgcacagtctgctggtggggtgtttgtatcgcttcctgaaattgaggaagtaga

SEQ ID NO: 546604 - DNA, 75 bp, synthetic construct
  source 1..75: mol_type = other DNA
taatcggaaatgcctattcaacaaccccggtatcaaaagtcagatttactatcgctcaagttaataacgatacaa

SEQ ID NO: 546605 - DNA, 75 bp, synthetic construct
  source 1..75: mol_type = other DNA
cgcgctggtcgtccatgccaaaatgatcccggatgccgatttggcctcattgatgaagcaaatacccggcatggt

SEQ ID NO: 546606 - DNA, 75 bp, synthetic construct
  source 1..75: mol_type = other DNA
gcccttactgaaagcggtattccagttaatgaccggttagtaacttttggtgaaccggatgaaagtggcggcgaa

SEQ ID NO: 546607 - DNA, 75 bp, synthetic construct
  source 1..75: mol_type = other DNA
gcattgattcgtcagtatcaggcggaaggccgtttggtggcgatgaccggcgatggcaccaacgatgctccggcg

SEQ ID NO: 546608 - DNA, 75 bp, synthetic construct
  source 1..75: mol_type = other DNA
gtactgttcgctaatttcgccgaggcgctggcagaaggccgcagtaaagcgcaggccaacagtctgaaaggggtg

SEQ ID NO: 546609 - DNA, 75 bp, synthetic construct
  source 1..75: mol_type = other DNA
atggccagacgcagcacgatagaaaagctgccggaagacgtgcgtcgctggcttgagcgggcgctgactgaatcc

SEQ ID NO: 546610 - DNA, 75 bp, synthetic construct
  source 1..75: mol_type = other DNA
aggctgccgcacgcctgaaagaacgcctccgggacttccgtcacacacatgccgccgcacagttgggcgtttctg

SEQ ID NO: 546611 - DNA, 75 bp, synthetic construct
  source 1..75: mol_type = other DNA
aacagcactttggcgaagagatctatgtgacgcgtaaaggtgcggtgtctgcgcgtgctggtcaatatggaatta

SEQ ID NO: 546612 - DNA, 75 bp, synthetic construct
  source 1..75: mol_type = other DNA
aagttggcagcatcacccgaattactgaccactgaaaatgccccggtaaaaatgtggaccaaaggcgtgccggta

SEQ ID NO: 546613 - DNA, 75 bp, synthetic construct
  source 1..75: mol_type = other DNA
acgtgataaaggtgcctgggaaaatccacctgttaacgtcgatgctaaatgggctgagctggaagccggttatca

SEQ ID NO: 546614 - DNA, 75 bp, synthetic construct
  source 1..75: mol_type = other DNA
gggaaaacagcagtatgccatccgacgtgtatcagcagttctgtctggcgccggtacaaaaactcctgatggcag

SEQ ID NO: 546615 - DNA, 75 bp, synthetic construct
  source 1..75: mol_type = other DNA
gactcaagactcaagactcaagactcgttttccgttgatgataatgggtcaggtaatgtttttgtatgtggagat

SEQ ID NO: 546616 - DNA, 75 bp, synthetic construct
  source 1..75: mol_type = other DNA
gtggtgtgcgtaaaaggataaatgatgaaaaggatgattgcgctggatggcgcacagggcgaaggtggcgggcag

SEQ ID NO: 546617 - DNA, 75 bp, synthetic construct
  source 1..75: mol_type = other DNA
ccgacaacgccgataaaatcagtgatgactggaaagcctttgagcgtgccgtcgacgcacagagcggcgtaccgc

SEQ ID NO: 546618 - DNA, 75 bp, synthetic construct
  source 1..75: mol_type = other DNA
atttacgcaagggtttccatggaccttggtcatggtgacggaagagggcgttatgtaaaacaggtctactttaaa

SEQ ID NO: 546619 - DNA, 75 bp, synthetic construct
  source 1..75: mol_type = other DNA
taaacagaatggtaaacttatcgatcgccccaatattaaacaggctataaacgtatatcgttaccatgtaagaaa

SEQ ID NO: 546620 - DNA, 75 bp, synthetic construct
  source 1..75: mol_type = other DNA
cgaagatgccgtttattttcaaacatattgcggtaatgcctgatgtacacctgggtaaaggttccaccattggta

SEQ ID NO: 546621 - DNA, 75 bp, synthetic construct
  source 1..75: mol_type = other DNA
ccgccgtgggtgctgagtttaatgcctggaaatgggcacagttacgtgccggttaccgtcagaatatggccagca

SEQ ID NO: 546622 - DNA, 75 bp, synthetic construct
  source 1..75: mol_type = other DNA
gcaaacccggctttactgacaaagcacaacagcaatgatgatttcagcctgttactgccgtccgtgggcgcacaa

SEQ ID NO: 546623 - DNA, 75 bp, synthetic construct
  source 1..75: mol_type = other DNA
atggagcgtatatttacttcaaacctccagaatgaggctacagctaaagaagaaatatcacatcacgtcactgaa

SEQ ID NO: 546624 - DNA, 75 bp, synthetic construct
  source 1..75: mol_type = other DNA
gaagagatacaaccagaatgtcagataactggcgacaggccagttataaggataaacaatactttatgggaaagt

SEQ ID NO: 546625 - DNA, 75 bp, synthetic construct
  source 1..75: mol_type = other DNA
acaacggtttccatgacaacggacagcagttataccactctgcaacgtgtcgcagcgctggaacgttccggaatg

SEQ ID NO: 546626 - DNA, 75 bp, synthetic construct
  source 1..75: mol_type = other DNA
ctttataaccatttgaacattattccaatgatacacatctatgatgatgaagatttttctgaagtgcggagtttt

SEQ ID NO: 546627 - DNA, 75 bp, synthetic construct
  source 1..75: mol_type = other DNA
tgggctaccgcctggaaggcacagatgcacagaccctggaagtcaaaaaatacaaaggcagcttcccctatatct

SEQ ID NO: 546628 - DNA, 75 bp, synthetic construct
  source 1..75: mol_type = other DNA
gctgccccagaacgttcagggcggtgaatggcagtcacgggcgatagccatgaacaaggccctggtctttggcac

SEQ ID NO: 546629 - DNA, 75 bp, synthetic construct
  source 1..75: mol_type = other DNA
ggagcgtcatcagtggaaaggcatggactttgccgcacaggcagaggggatccgcaagctgaccgagaaatataa

SEQ ID NO: 546630 - DNA, 75 bp, synthetic construct
  source 1..75: mol_type = other DNA
agttggtgcgctcattctacccggcggcacgcggcatccgttacacacctgaaatgaaaaccgcgatggtgctca

SEQ ID NO: 546631 - DNA, 75 bp, synthetic construct
  source 1..75: mol_type = other DNA
cacctgcgcaccacctacttttcaacaccctcaacgctggcacatggcgcgtatccgttctggtcaggtgaactg

SEQ ID NO: 546632 - DNA, 75 bp, synthetic construct
  source 1..75: mol_type = other DNA
caggcccgttataaaaataaacaatacattatgggaaagtaatacagcagcagcgtttctgaacagaaagtcaca

SEQ ID NO: 546633 - DNA, 75 bp, synthetic construct
  source 1..75: mol_type = other DNA
ttacaggacgtcaggcggctatggcaatgctggaagagtacgacacggatatcaacacacgtgaaagtgccttgt

SEQ ID NO: 546634 - DNA, 75 bp, synthetic construct
  source 1..75: mol_type = other DNA
cgaatgtttatcacccagaaaagtatgattctcgcccgtgatttgggctaccgcctcgaaggaactgattctgat

SEQ ID NO: 546635 - DNA, 75 bp, synthetic construct
  source 1..75: mol_type = other DNA
tcaaaaaactgaccgaacagtacaacgtgacctatatcggtatcgactcaaccggcgttggtcacggggtttatg

SEQ ID NO: 546636 - DNA, 75 bp, synthetic construct
  source 1..75: mol_type = other DNA
cgggcgcagcgccacctatgaggccagccgcaccgaggaagccagccacgcggacgtcgcctgggcgaccatgca

SEQ ID NO: 546637 - DNA, 75 bp, synthetic construct
  source 1..75: mol_type = other DNA
gccaatatcctgacgccgttcagccgcctggtaacgccgaaaattaccgagatcctgggctttaacttaccagtc

SEQ ID NO: 546638 - DNA, 75 bp, synthetic construct
  source 1..75: mol_type = other DNA
ttcgccgacaacccgttcggctcccgcccggtctgggtgggatacgacccttcgcacagcggcgacagcgccggg

SEQ ID NO: 546639 - DNA, 75 bp, synthetic construct
  source 1..75: mol_type = other DNA
tcgccttcgcgcgcatggtcgaggtcgacctgtcaggcgacccgattgtcatcggcaacaacggcgcagaactga

SEQ ID NO: 546640 - DNA, 75 bp, synthetic construct
  source 1..75: mol_type = other DNA
gcgtcggtattcccgttcgaggagctgcagcgctgcatggtcgatgcgatggaagaatgggaggacttcgagccg

SEQ ID NO: 546641 - DNA, 75 bp, synthetic construct
  source 1..75: mol_type = other DNA
cgcgtcgtcaggcggcgctgctgtactggcaggggttttccgtgccgcagattgccgccatgttgcagatgaaac

SEQ ID NO: 546642 - DNA, 75 bp, synthetic construct
  source 1..75: mol_type = other DNA
ccgtggagtgaagtcccggataacttcctgtgcccggaatgctcccttggcaaagacgtctttgacgaactggca

SEQ ID NO: 546643 - DNA, 75 bp, synthetic construct
  source 1..75: mol_type = other DNA
ccccgtccacgctggcgcacgacgcctatccgttctggtccggtgaactgtttaaccggggacgcgccagcgccg

SEQ ID NO: 546644 - DNA, 75 bp, synthetic construct
  source 1..75: mol_type = other DNA
ccggacaacttcctgtgcccggaatgttcactcggcaaagacgtctttgacgaactggcatcggaggcaaaatga

SEQ ID NO: 546645 - DNA, 75 bp, synthetic construct
  source 1..75: mol_type = other DNA
ttacccgttctggtcgggggaattattcaaccggggccgcgccagcgccagcgagcgggttgacatcgatatcag

SEQ ID NO: 546646 - DNA, 75 bp, synthetic construct
  source 1..75: mol_type = other DNA
tcatgacgcgctcgccgctggcgtagcgtgtcctgacggtcagtggcggcagattgtcaccattgaggatgcgct

SEQ ID NO: 546647 - DNA, 75 bp, synthetic construct
  source 1..75: mol_type = other DNA
acccgacgcaaattgtcgagctgtacctgaaatgggcggctgattatcaggaagacagaatcaccattttctacg

SEQ ID NO: 546648 - DNA, 75 bp, synthetic construct
  source 1..75: mol_type = other DNA
ttaccccttctggtctggcgagctgttcaacaaggggcgcagccggattgccgaccgcatcgaaatcgacatcag

SEQ ID NO: 546649 - DNA, 75 bp, synthetic construct
  source 1..75: mol_type = other DNA
aagtgctcaacgcaatgggtaccggtgtacaactgctcagcaaagaaaaatgctgcggcgtaccgctgatcgcca

SEQ ID NO: 546650 - DNA, 75 bp, synthetic construct
  source 1..75: mol_type = other DNA
gcattaaatgtacagtttgcaccaccgcctgcccggtcagtcgggtaaatccgggttatccgggaccgaaacagg

SEQ ID NO: 546651 - DNA, 75 bp, synthetic construct
  source 1..75: mol_type = other DNA
gcaccactgttccgccagatagaagagagcggcgcagatctggtggtcaccgactgcgaaacctgcaaatggcag

SEQ ID NO: 546652 - DNA, 75 bp, synthetic construct
  source 1..75: mol_type = other DNA
ggaagtgctgaatgtcgacaacaaaggcttgcgcgatcacatcgaactggcgacccgctggctgtggcgcaagct

SEQ ID NO: 546653 - DNA, 75 bp, synthetic construct
  source 1..75: mol_type = other DNA
cgcctgcccggtgagccgggtgaatcccagctatccggggccaaaacaagccgggccggatggcgagcgtctgcg

SEQ ID NO: 546654 - DNA, 75 bp, synthetic construct
  source 1..75: mol_type = other DNA
atggttttactgataaggcgcgtaaacaagccatcactaacgtggaatcgatccgcgaagcggtaggcgtaaaag

SEQ ID NO: 546655 - DNA, 75 bp, synthetic construct
  source 1..75: mol_type = other DNA
aggtggaaaacgcctttatggcctgggtgggcggtgcgaatgaggccagcggagcgacgaaaacgctctccggcg

SEQ ID NO: 546656 - DNA, 75 bp, synthetic construct
  source 1..75: mol_type = other DNA
ttacacatcggcaaatctgagtgcttacagtaacaccattgtggatacgccgacgtactttgcttttgcgaaagg

SEQ ID NO: 546657 - DNA, 75 bp, synthetic construct
  source 1..75: mol_type = other DNA
gaaggcaatggcggatgatggaaagctgaccgccgataaggttgttcctgcactgattagccagcttggtacgct

SEQ ID NO: 546658 - DNA, 75 bp, synthetic construct
  source 1..75: mol_type = other DNA
gatgccgcgttaaaaatcgaccaccgtcgcacactgccgaaatactccttcggcaccttccgccgctggtatcgc

SEQ ID NO: 546659 - DNA, 75 bp, synthetic construct
  source 1..75: mol_type = other DNA
cggctggtttctctgattggccgtgtctcgcagacccggctacgcagcggcgatctcagcgatgatgactggcag

SEQ ID NO: 546660 - DNA, 75 bp, synthetic construct
  source 1..75: mol_type = other DNA
caccctgagcgaatcgctggaacagcaggaacaactcggacaggtgggcggcttcgcgtatctggcagagttgtc

SEQ ID NO: 546661 - DNA, 75 bp, synthetic construct
  source 1..75: mol_type = other DNA
cccggggcttgagttaacggtgctggattcccagtgctgcggtattgcaggtacttacggtttcaaaaaagagaa

SEQ ID NO: 546662 - DNA, 75 bp, synthetic construct
  source 1..75: mol_type = other DNA
aggtataagtccatctttttggattgcagtgagaatgaattatttcatgtcaagtcgtgttctactaagaaaatc

SEQ ID NO: 546663 - DNA, 75 bp, synthetic construct
  source 1..75: mol_type = other DNA
aataaacaatacattatgggaaagtaatacagcagcagcgtttctgaacagaaagtcacagtttttatatacaac

SEQ ID NO: 546664 - DNA, 75 bp, synthetic construct
  source 1..75: mol_type = other DNA
cggaactgaaaggcaaacaaccgggtgatgtagaagtgccggttattggcggtcactctggcgttaccattctgc

SEQ ID NO: 546665 - DNA, 75 bp, synthetic construct
  source 1..75: mol_type = other DNA
agccagaccggcaacgaggccgaccttaaccccaacgtcgccaaccgcaacaaaggggagcgcaaaaagccgaaa

SEQ ID NO: 546666 - DNA, 75 bp, synthetic construct
  source 1..75: mol_type = other DNA
gccagattgaacgactggcacgggtcaaccgttacagtcagaccggcaacgaggcagaccttaatccgaacgtcg

SEQ ID NO: 546667 - DNA, 75 bp, synthetic construct
  source 1..75: mol_type = other DNA
atgaagactcgggacgctgagttaaaagcgatgtcaaaactctcttcaggggtatttgatcatattctacctatt

SEQ ID NO: 546668 - DNA, 75 bp, synthetic construct
  source 1..75: mol_type = other DNA
aatgtggaacatccgacaggagtttgagcagaaaaataatgagttgctgagacagtaccagaccggagaaatcga

SEQ ID NO: 546669 - DNA, 75 bp, synthetic construct
  source 1..75: mol_type = other DNA
gcaaacgttgtgaagtcgcctgcccgtccgatgtgaagattggcgatatcatccagcgcgcgcgggcgaaatatg

SEQ ID NO: 546670 - DNA, 75 bp, synthetic construct
  source 1..75: mol_type = other DNA
gtacttacggtttcaaaaaagagaactaccccacctcacaagccatcggcgcaccactgttccgccagatagaag

SEQ ID NO: 546671 - DNA, 75 bp, synthetic construct
  source 1..75: mol_type = other DNA
ttggtctgtctctggttcgcgcactgcagggcgaacaaggcgttgtcgaatgtgcctacgttgaaggcgacggtc

SEQ ID NO: 546672 - DNA, 75 bp, synthetic construct
  source 1..75: mol_type = other DNA
atgaaagtcgcagtcctcggcgctgctggcggtattggccaggcgcttgcactactgttaaaaacccaactgcct

SEQ ID NO: 546673 - DNA, 75 bp, synthetic construct
  source 1..75: mol_type = other DNA
gcggagcgtcttgaaggcactgccggaggaaacagcgtttccaccctgatgcagaacgccggcgtcaagatcagc

SEQ ID NO: 546674 - DNA, 75 bp, synthetic construct
  source 1..75: mol_type = other DNA
ctctgcgacgatggacagtggcggcagattgtcaccattgaggacgcgcttgccggtggctgcaccctgtttgac

SEQ ID NO: 546675 - DNA, 75 bp, synthetic construct
  source 1..75: mol_type = other DNA
gtgaagccgctattattcagaaaatgtgtcaccttagtgattgtccagtcctgctcgtctatgacgcgcttacac

SEQ ID NO: 546676 - DNA, 75 bp, synthetic construct
  source 1..75: mol_type = other DNA
ctacccgttctggtccggtgaactgttcaaccggggacgcgccagcgccgctgaacgcgtggaaatcgacgtcag

SEQ ID NO: 546677 - DNA, 75 bp, synthetic construct
  source 1..75: mol_type = other DNA
cagggaacggttatgtgagctgaatattcacagaggaaatacagtggtgcaggtaactctggcctacgaagcacg

SEQ ID NO: 546678 - DNA, 75 bp, synthetic construct
  source 1..75: mol_type = other DNA
acttcccgtttgattttgcagcaaacacggttgtttctacttctgcatctatccagcgctccggctctgctgtat

SEQ ID NO: 546679 - DNA, 75 bp, synthetic construct
  source 1..75: mol_type = other DNA
ccgctacacaccggaaatgaaaaaccgcaatggtgctcaaggcaaaagacgttatccgccgtggctgtctggaat

SEQ ID NO: 546680 - DNA, 75 bp, synthetic construct
  source 1..75: mol_type = other DNA
gcgtatgtgttccgcgaatacatcatcgcctttgcccggctggttgacgttgacctgaccggtgacccgattgtc

SEQ ID NO: 546681 - DNA, 75 bp, synthetic construct
  source 1..75: mol_type = other DNA
ttgaaagcagccttgaggccaggctgattcagctcatcgccaagccgcaaaagacagggggtgatttcaaagaga

SEQ ID NO: 546682 - DNA, 75 bp, synthetic construct
  source 1..75: mol_type = other DNA
atgaccatttccaccgatacaaccttgttgcatgacccgcgacgccaggcatcgctgctttactggcaggggttt

SEQ ID NO: 546683 - DNA, 75 bp, synthetic construct
  source 1..75: mol_type = other DNA
ggttggtgcacggcatggcgcacccgttgagtgcattttacggtacgcctcatggcgtggcgaatgctgttttgc

SEQ ID NO: 546684 - DNA, 75 bp, synthetic construct
  source 1..75: mol_type = other DNA
atgtttgctctggccggaaataaatggaacaccacgctgcccggcggaaatatgcaatttcagggcgtcattatt

SEQ ID NO: 546685 - DNA, 75 bp, synthetic construct
  source 1..75: mol_type = other DNA
atcggtaacaacggcgcaaaactgatttttctcggtaccaattccaacaccgcgcagagccataacggcgatctg

SEQ ID NO: 546686 - DNA, 75 bp, synthetic construct
  source 1..75: mol_type = other DNA
gtagcctcttccttgcagagaggtcaaagtttatgacgaaatataccctaattgggttgctcgccgtgtgcgcca

SEQ ID NO: 546687 - DNA, 75 bp, synthetic construct
  source 1..75: mol_type = other DNA
acacaggaacgcctgaacagaaatattgctgccagaaccgccgcccagaatgcgctgaacagtacaacggcggtg

SEQ ID NO: 546688 - DNA, 75 bp, synthetic construct
  source 1..75: mol_type = other DNA
actcgccgtggccagaaataccagtgcggaggcgctggtcacacagaatgccgtcgcaaaacgtcgggccatgat

SEQ ID NO: 546689 - DNA, 75 bp, synthetic construct
  source 1..75: mol_type = other DNA
gcattaagatggcggcaaacagcatgtccggtgcagggggaataacgggcagtatcggcagctggctgagcggcg

SEQ ID NO: 546690 - DNA, 75 bp, synthetic construct
  source 1..75: mol_type = other DNA
agagcagccgtgtaccgtgctcagcaggccgtggcggcagcccgcgggacggagatgcagattgctgcagaggcc

SEQ ID NO: 546691 - DNA, 75 bp, synthetic construct
  source 1..75: mol_type = other DNA
agtgcgggtctggtgtattccccggtctaccacatcgccattcagaatgacggggctaacggacagatagggccg

SEQ ID NO: 546692 - DNA, 75 bp, synthetic construct
  source 1..75: mol_type = other DNA
ctgccacaggccactctggatgataaacagcagagcgccctgaataacacagagcgtcaactggccctgtcccgg

SEQ ID NO: 546693 - DNA, 75 bp, synthetic construct
  source 1..75: mol_type = other DNA
agccgctgacgtatggtcttatgcctatggcaacaatttacttaccctttcatcaatacataaccgaagaattat

SEQ ID NO: 546694 - DNA, 75 bp, synthetic construct
  source 1..75: mol_type = other DNA
ccaggccactaacagtcagatggatatcgtccaccaaatcacgctgttaatcgtgttgctgctttcttctaaagg

SEQ ID NO: 546695 - DNA, 75 bp, synthetic construct
  source 1..75: mol_type = other DNA
tgacaatggcggcggtgtttatcgcccaggcgactaacagtcagatggatatcgtccaccaaatcacgctgttaa

SEQ ID NO: 546696 - DNA, 75 bp, synthetic construct
  source 1..75: mol_type = other DNA
ccctgttccagggagcctggtgacctttaatctgccccggggtgtcaagccgcttacaggcgataatgtctgggt

SEQ ID NO: 546697 - DNA, 75 bp, synthetic construct
  source 1..75: mol_type = other DNA
ttgaatctataagcgagagatacacccgcttgcttcagctttatgtaaacaaagacagagaaatgagcttgataa

SEQ ID NO: 546698 - DNA, 75 bp, synthetic construct
  source 1..75: mol_type = other DNA
aatcgatgccatggagttcctcattaataaactggcgatgaccaagaccaatgacgatttcttcgaaatgatgaa

SEQ ID NO: 546699 - DNA, 75 bp, synthetic construct
  source 1..75: mol_type = other DNA
atttgatgatgaaggaaacctcgtaccgattaatcgtcctccagcaaactggaaacggctttactcaggctctac

SEQ ID NO: 546700 - DNA, 75 bp, synthetic construct
  source 1..75: mol_type = other DNA
gatggacttccgcgcccaggctgacgccatcaaaaaactgactgaacagtacaacgtgacatacatcggtatcga

SEQ ID NO: 546701 - DNA, 75 bp, synthetic construct
  source 1..75: mol_type = other DNA
ggaagatgcggtgcgcggtggctgtaacctgttcgaccttgaccagttgcgcatggaatacagcccggacgaata

SEQ ID NO: 546702 - DNA, 75 bp, synthetic construct
  source 1..75: mol_type = other DNA
agaacgtgaaagcgttttttcctgccgtccgggagtttgtctacagccccaacgttaaaaacgccctggtactca

SEQ ID NO: 546703 - DNA, 75 bp, synthetic construct
  source 1..75: mol_type = other DNA
gggtggtaagttccgcattcttgagcgtcaccagtggcgcgggatggacttccgcgcccagctgacgccatcaaa

SEQ ID NO: 546704 - DNA, 75 bp, synthetic construct
  source 1..75: mol_type = other DNA
aataccagaacctgctgatgtgtgagttcgtggacgatctcgcgtctgtgttcccgctcagcgagctgcaggcgt

SEQ ID NO: 546705 - DNA, 75 bp, synthetic construct
  source 1..75: mol_type = other DNA
tcaaaaaactgaccgaacagtacaacgtgacctatatcggcatcgactcaaccggcgttggtcacggggtttacg

SEQ ID NO: 546706 - DNA, 75 bp, synthetic construct
  source 1..75: mol_type = other DNA
gcccggtatggattggttacgacccgtcacaccgtggcgacagcgccggatgcgtggtactggcaccgccggtgg

SEQ ID NO: 546707 - DNA, 75 bp, synthetic construct
  source 1..75: mol_type = other DNA
ggcgcaaattcccgatacgccgatctactgtactgccaacgctatcgactcgataaatggtcatcaccatcatcc

SEQ ID NO: 546708 - DNA, 75 bp, synthetic construct
  source 1..75: mol_type = other DNA
tgcgtcgttatcgcaccgccggtcgttgccggtggcaaattccgcatcctcgagcgccaccagtggaaagggatg

SEQ ID NO: 546709 - DNA, 75 bp, synthetic construct
  source 1..75: mol_type = other DNA
gcccgtgaagccctgattgacgccctgctgaccgggcgtaaccagattttcctttctgccagcaaggctcaggct

SEQ ID NO: 546710 - DNA, 75 bp, synthetic construct
  source 1..75: mol_type = other DNA
tcataacgcccttgccggtgggcttctctgtgcagacggccagtggcggcagattgtcaccattgaggacgccct

SEQ ID NO: 546711 - DNA, 75 bp, synthetic construct
  source 1..75: mol_type = other DNA
accgacatcaccagctcgtttatggctatccgcaagaccatgaccagcagcggacgcagcaccacctatgaggcc

SEQ ID NO: 546712 - DNA, 75 bp, synthetic construct
  source 1..75: mol_type = other DNA
caaagaagggaaagatttcaaagagattgacctgctggcgcgccagtcggaacgccacgcgcggatcggcaagtt

SEQ ID NO: 546713 - DNA, 75 bp, synthetic construct
  source 1..75: mol_type = other DNA
gctattatcaaaacgctccgcctgcggcaaagacatgctctatttctccctgcgctatttgcctgtcgcgcgtgg

SEQ ID NO: 546714 - DNA, 75 bp, synthetic construct
  source 1..75: mol_type = other DNA
ggatttgacacgttgattctgcaatggagccgttacggcgatgctttcacccaaccagaacagcgcgcgttatta

SEQ ID NO: 546715 - DNA, 75 bp, synthetic construct
  source 1..75: mol_type = other DNA
tgacactgctgttagtcagccctttttcctttgcaatgaaaggtattatctggcagccacaaaatcgcgacagcc

SEQ ID NO: 546716 - DNA, 75 bp, synthetic construct
  source 1..75: mol_type = other DNA
cggtatggctattcacaagaaatggcgacaaacctatttttccacgccatccagtctgacacacagtgcttatcc

SEQ ID NO: 546717 - DNA, 75 bp, synthetic construct
  source 1..75: mol_type = other DNA
acctgctggcgcgccagtcagagcgccacgcccggatcggcaaatttaacgacggcgggaacgaagctgatttaa

SEQ ID NO: 546718 - DNA, 75 bp, synthetic construct
  source 1..75: mol_type = other DNA
ccgtctggagtttgacgccgggcacagcgacattgcgcagtcattcatggcaatccgtcgcgccaccaccgccag

SEQ ID NO: 546719 - DNA, 75 bp, synthetic construct
  source 1..75: mol_type = other DNA
tgacactgctcctggtcagccctttttcctttgcaatgaaaggtattatctggcaaccgcaaaaccgtgacagtc

SEQ ID NO: 546720 - DNA, 75 bp, synthetic construct
  source 1..75: mol_type = other DNA
tgacactgctgctggtcagccctttttcctttgcgatgaaaggtatcatctggcaaccgcaaaatcgtgacagtc

SEQ ID NO: 546721 - DNA, 75 bp, synthetic construct
  source 1..75: mol_type = other DNA
tcaaaaaactcaccgaacagtacaacgttacgtatatcggtatcgactcgactggcgttggtcacggggtttatg

SEQ ID NO: 546722 - DNA, 75 bp, synthetic construct
  source 1..75: mol_type = other DNA
taacgccggatggctggtacatcagtgcggaaattgacgatctgaactggcgcagcgaagccgcccgtcagccat

SEQ ID NO: 546723 - DNA, 75 bp, synthetic construct
  source 1..75: mol_type = other DNA
tcgctggcaatatgtcgcccgatggctatcggcaactgctggaacaagttagagcgacaggcgttaatgtctggg

SEQ ID NO: 546724 - DNA, 75 bp, synthetic construct
  source 1..75: mol_type = other DNA
ttcctttgcaatgaaaggtattatctggcaaccgcaaaaccgtgacagtcaggtcaccgacgcccagtggcaggg

SEQ ID NO: 546725 - DNA, 75 bp, synthetic construct
  source 1..75: mol_type = other DNA
tgagacgctttctgaaaaaattgtacagaaatgcagaaatatgaatggtgaatatgtctggccctggatattgcc

SEQ ID NO: 546726 - DNA, 75 bp, synthetic construct
  source 1..75: mol_type = other DNA
tggcggacgtcgtgccgctggacgctaataatcgcattctgacctggcaggggatgagtcgcatccgtgccggaa

SEQ ID NO: 546727 - DNA, 75 bp, synthetic construct
  source 1..75: mol_type = other DNA
gtggtcggtgatttcgacgccgacggtgccaccagcacggctctaagcgtgctggcgatgcgctcgcttggttgc

SEQ ID NO: 546728 - DNA, 75 bp, synthetic construct
  source 1..75: mol_type = other DNA
ctttggtttcagaagtcaatacctacatcaatacccatcagtggcctggcaaagctgctattggtcgtctgaaag

SEQ ID NO: 546729 - DNA, 75 bp, synthetic construct
  source 1..75: mol_type = other DNA
accgtttcgaagacggttacggcttaagtccggaagtggtcgatcaggctcatgcgcgtggcgcgcagctgattg

SEQ ID NO: 546730 - DNA, 75 bp, synthetic construct
  source 1..75: mol_type = other DNA
caactggcttacaagctggatatcaacgagtttcgcggcaaccgcagcctgcaaattatcatcgacaatatctgg

SEQ ID NO: 546731 - DNA, 75 bp, synthetic construct
  source 1..75: mol_type = other DNA
tctggctaatgagcttgatgcactaaaccagacgcgaaaagagattgaacagggaatgcaggtcgaagcactgac

SEQ ID NO: 546732 - DNA, 75 bp, synthetic construct
  source 1..75: mol_type = other DNA
ctaattcttatcattggtccaatgtttattgcatgtttagcttttcctaaagtagctcattggttttggggatgg

SEQ ID NO: 546733 - DNA, 75 bp, synthetic construct
  source 1..75: mol_type = other DNA
tcaaacaacaaaccgcagaaagtcaggcggtaattcgcagcggagaatgttctccgtatgcgaatatcattctct

SEQ ID NO: 546734 - DNA, 75 bp, synthetic construct
  source 1..75: mol_type = other DNA
ggcattaacccagggtgtaccttcttttatgcaggtgctgggcgtcgtcacaaatgaaatgcaggtcgaggctgc

SEQ ID NO: 546735 - DNA, 75 bp, synthetic construct
  source 1..75: mol_type = other DNA
gatgatttcattgagcattttgaaaaatacaatctctttggcgatcctttaaaaggatatccagcttggactggc

SEQ ID NO: 546736 - DNA, 75 bp, synthetic construct
  source 1..75: mol_type = other DNA
tgctcaacagacgtttactgttggaaacaaaccgacagcagtaacaccaaaggaaaccatcacccatcacttctt

SEQ ID NO: 546737 - DNA, 75 bp, synthetic construct
  source 1..75: mol_type = other DNA
agcggctggtgggagagcgccatctgaaggtcatggttgaaccggtcggcggcggcccgctgctggatggtattg

SEQ ID NO: 546738 - DNA, 75 bp, synthetic construct
  source 1..75: mol_type = other DNA
ctcacgttgtctatggtcatgcgggtaacagcgcggcagagtttccgatgcgccgcctcggcgcaaatgtctggc

SEQ ID NO: 546739 - DNA, 75 bp, synthetic construct
  source 1..75: mol_type = other DNA
ggctgtgtgatgccgcccagccatttaaccgaaattgtgcaaggcattgccgccattgataaattacacacctgt

SEQ ID NO: 546740 - DNA, 75 bp, synthetic construct
  source 1..75: mol_type = other DNA
ccgtcgaagaagccgttaaagctgcgcgcgaactcattacgcaagggccacaaattgtgttggttaaacacctgg

SEQ ID NO: 546741 - DNA, 75 bp, synthetic construct
  source 1..75: mol_type = other DNA
cacgctgcctgcgccggggatttcacccgccgtcaattcccagcaactcttgaccggcagcttcaacggcaaaac

SEQ ID NO: 546742 - DNA, 75 bp, synthetic construct
  source 1..75: mol_type = other DNA
tcgtcgtcccgcagctgccgcccgcaagtcaggtgctggctgacgtaatgctcagccactggccgattagcgcct

SEQ ID NO: 546743 - DNA, 75 bp, synthetic construct
  source 1..75: mol_type = other DNA
ccagtctctgctagtgatgcttaatgccgaagatcagaaaatcacccttgccgggctgtcgtcggtcggcattcg

SEQ ID NO: 546744 - DNA, 75 bp, synthetic construct
  source 1..75: mol_type = other DNA
tgatgttactttccggcgaaacggtcaatgtcgcgatccgtaacggcaatgaagcagtattaattggtcagttag

SEQ ID NO: 546745 - DNA, 75 bp, synthetic construct
  source 1..75: mol_type = other DNA
gacggaagatcgctttgtcagtcagggtgagctggtacgggacacggcacgagatatcagtacggcgttgggact

SEQ ID NO: 546746 - DNA, 75 bp, synthetic construct
  source 1..75: mol_type = other DNA
atggctggattatctggaggcactggaattggttgatccctccagtgctccagatattgaatggcctacgcctcc

SEQ ID NO: 546747 - DNA, 75 bp, synthetic construct
  source 1..75: mol_type = other DNA
ggctgcgtaatgccgcccagccatttaaccgaaattgttcagggcattgccgccatcgataaattacatacctgt

SEQ ID NO: 546748 - DNA, 75 bp, synthetic construct
  source 1..75: mol_type = other DNA
tgccttacggcggcatgcccgaggcagacaccctcaagcacccgcagtcattctacagtaaaaccccgcgctttc

SEQ ID NO: 546749 - DNA, 75 bp, synthetic construct
  source 1..75: mol_type = other DNA
caaattccttaatcgttatccgcactggaagattgaatataccgaaagtacgtctgcggcaatggaaaaggttgc

SEQ ID NO: 546750 - DNA, 75 bp, synthetic construct
  source 1..75: mol_type = other DNA
atatgccgtccctgctttcaacattcataaccttgaaactttacaggtagttgttgagagcgctgcacaacttcg

SEQ ID NO: 546751 - DNA, 75 bp, synthetic construct
  source 1..75: mol_type = other DNA
gaggcgctggaacgatatgcgccagagtataccaacaccttcagactgcactggctggcggtaaaacgtgaacat

SEQ ID NO: 546752 - DNA, 75 bp, synthetic construct
  source 1..75: mol_type = other DNA
tgggcggcgaaggtaaaggccgcgcgttgggcgttggcgaagtgaaattcactggtcaggtactgccgacagcga

SEQ ID NO: 546753 - DNA, 75 bp, synthetic construct
  source 1..75: mol_type = other DNA
acgaaaacaatcagccgctggcaggcgcatatatagaccgctccgggctggacgctgaaacctggcttacgcaac

SEQ ID NO: 546754 - DNA, 75 bp, synthetic construct
  source 1..75: mol_type = other DNA
cggcacgacggaagggatcaatctggtcgccaatagttggggcaacagcaacgtgcgggcgggcgataacatcat

SEQ ID NO: 546755 - DNA, 75 bp, synthetic construct
  source 1..75: mol_type = other DNA
gtaccctgaccaacgccagtcgccggggcgggctggatatcaagctgccgctgaccatctacaacacctcatgct

SEQ ID NO: 546756 - DNA, 75 bp, synthetic construct
  source 1..75: mol_type = other DNA
aacgatatgcgccagagtataccaacaccttcagactgcactggctggcggtaaaacgtgaacatatgatctggc

SEQ ID NO: 546757 - DNA, 75 bp, synthetic construct
  source 1..75: mol_type = other DNA
tgtacagccgctacgcggaaacccgtcgctggcgtgtggaaatcatgagcgccagtgagggtgaacatggtggtt

SEQ ID NO: 546758 - DNA, 75 bp, synthetic construct
  source 1..75: mol_type = other DNA
gcagggtcgaattcatacttccgcttgtaccgttgcggtaatgccagaactgcctgacgcagaactgccggacat

SEQ ID NO: 546759 - DNA, 75 bp, synthetic construct
  source 1..75: mol_type = other DNA
taccgatcaccgcatcaacctgacgctctaccgcctggatgaagtgatggaaggtaagctggatatgctgattga

SEQ ID NO: 546760 - DNA, 75 bp, synthetic construct
  source 1..75: mol_type = other DNA
agtatgccaacaccttcagactgcactggctggcggtaaaacgtgaacatatgatctggcgctgcgacaacgatc

SEQ ID NO: 546761 - DNA, 75 bp, synthetic construct
  source 1..75: mol_type = other DNA
agtctcatcctgttcataaagcgatggagttctttgcgaaaaagagcaaagagtactctaacggtgatattacta

SEQ ID NO: 546762 - DNA, 75 bp, synthetic construct
  source 1..75: mol_type = other DNA
atggtgatacgcaaaacggtgtgcagggattgtgataacgccatccctcataatacggaatgttgcccgagctgc

SEQ ID NO: 546763 - DNA, 75 bp, synthetic construct
  source 1..75: mol_type = other DNA
ggccaaagcgccgtggcggtttgaggcgggtacgcccaataccggtggcattattggtcttggcgcggcactgga

SEQ ID NO: 546764 - DNA, 75 bp, synthetic construct
  source 1..75: mol_type = other DNA
ttgcagtgtgagcgtgcttacacctggcagccgatctatcaaacatgcgggcggttaatggccgtggagctatta

SEQ ID NO: 546765 - DNA, 75 bp, synthetic construct
  source 1..75: mol_type = other DNA
tgttctcggcctgggttgctatgacaatgcggcgatcactgcgttaggtaatatctgttctgatcgcctgattga

SEQ ID NO: 546766 - DNA, 75 bp, synthetic construct
  source 1..75: mol_type = other DNA
tacctgcgtgcggtgaaagtgctgaacaatgcgccgtacatgtacaccgctgttctcggcctgggttgctatgac

SEQ ID NO: 546767 - DNA, 75 bp, synthetic construct
  source 1..75: mol_type = other DNA
tgctgaaaaaagcccagtcagagggatatgccgtccctgctttcaacattcataaccttgaaactttacaggtag

SEQ ID NO: 546768 - DNA, 75 bp, synthetic construct
  source 1..75: mol_type = other DNA
agaaacgccggaagagtggcgtgatgttcgaactcgcccgcattcgccgcacaaggctggtttctttcacgcccg

SEQ ID NO: 546769 - DNA, 75 bp, synthetic construct
  source 1..75: mol_type = other DNA
gcggttgatggccgtggagttgttgaccgtggttacacatcccgataacccttcgcaacggctgccgcccgatcg

SEQ ID NO: 546770 - DNA, 75 bp, synthetic construct
  source 1..75: mol_type = other DNA
cctggacgaaatctacggtggaacatttaccgcaactcatttacagaaacttgtaacgcgtcttgagggtaatgc

SEQ ID NO: 546771 - DNA, 75 bp, synthetic construct
  source 1..75: mol_type = other DNA
gatagtatcttacagggggtcccgctcagatatttatctaccgtagcacctactaggggggtgttggccagaggg

SEQ ID NO: 546772 - DNA, 75 bp, synthetic construct
  source 1..75: mol_type = other DNA
gtatgtttcagcgctggggcttaacaacattgccgagtatgaacagaatctgatgcattatgcgctgtcacagct

SEQ ID NO: 546773 - DNA, 75 bp, synthetic construct
  source 1..75: mol_type = other DNA
gccgccgactgttaacggcgatggcgctttctccgttgttatggcagatgaataccgcccacgcggcggttattg

SEQ ID NO: 546774 - DNA, 75 bp, synthetic construct
  source 1..75: mol_type = other DNA
cacttaggattggcggtcagacaaagcattttttggtccatgaaacacaagaagaagatgatgatcgtcggaaag

SEQ ID NO: 546775 - DNA, 75 bp, synthetic construct
  source 1..75: mol_type = other DNA
ttggatactttggcgctgaattagctcgttttatgaatatgcatgataatgcaaaaattacatgtgtatacgatc

SEQ ID NO: 546776 - DNA, 75 bp, synthetic construct
  source 1..75: mol_type = other DNA
ctttcgtttgccttcaaactttgcaatgaagggcattaatttagttaaaatcaaattaacattttctgatacata

SEQ ID NO: 546777 - DNA, 75 bp, synthetic construct
  source 1..75: mol_type = other DNA
tatgcaaataatatcactgatgctataaattttattatgaatggaggaatggaagtaatattatttgcattcgaa

SEQ ID NO: 546778 - DNA, 75 bp, synthetic construct
  source 1..75: mol_type = other DNA
atgggatttattactcttgttttattttttttctatgtggtctgccattatttttattttttaactaaagatgga

SEQ ID NO: 546779 - DNA, 75 bp, synthetic construct
  source 1..75: mol_type = other DNA
gttctggtccggtgcgctgtttaatcggggccgcgccaaagcggacaaggtggatattgacctgacccacagcaa

SEQ ID NO: 546780 - DNA, 75 bp, synthetic construct
  source 1..75: mol_type = other DNA
ccgtctggagtttgacgccggacacactgacattgcgcagtcctttatggctatccgccgggccaccaccgccag

SEQ ID NO: 546781 - DNA, 75 bp, synthetic construct
  source 1..75: mol_type = other DNA
aataccagaacctgctgatgtgtgagttcgtggatgatctcgcgtccgtgttcccgctcagcgagctgcaggcgt

SEQ ID NO: 546782 - DNA, 75 bp, synthetic construct
  source 1..75: mol_type = other DNA
ttatgatttcggtttctttttaagaatgatgccatatatggaaccgggtttaatcaagcgtgatatagaagaact

SEQ ID NO: 546783 - DNA, 75 bp, synthetic construct
  source 1..75: mol_type = other DNA
ggatcggttatgacccggcgaaaggtacgcagaacggcgacagcgccggatgcgtggtggtggcgccgccagccg

SEQ ID NO: 546784 - DNA, 75 bp, synthetic construct
  source 1..75: mol_type = other DNA
tccaggagctgcgcaaagtggcttccgggatggctattcacaagaaatggcgacagacctatttttccacgccat

SEQ ID NO: 546785 - DNA, 75 bp, synthetic construct
  source 1..75: mol_type = other DNA
tatcttacgtactacaaaatggaattgcactaggattatcatataatgaccgattaacagccaacacaggtggcg

SEQ ID NO: 546786 - DNA, 75 bp, synthetic construct
  source 1..75: mol_type = other DNA
atggcaacctcgctgacgacgcaagacatacttgggctttttaaggcgttgaaagacgatattcaggcaacagta

SEQ ID NO: 546787 - DNA, 75 bp, synthetic construct
  source 1..75: mol_type = other DNA
atgatcgattcgaatgccaaactgcgatcgattcagatgccattttgcaaatacagcagcgggttcccgcgaaac

SEQ ID NO: 546788 - DNA, 75 bp, synthetic construct
  source 1..75: mol_type = other DNA
cggggccgcgccaaagcggacaaggtggatattgacctgacccacagcaaccttgcgcgcggcctgctctgccct

SEQ ID NO: 546789 - DNA, 75 bp, synthetic construct
  source 1..75: mol_type = other DNA
atgaaaggcatcaacttagtaaaaattaaactggattttactgatacgtaccaggtgaatttttctcgtgtacgt

SEQ ID NO: 546790 - DNA, 75 bp, synthetic construct
  source 1..75: mol_type = other DNA
agattcgataatatctattgtgatcagttagcgcgtttatttacacaggaaacagggttacataccgtgttatag

SEQ ID NO: 546791 - DNA, 75 bp, synthetic construct
  source 1..75: mol_type = other DNA
gcaatgaagggaattaatttggttaaaatcaaattaaccttctctgatacatacctggtgacattttcccgtgtc

SEQ ID NO: 546792 - DNA, 75 bp, synthetic construct
  source 1..75: mol_type = other DNA
tcggcggtggacggacgcacagagcaccagatcctgcataacctgcgtcagtgggggcaggggagaacggtgatt

SEQ ID NO: 546793 - DNA, 75 bp, synthetic construct
  source 1..75: mol_type = other DNA
aactggatgtaaatattcgccagtttacgtatccgcagactgaccatcctgcgctggaaaacgtcaatttcgccc

SEQ ID NO: 546794 - DNA, 75 bp, synthetic construct
  source 1..75: mol_type = other DNA
tattacattgcctcatcataatcagacaaaatattaaaattttattaaagcaacagagaaaaaaggggggtaatt

SEQ ID NO: 546795 - DNA, 75 bp, synthetic construct
  source 1..75: mol_type = other DNA
acttcgccaaagaagtcgaggtggagctgaaaggtgatccgatagtgcttcctgacggggccacgctttacttcc

SEQ ID NO: 546796 - DNA, 75 bp, synthetic construct
  source 1..75: mol_type = other DNA
aacgttttcaccgatgaacaaattgagaagctggaagaaatcttccactcctccatgttcaactaccagcgccac

SEQ ID NO: 546797 - DNA, 75 bp, synthetic construct
  source 1..75: mol_type = other DNA
ccgtggaagatgcagtgcgcggcggctgtaacctgttcgaccttgaccagttgcgcatggagtacagcccggatg

SEQ ID NO: 546798 - DNA, 75 bp, synthetic construct
  source 1..75: mol_type = other DNA
aactgactgcctggtgaaaagcgcgctgttaaaaaatccttttcttggcggcgtcgtgcgggcggcagattattt

SEQ ID NO: 546799 - DNA, 75 bp, synthetic construct
  source 1..75: mol_type = other DNA
cgggagtttgtctacaaccccaacgttaaaaacgccctggtactcaaggcctacgacattatcagccaccgccgt

SEQ ID NO: 546800 - DNA, 75 bp, synthetic construct
  source 1..75: mol_type = other DNA
gataaggtggacatcgacctgtcccacagcaatctggctcccggcctgctgtgtgcagacgggcaataccgccag

SEQ ID NO: 546801 - DNA, 75 bp, synthetic construct
  source 1..75: mol_type = other DNA
gttctggtccggtgcgctgttcaatcgtgggcgcaacaaagccgataaggtggacatcgacctgtcccacaacaa

SEQ ID NO: 546802 - DNA, 75 bp, synthetic construct
  source 1..75: mol_type = other DNA
acagttatgccatttattctgcgtaacgtccgtttacagggagtagattcagtgatgacgccaccagcacgccgc

SEQ ID NO: 546803 - DNA, 75 bp, synthetic construct
  source 1..75: mol_type = other DNA
caaaaggggatgataagtttatcaccaccgactatttgcaacagtgcctcgtggaagtcgctgcggaggccgacg

SEQ ID NO: 546804 - DNA, 75 bp, synthetic construct
  source 1..75: mol_type = other DNA
gaaaaacgtttattacaacatggcgttaatgaatgccggagtgaaaaaagttgtggtcagatttgatccacagca

SEQ ID NO: 546805 - DNA, 75 bp, synthetic construct
  source 1..75: mol_type = other DNA
aatgttttcaccgatgagcagattgagaagctggaagaaatcttccattcctccatgttcaactaccagcgccac

SEQ ID NO: 546806 - DNA, 75 bp, synthetic construct
  source 1..75: mol_type = other DNA
ctgatactgattaataactatattggcgatccaaaactcgacactttatttaatcaattaaccgctgaacataaa

SEQ ID NO: 546807 - DNA, 75 bp, synthetic construct
  source 1..75: mol_type = other DNA
caggcgcgcgtaaaaggtgactggctggttgcgatgccgcaaggtctggacgcgcgtaaagcgatggttatcggt

SEQ ID NO: 546808 - DNA, 75 bp, synthetic construct
  source 1..75: mol_type = other DNA
ccgatgataaatacgaacccgctcgtgatgaatatctgaatcagtcactggatattctggaacagaaaagacgta

SEQ ID NO: 546809 - DNA, 75 bp, synthetic construct
  source 1..75: mol_type = other DNA
cgtggctgcaacctggcacgcgcatcacgctgccggcaccagggatttcacccgcagtcaattcgcagcaactgt

SEQ ID NO: 546810 - DNA, 75 bp, synthetic construct
  source 1..75: mol_type = other DNA
gaatcgccagggcaaacgcgtgccaatcagcattgagcagcatgtctttaaataccacatcaccattcaatactt

SEQ ID NO: 546811 - DNA, 75 bp, synthetic construct
  source 1..75: mol_type = other DNA
tcgcctctcattcatggatgtggtgacacgctacggcatcccggaggattttcacatcaccattgataacacccg

SEQ ID NO: 546812 - DNA, 75 bp, synthetic construct
  source 1..75: mol_type = other DNA
cctggcagtttctgattgcagattatctgcgaccggaaaaacccgccttccgcaaatgttatgagcgtctggaac

SEQ ID NO: 546813 - DNA, 75 bp, synthetic construct
  source 1..75: mol_type = other DNA
atccactttgcgggacaagtattaccaggtacagaagtttgcgaagcctgactgggcggctgcgcttgttgatgg

SEQ ID NO: 546814 - DNA, 75 bp, synthetic construct
  source 1..75: mol_type = other DNA
ccgtctggagtttgacgccggacacaccgacatagcgcagtcattcatggcaatccgtcgctccaccaccgccag

SEQ ID NO: 546815 - DNA, 75 bp, synthetic construct
  source 1..75: mol_type = other DNA
agaacgttttcaccgatgagcagatcgaaaagctggaagaaatattccgtggcggtatgttcgaatatcagcgcc

SEQ ID NO: 546816 - DNA, 75 bp, synthetic construct
  source 1..75: mol_type = other DNA
tcaaaaaactgaccgaacagtacaacgtgacatacatcggcatcgactcgacaggtgtcggtcacggggtttatg

SEQ ID NO: 546817 - DNA, 75 bp, synthetic construct
  source 1..75: mol_type = other DNA
ccgtggaagatgcggtgtgcggcggctgtaacctattcgacctcgaccagctgcgcatggagtacagcccggacg

SEQ ID NO: 546818 - DNA, 75 bp, synthetic construct
  source 1..75: mol_type = other DNA
ttgcactggtatcgcgccgggcttgagcaccgcatccgcgatatcctgaaatcccgccagattggtgcgacgtat

SEQ ID NO: 546819 - DNA, 75 bp, synthetic construct
  source 1..75: mol_type = other DNA
cgtgggcgcaataaagccgataaggtggacatcgacttgtcccacagcaatctggcccccggcctgctgtgcgca

SEQ ID NO: 546820 - DNA, 75 bp, synthetic construct
  source 1..75: mol_type = other DNA
cgtggacgcaacaaagctgacaaggtggacatcgacctgtcccacagcaatctggcccccggcctactgtgcgca

SEQ ID NO: 546821 - DNA, 75 bp, synthetic construct
  source 1..75: mol_type = other DNA
ccgatctggcctgggcaacgatgcacgctctgtttaacgaaccgctgcagggcaaatccgccaataccagcaata

SEQ ID NO: 546822 - DNA, 75 bp, synthetic construct
  source 1..75: mol_type = other DNA
tcaaaaaactgactgaacagtacaacgtgacatacatcggtatcgactcaaccggcgtcggtcacggggtttacg

SEQ ID NO: 546823 - DNA, 75 bp, synthetic construct
  source 1..75: mol_type = other DNA
accgacatagcgcagtcattcatggcaatccgtcgctccaccaccgccagtggcaaccgcccgacctatgaagcc

SEQ ID NO: 546824 - DNA, 75 bp, synthetic construct
  source 1..75: mol_type = other DNA
accggcgttggtcacggggtttacgagaacgtgaaagcgttctttcctgctgtccgggagtttgtctataacccc

SEQ ID NO: 546825 - DNA, 75 bp, synthetic construct
  source 1..75: mol_type = other DNA
cgtgggcgcaacaaagccgataaccggacatcaaccaggaggtctacggcctgcccggttatctttctgccattc

SEQ ID NO: 546826 - DNA, 75 bp, synthetic construct
  source 1..75: mol_type = other DNA
ttgcgcatggagtacagcccggacgaataccagaacctgctgatgtgtgagttcgtggacgatctcgcgtccgtg

SEQ ID NO: 546827 - DNA, 75 bp, synthetic construct
  source 1..75: mol_type = other DNA
gtgacgccaggtcatgaattaggcaaaggtggcgaaggcgcggtttatgatatcaatgagtttgtcgatagcgtc

SEQ ID NO: 546828 - DNA, 75 bp, synthetic construct
  source 1..75: mol_type = other DNA
atgctcgaaaaaatgaaggacgaaattctcgggttaccggaagaagaaaaacgtgctctggcagcacttcacgac

SEQ ID NO: 546829 - DNA, 75 bp, synthetic construct
  source 1..75: mol_type = other DNA
ctggcgaaagtctgggcgatggtgatggcgtcagtgccaccgccagcactacagttaccattacccgctcatttc

SEQ ID NO: 546830 - DNA, 75 bp, synthetic construct
  source 1..75: mol_type = other DNA
aatgcggaaggaattgaaggtggcaaaaccaccattaaaagccgtagcgttgacgtcggcgtggttgaaagcgcc

SEQ ID NO: 546831 - DNA, 75 bp, synthetic construct
  source 1..75: mol_type = other DNA
atggaagttaaaaccaaagaggactggctgtatcagttccgtcgttgttcatcccgggagacactggaaaaagtg

SEQ ID NO: 546832 - DNA, 75 bp, synthetic construct
  source 1..75: mol_type = other DNA
cagctgacgcgcagttgctcaattatgtcgcctggccgcagtcaacgcttcacgctggacgaggcggaaaagtta

SEQ ID NO: 546833 - DNA, 75 bp, synthetic construct
  source 1..75: mol_type = other DNA
acagtgattcctttcagattaacgccaatggcacgctgcatttatgcgaagtcggcgtgtcgcattttacgccgc

SEQ ID NO: 546834 - DNA, 75 bp, synthetic construct
  source 1..75: mol_type = other DNA
cgaagaggtcattaccaccggcggtgattttgtgctggcgaaagtctgggcgatggtgatggcgtcagtagcacc

SEQ ID NO: 546835 - DNA, 75 bp, synthetic construct
  source 1..75: mol_type = other DNA
tctactctatgttgcgcgtaatatagcttcatcttttactacgattcacgagcacgggcatgtcgtgggtgacgt

SEQ ID NO: 546836 - DNA, 75 bp, synthetic construct
  source 1..75: mol_type = other DNA
aggccgaacgaagcgataacgcctgcagacagacaagcggtaatggcaaaaatagccgccaaacgacatcggctg

SEQ ID NO: 546837 - DNA, 75 bp, synthetic construct
  source 1..75: mol_type = other DNA
tgcgccagcacggaccataccgttgatggaaccgctacgtcaggcggcagaaaaactggctcaggcgcaggcaga

SEQ ID NO: 546838 - DNA, 75 bp, synthetic construct
  source 1..75: mol_type = other DNA
aattttggccttgcgttgctgatttttcacgtcttgtttggtgggcggcatccttattccggtgtaccgcttatc

SEQ ID NO: 546839 - DNA, 75 bp, synthetic construct
  source 1..75: mol_type = other DNA
gccccgcctgatgcgaaaggtatccgtgtgattctcgatagcaaaaaagccgggcagctctcgccaggagatccg

SEQ ID NO: 546840 - DNA, 75 bp, synthetic construct
  source 1..75: mol_type = other DNA
aaatcgcttattaagatggttcaggacatgctgaccagcatcgagaacaaggccatcaccgacacgccgctgacg

SEQ ID NO: 546841 - DNA, 75 bp, synthetic construct
  source 1..75: mol_type = other DNA
ttacctgcagtatctggaggccgtcatgaaggtggttaatggctcactggccaccaaagactatccgggtgccaa

SEQ ID NO: 546842 - DNA, 75 bp, synthetic construct
  source 1..75: mol_type = other DNA
cgtttgtgctgggcctgtacagtgcaggaacggcacatgccagcctgcaggatgatatgaattcgttcttcaaca

SEQ ID NO: 546843 - DNA, 75 bp, synthetic construct
  source 1..75: mol_type = other DNA
tcttatactgcatcctttggtctcatcactggccgacacccgataactgtcccaggtacgaagaatattaattct

SEQ ID NO: 546844 - DNA, 75 bp, synthetic construct
  source 1..75: mol_type = other DNA
tcgaagcgatgggtacggcctacgcgctctacaccgtcactggcgatcgccagtatgaaacctggtatcagacat

SEQ ID NO: 546845 - DNA, 75 bp, synthetic construct
  source 1..75: mol_type = other DNA
caccgagatcctggtcaaagtgggcgacaaagttgaagccgaacagtcgctgatcaccgtagaaggcgataaagc

SEQ ID NO: 546846 - DNA, 75 bp, synthetic construct
  source 1..75: mol_type = other DNA
gataccgttttttgggtagtaaaaccgcagattggtcgcgagggcattagcggcctggggactctgctgtcaggg

SEQ ID NO: 546847 - DNA, 75 bp, synthetic construct
  source 1..75: mol_type = other DNA
atggtggcggatatgcagcgccttgatcaggtgttgcgagaactgcaaccggtgctgaaaacgctcaatgagaag

SEQ ID NO: 546848 - DNA, 75 bp, synthetic construct
  source 1..75: mol_type = other DNA
gccagagcggctgaaaatgcagcttggcgaaaatgcggatgttgttgagcaccttggcgaattgttgaaacgtgg

SEQ ID NO: 546849 - DNA, 75 bp, synthetic construct
  source 1..75: mol_type = other DNA
taaccgtttcaatatgtccagctgtcaggcggcaaaagcgatggtcgacagcgtggcgtcgctgtggggggaaag

SEQ ID NO: 546850 - DNA, 75 bp, synthetic construct
  source 1..75: mol_type = other DNA
attcgttttgtatgacgaccagaagagcattcaggattcgctatacaccgatcacattgactatctgatgttctt

SEQ ID NO: 546851 - DNA, 75 bp, synthetic construct
  source 1..75: mol_type = other DNA
tttacgtggatcgctgaaaaccggaaatctggttactggcgcactctatgttgatctcgatttctacccgaatac

SEQ ID NO: 546852 - DNA, 75 bp, synthetic construct
  source 1..75: mol_type = other DNA
gtgggtagcggcacttgattctctgcgccaacagttaaagaaatgtcccgtttcggcaatgcatgtttatcccgc

SEQ ID NO: 546853 - DNA, 75 bp, synthetic construct
  source 1..75: mol_type = other DNA
acgcttagtgaagcgacctttattgatgtaaacgatactattgcggaaggcgcagcaacattcagcgaacatgtt

SEQ ID NO: 546854 - DNA, 75 bp, synthetic construct
  source 1..75: mol_type = other DNA
cagttggctattcaggttcgtcagaaagttaaaggtctggctcgtgcgttccgtcgcaacctgattttgggtgac

SEQ ID NO: 546855 - DNA, 75 bp, synthetic construct
  source 1..75: mol_type = other DNA
aaaagctgtctaacaacgaactcgaacagggtgtgatcgaaactatcatcgatcgcgatgacctgtttgccatcc

SEQ ID NO: 546856 - DNA, 75 bp, synthetic construct
  source 1..75: mol_type = other DNA
cagaatccgaacgatacatggctgtttccgtgggtatcgaatgatgtcgtctacgtcgctgagtattacgaggtc

SEQ ID NO: 546857 - DNA, 75 bp, synthetic construct
  source 1..75: mol_type = other DNA
atcgtcatcttagatactcctccaatattagctgtaactgacgcagcgattattgggcagtatgtaggtacaact

SEQ ID NO: 546858 - DNA, 75 bp, synthetic construct
  source 1..75: mol_type = other DNA
cgttcagagcaccttcgtgcttaccgtgcgctgctgcgtacagtaaacgtaggtccgtctgaaatcatgatggag

SEQ ID NO: 546859 - DNA, 75 bp, synthetic construct
  source 1..75: mol_type = other DNA
agccattggtattctccttggccatttctatcctgaaataggcgagcaaatgaaaccgcttggcgacgggttcgt

SEQ ID NO: 546860 - DNA, 75 bp, synthetic construct
  source 1..75: mol_type = other DNA
atttccggatacctggtttggcccattactgggagagtttgaagaagtgctcgatgcatacgacactgatgaaat

SEQ ID NO: 546861 - DNA, 75 bp, synthetic construct
  source 1..75: mol_type = other DNA
cagaaatgcagaaatatgaatggtgaatatgtctggccctggatattgccgttttcagcggcaggcatgaaacat

SEQ ID NO: 546862 - DNA, 75 bp, synthetic construct
  source 1..75: mol_type = other DNA
ctggcgttattctgcaacgcgacgatggcgtactggtcaataaccgcctggaaattcctctccctattgttgacg

SEQ ID NO: 546863 - DNA, 75 bp, synthetic construct
  source 1..75: mol_type = other DNA
ggctgccggggtaacgggcagtggctttatcgtgctggcggcaacgctttctgctgtaggccatttgccagtggc

SEQ ID NO: 546864 - DNA, 75 bp, synthetic construct
  source 1..75: mol_type = other DNA
aacgttatcgaaagtttctcgcaggtcatcttcggcatcatcaatatgatcatgcgtctggcgcccattggcgcg

SEQ ID NO: 546865 - DNA, 75 bp, synthetic construct
  source 1..75: mol_type = other DNA
ttgatgcggctaaggtcgaagcgcagaaccagcttaacgctgccaaaatcgcagaaatcttcaacaacatggacc

SEQ ID NO: 546866 - DNA, 75 bp, synthetic construct
  source 1..75: mol_type = other DNA
atcaagacgtgaccaggagagtgcgctgtcatgctggggtatcgacaggtaagcagaatattttgctgaaaaatg

SEQ ID NO: 546867 - DNA, 75 bp, synthetic construct
  source 1..75: mol_type = other DNA
agataagcagaatattttgctgaaaaataaggcatggccacgcgggcggataacacgaaatcctgcgaactggcg

SEQ ID NO: 546868 - DNA, 75 bp, synthetic construct
  source 1..75: mol_type = other DNA
cctttgatgtttatgttggcggaacggatatccgcgtaaaaaacatttcgctggatatcagcgacgaaagcgccg

SEQ ID NO: 546869 - DNA, 75 bp, synthetic construct
  source 1..75: mol_type = other DNA
ctttgcggccttcaggcagaaccgcgttatatcattttggttcctgtgctggcggctatctggattattggcagc

SEQ ID NO: 546870 - DNA, 75 bp, synthetic construct
  source 1..75: mol_type = other DNA
ttaaactggattttactgatacgtaccaggtgaaattttctcgtgtacgtggtgctgaagttaaagatatttcaa

SEQ ID NO: 546871 - DNA, 75 bp, synthetic construct
  source 1..75: mol_type = other DNA
caccgtttttaccgggatatcgataccatccgtgccctgaagaaacagcatgccgtctgcggatacagccagacc

SEQ ID NO: 546872 - DNA, 75 bp, synthetic construct
  source 1..75: mol_type = other DNA
tgatcctgacaccttgccatctttccagaatccgaacgatacatggctgtttccgtgggtatcgaatgatgtcgt

SEQ ID NO: 546873 - DNA, 75 bp, synthetic construct
  source 1..75: mol_type = other DNA
aagagttcgcagaggattacggtattgatccggacaccctgccatctttccagaatccgaacgacacatggctgt

SEQ ID NO: 546874 - DNA, 75 bp, synthetic construct
  source 1..75: mol_type = other DNA
tcagatcgctgagttttacgaagtggtcgagaagaaagagacggcgtttatctatcaggacccggtaactggcga

SEQ ID NO: 546875 - DNA, 75 bp, synthetic construct
  source 1..75: mol_type = other DNA
gggggttccccgccctgtcgaaaaaagcacatttctttaattcgggggaagccatatcactatgcggaaaatgga

SEQ ID NO: 546876 - DNA, 75 bp, synthetic construct
  source 1..75: mol_type = other DNA
cgcagagatgcgccggaaccctatcgacgttctcttcagaccaaaagacggcgctaatcctgatgctgccgatgt

SEQ ID NO: 546877 - DNA, 75 bp, synthetic construct
  source 1..75: mol_type = other DNA
tctaccgcgacccgctgacaggtgagccggtcagctattaccagcaggatatcaaagacgtcatcgacgacctgg

SEQ ID NO: 546878 - DNA, 75 bp, synthetic construct
  source 1..75: mol_type = other DNA
agttcaagtattcgacactgatataatcggcccaattatggttagcgcagaaaataatgaaaatggggatgatcc

SEQ ID NO: 546879 - DNA, 75 bp, synthetic construct
  source 1..75: mol_type = other DNA
tctttctcattgcctacagcgtgtatattaaaatagctaatgcagatgatttaaaggaaaaacaatatgttactg

SEQ ID NO: 546880 - DNA, 75 bp, synthetic construct
  source 1..75: mol_type = other DNA
gttgcctggcttgatactaaaaatggactaggtgaaagattaaacgtcagtgatacgtatcccgctgcttttttt

SEQ ID NO: 546881 - DNA, 75 bp, synthetic construct
  source 1..75: mol_type = other DNA
gagcaacattttcacagccaggaagtgaaaaatgaatcagaacaagccaagtatgctgacaggcaaatggaacga

SEQ ID NO: 546882 - DNA, 75 bp, synthetic construct
  source 1..75: mol_type = other DNA
acctacacagcgttaattcctgatgatcatgtagtgttatctgttgaggcattcattgaatacttggaaagactc

SEQ ID NO: 546883 - DNA, 75 bp, synthetic construct
  source 1..75: mol_type = other DNA
aatgacctttaatgaaggacgtgtagatgtgcagatcaaaatgattcctcttgaaaaggtgaggatacacaccta

SEQ ID NO: 546884 - DNA, 75 bp, synthetic construct
  source 1..75: mol_type = other DNA
atcctcgactcaacgaaaagcaaaggttatttcgggctgactttttatgatggaggcgcccgcagtttctatggc

SEQ ID NO: 546885 - DNA, 75 bp, synthetic construct
  source 1..75: mol_type = other DNA
acgccatcgcggccggcgccgtgctggtgacgaataatacacgggagtttgagcgggtgccgggcctggtgctgg

SEQ ID NO: 546886 - DNA, 75 bp, synthetic construct
  source 1..75: mol_type = other DNA
gcgcatggccggcatgccgatcggcccgaacgacacggcaatagccgggcatgccattgccgccggcgcggtgct

SEQ ID NO: 546887 - DNA, 75 bp, synthetic construct
  source 1..75: mol_type = other DNA
agcatattttgtgcccgcagtgtgacatgctggtggcgttaccccaccttgagcatggtcagaaagcggcatgtc

SEQ ID NO: 546888 - DNA, 75 bp, synthetic construct
  source 1..75: mol_type = other DNA
gtgcgtatgggaggtttaatgagtatttatccggcaatgggtgcattaatgtttgctttagtcgtcataatgaca

SEQ ID NO: 546889 - DNA, 75 bp, synthetic construct
  source 1..75: mol_type = other DNA
atgccattgccgtcggtgcgatcctggtaaccaataatgtgcgagaatttgagagggttcccggcctggtgctgg

SEQ ID NO: 546890 - DNA, 75 bp, synthetic construct
  source 1..75: mol_type = other DNA
atgtaatccgcaatcagctagcgaaaacaggaattagcgagattttaggatatgacggtttaaccgaagtagccg

SEQ ID NO: 546891 - DNA, 75 bp, synthetic construct
  source 1..75: mol_type = other DNA
cggtgacggcgtgtatgggcgcctgaaatttgaatccggcggtcatcgcgtacagcgtgttccggccactgaatc

SEQ ID NO: 546892 - DNA, 75 bp, synthetic construct
  source 1..75: mol_type = other DNA
tttgaagcacagaaagggttcgatgaatcattccggcattatggttgtgaggatgaagaatttggggcgcggctt

SEQ ID NO: 546893 - DNA, 75 bp, synthetic construct
  source 1..75: mol_type = other DNA
agtttcagggaaatatcccgtattacagacttgtcgcgtgtgacagtcagtcgctgggtgcgttcaggaacattc

SEQ ID NO: 546894 - DNA, 75 bp, synthetic construct
  source 1..75: mol_type = other DNA
accttccgttcttcgggagcgggggggcagcacgttaacaccaccgattcggcaatccgtattactcacttgccg

SEQ ID NO: 546895 - DNA, 75 bp, synthetic construct
  source 1..75: mol_type = other DNA
aaatttgaatctggcggtcatcgcgtgcagcgtgttcctgctacggaatcgcagggtcgtattcatacttctgct

SEQ ID NO: 546896 - DNA, 75 bp, synthetic construct
  source 1..75: mol_type = other DNA
tcgctggcgagtagaaattatgagcgccagtgaaggcgaacatggtggttataaagagatcatcgccaaaatcag

SEQ ID NO: 546897 - DNA, 75 bp, synthetic construct
  source 1..75: mol_type = other DNA
gacgctgctgctcatgaagttattgaaggtcaggcttctgccctggaagaactggatgatgaatatctgaaagaa

SEQ ID NO: 546898 - DNA, 75 bp, synthetic construct
  source 1..75: mol_type = other DNA
ggcgatggcgcaaagtgtcaccgtcgatgtgccgagtggatacaaagtggttgtggttcctgattcagtcagcgt

SEQ ID NO: 546899 - DNA, 75 bp, synthetic construct
  source 1..75: mol_type = other DNA
gaagcctattcattctgtgacgctaccagatggagaaagggggcaaattattttgcctcctgcggcagaagaagg

SEQ ID NO: 546900 - DNA, 75 bp, synthetic construct
  source 1..75: mol_type = other DNA
agaaaaacattggggtgggctttccgaaaaagcgcgggtaaagggagactggctgacgccactcccggctggcgc

SEQ ID NO: 546901 - DNA, 75 bp, synthetic construct
  source 1..75: mol_type = other DNA
acactctggcagttgaccgtggtaatgatatgatttcacccctttaccaaccaatgtcaccgtccgtgctgaact

SEQ ID NO: 546902 - DNA, 75 bp, synthetic construct
  source 1..75: mol_type = other DNA
cttgctcaaccgacaacggacgagttaatgacgctggttaacaagttcattgaagaaaaacaatctgctaatcca

SEQ ID NO: 546903 - DNA, 75 bp, synthetic construct
  source 1..75: mol_type = other DNA
ttgctgttttgaaaaggattttgggttgggtgatttttatacctgcattgatctctacattgatttctttgctga

SEQ ID NO: 546904 - DNA, 75 bp, synthetic construct
  source 1..75: mol_type = other DNA
aacagcgccgccccacagggctgaatcctcaactgaagacgtttcaggcggtgttccgggtgacggatgagtcaa

SEQ ID NO: 546905 - DNA, 75 bp, synthetic construct
  source 1..75: mol_type = other DNA
aattacaagctttgctgctgcgcgaaaaagttgaagccgcgcgcagagcgatgctgttatatccacaacaattaa

SEQ ID NO: 546906 - DNA, 75 bp, synthetic construct
  source 1..75: mol_type = other DNA
tgacggaacagtggttatgcgctcgcgttccgggcaaagagatgcccgatctgagcgcctttcaactggaaggtt

SEQ ID NO: 546907 - DNA, 75 bp, synthetic construct
  source 1..75: mol_type = other DNA
aagttgaccttccgtcctatcccggagggccggtaacagtccctcttactgtacgttgcgaccagacacagtcgg

SEQ ID NO: 546908 - DNA, 75 bp, synthetic construct
  source 1..75: mol_type = other DNA
agagaaaatggttcgttctatcaaagaaaggaagccaataatacctaagaggcaagataggacttatgaaaatga

SEQ ID NO: 546909 - DNA, 75 bp, synthetic construct
  source 1..75: mol_type = other DNA
gaaaaaatgagagagagtctaatgggttggaaagaaaactctggcacttccagtatatataataaacgttttatt

SEQ ID NO: 546910 - DNA, 75 bp, synthetic construct
  source 1..75: mol_type = other DNA
tttcgggttacagatgaatattcccgtgctgcgctggacagttttttatcccgtcatgccgggatgcgtgctttt

SEQ ID NO: 546911 - DNA, 75 bp, synthetic construct
  source 1..75: mol_type = other DNA
gtgcggtttggtgacggttatgaacagcgccgaccaacaggactaaatacaaaactgaagacgtttcaggcggtg

SEQ ID NO: 546912 - DNA, 75 bp, synthetic construct
  source 1..75: mol_type = other DNA
acaaaatgtcagacacagtaaaaaagactgggtaatcaacccaccagagaaaacacgtttattgcaaaagagggg

SEQ ID NO: 546913 - DNA, 75 bp, synthetic construct
  source 1..75: mol_type = other DNA
gtgtgccgggagtggagcgtcacggataacgcccggtacagtgatttcagttgtacgattgagcaggtggtgaac

SEQ ID NO: 546914 - DNA, 75 bp, synthetic construct
  source 1..75: mol_type = other DNA
tgaacgttatgttctgggtgattttcatcctgatttttgtcggactggcgttgcaggattccggtgcccggatga

SEQ ID NO: 546915 - DNA, 75 bp, synthetic construct
  source 1..75: mol_type = other DNA
ctggcatggtggttaccgtgcctttttgtggcgaccgccgaaacataaccggacggtgagggtggtgtgccggga

SEQ ID NO: 546916 - DNA, 75 bp, synthetic construct
  source 1..75: mol_type = other DNA
atgacgactatgaacgagaaagcgtcatgcgtgcaatgtgcaatgtatgcagcacgaagaaaggaggctgtaacg

SEQ ID NO: 546917 - DNA, 75 bp, synthetic construct
  source 1..75: mol_type = other DNA
ccatgagctctgaatataaacgtctgccgcatctgtataaccagttgtgggccatatttgccggtgttaaaaaca

SEQ ID NO: 546918 - DNA, 75 bp, synthetic construct
  source 1..75: mol_type = other DNA
aagggccaaccattgacgaagggatatctcagagtatccgcaaccagttcaacgatgaaatcccgcagctgtttg

SEQ ID NO: 546919 - DNA, 75 bp, synthetic construct
  source 1..75: mol_type = other DNA
attcggaccgattgtccacgcttataccatgcagcgagcggtagaagataaagccgttacacctttgctgtatga

SEQ ID NO: 546920 - DNA, 75 bp, synthetic construct
  source 1..75: mol_type = other DNA
cgaagcgatggtggccgaagcgccgaagaaggaagagccggccgctccgggcggcggcatgggcggcatgggcgg

SEQ ID NO: 546921 - DNA, 75 bp, synthetic construct
  source 1..75: mol_type = other DNA
gggggggaactggcagtcagcgggcaggataagctgctcatcagtctgctttcaccggaacgtctgctggagatg

SEQ ID NO: 546922 - DNA, 75 bp, synthetic construct
  source 1..75: mol_type = other DNA
agagatcggtgctggaatgaaccaggtaaaccgtatcgttgaaaccatcatccagatcctgcgcgttggtttgat

SEQ ID NO: 546923 - DNA, 75 bp, synthetic construct
  source 1..75: mol_type = other DNA
cataaacgatgatgagtattgctacatgacgttttatgaaacggggtacgctttcctgaaagccttactgagaac

SEQ ID NO: 546924 - DNA, 75 bp, synthetic construct
  source 1..75: mol_type = other DNA
cataagcgatgatgaatattgcttcaatgagttttgtgagacggggtgcgccttcctgaaagccttactgagaac

SEQ ID NO: 546925 - DNA, 75 bp, synthetic construct
  source 1..75: mol_type = other DNA
atgtctactcaagaatttaaagttaaattgccagaatacactatcgagcagatagaaagaattatttacaataaa

SEQ ID NO: 546926 - DNA, 75 bp, synthetic construct
  source 1..75: mol_type = other DNA
tcacggagtttgtcgacggcaagaaagtgaaccccaccattgcgctgattgactgggaacacccgcaaaataacc

SEQ ID NO: 546927 - DNA, 75 bp, synthetic construct
  source 1..75: mol_type = other DNA
agttccactttactgaagaatttacagtattgcggtcgggcggtgttgaaacccgcaggccggatattgtctgtt

SEQ ID NO: 546928 - DNA, 75 bp, synthetic construct
  source 1..75: mol_type = other DNA
gctgaaagccaatgagcggatgtataaccatctgctctacggtatcgccgtcaccgaatttgtcaatggcaagaa

SEQ ID NO: 546929 - DNA, 75 bp, synthetic construct
  source 1..75: mol_type = other DNA
ggcaggcgaaccgctggatattctgatcaatggttatttaatcgcccagggcgaagtggtggtcgttgccgataa

SEQ ID NO: 546930 - DNA, 75 bp, synthetic construct
  source 1..75: mol_type = other DNA
ctacacctcccaaaccgatttcgtttaataatgacgttattctcgataaagcagaaaaaacgttaactattcgcg

SEQ ID NO: 546931 - DNA, 75 bp, synthetic construct
  source 1..75: mol_type = other DNA
aatggcggcattcagtttgtgggcgagaaaaacgcgctggcagacggttcaactattgccgataagcgcagctac

SEQ ID NO: 546932 - DNA, 75 bp, synthetic construct
  source 1..75: mol_type = other DNA
gtatctacctgaacaaacatatagcgcagaaaattttgtaaggcgtaacagaatccaggctgctttatgtgattc

SEQ ID NO: 546933 - DNA, 75 bp, synthetic construct
  source 1..75: mol_type = other DNA
gaatcgctgagatatggcattccaactattgcggtattgggtaatgggatttttgtcgagtatccgaaaggttct

SEQ ID NO: 546934 - DNA, 75 bp, synthetic construct
  source 1..75: mol_type = other DNA
ataaccccattataggtttaatcggctacgatgtagccaaaacaaactgttcatatagagcagatactgctgctt

SEQ ID NO: 546935 - DNA, 75 bp, synthetic construct
  source 1..75: mol_type = other DNA
cggtgatgaagccaccgtaaacaataacggcaataccaccgtagacggtcagggttcgaccggaactgaaatcgc

SEQ ID NO: 546936 - DNA, 75 bp, synthetic construct
  source 1..75: mol_type = other DNA
atcagcaacggcggcaccggcacacaggttaacggtgatgaagccactgtaaacaataacggtaacaccaccgtt

SEQ ID NO: 546937 - DNA, 75 bp, synthetic construct
  source 1..75: mol_type = other DNA
gattccactggcacggagatcgccggtaataacgggaaagttattcaggacggtatactggatgtcagcggcggc

SEQ ID NO: 546938 - DNA, 75 bp, synthetic construct
  source 1..75: mol_type = other DNA
attcaataatagcgtgtcgagtatgatgggaatggaggcctacggtaaaggcactgttcttaacagcgaaagcgg

SEQ ID NO: 546939 - DNA, 75 bp, synthetic construct
  source 1..75: mol_type = other DNA
ggtattaacaacggaaatattacgctttctcaatatgactattcttctccggagacatcgttctcagaacctgac

SEQ ID NO: 546940 - DNA, 75 bp, synthetic construct
  source 1..75: mol_type = other DNA
ggacaacaaaggcggcatgaccgtcaccgatccggattccatcggtattcagatcgacggcgacaaggcagttgt

SEQ ID NO: 546941 - DNA, 75 bp, synthetic construct
  source 1..75: mol_type = other DNA
agccaagtaataataaccgtgtgggtgctatgttgtttaatttgggggttgatgatggtaaagggaccatcatgg

SEQ ID NO: 546942 - DNA, 75 bp, synthetic construct
  source 1..75: mol_type = other DNA
agcttattgaaaacgaaacgttgcgccagaaggcggcggagattttacagcggcgcgatatctttaccccgcgtt

SEQ ID NO: 546943 - DNA, 75 bp, synthetic construct
  source 1..75: mol_type = other DNA
tttgcagggcagaaacagggcacgcataccgcgcgctttggtgaaatagagcagcgtggcgtggcattaacgccg

SEQ ID NO: 546944 - DNA, 75 bp, synthetic construct
  source 1..75: mol_type = other DNA
taaggcgctggaagagtcggtcatgtttgcagggcaaaagcaggggacgcataccgcgcgctttggcgagataga

SEQ ID NO: 546945 - DNA, 75 bp, synthetic construct
  source 1..75: mol_type = other DNA
acggtggatatatatcacccgcggcatttattccacttgctgaaaaatccggattaatcgttccgcttacgcaaa

SEQ ID NO: 546946 - DNA, 75 bp, synthetic construct
  source 1..75: mol_type = other DNA
tgtccggttttggatgagttccagctttatcaggaagcggaagaacgcagtaaacgtcgctgtggtttgctttaa

SEQ ID NO: 546947 - DNA, 75 bp, synthetic construct
  source 1..75: mol_type = other DNA
tcctggctgccatattaaccacctgacgccacgcacgctcgacattgaccgggtgcagtcgatgatgcccgaatg

SEQ ID NO: 546948 - DNA, 75 bp, synthetic construct
  source 1..75: mol_type = other DNA
cacgaattaagctacatgatcctggtcctggttatatgcattttccattagattctgacagaggatatgatactg

SEQ ID NO: 546949 - DNA, 75 bp, synthetic construct
  source 1..75: mol_type = other DNA
ttgcgtgaaccaatggatgttattggtgacgctgatacagaaacagtagtgatgcaatgtagctcgcaaattggt

SEQ ID NO: 546950 - DNA, 75 bp, synthetic construct
  source 1..75: mol_type = other DNA
caagaattaaactacatgatcctggtcctggttatatgcatttcccattagattctgacagaggatatgataccg

SEQ ID NO: 546951 - DNA, 75 bp, synthetic construct
  source 1..75: mol_type = other DNA
cgattttactacgccagaccagctttaaagcactggaagagacggtgttgtttgcagggcagaaacagggcacgc

SEQ ID NO: 546952 - DNA, 75 bp, synthetic construct
  source 1..75: mol_type = other DNA
gcgttatgtactatcattattattggtcctgcgggtatttattattatcattcttaccaaggggatattatttgg

SEQ ID NO: 546953 - DNA, 75 bp, synthetic construct
  source 1..75: mol_type = other DNA
cagtgaattccgatctgcgtgagtctggttctattgaacaggacgcagacttgataatgttcatataccgtgatg

SEQ ID NO: 546954 - DNA, 75 bp, synthetic construct
  source 1..75: mol_type = other DNA
ccgatccggattccatcggtattctgatcgacggcgacaaagccatcgtcaacaacgacggcgacaatgccatca

SEQ ID NO: 546955 - DNA, 75 bp, synthetic construct
  source 1..75: mol_type = other DNA
gttcttccatatgggaatgggattccgtcgccgcgtgcgcatgttctctgtcgatccggcaactcatctggcgcg

SEQ ID NO: 546956 - DNA, 75 bp, synthetic construct
  source 1..75: mol_type = other DNA
aacaagttttcagcaaccaatatgaattgcaatctaccggagctaaaaatgtagggattgttattttttcggcac

SEQ ID NO: 546957 - DNA, 75 bp, synthetic construct
  source 1..75: mol_type = other DNA
gatctcggcaccgtgacactggactatttttctaacaatataaccccagatacggattacgctggcggtaagaat

SEQ ID NO: 546958 - DNA, 75 bp, synthetic construct
  source 1..75: mol_type = other DNA
tgggtggaaccgcgtaacaagtggggtaagggcaccatcggcctgatggaaatcccaacaacgggtgaaacgctg

SEQ ID NO: 546959 - DNA, 75 bp, synthetic construct
  source 1..75: mol_type = other DNA
cgaaatacacttccgtccggaattgtttaaatacaacgatgcgggtgttgataccaaacaattagaagggcaaag

SEQ ID NO: 546960 - DNA, 75 bp, synthetic construct
  source 1..75: mol_type = other DNA
ataccaaacaactggaagggcaaagtgatctcggctttgcggggttccgagtgtttaaagcgccagaactggcgc

SEQ ID NO: 546961 - DNA, 75 bp, synthetic construct
  source 1..75: mol_type = other DNA
tgcagaagaagaaagcctactgtcagtttgattcgaagctggcacagattgttcaggcacaggggcgtaaagggc

SEQ ID NO: 546962 - DNA, 75 bp, synthetic construct
  source 1..75: mol_type = other DNA
gggattgcaggccagtgataaatacagttcagggaagcagtttgcggacagcctgaagggaaatggctcaggtgt

SEQ ID NO: 546963 - DNA, 75 bp, synthetic construct
  source 1..75: mol_type = other DNA
gacatgctctctgctcatcagccttatgaacattatcctgagatcattcgtaaagcactgcatgaagccaacgca

SEQ ID NO: 546964 - DNA, 75 bp, synthetic construct
  source 1..75: mol_type = other DNA
cactttttttcgggctggtaacagccctctgctctcctgttagcctggctaataaagatgtagatcttactgcga

SEQ ID NO: 546965 - DNA, 75 bp, synthetic construct
  source 1..75: mol_type = other DNA
tatgttttttggggctggcaacagccctcataacgccttttgcctatgctggtcaggatgtgaatctcaccgcgc

SEQ ID NO: 546966 - DNA, 75 bp, synthetic construct
  source 1..75: mol_type = other DNA
tactatttgtacgggagggcagaatgaacactgcacatatcctgtgcgaaatggatggggcaggattcatcaggc

SEQ ID NO: 546967 - DNA, 75 bp, synthetic construct
  source 1..75: mol_type = other DNA
gactttaccgccttctggttcgatacggtaaaacctggcgcgaccacttttaccgtttatgcgttgctcgatagc

SEQ ID NO: 546968 - DNA, 75 bp, synthetic construct
  source 1..75: mol_type = other DNA
tcccttcttcgtgttagccggaaacattatgaataccggtggtatagccagacgactggttaacctggcgcaagc

SEQ ID NO: 546969 - DNA, 75 bp, synthetic construct
  source 1..75: mol_type = other DNA
atttaggcgctctgaaaaggtcagttaatcgcactgaaaaacaaatggggatagctggtattggtaaagcaatat

SEQ ID NO: 546970 - DNA, 75 bp, synthetic construct
  source 1..75: mol_type = other DNA
agaactacgcagacctgaggaaagcagtaaaccgcacttacgcagaaatggggataggagggagatgtaaaaaaa

SEQ ID NO: 546971 - DNA, 75 bp, synthetic construct
  source 1..75: mol_type = other DNA
ttgacggcgacaaggcggtcgtgaacaacgacggtgacagtgccatcagcaacggcggcaccggcacgcaggtta

SEQ ID NO: 546972 - DNA, 75 bp, synthetic construct
  source 1..75: mol_type = other DNA
tcgagcaggcgctggactggctggtgaaagagtcccgtcgcggcctctccatccagcgttataaaggtctgggcg

SEQ ID NO: 546973 - DNA, 75 bp, synthetic construct
  source 1..75: mol_type = other DNA
tcattattggcggtattatcgcaggggtattcacgcccacggaagcatcggcaattgcggtaatttatagtttag

SEQ ID NO: 546974 - DNA, 75 bp, synthetic construct
  source 1..75: mol_type = other DNA
aatcagttaaaaacctctacgcgtggcttatagcaatactgccgtttgttgtcagcgtcccccctgctgagtacg

SEQ ID NO: 546975 - DNA, 75 bp, synthetic construct
  source 1..75: mol_type = other DNA
aacctctgaataacatttatgcgtggattctagcgttcatgcctttcttctttggagtattgccggaagagtata

SEQ ID NO: 546976 - DNA, 75 bp, synthetic construct
  source 1..75: mol_type = other DNA
atggatcgtagacgatttattaaagcttcaatggctatggccgccgtgtgcggtaccagcggcattgcttctctt

SEQ ID NO: 546977 - DNA, 75 bp, synthetic construct
  source 1..75: mol_type = other DNA
tatagtcgttaccttgctggcttacgtattcttcattgtaataccgaaacaggaagatggcgtcattgaggaagc

SEQ ID NO: 546978 - DNA, 75 bp, synthetic construct
  source 1..75: mol_type = other DNA
atggtaatgatataaacataacactggagcttgccggtagagagaaattgtatgtccgtgtgccaggtgtttatt

SEQ ID NO: 546979 - DNA, 75 bp, synthetic construct
  source 1..75: mol_type = other DNA
atggtaatgacattaacattactctggaacttaccggtaacagtaagttctacgtccgtgttccaaatgtttatc

SEQ ID NO: 546980 - DNA, 75 bp, synthetic construct
  source 1..75: mol_type = other DNA
gttcgtggatgccgagcttgcgccagttgccagcaggatattgaacttatcaacaaacagagaggtgtgaagtga

SEQ ID NO: 546981 - DNA, 75 bp, synthetic construct
  source 1..75: mol_type = other DNA
aaacaaagggaagtgataccagcgcggttactgttgagtatcgattagaaccggaaggaagtgtgttgttagacg

SEQ ID NO: 546982 - DNA, 75 bp, synthetic construct
  source 1..75: mol_type = other DNA
tgatcgacaccgaccagaatacaagcggtcagacgggctattatgttttgtatgatgcctatgtcactagcgcca

SEQ ID NO: 546983 - DNA, 75 bp, synthetic construct
  source 1..75: mol_type = other DNA
caaacgagctggtagagcaccgcctgcagctggccatacaaaaacaccgtattgatcagaatgcagtctctgcag

SEQ ID NO: 546984 - DNA, 75 bp, synthetic construct
  source 1..75: mol_type = other DNA
catttattattaccgaagatctcactcccacgattagccttgaagattattgtgctgattgggcagtcaacccgc

SEQ ID NO: 546985 - DNA, 75 bp, synthetic construct
  source 1..75: mol_type = other DNA
tcccacgattagccttgaagattattgtgcagattgggcagtcaacccacctgatgtgcgtattaaacgtatgtt

SEQ ID NO: 546986 - DNA, 75 bp, synthetic construct
  source 1..75: mol_type = other DNA
agattataaaaaatctactctcattgcggatgcccgttttgggcgcagacagagagtggcacgctattcatcgcc

SEQ ID NO: 546987 - DNA, 75 bp, synthetic construct
  source 1..75: mol_type = other DNA
ttttggttcgggtggtggcgatgccttcagccgaaataatacggatgcctttttaaccagacaggaaacagcgaa

SEQ ID NO: 546988 - DNA, 75 bp, synthetic construct
  source 1..75: mol_type = other DNA
ggtgtaaatcctttcacgggtccgattgatagcgaggcattagccggaaaccgtttcgtaacttacaagggaact

SEQ ID NO: 546989 - DNA, 75 bp, synthetic construct
  source 1..75: mol_type = other DNA
cgcttaaagacattctcaagcaggaacaagggctgctgtcgcaagcagaagcaaaagccacaaaaatcagggaaa

SEQ ID NO: 546990 - DNA, 75 bp, synthetic construct
  source 1..75: mol_type = other DNA
tgataactcacaacttcctgatggctttgtgcttgattcccaaccagaacagcagcaatctcctttggtttcacc

SEQ ID NO: 546991 - DNA, 75 bp, synthetic construct
  source 1..75: mol_type = other DNA
agcagccttgtggatcagcaagttaataactttctgaaagaaaagggtagtctcgcaaaaatttatggaatagcc

SEQ ID NO: 546992 - DNA, 75 bp, synthetic construct
  source 1..75: mol_type = other DNA
tcgctcatccgtagggatgggtagtaaatcatctaaagcaacgttaaagaaagctgctggcgcaatggataataa

SEQ ID NO: 546993 - DNA, 75 bp, synthetic construct
  source 1..75: mol_type = other DNA
cggtaattgacctgcaccgggcgcagcttcgcacgcgcgttccacgtcgttggcgcgataaagatttgattggtt

SEQ ID NO: 546994 - DNA, 75 bp, synthetic construct
  source 1..75: mol_type = other DNA
atggttgaacttaaagagccgtttgccacgttatggcgcggtaaagatccttttgaggaagttaaaaccttgcag

SEQ ID NO: 546995 - DNA, 75 bp, synthetic construct
  source 1..75: mol_type = other DNA
attggctatccggctacgcgtaggttgagaaacatctatgaggtggcttctggcatgcaaagggtgggcagcgag

SEQ ID NO: 546996 - DNA, 75 bp, synthetic construct
  source 1..75: mol_type = other DNA
caagcaagaattcagtcggtaccacaacaaatgtaaacatgaacgttgcccgctcttactgggaaggtaatgctt

SEQ ID NO: 546997 - DNA, 75 bp, synthetic construct
  source 1..75: mol_type = other DNA
gcagcgcattagcgacagctattgttatggctctttctgcaccagcattcgctactgatagcacggtatcaactg

SEQ ID NO: 546998 - DNA, 75 bp, synthetic construct
  source 1..75: mol_type = other DNA
cagctccctgattcaggcaatggcagcagctccggctaacgttgctaatctgcaggctgacacgctctcagcccg

SEQ ID NO: 546999 - DNA, 75 bp, synthetic construct
  source 1..75: mol_type = other DNA
gttgttaataatgctaacggtttcgaccgttttatgtatggcgttctcagtggattgatggatgttggtaaaggt

SEQ ID NO: 547000 - DNA, 75 bp, synthetic construct
  source 1..75: mol_type = other DNA
aagtagtaatctgaatataaatctttccgatggctcagtctggaaaggtaacgtaggtggagctctggatagtag

SEQ ID NO: 547001 - DNA, 75 bp, synthetic construct
  source 1..75: mol_type = other DNA
gcggcgataaagcgggtagtaatctggatataaatctttccgatagttcagtctggaaaggcaaagtttcagggg

SEQ ID NO: 547002 - DNA, 75 bp, synthetic construct
  source 1..75: mol_type = other DNA
gatcgcgcgtgtggcaaccatggtgcacaaaatgcacgccgcagggataaatcaccgcgactgttatatttgcca

SEQ ID NO: 547003 - DNA, 75 bp, synthetic construct
  source 1..75: mol_type = other DNA
cttttatcaatcagcgtcttatcgaaacggcagataccagtctgctggtgttgccggagtttctgggattattgc

SEQ ID NO: 547004 - DNA, 75 bp, synthetic construct
  source 1..75: mol_type = other DNA
ttatcagatattgaagcttttaaggctgatacgattaaggccctacttgcctccgatttacttcctggaatggag

SEQ ID NO: 547005 - DNA, 75 bp, synthetic construct
  source 1..75: mol_type = other DNA
cagcaatacttgaggcaactagtcagcttgtaggttatgcaagagacattgcacatgcgcaggaagaatctgata

SEQ ID NO: 547006 - DNA, 75 bp, synthetic construct
  source 1..75: mol_type = other DNA
aacggcggataccagtctgctggtgttgccggagtttctgggattattgctgctgttgatggcagtcactctcgg

SEQ ID NO: 547007 - DNA, 75 bp, synthetic construct
  source 1..75: mol_type = other DNA
cagagtttccgcgcccgcaggcgtttcccaactggcaaacgctggagctgcgtaacgtgacgtttgcttatcagg

SEQ ID NO: 547008 - DNA, 75 bp, synthetic construct
  source 1..75: mol_type = other DNA
caactcggtagcgcctcgttgctggcggggttaaccagcgatgtgcgcaatatcaccattgcttttgtgcgtctg

SEQ ID NO: 547009 - DNA, 75 bp, synthetic construct
  source 1..75: mol_type = other DNA
gtggcaatacataatcattcaattccggccattcattatatggtggcggtatcggggacggatcatattccctgt

SEQ ID NO: 547010 - DNA, 75 bp, synthetic construct
  source 1..75: mol_type = other DNA
tacgcatgcggtgaattccacggcggtggcaatacataatcattcaattccggccattcattatatggtggcggt

SEQ ID NO: 547011 - DNA, 75 bp, synthetic construct
  source 1..75: mol_type = other DNA
cggaaggttttcatattggaattaattttagcgcttcgcatattatttcgccgacgtttgtcgacgagtgtttaa

SEQ ID NO: 547012 - DNA, 75 bp, synthetic construct
  source 1..75: mol_type = other DNA
gttggcaggctagccttaagattagtggaaaaacagagagaagtttcccccaccttagacgacttcagaagggag

SEQ ID NO: 547013 - DNA, 75 bp, synthetic construct
  source 1..75: mol_type = other DNA
ggcgtggtggggtgattttatcgaacaggcagcaaccggaagccttagtgcaactggcggttttcgtggcttaaa

SEQ ID NO: 547014 - DNA, 75 bp, synthetic construct
  source 1..75: mol_type = other DNA
cgatattaaaccgtttatggtggcggatgcgctggccgatttcagccgtgacgagcatttgatgtcgctgaaata

SEQ ID NO: 547015 - DNA, 75 bp, synthetic construct
  source 1..75: mol_type = other DNA
agctgaaaatggctcataagcttgagttaagcaacgggcgtattgttaacctgaagttatcaaaagggcagaaaa

SEQ ID NO: 547016 - DNA, 75 bp, synthetic construct
  source 1..75: mol_type = other DNA
cgctgccgcaggtgtagagattaaagtggtcgatgacgcacgcaagaccttaccgccaggttgcgaaggtgaaga

SEQ ID NO: 547017 - DNA, 75 bp, synthetic construct
  source 1..75: mol_type = other DNA
gctaaagtgctgtcgttactcaacggcattacctgcatcattccggtgttagcgccggtgctcggacacctgatt

SEQ ID NO: 547018 - DNA, 75 bp, synthetic construct
  source 1..75: mol_type = other DNA
ggggccgttttcattacgcgcgggcgtagccagctcgaccttaggtattgcgcaagtttgcggttcgtcactgtg

SEQ ID NO: 547019 - DNA, 75 bp, synthetic construct
  source 1..75: mol_type = other DNA
aaaacacgtagcgcaagcggcggagttctgggtgttctgtgccgactttaatcgccatttacagatctgtccgga

SEQ ID NO: 547020 - DNA, 75 bp, synthetic construct
  source 1..75: mol_type = other DNA
ctcacccgtggtagcaataatcgccgtgatacctggagcgatcatattcgccggacgattatcaaagaaagtcgt

SEQ ID NO: 547021 - DNA, 75 bp, synthetic construct
  source 1..75: mol_type = other DNA
acatatcgtggtaatcgaaaaactaccgcgaactacctcaggtaaaatacaaaagtttttgttaagaaaagatat

SEQ ID NO: 547022 - DNA, 75 bp, synthetic construct
  source 1..75: mol_type = other DNA
caaaacggcgaaatcttgctggatggcaaacctgtcagcggcgaacaaccggaagattatcgcaaactgttttcg

SEQ ID NO: 547023 - DNA, 75 bp, synthetic construct
  source 1..75: mol_type = other DNA
tgggccataagcttgagttaagtaatgggcgaattcttaacctgaggttatcaaaagggcagaaaaaacgcgtgg

SEQ ID NO: 547024 - DNA, 75 bp, synthetic construct
  source 1..75: mol_type = other DNA
ccgcctgctggaaatgcgcaacgggcaacttagcgagctgacgggcgaagagcgcgatgccgcttcgcgtgatgc

SEQ ID NO: 547025 - DNA, 75 bp, synthetic construct
  source 1..75: mol_type = other DNA
gtggccatcgctctattcgccatttcactgatgaacccatttccgaagcgcagcgtgaggcgattattaacagcg

SEQ ID NO: 547026 - DNA, 75 bp, synthetic construct
  source 1..75: mol_type = other DNA
atgcggcctacggttcggcacagacttgtaggcatgataagacgcgtccagcgtcgcatcaggcattgtgcgcca

SEQ ID NO: 547027 - DNA, 75 bp, synthetic construct
  source 1..75: mol_type = other DNA
gcgctatgttgtcgcggacaacggcgaaaaggggctgaccttcgctgttgaaccgattaagctggcgctatctga

SEQ ID NO: 547028 - DNA, 75 bp, synthetic construct
  source 1..75: mol_type = other DNA
ggtggctaaattccttaatgcagaaatcatcgacgccattctggatcgcaccgccgcacaagatggcgatatgat

SEQ ID NO: 547029 - DNA, 75 bp, synthetic construct
  source 1..75: mol_type = other DNA
actatcagatcgttaagtgtttccgtgacgaagacctgcgtgctgatcgtcagcctgaatttacccagatcgatg

SEQ ID NO: 547030 - DNA, 75 bp, synthetic construct
  source 1..75: mol_type = other DNA
aatccatttttgatacttacggcgtgctgcctcgccacccgtcacagttgtacgagctgctgctggaaggtgtgg

SEQ ID NO: 547031 - DNA, 75 bp, synthetic construct
  source 1..75: mol_type = other DNA
gaaatattacgcagcgcagctgctcgggaatatggcccgccgtcgagcccctgctgttaacgcagtggatttgta

SEQ ID NO: 547032 - DNA, 75 bp, synthetic construct
  source 1..75: mol_type = other DNA
agccaatgcaggaaaaggcggtatccaggttgtctgatcctgaactaagggggcgctactttaattcaggagtgg

SEQ ID NO: 547033 - DNA, 75 bp, synthetic construct
  source 1..75: mol_type = other DNA
cggatctgcgtaacccgatggaactgaccgacgttgccgatctgctgaaatctgttgagtttgcagtatttgcag

SEQ ID NO: 547034 - DNA, 75 bp, synthetic construct
  source 1..75: mol_type = other DNA
gaagaactcggcaattacattaagcctaaacgtgacgatctttttggctatgcagctacggtgcagttgcaaagc

SEQ ID NO: 547035 - DNA, 75 bp, synthetic construct
  source 1..75: mol_type = other DNA
ttaaaatccgcaaagatgccttcggtcgttacgactatccgaacttctaccaacacattgtcaagaacgttaaca

SEQ ID NO: 547036 - DNA, 75 bp, synthetic construct
  source 1..75: mol_type = other DNA
tgcagttcaaaaattgcgtgatatgggggctgttattacgtatcagggtaaagggacatatgtaactgataatat

SEQ ID NO: 547037 - DNA, 75 bp, synthetic construct
  source 1..75: mol_type = other DNA
ggcagaaactggactctatgggagttaagttggagaagattactcaacttaagcagtggcatatcggcgaatatt

SEQ ID NO: 547038 - DNA, 75 bp, synthetic construct
  source 1..75: mol_type = other DNA
acgaaatgttgcaatctggtctggtcgaatttcatgttcatacgcatactcatacacgttgggataaaaagttca

SEQ ID NO: 547039 - DNA, 75 bp, synthetic construct
  source 1..75: mol_type = other DNA
tatttttatcagggagggaaacttcccagaaagagcgtaatgataacatttgatgacggttatcttgataactgg

SEQ ID NO: 547040 - DNA, 75 bp, synthetic construct
  source 1..75: mol_type = other DNA
cgcttgatcagttaagcaaccaggcgtcggttggtggcataagtttttccaccaacgctaacaacggccttatgg

SEQ ID NO: 547041 - DNA, 75 bp, synthetic construct
  source 1..75: mol_type = other DNA
tactgaagagcagttggggtacgccgtgttcgcgttcccaatgagcgtgggacgtcagtggggcatgggcttctt

SEQ ID NO: 547042 - DNA, 75 bp, synthetic construct
  source 1..75: mol_type = other DNA
tacgtcgaatggctggcagataccatgattcgcgttcctgttgagcatacgctggatgcagtcaatattgccgat

SEQ ID NO: 547043 - DNA, 75 bp, synthetic construct
  source 1..75: mol_type = other DNA
gttgcaaagcaatgataaacagccttcattcttgtgggagcgttacaaggcgttttcccaaccgcagaggcaaaa

SEQ ID NO: 547044 - DNA, 75 bp, synthetic construct
  source 1..75: mol_type = other DNA
ttcagagccagataactactcatttgtagatgaacactatgatgaattaaaagacttgagcttaagttcatataa

SEQ ID NO: 547045 - DNA, 75 bp, synthetic construct
  source 1..75: mol_type = other DNA
gtgcggcacctgtcgggtgctgtgcggcaacactattctcgaacagtggcaatatcccgcaggcaccttcggtat

SEQ ID NO: 547046 - DNA, 75 bp, synthetic construct
  source 1..75: mol_type = other DNA
ctcaatctgttacgcgaaaaagggattgataaacagtatttcgatgagctggcgaatgtgctggatatcgacttc

SEQ ID NO: 547047 - DNA, 75 bp, synthetic construct
  source 1..75: mol_type = other DNA
ccagatgatggattccgcagaaaagggcaaagcgttcgagcaggcgattatgcccgcgcagatgctctcgcaagt

SEQ ID NO: 547048 - DNA, 75 bp, synthetic construct
  source 1..75: mol_type = other DNA
gatgtttgcgctcaatgattatctcgcagggctggcgcttgatcagttaagcaaccaggcgtcggttggtggcat

SEQ ID NO: 547049 - DNA, 75 bp, synthetic construct
  source 1..75: mol_type = other DNA
cagcggttttcgtaccgactggctacgatgaatacaccagttcagcctacagttctctgctggcgcagattgttc

SEQ ID NO: 547050 - DNA, 75 bp, synthetic construct
  source 1..75: mol_type = other DNA
gagtttatggttatcggcaacatgaccgaggcccaggcaacaacgctggcacgcgatgtgcaaaaacagttgggc

SEQ ID NO: 547051 - DNA, 75 bp, synthetic construct
  source 1..75: mol_type = other DNA
tcgcagcccaggtacactttctgactggctgcaaaagcagggattagttgagggcattagcgccaattccgatcc

SEQ ID NO: 547052 - DNA, 75 bp, synthetic construct
  source 1..75: mol_type = other DNA
ttagctataccgccacggaagatcagcttgagcaggcgaagtcctggtataaccagatgatggattccgcagaaa

SEQ ID NO: 547053 - DNA, 75 bp, synthetic construct
  source 1..75: mol_type = other DNA
aaaaacacggtttttactgcagccatgcatgcaataaaagacatatattatcaatatcttgaagagttgaatcgg

SEQ ID NO: 547054 - DNA, 75 bp, synthetic construct
  source 1..75: mol_type = other DNA
gcttatgacaatatctgccgtgcttcacgtaatatcgccgcgacactggcgattggaatgcgcaacgcggggtga

SEQ ID NO: 547055 - DNA, 75 bp, synthetic construct
  source 1..75: mol_type = other DNA
ggatttcgggaaatttttcctgatgcacagtacgtttctgttccggttgccgacggtggcgaaggaacggtggaa

SEQ ID NO: 547056 - DNA, 75 bp, synthetic construct
  source 1..75: mol_type = other DNA
cgtattcccgagtcacatttaacctggttttgccccgtcaataacgaagagaaacgcattgccatcttagcattg

SEQ ID NO: 547057 - DNA, 75 bp, synthetic construct
  source 1..75: mol_type = other DNA
acatttaggggcgcaggggaagtactggttcaggcgaatggcggaagagctgaatgcggaagggatcatttctca

SEQ ID NO: 547058 - DNA, 75 bp, synthetic construct
  source 1..75: mol_type = other DNA
ggttctggtacgtgaactgctcaaagcaggcctgctgcatgaagatgtcaatacggtggcaggttttggtctgtc

SEQ ID NO: 547059 - DNA, 75 bp, synthetic construct
  source 1..75: mol_type = other DNA
tattcgccagctttatgccgaaggtaaagtggaccgcatggcattactggagtcagaagccgcgtcttatcatgc

SEQ ID NO: 547060 - DNA, 75 bp, synthetic construct
  source 1..75: mol_type = other DNA
tggcaccgattaactacatgcgccgccagacgctgaaaaacgccgagcgctacattattccggagctgaaagagt

SEQ ID NO: 547061 - DNA, 75 bp, synthetic construct
  source 1..75: mol_type = other DNA
gccgaactgcgcgatctgctggagcgggccattatcgacacaccgccggtactggtgcgcgacggtggtgttatc

SEQ ID NO: 547062 - DNA, 75 bp, synthetic construct
  source 1..75: mol_type = other DNA
gctgcgtgagaagatgggtgagtttgccgaactgcgcgatctgctggagcgggccattatcgacacaccgccggt

SEQ ID NO: 547063 - DNA, 75 bp, synthetic construct
  source 1..75: mol_type = other DNA
caatccgcagcgttgccgcagtggcggcacaacatgcggaaatcctcgttcctgaatggctgcccgaaggtaaac

SEQ ID NO: 547064 - DNA, 75 bp, synthetic construct
  source 1..75: mol_type = other DNA
gactgatggcctttactaactgcacgttgcgtaatggcattgatattgttgtagaatttagtgggttatgtgaaa

SEQ ID NO: 547065 - DNA, 75 bp, synthetic construct
  source 1..75: mol_type = other DNA
ctcctgattcatttaaagagagtatgacggcgaaagaagtatgtaatgcgatggaaaaagggttgcgtaaggtgt

SEQ ID NO: 547066 - DNA, 75 bp, synthetic construct
  source 1..75: mol_type = other DNA
atgtcaggacctccgaaaaccccgccacgcctgcatttgatacgaggcaacccctcaaagcgccccgttaaagac

SEQ ID NO: 547067 - DNA, 75 bp, synthetic construct
  source 1..75: mol_type = other DNA
atattgatccttgatgaagccacttcggcgctggataccgaatctgaacgtgcaattcaggcggcgttggatgag

SEQ ID NO: 547068 - DNA, 75 bp, synthetic construct
  source 1..75: mol_type = other DNA
agattgaacgtgccaccggcgatgtggaattccgcaacgttacctttacctatcctgggcgtgatgttcctgcgt

SEQ ID NO: 547069 - DNA, 75 bp, synthetic construct
  source 1..75: mol_type = other DNA
cagaacatctataatttctgaacattctaggcttggtacctgcatttatatagggaaaatggctatcattaactg

SEQ ID NO: 547070 - DNA, 75 bp, synthetic construct
  source 1..75: mol_type = other DNA
tattaacttaattaaactcttaagaagtacaaaaggcatgctattctggtccgatgccccatcgtggttcgctag

SEQ ID NO: 547071 - DNA, 75 bp, synthetic construct
  source 1..75: mol_type = other DNA
agattgaacgagcaatcggcgacgtcgaatttcgcaatgtcacttttacctatccggggcgtgaagttcccgctc

SEQ ID NO: 547072 - DNA, 75 bp, synthetic construct
  source 1..75: mol_type = other DNA
gaaacgaagcgttttgataaggtcagcaacaagatgcgtttgcagggaatgaagatggtatcagcctcttctatc

SEQ ID NO: 547073 - DNA, 75 bp, synthetic construct
  source 1..75: mol_type = other DNA
gcaacgcgtcactatgccaatgtttaatgccttctggcagcaaaataaactgatcgaaatgcgccgcagcgagaa

SEQ ID NO: 547074 - DNA, 75 bp, synthetic construct
  source 1..75: mol_type = other DNA
cccgccaacccttcctcgcatcgccgcaggttcgaaaactttttttgggaatgcgatcaaacgattgataggtaa

SEQ ID NO: 547075 - DNA, 75 bp, synthetic construct
  source 1..75: mol_type = other DNA
ggcatcactgcgaaacactcgatgttgagggttatacctaccgcacggaaacgcagaatggcgatgtgatgatca

SEQ ID NO: 547076 - DNA, 75 bp, synthetic construct
  source 1..75: mol_type = other DNA
agcaatcgtttcaacaagatcgtcaattggaacatgtatttatattggaaaaatggctatagtgaattgtgattc

SEQ ID NO: 547077 - DNA, 75 bp, synthetic construct
  source 1..75: mol_type = other DNA
gggctggtgggtttgctaaagcagtaatagatagtctggatcataatgaatacgctcttgaagggtttgttgatt

SEQ ID NO: 547078 - DNA, 75 bp, synthetic construct
  source 1..75: mol_type = other DNA
ggatggcgaaggttcctcaaacgtttcagcgaactcatctagctccggagacccggtgattgacaactatgtcgc

SEQ ID NO: 547079 - DNA, 75 bp, synthetic construct
  source 1..75: mol_type = other DNA
agagatgacgctacgcgatgcgctctccctgtttgtcgcgcggggatgcgaagtgctgccggtggtgaacacgca

SEQ ID NO: 547080 - DNA, 75 bp, synthetic construct
  source 1..75: mol_type = other DNA
aaatcaccgaagacggttatgccattctacaatttggcggcggctgtaacggttgttcaatggtagacgtcaccc

SEQ ID NO: 547081 - DNA, 75 bp, synthetic construct
  source 1..75: mol_type = other DNA
ctgaacgaattcccggagctgaaaggtgtacgcgatctcaccgaacaccagcgcggcgagcactcttactactaa

SEQ ID NO: 547082 - DNA, 75 bp, synthetic construct
  source 1..75: mol_type = other DNA
aaggatgacgctacgcgatgcgctttctctgtttgtcgcgcggggatgcgaggtgctgccggtggtgaacacgca

SEQ ID NO: 547083 - DNA, 75 bp, synthetic construct
  source 1..75: mol_type = other DNA
atgattgaatttagccatgtcagcaaactgtttggcgcacaaaaagccgttaacgatcttaatctcaattttcag

SEQ ID NO: 547084 - DNA, 75 bp, synthetic construct
  source 1..75: mol_type = other DNA
aagtgttgccggtggttgacgctcagggtaaaccttgcggcacattgcattttcaggatctgctggtggaggcgt

SEQ ID NO: 547085 - DNA, 75 bp, synthetic construct
  source 1..75: mol_type = other DNA
gccgcccggaagggagcggctggagctggaaggatttggcctgggatgtcgccggtgcaactactggctataccg

SEQ ID NO: 547086 - DNA, 75 bp, synthetic construct
  source 1..75: mol_type = other DNA
ttgcgtattctttttgtctgttcgctattgttactttctggatgcagccatatcgctaacgatagctggagcggg

SEQ ID NO: 547087 - DNA, 75 bp, synthetic construct
  source 1..75: mol_type = other DNA
atggctaacgatagctggggcgggcaggataaagctcaacactttatcgcctcggcgatgctttctgccgctgga

SEQ ID NO: 547088 - DNA, 75 bp, synthetic construct
  source 1..75: mol_type = other DNA
gccaccgacactgccctgaaatttgacctgctgaccgcgtatgttgatgagttaagcgcaccatacctggaagat

SEQ ID NO: 547089 - DNA, 75 bp, synthetic construct
  source 1..75: mol_type = other DNA
actgcccgttgacggacttcaggggaaaaacgagtatttttagtcatcctgtttacctctttctcaggaagttta

SEQ ID NO: 547090 - DNA, 75 bp, synthetic construct
  source 1..75: mol_type = other DNA
gccgccctgaggggagcggctggagctggaaggattttgcctgggatatcgccggtgcaagcaccggctataccg

SEQ ID NO: 547091 - DNA, 75 bp, synthetic construct
  source 1..75: mol_type = other DNA
tttttggtcgtagtgagctgggtgtacgcctgctttcgttacgtagcgtggcagattacgtgcgtcgcgaagaac

SEQ ID NO: 547092 - DNA, 75 bp, synthetic construct
  source 1..75: mol_type = other DNA
actgggaatctctgggcggcagctggggtgggcgcttcaaatcccgaccggatggcaatcatttcagcctggaac

SEQ ID NO: 547093 - DNA, 75 bp, synthetic construct
  source 1..75: mol_type = other DNA
actgggaatcactgggcggaagctggggtgggcgcttcaaatccagaccggatggtaatcatttcagcctggaac

SEQ ID NO: 547094 - DNA, 75 bp, synthetic construct
  source 1..75: mol_type = other DNA
tctgcaatatcagttcgactttggtctgcgtccatccatcggttactcctattctaaagcactggacgtagcagg

SEQ ID NO: 547095 - DNA, 75 bp, synthetic construct
  source 1..75: mol_type = other DNA
gacatgctctctgcccaccagccttatgaacattatccagagatcattcgtaaagcactgcatgaagctaacgcg

SEQ ID NO: 547096 - DNA, 75 bp, synthetic construct
  source 1..75: mol_type = other DNA
ggcgcatggggcggtcgttttaaaaaccgaccggatggcaatcatttcagccttgagcacgacggcgtgcgctga

SEQ ID NO: 547097 - DNA, 75 bp, synthetic construct
  source 1..75: mol_type = other DNA
tgtttgccgtgatggtggcagatcttattcactgggcgcaggaacacggctaccgcctgacatttggcgaagcgt

SEQ ID NO: 547098 - DNA, 75 bp, synthetic construct
  source 1..75: mol_type = other DNA
taatctgaatataaatctttccgatggctcagtctggaaaggtaacgtaggtaaaggtctggatggtagtgcacg

SEQ ID NO: 547099 - DNA, 75 bp, synthetic construct
  source 1..75: mol_type = other DNA
cagcttccacgcttacctgagccgccagtataacaacggtatcttcattgatactgctgcacagtttggtcacta

SEQ ID NO: 547100 - DNA, 75 bp, synthetic construct
  source 1..75: mol_type = other DNA
atgaacgttgcccgctcttattgggaaggtaatgcttatgcttatgcttatgcttatgcttatgcttatgcttat

SEQ ID NO: 547101 - DNA, 75 bp, synthetic construct
  source 1..75: mol_type = other DNA
cgcacgcctttccgagcgcggcatgtcagattcaaagcatgctgggtattaaaggttgcccggcgtttgacgttg

SEQ ID NO: 547102 - DNA, 75 bp, synthetic construct
  source 1..75: mol_type = other DNA
ccgtgcgcgctggatgaagctgtacgcgacgggcgcattaagccggggcagttggttctgcttgaagcctttggc

SEQ ID NO: 547103 - DNA, 75 bp, synthetic construct
  source 1..75: mol_type = other DNA
ctggatatcagcggtaaagcgagcggtgacttgagtgtttacagtgcgggttcattggatcttatcaatgaacaa

SEQ ID NO: 547104 - DNA, 75 bp, synthetic construct
  source 1..75: mol_type = other DNA
ttatctattcttatgagcaaagataatgtctacaaatatcctgatcaagatgtaatgaacgtcttattgaagggg

SEQ ID NO: 547105 - DNA, 75 bp, synthetic construct
  source 1..75: mol_type = other DNA
gtgcggcacctgtcgggtgctgtgtggcaacactattctcgaacaatggcaataccccgcaggcaccttcggtat

SEQ ID NO: 547106 - DNA, 75 bp, synthetic construct
  source 1..75: mol_type = other DNA
gtcggttttgtgttccagcattacgcgctgttccgccatatgaccgtgttcgacaacatcgctttcggcctgacg

SEQ ID NO: 547107 - DNA, 75 bp, synthetic construct
  source 1..75: mol_type = other DNA
agaagtcgtttggtcgcactcaggtgctgaacgatatctcactggatattccttctggtcagatggtcgcgttgc

SEQ ID NO: 547108 - DNA, 75 bp, synthetic construct
  source 1..75: mol_type = other DNA
atctctggccttgatccacgcttaaaggattgtacgattcgcgtcgcctgcgatgtcaccaatccgctggtgggt

SEQ ID NO: 547109 - DNA, 75 bp, synthetic construct
  source 1..75: mol_type = other DNA
ctgatctgcaccgaatgtcctggtctcagctggcaagagctgcggaagagtcgacagtacatcatgattatgccc

SEQ ID NO: 547110 - DNA, 75 bp, synthetic construct
  source 1..75: mol_type = other DNA
attttgattccgccggttgtctcgaatgcggcacctgtcgggtgttgtgtggcaatacgattctcgaacagtggc

SEQ ID NO: 547111 - DNA, 75 bp, synthetic construct
  source 1..75: mol_type = other DNA
acgcgagacatcggcaggacaaggcgttccaggaaactttcgcgcaaaagcgacattcaatttcatctatgaata

SEQ ID NO: 547112 - DNA, 75 bp, synthetic construct
  source 1..75: mol_type = other DNA
tccctggtactattggcctggataaaattgcaaataaaactactcaggcacaggcgaattttaatctggttgcca

SEQ ID NO: 547113 - DNA, 75 bp, synthetic construct
  source 1..75: mol_type = other DNA
cagttaaaataaacattaaagatgatggggaatatccatataataaaatgagtaatgcagaaaaaatgtattacc

SEQ ID NO: 547114 - DNA, 75 bp, synthetic construct
  source 1..75: mol_type = other DNA
gacaaaattgctggagatggtgcagcttgctcatctggcggatcgttatccggcgcagctttccggcggccagaa

SEQ ID NO: 547115 - DNA, 75 bp, synthetic construct
  source 1..75: mol_type = other DNA
tcaggggccggtggatctcttcctgcgtccgtgggaagtggatatcagccgccgtaccagcctcgattcgccgct

SEQ ID NO: 547116 - DNA, 75 bp, synthetic construct
  source 1..75: mol_type = other DNA
ggatgcgcaggtgcgtaaagagctgcgtcgctggttgcgtcaactgcatgaagaactgaaattcaccagcgtgtt

SEQ ID NO: 547117 - DNA, 75 bp, synthetic construct
  source 1..75: mol_type = other DNA
gaaattggttttggcggcggtagtcttaatactctgaatgatattgatatttccggcctcgatccgcgcttaaaa

SEQ ID NO: 547118 - DNA, 75 bp, synthetic construct
  source 1..75: mol_type = other DNA
gttgtggtttacctgctctggttttctggcttcttttgtaagcggcgcatttgcttcatgcatttcacaatatgt

SEQ ID NO: 547119 - DNA, 75 bp, synthetic construct
  source 1..75: mol_type = other DNA
agacagcagaacatctgcaccagcacgcccaatgactcatgccctcgcacaggcccacgccaacgcgcaaaaact

SEQ ID NO: 547120 - DNA, 75 bp, synthetic construct
  source 1..75: mol_type = other DNA
ttattgcattgcctatgaccttattatactgctggacaataataagccttgatttcagagtttatttatttgacc

SEQ ID NO: 547121 - DNA, 75 bp, synthetic construct
  source 1..75: mol_type = other DNA
gcatcaatctgcccttctggctggcagctatctgttccgcgttccccatgcttttcattcaaatttgggtaaagc

SEQ ID NO: 547122 - DNA, 75 bp, synthetic construct
  source 1..75: mol_type = other DNA
tgtttatcatcttagcgttggtgatcgttgctgcgtgggtgctgatgttaaaaggaattcgtgcaagaccgtggg

SEQ ID NO: 547123 - DNA, 75 bp, synthetic construct
  source 1..75: mol_type = other DNA
aaagatataagcatttgttagtccagcatcattacgtaaccggtgttatagcaggggtccgttatctttaccgaa

SEQ ID NO: 547124 - DNA, 75 bp, synthetic construct
  source 1..75: mol_type = other DNA
gatcgcgaataaaacgacagaatctcaggctgattttaaactggttgctagtgggtgcagcagtggcatcagttg

SEQ ID NO: 547125 - DNA, 75 bp, synthetic construct
  source 1..75: mol_type = other DNA
tcaaagcgacaacctgtaacatcacacttactggtaataacgtcacgaatgatggcaataataactacacattga

SEQ ID NO: 547126 - DNA, 75 bp, synthetic construct
  source 1..75: mol_type = other DNA
ctggatgaagctttcagcggggcttatgacaatatttaccgcgcttcacgcaatatcgccgccacactggcgatt

SEQ ID NO: 547127 - DNA, 75 bp, synthetic construct
  source 1..75: mol_type = other DNA
atgcagtattggggaaaaatcattggcgtggccgtggccttaataatgggcggcggcttttggggcgtagtattg

SEQ ID NO: 547128 - DNA, 75 bp, synthetic construct
  source 1..75: mol_type = other DNA
atgcagtattggggaaaaatcattggcgtggccgtggccttactgatgggcggcggcttttggggcgtagtgtta

SEQ ID NO: 547129 - DNA, 75 bp, synthetic construct
  source 1..75: mol_type = other DNA
atcatcgacgacaagttatatcggtatgggtttcaaaaaacggactactgatgatgcaactttccttcaacctaa

SEQ ID NO: 547130 - DNA, 75 bp, synthetic construct
  source 1..75: mol_type = other DNA
cagcggcagcgattgtcattatctgggcggccagtggtttctataccattaaagaagccgaacgcggcgtggtaa

SEQ ID NO: 547131 - DNA, 75 bp, synthetic construct
  source 1..75: mol_type = other DNA
taccggagggatgggcacgggacatgacgacgttcctgtcactcagccaggacgtgctgttatcactgctcagtt

SEQ ID NO: 547132 - DNA, 75 bp, synthetic construct
  source 1..75: mol_type = other DNA
gcggggcatcgtctgttcccgtccgtgccttttcgtgaaggtgagcgtcgtcgtcagaaaaccacgctgacagag

SEQ ID NO: 547133 - DNA, 75 bp, synthetic construct
  source 1..75: mol_type = other DNA
tttcacatgcgtgactggtggcagccgacaaaagcaaacttcttcggacacctgaaaaagccgcagattatcgca

SEQ ID NO: 547134 - DNA, 75 bp, synthetic construct
  source 1..75: mol_type = other DNA
ctggaaagccgagaaagttgatgcacgtttgcatcacatcatgctggatatccaccatgcctgtgttgagcatgg

SEQ ID NO: 547135 - DNA, 75 bp, synthetic construct
  source 1..75: mol_type = other DNA
cgcagaagaactgcacggcaaccgtcttcaatggctgtatgccatcgatgtgctgattgaaacacagggcgaggt

SEQ ID NO: 547136 - DNA, 75 bp, synthetic construct
  source 1..75: mol_type = other DNA
ccgtcagcgaactggctgagtccattaagggcgttggcctgttgcagaatctggtcgtgcataccctgcctggtg

SEQ ID NO: 547137 - DNA, 75 bp, synthetic construct
  source 1..75: mol_type = other DNA
ccgctggagtgaccgggtggcagagcatgacctggaaaccctgttctggcagtggggtgagcgttttccgtcact

SEQ ID NO: 547138 - DNA, 75 bp, synthetic construct
  source 1..75: mol_type = other DNA
gcagcagaacgcttgttcccgtcggtgcggtttcgtgtcagggaacgcagtcgccataaatccgcgctggtcatg

SEQ ID NO: 547139 - DNA, 75 bp, synthetic construct
  source 1..75: mol_type = other DNA
ttcctctcagcgcagagcaacaggccgcatggcgggcggtggcggagacggaaaaacgccgccatcaggggaaca

SEQ ID NO: 547140 - DNA, 75 bp, synthetic construct
  source 1..75: mol_type = other DNA
taaccgaaagtgaagtggcggtggcagggaacagtaaattccgcttcgtgggggctgatgccttctcgccagaag

SEQ ID NO: 547141 - DNA, 75 bp, synthetic construct
  source 1..75: mol_type = other DNA
tatctttcggttattccggcggcagatgtcattgcagctgtcgataaattacttccctcctccacgacaggtacg

SEQ ID NO: 547142 - DNA, 75 bp, synthetic construct
  source 1..75: mol_type = other DNA
tgctcggtgtcgttgatacggcaatgatggcgcagaatgcattaatcgcagcggaatcgctgggattgggcgggg

SEQ ID NO: 547143 - DNA, 75 bp, synthetic construct
  source 1..75: mol_type = other DNA
ggttgacgatcgcaaccaggtacaggtcaaccgtgcatggcgcgtgcagttcagctccgccatcggcccgtacaa

SEQ ID NO: 547144 - DNA, 75 bp, synthetic construct
  source 1..75: mol_type = other DNA
gtcgggatatgcaccctgccgaacagattgccggattccgtgcaatggcgcaggaaggcaaaacgcctgcacaaa

SEQ ID NO: 547145 - DNA, 75 bp, synthetic construct
  source 1..75: mol_type = other DNA
cttccgaacgcacgctggcagtccaggcagcactgatgcagcaaccggacaaatccctgacactgctggcatgga

SEQ ID NO: 547146 - DNA, 75 bp, synthetic construct
  source 1..75: mol_type = other DNA
cacgctggcagtccaggcagcactgatgcagcaaccggacaaatctctggcactgctggcatggacgctctgcct

SEQ ID NO: 547147 - DNA, 75 bp, synthetic construct
  source 1..75: mol_type = other DNA
aaaaagcccgtcttgcagccctgctgccggagggatggtcacgggacatgacgacgttcctgtcactcagccagg

SEQ ID NO: 547148 - DNA, 75 bp, synthetic construct
  source 1..75: mol_type = other DNA
attccgcaggagctggcgacggctgcatcaatgactgaaaacggtcatcgtcgggatatgcaccctgccgaacag

SEQ ID NO: 547149 - DNA, 75 bp, synthetic construct
  source 1..75: mol_type = other DNA
gcgttacgacgcgctggaaaaccagtgtgaggaatctgacctgctggcagcagaaatgaagctgattgactgcat

SEQ ID NO: 547150 - DNA, 75 bp, synthetic construct
  source 1..75: mol_type = other DNA
atgaccgaactgtaccgtcacctgggtgcagataccgacgttccggcgggcgatatcggcgttggtgggcgtgaa

SEQ ID NO: 547151 - DNA, 75 bp, synthetic construct
  source 1..75: mol_type = other DNA
aggcggtatgcgcttccacccttcagtaaacctttccattctcaaattcctcggcttcgagcaaacctttaaaaa

SEQ ID NO: 547152 - DNA, 75 bp, synthetic construct
  source 1..75: mol_type = other DNA
gtaaacctttccattctcaaattcctcggcttcgagcaaacctttaaaaatgccctgactactctgccgatgggc

SEQ ID NO: 547153 - DNA, 75 bp, synthetic construct
  source 1..75: mol_type = other DNA
ctggcagagcgtggcatcattccggctgactggcctgtccgcgtgaaggtcatcccgcaggaactggcgactgct

SEQ ID NO: 547154 - DNA, 75 bp, synthetic construct
  source 1..75: mol_type = other DNA
tggtggtgtcctggcgttatggcaacgtgtgtgtccagcgtggtgtgcggttgcgcagtgaggatgacgtggctg

SEQ ID NO: 547155 - DNA, 75 bp, synthetic construct
  source 1..75: mol_type = other DNA
aagaagaacgcctgaacgaactgatggcacgttacgacgcgctggaaaaccagtgtgaggaatccgacctgctgg

SEQ ID NO: 547156 - DNA, 75 bp, synthetic construct
  source 1..75: mol_type = other DNA
cccagagaggccggtcatgctgtccgtgagatggagcggtggatggtgccgaacaaactccgggaggcagcgtga

SEQ ID NO: 547157 - DNA, 75 bp, synthetic construct
  source 1..75: mol_type = other DNA
accgccacggtgtcgccgcaggtggtcgccgactggcagcactcaatatgctggcagagcgtggcatcattccgg

SEQ ID NO: 547158 - DNA, 75 bp, synthetic construct
  source 1..75: mol_type = other DNA
cgactgccgcatcaatgactgaaaacggtcatcgtcgggatatgcaccctgccgaacagattgccggattccgtg

SEQ ID NO: 547159 - DNA, 75 bp, synthetic construct
  source 1..75: mol_type = other DNA
ccgccacgttcagcgaatgctgaaactggccgaccttgccccagtgatcctggatgcgctggcagaagaccacat

SEQ ID NO: 547160 - DNA, 75 bp, synthetic construct
  source 1..75: mol_type = other DNA
tgtggtcacacgtcacgcagtccgcttgacacgctggaaagcgccatcggctttcacatgcgcgactggtggcag

SEQ ID NO: 547161 - DNA, 75 bp, synthetic construct
  source 1..75: mol_type = other DNA
gaaaaccagtgtgaggaatccgacctgctggaagccgaaatgaagctgatgcgctgcatggcgaaggtcagggcg

SEQ ID NO: 547162 - DNA, 75 bp, synthetic construct
  source 1..75: mol_type = other DNA
acctgaaaaagccgcagattatcgacgccctgaatgacgccggactgtccggtgccgcacgggacgcggagaaga

SEQ ID NO: 547163 - DNA, 75 bp, synthetic construct
  source 1..75: mol_type = other DNA
gcaaaggaggccggtcatgctgtccgtgagatggagcggtggatggtgccgaacaaactccgggaggcggcgtga

SEQ ID NO: 547164 - DNA, 75 bp, synthetic construct
  source 1..75: mol_type = other DNA
agggaacagtaaattccgcttcgtgggggctgataccttctcgccagatgaactgcgcaccgatttgttcagtga

SEQ ID NO: 547165 - DNA, 75 bp, synthetic construct
  source 1..75: mol_type = other DNA
gagatgcgtgccggaagcggcgtggtggtgtcctggcgttatggcaacgtgtgtgtccagcgtggtgtgcagttg

SEQ ID NO: 547166 - DNA, 75 bp, synthetic construct
  source 1..75: mol_type = other DNA
ccgccacgttcagcgaatgctgaaactggccgaccttgccccagtgatccttgatgcgctggcagaagacctcat

SEQ ID NO: 547167 - DNA, 75 bp, synthetic construct
  source 1..75: mol_type = other DNA
ccgccacgttcagcgaatgctgaaactggccgaccttgccccagtgatcctagatgcgctggcagaagaccgcat

SEQ ID NO: 547168 - DNA, 75 bp, synthetic construct
  source 1..75: mol_type = other DNA
ccgccacgttcagcgaatgctgaaactggcagaccttgccccagtgatcctcgatgcgctggcagaagaccccat

SEQ ID NO: 547169 - DNA, 75 bp, synthetic construct
  source 1..75: mol_type = other DNA
attccacatgcgcgactggtggcagccgacaaaagcaaacttcttcggacacctgaaaaagccgcagattatcga

SEQ ID NO: 547170 - DNA, 75 bp, synthetic construct
  source 1..75: mol_type = other DNA
tgccggagggatggtcacgggacatgacgacgttcctgtcactcagccaggaggtactgttgtccctgctcagct

SEQ ID NO: 547171 - DNA, 75 bp, synthetic construct
  source 1..75: mol_type = other DNA
cgacgacgagggtggctatgtggactgcgtggcgctcgatgccgccctgctggaaaaactccaggctgtcgcaga

SEQ ID NO: 547172 - DNA, 75 bp, synthetic construct
  source 1..75: mol_type = other DNA
catccacggtgttcagacccgtgagtatggtcacacgtcacgcagtccgctggattcgctggaaagcgccatcgg

SEQ ID NO: 547173 - DNA, 75 bp, synthetic construct
  source 1..75: mol_type = other DNA
ggcagtggggcgagcgttttccgtcactggccggaatggaacgctggcagtggcaggatatgccattctggcagg

SEQ ID NO: 547174 - DNA, 75 bp, synthetic construct
  source 1..75: mol_type = other DNA
tccctgctcagtttctgcactgcgtgcagcatccacggcgttcagacccgcgagtgtggtcacacgtcacgcagt

SEQ ID NO: 547175 - DNA, 75 bp, synthetic construct
  source 1..75: mol_type = other DNA
cgtgccggaagcggtgtggtggtgtcctggcgttacggtaatgtgtgtgtccagcgtggtgtgcagttgcgcagt

SEQ ID NO: 547176 - DNA, 75 bp, synthetic construct
  source 1..75: mol_type = other DNA
tgaccgaaagtgaagtggcggtggcggggaacagtaaattccgcttcgtgggggctgatgctttctcacctgacg

SEQ ID NO: 547177 - DNA, 75 bp, synthetic construct
  source 1..75: mol_type = other DNA
cgcatggcgggcggtggcggagacagaaaaacgccgccatcagggtaacacgctggcgaatatccgtatgcgggg

SEQ ID NO: 547178 - DNA, 75 bp, synthetic construct
  source 1..75: mol_type = other DNA
tcagccggaagaggcgcaacagttcagcggtcagcctcagccggaaccgccggagggtgacgattacggggtttc

SEQ ID NO: 547179 - DNA, 75 bp, synthetic construct
  source 1..75: mol_type = other DNA
aaatctctggcactgctggcatggacgctctgcctgaatgtgtttggcagcggagcttacagcaatcccgcaaaa

SEQ ID NO: 547180 - DNA, 75 bp, synthetic construct
  source 1..75: mol_type = other DNA
cgaagtgtgaaccagaaaccacccgcaaagcaagccgtaaatctgcaaaaacgcaggaaaccgtcctgtctgccc

SEQ ID NO: 547181 - DNA, 75 bp, synthetic construct
  source 1..75: mol_type = other DNA
tgcagagttccatatgaaagacaaccgctgggtgcctggctggatgtgtacaccacgtccacagatggatgccac

SEQ ID NO: 547182 - DNA, 75 bp, synthetic construct
  source 1..75: mol_type = other DNA
ggcaaaccccatgaagccgatattgcgcgcaacacggccccggattttaccagcccggaggttaaagctgaccgg

SEQ ID NO: 547183 - DNA, 75 bp, synthetic construct
  source 1..75: mol_type = other DNA
gcagatgcagcggcacgttggtgatgccaaaaaagagcgtctgggctatgacctgacattttcagcgcctaaagg

SEQ ID NO: 547184 - DNA, 75 bp, synthetic construct
  source 1..75: mol_type = other DNA
cgtgttgttcaacatagataccaaatcacttaccacatctaaggacgttttttatgtggggatttcgcgcgcgcg

SEQ ID NO: 547185 - DNA, 75 bp, synthetic construct
  source 1..75: mol_type = other DNA
tggaggattgcgggccattttgtggtgtctttcatcatcggcgtgctgggggcaaaggcgctggcgtcatatctt

SEQ ID NO: 547186 - DNA, 75 bp, synthetic construct
  source 1..75: mol_type = other DNA
gtatcgatattgcgtcagttgtaggctactacgctgatgcaaaagacgattactacagcaaagacagcagcttta

SEQ ID NO: 547187 - DNA, 75 bp, synthetic construct
  source 1..75: mol_type = other DNA
aagaagctggataaagcggccagccgtgaagggttcaaaaccgccgcgcttgagctggaacaactcaaacgctat

SEQ ID NO: 547188 - DNA, 75 bp, synthetic construct
  source 1..75: mol_type = other DNA
caaacgtcgcgtgacggaattgctgtcattggttggtcttggcgataagcatgatagctatccgtcgaatctttc

SEQ ID NO: 547189 - DNA, 75 bp, synthetic construct
  source 1..75: mol_type = other DNA
cccctacactgctgaaatggcgagagaattagcaatatggtatggtaatgagtatattcggttatccagtccgct

SEQ ID NO: 547190 - DNA, 75 bp, synthetic construct
  source 1..75: mol_type = other DNA
gtgaaaacgtcaggacatcatgcaaggtttttgatgtgtcaaccaacatcaacgcaggggacaagaataataacc

SEQ ID NO: 547191 - DNA, 75 bp, synthetic construct
  source 1..75: mol_type = other DNA
gctacgccacgctgaattatcgcggtggttacggcaatgccaacatcggttacagccatagcgatgatattaagc

SEQ ID NO: 547192 - DNA, 75 bp, synthetic construct
  source 1..75: mol_type = other DNA
gaagacaacaacctcagctatagcgtgcaaaccggttacgccgggggaggtgatggtaatagcggaagtacaggc

SEQ ID NO: 547193 - DNA, 75 bp, synthetic construct
  source 1..75: mol_type = other DNA
cctgttccaccacagatacatcgaacaatttttaatgatacaacgatagagggaatgttaaaatattattctgat

SEQ ID NO: 547194 - DNA, 75 bp, synthetic construct
  source 1..75: mol_type = other DNA
gaagtgaatgcgtctatcgacggcgatgatgtggtctaccacaactatttcgacgtcagtatggcggtttctacg

SEQ ID NO: 547195 - DNA, 75 bp, synthetic construct
  source 1..75: mol_type = other DNA
gcttcattattaagccacaaacactcccgttgcgaagtgatttctggtgtcacgttaccgttaattgaacagatg

SEQ ID NO: 547196 - DNA, 75 bp, synthetic construct
  source 1..75: mol_type = other DNA
aaatcaacgatattttcgcccgtatcctgttatgccgcgaaaaagatcacaaactttgccatattatctggcgag

SEQ ID NO: 547197 - DNA, 75 bp, synthetic construct
  source 1..75: mol_type = other DNA
aaattaacgatattttcgcccgcattctgttatgtcgcgaaaaagatcacaaactttgccatattatctggcgag

SEQ ID NO: 547198 - DNA, 75 bp, synthetic construct
  source 1..75: mol_type = other DNA
caaagttcccgagactagcgacgcctccaagctgcggagaaaggtactcaacaactttgcaaaaatgtctcctct

SEQ ID NO: 547199 - DNA, 75 bp, synthetic construct
  source 1..75: mol_type = other DNA
gaggtcagtagtctttggcaccaacaacaaaaaaatccgcctttcgtcctcaaacataatttgtatgagtattaa

SEQ ID NO: 547200 - DNA, 75 bp, synthetic construct
  source 1..75: mol_type = other DNA
gacgttaccgttaattgagcagatgctcccctgtcgggagacaatgtccagtgcggcatttcgagagcatatcgt

SEQ ID NO: 547201 - DNA, 75 bp, synthetic construct
  source 1..75: mol_type = other DNA
actggtatcggtggtgtcagtgaagattctctcattcatccaccagcaggatatcgcatcgctggtatccgggct

SEQ ID NO: 547202 - DNA, 75 bp, synthetic construct
  source 1..75: mol_type = other DNA
tggtgtcctttattgttggtgttcttggggcccgtggtgtggcggggtatatggcggagcgtattgggtttgaca

SEQ ID NO: 547203 - DNA, 75 bp, synthetic construct
  source 1..75: mol_type = other DNA
actggtgtcagtggtgtcggtgaagattctctcgttcatccaccagcaggatattgcatcgctggtgtccggctt

SEQ ID NO: 547204 - DNA, 75 bp, synthetic construct
  source 1..75: mol_type = other DNA
tgcaggaagatagttatctggagtttgctaaatcagttgctatccgcatgttccccgtatcctccacgctgggta

SEQ ID NO: 547205 - DNA, 75 bp, synthetic construct
  source 1..75: mol_type = other DNA
gagatttgtaccgaaatagaccgcctgatcggtaatgattaccaacgggttaaaatcccggtaaccagcagcgcc

SEQ ID NO: 547206 - DNA, 75 bp, synthetic construct
  source 1..75: mol_type = other DNA
caccgggctggctgcggcttgcgaatgtgctcatgccaatctgatggcaaagaatgacctgcagcgcgtgagcgt

SEQ ID NO: 547207 - DNA, 75 bp, synthetic construct
  source 1..75: mol_type = other DNA
aatccacagcagctggcagaagtcaccgaagcgggtgcacagttcgcaattagcccgggtctgaccgagccgctg

SEQ ID NO: 547208 - DNA, 75 bp, synthetic construct
  source 1..75: mol_type = other DNA
ggtcagcgtcgggatatgcaccctgccgaacagattgccggattccgcgcaatggcgcaggaaggcaaaacacct

SEQ ID NO: 547209 - DNA, 75 bp, synthetic construct
  source 1..75: mol_type = other DNA
tattccgcaggagctggcgacggcagcatcaatgactgaaaacggtcatcgtcgggatatgcaccctgccgaaca

SEQ ID NO: 547210 - DNA, 75 bp, synthetic construct
  source 1..75: mol_type = other DNA
aattccgcaggagctggcgacggctgcatcaatgactgaaaacggtcatcgtcgggatatgcaccctgccgaaca

SEQ ID NO: 547211 - DNA, 75 bp, synthetic construct
  source 1..75: mol_type = other DNA
tcagtcaggaggtgctgttatccctgctcagtttctgcaccgcatgcagccttaacggtgtccagacccgcgagt

SEQ ID NO: 547212 - DNA, 75 bp, synthetic construct
  source 1..75: mol_type = other DNA
gcagtgaagatgacgcgactgatgacgctgaccgcacggaacaggtgcaggagaaagcgtcagtggaggaaatca

SEQ ID NO: 547213 - DNA, 75 bp, synthetic construct
  source 1..75: mol_type = other DNA
agggaacagtaaattccgcttcgtgggggctgatgccttctcgccagatgaactgcgcactgacctgttcagcga

SEQ ID NO: 547214 - DNA, 75 bp, synthetic construct
  source 1..75: mol_type = other DNA
ggcagcactgatgcagcaaccggacaaatccctggcactgctggcatggacgctctgcctgaatgtgtttggcag

SEQ ID NO: 547215 - DNA, 75 bp, synthetic construct
  source 1..75: mol_type = other DNA
aagaacgtctgaacgaactgatgacgcgttacgacgcgctggaaaaccagtgtgaggaatctgacctgctggaag

SEQ ID NO: 547216 - DNA, 75 bp, synthetic construct
  source 1..75: mol_type = other DNA
tattccgcaggaactggcgacggcggcatcaatgactgaaaacggtcatcgtcgggatatgcaccctgccgaaca

SEQ ID NO: 547217 - DNA, 75 bp, synthetic construct
  source 1..75: mol_type = other DNA
aattccgcaggagctggcgactgcagcatcaatgactgaaaacggtcatcgtcgggatatgcaccctgccgaaca

SEQ ID NO: 547218 - DNA, 75 bp, synthetic construct
  source 1..75: mol_type = other DNA
tcgcagaggctggtatggcggcaagggtggttggtcatgctgttcgtgagatggagcggtggatggtgccgaaca

SEQ ID NO: 547219 - DNA, 75 bp, synthetic construct
  source 1..75: mol_type = other DNA
ccgacgaaagcaaacttcttcggacacctgaaaaagccgcagattatcacagccctgaatgatgccggactgtcc

SEQ ID NO: 547220 - DNA, 75 bp, synthetic construct
  source 1..75: mol_type = other DNA
tggctgtatgccatcgatgtgctgattgaaacacagggcgaggtctgcctccttccccttcccggtgatgcagca

SEQ ID NO: 547221 - DNA, 75 bp, synthetic construct
  source 1..75: mol_type = other DNA
gaacagatgattgcttgtcgtgaaacaatgtcgagtgcagagttccgcaatcgcattgtcgaactgggggctcct

SEQ ID NO: 547222 - DNA, 75 bp, synthetic construct
  source 1..75: mol_type = other DNA
ttgaaagcaaattaaagatctcttcagccgcaaccaaggttaaagctgttctcgctaagacattggctttattta

SEQ ID NO: 547223 - DNA, 75 bp, synthetic construct
  source 1..75: mol_type = other DNA
cgcgctcaaaaacatgagttcaagcagaaagtagaggcggcagcgcggaaatatgcttacctgaagaacaagcgt

SEQ ID NO: 547224 - DNA, 75 bp, synthetic construct
  source 1..75: mol_type = other DNA
tttttgtacgcgaaaaaaagaacttgtgaaaacgtcaggacatcatgcaaggtttttgatgtgtcaaccaacatc

SEQ ID NO: 547225 - DNA, 75 bp, synthetic construct
  source 1..75: mol_type = other DNA
tagctatggcgataactgcagcattaacagcgatgtcaattgcctgtcagaatcaggttgatgtgtgcagaccag

SEQ ID NO: 547226 - DNA, 75 bp, synthetic construct
  source 1..75: mol_type = other DNA
agggaaaccagctagagctgccacttttcttcttggatgaagagccgaaaaccgcagaagtcattccatttgagc

SEQ ID NO: 547227 - DNA, 75 bp, synthetic construct
  source 1..75: mol_type = other DNA
ccggaagtccgttacatccccaacgggggcgcagtggcaaacctgcaggtggccacgtcagaaacctggcgcgac

SEQ ID NO: 547228 - DNA, 75 bp, synthetic construct
  source 1..75: mol_type = other DNA
tgctgacgaaaatgtcttccgaacgcacgctggcagtccaggcggcactcatgcagcaaccggacaaatctctgg

SEQ ID NO: 547229 - DNA, 75 bp, synthetic construct
  source 1..75: mol_type = other DNA
gctgggctattcaccccgccacgttcagcgaatgctgaaactggcagaccttgcgcctgtcatcctcgatgcgct

SEQ ID NO: 547230 - DNA, 75 bp, synthetic construct
  source 1..75: mol_type = other DNA
cagatagacaggtttggtctgcggcaccgtttccgtattctgaacaacaaaatcataaaccgggttactggctcg

SEQ ID NO: 547231 - DNA, 75 bp, synthetic construct
  source 1..75: mol_type = other DNA
agataagtgcgctaacgtttaccgtcacggatccgttgttttctgggccgacgaatggaaggccaaagaagatga

SEQ ID NO: 547232 - DNA, 75 bp, synthetic construct
  source 1..75: mol_type = other DNA
aatcattaaccgggtgaccgggtctgaattcgtcttttatgggctctggcgcaacattgaagagattaagtctct

SEQ ID NO: 547233 - DNA, 75 bp, synthetic construct
  source 1..75: mol_type = other DNA
cgcagcgaggatgatgcggctgacgacgctgaccgcacggaacaggtgcaggacaaagcggcggtggaggaaatc

SEQ ID NO: 547234 - DNA, 75 bp, synthetic construct
  source 1..75: mol_type = other DNA
ccaaattcactgaagtcggttatgttggtaaggaagtggattctattatccgcgatctgaccgatgccgccgtga

SEQ ID NO: 547235 - DNA, 75 bp, synthetic construct
  source 1..75: mol_type = other DNA
gtttggcagtggagcgtacagcaaaccagcacgaatcagcctggaatgtaagcattattcgctgaccagcgatgc

SEQ ID NO: 547236 - DNA, 75 bp, synthetic construct
  source 1..75: mol_type = other DNA
cgcagcgaggatgatgcggctgacgacgctgaccgcacggaacaggtgccggaaaaagcggcggtggaggaaatc

SEQ ID NO: 547237 - DNA, 75 bp, synthetic construct
  source 1..75: mol_type = other DNA
cgcagcgaggatgatgcggctgacgacgctgaccgcacggaacaggtgctggataaagcggccgtggaggaaatc

SEQ ID NO: 547238 - DNA, 75 bp, synthetic construct
  source 1..75: mol_type = other DNA
cgcagcgaggatgatgcggctgacgacgctgaccgcacggaacaggtgcaggagaaagcggccgtggaggaaatc

SEQ ID NO: 547239 - DNA, 75 bp, synthetic construct
  source 1..75: mol_type = other DNA
gtgtgtccagcgaggtgtgcagttgcgcagtgaggatgacgtggctgacgacgctgaccgcacggaacaggtgca

SEQ ID NO: 547240 - DNA, 75 bp, synthetic construct
  source 1..75: mol_type = other DNA
cagaaatgaagctgatgcgctgcatggcgaaggtcagagcgtggacgccggagatgcgtgccggaggtggagtgg

SEQ ID NO: 547241 - DNA, 75 bp, synthetic construct
  source 1..75: mol_type = other DNA
aaatgaagctgattgactgcatggcgaaggtcagggcgtggacgccggagatgcgtgccggaagtggcgtggtgg

SEQ ID NO: 547242 - DNA, 75 bp, synthetic construct
  source 1..75: mol_type = other DNA
gcaagggaggccggtcacgctgtccgtgagatggagcggtggatggtgccgaacaaactccgggaggtggcgtga

SEQ ID NO: 547243 - DNA, 75 bp, synthetic construct
  source 1..75: mol_type = other DNA
ttcctctcagcacagagcaacaggccgcatggcgggcggtggcggagacggaaaaacgccgccatcagggaaaca

SEQ ID NO: 547244 - DNA, 75 bp, synthetic construct
  source 1..75: mol_type = other DNA
ttcccctcagcgcagagcaacaggccacatggcgggcggtggcggagacggaaaaacgccgccatcagggaaact

SEQ ID NO: 547245 - DNA, 75 bp, synthetic construct
  source 1..75: mol_type = other DNA
cgcagcgaggatgatgcggctgacgacgctgaccgcacggaacaggtgccggagaaagcggcagtggaggaaatc

SEQ ID NO: 547246 - DNA, 75 bp, synthetic construct
  source 1..75: mol_type = other DNA
tggcagtccaggcagcactgatgcagcagccggacaaatccctggcacttctggcatggacactctgtctgaatg

SEQ ID NO: 547247 - DNA, 75 bp, synthetic construct
  source 1..75: mol_type = other DNA
tgtgcagttacgcagtgaggatgatgtggctgacgacgctgaccacacggaacaggtgcaggagaaagcctccgt

SEQ ID NO: 547248 - DNA, 75 bp, synthetic construct
  source 1..75: mol_type = other DNA
agaagcaaaaagcgcgtaagctgaaaatcaaagacgccatgaagctgctgattgaagaagaagcggcgaaactgg

SEQ ID NO: 547249 - DNA, 75 bp, synthetic construct
  source 1..75: mol_type = other DNA
ccgctaacctggctgatgcgcctgatgaacaaccacaccgccccgccggagacggggcggcagcaagggagatac

SEQ ID NO: 547250 - DNA, 75 bp, synthetic construct
  source 1..75: mol_type = other DNA
ggggctgatgctttctcacctgacgaactgcgtactgatttgttcagcgatgacgagggtggctatgtggactgc

SEQ ID NO: 547251 - DNA, 60 bp, synthetic construct
  source 1..60: mol_type = other DNA
atgacgctcgcagaactgggcatggccttctggcatgatttagcggctccggtcattgct

SEQ ID NO: 547252 - DNA, 75 bp, synthetic construct
  source 1..75: mol_type = other DNA
cacattctgtttatcgcttctggcgcgttccagattgcgaaaccgtctgacctgatcccggaactgcaaggtcgt

SEQ ID NO: 547253 - DNA, 75 bp, synthetic construct
  source 1..75: mol_type = other DNA
cgcagcgaggatgatgcggctgacgacgctgaccgcacggaacaggtgcgggacaaagcggcagtggaggaaatc

SEQ ID NO: 547254 - DNA, 75 bp, synthetic construct
  source 1..75: mol_type = other DNA
cgcagcgaggatgatgcggctgacgacgctgaccgcacggaacaggtgcgggaaaaagcggccgtggaggaaatc

SEQ ID NO: 547255 - DNA, 75 bp, synthetic construct
  source 1..75: mol_type = other DNA
aggaagtgagcgtgccgctggcctcactgattaagtcaccgctgaatgtgcgcacggtgccgtattctgcggagt

SEQ ID NO: 547256 - DNA, 75 bp, synthetic construct
  source 1..75: mol_type = other DNA
cccatcagcttgcagaagaaaagcgcgcgccaaaagaggaagatctcgcgttgttacgcaaagaccgtatggcgg

SEQ ID NO: 547257 - DNA, 75 bp, synthetic construct
  source 1..75: mol_type = other DNA
gggtgcccgtctggatgcgcgggccggatgcagcgaaggacgccggagaaccggactgctccgccactgataccg

SEQ ID NO: 547258 - DNA, 75 bp, synthetic construct
  source 1..75: mol_type = other DNA
cgcgaaaacgaaaggccgtggacgtaaggccgcgcagccggagcctcagcagccgtctgaacccgcgtatggctt

SEQ ID NO: 547259 - DNA, 75 bp, synthetic construct
  source 1..75: mol_type = other DNA
ttgccctggttttactttatcccgcagggattgatatgtacctcgttggtttaccgcgcatcgccgccgatctca

SEQ ID NO: 547260 - DNA, 75 bp, synthetic construct
  source 1..75: mol_type = other DNA
gtattattcctggcagccggtatcacccttgcattttcgccttcccatgcggtttctctgtttggcatcacgctg

SEQ ID NO: 547261 - DNA, 75 bp, synthetic construct
  source 1..75: mol_type = other DNA
ggacgacgacagcgaggcggtcgggattatccgctcactgcttgccggtgaggaaaacgccaggctgcgtgcaac

SEQ ID NO: 547262 - DNA, 75 bp, synthetic construct
  source 1..75: mol_type = other DNA
ggcggcggctttttatgaacccattaacggcaccgggcagttagatgaagcggtgcagcgtattacgacgcttcg

SEQ ID NO: 547263 - DNA, 75 bp, synthetic construct
  source 1..75: mol_type = other DNA
ggcggcggctttctatgaacccattaatggcacccgtcagttagatgtggcggtgcagcgtattacaacgcttcg

SEQ ID NO: 547264 - DNA, 75 bp, synthetic construct
  source 1..75: mol_type = other DNA
gacagcgaggcggtcgggattatccgcgcactgcttgccggtgaggaaaacgcaaggctgcgtgcaacccactgg

SEQ ID NO: 547265 - DNA, 75 bp, synthetic construct
  source 1..75: mol_type = other DNA
acagcgaggcggtcgggattatccgctcactgcttgccggtgaggaaaacgccaggctgcgtgcagcccactggt

SEQ ID NO: 547266 - DNA, 75 bp, synthetic construct
  source 1..75: mol_type = other DNA
aagttctgctgaaggataataaaagttttgatatgggccttgcacaaattaactcaaataatttagtgggcctgg

SEQ ID NO: 547267 - DNA, 75 bp, synthetic construct
  source 1..75: mol_type = other DNA
agcgtggcgtggcccggggtatcactcttcataccgcggtgaaggacgacgacagcgaggcggtcgggattatcc

SEQ ID NO: 547268 - DNA, 75 bp, synthetic construct
  source 1..75: mol_type = other DNA
ttgctggaagaaaatgcggcaggaattagatgctctgggcgtgaaagatcattatgtcgtcatccaaccgacagc

SEQ ID NO: 547269 - DNA, 75 bp, synthetic construct
  source 1..75: mol_type = other DNA
tggtcatcggcagcatggtatttggaaaaaaagcttcacacacttagcgccaatacacggtacacatattgttga

SEQ ID NO: 547270 - DNA, 75 bp, synthetic construct
  source 1..75: mol_type = other DNA
ctgatgcaaaaatcgatatgctgctttatcaggacaccatccctattttgtctgaaaacccggaaattaatgcgc

SEQ ID NO: 547271 - DNA, 75 bp, synthetic construct
  source 1..75: mol_type = other DNA
gtcctcgctgtccattctgttacatacccattatgcaatccgcctgtgggaagggcgcttacccggacgagagtc

SEQ ID NO: 547272 - DNA, 75 bp, synthetic construct
  source 1..75: mol_type = other DNA
ggctggtgaatatctgcgtaagggcgcgcaggtctacatcgaggggcaactccgtacccgtagctgggacgacaa

SEQ ID NO: 547273 - DNA, 75 bp, synthetic construct
  source 1..75: mol_type = other DNA
gatcgatggttctcgaatggttcctaaataccgggccttcattaaactattgctgcattttggttgccgtagttc

SEQ ID NO: 547274 - DNA, 75 bp, synthetic construct
  source 1..75: mol_type = other DNA
ctggcagaccttgcgcctgtcatcctcgatgcgctggcagaagaccgcatcaccaccgaacactgtcaggcgctg

SEQ ID NO: 547275 - DNA, 75 bp, synthetic construct
  source 1..75: mol_type = other DNA
tgatccggaagtccgttacatccccaacgggggcgcagtggcaaacctgcaggtggccacatcagaaagctggcg

SEQ ID NO: 547276 - DNA, 75 bp, synthetic construct
  source 1..75: mol_type = other DNA
accacgggcaccatgcagatgctggggagtgcaccacagcagaacgctcaggcgcaaccggagcctcagcagaat

SEQ ID NO: 547277 - DNA, 75 bp, synthetic construct
  source 1..75: mol_type = other DNA
gaactgacggaatggcaccgcgtggtgctgttcggcaagctcgcggaagtggctggcgaatatctgcgcaagggc

SEQ ID NO: 547278 - DNA, 75 bp, synthetic construct
  source 1..75: mol_type = other DNA
aactctggtgaacttaaacttaaagtaaaagacggggaaattattgaatttgtgtatcgtgataattatgacgcg

SEQ ID NO: 547279 - DNA, 75 bp, synthetic construct
  source 1..75: mol_type = other DNA
gaaagacaaccgctgggtgcctggctggatgggttcaccacgtccacagacggatgccactgaacgcgccgataa

SEQ ID NO: 547280 - DNA, 75 bp, synthetic construct
  source 1..75: mol_type = other DNA
ggagaagatgaagaaaggcgatgcggctgaacatgcagagttccacatgaaagacaaccgctgggtgcctggctg

SEQ ID NO: 547281 - DNA, 75 bp, synthetic construct
  source 1..75: mol_type = other DNA
agtctgccgttgctgacgaaaatgtcttccgaacgcacgctggcagtccaggcggcactgatgcagcagccggac

SEQ ID NO: 547282 - DNA, 75 bp, synthetic construct
  source 1..75: mol_type = other DNA
actgccaggggtatggcaggtttatgacaagagcgattatttagaagaacagcgtaaagcttaccaggcatggtg

SEQ ID NO: 547283 - DNA, 75 bp, synthetic construct
  source 1..75: mol_type = other DNA
gtatatgttaaggctgttaagattgatccatctctgaaacaagagcaacgcaactggaataaaactgttcgtgat

SEQ ID NO: 547284 - DNA, 75 bp, synthetic construct
  source 1..75: mol_type = other DNA
aaccgctgggtgcctggctggatgtgtgcaccgcatccacagacggatgccactgaacgcaccggtaacctggct

SEQ ID NO: 547285 - DNA, 75 bp, synthetic construct
  source 1..75: mol_type = other DNA
gagcagacggaatggcagcgcgtggtgctgttcggcaagctcgcggaagtggcaggagaatatctgcgcaagggg

SEQ ID NO: 547286 - DNA, 75 bp, synthetic construct
  source 1..75: mol_type = other DNA
gagcagaccgaatggcaccgcgtggtgctgttcggcaagctcgcggaagtggcaggagaatatctgcgcaagggg

SEQ ID NO: 547287 - DNA, 75 bp, synthetic construct
  source 1..75: mol_type = other DNA
caacagttcagtggtcagcctcagccggagcctcagccgcaaccgccggagggtgacgattacgggttttcagac

SEQ ID NO: 547288 - DNA, 75 bp, synthetic construct
  source 1..75: mol_type = other DNA
taaaccagcacaaatcagcctggaatgtaaacattattcgctgaccagcgatgcgccatcggggaaggaaggtgc

SEQ ID NO: 547289 - DNA, 75 bp, synthetic construct
  source 1..75: mol_type = other DNA
gggcggaaaaccggatgtgcgggttatccgcaatctgattacggaaagtgaagtggcggtggcggggaacagtaa

SEQ ID NO: 547290 - DNA, 75 bp, synthetic construct
  source 1..75: mol_type = other DNA
gagcagacagaatggcaccgcgtggtgctgttcggcaagctcgcggaagtggcaggcgaatatctgcgcaagggg

SEQ ID NO: 547291 - DNA, 75 bp, synthetic construct
  source 1..75: mol_type = other DNA
gagcagacagaatggcatcgcgtggtgctgttcggcaagctcgcggaagtggcaggtgaatatctgcgcaagggg

SEQ ID NO: 547292 - DNA, 75 bp, synthetic construct
  source 1..75: mol_type = other DNA
gagcagacagaatggcaacgcgtggtgctgttcggcaagctcgcggaagtggcaggagaatatctgcgcaagggg

SEQ ID NO: 547293 - DNA, 75 bp, synthetic construct
  source 1..75: mol_type = other DNA
gagcagactgaatggcagcgcgtggtgctgttcggcaagctcgcggaagtggcaggtgaatatctgcgcaagggg

SEQ ID NO: 547294 - DNA, 75 bp, synthetic construct
  source 1..75: mol_type = other DNA
gagcagactgaatggcatcgcgtggtgctgttcggcaagctcgcggaagtggcaggagaatatctgcgcaagggg

SEQ ID NO: 547295 - DNA, 75 bp, synthetic construct
  source 1..75: mol_type = other DNA
gagcagacagaatggcagcgcgtggtgctgttcggcaagctcgcggaagtggcaggggaatatctgcgcaagggg

SEQ ID NO: 547296 - DNA, 75 bp, synthetic construct
  source 1..75: mol_type = other DNA
atgagcgcacgttcacaggcactggttcccctcagcacagagcaacaggccgcatggcgggcggtggcggagacc

SEQ ID NO: 547297 - DNA, 75 bp, synthetic construct
  source 1..75: mol_type = other DNA
tccgctggattcgctggaaacggctatcgggttccacatgcgtgactggtggcagccgacgaaagcgaacttctt

SEQ ID NO: 547298 - DNA, 75 bp, synthetic construct
  source 1..75: mol_type = other DNA
gacgacgaaggtggctatgtggactgcgtggcactcgataccgccctgctggaaaaactccaggccgtcgctgaa

SEQ ID NO: 547299 - DNA, 75 bp, synthetic construct
  source 1..75: mol_type = other DNA
gaccagcgaagccccgagtggaaagagtggccatgcatggctgagtctgatgcaggagaaagtccgtctggaagc

SEQ ID NO: 547300 - DNA, 75 bp, synthetic construct
  source 1..75: mol_type = other DNA
aaaaactccaggctgtcgccgaacaccttcgggaagccgaaggctgggaatggtgcgccggacgtatggagcctg

SEQ ID NO: 547301 - DNA, 75 bp, synthetic construct
  source 1..75: mol_type = other DNA
aaacagttcagcggtcagcctcagcggcaaccgccggagggtgacgattacgggttttcagacgatatcccgttc

SEQ ID NO: 547302 - DNA, 75 bp, synthetic construct
  source 1..75: mol_type = other DNA
acaaccgctgggtgcctggctggatgtgtgcaccacgtctacaggcagagacggaaaccacggaataccgtgaca

SEQ ID NO: 547303 - DNA, 75 bp, synthetic construct
  source 1..75: mol_type = other DNA
ccctgctcagtttctgcaccgcgtgcagtattcacggcgttcagacccgcgagtatggtcacacgtcacgcagtc

SEQ ID NO: 547304 - DNA, 75 bp, synthetic construct
  source 1..75: mol_type = other DNA
tgtcgccgcaggtggtcgccgactggctgcactcaacatgctggcagagcgtggcatccttacggctgactggcc

SEQ ID NO: 547305 - DNA, 75 bp, synthetic construct
  source 1..75: mol_type = other DNA
aggtggccacgtcagcaagatggcgtgacaaacagacgggggagatacgggatcagacagaatggcatcgcgtgg

SEQ ID NO: 547306 - DNA, 75 bp, synthetic construct
  source 1..75: mol_type = other DNA
tcccgccagaatccgcctggaatgtgagcattattcgctgaccagcgatgcgccgtcagggaaggaaggtgccgc

SEQ ID NO: 547307 - DNA, 75 bp, synthetic construct
  source 1..75: mol_type = other DNA
agtcaggaggtgctgttatccctgctcagtttctgcactgcgtgcagcatccacggtgttcagacccgtgagtat

SEQ ID NO: 547308 - DNA, 75 bp, synthetic construct
  source 1..75: mol_type = other DNA
acatgcagagcaccatatgaaagacaaccgctgggtgcctggctggatgtgtgcaccacgcccacagacggatgc

SEQ ID NO: 547309 - DNA, 75 bp, synthetic construct
  source 1..75: mol_type = other DNA
tgacaaacagacgggggagatgcgggagcagacggaatggcatcgcgtggtgctgttcggcaagctcgcggaagt

SEQ ID NO: 547310 - DNA, 75 bp, synthetic construct
  source 1..75: mol_type = other DNA
atggcacaaaaaagaaaagcaaactgcgcaaaactgatggttaatccataccccgctaccgtgttgaaagcctgg

SEQ ID NO: 547311 - DNA, 75 bp, synthetic construct
  source 1..75: mol_type = other DNA
cctgcgccctcctcatttcgtcgttgttattaaccatcgggcgcggcgccacactgccgtttatgaccatctatt

SEQ ID NO: 547312 - DNA, 75 bp, synthetic construct
  source 1..75: mol_type = other DNA
tctcaatcaactacaccatgctcaacattggctggaccatcggtccgccgctcggcacgctgttggtgatgcaga

SEQ ID NO: 547313 - DNA, 75 bp, synthetic construct
  source 1..75: mol_type = other DNA
atcattgtgaccaccgcgcttattccaggtaaaccggcaccgaaactgattacccgcgaaatggttgactccatg

SEQ ID NO: 547314 - DNA, 75 bp, synthetic construct
  source 1..75: mol_type = other DNA
cggaaccacaggcggaggccggtacgaaaaaaggaggcgcaaaaacgaaaggccgtggacgtaaggccacgcagc

SEQ ID NO: 547315 - DNA, 75 bp, synthetic construct
  source 1..75: mol_type = other DNA
gcaagggaggccagtcatgctgtccgtgagatggagcggtggatggtgccgaacaaactccgggaggcggcgtga

SEQ ID NO: 547316 - DNA, 75 bp, synthetic construct
  source 1..75: mol_type = other DNA
actggcagaccttgcgcctgtcatcctcgatgcgctggcagaagaccgcatcaccacagagcactgtcaggcgct

SEQ ID NO: 547317 - DNA, 75 bp, synthetic construct
  source 1..75: mol_type = other DNA
aaccgctgggtgccaggctggatgtgtgcaccacgtcctcaggcagagacagaaaccacggaataccgtgatgac

SEQ ID NO: 547318 - DNA, 75 bp, synthetic construct
  source 1..75: mol_type = other DNA
atccgtgctatcgccaaagaagtgcctgaagcgattgtgggtgccggtacggtgctgaatccacagcagctggca

SEQ ID NO: 547319 - DNA, 75 bp, synthetic construct
  source 1..75: mol_type = other DNA
gcttcatgcatttcacaatatgtgatggtgattgctgatggggattttgccgaaaaggtggtcgcggttgttctt

SEQ ID NO: 547320 - DNA, 75 bp, synthetic construct
  source 1..75: mol_type = other DNA
atgttactggcaattaccgccttcgccagcggttttattgccattcctttagtgaataacgtgacgctggtggtg

SEQ ID NO: 547321 - DNA, 75 bp, synthetic construct
  source 1..75: mol_type = other DNA
aatccacagcaactggcagaagtgaccgaagcgggtgcacagttcgcaatcagcccgggtctgactgagccactg

SEQ ID NO: 547322 - DNA, 75 bp, synthetic construct
  source 1..75: mol_type = other DNA
ttaatgcaaaaacttacggagcgtaacgtcactgtaatggcgatggattccgttcctcgtatttcacgcgctcag

SEQ ID NO: 547323 - DNA, 75 bp, synthetic construct
  source 1..75: mol_type = other DNA
cttcagtgggtgtatgccatcgatgtgctgattgaaacacagggcgaggtctgcctccttccacttcctggcgat

SEQ ID NO: 547324 - DNA, 75 bp, synthetic construct
  source 1..75: mol_type = other DNA
cttcagtggctgtatgccatcgatgtgctgattgaaacacagggcgaggtctgcctccttccccttcctggagat

SEQ ID NO: 547325 - DNA, 75 bp, synthetic construct
  source 1..75: mol_type = other DNA
cttcagtggatgtatgccatcgatgtgctgattgaaacacagggcgaggtctgcctccttccgcttcctggcgat

SEQ ID NO: 547326 - DNA, 75 bp, synthetic construct
  source 1..75: mol_type = other DNA
tgacaaacagaccggggagatgcgggagcagaccgaatggcatcgcgtggtgctgttcggcaagctcgcggaagt

SEQ ID NO: 547327 - DNA, 75 bp, synthetic construct
  source 1..75: mol_type = other DNA
tgacaaacagactggggagatgcgggagcagactgaatggcatcgcgtggtgctgttcggcaagctcgcggaagt

SEQ ID NO: 547328 - DNA, 75 bp, synthetic construct
  source 1..75: mol_type = other DNA
attcttgttaagaccacgggcaccatgcagatgctggggagtgcaccacagcagaacgctcaggcgcaaccgcag

SEQ ID NO: 547329 - DNA, 75 bp, synthetic construct
  source 1..75: mol_type = other DNA
gaacgaactgatggcgcgttacgacgcgctggaaaaccagtgtgaggaatccgacctgctggaagcagaaatgaa

SEQ ID NO: 547330 - DNA, 75 bp, synthetic construct
  source 1..75: mol_type = other DNA
ggagaaagcgcccgtggaggaaatcagtctgccgctactgacgaaaatgtcatcagagcgcacgctggcagtcca

SEQ ID NO: 547331 - DNA, 75 bp, synthetic construct
  source 1..75: mol_type = other DNA
aaaaactccaggccgtcgcagagttccttcgggaagccgaaggctggggatggtgcgccggacgcatggaacctg

SEQ ID NO: 547332 - DNA, 75 bp, synthetic construct
  source 1..75: mol_type = other DNA
cgatgacggggacggttatgtcgaccgcgtggcgctcgatgctgccctgctggaaaaactccaggctgtcgctga

SEQ ID NO: 547333 - DNA, 75 bp, synthetic construct
  source 1..75: mol_type = other DNA
ggacaacactaaattccgcttcgtgggggctgatgctttctcacctgacgaactgcgtactgatttgttcagcga

SEQ ID NO: 547334 - DNA, 75 bp, synthetic construct
  source 1..75: mol_type = other DNA
tgacggaggcggaagacgaacgtctgaacgaactgatggcacgttacgacgcgctggaaaaccagtgtgaggaat

SEQ ID NO: 547335 - DNA, 75 bp, synthetic construct
  source 1..75: mol_type = other DNA
agcaccgcttcctggtggccgaacagctgcgccagctcaacaagctgtcgaacaacattattcttgagccggtcg

SEQ ID NO: 547336 - DNA, 75 bp, synthetic construct
  source 1..75: mol_type = other DNA
aacattattcttgagccggtcgggcgcaacaccgccccggccatcgccctggcggctctccaggccacccgccac

SEQ ID NO: 547337 - DNA, 75 bp, synthetic construct
  source 1..75: mol_type = other DNA
tggcgctgtatcgcaacaatccgcgctgtaaagcggtggtgcatttgcacagtacgtggtcgacggcgctttcct

SEQ ID NO: 547338 - DNA, 75 bp, synthetic construct
  source 1..75: mol_type = other DNA
agatcgcgaaatgactgtgcgtctgaacgaacttggcgcatcgtcgattaatttcgtggtccgcgtctggagcaa

SEQ ID NO: 547339 - DNA, 75 bp, synthetic construct
  source 1..75: mol_type = other DNA
gaaccactgcgtacttatcatccgaaaaagtcacgccaggaagttcgcgagcgcgtgaaggcgatgatgctgaaa

SEQ ID NO: 547340 - DNA, 75 bp, synthetic construct
  source 1..75: mol_type = other DNA
cggagtgcgccaaaacacgtcctgttctggaggggagtttcagacacgccgtttcttgcctgaaagtcgatccgc

SEQ ID NO: 547341 - DNA, 75 bp, synthetic construct
  source 1..75: mol_type = other DNA
ctgatgcagtcgtcgtcggctttgatgcagactggagtgatgtgggctcctggtccgccctttgggaagttagcc

SEQ ID NO: 547342 - DNA, 75 bp, synthetic construct
  source 1..75: mol_type = other DNA
cggttaaaccgggcgctgcgttttcaatgcagatgcatcatcaccgtacagaacactgggttattctctccggga

SEQ ID NO: 547343 - DNA, 75 bp, synthetic construct
  source 1..75: mol_type = other DNA
ctccaagaatgaccgaggccaaagtcattagggtacgcactcgtggtttttataatttagttgagataggtgcag

SEQ ID NO: 547344 - DNA, 75 bp, synthetic construct
  source 1..75: mol_type = other DNA
gtcacgttctgcacatgatgtgcgacctgaccattgcggcggaaaacgccatcttcggtcagactggcccgaaag

SEQ ID NO: 547345 - DNA, 75 bp, synthetic construct
  source 1..75: mol_type = other DNA
accgtataaccgaatcgtctttgctcatggcttttatgccagcgccatccacgagatttcgcactggtgtattgc

SEQ ID NO: 547346 - DNA, 75 bp, synthetic construct
  source 1..75: mol_type = other DNA
cgtcagttgcgacaacctggaaggcgacgtcgaaccggatcgtgtggtattccaacgacgggttcatgcgcaggt

SEQ ID NO: 547347 - DNA, 75 bp, synthetic construct
  source 1..75: mol_type = other DNA
attggtagtgttgatttaggaacgttaacaaatactgctacaactgatggtgttgcagttgctttcaaactggtt

SEQ ID NO: 547348 - DNA, 75 bp, synthetic construct
  source 1..75: mol_type = other DNA
atgagcgatttcgcaaaagtagagcagtctttgcgagaggagatgacgcggattgccagttcattctttcagcgc

SEQ ID NO: 547349 - DNA, 75 bp, synthetic construct
  source 1..75: mol_type = other DNA
catagctacattcgtcttgtgaatgacggtaaagacccatggtatacgttgtttggcgctgcatttgtctgggtg

SEQ ID NO: 547350 - DNA, 75 bp, synthetic construct
  source 1..75: mol_type = other DNA
tgctggccttgacgctattgggctaccttgtggcggaattgctcagggggtatgttgcggatagttcaccctatg

SEQ ID NO: 547351 - DNA, 75 bp, synthetic construct
  source 1..75: mol_type = other DNA
ggtgttgaggtgatccgtgagctgggccgcctgcgcggatcacaacgtcaaccgctgatgccggtagtgtttacc

SEQ ID NO: 547352 - DNA, 75 bp, synthetic construct
  source 1..75: mol_type = other DNA
cgttgaagcgacggagcgaaacagcgtattccagctggcgagcgtgggctttattgagggattaagcggataccg

SEQ ID NO: 547353 - DNA, 75 bp, synthetic construct
  source 1..75: mol_type = other DNA
agtctttgcgagaagagatgacgcggattgccagttcgttctttcagcgcggctatgccaccggttcggctggca

SEQ ID NO: 547354 - DNA, 75 bp, synthetic construct
  source 1..75: mol_type = other DNA
gccgtggaaaaagggaagaagtatgaaatccgcgtggaagttcgtgaggtgacaccaccaccggcaccggatatg

SEQ ID NO: 547355 - DNA, 75 bp, synthetic construct
  source 1..75: mol_type = other DNA
atcacctagttcagttacaatttttacggtgcccacagttggtttacttggtctttgttacgataacaatgacca

SEQ ID NO: 547356 - DNA, 75 bp, synthetic construct
  source 1..75: mol_type = other DNA
gcccccaggcagcgtaagcacattcgtagttcctacggttggaatgcttggactttgcttcaacaatgaagatca

SEQ ID NO: 547357 - DNA, 75 bp, synthetic construct
  source 1..75: mol_type = other DNA
gattggtgcagttgtgtgtggccttggatatgccgccgggttacgcatcaataccacgaaaagtatccctgttgg

SEQ ID NO: 547358 - DNA, 75 bp, synthetic construct
  source 1..75: mol_type = other DNA
gctttataaaatcagcgctaaaaccccggaaaaaggggattacgtcattttctgcccgccagaaaaagatatttt

SEQ ID NO: 547359 - DNA, 75 bp, synthetic construct
  source 1..75: mol_type = other DNA
gaactgagaacggaggtgtttggcatcatgcaggcctttaaccggcatatcccggcggaagagcagttacgtcgc

SEQ ID NO: 547360 - DNA, 75 bp, synthetic construct
  source 1..75: mol_type = other DNA
gttgttgctgctggtactagtggagttgcgacgttttcgccagacgccgccgcaggtgacagcgtccgacagtta

SEQ ID NO: 547361 - DNA, 75 bp, synthetic construct
  source 1..75: mol_type = other DNA
catccggatttcgcaggtatttctgttaaacatttgaccagctatggcgatctgaatccggaagaagttccgttg

SEQ ID NO: 547362 - DNA, 75 bp, synthetic construct
  source 1..75: mol_type = other DNA
cgatctgaccggacgcgagaagcatgaagtcgcgctgaaccgtccgccaaaagtgacgaaaacctatgatctgaa

SEQ ID NO: 547363 - DNA, 75 bp, synthetic construct
  source 1..75: mol_type = other DNA
ttgactagcgggaaactggcgcatagcgtgcggccaggattgttaatgctgctttccacattaggttcatttctc

SEQ ID NO: 547364 - DNA, 75 bp, synthetic construct
  source 1..75: mol_type = other DNA
gctctccacgttgggatcgttcctcgccattggtctgtttggcctgatgccgatgtggattttaggcgtggtttg

SEQ ID NO: 547365 - DNA, 75 bp, synthetic construct
  source 1..75: mol_type = other DNA
ctttgctggcaatctatttactcggattatgggatggctttttcgcgtcacttggcgttacggcgcttctggcgg

SEQ ID NO: 547366 - DNA, 75 bp, synthetic construct
  source 1..75: mol_type = other DNA
cggtaagcaccggatgtttacctataaaaacttgacgggccacaagcatcgtttcaccaacgatgtgcagatctc

SEQ ID NO: 547367 - DNA, 75 bp, synthetic construct
  source 1..75: mol_type = other DNA
attcagggcgttatcaacaagctgtggggcgtggatcagagctacaaatctgtcagcaagttccatgttttccat

SEQ ID NO: 547368 - DNA, 75 bp, synthetic construct
  source 1..75: mol_type = other DNA
atgaataagaaatttaaatataaaaaatcgcttttagcggctattttaagcgcaaccttattaaccggttgtgat

SEQ ID NO: 547369 - DNA, 75 bp, synthetic construct
  source 1..75: mol_type = other DNA
gctgcggcgaagaagagaattctggacgcgttcccagggctggaagagtgtaaggattctgactaccactatgag

SEQ ID NO: 547370 - DNA, 75 bp, synthetic construct
  source 1..75: mol_type = other DNA
aaaatccttaaggcatttcctggattagaggtgtgtaaggatcctgactaccactacgaggtcaactgcctggaa

SEQ ID NO: 547371 - DNA, 75 bp, synthetic construct
  source 1..75: mol_type = other DNA
gctgcaaaggcaaaaatctttgagaagtttcctggattacaggagtgtaaggattcgacatatcactacgaggtc

SEQ ID NO: 547372 - DNA, 75 bp, synthetic construct
  source 1..75: mol_type = other DNA
aaggaacactcgcaccgttgggccatcctacggttgacggtgaatttgtttccgcatttagccctgaaggactaa

SEQ ID NO: 547373 - DNA, 75 bp, synthetic construct
  source 1..75: mol_type = other DNA
aaactgttcaaatcatcaatggcctgaaaccgaagtatgaagcgcaccacgacgtgcgttataccgcaaaagcgg

SEQ ID NO: 547374 - DNA, 75 bp, synthetic construct
  source 1..75: mol_type = other DNA
tacgaccgggcaatgggcgcacgtccgatggcgcgtgtcatccaggacaacctgaaaaaaccgctcgccaacgaa

SEQ ID NO: 547375 - DNA, 75 bp, synthetic construct
  source 1..75: mol_type = other DNA
gcagaaaactatgaccaggcgctgaccatcaacgacgtggctgagcacgtcaaactaaacgccaactatgcgatg

SEQ ID NO: 547376 - DNA, 75 bp, synthetic construct
  source 1..75: mol_type = other DNA
ttaatgctgcatgtgctgtaaacactaactcattcgatcagacggttaatcttggacaggttcgttccgaaagat

SEQ ID NO: 547377 - DNA, 75 bp, synthetic construct
  source 1..75: mol_type = other DNA
aaaattccatttcaggcggtttactacgcaactggacaggccactgctggtattgccaatgccgacgccaccttt

SEQ ID NO: 547378 - DNA, 75 bp, synthetic construct
  source 1..75: mol_type = other DNA
actcactgagcaggtggcccatcatctggagttcgtgagggctgccgccagacagcagtgcgaacttttagtttt

SEQ ID NO: 547379 - DNA, 75 bp, synthetic construct
  source 1..75: mol_type = other DNA
gtgagtaaagaattaattcaggttaataccaaattaaccgctaataccatacgccgggaaacttataacggacgc

SEQ ID NO: 547380 - DNA, 75 bp, synthetic construct
  source 1..75: mol_type = other DNA
tgaggaagcggcgcgtaaactgttccccgatgcagattatgtctatgtcgtggacttcactgataaagaagtgac

SEQ ID NO: 547381 - DNA, 75 bp, synthetic construct
  source 1..75: mol_type = other DNA
cctgatgccgattatgtctatgtcgtggacttcactgataaagaagtgacgatcgccaccaataaaaattacgcg

SEQ ID NO: 547382 - DNA, 75 bp, synthetic construct
  source 1..75: mol_type = other DNA
atgagccggttacccaggcgcgattacaatcttacttcactcaggagtgggtataccgtttccgttacagcgagc

SEQ ID NO: 547383 - DNA, 75 bp, synthetic construct
  source 1..75: mol_type = other DNA
atcacagcgaaactcgaactcgaacccgtcagagcaccatcgttgattgctttctttcacggccactttgccagt

SEQ ID NO: 547384 - DNA, 75 bp, synthetic construct
  source 1..75: mol_type = other DNA
aagatgagcctgtaacgcaggcacgtttgcaaagctacttcacccaggaagggtatctcgtgtcggtcacggcaa

SEQ ID NO: 547385 - DNA, 75 bp, synthetic construct
  source 1..75: mol_type = other DNA
catattgccgccgttgaggcgctggaagatatcctggcagttcaggagtatgactactctacggggtggcaacca

SEQ ID NO: 547386 - DNA, 75 bp, synthetic construct
  source 1..75: mol_type = other DNA
agttaaacaagcgataaaagcacaacgagacgaagtcactgccgattatattgtgattggtgactaccacttcca

SEQ ID NO: 547387 - DNA, 75 bp, synthetic construct
  source 1..75: mol_type = other DNA
acctgaaaatgtaacagtcatttccccgacaggttcttttgaacgttgggatggtgaaaaatggcaaccatctat

SEQ ID NO: 547388 - DNA, 75 bp, synthetic construct
  source 1..75: mol_type = other DNA
cactaaaaacacttcgcactactttaaatccaaaaatgaagcagtccattttgttaatgagcttgctaaagtagg

SEQ ID NO: 547389 - DNA, 75 bp, synthetic construct
  source 1..75: mol_type = other DNA
actcaaataatttcacaagggggttcaaaaaagaaaaaaatgggaaaagctatatagatcttgctaacaacgcgg

SEQ ID NO: 547390 - DNA, 75 bp, synthetic construct
  source 1..75: mol_type = other DNA
caaagaaaatgacaaacggtactatcgctgtaaatgaatttgaatttcttttgcctaaactcctatcatctatat

SEQ ID NO: 547391 - DNA, 75 bp, synthetic construct
  source 1..75: mol_type = other DNA
agagatcgaccagaaatcgctgcaagaagcggtaatggaagagatcatcaagccgattctgcccgctgaatggct

SEQ ID NO: 547392 - DNA, 75 bp, synthetic construct
  source 1..75: mol_type = other DNA
aggtgaagaagggatatgtggggcaagtagactctaatgctaactctcatgatgcctcagcaaagaaagtcattg

SEQ ID NO: 547393 - DNA, 75 bp, synthetic construct
  source 1..75: mol_type = other DNA
gaaaaaattgccagcattgccgaaagccgcgaactgacggtagcagaacttgaagaccggttagccccggatttg

SEQ ID NO: 547394 - DNA, 75 bp, synthetic construct
  source 1..75: mol_type = other DNA
ctgaaacatttatcgttctggactggatcgatacagaacactacaactatcctaaagtagaacatttagttgaaa

SEQ ID NO: 547395 - DNA, 75 bp, synthetic construct
  source 1..75: mol_type = other DNA
tggatcgaggaaaaccgcgcaggaatcgaggcgttaaacagctttgtggaagaggtgggtattttttccgatgat

SEQ ID NO: 547396 - DNA, 75 bp, synthetic construct
  source 1..75: mol_type = other DNA
agccagccatcgcaaagcagtgcctgatgcggatgcaggcgctcttattgccggtgatgaactcatctttcccac

SEQ ID NO: 547397 - DNA, 75 bp, synthetic construct
  source 1..75: mol_type = other DNA
acccgaaggggatcagcctgaaatggttgaaagtgcaattaatgtagaagggaacaaaccagcgcgggctgcttg

SEQ ID NO: 547398 - DNA, 75 bp, synthetic construct
  source 1..75: mol_type = other DNA
tgatgtcacggctgccagggaactttgaagagtggcctaacggtccgtttaccctggggaataaaggcgatatgg

SEQ ID NO: 547399 - DNA, 75 bp, synthetic construct
  source 1..75: mol_type = other DNA
tgcgatagtggtgtggcagatgacggatggggaactctggcaacctatatacctgcagaacagattgccagagtt

SEQ ID NO: 547400 - DNA, 75 bp, synthetic construct
  source 1..75: mol_type = other DNA
cgtggcagtcattgttcaatcagatggatttcactttttctgaaatctatgtatatcttaaggatggctctgttt

SEQ ID NO: 547401 - DNA, 75 bp, synthetic construct
  source 1..75: mol_type = other DNA
cctccgcgcccatggatcacagcagcatggccggtatggatcattcccggatggccggaatgccgggtatgcaaa

SEQ ID NO: 547402 - DNA, 75 bp, synthetic construct
  source 1..75: mol_type = other DNA
gatgaaaacggtaatttcatggtgcgtaaacatacaatagatgttcctcctggtaccaaacgcagttacagagtg

SEQ ID NO: 547403 - DNA, 75 bp, synthetic construct
  source 1..75: mol_type = other DNA
tgcactatgcggatgccattcgttataatgctcgaacgcctctgcaaggttctttgctgccgttaacccgtctgg

SEQ ID NO: 547404 - DNA, 75 bp, synthetic construct
  source 1..75: mol_type = other DNA
gattaaaggattatctttctctacattcaatctcaaaagactttctaaagaaatagacttcatctattccactct

SEQ ID NO: 547405 - DNA, 75 bp, synthetic construct
  source 1..75: mol_type = other DNA
gattaaagaattatctttctctacattcaatctcaaaagactagataaagaaatagaattcatctattccactct

SEQ ID NO: 547406 - DNA, 75 bp, synthetic construct
  source 1..75: mol_type = other DNA
gattaaagaattatctttctctacattcaatctcaaaagactaaatagagaaatagaattcatctattccactct

SEQ ID NO: 547407 - DNA, 75 bp, synthetic construct
  source 1..75: mol_type = other DNA
gcaatgatggtctatcaggttgttatgtgggctggtctgaattcgtggctggcaacgccaccagcgcttctttgc

SEQ ID NO: 547408 - DNA, 75 bp, synthetic construct
  source 1..75: mol_type = other DNA
caggatgcggttcagcctatttatgacaatcttaagaacaaacctcagctttataaactatatcagcagatataa

SEQ ID NO: 547409 - DNA, 75 bp, synthetic construct
  source 1..75: mol_type = other DNA
gaagagaaaaccgggggtgaaataaaagttgcttactttcctgatggtcaacccggtggtgagcgcgaactggtt

SEQ ID NO: 547410 - DNA, 75 bp, synthetic construct
  source 1..75: mol_type = other DNA
accaaacaaaagcgatgatgaatcacaggcgaacgatgctgttaaccgctacaaactgctgaaaaaagatgcgcg

SEQ ID NO: 547411 - DNA, 75 bp, synthetic construct
  source 1..75: mol_type = other DNA
tactgcgtgacgtaaacagctacaccctggccgtggggatgcagcaatacctcaacccgcaaaactacctgtggg

SEQ ID NO: 547412 - DNA, 75 bp, synthetic construct
  source 1..75: mol_type = other DNA
ctgccagcggccccgctcgtcctgaatttatgaacggcgatatttaccgcgataaatatggcggtacggtaacga

SEQ ID NO: 547413 - DNA, 75 bp, synthetic construct
  source 1..75: mol_type = other DNA
ccggtgatgaactcattttccccaccagccgtatgttgcgtggttttgctcgctcaggggctgaagtggtgctta

SEQ ID NO: 547414 - DNA, 75 bp, synthetic construct
  source 1..75: mol_type = other DNA
actcagttgcacgttcaccggatattttaaaacctacggacagcaacggcgcgctgatttcaatcacgtataaat

SEQ ID NO: 547415 - DNA, 75 bp, synthetic construct
  source 1..75: mol_type = other DNA
ggctatggaactcggtaaaggtcgccgggatttccgcgattggcattgtggcgctctccaccacctgcgcctacg

SEQ ID NO: 547416 - DNA, 75 bp, synthetic construct
  source 1..75: mol_type = other DNA
gcactctccaccacctgcgcttatgccttcgcccgtatgcgctttcctggcaaagcgacgctgctgaaagggatg

SEQ ID NO: 547417 - DNA, 75 bp, synthetic construct
  source 1..75: mol_type = other DNA
agcgaaatcgacgattgccattaccgtctgcatatgaacctcgaccttttgcagtttgatgtgcagagttttaaa

SEQ ID NO: 547418 - DNA, 75 bp, synthetic construct
  source 1..75: mol_type = other DNA
tcgccagccgaggtatgggcgcgttaagcgatgccgaaggctgctggcacctggaacaggcggtgatgcgcggcg

SEQ ID NO: 547419 - DNA, 75 bp, synthetic construct
  source 1..75: mol_type = other DNA
attttttatcgggagaacattatagacaagctggtagtatgtccgttgagcactttcgacatctggttgaaattt

SEQ ID NO: 547420 - DNA, 75 bp, synthetic construct
  source 1..75: mol_type = other DNA
accagcagggagaaagcacgcgccaatattcagaagatgaaaaacatgattaacggattcaggggtaaaaaatga

SEQ ID NO: 547421 - DNA, 75 bp, synthetic construct
  source 1..75: mol_type = other DNA
agctgggccgcctgcgcggatcacaacgtcaaccgctgatgccggtagtgtttaccagtatgctggggatgacgc

SEQ ID NO: 547422 - DNA, 75 bp, synthetic construct
  source 1..75: mol_type = other DNA
ctcacgctgtttgccgccacccttgagcgctggagccgtaccacaacatttacgctgaacctgacgttcttcaat

SEQ ID NO: 547423 - DNA, 75 bp, synthetic construct
  source 1..75: mol_type = other DNA
cgatgctcacaaccagctctgccactgccgaagatgccgggaagaacatcgcctcaggcttggcaactgcatcta

SEQ ID NO: 547424 - DNA, 75 bp, synthetic construct
  source 1..75: mol_type = other DNA
cttcccatatccgcaaatggatgtgaacttcaagcgggtgaaagagaataaagagagcgatgcggtaacgcgtta

SEQ ID NO: 547425 - DNA, 75 bp, synthetic construct
  source 1..75: mol_type = other DNA
agcagtgaacagcagcaaaaaaaggtggaaaatggtcttgtcgagctggtgagtcgttactgggttttgacgcaa

SEQ ID NO: 547426 - DNA, 75 bp, synthetic construct
  source 1..75: mol_type = other DNA
cttatttctactcccgaggacttatcatcgtataaacgcctgctaggagacggatcccggtttggaattaacctt

SEQ ID NO: 547427 - DNA, 75 bp, synthetic construct
  source 1..75: mol_type = other DNA
tgttgaaactggtagcgacagatccattcacgctcgaaatactggagaactatcaatacattgatgtatttaaca

SEQ ID NO: 547428 - DNA, 75 bp, synthetic construct
  source 1..75: mol_type = other DNA
gttggatattctcgccgctatcggtagtgatatcgccctgatgcagcttaacggcattgcccagaaactgaaatt

SEQ ID NO: 547429 - DNA, 75 bp, synthetic construct
  source 1..75: mol_type = other DNA
ggcgtatgattccgatatcgatcaggtgaagcagatcctgaccgatattatccagtctgacgatcgcattttaaa

SEQ ID NO: 547430 - DNA, 75 bp, synthetic construct
  source 1..75: mol_type = other DNA
acccatgacagtctgattgaagcttctcagtttattcacaccattgagaaacgtcaggggatgaaggtcgcctgc

SEQ ID NO: 547431 - DNA, 75 bp, synthetic construct
  source 1..75: mol_type = other DNA
gggcctggggacattgaaagaagcgcctgagtttctctacgttgttacagacgtaaatgccaacatggcggtcaa

SEQ ID NO: 547432 - DNA, 75 bp, synthetic construct
  source 1..75: mol_type = other DNA
ttgagctggtggcactgcgtaagacgaacaacaaaggtagctacgaacaagcgctatcccacctcgattgttcaa

SEQ ID NO: 547433 - DNA, 75 bp, synthetic construct
  source 1..75: mol_type = other DNA
tacgacaacaacgtggtggagatggcgaaggacgtgaagccttcagcgcgcggggagctggaaatcactactttg

SEQ ID NO: 547434 - DNA, 75 bp, synthetic construct
  source 1..75: mol_type = other DNA
atatctactttggtcagagcttcggtaaaaagctggaagcggcggcggcgaagacctccggtgccacggtgtttg

SEQ ID NO: 547435 - DNA, 75 bp, synthetic construct
  source 1..75: mol_type = other DNA
aatggctgtctgcagaaggggtggcgatgcaggctgaaaagttaaagaaaactgaatacggtgcctatctcaagc

SEQ ID NO: 547436 - DNA, 75 bp, synthetic construct
  source 1..75: mol_type = other DNA
ctttaatatctgacgaccagtacccttacatgactatggatgtatgcaggttggttgacggcaccggtacggtag

SEQ ID NO: 547437 - DNA, 75 bp, synthetic construct
  source 1..75: mol_type = other DNA
ttcctctatcctggcagcggcagaaacgaatagttacgttggtaccaagccaacaccgtcatcggggatgattga

SEQ ID NO: 547438 - DNA, 75 bp, synthetic construct
  source 1..75: mol_type = other DNA
accattacacttaaggtatggtgcaccaacggagatataaccctggttgctggccaaaacctgacgcctgtcgat

SEQ ID NO: 547439 - DNA, 75 bp, synthetic construct
  source 1..75: mol_type = other DNA
ttccggtgaacctgaagaagaaagtgacctgggaagacgggaaaagcgagcgcgtgctttacactcctgaaatcg

SEQ ID NO: 547440 - DNA, 75 bp, synthetic construct
  source 1..75: mol_type = other DNA
gctgagcatggcctacccggaaagatcgactcgactgttatctatagagttaaccaatatccaacttgtgagaat

SEQ ID NO: 547441 - DNA, 75 bp, synthetic construct
  source 1..75: mol_type = other DNA
tattgagaacgtgactgatgagttgaagtcggcactggaaacaaaatttgggcgcgactcaaatttctttgatcc

SEQ ID NO: 547442 - DNA, 75 bp, synthetic construct
  source 1..75: mol_type = other DNA
cataaaacactatcagtaagttggagtcattacctaagtatgaaacgtttaattatggctacgatggtcacagca

SEQ ID NO: 547443 - DNA, 75 bp, synthetic construct
  source 1..75: mol_type = other DNA
catgaatgcagattaccaaatcaccaggctgtaagtaaccacagagaactttacctgactgtggggggcagttgt

SEQ ID NO: 547444 - DNA, 75 bp, synthetic construct
  source 1..75: mol_type = other DNA
tgtcgctgaacacctgttgttacggcatgaatgcagattaccaaatcaccaggctgtaagtaaccacagagaact

SEQ ID NO: 547445 - DNA, 75 bp, synthetic construct
  source 1..75: mol_type = other DNA
ctccgtctgtaaaatgttgggaggtaattcgtggcgaactagtagattcggaaattgcaggaaacttattagaaa

SEQ ID NO: 547446 - DNA, 75 bp, synthetic construct
  source 1..75: mol_type = other DNA
aaaactttgaaaatgcacaattacggattatatccaacaaaggaaattacagatatactcatcgtaagaaagcaa

SEQ ID NO: 547447 - DNA, 75 bp, synthetic construct
  source 1..75: mol_type = other DNA
gcgaacatcatgtagttgatagcgtacttaaccgtattggtatatattctgcatttggggtaaaaggtcgagaga

SEQ ID NO: 547448 - DNA, 75 bp, synthetic construct
  source 1..75: mol_type = other DNA
accagtccgtacaagttctaccagttctggatcaacaccgctgatgccgacgtttaccgcttcctgaagttcttc

SEQ ID NO: 547449 - DNA, 75 bp, synthetic construct
  source 1..75: mol_type = other DNA
gaaagaaggggctttcagggtttgctacgataccgccgctacccttggataggtttcttctgctcggggagcaaa

SEQ ID NO: 547450 - DNA, 75 bp, synthetic construct
  source 1..75: mol_type = other DNA
cgacggaactgacgggtaaagcccgaagttccctgtatcgggatatggcgaaaggccgcgtatcataccgtacgg

SEQ ID NO: 547451 - DNA, 75 bp, synthetic construct
  source 1..75: mol_type = other DNA
tcgctggtcgatgcgtgtttatacacgcttaatgcagcgatttgatgcctttcatgaaaatgtttatcgcgttac

SEQ ID NO: 547452 - DNA, 75 bp, synthetic construct
  source 1..75: mol_type = other DNA
taatgaggaaggttatcgggagatccgtaaccgtttatcgtcgcaatataacttaagtaatctggagccgaatat

SEQ ID NO: 547453 - DNA, 75 bp, synthetic construct
  source 1..75: mol_type = other DNA
ggcctatgaaatcgttattaactctaatccgtgcatcgcttacctgatggaagagaacaccattaccatgcaggc

SEQ ID NO: 547454 - DNA, 75 bp, synthetic construct
  source 1..75: mol_type = other DNA
ttccgtccgctcggcggtgtcattttcggtcactttggcgaccggctgggacgtaagcgcatgttaatgctgacc

SEQ ID NO: 547455 - DNA, 75 bp, synthetic construct
  source 1..75: mol_type = other DNA
taattatatctgctaatgcatatgcagatatagagaggtattgcgatcttttttggggagttcctaagttccaag

SEQ ID NO: 547456 - DNA, 75 bp, synthetic construct
  source 1..75: mol_type = other DNA
ggcgcttagaagtaaaggctccaacctgtagccacaatcagccttctcttgattttgggcagatgacatatgaac

SEQ ID NO: 547457 - DNA, 75 bp, synthetic construct
  source 1..75: mol_type = other DNA
aattgcaagagcgggggctggtagcccaggtgacggacgaggaagcgttagtagagcgactggcgcaaggcccga

SEQ ID NO: 547458 - DNA, 75 bp, synthetic construct
  source 1..75: mol_type = other DNA
taaccactatctgttcaacgccatggacattgcagagcttcgtaacaacgcgtctccagcagatccgcaagttca

SEQ ID NO: 547459 - DNA, 75 bp, synthetic construct
  source 1..75: mol_type = other DNA
tcaccagaggaaattatcgtcattcgtatccttaaccaaaaccaggacgcctccagacatttacactggagctaa

SEQ ID NO: 547460 - DNA, 75 bp, synthetic construct
  source 1..75: mol_type = other DNA
gttcagggcaacgttatttgcaatggtagcaataataacggcccttttatctattctttttagatcaatgatccc

SEQ ID NO: 547461 - DNA, 75 bp, synthetic construct
  source 1..75: mol_type = other DNA
cgattcgtcagggctggcccgaattctcacagtggcttgatgccgtgattcagcgtgtcgaaatgtacaacgcat

SEQ ID NO: 547462 - DNA, 75 bp, synthetic construct
  source 1..75: mol_type = other DNA
ctgcgcgatttcccgatcagcggtatcggcggcattgaaacctgggaagatgcggcggagtttttattgctcggc

SEQ ID NO: 547463 - DNA, 75 bp, synthetic construct
  source 1..75: mol_type = other DNA
cgcagcggaatttttattactcggtgcggcaacgttacaggtgactactggcatcatgcagtacggttatcgcat

SEQ ID NO: 547464 - DNA, 75 bp, synthetic construct
  source 1..75: mol_type = other DNA
gctggcgaatcacaatattgttccggccgaagatctagaccgtagttatatcgtgtatcccaacatcaatcttga

SEQ ID NO: 547465 - DNA, 75 bp, synthetic construct
  source 1..75: mol_type = other DNA
atggaggtttctaaatccacatggacagagacataccgacctcactgggggattatgcgtggctgtatcgcaggc

SEQ ID NO: 547466 - DNA, 75 bp, synthetic construct
  source 1..75: mol_type = other DNA
gcggctacactgcaggtgaccaccggaattatgcagtacggttatcggattgtggaagatatggcgagcgggtta

SEQ ID NO: 547467 - DNA, 75 bp, synthetic construct
  source 1..75: mol_type = other DNA
ctacgcgatttcccgatcagcggtattggcggcattgaaacctgggaagacgcggcagagtttttattgctcggc

SEQ ID NO: 547468 - DNA, 75 bp, synthetic construct
  source 1..75: mol_type = other DNA
gttcagcgatttatggctcagatgccattggcggtgtgataaatattattacctcccgtgagaatactggcactg

SEQ ID NO: 547469 - DNA, 75 bp, synthetic construct
  source 1..75: mol_type = other DNA
aaaggcgaagtgagtttcggggatattgcccataaaggcgaaaccggtactggctttggttcgctggtgggaaca

SEQ ID NO: 547470 - DNA, 75 bp, synthetic construct
  source 1..75: mol_type = other DNA
ctcggtgctatcggcgaaggtaaagcgccaacctcagttccttctgcggccagttgcgcgttggaagagatcctg

SEQ ID NO: 547471 - DNA, 75 bp, synthetic construct
  source 1..75: mol_type = other DNA
caaagcccggtgctggtagaaaaatattgtcgggcggtaaaacgtggttcgacgctaccgatgctggcaaagatg

SEQ ID NO: 547472 - DNA, 75 bp, synthetic construct
  source 1..75: mol_type = other DNA
aacaccgttaaatccatcaccaatatcgatcttaatcagaaaatcggtatgccgatcgttaacggtaaatcgagt

SEQ ID NO: 547473 - DNA, 75 bp, synthetic construct
  source 1..75: mol_type = other DNA
gaacgtgactcgcagtttttctccgttatcacagcggaactcgaacccgtcagagcaccatcgttgattgctttc

SEQ ID NO: 547474 - DNA, 75 bp, synthetic construct
  source 1..75: mol_type = other DNA
gatgaggtaaccggaaaaatgatcacgcgggataatcccccgatcccgggtaaacaatcactggcgaaaggctca

SEQ ID NO: 547475 - DNA, 75 bp, synthetic construct
  source 1..75: mol_type = other DNA
gcagcacttgaagccggtgtaaaaccgtggtcctgtccgtggcaacgcgtatcgggcatatctggtctgccatcg

SEQ ID NO: 547476 - DNA, 75 bp, synthetic construct
  source 1..75: mol_type = other DNA
cggagctggcaggcaaggatgtatatcagcatcaggacctggcggccctgtgcggcgttaaacctgataactggt

SEQ ID NO: 547477 - DNA, 75 bp, synthetic construct
  source 1..75: mol_type = other DNA
tgctgatttgagcggagcaacgaaaggccagcttgaagcctggctggagcatgcacaatttgatactggtacata

SEQ ID NO: 547478 - DNA, 75 bp, synthetic construct
  source 1..75: mol_type = other DNA
cctgagaggcgataagcgctacattttccaggcggccagcgccgcaagtaaagctcatcggtatctgatggactg

SEQ ID NO: 547479 - DNA, 75 bp, synthetic construct
  source 1..75: mol_type = other DNA
tcattacccctgtatataaaattgaccctctgaaacccgtaacggtaaaaaaaccggataagatcactgttgttt

SEQ ID NO: 547480 - DNA, 75 bp, synthetic construct
  source 1..75: mol_type = other DNA
ctaaaaccggaacggatatttatcagatcgttactgacaacatcattgcagcgctcgaagccggtgtaaaaccgt

SEQ ID NO: 547481 - DNA, 75 bp, synthetic construct
  source 1..75: mol_type = other DNA
ggcggttctgtctcttgaagaacatcataaagcctggttgttgtggtgttacagcgggagtatttgttgggaata

SEQ ID NO: 547482 - DNA, 75 bp, synthetic construct
  source 1..75: mol_type = other DNA
cgccgatttgagtggagcaacaaaaggtcagcttgaggcctggcaggagaatgccatgttcgatacagggcgtta

SEQ ID NO: 547483 - DNA, 75 bp, synthetic construct
  source 1..75: mol_type = other DNA
gcaacaggaaaattgcagagaaaacacgggaacgcctgaaaaaattaatctggctggcggcgcaggcagtaaaag

SEQ ID NO: 547484 - DNA, 75 bp, synthetic construct
  source 1..75: mol_type = other DNA
ttattatttgtaatgagaacacgttcaaaacaaaaggcggcattttcaaagcaaagtgttgcaaaagtagattga

SEQ ID NO: 547485 - DNA, 75 bp, synthetic construct
  source 1..75: mol_type = other DNA
ctcgattcccagtcgctacatcatatttcgcgatcacgttcacaacaaaaggcagcaaattatcagcaaggtatt

SEQ ID NO: 547486 - DNA, 75 bp, synthetic construct
  source 1..75: mol_type = other DNA
cgctggataatccgccgatccccggtaaacagtcgcacgcaaaaggttctcatatcccgctggtgcagccgattg

SEQ ID NO: 547487 - DNA, 75 bp, synthetic construct
  source 1..75: mol_type = other DNA
gccggacgtagtgcgcaaggtctttgccgcgtatcccaacgtaatcaacgagattatcaatctctcgttatccaa

SEQ ID NO: 547488 - DNA, 75 bp, synthetic construct
  source 1..75: mol_type = other DNA
atcgctatctcggcaagatgaaccgtgtcgctgacgatattaccgtcgcaccggaatatctggaggagagcaacg

SEQ ID NO: 547489 - DNA, 75 bp, synthetic construct
  source 1..75: mol_type = other DNA
cgtctggttttgtgcgtctgttggatgctgcaggtctgtcaatggcactgaacaagtcggtggtgaataacgatc

SEQ ID NO: 547490 - DNA, 75 bp, synthetic construct
  source 1..75: mol_type = other DNA
cacaaggatttcactggcatcacggtcaaaccgatgaccagctatggcaatctgaatccagatgaagttcctctg

SEQ ID NO: 547491 - DNA, 75 bp, synthetic construct
  source 1..75: mol_type = other DNA
cgagacgctggcggcgcttaatctgccgaaaccgcagcaagggccggaaaccattaataaagttaccgagtattc

SEQ ID NO: 547492 - DNA, 75 bp, synthetic construct
  source 1..75: mol_type = other DNA
ttaaggaagagagcgcgtctggctttgtgcgtctgctggatgccgcaggcctgtcaatggcactgaacaagtcgg

SEQ ID NO: 547493 - DNA, 75 bp, synthetic construct
  source 1..75: mol_type = other DNA
aaaatcaatcagggagatgagaaaggttaaggatatcaggaagttaagatcattatattcaaagttaaaaccatt

SEQ ID NO: 547494 - DNA, 75 bp, synthetic construct
  source 1..75: mol_type = other DNA
cttattttgtattttaaaattagagggttagcaaataccttaaagcagcaaggtgataaaaatcatgctgagtat

SEQ ID NO: 547495 - DNA, 75 bp, synthetic construct
  source 1..75: mol_type = other DNA
ggacataactctttcttcaaaaacaattacttattccgtagctggaccgacgccagttcgattgttgattatctg

SEQ ID NO: 547496 - DNA, 75 bp, synthetic construct
  source 1..75: mol_type = other DNA
tacggcgatttgtgactcccttgggggctgcaactctcaacgttggttctcgttgacagcacgcaatgttaacga

SEQ ID NO: 547497 - DNA, 75 bp, synthetic construct
  source 1..75: mol_type = other DNA
ctttgtacgtctgcttgatgccgcaggtttgtcgatggcgcttaacaagtcggtagtaaataacgatccgcaagg

SEQ ID NO: 547498 - DNA, 75 bp, synthetic construct
  source 1..75: mol_type = other DNA
tggcaatctgaatccagatgaagttcctctgttgatcctcaatggctttgaatacgtcacacaatggggtagcga

SEQ ID NO: 547499 - DNA, 75 bp, synthetic construct
  source 1..75: mol_type = other DNA
atcgtttcaccaacgatgtgcagatctccatcggtgatgcgcactctggttatccggtgatgaacagcagcttct

SEQ ID NO: 547500 - DNA, 75 bp, synthetic construct
  source 1..75: mol_type = other DNA
cgcgccgagcagatctatcgcgatgagcaaggtttaagcctgatgccgcacaccgcgcagccggtactgccagcg

SEQ ID NO: 547501 - DNA, 75 bp, synthetic construct
  source 1..75: mol_type = other DNA
gaaccgcgtgcgccagcgccgagcggatggcatttgggtttatgaacgttatccggttgtggaaggtgcgctgcc

SEQ ID NO: 547502 - DNA, 75 bp, synthetic construct
  source 1..75: mol_type = other DNA
cgccgacactgcaaaagcgatggtgcaggctgcggatttaggcaccaacattcagcgtctgtatcagcatgagct

SEQ ID NO: 547503 - DNA, 75 bp, synthetic construct
  source 1..75: mol_type = other DNA
aaaagagattgataccgcgatttgtgcggaaatcggcggctgtaaccaggcgcgctggttctcgctgacgacgcg

SEQ ID NO: 547504 - DNA, 75 bp, synthetic construct
  source 1..75: mol_type = other DNA
acgatctgaactctcctgccccgctgggcgaactggagtctgcgtcgttcgtctataccacaccgaagaagaacc

SEQ ID NO: 547505 - DNA, 75 bp, synthetic construct
  source 1..75: mol_type = other DNA
ataacgatcctcaagggtatccgaaccgcgttcgtcagcagcgcgcaacgggcatttgggtctatgaacgttatc

SEQ ID NO: 547506 - DNA, 75 bp, synthetic construct
  source 1..75: mol_type = other DNA
catcgtcctggcacaggtgttccggtaaccgggggcatgtatgttccgcgctatacgcaactgaatctcagcgcc

SEQ ID NO: 547507 - DNA, 75 bp, synthetic construct
  source 1..75: mol_type = other DNA
ccagagccaacaccagaaccggagccagaacctgttcctacgaaaaccggttatctgaccctgggcggaagccag

SEQ ID NO: 547508 - DNA, 75 bp, synthetic construct
  source 1..75: mol_type = other DNA
actgtgctgaatccaacggtaacgcagcggacacgctgatgctgtgtgcctcctgggtcgcccagacggatcttt

SEQ ID NO: 547509 - DNA, 75 bp, synthetic construct
  source 1..75: mol_type = other DNA
gtttacctataaagcattgacggggcataaacatcgtttcgccaacgatgtgcagatctccatcggtgatgcgca

SEQ ID NO: 547510 - DNA, 75 bp, synthetic construct
  source 1..75: mol_type = other DNA
ggcttacaacacgctggcgtcactcaagctgccgaaaccggaacaggggccggaaaccattaataaggttaccga

SEQ ID NO: 547511 - DNA, 75 bp, synthetic construct
  source 1..75: mol_type = other DNA
tgtatgttccgcgctatacgcaactgaatctcagcgccgacaccgcgaaagcgatggtgcaggcggcggatttag

SEQ ID NO: 547512 - DNA, 75 bp, synthetic construct
  source 1..75: mol_type = other DNA
gtatagcccggtattattcacaacatcccagcctgcacctcaagggcgactggctggctgaggcgggatttgata

SEQ ID NO: 547513 - DNA, 75 bp, synthetic construct
  source 1..75: mol_type = other DNA
attacttattccgtagctggaccgacgccagttcgattgtcgattatctgatttttgcccgtaaatatattaccg

SEQ ID NO: 547514 - DNA, 75 bp, synthetic construct
  source 1..75: mol_type = other DNA
gatgtttatctggcagagatagaccgggtggcgaaactctatcggctggatacctacccgcaccagattgaagtg

SEQ ID NO: 547515 - DNA, 75 bp, synthetic construct
  source 1..75: mol_type = other DNA
catttgcaggtcaggtttggtgacgggccgtggcaggatgttaaggggctggatgaagtgggcagtgatacaggc

SEQ ID NO: 547516 - DNA, 75 bp, synthetic construct
  source 1..75: mol_type = other DNA
gatcgcaggcataccatcaagttcggcctgtctgcgaagcagcgcccatacccgacgataaccatatgtgggcag

SEQ ID NO: 547517 - DNA, 75 bp, synthetic construct
  source 1..75: mol_type = other DNA
tcacgacgatcatcagcaaaaaccacgcaatgatagtcattgaggatttgaaggtcagcaacatgtcaaagtcag

SEQ ID NO: 547518 - DNA, 75 bp, synthetic construct
  source 1..75: mol_type = other DNA
aaccgtttaatgaagagaaattgcgtagcggaatgctgcgggcgctggaaaaacgtccggtgagttccgatgacg

SEQ ID NO: 547519 - DNA, 75 bp, synthetic construct
  source 1..75: mol_type = other DNA
cacatgactcaggatgacgccgacttattagctgatgataacgtttattatatgatgtgtgtgacaatatgcaaa

SEQ ID NO: 547520 - DNA, 75 bp, synthetic construct
  source 1..75: mol_type = other DNA
atgcgtgatttcaaagatgagagctttatcagtcaattcctgtcaccgaaggtaatgcgtgatttccgcttcttc

SEQ ID NO: 547521 - DNA, 75 bp, synthetic construct
  source 1..75: mol_type = other DNA
tgtggtcttccagccgccttacaacagtccgtggtacagcggcattaacccgtatgccctcggtttcgcgatgtt

SEQ ID NO: 547522 - DNA, 75 bp, synthetic construct
  source 1..75: mol_type = other DNA
acgtcactggcaggccgggccgggtaaaaaaagtgggcgtggtcggcatcggcggtctgggacatatggggatta

SEQ ID NO: 547523 - DNA, 75 bp, synthetic construct
  source 1..75: mol_type = other DNA
actgcatcctgacgatcggattgcgaaatatattccggggtttgccgatagtccaaatgacaccatcaaaggcaa

SEQ ID NO: 547524 - DNA, 75 bp, synthetic construct
  source 1..75: mol_type = other DNA
ggaaattagcaaaggaatggaattttggtgatactaaattaaccgctgatcaggcttatgatgttgttgctgagg

SEQ ID NO: 547525 - DNA, 75 bp, synthetic construct
  source 1..75: mol_type = other DNA
atgatccacagtagcgtaaagcgttggggaaattcaccggcggtgcggatcccggctacgttaatgcaggcgctc

SEQ ID NO: 547526 - DNA, 75 bp, synthetic construct
  source 1..75: mol_type = other DNA
cgcaatgcgtttccttaacacccgttttcctggtcatgacagtttgttgtgtgatgacgttaaagtgattaacta

SEQ ID NO: 547527 - DNA, 75 bp, synthetic construct
  source 1..75: mol_type = other DNA
acttgcctacagctttgacaggaaacatggataaacactatatccctgttttagaggatttaagaaaagcgatat

SEQ ID NO: 547528 - DNA, 75 bp, synthetic construct
  source 1..75: mol_type = other DNA
taatgatagtcaggaagtaagcggcgatcttcatcgggcattaccaaaagcaattaaattatttaaatatttttt

SEQ ID NO: 547529 - DNA, 75 bp, synthetic construct
  source 1..75: mol_type = other DNA
cggtaattgctgaggcggttgaacgtgaacaaccggaacacctgcgaagctggtttcgtgagcgccttattaccc

SEQ ID NO: 547530 - DNA, 75 bp, synthetic construct
  source 1..75: mol_type = other DNA
ccgggcggggtgtcacggtgaagatttcggaggggtgcctgaccatcatcgctgacagtgacgaagtgcaggaac

SEQ ID NO: 547531 - DNA, 75 bp, synthetic construct
  source 1..75: mol_type = other DNA
tgaacgagaaagttaagatccgcgcggtaataaaccagtgtccgtcattgccttcccaggtatcacgtattctgg

SEQ ID NO: 547532 - DNA, 75 bp, synthetic construct
  source 1..75: mol_type = other DNA
acgaaggcggtcacggcttgcccgtgagcattttcgtcagcagacaagcccgtcagggcgcgtcagcgggtttta

SEQ ID NO: 547533 - DNA, 75 bp, synthetic construct
  source 1..75: mol_type = other DNA
aaccgcctgacacaaagtaaattcgtgtgtcgggcttgtggatatacagcgaacgccgatgtaaacggcgctcgc

SEQ ID NO: 547534 - DNA, 75 bp, synthetic construct
  source 1..75: mol_type = other DNA
ttttcaggtcgaattagctgttaccgatccgattcacgcatcgaccagcgcaataggcctggatgcaggtataac

SEQ ID NO: 547535 - DNA, 75 bp, synthetic construct
  source 1..75: mol_type = other DNA
tttctgaaaaagcaatatcactcagcaacattcgtaaccaaaataccgatgaatgcagtggaagtatttgtcttc

SEQ ID NO: 547536 - DNA, 75 bp, synthetic construct
  source 1..75: mol_type = other DNA
gaatgcagtggaagtatttgcctgccaaacgtagctctttacgcagcaggctaccggaaatcaaaacaactgaca

SEQ ID NO: 547537 - DNA, 75 bp, synthetic construct
  source 1..75: mol_type = other DNA
gtcgcggtattgtcgatgaaaccgaggctggaagattaggtctggcatcagctaatctccagccgggctttacct

SEQ ID NO: 547538 - DNA, 75 bp, synthetic construct
  source 1..75: mol_type = other DNA
catcaatggcggcctgccggggcccgtccttcgctggaaagaaggtgaaactattaccctgaaggtcaaaaaccg

SEQ ID NO: 547539 - DNA, 75 bp, synthetic construct
  source 1..75: mol_type = other DNA
aaaatcggcgtcgccaaaggtaagaaacagcacgataaacgttcagatatcaaagaacgcgaatggcaggtggat

SEQ ID NO: 547540 - DNA, 75 bp, synthetic construct
  source 1..75: mol_type = other DNA
ggtggcaccggtcgcccctgaaccgatacaggaaagtcagcctgaagatcagccgcaaaccgcacaaacacaacc

SEQ ID NO: 547541 - DNA, 75 bp, synthetic construct
  source 1..75: mol_type = other DNA
gggggcaacggcaaatccgccgcgaaaacggcgagccgagctataacctgtttggcgtcaaagcctctggcaact

SEQ ID NO: 547542 - DNA, 75 bp, synthetic construct
  source 1..75: mol_type = other DNA
attctgcgctggtcaccatgcacagcctggcctgtgagctgttgccggagtggagtgagttttttgatgaattgc

SEQ ID NO: 547543 - DNA, 75 bp, synthetic construct
  source 1..75: mol_type = other DNA
attatgcgcgtgtggttgctgaggtgatgcgccgtgatggtatccagcttaatgatgcggatatgcgcgacatac

SEQ ID NO: 547544 - DNA, 75 bp, synthetic construct
  source 1..75: mol_type = other DNA
gtcatatcgtcgccgcgtggagatgtaccgggagaaggaaaaaataacttaccactggaagaagccggagcggtt

SEQ ID NO: 547545 - DNA, 75 bp, synthetic construct
  source 1..75: mol_type = other DNA
atgatcagcgacagcaaactactggcaagtgcggcctgggatgcacaatcgctcaacgaacttaaggcgaaagcg

SEQ ID NO: 547546 - DNA, 75 bp, synthetic construct
  source 1..75: mol_type = other DNA
cctttgaaggtaaagcgaattcgcaagaaaacgcactgactctggcctgtctgctgcatccgacccccgcgctga

SEQ ID NO: 547547 - DNA, 75 bp, synthetic construct
  source 1..75: mol_type = other DNA
tcgtcagccggatgaagtgctcgatcgcgaagcgggtaatcgtctgttggcgtcagaaaaagatcgccatgaaca

SEQ ID NO: 547548 - DNA, 75 bp, synthetic construct
  source 1..75: mol_type = other DNA
cacgactgaatatgaaaacggcgaagcgaagaaagtaaaagcgaagtttcgggtctacagctcgtatctggaagc

SEQ ID NO: 547549 - DNA, 75 bp, synthetic construct
  source 1..75: mol_type = other DNA
gatgatggttgaacagatgactccggcacaaccattgccagatgaagcacaacccgcggcaccgatgaaattctc

SEQ ID NO: 547550 - DNA, 75 bp, synthetic construct
  source 1..75: mol_type = other DNA
agcatgcgtgaagccttgccaaaggaggggctgctcagtagcgaacacactcgcctttacaccagcatgtatgat

SEQ ID NO: 547551 - DNA, 75 bp, synthetic construct
  source 1..75: mol_type = other DNA
accgtcgccgttctcaacaacggagggagagcgcgaaaaatacttaccagtggaagaagccggagcggctgcggc

SEQ ID NO: 547552 - DNA, 75 bp, synthetic construct
  source 1..75: mol_type = other DNA
ggatccgcgttcttgaaatgctggcctacaatcgccgcgttgaactgcatcgggagaaagaaaaaataacgtacc

SEQ ID NO: 547553 - DNA, 75 bp, synthetic construct
  source 1..75: mol_type = other DNA
gtcatatcgtcgccgcgtggagatgtaccgggagagcgagaaaaagacttaccagtggaaaaaaccggagcggct

SEQ ID NO: 547554 - DNA, 75 bp, synthetic construct
  source 1..75: mol_type = other DNA
taatccgcagtattaccggaatcagccagcaggctggcgaacaggaggccacgcagccggacagcgttatcgctg

SEQ ID NO: 547555 - DNA, 75 bp, synthetic construct
  source 1..75: mol_type = other DNA
cagccggacagcgtgaccgcagaaaattatgttcgtgtggttgctgaggtgatgcaccgtgatggtatccagctt

SEQ ID NO: 547556 - DNA, 75 bp, synthetic construct
  source 1..75: mol_type = other DNA
ccagcaggctgacgaacaggccacgcagccggacagcgtgaccgcagaaaattatgttcgtgtggttgctgaggt

SEQ ID NO: 547557 - DNA, 75 bp, synthetic construct
  source 1..75: mol_type = other DNA
attatgtgcgtgttgttgctgaggtgatgcgccgtgatggtattgagcttaacggcgtggatatgcgcaacatac

SEQ ID NO: 547558 - DNA, 75 bp, synthetic construct
  source 1..75: mol_type = other DNA
agttggttattaacaccaccgccggaaattatgcgcgtgttgttgctgaggtgatgcgccgtgatggtatcgaac

SEQ ID NO: 547559 - DNA, 75 bp, synthetic construct
  source 1..75: mol_type = other DNA
ctacaatcgccgcgttgaactgtatcgggagaaggagaaaatcccgtatcactggaagaagccggagcggttacg

SEQ ID NO: 547560 - DNA, 75 bp, synthetic construct
  source 1..75: mol_type = other DNA
ataccgtcgccgcgtgcagatgtaccaggagaaagaaaaaattacgtaccggtggaagaagccggagcggttacg

SEQ ID NO: 547561 - DNA, 75 bp, synthetic construct
  source 1..75: mol_type = other DNA
taatccgccgtgcttgtggaatcagcaagcagcatgacgaacaggccacgcagccggactgcgtgatcgccgaaa

SEQ ID NO: 547562 - DNA, 75 bp, synthetic construct
  source 1..75: mol_type = other DNA
atgacagaatctgaattgctgggattaatccgccgcgttaccggaatcaaacaaccatcaagcaaacaggaggcc

SEQ ID NO: 547563 - DNA, 75 bp, synthetic construct
  source 1..75: mol_type = other DNA
ccagcaggctggcgaacaggaggccacgcagccggacagcgtgatagccgaaaattacgcgcgtgttgttgctga

SEQ ID NO: 547564 - DNA, 75 bp, synthetic construct
  source 1..75: mol_type = other DNA
gtgacagcgaaggtaacggcgaatgggtggtgaccatccgctgcgcgaagctgcgggaaaatcaggtgcgtctgt

SEQ ID NO: 547565 - DNA, 75 bp, synthetic construct
  source 1..75: mol_type = other DNA
aagagaataaaaattgcaatatgtggtggacccatacatgtccttgcaatagtttcagtatggtattagcattga

SEQ ID NO: 547566 - DNA, 75 bp, synthetic construct
  source 1..75: mol_type = other DNA
aacttcgacaaaacgctgcaggaagccgccatcaaacacctctggacctatccctacacgccaaaaatgaacgct

SEQ ID NO: 547567 - DNA, 75 bp, synthetic construct
  source 1..75: mol_type = other DNA
taaaatgcgaatgatacctgtgcgtctgggctcgcgggggaaggcactgcttgtcaaaaagcggtctgccaaacc

SEQ ID NO: 547568 - DNA, 75 bp, synthetic construct
  source 1..75: mol_type = other DNA
atggccgtttctggcctgcatggcatgatttgcgcttttggacaggagattcagtgtgctgattggctatgtaag

SEQ ID NO: 547569 - DNA, 75 bp, synthetic construct
  source 1..75: mol_type = other DNA
ttacaggaaagcttaacatttgattctgtatacataataaatcaccttacagttacaacaggtcaaaaaccgctg

SEQ ID NO: 547570 - DNA, 75 bp, synthetic construct
  source 1..75: mol_type = other DNA
cttgcatcgctattcacagggaagcaacagttaaaaaccatgaaacaggcaacaagaaaaccgacgacacccgga

SEQ ID NO: 547571 - DNA, 75 bp, synthetic construct
  source 1..75: mol_type = other DNA
atgaacataatttgccgggaatgccgtaacagcgaatcaatgcaacgtgtactggcgttctatcggggtaatttt

SEQ ID NO: 547572 - DNA, 75 bp, synthetic construct
  source 1..75: mol_type = other DNA
cccaacgctggcaaaccgtcgcgctggggatgccacggctctgttcagcacagcgtctggcgggcgcgatggttg

SEQ ID NO: 547573 - DNA, 75 bp, synthetic construct
  source 1..75: mol_type = other DNA
ccggtcgcgtgctggagtcggttcatccgcgctttttagtggatctggcgcagggcgatgatgcccgccttccac

SEQ ID NO: 547574 - DNA, 75 bp, synthetic construct
  source 1..75: mol_type = other DNA
atgacgcccgtggaatatattttaaaagagaataaaaattgcaatatgtggtggatccatacacctccttgcaat

SEQ ID NO: 547575 - DNA, 75 bp, synthetic construct
  source 1..75: mol_type = other DNA
ggtggtatcgctgtcatagctatcctgcttttagtctggttgtttgggggctccgatagtgacactgcgcctgcg

SEQ ID NO: 547576 - DNA, 75 bp, synthetic construct
  source 1..75: mol_type = other DNA
cggagaaatacgccgctacgacagacaacagaacataatctgtggtgaaccgccccggttttcctggagagtgtt

SEQ ID NO: 547577 - DNA, 75 bp, synthetic construct
  source 1..75: mol_type = other DNA
ccgcctttgaattacaaggcccggcgcaaaacgcgctgccaccgtgctctggacaagcctttccggcagataaca

SEQ ID NO: 547578 - DNA, 75 bp, synthetic construct
  source 1..75: mol_type = other DNA
ggacagcatgaacgcagcacagcttgaacacctcgcctatctcgaaagcaccaatatcacgttaattgatatggg

SEQ ID NO: 547579 - DNA, 75 bp, synthetic construct
  source 1..75: mol_type = other DNA
tacatcatcacagtgaacatggcgaaagaactggcgatggtagaacgcaccgaacaggggcgcgccgttcgtcag

SEQ ID NO: 547580 - DNA, 75 bp, synthetic construct
  source 1..75: mol_type = other DNA
tacgccgggaactgaaagcccgtatcaccgtagccagccactttaagcctatgtgcgccgcgctggagacgtacc

SEQ ID NO: 547581 - DNA, 75 bp, synthetic construct
  source 1..75: mol_type = other DNA
tggttgcccgtgctgccgcacttaccgccacgccgcaggtcgacaaagtggtgttgtcacggttgattgatatca

SEQ ID NO: 547582 - DNA, 75 bp, synthetic construct
  source 1..75: mol_type = other DNA
agaaaaagcaatttaatgctaattttgagaagcgtctgacagaacgtccagcggcaaaaggtaaaatgcctgcaa

SEQ ID NO: 547583 - DNA, 75 bp, synthetic construct
  source 1..75: mol_type = other DNA
agaaaaagcaatttaatgccaattttgagaagcgtctgacagaacgccctgtggcaaagggtaaaatgcctgcaa

SEQ ID NO: 547584 - DNA, 75 bp, synthetic construct
  source 1..75: mol_type = other DNA
ctgacgtatgaagcgccggccggtctttttgaattactgatgcgcacggctgacctcagtcatcctgacaacatc

SEQ ID NO: 547585 - DNA, 75 bp, synthetic construct
  source 1..75: mol_type = other DNA
ccaaaggtggcgaaggaaaatcaacccagtctgctaaccttgccggttttctggcagatgccggcctccgtaccc

SEQ ID NO: 547586 - DNA, 75 bp, synthetic construct
  source 1..75: mol_type = other DNA
tggcctggatgttctgaatggtaaacaaggttcgttgaataacaatggctatattgtgaacgctggtgattcgtt

SEQ ID NO: 547587 - DNA, 75 bp, synthetic construct
  source 1..75: mol_type = other DNA
ctgcggcggcagataccatgcacagccttgcctgcgagttgtttccagagtggaaagcgttctttgatgacgtcc

SEQ ID NO: 547588 - DNA, 75 bp, synthetic construct
  source 1..75: mol_type = other DNA
actacctttcccgtcgcatttataatgctgaacagcgtgagtctatcattaatgttatcaatgaacggcagaagt

SEQ ID NO: 547589 - DNA, 75 bp, synthetic construct
  source 1..75: mol_type = other DNA
tgtttctgttcttcctgaaagtattcccgctggtttcagtgttcttgcggggcttgaggatgatgaatccctttt

SEQ ID NO: 547590 - DNA, 75 bp, synthetic construct
  source 1..75: mol_type = other DNA
aagttatctggaagtgctgggtaatgactccaacttattgatagtgttttatgttcagataatgcccgatgactt

SEQ ID NO: 547591 - DNA, 75 bp, synthetic construct
  source 1..75: mol_type = other DNA
gattacaagagcatccccctgaagacagtaaagcaactggacgtctgatgagccgcatggaatgtaattcagtgc

SEQ ID NO: 547592 - DNA, 75 bp, synthetic construct
  source 1..75: mol_type = other DNA
ccgccgggaatagccctgattatttacggtctggttgccgacgtctctatcggaaaaatgtttatcgccggactg

SEQ ID NO: 547593 - DNA, 75 bp, synthetic construct
  source 1..75: mol_type = other DNA
acgcaaagcccatcattgctggcaattccgttttttatcttgctaggcacactaatgagctacaccggcattgcc

SEQ ID NO: 547594 - DNA, 75 bp, synthetic construct
  source 1..75: mol_type = other DNA
ttgcaacccgacaaactttactcgacctgaattatgcccgtcaggttaacgaaatttctttgtataccgccttag

SEQ ID NO: 547595 - DNA, 75 bp, synthetic construct
  source 1..75: mol_type = other DNA
tatttcaatcagcaactggcgtatgcgcaattgcaaatagccgaagaaacgctgcgtaattatcagcagtcatat

SEQ ID NO: 547596 - DNA, 75 bp, synthetic construct
  source 1..75: mol_type = other DNA
tgctggcgataaaaccgacgaatggctgcaaccggcctgtaatgagatgtaccgcgtgctgaaaaaagacgcgct

SEQ ID NO: 547597 - DNA, 75 bp, synthetic construct
  source 1..75: mol_type = other DNA
ttaaaccgctgccggatgtgctgcccttcccgtataccggtaataccctgcatccgacgcagaaaccagtggagg

SEQ ID NO: 547598 - DNA, 75 bp, synthetic construct
  source 1..75: mol_type = other DNA
cagtttggctgtagcgacgacgcgtttattcatcgtgcagaaatgtacctcaaagaactgcggctgccagaaatt

SEQ ID NO: 547599 - DNA, 75 bp, synthetic construct
  source 1..75: mol_type = other DNA
catcgtgatgggcataagagcgaaaaaaaaaaaaaaacccgccgttcgctggtggaagccgcatttagccaatta

SEQ ID NO: 547600 - DNA, 75 bp, synthetic construct
  source 1..75: mol_type = other DNA
tatttcttgttttgatttttgcggttacattgttatcgtccctgcgagctcccggtgattgggatgatactatgt

SEQ ID NO: 547601 - DNA, 75 bp, synthetic construct
  source 1..75: mol_type = other DNA
ccatcacccgacggaaaagcccgttaccagcctgcaaccactgattgagagcttcacacatccgaacgcgattgt

SEQ ID NO: 547602 - DNA, 75 bp, synthetic construct
  source 1..75: mol_type = other DNA
tactgatgtttaccgtctaccttgtcgcccgcaaaactaacgctaaaccctcgcgtgaaagctggcctacgggca

SEQ ID NO: 547603 - DNA, 75 bp, synthetic construct
  source 1..75: mol_type = other DNA
ctcaaaaggcaaagcactggcactggaaaaacagctttatgaagagttgttcgacctgctgttgccgcatctgga

SEQ ID NO: 547604 - DNA, 75 bp, synthetic construct
  source 1..75: mol_type = other DNA
aggcaaagcactggcactggaaaaacaactttatgaagagctgttcgacctgctgttgccgcatctggaagcgtt

SEQ ID NO: 547605 - DNA, 75 bp, synthetic construct
  source 1..75: mol_type = other DNA
aacccgctgaatctgtcaccgcagcgccggatgttgattattaccggtccgaacatgggcggtaaaagtacctat

SEQ ID NO: 547606 - DNA, 75 bp, synthetic construct
  source 1..75: mol_type = other DNA
ctaaacctgtcgccacagcgccgcatgttgatcatcaccggtccgaacatggggggtaaaagtacctatatgcgc

SEQ ID NO: 547607 - DNA, 75 bp, synthetic construct
  source 1..75: mol_type = other DNA
cggttgctgctctggcgggcgtgccaaaagaggttattaagcgcgcacggcaaaaactgcgtgagctggaaagca

SEQ ID NO: 547608 - DNA, 75 bp, synthetic construct
  source 1..75: mol_type = other DNA
gagatcctgctgttctaccggatgggtgacttttacgaactgttttatgacgacgcaaaacgtgcgtcacaactg

SEQ ID NO: 547609 - DNA, 75 bp, synthetic construct
  source 1..75: mol_type = other DNA
cgtatatcggcagctacgtaccggcgcaaaaagtcgagattggcccgattgaccgtatctttacccgcgtaggtg

SEQ ID NO: 547610 - DNA, 75 bp, synthetic construct
  source 1..75: mol_type = other DNA
gcaacagagcgcgagcgcgctggcagaacttgatgtgctggttaacctggcggagcgggcctataccctgaacta

SEQ ID NO: 547611 - DNA, 75 bp, synthetic construct
  source 1..75: mol_type = other DNA
cccggcattcgcattaccgaaggtcgccatccggtggttgaacaggtgctaaatgagccgtttatcgctaacccg

SEQ ID NO: 547612 - DNA, 75 bp, synthetic construct
  source 1..75: mol_type = other DNA
cgcgaccgattatctggagcgtctggaagtccgcgagcgtgaacgtaccggcctggacacgctgaaagttggctt

SEQ ID NO: 547613 - DNA, 75 bp, synthetic construct
  source 1..75: mol_type = other DNA
gcgcgacacccgtgtgttgcttgagcgtcagcaaactattggcgcattgcaggatttcaccgccgagttacagcc

SEQ ID NO: 547614 - DNA, 75 bp, synthetic construct
  source 1..75: mol_type = other DNA
atgagtgcaatagaaaattttgacgcccatacgccaatgatgcagcagtatctcaagctgaaagcccagcatccg

SEQ ID NO: 547615 - DNA, 75 bp, synthetic construct
  source 1..75: mol_type = other DNA
ccagcaacggcactggttacaccatcgccagccgtcgctttgtttcggcagaccaactgccgctgatcgcgctgg

SEQ ID NO: 547616 - DNA, 75 bp, synthetic construct
  source 1..75: mol_type = other DNA
taccgttccccataccattaacgacagtccagggcaggcggaagagtctgtgtcatttacctatgagagcatcaa

SEQ ID NO: 547617 - DNA, 75 bp, synthetic construct
  source 1..75: mol_type = other DNA
ggacaaccagaagaggccatatcattcacctatgaaagtattactcaggagcactgtgttgcaggaaccagtgca

SEQ ID NO: 547618 - DNA, 75 bp, synthetic construct
  source 1..75: mol_type = other DNA
atgagagacattgatgtaagaaaggctgtgcatgccaagattctgagagatcatcataaagatcctgacacccta

SEQ ID NO: 547619 - DNA, 75 bp, synthetic construct
  source 1..75: mol_type = other DNA
ggcgcaattagtcacaccacaaaatgatcctgatcaggtggctccggtcgctccagaacctatacaggaaggcca

SEQ ID NO: 547620 - DNA, 75 bp, synthetic construct
  source 1..75: mol_type = other DNA
atacaggaaggccagccagaagagcagccgcaaaccacccaaacgcaaccattccagccagatagcggaattgat

SEQ ID NO: 547621 - DNA, 75 bp, synthetic construct
  source 1..75: mol_type = other DNA
ggtggctccggtcgctccagaacctatacaggaaggccagccagaagagcagccgcaaactacccaaacgcaacc

SEQ ID NO: 547622 - DNA, 75 bp, synthetic construct
  source 1..75: mol_type = other DNA
cgcacgctggctgaaatgctgacccaaaacggcgtcccgatgagccgttatcgtgccggacggctgatgaaatac

SEQ ID NO: 547623 - DNA, 75 bp, synthetic construct
  source 1..75: mol_type = other DNA
atgacagaaaccgaactactgcgattaatccgccgcgtcgccggaatcaaccagcaggctgacgaacaggccacg

SEQ ID NO: 547624 - DNA, 75 bp, synthetic construct
  source 1..75: mol_type = other DNA
agactatcacttatttaagtgatactggttgtctggagattcagggggccagtctagaaaccggacatggattcc

SEQ ID NO: 547625 - DNA, 75 bp, synthetic construct
  source 1..75: mol_type = other DNA
ttaatactgaacgtcaaatatatttggataaacagttttttgtcgatgttttttcaatccctgcttgcgttcgaa

SEQ ID NO: 547626 - DNA, 75 bp, synthetic construct
  source 1..75: mol_type = other DNA
cttaaatgttaaagtgttggctcttgacgttcctgcttttggtgtttcaatgacaactaaagcaattgcaaggta

SEQ ID NO: 547627 - DNA, 75 bp, synthetic construct
  source 1..75: mol_type = other DNA
gtgatagttcaccaaatacggttagcttaaatgttaaagtgttggctcttgacgttcctgcttttggtgtttcaa

SEQ ID NO: 547628 - DNA, 75 bp, synthetic construct
  source 1..75: mol_type = other DNA
gccgccgcgtgcatgccggcctgaacaaaggtgaggcgcgcaactcgctggccagggcggtgttcttcaaccgcc

SEQ ID NO: 547629 - DNA, 75 bp, synthetic construct
  source 1..75: mol_type = other DNA
tcagcgccagcttagcgagattgaggttgagaaacacgcgcgcaggctgctcgatgattgggcgaaaaaggtggc

SEQ ID NO: 547630 - DNA, 75 bp, synthetic construct
  source 1..75: mol_type = other DNA
gcgtttgccgaaggggggatccgaacccgtgaacaggtttctgctggtatgcgccacgcccgcgccagtgaatct

SEQ ID NO: 547631 - DNA, 75 bp, synthetic construct
  source 1..75: mol_type = other DNA
taagcaatggatgcttgcgtttctggagaatgggatcacaacaatggaacaggttaacgctggtatgcgccacgc

SEQ ID NO: 547632 - DNA, 75 bp, synthetic construct
  source 1..75: mol_type = other DNA
gggcgaagtttcgggtgcatgcctaacgccgccaccctggggggaataacaccggcgcagtggctgatggaggaa

SEQ ID NO: 547633 - DNA, 75 bp, synthetic construct
  source 1..75: mol_type = other DNA
gagaatgggatcactacaatggaacaggttaacgctggtatgcgccacgcccgcgccagtgaatctccgttctgg

SEQ ID NO: 547634 - DNA, 75 bp, synthetic construct
  source 1..75: mol_type = other DNA
tggatgaatggtcggcaaaagtggcatccggtcaccagattccagatccgatactcagcatacaagccaagccag

SEQ ID NO: 547635 - DNA, 75 bp, synthetic construct
  source 1..75: mol_type = other DNA
atggaaactatcgctaaacatcgccatgctcgttcttctgctcagaaggttcgccttgttgctgacctgattcgc

SEQ ID NO: 547636 - DNA, 75 bp, synthetic construct
  source 1..75: mol_type = other DNA
aaagatataagcatttgttagttcagcatcattacgtaactggcattatagcaggggttcgttatctttaccgaa

SEQ ID NO: 547637 - DNA, 75 bp, synthetic construct
  source 1..75: mol_type = other DNA
aatgaaagcctccgatcgacgtaacgcgttttactggcgatttgtcgaaatgggcacagtgaatatgcccccaca

SEQ ID NO: 547638 - DNA, 75 bp, synthetic construct
  source 1..75: mol_type = other DNA
tgtactggattaccttgatgcactggataaagttgatattagtacggcacctgatattgactggccggtaagtag

SEQ ID NO: 547639 - DNA, 75 bp, synthetic construct
  source 1..75: mol_type = other DNA
gtggcgtttaagaagaacgggacgtttgtcaggtgtatgaatcatcctgttagtcgtgtgtataaagtcatctat

SEQ ID NO: 547640 - DNA, 75 bp, synthetic construct
  source 1..75: mol_type = other DNA
atattttgacctacaccaacaagaaagcggctgtactggtcaagaaagttctggaatctgccattgctaacgctg

SEQ ID NO: 547641 - DNA, 75 bp, synthetic construct
  source 1..75: mol_type = other DNA
aagcgtcgggcattcatcaacctccatcagtgccggaattggtattgcggttgctgccgagaaagaaggcaaaaa

SEQ ID NO: 547642 - DNA, 75 bp, synthetic construct
  source 1..75: mol_type = other DNA
tccggtaagctttactcttcactgcgcgaaggcgggaaaaaagttttctctggcgtgccgccaattaaagagctg

SEQ ID NO: 547643 - DNA, 75 bp, synthetic construct
  source 1..75: mol_type = other DNA
acgccattatgggcggcgcaggcagcggcgtgaacgaagtattgatggcacatcgtaaaccggtgccagtgctga

SEQ ID NO: 547644 - DNA, 75 bp, synthetic construct
  source 1..75: mol_type = other DNA
gttgcgcttaatccagccgggcaagccaacgcagaacggatttattgagagctttaacggacgatttcgcgatga

SEQ ID NO: 547645 - DNA, 75 bp, synthetic construct
  source 1..75: mol_type = other DNA
acgctattatgggcggtgcaggcagcagcgtgaatgaagtgttgatggcgcatcgaaagcccgtaccagtgctca

SEQ ID NO: 547646 - DNA, 75 bp, synthetic construct
  source 1..75: mol_type = other DNA
tcccggatcgctatttcgacgtggcgatcgccgagcaacatgcagtgacctttgccgccggtctggcgattggcg

SEQ ID NO: 547647 - DNA, 75 bp, synthetic construct
  source 1..75: mol_type = other DNA
atgttacccgcgacccattagctgaggccagacgggtgctggtggtggggcagggcggagaggcagataaccagg

SEQ ID NO: 547648 - DNA, 75 bp, synthetic construct
  source 1..75: mol_type = other DNA
ggagcagataaaaacgccacgttgccctctgggatgcagcaactgaacattgtccccggcgcgcttccagactgg

SEQ ID NO: 547649 - DNA, 75 bp, synthetic construct
  source 1..75: mol_type = other DNA
cctctggtatgcagcaactgaacattgtcccaggtgcgcttcccgactggctggttagcacagaggatctgaaaa

SEQ ID NO: 547650 - DNA, 75 bp, synthetic construct
  source 1..75: mol_type = other DNA
tgggatgtggggcatcaggcttatccgcataaaattttgaccggacgccgcgacaaaatcggcaccatccgtcag

SEQ ID NO: 547651 - DNA, 75 bp, synthetic construct
  source 1..75: mol_type = other DNA
tactctcgtcgcacggctgcaaacacactggattttatcgattgtgttattgaagaaatgcctttcccgatacag

SEQ ID NO: 547652 - DNA, 75 bp, synthetic construct
  source 1..75: mol_type = other DNA
tttgttagcatcgaaaacctgaaaaatactacccgtgacccattagtagaagccagacgggtgctggtggtgggg

SEQ ID NO: 547653 - DNA, 75 bp, synthetic construct
  source 1..75: mol_type = other DNA
cggcgaccgataccctgaccattaagggcacgccgccgaacttgcgcgatcagcttcagcgccggacgtctggcg

SEQ ID NO: 547654 - DNA, 75 bp, synthetic construct
  source 1..75: mol_type = other DNA
tacagatattgcgccgcctgatataccggctggttatgcagccgttttcaatgcagatgaaatgaaatgggagtt

SEQ ID NO: 547655 - DNA, 75 bp, synthetic construct
  source 1..75: mol_type = other DNA
cctcgatgaaggcgatttaaagcctgatgtcgttaaacgctttgaggaaatggtggcgcaggcgcagcagagcgc

SEQ ID NO: 547656 - DNA, 75 bp, synthetic construct
  source 1..75: mol_type = other DNA
aagctggcgcaagctgacatcgctccctgatgtcagggccatgctgtattcatatatttataataattacaacag

SEQ ID NO: 547657 - DNA, 75 bp, synthetic construct
  source 1..75: mol_type = other DNA
gttaatatatttaatggatattattttgtttttattgtttttgcgctgatatctgtctccttaaaatataatata

SEQ ID NO: 547658 - DNA, 75 bp, synthetic construct
  source 1..75: mol_type = other DNA
actcaaccgctaacactcaaagacgtcactgtttatctgcatggtgccagcctacaaggtgaagagacactcaac

SEQ ID NO: 547659 - DNA, 75 bp, synthetic construct
  source 1..75: mol_type = other DNA
aggtggaacaggcaaaactgaccgccgagaaaaacaatatcgcggctcaaattaaggtattagaggcaaatagca

SEQ ID NO: 547660 - DNA, 75 bp, synthetic construct
  source 1..75: mol_type = other DNA
acctgccgcgcgctggatcaatgggcctttgaacatagtgttgagttgcgcttaatccagccgggcaagccaact

SEQ ID NO: 547661 - DNA, 75 bp, synthetic construct
  source 1..75: mol_type = other DNA
gtgctgttttgccactatcgctatctggcggtggagtatctgctggtggcagttctgagcaacctgagcagtatg

SEQ ID NO: 547662 - DNA, 75 bp, synthetic construct
  source 1..75: mol_type = other DNA
gtttatagctactgtaatgagcagctgcaggcaggtgaagagattgaactggaatcgctgtcgaaagagctggca

SEQ ID NO: 547663 - DNA, 75 bp, synthetic construct
  source 1..75: mol_type = other DNA
gcggctatctcaagataaaaaacaactttcaggaaattgttgatgctggcccctcagcactggctcaggcccaat

SEQ ID NO: 547664 - DNA, 75 bp, synthetic construct
  source 1..75: mol_type = other DNA
gaccgagcggtttccccttctgcgcccagatgcgccgaacctgacctggtcgatggatttcgtcatggacgcact

SEQ ID NO: 547665 - DNA, 75 bp, synthetic construct
  source 1..75: mol_type = other DNA
gcgatattacagcgaccgtaacctttgccgggctggactgggaatcaaaggccgatgatacgaattttatcaaag

SEQ ID NO: 547666 - DNA, 75 bp, synthetic construct
  source 1..75: mol_type = other DNA
acggtggcgttgatgctgaaaaagtgattggtatttccggacatctgctggcacctgaggtgtgtattgttgttg

SEQ ID NO: 547667 - DNA, 75 bp, synthetic construct
  source 1..75: mol_type = other DNA
cttcaaaactgaagaagtatggccggaagagctgctggcgaagaaaccggaactgcgtggcaaaacgctgtacga

SEQ ID NO: 547668 - DNA, 75 bp, synthetic construct
  source 1..75: mol_type = other DNA
tgattccagtcgtgacgggcgagtcagagatcgtattaaagccattcttctggcttccgaaggctggagttctgc

SEQ ID NO: 547669 - DNA, 75 bp, synthetic construct
  source 1..75: mol_type = other DNA
gcggtgttcaatactctgggtggggccgcgccgttaattcgttctctctggtcgcgctggtgggcgctggatacg

SEQ ID NO: 547670 - DNA, 75 bp, synthetic construct
  source 1..75: mol_type = other DNA
tcgtctctctaaccagaacgtcaccgtggcggtgctttctacctaccagcatcgtagcttcgagctggcggataa

SEQ ID NO: 547671 - DNA, 75 bp, synthetic construct
  source 1..75: mol_type = other DNA
aatcaggacttcttcagcaaacacgtcaacctgcgcaaaggggcgacggacatcggctacggtttacgtccgacc

SEQ ID NO: 547672 - DNA, 75 bp, synthetic construct
  source 1..75: mol_type = other DNA
ttccgatgcttccgagccgatgagctttgaagattacaaagcctttgttgccgaatatacgctggaaaaaaccgc

SEQ ID NO: 547673 - DNA, 75 bp, synthetic construct
  source 1..75: mol_type = other DNA
aatgtcgtaattgctattggcctgcggtgtgaggccttagtaaatgtatttaactctttaggttatcgagatatt

SEQ ID NO: 547674 - DNA, 75 bp, synthetic construct
  source 1..75: mol_type = other DNA
tacatacattctctgatgatatggcaaatatagtatctctatataatgcaatccaaagcgataaaactactgcta

SEQ ID NO: 547675 - DNA, 75 bp, synthetic construct
  source 1..75: mol_type = other DNA
cctccgcgccagtggaccacagcaacatggccggtatggatcattcccagatggccggaatgccgggaatgcaaa

SEQ ID NO: 547676 - DNA, 75 bp, synthetic construct
  source 1..75: mol_type = other DNA
tggtcagggacgtgttgaaccgtatgaatagtctacaggatacaactcctgtttctgcggccccccactcatcaa

SEQ ID NO: 547677 - DNA, 75 bp, synthetic construct
  source 1..75: mol_type = other DNA
gttaaagatgcgctgacctatggcattcgcgtattgccaccagacgttaacgtgtcatctaaccgaatcgagatc

SEQ ID NO: 547678 - DNA, 75 bp, synthetic construct
  source 1..75: mol_type = other DNA
cccggagaaaatccggacgcctggcggcaagccgctaaccgacattacccttgagaatgtgctggcgggccgcgt

SEQ ID NO: 547679 - DNA, 75 bp, synthetic construct
  source 1..75: mol_type = other DNA
aatgagctttgaagattacaaagccttcgttgccgaatatacgctggaaaaaaccgccgaaatgaccggcgtgcc

SEQ ID NO: 547680 - DNA, 75 bp, synthetic construct
  source 1..75: mol_type = other DNA
cggagaacaggcaacagtttttttcaacgtcgatttcgcgttctgaggaagtcttacctgactcaccgtctgcaa

SEQ ID NO: 547681 - DNA, 75 bp, synthetic construct
  source 1..75: mol_type = other DNA
gtttcattcacaaatagcgctgaatcagttggtgttgctggagcggggggattttacacaccgtgaacagttatt

SEQ ID NO: 547682 - DNA, 75 bp, synthetic construct
  source 1..75: mol_type = other DNA
tatgacaaatcactggaacgactgaatagtagattgaattcaaatgattcacactttaagtcagaacagattgtg

SEQ ID NO: 547683 - DNA, 75 bp, synthetic construct
  source 1..75: mol_type = other DNA
gacatcatgtccgacgacacggtgatctccaccatggtcaacggctaccgtagccacaaatttggcaaaataagt

SEQ ID NO: 547684 - DNA, 75 bp, synthetic construct
  source 1..75: mol_type = other DNA
tggtggcagggcgtgtggtatgaaatccgctggtatctgtttctggcaaaacgtccgtgtgccgatataggccat

SEQ ID NO: 547685 - DNA, 75 bp, synthetic construct
  source 1..75: mol_type = other DNA
cttgtgcagggtggctgacgaacgtgttttttatgctcgaggtaataataaaaatatcgatgagaatatcctcag

SEQ ID NO: 547686 - DNA, 75 bp, synthetic construct
  source 1..75: mol_type = other DNA
gtgaaagcgacacaacatctggcagagagtatcaatgcggccccgaccacgcgtcactattaccatcagtggttt

SEQ ID NO: 547687 - DNA, 75 bp, synthetic construct
  source 1..75: mol_type = other DNA
tgcacgcggtggcacaagaccgtgcgctgaaagacggcaaactgaatgtttactggaccatgtgtaccaacaaca

SEQ ID NO: 547688 - DNA, 75 bp, synthetic construct
  source 1..75: mol_type = other DNA
attcaaaacaatgcgataaatcaggacttcttcagcaaacacgttaacctgcgcaaaggggcgacggacatcggc

SEQ ID NO: 547689 - DNA, 75 bp, synthetic construct
  source 1..75: mol_type = other DNA
aattcagaataaaacagtggcaattttgtccaataataactcagctgtcagtaatgtttatgaaaagatggacaa

SEQ ID NO: 547690 - DNA, 75 bp, synthetic construct
  source 1..75: mol_type = other DNA
ttgacggggatgtgttattcagctggcagtgctatgcgccacggaagcagttcgctgacccggttgaccggccag

SEQ ID NO: 547691 - DNA, 75 bp, synthetic construct
  source 1..75: mol_type = other DNA
cgccttgtatgagtggttttcagcccgttgtcgctggaaggaaaaggcgttaacgcaacgaggcctattggtgca

SEQ ID NO: 547692 - DNA, 75 bp, synthetic construct
  source 1..75: mol_type = other DNA
gcagaacgtatgggcatcaaagcgcctactatctcacgtatggagaagaacgcttcgcgaatgagtattcagacg

SEQ ID NO: 547693 - DNA, 75 bp, synthetic construct
  source 1..75: mol_type = other DNA
tttcccgcctggaaaacaacatcactaaagccagcatcggtacactgactcgctatgcccatgcgtgtggtatca

SEQ ID NO: 547694 - DNA, 75 bp, synthetic construct
  source 1..75: mol_type = other DNA
ctgcaagagaacatcgaaatctgctctaaatacctggagcgcatgtccaaaatcggcatgactctggaaatcgaa

SEQ ID NO: 547695 - DNA, 75 bp, synthetic construct
  source 1..75: mol_type = other DNA
gtaacgggaaaagccggtgttaaaactcgctatctccacctcaataaaatactcgttactaaaggggccagagtt

SEQ ID NO: 547696 - DNA, 75 bp, synthetic construct
  source 1..75: mol_type = other DNA
cttcaaaaaaaagcaggacaatcccgggtcgtggcctataaattcacgtcaggtaaatttaattacaccgcttat

SEQ ID NO: 547697 - DNA, 75 bp, synthetic construct
  source 1..75: mol_type = other DNA
tgacaacctgacaaaagcgcaggttgctgaacgcatgggggttacacctccggttatttcccgcctggaaaacaa

SEQ ID NO: 547698 - DNA, 75 bp, synthetic construct
  source 1..75: mol_type = other DNA
aaaagctgcacacggtgaaagtcctctcggcaagcagttacagccccgatgagtgggaacggcagtgtaaagcgg

SEQ ID NO: 547699 - DNA, 75 bp, synthetic construct
  source 1..75: mol_type = other DNA
atcgtgaaaagctgcatacggtgaaagtcctctcggcaagcagttatagccccgatgagtgggaacggcagtgta

SEQ ID NO: 547700 - DNA, 75 bp, synthetic construct
  source 1..75: mol_type = other DNA
gaacgagctcatacgttgggtaaataccggggaaaacaagccgatcaggaacggcatcagaaagtgttgtgctac

SEQ ID NO: 547701 - DNA, 75 bp, synthetic construct
  source 1..75: mol_type = other DNA
agcagttgggtatgtttactttgagtcaatttcatctaatgttatttacagaataaaaaatggtgtaattgatag

SEQ ID NO: 547702 - DNA, 75 bp, synthetic construct
  source 1..75: mol_type = other DNA
atgaagtatggtactgttatggctaagaaaaatttatactcggaagagattgtgattgccaaaaagcaactcaat

SEQ ID NO: 547703 - DNA, 75 bp, synthetic construct
  source 1..75: mol_type = other DNA
agccagcaactggcatacgaacaacttcgtattgcgcgggaaacgctgaaaaattatcaacagtcctatgctttc

SEQ ID NO: 547704 - DNA, 75 bp, synthetic construct
  source 1..75: mol_type = other DNA
ggcgttccgggcagcggcacccgctgataacaaactcgaacagcatgcctttgcgcatgccagagactacgaacg

SEQ ID NO: 547705 - DNA, 75 bp, synthetic construct
  source 1..75: mol_type = other DNA
acttcgatcgccagagtcgcaacctgcagcaactcaacgaatcaaatgcacggttctggagtgaacagaatgaga

SEQ ID NO: 547706 - DNA, 75 bp, synthetic construct
  source 1..75: mol_type = other DNA
cgccgggcttaccacgggtttcccatgccatttccagcgctttcatggtgagcctgctgtccggcgagaacgaca

SEQ ID NO: 547707 - DNA, 75 bp, synthetic construct
  source 1..75: mol_type = other DNA
acggcggcatgttaaatgcgccgcttagcctgcgtctgacattggtggaaaaactggcgtcgatgctggatcccg

SEQ ID NO: 547708 - DNA, 75 bp, synthetic construct
  source 1..75: mol_type = other DNA
gactaatgttccttccggctacgaccgcgtttatagcattcgtattaacgaactggaatatgctattcgcgatag

SEQ ID NO: 547709 - DNA, 75 bp, synthetic construct
  source 1..75: mol_type = other DNA
aaatgttccaacgggaacaatgcagggcagaagccgcagagaagcgtattgctgaactggagaaaagcgaagagc

SEQ ID NO: 547710 - DNA, 75 bp, synthetic construct
  source 1..75: mol_type = other DNA
gtgaaaaggcagagaaagcaactaaaggaagctacatcgtagggcatacatctgttaaccaacacggcaatttaa

SEQ ID NO: 547711 - DNA, 75 bp, synthetic construct
  source 1..75: mol_type = other DNA
aatttgcggctgaaaaagggtatgaactggaagaaagcttcccggcagaccgtagcacgctgcgtcagttgacta

SEQ ID NO: 547712 - DNA, 75 bp, synthetic construct
  source 1..75: mol_type = other DNA
aacaaagcctatggcttgttcagtgaagagagtgaactggcgcagacgttgcgtttgcagcgtcagggcgaagaa

SEQ ID NO: 547713 - DNA, 75 bp, synthetic construct
  source 1..75: mol_type = other DNA
aagctttactcgacctgaattatgcccgtcaggttaacgaaatttctttatataccgcacttggtggcggttggt

SEQ ID NO: 547714 - DNA, 75 bp, synthetic construct
  source 1..75: mol_type = other DNA
cttcacaatcagatccgattacccgcacagtgataactgcaataaataatatgcttatagacctgatgtccgcca

SEQ ID NO: 547715 - DNA, 75 bp, synthetic construct
  source 1..75: mol_type = other DNA
cccatagtggagagcgcttttgatccttacgcaacgtctggcgccaatgccgcaggcatctggcagatcattccg

SEQ ID NO: 547716 - DNA, 75 bp, synthetic construct
  source 1..75: mol_type = other DNA
gtttgctgctgggcgtcctctgtggtctggtgaatggttttgttatcgccaaactaaaaattaacgccttgatta

SEQ ID NO: 547717 - DNA, 75 bp, synthetic construct
  source 1..75: mol_type = other DNA
atgaaaggtctcgggctggcaatatccatgtcgggaatggtggcttgcggcatgttgttctgcctcgcttcgggg

SEQ ID NO: 547718 - DNA, 75 bp, synthetic construct
  source 1..75: mol_type = other DNA
accaggctgaaaaactcagcctgaaagaaaccatcaatctgctcgatggcgccatgcgtaataatgttcagatcc

SEQ ID NO: 547719 - DNA, 75 bp, synthetic construct
  source 1..75: mol_type = other DNA
ccacagggaaatttatctccccggggaaaaagtatccgttaccgcatgtcgcgttacctgcatttgaccgtaatg

SEQ ID NO: 547720 - DNA, 75 bp, synthetic construct
  source 1..75: mol_type = other DNA
caacagactacattctgagttgggaatgggatttgaagagcggcgggtattccgacgatataaagggacaggaga

SEQ ID NO: 547721 - DNA, 75 bp, synthetic construct
  source 1..75: mol_type = other DNA
ctggaggatgaatcccctttcggtctctatgaactgctgatgcagatggtcagtgaccatacgcaatgcatttcg

SEQ ID NO: 547722 - DNA, 75 bp, synthetic construct
  source 1..75: mol_type = other DNA
ggtgctttttatcaaaatttattcattatctccgcttgctttcattatattatcttctatgccagtattcgcttt

SEQ ID NO: 547723 - DNA, 75 bp, synthetic construct
  source 1..75: mol_type = other DNA
ggtatatctttatttatttcttgaccttatttggggcatattgttgttattatgcaggtgtcaatttcttaacct

SEQ ID NO: 547724 - DNA, 75 bp, synthetic construct
  source 1..75: mol_type = other DNA
ttcgcgcagtacgtggttcgcggcttaatcctgctggcagcggtgatcttcgaccgttacaagcaaaaagcgaaa

SEQ ID NO: 547725 - DNA, 75 bp, synthetic construct
  source 1..75: mol_type = other DNA
ggttgctgcttggcattctctgtggcctggtcaatggctttgttatcgccaaactgaaaataaatgctctgatca

SEQ ID NO: 547726 - DNA, 75 bp, synthetic construct
  source 1..75: mol_type = other DNA
gttgggaatgggatttgaagagcggcgggtattccgacgatataaagggacaggagaacagaatacgtccggaaa

SEQ ID NO: 547727 - DNA, 75 bp, synthetic construct
  source 1..75: mol_type = other DNA
gacgaagtgggtgagcagatcaaggacattatcacggatgtggttcgcggtctggaacgacagaaggggcagcat

SEQ ID NO: 547728 - DNA, 75 bp, synthetic construct
  source 1..75: mol_type = other DNA
atcttgaattaggtcgtttttttgcaaccatcatttatggctctgatagagacaaaatcaatagaaaaaatttta

SEQ ID NO: 547729 - DNA, 75 bp, synthetic construct
  source 1..75: mol_type = other DNA
gccgagttaaccctgatgtcccgggagcaggggcgtgatgtccatatcctggcggccgataaccgctcacgtgat

SEQ ID NO: 547730 - DNA, 75 bp, synthetic construct
  source 1..75: mol_type = other DNA
cggtattaaagtcggccacggctgggtggaaagtcccggcaggtcggttagcgagacggcaacggtctttgcgtc

SEQ ID NO: 547731 - DNA, 75 bp, synthetic construct
  source 1..75: mol_type = other DNA
tcgtcaacgacaaaaacagggaattgaacgtgcccatactttaggtaagtatcggggcaaacaggcagatcggga

SEQ ID NO: 547732 - DNA, 75 bp, synthetic construct
  source 1..75: mol_type = other DNA
tgtcgcataaagactggctgagtcgtcgtcaacgacaaaaacagggaattgaacgtgcccatactttaggtaagt

SEQ ID NO: 547733 - DNA, 75 bp, synthetic construct
  source 1..75: mol_type = other DNA
taaatatgcctcctactgcgcaagtttaaccaaagcgcaaatcgttgaaatttaccagcagtacttagaccgcta

SEQ ID NO: 547734 - DNA, 75 bp, synthetic construct
  source 1..75: mol_type = other DNA
gagcgcggctatgtggccaacagtatctgggaagtgcagtctgtttcgggtgacagtgtcacgctgtctgatggc

SEQ ID NO: 547735 - DNA, 75 bp, synthetic construct
  source 1..75: mol_type = other DNA
tcctgaccgggaatctgattattgcccgctttaaccatgatacatcgcgcgctcaggatccacagatacacacac

SEQ ID NO: 547736 - DNA, 75 bp, synthetic construct
  source 1..75: mol_type = other DNA
gaaagtctgcagcgtgaacgtctgcaggctgtggagcgggacatggtgcgcgacctgaaccgcgagaaaaccctc

SEQ ID NO: 547737 - DNA, 75 bp, synthetic construct
  source 1..75: mol_type = other DNA
cacaggaaaaggcgatacaaaaggcactgagcgagggggaaaccctgccggcaggtcagcccgcgtcgctctacg

SEQ ID NO: 547738 - DNA, 75 bp, synthetic construct
  source 1..75: mol_type = other DNA
ctccctcagacaggagggggtgctgggtgagaaagacacgaccattacagccctgacgccggtgtggctggacag

SEQ ID NO: 547739 - DNA, 75 bp, synthetic construct
  source 1..75: mol_type = other DNA
ctacagcctgattgagcgggatgtgcaccgcgccctgaccaccattgagcaggtcacgccggaacaggtgccgag

SEQ ID NO: 547740 - DNA, 75 bp, synthetic construct
  source 1..75: mol_type = other DNA
aaccctgaaaattatctaaaccagcggccagatgcagatcactattctctgcaggttgatgtctatggtgatact

SEQ ID NO: 547741 - DNA, 75 bp, synthetic construct
  source 1..75: mol_type = other DNA
attgtgaccatccagactttcccgttcgtgctgaaagcaatcgaaaacagcgtcagcctgaagcagcgtaaatat

SEQ ID NO: 547742 - DNA, 75 bp, synthetic construct
  source 1..75: mol_type = other DNA
cccgcgtctaccccaacgacaccgagcgccatttcctcgacgcgctggttgcgcagttaaaaaaagccgacagca

SEQ ID NO: 547743 - DNA, 75 bp, synthetic construct
  source 1..75: mol_type = other DNA
atattgcatctgcacttaaatacgcaaatagtcgtgcagtaacaatgatttataacaagtatagcgatgagttta

SEQ ID NO: 547744 - DNA, 75 bp, synthetic construct
  source 1..75: mol_type = other DNA
actacaccaactacaaagtggcgtatcagttgctgcaaaagctggaagacaaagaccgcgaagtcgatagcaaac

SEQ ID NO: 547745 - DNA, 75 bp, synthetic construct
  source 1..75: mol_type = other DNA
acgctggagctgaaatccgaatttaaacaggcggtgcagaacgccattgcccagtacaaaaagacccgcctgccg

SEQ ID NO: 547746 - DNA, 75 bp, synthetic construct
  source 1..75: mol_type = other DNA
aactcgcgggtgacagcaccttcttcctgccgtttaacaaaggcaccaaagacggcggcgcaggcaacgagatcc

SEQ ID NO: 547747 - DNA, 75 bp, synthetic construct
  source 1..75: mol_type = other DNA
tttttattcataaacaccatcttgaaaaatggatgaatggaggccttaccgctgaaaatgtaaaaaaaactctca

SEQ ID NO: 547748 - DNA, 75 bp, synthetic construct
  source 1..75: mol_type = other DNA
ttgaagcttgttttcaacattactggtgatttcgataaggtgtttttaccactggagttttctggttttcatgga

SEQ ID NO: 547749 - DNA, 75 bp, synthetic construct
  source 1..75: mol_type = other DNA
atgaaagtcgtattcaatgtgatgaatggttttgataggatttttctgccattggagttttctggttttcacggg

SEQ ID NO: 547750 - DNA, 75 bp, synthetic construct
  source 1..75: mol_type = other DNA
tcttcaagaaagacctcggcagctttgtccgcttttacgagtttatgtcgcaaatcgtcgattacgacgacaaga

SEQ ID NO: 547751 - DNA, 75 bp, synthetic construct
  source 1..75: mol_type = other DNA
tgcaggacaccatctatcagtttgagcatcaggatggcgtggtcgggcggatcaataacaaagaaggcgacggtt

SEQ ID NO: 547752 - DNA, 75 bp, synthetic construct
  source 1..75: mol_type = other DNA
atgaaagcaatattcaatgtgatgaatggttttgataagatttttctgccattgaagttttctggttttcatggg

SEQ ID NO: 547753 - DNA, 75 bp, synthetic construct
  source 1..75: mol_type = other DNA
ttaacctgcaaaacgacatcatcgcgcagatggtgaaaaaaggctggattgccggcaaaggtgacgcttacgaca

SEQ ID NO: 547754 - DNA, 75 bp, synthetic construct
  source 1..75: mol_type = other DNA
attacaggccgctcgcgtattgatgatgcatttacccgcaaaggtttgctggcagatattgtattgagcgcccag

SEQ ID NO: 547755 - DNA, 75 bp, synthetic construct
  source 1..75: mol_type = other DNA
tgcaggactgtcagttgaggatatcaagcggcaggtgatggaaaacagtgaagaggaaattgattatcagatata

SEQ ID NO: 547756 - DNA, 75 bp, synthetic construct
  source 1..75: mol_type = other DNA
ataaatagcgaaaacccgcgaggtcgccgccccgtagcctgttggatcgccggaaaggacccgaaaaacgagaat

SEQ ID NO: 547757 - DNA, 75 bp, synthetic construct
  source 1..75: mol_type = other DNA
tgcaggtctgtcagtagaagatatcaagcggcaggtgatggaaaacagtgaagaggaaattgattatcagatata

SEQ ID NO: 547758 - DNA, 75 bp, synthetic construct
  source 1..75: mol_type = other DNA
tctggcactttctggaactgtgtaacgctggattgtcggttgaggatattaagcggcaggtgatggaaaagagtg

SEQ ID NO: 547759 - DNA, 75 bp, synthetic construct
  source 1..75: mol_type = other DNA
gcaggactttcagttgaggatatcaagcggcaggtgatggaaaacagtgaagaggaaattgattatcagatatag

SEQ ID NO: 547760 - DNA, 75 bp, synthetic construct
  source 1..75: mol_type = other DNA
ccaaatcggaaaagctcgccaacgcgctggaaaactcgcagccgattattatcgtcaccatccagactttcccgt

SEQ ID NO: 547761 - DNA, 75 bp, synthetic construct
  source 1..75: mol_type = other DNA
acggcgtggtcgggcgcatcaataacagagagggcgacggctctaaatcggaaaagctcgccaacgcgctggaaa

SEQ ID NO: 547762 - DNA, 75 bp, synthetic construct
  source 1..75: mol_type = other DNA
cgggcgatacggtgttaatcactaatgcggaaaacagttttaaagcctgtaagcaggagaaagatcgcctggaaa

SEQ ID NO: 547763 - DNA, 75 bp, synthetic construct
  source 1..75: mol_type = other DNA
aggtgcaggacgtcagcgtgacctttcctgtgttgatccttccgcgacagatgatgtcgccgactggcttgacgc

SEQ ID NO: 547764 - DNA, 75 bp, synthetic construct
  source 1..75: mol_type = other DNA
tggcgacggggtggtggctctggactgcgatatcaatgatgccgggatgcaggagattgtacgcaatattatcct

SEQ ID NO: 547765 - DNA, 75 bp, synthetic construct
  source 1..75: mol_type = other DNA
ccgttggttgccgatgacgataccggatgagactgacggcaagtttatcgctcagggtatcgctgacgaaaaaat

SEQ ID NO: 547766 - DNA, 75 bp, synthetic construct
  source 1..75: mol_type = other DNA
cttttgaagagttcagcctagatctagaaaaagacaatttacaagataaaaaggcatatcaatattttggtttca

SEQ ID NO: 547767 - DNA, 75 bp, synthetic construct
  source 1..75: mol_type = other DNA
atgaataagtttgaagatattcgcggcgtcgcttttgatcttgatggtacgctggtcgacagtgctcccggtctt

SEQ ID NO: 547768 - DNA, 75 bp, synthetic construct
  source 1..75: mol_type = other DNA
tatccgttttgccgacgttcgccgcaaaatgcatgacgccttgctggattacatggacaaaattcgcgatccgtt

SEQ ID NO: 547769 - DNA, 75 bp, synthetic construct
  source 1..75: mol_type = other DNA
cgtccacgtccacaagatggctattcgccagttgtacgcgactatgacaccggcctaccgacacaaggggtgaag

SEQ ID NO: 547770 - DNA, 75 bp, synthetic construct
  source 1..75: mol_type = other DNA
gcgttgccttcgatctcgatggcacgctggttgacagtgctcccggtctggctgctgcggtagatatggcgctgt

SEQ ID NO: 547771 - DNA, 75 bp, synthetic construct
  source 1..75: mol_type = other DNA
ggtaatggcgcagatgtcctgatggagcgagcactgatctgggctcgccaggaacgtgcgaccctgcgtaaaacg

SEQ ID NO: 547772 - DNA, 75 bp, synthetic construct
  source 1..75: mol_type = other DNA
aaaggcctgccgctaggcctggtcaccaacaaaccgacgccgttcgtcgcgccgctgctcgaagccttagatatc

SEQ ID NO: 547773 - DNA, 75 bp, synthetic construct
  source 1..75: mol_type = other DNA
tgatcagtaaaggagcggcgatgtatgacgacatcacccgtattccgctgatcatccgttcgccgcaaggggagc

SEQ ID NO: 547774 - DNA, 75 bp, synthetic construct
  source 1..75: mol_type = other DNA
agtggtcctatttaaaaacgctgattcagacgccacagaaaatttttatgctggcagtctctgccgtgctgattg

SEQ ID NO: 547775 - DNA, 75 bp, synthetic construct
  source 1..75: mol_type = other DNA
ggaggatatagcaggtcgaaaaggggatctgaagactgtgtccgggatccgcaagaatattgtgatgtttgcccc

SEQ ID NO: 547776 - DNA, 75 bp, synthetic construct
  source 1..75: mol_type = other DNA
gcgttgctgggtgacggatgactttaaactggtactcaacctcttcaccagtgatgaactttacgatcgccgtaa

SEQ ID NO: 547777 - DNA, 75 bp, synthetic construct
  source 1..75: mol_type = other DNA
gctggatgggggcatttcgtccacgcccacaagatggctattcgccagtggtacgcgactatgacaccggcctac

SEQ ID NO: 547778 - DNA, 75 bp, synthetic construct
  source 1..75: mol_type = other DNA
gccgcatcacccgttcacctgtccggtggagtatttagagaaatacgctgatttttactacgaactgggcgagaa

SEQ ID NO: 547779 - DNA, 75 bp, synthetic construct
  source 1..75: mol_type = other DNA
gtggagtcggttacattttctcttccggatattctcagtgatctggctgttcctcgtctggaatcccttactgtg

SEQ ID NO: 547780 - DNA, 75 bp, synthetic construct
  source 1..75: mol_type = other DNA
aaccttctcggaagcgattatttccggtgagtggaaaggctataccggcaaagcaatcactgacgtagtgaacat

SEQ ID NO: 547781 - DNA, 75 bp, synthetic construct
  source 1..75: mol_type = other DNA
ttctggttgatggcaaagacgtaatgccggaagtcaacgcggtgctggagaagatgaaaaccttctcggaagcga

SEQ ID NO: 547782 - DNA, 75 bp, synthetic construct
  source 1..75: mol_type = other DNA
ctttattgatgcggttaacgattatgtgaatacccagggccaccacggacacggtgatgatctgcagtgttatgc

SEQ ID NO: 547783 - DNA, 75 bp, synthetic construct
  source 1..75: mol_type = other DNA
caattaaatattatcgcaaaagatgaacatgttagaacagtaccatttaagttcacttcatcacttttaccctat

SEQ ID NO: 547784 - DNA, 75 bp, synthetic construct
  source 1..75: mol_type = other DNA
atccgttgcgttttcattaccggatattatcagcgatctggatattccaagactgaaccagctgacgattgaggt

SEQ ID NO: 547785 - DNA, 75 bp, synthetic construct
  source 1..75: mol_type = other DNA
ctgaaagatgacaaagaaatcagcagccacgatagctcgaccaatggtctgattaaccgctataaagcgtggcgc

SEQ ID NO: 547786 - DNA, 75 bp, synthetic construct
  source 1..75: mol_type = other DNA
gaattaccacaccgacgccgtgtaccgttcgatgattgccagtgttgcgggactgagtattgatcggattttctt

SEQ ID NO: 547787 - DNA, 75 bp, synthetic construct
  source 1..75: mol_type = other DNA
tggacagtggggtggcttccgcaccgttcgtgaatgcggtgaatgattacatcaacacgcagggacatcacggcc

SEQ ID NO: 547788 - DNA, 75 bp, synthetic construct
  source 1..75: mol_type = other DNA
agttaccgtgccggccggtacgcagattcagacagaacgcattaacggcgtgatttatacgctgaccgttgtcag

SEQ ID NO: 547789 - DNA, 75 bp, synthetic construct
  source 1..75: mol_type = other DNA
ttgagaaatatcagttcagggcgaggaatgagtctccacgactgatgcgtcagtgggctgatgtcatgcgtgaat

SEQ ID NO: 547790 - DNA, 75 bp, synthetic construct
  source 1..75: mol_type = other DNA
ctgagttcctgctgtaaagactcccgtccagtaaccaagaatgacatcatttggattcacttcaccgttaatcag

SEQ ID NO: 547791 - DNA, 75 bp, synthetic construct
  source 1..75: mol_type = other DNA
cagtctgcagaatgacttatccggcgtgccggatagcttcagttacagtcttgcgacgcgaatacggcgggtgga

SEQ ID NO: 547792 - DNA, 75 bp, synthetic construct
  source 1..75: mol_type = other DNA
tgctcatttttatccgttccagtgaactccgattcgcaagatggtcggagatcgactttgaaaatgcgatgtgga

SEQ ID NO: 547793 - DNA, 75 bp, synthetic construct
  source 1..75: mol_type = other DNA
atgttgcagtggtgggctgattatcttgatgaaacaactgagagaagaattgcaccttttgattttgataactaa

SEQ ID NO: 547794 - DNA, 75 bp, synthetic construct
  source 1..75: mol_type = other DNA
cgtgccgcatacattcataaagctgagcatttggacgagcgtaggttgatgttgcagtggtgggctgattatctt

SEQ ID NO: 547795 - DNA, 75 bp, synthetic construct
  source 1..75: mol_type = other DNA
taaggtcatgagtgagaacacggttaacagcgccttgcgtaccatgggatatgacacgaaaaccgaggtctgtgg

SEQ ID NO: 547796 - DNA, 75 bp, synthetic construct
  source 1..75: mol_type = other DNA
ggtggaggttcaagtggcggcggatttagcggaggtggcggttcttctggcggtggtggcgcgtccggccgctgg

SEQ ID NO: 547797 - DNA, 75 bp, synthetic construct
  source 1..75: mol_type = other DNA
catcgtccggcgctggagttaaagcgcattcctgaattactccagaaaatagatgactacaccggcaggccacta

SEQ ID NO: 547798 - DNA, 75 bp, synthetic construct
  source 1..75: mol_type = other DNA
atgctggcgctggggaaataccctgaagtctcgctggtcgatgccagaggtcgccgggatgaagcccgtaagttg

SEQ ID NO: 547799 - DNA, 75 bp, synthetic construct
  source 1..75: mol_type = other DNA
gtaatcagaagtggtctgcatcgcatagtgctcgtgtattgaaaagcctagaagataatctctttgctgctatcg

SEQ ID NO: 547800 - DNA, 75 bp, synthetic construct
  source 1..75: mol_type = other DNA
tcgaagtcgccgcccgtttacagcagcgaactactgcgattatgcgctttgccgttcagagcggcttaatcgact

SEQ ID NO: 547801 - DNA, 75 bp, synthetic construct
  source 1..75: mol_type = other DNA
acgcgatgcggcgagaaagcagatagctgaaggtactgacccgtgcgaacagaaacgaatcaaaaagtcggtacc

SEQ ID NO: 547802 - DNA, 75 bp, synthetic construct
  source 1..75: mol_type = other DNA
atgtttttgctcgttcaccctaacggctcgcgctactggcggctccgctacaggtttctgggcaaagagaaaacg

SEQ ID NO: 547803 - DNA, 75 bp, synthetic construct
  source 1..75: mol_type = other DNA
gaagactcgggatctgcttgtccccatcaaagcggtggagtcgtctgggcgtctcgaagtcgctgctcgtttgca

SEQ ID NO: 547804 - DNA, 75 bp, synthetic construct
  source 1..75: mol_type = other DNA
gttctaagtactggcgtttgcagtaccgttatgagggaaagcaaaagatgctggcacttggggtttatcctgaaa

SEQ ID NO: 547805 - DNA, 75 bp, synthetic construct
  source 1..75: mol_type = other DNA
gagaaagcgcgagggatgaagggcgatgaaataaacgcgtggcgtaatgcgatggaagcggcgaactacacgttt

SEQ ID NO: 547806 - DNA, 75 bp, synthetic construct
  source 1..75: mol_type = other DNA
cttcagaaagccgggataccagtgatagaaacagatcttggtgaatatattcttcagctggcgcatgagccgcca

SEQ ID NO: 547807 - DNA, 75 bp, synthetic construct
  source 1..75: mol_type = other DNA
aattcacgtacggcagcggaacatgaagaaggcactggaagcgctgaacagtgcggatgagattctggcgtataa

SEQ ID NO: 547808 - DNA, 75 bp, synthetic construct
  source 1..75: mol_type = other DNA
aatccacattcgccagcgcaccatgaagaaggagctggaaaagctgaccagtgcggatgaggttctggcgtataa

SEQ ID NO: 547809 - DNA, 75 bp, synthetic construct
  source 1..75: mol_type = other DNA
gaagctggtttatgacagtaacggtataatcaccagcataagtaaggatgtctctatgctgtggccggtaaacca

SEQ ID NO: 547810 - DNA, 75 bp, synthetic construct
  source 1..75: mol_type = other DNA
atgattattaagagttttaagctatacacccctgaaaaatctgacgtgccgggtgcgatgtacctgaaatcagta

SEQ ID NO: 547811 - DNA, 75 bp, synthetic construct
  source 1..75: mol_type = other DNA
gatggattgacgcatcatcaatgaatgagtcattcgatcaaaatgccgaatatattgtgttaattaacggacttg

SEQ ID NO: 547812 - DNA, 75 bp, synthetic construct
  source 1..75: mol_type = other DNA
ctgaaatgtaccccggagtttttgcaactttgggatgccccggtcaatacgccagcgcttcgttggggatgttaa

SEQ ID NO: 547813 - DNA, 75 bp, synthetic construct
  source 1..75: mol_type = other DNA
gcggtggtgggcggattttctggatgcgaaccgggagaaagggattacgccgtttgactatgcgaagatcaatcg

SEQ ID NO: 547814 - DNA, 75 bp, synthetic construct
  source 1..75: mol_type = other DNA
ctgcaatggggtatgtccggtaaaaatacctctggcacaactaatacaaacacatcggcaggttatggcagagac

SEQ ID NO: 547815 - DNA, 75 bp, synthetic construct
  source 1..75: mol_type = other DNA
cattctaattgctggtatatatgtctttacttcattgagtatatttatcgattacataataggattgactttcag

SEQ ID NO: 547816 - DNA, 75 bp, synthetic construct
  source 1..75: mol_type = other DNA
atatccatattcactgcttctctatcgggatattttataaagagctatcttgagaaaaaattatcctttcatgat

SEQ ID NO: 547817 - DNA, 75 bp, synthetic construct
  source 1..75: mol_type = other DNA
tagagctcgagtattgaaaagcctcgaagataatctctttgctgctatcggtaagcggaacattgcagaactgaa

SEQ ID NO: 547818 - DNA, 75 bp, synthetic construct
  source 1..75: mol_type = other DNA
gtcctcggatgccgcaaagccggacgatgcacatgctgccccggacactgacaaaccgacttcccacgctgcctg

SEQ ID NO: 547819 - DNA, 75 bp, synthetic construct
  source 1..75: mol_type = other DNA
ctgagtctggagaacgatcctgtgcgtcaggtggagatttacgagcgtgtgaaggcacagcacagctatgccccc

SEQ ID NO: 547820 - DNA, 75 bp, synthetic construct
  source 1..75: mol_type = other DNA
tgggacataccacacagagcgacctcgatggcgtggaaacggcgctcgggttccacctgcgcgactggtggcagc

SEQ ID NO: 547821 - DNA, 75 bp, synthetic construct
  source 1..75: mol_type = other DNA
cctgctcagtaaaaaccagatagtggaggcgttacaggaagctgggctggattcagtcgccgtcgaagcggcgaa

SEQ ID NO: 547822 - DNA, 75 bp, synthetic construct
  source 1..75: mol_type = other DNA
ctgagtctggagaacgatccggtgcgtcaggtggagatttacgagcgcgtgaaggcgcagcacagctatgccccc

SEQ ID NO: 547823 - DNA, 75 bp, synthetic construct
  source 1..75: mol_type = other DNA
gctgctcagcaaggcccagattgtggcggcactgaaggaggccgggctgaccggagccgcctcggatgccgaaaa

SEQ ID NO: 547824 - DNA, 75 bp, synthetic construct
  source 1..75: mol_type = other DNA
gctaaagtctggcgcaataccggagaaaaatggtcaaggcagtcagaagaacttcatctgcacagggtgatagac

SEQ ID NO: 547825 - DNA, 75 bp, synthetic construct
  source 1..75: mol_type = other DNA
tttgcaacagtgcctgcgcctgggtagaaaagaccagccgctgggctcaatatcaccgttgcgcgttcttagcga

SEQ ID NO: 547826 - DNA, 75 bp, synthetic construct
  source 1..75: mol_type = other DNA
gactcaggcggctgatctcggtacctggggggatttatggcccgtccgggagcaggacatgctgcagctcatcac

SEQ ID NO: 547827 - DNA, 75 bp, synthetic construct
  source 1..75: mol_type = other DNA
aagcacccaaaaaagcgagcagcaaaaaaattacgaaggcacaggaggctgccctgaagatcgcccttgaggccg

SEQ ID NO: 547828 - DNA, 75 bp, synthetic construct
  source 1..75: mol_type = other DNA
aaacgagctaaaagagaatcacgagtatttagatgagagtcttaagcgtttagcagcagaactaaaacgtttagg

SEQ ID NO: 547829 - DNA, 75 bp, synthetic construct
  source 1..75: mol_type = other DNA
gcaaaagtgtggcgcaacaccggagaaaagtggtcacggcaatcagaagaattacctcttcatcgtgttatcgac

SEQ ID NO: 547830 - DNA, 75 bp, synthetic construct
  source 1..75: mol_type = other DNA
gatcgccgatttgcatcgggtatttactatcgtgatattcattttcaggaatactttgaaaagctgaaggagtga

SEQ ID NO: 547831 - DNA, 75 bp, synthetic construct
  source 1..75: mol_type = other DNA
acccgactggctgtcgaactcacgttactagttttcatccgttcaagcgaactgcgttttgctcgctggtctgaa

SEQ ID NO: 547832 - DNA, 75 bp, synthetic construct
  source 1..75: mol_type = other DNA
gggctgattatctggatgcgaatagaatggcggctatcactccatttgactatgcaaagattaatagttcttttc

SEQ ID NO: 547833 - DNA, 75 bp, synthetic construct
  source 1..75: mol_type = other DNA
gtggatcacttttcatccgtcgttgacagtaagttgttagctaacggcgtcgatcctagtgagaacaagaaagct

SEQ ID NO: 547834 - DNA, 75 bp, synthetic construct
  source 1..75: mol_type = other DNA
acacgaaaatggaagtgtgtggacatggtttcagaacgatggcgtgtagttctttgattgaatcgggattgtggt

SEQ ID NO: 547835 - DNA, 75 bp, synthetic construct
  source 1..75: mol_type = other DNA
ttgaagtcgccgctcgtttgcaacagcgaactaccgcgattatgcgctttgctgtgcagagcggtttaatcgact

SEQ ID NO: 547836 - DNA, 75 bp, synthetic construct
  source 1..75: mol_type = other DNA
gctcaaaatactggcggcttcgttatcgttttagcggtaaggagaagatgctggcgcttgggaaataccctgaag

SEQ ID NO: 547837 - DNA, 75 bp, synthetic construct
  source 1..75: mol_type = other DNA
tgatgaagattttcggttcgcttccggtatttactacaaacaacttcattttgatgactatttcagaaaactgaa

SEQ ID NO: 547838 - DNA, 75 bp, synthetic construct
  source 1..75: mol_type = other DNA
gtgaataacgaaaacagacatctgatttatgatgtggttaacgactatttttatcactggctgaatgagattgat

SEQ ID NO: 547839 - DNA, 75 bp, synthetic construct
  source 1..75: mol_type = other DNA
ttgcggagggtgttaagcaacgtcgatgtgattatgagtattaagtacatcgatgaggaagataaccgatttgca

SEQ ID NO: 547840 - DNA, 75 bp, synthetic construct
  source 1..75: mol_type = other DNA
tccctgagttgcttacaaaaatagatagctatactggtaggccgctaacccgatgggcgatagaactcactttgc

SEQ ID NO: 547841 - DNA, 75 bp, synthetic construct
  source 1..75: mol_type = other DNA
atgcatctgcttgtccatccaaatggttctaagtactggcgtttgcagtaccgttatgagggaaagcaaaaaatg

SEQ ID NO: 547842 - DNA, 75 bp, synthetic construct
  source 1..75: mol_type = other DNA
ttccagccgaacgcgaacctttgccaggcgtaaaatactcacaccggggctccaagatgcgaacaccacatcttg

SEQ ID NO: 547843 - DNA, 75 bp, synthetic construct
  source 1..75: mol_type = other DNA
aatggccgtactggaggggaagtctgtcaccttcaacgggcagcaactgacgctggaaagcctttctcagatccg

SEQ ID NO: 547844 - DNA, 75 bp, synthetic construct
  source 1..75: mol_type = other DNA
atcttgatgccatgattcgccacatcacaaaggcggagttatcccgcgtggagatagtcgagctgctcagtcagg

SEQ ID NO: 547845 - DNA, 75 bp, synthetic construct
  source 1..75: mol_type = other DNA
atgcatatagtttctgaaaatcagtgcggtaaatacgcattactgctgcaacaggccagaaccgaagcacaggcc

SEQ ID NO: 547846 - DNA, 75 bp, synthetic construct
  source 1..75: mol_type = other DNA
ttgcgacgttgttgcaaaatggcgaagctgatattggtatcgccagcgagcgtttgagtaatgacccgcagctcg

SEQ ID NO: 547847 - DNA, 75 bp, synthetic construct
  source 1..75: mol_type = other DNA
tagtaatgatgttaaaagcatgggtttttcacttacatcatcagttgataatatattgcattttttgcggcttac

SEQ ID NO: 547848 - DNA, 75 bp, synthetic construct
  source 1..75: mol_type = other DNA
atgccgggcaagcaaatgctctgttgtattttgatatcgattatcagtgagggagatatgaagatattcattagt

SEQ ID NO: 547849 - DNA, 75 bp, synthetic construct
  source 1..75: mol_type = other DNA
gtgaagaaaatgatttttgtggcggcattgctaaccattacccaacatacgcaggcttcagcagttattgtggca

SEQ ID NO: 547850 - DNA, 75 bp, synthetic construct
  source 1..75: mol_type = other DNA
gtcttcgaagtcgcgggtgaagcaggcgcggcagctccggcggctaaacaggaagcggctccggcagcggcccct

SEQ ID NO: 547851 - DNA, 75 bp, synthetic construct
  source 1..75: mol_type = other DNA
aatatcctgttcacctttgctgttgtcatgcaggtggctcttttcctgcagtctgctactgcccgtaatggtgtt

SEQ ID NO: 547852 - DNA, 75 bp, synthetic construct
  source 1..75: mol_type = other DNA
cacaaaggcggagttatcccgcgtggagataatcgagctgctcagtcaggagtcggaaaaatttcacaatatcgg

SEQ ID NO: 547853 - DNA, 75 bp, synthetic construct
  source 1..75: mol_type = other DNA
cgcggaactgaactttggtaagggcaacttcaacgttcgctctaccggttggggtggttacctggtagtaggtta

SEQ ID NO: 547854 - DNA, 75 bp, synthetic construct
  source 1..75: mol_type = other DNA
aacggtattaaaacacgtaccaataactctattgcgtccagccatattctggcgctgaattacgatcactggcac

SEQ ID NO: 547855 - DNA, 75 bp, synthetic construct
  source 1..75: mol_type = other DNA
tatggtaaaagcaaccattccgatttgtcggtggaatcgaaaaaacatgaggtggttaatttatacttgtgccct

SEQ ID NO: 547856 - DNA, 75 bp, synthetic construct
  source 1..75: mol_type = other DNA
cccggcagaaagcggcgtttatccgccagcttaaagagcaggcaacccgccagaatctgtcgtcttctgagttgc

SEQ ID NO: 547857 - DNA, 75 bp, synthetic construct
  source 1..75: mol_type = other DNA
gcatggcccgtgaggtggaacaaacccgtctgcgcgtggatgccctgaatcagaaaatgctcgaggaacaggcgc

SEQ ID NO: 547858 - DNA, 75 bp, synthetic construct
  source 1..75: mol_type = other DNA
tgattcaggcactgacgctgctggatttaaaacagcaggagcttcagaaacagacggcactcaacgagctgaaga

SEQ ID NO: 547859 - DNA, 75 bp, synthetic construct
  source 1..75: mol_type = other DNA
aaagtctgaatagtaattcaatgactcagggtgactttttgaaaggtatcggtgtatatacacaaaatggagaac

SEQ ID NO: 547860 - DNA, 75 bp, synthetic construct
  source 1..75: mol_type = other DNA
ggttacaacgccattgcaaaccatacgaacagtgttgctgtaggggctaactctcagaccactcgccccgatgaa

SEQ ID NO: 547861 - DNA, 75 bp, synthetic construct
  source 1..75: mol_type = other DNA
aaaaatttaattgatttttggaaagacctcggcttctcaggaaaagcatatctggatggaaaagtggtaaatgca

SEQ ID NO: 547862 - DNA, 75 bp, synthetic construct
  source 1..75: mol_type = other DNA
ttggccgggaggattctcttgatgcgcagattgcagcactgcaggaaaaaattcagcgagcaaagaaatttccgt

SEQ ID NO: 547863 - DNA, 75 bp, synthetic construct
  source 1..75: mol_type = other DNA
aaattgcgcgtattaatgccatgcagtacgccgatcaggctgtcagggatgcggcgatacaacgtgaaaatgaac

SEQ ID NO: 547864 - DNA, 75 bp, synthetic construct
  source 1..75: mol_type = other DNA
tataacacggatgactacagaaaggccgagcaggcgctgacggagagcctgaaccgacaactgaatgagaatcgc

SEQ ID NO: 547865 - DNA, 75 bp, synthetic construct
  source 1..75: mol_type = other DNA
ttggtcgtgaagattcgctggatgcgcagattgccgctttacaggagaaagtgtcgcgggcgaaaagactcccat

SEQ ID NO: 547866 - DNA, 75 bp, synthetic construct
  source 1..75: mol_type = other DNA
ttggtcgtgaagactcgctggatgaacagatttccgctttacaggagaaagtgtcgcgggcgaaaagactcccct

SEQ ID NO: 547867 - DNA, 75 bp, synthetic construct
  source 1..75: mol_type = other DNA
cagacggcgctgaatgacctgaagaaaaaatccattcagcttgccagccagctggcggaagaggaacgggctctg

SEQ ID NO: 547868 - DNA, 75 bp, synthetic construct
  source 1..75: mol_type = other DNA
ttactggctggccttcagggaagccggactcatgtggtggcaactgaatatcctgttcgccttcgccgttgttat

SEQ ID NO: 547869 - DNA, 75 bp, synthetic construct
  source 1..75: mol_type = other DNA
tctctgcttttggctgggcctacttgctgatgcaaatccccggcggctggctgcttgataagtttggctcgaaaa

SEQ ID NO: 547870 - DNA, 75 bp, synthetic construct
  source 1..75: mol_type = other DNA
gttggggtggctgaccttcgcctggggctgggaacatgtttttaccgttatgggaggaattggttttgtgctaac

SEQ ID NO: 547871 - DNA, 75 bp, synthetic construct
  source 1..75: mol_type = other DNA
gaacataatgattttgagaagcgaaaagagaagcagcaaaactttaaagcggcgctggagaaactgaatgcgctg

SEQ ID NO: 547872 - DNA, 75 bp, synthetic construct
  source 1..75: mol_type = other DNA
caataagatgggtatcgctacgaaattggttaatcgtgttcacagcaaaattgtgattgaggatgaagaactgct

SEQ ID NO: 547873 - DNA, 75 bp, synthetic construct
  source 1..75: mol_type = other DNA
caatctttagctaggcagctcatgatggatgccatcgatcacgaaaatattaatgacgacgacttagaactttta

SEQ ID NO: 547874 - DNA, 75 bp, synthetic construct
  source 1..75: mol_type = other DNA
aaaacagaactccctccgggaatccaatctttatgggattcaaccaaagaaaaactaaagccaagtaccgctgaa

SEQ ID NO: 547875 - DNA, 75 bp, synthetic construct
  source 1..75: mol_type = other DNA
gtccgggccgtggaccaacaatgtcgcgccgggcaaaaacatctccactatgggacgctactttaaggatgcggg

SEQ ID NO: 547876 - DNA, 75 bp, synthetic construct
  source 1..75: mol_type = other DNA
gctcgctcgctgggttaatgagctttatcccgacagacgacgtatatttaccagtaaggccaacccggttgtgcc

SEQ ID NO: 547877 - DNA, 75 bp, synthetic construct
  source 1..75: mol_type = other DNA
tgtgctgtcagatatgtccagaatcatggcgcaggtaactttaatgaaagcggtaaaaggtattgcttccgcgct

SEQ ID NO: 547878 - DNA, 75 bp, synthetic construct
  source 1..75: mol_type = other DNA
tgacatgctatatgctgcccggcaatatgcagataagtgagcacaaaggacagcgtaaattcgagaaaagttatt

SEQ ID NO: 547879 - DNA, 75 bp, synthetic construct
  source 1..75: mol_type = other DNA
aatgacccaaatgaaatgcataacctgatcgatgatatccattttgccgacgttcgcagcaaaatgcatgacgcc

SEQ ID NO: 547880 - DNA, 75 bp, synthetic construct
  source 1..75: mol_type = other DNA
cagcccgcgcgcgccgacgaacctttcctgatggtggtttcgtatgatgagccgcatcacccgttcacctgtccg

SEQ ID NO: 547881 - DNA, 75 bp, synthetic construct
  source 1..75: mol_type = other DNA
atgcaggtagcccagttcaactctcactaccagtatgatcccaagttcgagcgcggaatgtatctgtatgagcat

SEQ ID NO: 547882 - DNA, 75 bp, synthetic construct
  source 1..75: mol_type = other DNA
tcggaaaaacagcagcagctttctgaattgctgctctcaaaaatcaacagtgtgggcagtctgtccggaacctgg

SEQ ID NO: 547883 - DNA, 75 bp, synthetic construct
  source 1..75: mol_type = other DNA
atatccagacgaccggtaaacgactcagcagcctgacgcactggcgatattattttgccttctcctcaccacaga

SEQ ID NO: 547884 - DNA, 75 bp, synthetic construct
  source 1..75: mol_type = other DNA
caaaagtcaagttgcagcttggttgggactctaatatttcacatgagacaaaatcaaaacaagatgggaagcttt

SEQ ID NO: 547885 - DNA, 75 bp, synthetic construct
  source 1..75: mol_type = other DNA
tttctccgcgctgcagcgcgatgtcatccggatggtggcgtttgtggcgatggtgggggaccacatagctactgc

SEQ ID NO: 547886 - DNA, 75 bp, synthetic construct
  source 1..75: mol_type = other DNA
tacatagactgcccgcacaagaagcatggccgaaaattttttcggccctatggctcctgtttgcagaacctatca

SEQ ID NO: 547887 - DNA, 75 bp, synthetic construct
  source 1..75: mol_type = other DNA
gcgcaagtctcttctcgggtatctctacgcctggagagacatgagttcaggtgaaaccgtgaagcaatgggtcag

SEQ ID NO: 547888 - DNA, 75 bp, synthetic construct
  source 1..75: mol_type = other DNA
acaaaaatatcagcagcagatggaacagctggagcgtgacagtaagctgaaagggacttacgggacggaggatta

SEQ ID NO: 547889 - DNA, 75 bp, synthetic construct
  source 1..75: mol_type = other DNA
aaacgcggcgcggtcatgggcggaattggtacgattggtgtgatcgtggcgctgaaatcccgatgttccttggct

SEQ ID NO: 547890 - DNA, 75 bp, synthetic construct
  source 1..75: mol_type = other DNA
cgaacatttcgttgtttgacctcgaaactgcggttgtgattgcgctatccggcgtcatcattttgctgtgcttcg

SEQ ID NO: 547891 - DNA, 75 bp, synthetic construct
  source 1..75: mol_type = other DNA
caggtaaaagcggcattgttgtcatctcaggatttatctgtttattctatgaataccccagggtttattcccggt

SEQ ID NO: 547892 - DNA, 75 bp, synthetic construct
  source 1..75: mol_type = other DNA
ttaaaagagaaacgtaaagcaggagtgctgaccaaaaacacaacgccaatcagtgatgatgaaatggtggaaagc

SEQ ID NO: 547893 - DNA, 75 bp, synthetic construct
  source 1..75: mol_type = other DNA
ttgggccgttggtggagatataagtggatcacttttcatccgtcgttgacacttacacaggctgaggaagagggt

SEQ ID NO: 547894 - DNA, 75 bp, synthetic construct
  source 1..75: mol_type = other DNA
aagaattgccagtgaatccggttaagaaaatcggtattcgccagcaccgcaaattattcgtagatcgtaagattg

SEQ ID NO: 547895 - DNA, 75 bp, synthetic construct
  source 1..75: mol_type = other DNA
aacagcaggcgcaaaacaagttaaaccggaaaaagaagactcctaacgcttggggtgtaattaagtggcttatta

SEQ ID NO: 547896 - DNA, 75 bp, synthetic construct
  source 1..75: mol_type = other DNA
gtgctgttcaatctcatccttatgagggcgaaccatagtgttggagcaggcatatcgcttgcacactatgggcat

SEQ ID NO: 547897 - DNA, 75 bp, synthetic construct
  source 1..75: mol_type = other DNA
ttattatcaaccacttgcggctgaatctctgcgtggtgtgactgacttcctaccagtgattaaggatatcgcaca

SEQ ID NO: 547898 - DNA, 75 bp, synthetic construct
  source 1..75: mol_type = other DNA
atcgagaatgctttctggaagtgggcgcagaatgctaaacgcttctctcgtaacggtcgctttaacttccgtgaa

SEQ ID NO: 547899 - DNA, 75 bp, synthetic construct
  source 1..75: mol_type = other DNA
gtagcatggcgttcatcgagcgtccgaaagattctggtgacgattttgatactggtgaagatgatgaacaatatc

SEQ ID NO: 547900 - DNA, 75 bp, synthetic construct
  source 1..75: mol_type = other DNA
ctctcgtgaagcggtcgatcgtgccaaccggattctggtgaataacctgccgcaaggcgttgagaagattagcgt

SEQ ID NO: 547901 - DNA, 75 bp, synthetic construct
  source 1..75: mol_type = other DNA
aaaagagctggcaggctgaacgctacgcgcgcggaaccctgcgcaaaatattcgaacgtctggaccgcaccgacg

SEQ ID NO: 547902 - DNA, 75 bp, synthetic construct
  source 1..75: mol_type = other DNA
aaaattactgaacatcctaaaaagggagatctcattttctatcctaattcccaagaagatggtgaacctgaaaac

SEQ ID NO: 547903 - DNA, 75 bp, synthetic construct
  source 1..75: mol_type = other DNA
acccttattcatcgtgggccactatcggggccaacattattttcctgtctgtgctggtcgccgtcagaggcaacg

SEQ ID NO: 547904 - DNA, 75 bp, synthetic construct
  source 1..75: mol_type = other DNA
caatcaacgcgctgctttgcgctggggtagtgttgaccctgatgttttaccgtcgcggtgattcccgacatcgac

SEQ ID NO: 547905 - DNA, 75 bp, synthetic construct
  source 1..75: mol_type = other DNA
ccagcctgcgcaaacagctggccggtacagcgcctggtcaatcagagccactgcaacaacaacgtgttgaagctg

SEQ ID NO: 547906 - DNA, 75 bp, synthetic construct
  source 1..75: mol_type = other DNA
cgacagccaataaacatcgtcttgccgctggtaaggccgcgcgtacagttaaagctaatgcggtgctggatgagg

SEQ ID NO: 547907 - DNA, 75 bp, synthetic construct
  source 1..75: mol_type = other DNA
ttaccgttatttacagcatcttagtctgtgttttcggctccatttactgccttttcagcccgcgaaatccaaagc

SEQ ID NO: 547908 - DNA, 75 bp, synthetic construct
  source 1..75: mol_type = other DNA
tttgcagcatggctacaaactgatgaagcaacgcctgcattcaaaaaatatggctggactaggaaaggagtttga

SEQ ID NO: 547909 - DNA, 75 bp, synthetic construct
  source 1..75: mol_type = other DNA
atggaactaaaaatctggcaggctatcgacgttgttgataacgaattaaccatgtttgccactgatggaaagcgc

SEQ ID NO: 547910 - DNA, 75 bp, synthetic construct
  source 1..75: mol_type = other DNA
tatggtccgcaggctaaatggaatgaagaagccaaagagaaggctgatatactgtttggtgcatcggaacagtct

SEQ ID NO: 547911 - DNA, 75 bp, synthetic construct
  source 1..75: mol_type = other DNA
ctataatttttacatcttgtgcacaagcagatattcatttatatgggccaggaggtcctcatactgcacttcagg

SEQ ID NO: 547912 - DNA, 75 bp, synthetic construct
  source 1..75: mol_type = other DNA
cacttatccttacatcttatgcacatgctgatatcaatctgtatggcccaggagggccacacaccgcacttcagg

SEQ ID NO: 547913 - DNA, 75 bp, synthetic construct
  source 1..75: mol_type = other DNA
gctcaacgtcttctcggacataaatcagattcaatggcggcgcggtatagggacagccgagggagagaatgggac

SEQ ID NO: 547914 - DNA, 75 bp, synthetic construct
  source 1..75: mol_type = other DNA
cgacagccaataaacatcgtcttgccgcaggtaaggccgcgcgtacagtgaaagctaatgcggtgctggatgaga

SEQ ID NO: 547915 - DNA, 75 bp, synthetic construct
  source 1..75: mol_type = other DNA
acctggccgttggataaagacaacttcgagtaccactatccgcgtggtttcgatgattgcttcactattgaaccg

SEQ ID NO: 547916 - DNA, 75 bp, synthetic construct
  source 1..75: mol_type = other DNA
tcgttacagggcagagagtcggcgatttgtgcagaatgaaatggtcagacataaacgacaaccatcttcacattg

SEQ ID NO: 547917 - DNA, 75 bp, synthetic construct
  source 1..75: mol_type = other DNA
aaacaggggctaagctcgccattccgctgacgctaacgattgacgcgctcaatatctcattggctgatacactac

SEQ ID NO: 547918 - DNA, 75 bp, synthetic construct
  source 1..75: mol_type = other DNA
taattttctaccctaaaagtcaaggagatgataagcctgaaaacatcctgaaaattgtcaaagaatggcggcgtt

SEQ ID NO: 547919 - DNA, 75 bp, synthetic construct
  source 1..75: mol_type = other DNA
catcgaccagggcgcatccggtgtcgatatgggacgtaacatcttccagtccgaacaccctgtcgccatgatgaa

SEQ ID NO: 547920 - DNA, 75 bp, synthetic construct
  source 1..75: mol_type = other DNA
gttaagcaatgaaacggttgcgctttctattgatgacgcggttcgcctcaacagttgtgctgtagcggcacaggt

SEQ ID NO: 547921 - DNA, 75 bp, synthetic construct
  source 1..75: mol_type = other DNA
tgatcgatgccggtatcaaagtcggcatgccgacgatggcagtaaccggcgtggggaaagacatggtgcgcgatc

SEQ ID NO: 547922 - DNA, 75 bp, synthetic construct
  source 1..75: mol_type = other DNA
gttcgactttccacgcccgcctgccgtccttggcgacctggcgcgcgtcatcggggacaaagagcttcactacag

SEQ ID NO: 547923 - DNA, 75 bp, synthetic construct
  source 1..75: mol_type = other DNA
gcgcagcgtggtgccgcctgccactaacaagccggtggtactgcgcgcctcgggggccaactctattctcaccga

SEQ ID NO: 547924 - DNA, 75 bp, synthetic construct
  source 1..75: mol_type = other DNA
atggtaaagattttcgcaccgatcaaccgcaacaaaatatcccttttatcctgaaaggttgcggtgcactggatt

SEQ ID NO: 547925 - DNA, 75 bp, synthetic construct
  source 1..75: mol_type = other DNA
ccaaaataatttgcaatattgcttgactcgcttttttgtcatggcgtatcgtttgcccgcacctcataaaacagg

SEQ ID NO: 547926 - DNA, 75 bp, synthetic construct
  source 1..75: mol_type = other DNA
gatgtgatggccgcgcagggcatgacacagaattgggctgagatggggttttctgcgttccttgggaaaatgtga

SEQ ID NO: 547927 - DNA, 75 bp, synthetic construct
  source 1..75: mol_type = other DNA
gaattgggctgagatggggttttctgcgttccttgggaaaatgggcattagtatgaatgacagagagcgggcaac

SEQ ID NO: 547928 - DNA, 75 bp, synthetic construct
  source 1..75: mol_type = other DNA
ggctgcccattgtcgttcgataatggaacaaaaaatcgctgagctcgataaagaagtcgcagagcgcgaagccgc

SEQ ID NO: 547929 - DNA, 75 bp, synthetic construct
  source 1..75: mol_type = other DNA
gaagcgcgcgccctgcttccggcatcccgtctggtctttgttgcccgtattcgtatccgggaggcgtgcaatgtt

SEQ ID NO: 547930 - DNA, 75 bp, synthetic construct
  source 1..75: mol_type = other DNA
gaagcgcgcgccctgcttcctgcatcccgcctggtctttgtcgcccgtatccgtgtccgggaggcgtgccatgtt

SEQ ID NO: 547931 - DNA, 75 bp, synthetic construct
  source 1..75: mol_type = other DNA
cagacgccgctgaatcagctctcaccggagcaattaaaaaccattctcaccctgttgcaggaagggaagatggtt

SEQ ID NO: 547932 - DNA, 75 bp, synthetic construct
  source 1..75: mol_type = other DNA
ttggcgaggggttacgtctgaccagttcccgcgtcaccgaggacggtatggggctgaatatttacgcgggcgata

SEQ ID NO: 547933 - DNA, 75 bp, synthetic construct
  source 1..75: mol_type = other DNA
agcaaatcacagcggcggatgccaacctgctgaccggttacggtatcaacgtttatcaggcgctggctgatgcaa

SEQ ID NO: 547934 - DNA, 75 bp, synthetic construct
  source 1..75: mol_type = other DNA
ttacgggaacggtcggaaagctggctgatgccgggcgtgctgttggcgggtggttttccggtatcggaaacaaac

SEQ ID NO: 547935 - DNA, 75 bp, synthetic construct
  source 1..75: mol_type = other DNA
attagtagatcattttattgaaattacacagcatccgtcagggagcgatctaattttctaccctaaaagtcaagg

SEQ ID NO: 547936 - DNA, 75 bp, synthetic construct
  source 1..75: mol_type = other DNA
cagaatacgacatatcattatctgacgatgaaaactataacgatgactattatcgtgagcgcccgtgcccgggag

SEQ ID NO: 547937 - DNA, 75 bp, synthetic construct
  source 1..75: mol_type = other DNA
aggcgcacaggcggctgccatgaactcctgggacgggatgatggcccagatggagggcaacctgcttgagtttcg

SEQ ID NO: 547938 - DNA, 75 bp, synthetic construct
  source 1..75: mol_type = other DNA
cagagcaattaaaaaccgtcctgactctgctacaggaagggaagatggttatcccgcagccgcaacagcgccagg

SEQ ID NO: 547939 - DNA, 75 bp, synthetic construct
  source 1..75: mol_type = other DNA
cttaaccagctctatcagcggcgggtgaaaggcattgaaccgcgtaatattcaaccgctgttcaatccctttacc

SEQ ID NO: 547940 - DNA, 75 bp, synthetic construct
  source 1..75: mol_type = other DNA
cagcaacacactccgacgctggagtcactccagatggcgctaaagcagccactggatgcaagcgagttgacggta

SEQ ID NO: 547941 - DNA, 75 bp, synthetic construct
  source 1..75: mol_type = other DNA
tttgtcgccgaacttaaggcagcccgcattgagcagactggtatcgatgccgcctatgttctgcgacgcttggtt

SEQ ID NO: 547942 - DNA, 75 bp, synthetic construct
  source 1..75: mol_type = other DNA
tgttcaggcgtttaaagacaacgtcaaaaatgaagtgactggtgctgacggaggaccagtcagaacagaaattac

SEQ ID NO: 547943 - DNA, 75 bp, synthetic construct
  source 1..75: mol_type = other DNA
atgatcttgttggtattaatgcagaatatgtacttaatcgccttattgaaatcgaccagatggatgtgctcgaca

SEQ ID NO: 547944 - DNA, 75 bp, synthetic construct
  source 1..75: mol_type = other DNA
aaggttattacgagtgtcagcagggatgtgtcaacgctgtggccagttgatcagagcgttgccgagttgccggat

SEQ ID NO: 547945 - DNA, 75 bp, synthetic construct
  source 1..75: mol_type = other DNA
atggtctgctttaacccgtcaccgtcaccaccacatcatacctgttttcgcttttatcttctgtcttcagaggta

SEQ ID NO: 547946 - DNA, 75 bp, synthetic construct
  source 1..75: mol_type = other DNA
cttttttgataaacgaaagatatcaagaaatgacaatagaagcaatagaatttgcaactgccaaattaaatcttg

SEQ ID NO: 547947 - DNA, 75 bp, synthetic construct
  source 1..75: mol_type = other DNA
taatttcctataacctcgccactcgccctcaaccttcaatggtgcagactatgcttacggatgcgctgaaacagc

SEQ ID NO: 547948 - DNA, 75 bp, synthetic construct
  source 1..75: mol_type = other DNA
attagatgctttaaatttaaatgatatcatcgatcaatggattgacgaggggctgttgccgcccctgatccatac

SEQ ID NO: 547949 - DNA, 75 bp, synthetic construct
  source 1..75: mol_type = other DNA
acgctctgcggcgcagcggcgctatttatcgcagcattaatctgcgggatgcaaatattcaaattgcatacgaat

SEQ ID NO: 547950 - DNA, 75 bp, synthetic construct
  source 1..75: mol_type = other DNA
agtaaaggtggattactgcatcactttccgaacaagcaggcgctgatctacgccttgtttgcccggttgttggca

SEQ ID NO: 547951 - DNA, 75 bp, synthetic construct
  source 1..75: mol_type = other DNA
agaaaagcacgcgcaatacccgggaaagactgaaagatattgcccaatatgtcttttcatctggaagcgattctc

SEQ ID NO: 547952 - DNA, 75 bp, synthetic construct
  source 1..75: mol_type = other DNA
tggctgacgaaggaagagcgtaaggtcggtgggcgtaatgtaagcaatatctatcggcttaatgtggaaaaactc

SEQ ID NO: 547953 - DNA, 75 bp, synthetic construct
  source 1..75: mol_type = other DNA
agaggacgtagctattctctgccatctggatccaagtatcccgtatatccatcctgatttagcgcacacagaaga

SEQ ID NO: 547954 - DNA, 75 bp, synthetic construct
  source 1..75: mol_type = other DNA
cttgtttatgcttgaaggcgcaattatcggtattcatgaagcagcgctcccggtggcacgccgccaggagcttgc

SEQ ID NO: 547955 - DNA, 75 bp, synthetic construct
  source 1..75: mol_type = other DNA
cgggcttgtgaacaaagcgtacagtactgtgtaaaacatccgccagtctggctgacatataaaaagtgcggccga

SEQ ID NO: 547956 - DNA, 75 bp, synthetic construct
  source 1..75: mol_type = other DNA
atcggtatccatgaagcagcgctcccggtggcgcgccgccaggagcttgcagaatgggctgattctattacaccg

SEQ ID NO: 547957 - DNA, 75 bp, synthetic construct
  source 1..75: mol_type = other DNA
tggcgacaacatgaatgatattgcgactgatattgataacttaagaaaatccagacaggccatcttttattccga

SEQ ID NO: 547958 - DNA, 75 bp, synthetic construct
  source 1..75: mol_type = other DNA
gtgttttgcgccgatcccttcccacataaactgattcgtctctgttttgccaagaaggaatcgacgttgctggca

SEQ ID NO: 547959 - DNA, 75 bp, synthetic construct
  source 1..75: mol_type = other DNA
cgggcatgcacattcttctcaagctggcctcgctggtagtgatcctcgcgggcattcacgcagcggcagatatca

SEQ ID NO: 547960 - DNA, 75 bp, synthetic construct
  source 1..75: mol_type = other DNA
gcaaataataaaccgtcaagtgatatggcgaacagaatcaaaccggttgtaagcgatttacaaatcgatatatac

SEQ ID NO: 547961 - DNA, 75 bp, synthetic construct
  source 1..75: mol_type = other DNA
acgcgcccatgaccggcgtgcaggccttgcgcgaggcgattgctcagaaaacggaacgtctgtatggctatcaac

SEQ ID NO: 547962 - DNA, 75 bp, synthetic construct
  source 1..75: mol_type = other DNA
tgacatcaccgtaacagcaggagcgacggaggcgttatatgcggcgattaccgcgttggtaggtagtggcgatga

SEQ ID NO: 547963 - DNA, 75 bp, synthetic construct
  source 1..75: mol_type = other DNA
gcacttgccgatatgctacgcgcagaaccagaacattatcttgcgttacctgaattttatcgccagaagcgcgat

SEQ ID NO: 547964 - DNA, 75 bp, synthetic construct
  source 1..75: mol_type = other DNA
cctatagccgctattttacgctgagtacggaaagtatcagcgacgaacaatcccagggatggcaaagccatattt

SEQ ID NO: 547965 - DNA, 75 bp, synthetic construct
  source 1..75: mol_type = other DNA
tcgggtcttattacaaaaaagcccagggaaggctggctcaccacagatgcatttctttactgggcgcagcaggat

SEQ ID NO: 547966 - DNA, 75 bp, synthetic construct
  source 1..75: mol_type = other DNA
atggcaaatcaattatataaccaatgtcgggtttattgcgcgccctggcgattagatgctctaaacttaaatgat

SEQ ID NO: 547967 - DNA, 75 bp, synthetic construct
  source 1..75: mol_type = other DNA
cgacggtgcccgccagatcctagatgagctcaacgttaagcagcaggccttcctgcagaaaaagcaggcgctgac

SEQ ID NO: 547968 - DNA, 75 bp, synthetic construct
  source 1..75: mol_type = other DNA
gggcttcataacatgccaccgctgatgctggccggtttgcgctttatgctggttgctttcccggccatcatcttt

SEQ ID NO: 547969 - DNA, 75 bp, synthetic construct
  source 1..75: mol_type = other DNA
cgggaatcgatcgcgcaaacaccgatgagatcatgcaatctatcgccgactatatcgacgctgatgattcaccac

SEQ ID NO: 547970 - DNA, 75 bp, synthetic construct
  source 1..75: mol_type = other DNA
tgggatgagctttccctgcgcttatcaccgtccgtcagcacgtacaccgaaaaacgcgaagacccgtacttcaaa

SEQ ID NO: 547971 - DNA, 75 bp, synthetic construct
  source 1..75: mol_type = other DNA
aagccgcagacttgattgttaaaggtatggaaggcgcaatcaatgcgaagaccgtaacctatgatttcgaacgtc

SEQ ID NO: 547972 - DNA, 75 bp, synthetic construct
  source 1..75: mol_type = other DNA
atgggttggaccgaagccgcagacctgattgttaaaggtatggaaggcgcaatcaatgcgaagaccgtaacctat

SEQ ID NO: 547973 - DNA, 75 bp, synthetic construct
  source 1..75: mol_type = other DNA
tcaggcgttactggagaaaagtcttacagaggcgctgagccgattgtatgaactgtgggtggaagaatataagga

SEQ ID NO: 547974 - DNA, 75 bp, synthetic construct
  source 1..75: mol_type = other DNA
tgactttctgaaactgaaggccgggctggaacttgcgcaacagaaaattgccgagctgacccgggctgaaagcag

SEQ ID NO: 547975 - DNA, 75 bp, synthetic construct
  source 1..75: mol_type = other DNA
caataccggcgcgggatttgaatacgacctgattgaaaaactggtcggggagcgtctggccgccgtgcggaacaa

SEQ ID NO: 547976 - DNA, 75 bp, synthetic construct
  source 1..75: mol_type = other DNA
gacttcgaacgtctgatggaaggcgctaagctgctgaaatgttcagagtttggtgatgcgatcatcaagaaaatg

SEQ ID NO: 547977 - DNA, 75 bp, synthetic construct
  source 1..75: mol_type = other DNA
ggatgccgaaacgcagcagtacattaccgacaacctgcctaagactcggttgcagtacatcatgcaaactcaagg

SEQ ID NO: 547978 - DNA, 75 bp, synthetic construct
  source 1..75: mol_type = other DNA
atacccaaattttgctgggtcattcgaatcaaaaaatgaccgatatttacaacgatgtacgcggtaaagagtgga

SEQ ID NO: 547979 - DNA, 75 bp, synthetic construct
  source 1..75: mol_type = other DNA
caggaaagtactgattgatgttttccgggaggcccagcaaacgggcgatgtcccgccaggctttaaccctgcaga

SEQ ID NO: 547980 - DNA, 75 bp, synthetic construct
  source 1..75: mol_type = other DNA
ctatgaaaaaaatgctgtagcaggctggattgcagcttcttgtgctgctttggccgtagagcaagtcagcactat

SEQ ID NO: 547981 - DNA, 75 bp, synthetic construct
  source 1..75: mol_type = other DNA
gtgattaaatttctctctgcattaattcttctactggtcacgacggcggctcaggctgagcgtattcgcgatctc

SEQ ID NO: 547982 - DNA, 75 bp, synthetic construct
  source 1..75: mol_type = other DNA
ggcgcaaaaatgcgttgtgtgattgctactcagacctttgctgactttgcagctcgtacaggcagtgaagcaaag

SEQ ID NO: 547983 - DNA, 75 bp, synthetic construct
  source 1..75: mol_type = other DNA
cggtggaggagtggcgggaatggcaacttgctgaaggacgaaaacgcagcgaggagattaaccgccagaatcgcc

SEQ ID NO: 547984 - DNA, 75 bp, synthetic construct
  source 1..75: mol_type = other DNA
atgtgatcacctcactgaacggtaaaccgatcagcagctttgccgcgctgcgtgcccaggttggcaccatgccgg

SEQ ID NO: 547985 - DNA, 75 bp, synthetic construct
  source 1..75: mol_type = other DNA
tattatggggactgagctgaactccgatctggcgaaagcgatgaaagttgacgcccagcgcggtgctttcgtaag

SEQ ID NO: 547986 - DNA, 75 bp, synthetic construct
  source 1..75: mol_type = other DNA
accgatgctcgaaaaggtgatgccttcggtggtcagtattaacgtagaaggtagcacaaccgtcaatacgccgcg

SEQ ID NO: 547987 - DNA, 75 bp, synthetic construct
  source 1..75: mol_type = other DNA
aggattttttaatccggcaccctgacgcagttgtgtttagcacgaaaaaacgccagtggggtagccatgaggatt

SEQ ID NO: 547988 - DNA, 75 bp, synthetic construct
  source 1..75: mol_type = other DNA
tctgggggcgaatcgtgagtctttacgagcaggccgccagcgatgatggcgagatttcgcgaccgaaagaaccca

SEQ ID NO: 547989 - DNA, 75 bp, synthetic construct
  source 1..75: mol_type = other DNA
atgattgaccccgatccgtcagtattaaaacctgatccgtcagataaaagatcttcttgtccggacgtttcgcaa

SEQ ID NO: 547990 - DNA, 75 bp, synthetic construct
  source 1..75: mol_type = other DNA
tattcgactgtggcgtggtcccgcgcagcgttgtgtgaatcatatttctgaaccggacaccgaaattccaccagg

SEQ ID NO: 547991 - DNA, 75 bp, synthetic construct
  source 1..75: mol_type = other DNA
cattggttcaaaacgacccaatgtcatcgggtcaaaatggcctgatgatcttacagagaatacaacagagattac

SEQ ID NO: 547992 - DNA, 75 bp, synthetic construct
  source 1..75: mol_type = other DNA
tgaatcacggtaaaccggccgatgcagaactggaaatgatggtccgactcatccagacacggaaccgggaacgtg

SEQ ID NO: 547993 - DNA, 75 bp, synthetic construct
  source 1..75: mol_type = other DNA
aggacggttctccgttccagagctctccgttctgccagggcggtcaaggcggtaatggcgggagccaacaacaga

SEQ ID NO: 547994 - DNA, 75 bp, synthetic construct
  source 1..75: mol_type = other DNA
tgccgaaaactacgaaaacttcatccagaccgatgcagcgatcaaccgtggtaactccggtggtgcgctggttaa

SEQ ID NO: 547995 - DNA, 75 bp, synthetic construct
  source 1..75: mol_type = other DNA
gcaatatctaccgccttaatgtggaaaaactcgaagcagcagcagcggcggcgcgtgaggcatataaaccgaaaa

SEQ ID NO: 547996 - DNA, 75 bp, synthetic construct
  source 1..75: mol_type = other DNA
ctttacctggggctatgcggacgtagcaaaaaagcagcccgtcacacagcaaacgttgtttgagttaggttctgt

SEQ ID NO: 547997 - DNA, 75 bp, synthetic construct
  source 1..75: mol_type = other DNA
caggaacacaacgtctgtatgccaactccagtatcggtttattcggctcgctagctgtgaagccgtctggtttga

SEQ ID NO: 547998 - DNA, 75 bp, synthetic construct
  source 1..75: mol_type = other DNA
ctacgtttctatcaaaactggcagcctgaatgggcgccaggaacacaacgtttgtacgcgaattccagtattggt

SEQ ID NO: 547999 - DNA, 75 bp, synthetic construct
  source 1..75: mol_type = other DNA
agctcgcaaagtaaccggatgggctatcgcttacaggggcaaattttaaaacgcaccaccgatcgcgaactgtta

SEQ ID NO: 548000 - DNA, 75 bp, synthetic construct
  source 1..75: mol_type = other DNA
acgcttaaacgcccgcagcacgggatgcgcagttatctggcggtcgcgggtggtattgatgttccgccggtaatg

SEQ ID NO: 548001 - DNA, 75 bp, synthetic construct
  source 1..75: mol_type = other DNA
gttaccgttgtggttgctcaatcagcttgggcgaccgcgtgatgtaccggtaactaacgtggtggcactgctggt

SEQ ID NO: 548002 - DNA, 75 bp, synthetic construct
  source 1..75: mol_type = other DNA
atggcggtggcggtaatttatcagggtaaaccttattactttacctggggctatgcggacatcgccaaaaagcag

SEQ ID NO: 548003 - DNA, 75 bp, synthetic construct
  source 1..75: mol_type = other DNA
gccgacctgaaaaaagtaactttggtcagccagggctatgaagcggaagtggctgaacaaagcagtgaattaaaa

SEQ ID NO: 548004 - DNA, 75 bp, synthetic construct
  source 1..75: mol_type = other DNA
tggttttgcttgcggtcaggattgcattacaattttttcagaaaagcagagagtgccagaacaaaagggctgagt

SEQ ID NO: 548005 - DNA, 75 bp, synthetic construct
  source 1..75: mol_type = other DNA
tgattaccgcctcttgctccgcacttgccgccccccaacagctcaacgatattgtgcatcgcacaatgactccgc

SEQ ID NO: 548006 - DNA, 75 bp, synthetic construct
  source 1..75: mol_type = other DNA
ccttattaattaccgcctcttgctccacatttgctgcccctcaacaaatcaacgatattgtgcatcgcacaatta

SEQ ID NO: 548007 - DNA, 75 bp, synthetic construct
  source 1..75: mol_type = other DNA
gcagcccgtcacacagcaaacgttgtttgagttaggctcggtcagcaaaacatttacgggcgtacttggtggcga

SEQ ID NO: 548008 - DNA, 75 bp, synthetic construct
  source 1..75: mol_type = other DNA
cactggaagaggcactgaaagcacggcaagatcaacaacgttatttcgaacaattagcgtggcggctgcacaatg

SEQ ID NO: 548009 - DNA, 75 bp, synthetic construct
  source 1..75: mol_type = other DNA
atgcgtatttatacccctgaggagtgtgaaagactggatgccagctgtcgtggttttctgcttttccttgagcaa

SEQ ID NO: 548010 - DNA, 75 bp, synthetic construct
  source 1..75: mol_type = other DNA
agcaagcgttcaaagcgctatgtacagaactcaatgctcaaggcagtattaatgtcgtcaactattcccaatatg

SEQ ID NO: 548011 - DNA, 75 bp, synthetic construct
  source 1..75: mol_type = other DNA
gcgtctgcagatgcggcaaatattgagcaagcgttcaaagcgctatgtacagaactcaatgctcaaggcagtatt

SEQ ID NO: 548012 - DNA, 75 bp, synthetic construct
  source 1..75: mol_type = other DNA
caggctgaagctgcgtttagaaaccttgcaactgatcagttagtcactgatggtattaaagccttgcaaaattca

SEQ ID NO: 548013 - DNA, 75 bp, synthetic construct
  source 1..75: mol_type = other DNA
cgcgctggataacgcagagttcgaactggatgatctgaaatgggtgatcctgatggtgttgttcaatattccggg

SEQ ID NO: 548014 - DNA, 75 bp, synthetic construct
  source 1..75: mol_type = other DNA
tgccctgctttggctggaaaagcttgcggattatcaggaaggactggcagaaccgatgcaactggcctctgatcc

SEQ ID NO: 548015 - DNA, 75 bp, synthetic construct
  source 1..75: mol_type = other DNA
ctgcggcgcggcggcgttgtttattgctgcgcttatcagcacagtgcaattatttaagctacaagtggtcacttc

SEQ ID NO: 548016 - DNA, 75 bp, synthetic construct
  source 1..75: mol_type = other DNA
tgcctttgctcgtccatcagaagagttagtggacatacaaaaatatatttgttcgctgcatatgccagagtgcta

SEQ ID NO: 548017 - DNA, 75 bp, synthetic construct
  source 1..75: mol_type = other DNA
tgctccatgaaatagaaaatagtgatccaatgatcttcaactggaatgtattgttttatgtttcattagaagagt

SEQ ID NO: 548018 - DNA, 75 bp, synthetic construct
  source 1..75: mol_type = other DNA
cgcgcaccatatgaacattgcggagctggtgtcgcgcacgcaacctgctgaaaatgaacgggctgcacagttgca

SEQ ID NO: 548019 - DNA, 75 bp, synthetic construct
  source 1..75: mol_type = other DNA
gaactggaacggatggaggacctgtctggttcttgttacttggccgagtaccaggcgaaccgaaaagggaaatgg

SEQ ID NO: 548020 - DNA, 75 bp, synthetic construct
  source 1..75: mol_type = other DNA
tggttgccgccatttattctggtgttattgattcgcgtcctggcgggtgtcgccagcgccggaatgctgattttt

SEQ ID NO: 548021 - DNA, 75 bp, synthetic construct
  source 1..75: mol_type = other DNA
ttatttgcaggctatgcaggacaatgcacgggcggtgaatcaaacacagcagcgtgatgcttcccgatcccgcgc

SEQ ID NO: 548022 - DNA, 75 bp, synthetic construct
  source 1..75: mol_type = other DNA
ggttgccagtaaaggcttaagcatcgccctccccctttccgttgccggtttgagtagcgccacgctggtgaatga

SEQ ID NO: 548023 - DNA, 75 bp, synthetic construct
  source 1..75: mol_type = other DNA
gattgtaatgtcgaaagtgcgcgttttatcgctacacgtattatcagcgccgtgaatgactatcactttatctgg

SEQ ID NO: 548024 - DNA, 75 bp, synthetic construct
  source 1..75: mol_type = other DNA
cagcaggccgcaaaagcggttgccagtaaaggcataagcatcgccctccccctttccgttgccggtttgagtagc

SEQ ID NO: 548025 - DNA, 75 bp, synthetic construct
  source 1..75: mol_type = other DNA
atatccgcgccctcgccaaccgggtactgaataaagaaggcgaagtcgaacgtctgctcggcattaatatggata

SEQ ID NO: 548026 - DNA, 75 bp, synthetic construct
  source 1..75: mol_type = other DNA
aatattccgccatcggcatggcattagtgggcaccgaggggcaatggctgcaatccaacaaagctctatgccagt

SEQ ID NO: 548027 - DNA, 75 bp, synthetic construct
  source 1..75: mol_type = other DNA
attgccagtaaaggcttaagcatcgccctccccctttccgttgccggtttgagtagcgccacgctggtgaatgaa

SEQ ID NO: 548028 - DNA, 75 bp, synthetic construct
  source 1..75: mol_type = other DNA
ccgccaacatcatgacgatggtgatgtatgcctttcgtgcggaacgcaaacacatttccgaaagcgaaacccgct

SEQ ID NO: 548029 - DNA, 75 bp, synthetic construct
  source 1..75: mol_type = other DNA
aatatcgccgcatccatcctgcttttttccaccagctcgctgaacatgacctggacgaccatcaatattgttgaa

SEQ ID NO: 548030 - DNA, 75 bp, synthetic construct
  source 1..75: mol_type = other DNA
ggaaaaaagcccgctaccgccgcagttgttgcatttgattattcctgctgaagccatcatcgatcacgcacaggc

SEQ ID NO: 548031 - DNA, 75 bp, synthetic construct
  source 1..75: mol_type = other DNA
aatattccgctatcggcatggcgttagtgggcaccgagggacaatggctgcaatccaacaaagcgctctgccagt

SEQ ID NO: 548032 - DNA, 75 bp, synthetic construct
  source 1..75: mol_type = other DNA
cgccaacttagctacagcgcctcccatgatgcactgacgcatctcgccaaccgcgccagtttgagaaacaactgc

SEQ ID NO: 548033 - DNA, 75 bp, synthetic construct
  source 1..75: mol_type = other DNA
ggcgagatttttgatgaacaaacatttcgtcgtagcttcagtgatccggcgcttaaccatgctcttgaccgccgg

SEQ ID NO: 548034 - DNA, 75 bp, synthetic construct
  source 1..75: mol_type = other DNA
ttgcgcgccagtgacgtgctggcgcggctcggcggtgatgaatttggtcttttgctacctgactgtaatgttgaa

SEQ ID NO: 548035 - DNA, 75 bp, synthetic construct
  source 1..75: mol_type = other DNA
aaaggtgaggaaacgggcaaaacctatgccgtctggctgcatgattttaacgttcgctggcgcgtcaccgacgca

SEQ ID NO: 548036 - DNA, 75 bp, synthetic construct
  source 1..75: mol_type = other DNA
agaaaaattcgccgttccgcgccagcctgggctggtaaaaagcgccaacggagaactgcaccttattgctcctta

SEQ ID NO: 548037 - DNA, 75 bp, synthetic construct
  source 1..75: mol_type = other DNA
tgtacacacactagtagtgtttgctgatgaatggtttatcaatccgcagcagacaaaccatattgaaagtttcct

SEQ ID NO: 548038 - DNA, 75 bp, synthetic construct
  source 1..75: mol_type = other DNA
ctggaagcgtttagccatttatggatcctttttgtctttcatcaaacaatggaaggcggctggcgtccgacagtg

SEQ ID NO: 548039 - DNA, 75 bp, synthetic construct
  source 1..75: mol_type = other DNA
taggcgttattcgctcgccctataaagaaaagttcgccgttccgcgccagccaggtctggtaaaaagcgccaacg

SEQ ID NO: 548040 - DNA, 75 bp, synthetic construct
  source 1..75: mol_type = other DNA
atgagcagtttccagttcgagcaaataggtgttattcgctcgccctataaagaaaaattcgccgttccgcgccag

SEQ ID NO: 548041 - DNA, 75 bp, synthetic construct
  source 1..75: mol_type = other DNA
ttatcagtgccgtgaatgactatcactttatatgggaaggccgtgtgcatcgggtaggtgccagtgccgggatta

SEQ ID NO: 548042 - DNA, 75 bp, synthetic construct
  source 1..75: mol_type = other DNA
tggtggatgaactgcttgaacaactggaaaatagcccactacaaccacggttattacatctgattattccggcag

SEQ ID NO: 548043 - DNA, 75 bp, synthetic construct
  source 1..75: mol_type = other DNA
ctttatgtgggaaggccgtgtgcatcgggttggagccagcgcaggaattacactgatcgatgacagcaatcatca

SEQ ID NO: 548044 - DNA, 75 bp, synthetic construct
  source 1..75: mol_type = other DNA
gtgaatgcaggcgggaagcgcagtcagggactggttaaccgccgcagcgattttcgcgcctggtgtctgcgggat

SEQ ID NO: 548045 - DNA, 75 bp, synthetic construct
  source 1..75: mol_type = other DNA
caactcatggagcgcatcacgctggctaacgaggcgggcggaattgggatttgggagtgggaactcaagcccaat

SEQ ID NO: 548046 - DNA, 75 bp, synthetic construct
  source 1..75: mol_type = other DNA
gcgcgccctcacttttcagcaactgacctggccggaagatctgaataaagatctacaacacgttgaacagttggt

SEQ ID NO: 548047 - DNA, 75 bp, synthetic construct
  source 1..75: mol_type = other DNA
gcggcaaaatcatcagtaaaccggtcatgatttttggaccgttaatcgtcatctgtatgctcctgattgtgaagc

SEQ ID NO: 548048 - DNA, 75 bp, synthetic construct
  source 1..75: mol_type = other DNA
ccattgttgcgttatccgtaatctggggtggtggcacatggtacacaggtacgcaaattcagccaggtgtcgaaa

SEQ ID NO: 548049 - DNA, 75 bp, synthetic construct
  source 1..75: mol_type = other DNA
cgaaaaagttgcgtttgatacgcaagacggaagggctaactcaaaagcaatttgctgatattacagggttatctc

SEQ ID NO: 548050 - DNA, 75 bp, synthetic construct
  source 1..75: mol_type = other DNA
gtttgcaacgcattcatccgggcatcaaggcacgcgctatttcctccagccaggaaaacgccagcaccgaatcga

SEQ ID NO: 548051 - DNA, 75 bp, synthetic construct
  source 1..75: mol_type = other DNA
ccgctgtggcagagctatgaaatgttgccgctgttctcgctgctgacggcgttcatcatgggcttctcgattgtc

SEQ ID NO: 548052 - DNA, 75 bp, synthetic construct
  source 1..75: mol_type = other DNA
tggcggctgggcgctggcgtgggcggtatacgtctttaaccgtgggcaataccatccgctggtgcgtccggcgct

SEQ ID NO: 548053 - DNA, 75 bp, synthetic construct
  source 1..75: mol_type = other DNA
gcattgtttccgcattaggccgcagcgggttgaatcttgaaggtctggaaaactttatccagacagatgcttcca

SEQ ID NO: 548054 - DNA, 75 bp, synthetic construct
  source 1..75: mol_type = other DNA
ccactggaagtagaagtgacgctcgataccagcacctcttcgtcggccagcgctgaaatgatcacgccagcgctg

SEQ ID NO: 548055 - DNA, 75 bp, synthetic construct
  source 1..75: mol_type = other DNA
tagcgaactcaacaccattctgaacataaaaaatattgagagcttactcactctttcagagtgtaataacattag

SEQ ID NO: 548056 - DNA, 75 bp, synthetic construct
  source 1..75: mol_type = other DNA
atgtttgcaagatgtgtttgttctgatactccgttctttactgttggggagtcatacagcgttgagcttcttaat

SEQ ID NO: 548057 - DNA, 75 bp, synthetic construct
  source 1..75: mol_type = other DNA
cgatgcgtggcaattttacggcgattacgcaaaagggtttgttaagggtagttttgataatcgtgtgatggcgcg

SEQ ID NO: 548058 - DNA, 75 bp, synthetic construct
  source 1..75: mol_type = other DNA
ttgttgcgctgtccatgacagcgggttccgcaatggctcagcaaggggatgtcaaattctttggtagcgtatcag

SEQ ID NO: 548059 - DNA, 75 bp, synthetic construct
  source 1..75: mol_type = other DNA
cttacgcctgctctttatgctcggcctgtgacagcgtttgtccggtgcgtattcctctgtcgaaactgattttac

SEQ ID NO: 548060 - DNA, 75 bp, synthetic construct
  source 1..75: mol_type = other DNA
gatcttcctgaagctgacggagagagtttccgtagctggtttaagaaacataaggcgcaggagaaaaagaatgga

SEQ ID NO: 548061 - DNA, 75 bp, synthetic construct
  source 1..75: mol_type = other DNA
tcgcttgctgtaattatattgctggcggtactttcatattttattgtttttaccgatccgtcgaatttaccctgg

SEQ ID NO: 548062 - DNA, 75 bp, synthetic construct
  source 1..75: mol_type = other DNA
tccagcatgttggggtcttaatgttcgctgcccaaccccgttggttccatcaacccgtcagggatgaacgcaaat

SEQ ID NO: 548063 - DNA, 75 bp, synthetic construct
  source 1..75: mol_type = other DNA
cgcagtgatttctccgctgcttggcggctacaaagattttaaagatctgccttatgcctgttctttatgcacagc

SEQ ID NO: 548064 - DNA, 75 bp, synthetic construct
  source 1..75: mol_type = other DNA
ttgcaggatgctggcattcaggtgattgaaaccgatctgggtgaatacattctccagctggatcaagatccgccc

SEQ ID NO: 548065 - DNA, 75 bp, synthetic construct
  source 1..75: mol_type = other DNA
ttcttcatcctcttccggtggcggctcaagtggcggaggctcaggcggcggatttagcggcgggggcggttcttc

SEQ ID NO: 548066 - DNA, 75 bp, synthetic construct
  source 1..75: mol_type = other DNA
ctcaaagaattaaacttcgtaatgaattacgtgttcactcttgagacttggtattcatttttcgtcttgcgacgt

SEQ ID NO: 548067 - DNA, 75 bp, synthetic construct
  source 1..75: mol_type = other DNA
caatttaaaagtttgatgctcaaagaattaaacttcgtaatgaattacgtgttcactcttgagacttggtattca

SEQ ID NO: 548068 - DNA, 75 bp, synthetic construct
  source 1..75: mol_type = other DNA
atgccagagattaaaggcactgtcactgaagacctggtcaaacaggcgctgtattcaggtgaagtaaataaatta

SEQ ID NO: 548069 - DNA, 75 bp, synthetic construct
  source 1..75: mol_type = other DNA
tattgatatttgatgatcttgaacgctgcgaattagattggaattctatatttggttatataaataatttcgttg

SEQ ID NO: 548070 - DNA, 75 bp, synthetic construct
  source 1..75: mol_type = other DNA
tggtataaaccccagtttaagagggaatatcagacgatccactatgagaatacttggtattacgttcttgcacgc

SEQ ID NO: 548071 - DNA, 75 bp, synthetic construct
  source 1..75: mol_type = other DNA
ttgatcgcgctcagtgctgcggcagaaaaggcgatgtttcagaaagggatggaaatccacgttcgccagcgcatg

SEQ ID NO: 548072 - DNA, 75 bp, synthetic construct
  source 1..75: mol_type = other DNA
ggtgtgattacgggatatggtaaggacattaagttgttgtggccggtgaaccagagtgtggctgaagtgccggac

SEQ ID NO: 548073 - DNA, 75 bp, synthetic construct
  source 1..75: mol_type = other DNA
cagttatcgttatattccttattggatggggagttggtattgttttctttttgggcataaaacaaaagcgcaata

SEQ ID NO: 548074 - DNA, 75 bp, synthetic construct
  source 1..75: mol_type = other DNA
attcgccatcaccgaattgagttcatgatggctggattcatgatttatttctggacattctctcttattgccggt

SEQ ID NO: 548075 - DNA, 75 bp, synthetic construct
  source 1..75: mol_type = other DNA
ttttctgtctatattgctgctttttgttccgccttcgctggagttttcagtaattcatcaatatattgcgccaga

SEQ ID NO: 548076 - DNA, 75 bp, synthetic construct
  source 1..75: mol_type = other DNA
aaaaacttcatctggtatacgccggaaaatccggatgtgccgggggcgatgtacctgaaatcagaggatggtcag

SEQ ID NO: 548077 - DNA, 75 bp, synthetic construct
  source 1..75: mol_type = other DNA
acaataatgacgtaccgatggacgctgaaacactgattgctctgagtgctgctgcagagcaggcgatgtttacca

SEQ ID NO: 548078 - DNA, 75 bp, synthetic construct
  source 1..75: mol_type = other DNA
acaccggagagcctgaaaattgacctgagcggacgctgggggtttgacggggaaaaaatcaccgacctgctgacg

SEQ ID NO: 548079 - DNA, 75 bp, synthetic construct
  source 1..75: mol_type = other DNA
gaagaaaaccgcaaagctgacatctcggggcgctggggttttgacggggagaaaatcacgggcctgctgaccgcg

SEQ ID NO: 548080 - DNA, 75 bp, synthetic construct
  source 1..75: mol_type = other DNA
gatgaaaaaagagattgaagcgctgggtgatgcggaagctatactggcgtataaggtcggcatggctgacaggtg

SEQ ID NO: 548081 - DNA, 75 bp, synthetic construct
  source 1..75: mol_type = other DNA
gtacctgaaatcagaggatggtcaggactggtatgagtgtctgcccttgttttcgccggatacgctgaaagtggt

SEQ ID NO: 548082 - DNA, 75 bp, synthetic construct
  source 1..75: mol_type = other DNA
atcttagaacttataaacaaataatatttactaaagatcagcgagtggtaaattacaatgatcaaaatattataa

SEQ ID NO: 548083 - DNA, 75 bp, synthetic construct
  source 1..75: mol_type = other DNA
taccggagcactacacccgcaagcgtatccgtgcgatgggccgcgtgtcgcaaatgtcgacccgtgccagcgagc

SEQ ID NO: 548084 - DNA, 75 bp, synthetic construct
  source 1..75: mol_type = other DNA
atgacacgtcgcgtagtgattacaggaatgggcggcgtgactgcctttggtgaaaactggcaggacgtttccgcg

SEQ ID NO: 548085 - DNA, 75 bp, synthetic construct
  source 1..75: mol_type = other DNA
ctgggcgcagcggggctggaggcactggtgtttcaccagacgcctggcggcacgtttacccattttagcgccgaa

SEQ ID NO: 548086 - DNA, 75 bp, synthetic construct
  source 1..75: mol_type = other DNA
gataataaatacacatccaatttaattgaaaaatatggtacaacttatttgtcaaatttaatcttagacgaggat

SEQ ID NO: 548087 - DNA, 75 bp, synthetic construct
  source 1..75: mol_type = other DNA
aaggcgcaggcacgctgattctcgaagaactggagcacgccaaagcgcgcggtgcgaccatttatggagaaatcg

SEQ ID NO: 548088 - DNA, 75 bp, synthetic construct
  source 1..75: mol_type = other DNA
tatccgtgcgatgggccgcgtgtcgcaaatgtcgacccgtgccagcgagctggcgttagagcaggcagggttgat

SEQ ID NO: 548089 - DNA, 75 bp, synthetic construct
  source 1..75: mol_type = other DNA
agaactggagcatgccaaagcgcgcggcgcgaccatttacggtgaaatcgtcggctttgcgactaactgcgacgc

SEQ ID NO: 548090 - DNA, 75 bp, synthetic construct
  source 1..75: mol_type = other DNA
tttgggggataccgcattcttaacgccctgattgctgaagccgaaaaagaggagaaagcctgtgaaaaacagcct

SEQ ID NO: 548091 - DNA, 75 bp, synthetic construct
  source 1..75: mol_type = other DNA
aacaaccaagcattaaaggataaagtttacaatgatttcaatttagagaataatgactctcattttaattcactt

SEQ ID NO: 548092 - DNA, 75 bp, synthetic construct
  source 1..75: mol_type = other DNA
ccgttatcgggtggtttcgcaaattactcgccactcgccgtccttcgaaatgcatatggcaagtgacacgctgaa

SEQ ID NO: 548093 - DNA, 75 bp, synthetic construct
  source 1..75: mol_type = other DNA
tacggtgacccatgatgttgaatatgttctgtttcctaatccattggttgcaataggattgcgtgcgggattaat

SEQ ID NO: 548094 - DNA, 75 bp, synthetic construct
  source 1..75: mol_type = other DNA
gtgtattaccgcaacgcgacattccctgggacgagaaatttctgacgtggctgggtgcggcggggctggaggcgc

SEQ ID NO: 548095 - DNA, 75 bp, synthetic construct
  source 1..75: mol_type = other DNA
tcctcagtgatgcaaagccgccaacggatgtacctggtgccgcccgtcttttctcagctaaccgaacagcaccag

SEQ ID NO: 548096 - DNA, 75 bp, synthetic construct
  source 1..75: mol_type = other DNA
tggcgatgcaactcggcgtatcacgtaattcactgcgcgaggcgctggcaaaactggtgagtgaaggcgtgctgc

SEQ ID NO: 548097 - DNA, 75 bp, synthetic construct
  source 1..75: mol_type = other DNA
tccggacggctggcaataaaaattattgcagagccaccggataagcgccgccgcgacctggacaatattctgaaa

SEQ ID NO: 548098 - DNA, 75 bp, synthetic construct
  source 1..75: mol_type = other DNA
ttgcagagccaccggataagcgccgccgcgacctggacaatatcctgaaagcaccgctggatgcgctgacgcatg

SEQ ID NO: 548099 - DNA, 75 bp, synthetic construct
  source 1..75: mol_type = other DNA
gtttgatgaaatcaatattgtgcgcggactgcctgttcctggtggtcggttgggcgtgaagattgacgaaataat

SEQ ID NO: 548100 - DNA, 75 bp, synthetic construct
  source 1..75: mol_type = other DNA
cccggaaggctggcgataaaggttatcgccgagccaccggataagcgtcgtcgtgacctggacaatatcctgaaa

SEQ ID NO: 548101 - DNA, 75 bp, synthetic construct
  source 1..75: mol_type = other DNA
aagcgcacgaagcgattcgtccttctgacgtcaatgtgatggcggaatcgctgaaggatatggaagcagatgcgc

SEQ ID NO: 548102 - DNA, 75 bp, synthetic construct
  source 1..75: mol_type = other DNA
cgtttcagtgaagcatcgctggttaaagagctggaaaaacgcggtatcggtcgtccgtctacctatgcgtcgatc

SEQ ID NO: 548103 - DNA, 75 bp, synthetic construct
  source 1..75: mol_type = other DNA
tgcgggaagggtacagtccgttgctgttcgtctggtggtggagcgtgagcgtgaaattaaagccttcgtcccgga

SEQ ID NO: 548104 - DNA, 75 bp, synthetic construct
  source 1..75: mol_type = other DNA
tccggaaggctggcgataaaggtgattgcagagccaccggataagcgccgccgcgacctggacaatatcctgaag

SEQ ID NO: 548105 - DNA, 75 bp, synthetic construct
  source 1..75: mol_type = other DNA
gctgggcaccgctgcctgcccgccttaccacatcgcctttgtcgtcggagggctttcagccgatcaaaccttaaa

SEQ ID NO: 548106 - DNA, 75 bp, synthetic construct
  source 1..75: mol_type = other DNA
catttttaatcgaaaaaatgaaatcgctgggcaccgctgcctgcccgccttaccacatcgcctttgtcgtcggag

SEQ ID NO: 548107 - DNA, 75 bp, synthetic construct
  source 1..75: mol_type = other DNA
ccagcagcggctgaaattaaacctgtccggaaggctggcgataaaggtgattgcagagccaccggataagcgccg

SEQ ID NO: 548108 - DNA, 75 bp, synthetic construct
  source 1..75: mol_type = other DNA
ccgatgttccgggattgtctccatattttgacaaaagaaataacaaagtttactggcgttacaggcatcccataa

SEQ ID NO: 548109 - DNA, 75 bp, synthetic construct
  source 1..75: mol_type = other DNA
cctgctgggtcaaggtggattttcacctgcatacccgggcagataaggaatttcgctatgccggagaatccgaca

SEQ ID NO: 548110 - DNA, 75 bp, synthetic construct
  source 1..75: mol_type = other DNA
tgatatttttcatcaggatgccgcaaattttgtccgtaagttaaaagtacaaaaagataacgtgatgatcactgg

SEQ ID NO: 548111 - DNA, 75 bp, synthetic construct
  source 1..75: mol_type = other DNA
gctttgttggtattaatcaggcaggacaggtggcgctgctacaaactcagggtaatcctgacggacatgtgatcc

SEQ ID NO: 548112 - DNA, 75 bp, synthetic construct
  source 1..75: mol_type = other DNA
gtgggccttgctccattcatgatcctgaaaccgctctggaatatgctcgtcgatttaaagctcttgccgcagagg

SEQ ID NO: 548113 - DNA, 75 bp, synthetic construct
  source 1..75: mol_type = other DNA
atggcctccgggctttccatgccggttggttttaaaaacggcaccgacggcagtctggcaacagcaattaacgct

SEQ ID NO: 548114 - DNA, 75 bp, synthetic construct
  source 1..75: mol_type = other DNA
attatttaaggaacttgttgaaaataccgaacttgatcgcgcaacggttcgtagggcaaagaaaacaggcttcat

SEQ ID NO: 548115 - DNA, 75 bp, synthetic construct
  source 1..75: mol_type = other DNA
gaaacaagtggttttgtatgggtgtcggttaacggagtaatcaaactcgcaaatgcagaggattttgtatacaag

SEQ ID NO: 548116 - DNA, 75 bp, synthetic construct
  source 1..75: mol_type = other DNA
cctgttttagttgcatcttatgtaagagattttttgaatcctgaagaaggtcagcatgaaccatgccatgtgtat

SEQ ID NO: 548117 - DNA, 75 bp, synthetic construct
  source 1..75: mol_type = other DNA
caggaaagtactgattgatgttttccgggaggcccagcaaatgggcgatgtctcgccaggctttaaccctgcaga

SEQ ID NO: 548118 - DNA, 75 bp, synthetic construct
  source 1..75: mol_type = other DNA
agcctgtccggaaggctggcgataaaggtgattgcagagccaccggataagcgtcgtcgcgacctggacaatatc

SEQ ID NO: 548119 - DNA, 75 bp, synthetic construct
  source 1..75: mol_type = other DNA
cccggaaggctgacaataaaaattattgcagagccaccggataagcgcagtcgtgacctggacaacattctgaaa

SEQ ID NO: 548120 - DNA, 75 bp, synthetic construct
  source 1..75: mol_type = other DNA
aaacgaagcagcaatatgtttcttctgaaaaagatggaaaggcaaccggctggtcagcattttatgttgatggca

SEQ ID NO: 548121 - DNA, 75 bp, synthetic construct
  source 1..75: mol_type = other DNA
gcgacgccgtggcagcacatattttgtatcaaaagccggggagcgttatcgccgggcagtggtgcttattgttcg

SEQ ID NO: 548122 - DNA, 75 bp, synthetic construct
  source 1..75: mol_type = other DNA
gtgcatctatggggcttaaacatcgcgaccaactttcccttcctcaaaaaatcattgcgttattgaccgttggta

SEQ ID NO: 548123 - DNA, 75 bp, synthetic construct
  source 1..75: mol_type = other DNA
gaacgcatagaatttgttttgccttacccgccaacggtgaacacttactggcgacgtcgtggcagcacatatttt

SEQ ID NO: 548124 - DNA, 75 bp, synthetic construct
  source 1..75: mol_type = other DNA
ttgttaaattcatttaaactttcgctacagtacattctgccgaaactatggcttactcgcctggcgggttggggc

SEQ ID NO: 548125 - DNA, 75 bp, synthetic construct
  source 1..75: mol_type = other DNA
cgagcagtttgatgaaatcaatattgtgcgcggtcaggtcgttcctggtggtcggctgggcgtgaagatttacga

SEQ ID NO: 548126 - DNA, 75 bp, synthetic construct
  source 1..75: mol_type = other DNA
tccggaaggctggcgataaaggttatcgcagagccgccggataagcgccgtcgtgacctggacaatatcctgaaa

SEQ ID NO: 548127 - DNA, 75 bp, synthetic construct
  source 1..75: mol_type = other DNA
gcagatattacatgtgcctggcttctgggcagaattatcctggcatttacgccagcgtactacctcaaagacgaa

SEQ ID NO: 548128 - DNA, 75 bp, synthetic construct
  source 1..75: mol_type = other DNA
aacaatgctttcacggagggtttttgaattaggtgcttcagggtgttctataatcagcagtccatcaatagctat

SEQ ID NO: 548129 - DNA, 75 bp, synthetic construct
  source 1..75: mol_type = other DNA
tccggaaggctagcgatcaggattattgtggagccaccggataagcgccgtcgtgacctggacaatatcctgaaa

SEQ ID NO: 548130 - DNA, 75 bp, synthetic construct
  source 1..75: mol_type = other DNA
gtttgatgaaatcaatattgtgcgaggtcaggtcgttcctggtggtcggctgggcgtgaagatttacgaaataat

SEQ ID NO: 548131 - DNA, 75 bp, synthetic construct
  source 1..75: mol_type = other DNA
gtgcgcggtcagctcgttccaggtgggcggctgggcgtgaagatttacgaaataatgcatgacgggcaggtccaa

SEQ ID NO: 548132 - DNA, 75 bp, synthetic construct
  source 1..75: mol_type = other DNA
gtttgatgaaattaatattgtgcgcggtcagcccgttcctggtggtcggctgggcgtgaagatttgcgaaattag

SEQ ID NO: 548133 - DNA, 75 bp, synthetic construct
  source 1..75: mol_type = other DNA
ttgcgccgtttgaaccggcgcagattcaggcgctcattccactggcgaaagagattatcgcccgctatcacatca

SEQ ID NO: 548134 - DNA, 75 bp, synthetic construct
  source 1..75: mol_type = other DNA
gtttgatgaaatcaatattgtgcgcggtcagcttgtcccaggtggtcggttgggcgtgaagatttacgaaataat

SEQ ID NO: 548135 - DNA, 75 bp, synthetic construct
  source 1..75: mol_type = other DNA
gtttgatgaaatcaatattgtgcgcggtcagctcgttcctggtggtcggttggggataaaaatcacagaactgga

SEQ ID NO: 548136 - DNA, 75 bp, synthetic construct
  source 1..75: mol_type = other DNA
atcttttatatgacggcctctttccaggcaccggaagcgggtttcgaacaccaaaaagagatgcctccagcccct

SEQ ID NO: 548137 - DNA, 75 bp, synthetic construct
  source 1..75: mol_type = other DNA
ggacgtattctgcgtttcgacggctggacgaaagtgatgccggcactgcgtaaaggcgatgaagaccgcatttta

SEQ ID NO: 548138 - DNA, 75 bp, synthetic construct
  source 1..75: mol_type = other DNA
gtgattgggggtgatgatgcgcgctatagccgagtggtgtttaacgaaattactaaaaacgcgatccgccaggca

SEQ ID NO: 548139 - DNA, 75 bp, synthetic construct
  source 1..75: mol_type = other DNA
gtttgatgaaatcaatattgtgcgcggtcagctcgttcctggtgggcgactgggcgtgaagatttacgaaatcac

SEQ ID NO: 548140 - DNA, 75 bp, synthetic construct
  source 1..75: mol_type = other DNA
ccagcagcggttgaaactaagcctgtccggaaggctggcgataaaggttattgcagagccaccggataaacgtcg

SEQ ID NO: 548141 - DNA, 75 bp, synthetic construct
  source 1..75: mol_type = other DNA
aaccagaaaacgtagtggcacatgcggatattgccccacagcgcaaagacgatcctggtccactgttcccgtggc

SEQ ID NO: 548142 - DNA, 75 bp, synthetic construct
  source 1..75: mol_type = other DNA
cgcggattaacgatacctctattggcattgagctggaaaatcgcggctggcagaaatcagcggggatgaaatatt

SEQ ID NO: 548143 - DNA, 75 bp, synthetic construct
  source 1..75: mol_type = other DNA
gcgacgtcgtggcagcacatattttgtatcaaaagccggggagcgttatcgccgggcagtggcgcttattgttcg

SEQ ID NO: 548144 - DNA, 75 bp, synthetic construct
  source 1..75: mol_type = other DNA
tccggaaggctggcgatcaggattattgtggagccaccggataagcgtcgtcgcgacctggacaatatcctgaaa

SEQ ID NO: 548145 - DNA, 75 bp, synthetic construct
  source 1..75: mol_type = other DNA
ttgcagagccaccggataagcgtcgtcgcgacctggacaatatcctgaaagcaccactggatgcgctgacgcatg

SEQ ID NO: 548146 - DNA, 75 bp, synthetic construct
  source 1..75: mol_type = other DNA
taaaaaactgcgcagggcgctgaaggctgttacccgttcagaaagctatcttggcgcaatgaaggccggtgcctg

SEQ ID NO: 548147 - DNA, 75 bp, synthetic construct
  source 1..75: mol_type = other DNA
gccatcacccgttcagaaagctatctgtgcgccatgaaagccggtgcctgccggtatgacacggaagggtatgta

SEQ ID NO: 548148 - DNA, 75 bp, synthetic construct
  source 1..75: mol_type = other DNA
acggaatggctggcccagaaaaaggctaaccgtgaatacctcaaggctatggaactggaagaccaggacacgggc

SEQ ID NO: 548149 - DNA, 75 bp, synthetic construct
  source 1..75: mol_type = other DNA
attgcgttgcagcaggcggtaattaacctcgacgtggctttttctaactttttcaatccgaaactgaaagcaggt

SEQ ID NO: 548150 - DNA, 75 bp, synthetic construct
  source 1..75: mol_type = other DNA
ttttgaggcgatgcctgccggtacgttattcgtaagcatgaagcgtttgcgtgagcgacttctgttgacgactcc

SEQ ID NO: 548151 - DNA, 75 bp, synthetic construct
  source 1..75: mol_type = other DNA
accgtagagttggtgggcgatccctcaatgtgggagctttaccggtatgatcataaaaccttacttagcttgcag

SEQ ID NO: 548152 - DNA, 75 bp, synthetic construct
  source 1..75: mol_type = other DNA
gtgcgttttgcgtacaacaaagctcttcacatcaaaaaacacgcttaccagcgacacggagtgaatttaagtccg

SEQ ID NO: 548153 - DNA, 75 bp, synthetic construct
  source 1..75: mol_type = other DNA
tgcctggctcaaagaatttgactcaatggcattgcaacaggcggtaatcaatattgatgtggcattttccaactt

SEQ ID NO: 548154 - DNA, 75 bp, synthetic construct
  source 1..75: mol_type = other DNA
tggtaaaactcgaccagtggtttgccagttcgaaaacgtgtcattgttgtggttacaagatgtcggaaatgccac

SEQ ID NO: 548155 - DNA, 75 bp, synthetic construct
  source 1..75: mol_type = other DNA
atcaaaattcctaaactgtccccaatagaagcacgccttcatcgtgaacttcatggaaagctgaaaagcatcact

SEQ ID NO: 548156 - DNA, 75 bp, synthetic construct
  source 1..75: mol_type = other DNA
ggcctgagaagtgggaagcctcgcccgacagggcggggagtagtcaccaaatcctcgccaatacggatggcgggg

SEQ ID NO: 548157 - DNA, 75 bp, synthetic construct
  source 1..75: mol_type = other DNA
ttttaatccgaagcggaaagcgcggttcccgacgtttaaacgtaaacacggaaaacaatcgagctatcactgtgt

SEQ ID NO: 548158 - DNA, 75 bp, synthetic construct
  source 1..75: mol_type = other DNA
ttgagccgcagcgcaaccgggaaatactacgcgtcgttactctgtgacgacgggatggaagcgccggcaaagccc

SEQ ID NO: 548159 - DNA, 75 bp, synthetic construct
  source 1..75: mol_type = other DNA
ctggtttatggtctggtcgctatcggcggctggttaggtgacaaggtactgggtactaaacgcgtaattatgctc

SEQ ID NO: 548160 - DNA, 75 bp, synthetic construct
  source 1..75: mol_type = other DNA
aacggcctgtttaaagccaacccgtcttctctgctttctacatgctatgagaaaaacgacccgcgtctggacggt

SEQ ID NO: 548161 - DNA, 75 bp, synthetic construct
  source 1..75: mol_type = other DNA
cactatcgttaacttcaccttctgccaacgctgggttaagcagtacggctcaaaacctgactttgaaccagtcaa

SEQ ID NO: 548162 - DNA, 75 bp, synthetic construct
  source 1..75: mol_type = other DNA
gttttaccagaaacatatcgagtcggatattgatattgtaaaactacgaaatgagatcccagattatttgaggtg

SEQ ID NO: 548163 - DNA, 75 bp, synthetic construct
  source 1..75: mol_type = other DNA
ctgctgaccgcgccgaaactgcatcgcatgacgcaggatgacgctgcagacaaagccgcgaaagctgccgtagcg

SEQ ID NO: 548164 - DNA, 75 bp, synthetic construct
  source 1..75: mol_type = other DNA
gttgttgccttcggtatcgtggttatctttggtaaagaagccttcgcgatgaaaggtgccgcgcgtcgtaaaatg

SEQ ID NO: 548165 - DNA, 75 bp, synthetic construct
  source 1..75: mol_type = other DNA
gggtgaaaacgacgacttctttgattttggcgggcattcgcttattgccacacgaattatcgggcgcttaaaaaa

SEQ ID NO: 548166 - DNA, 75 bp, synthetic construct
  source 1..75: mol_type = other DNA
ggatatctctctggttcgagggggatttctttcagaatggtacccctacgtcgctgacgcttatctgcacggata

SEQ ID NO: 548167 - DNA, 75 bp, synthetic construct
  source 1..75: mol_type = other DNA
caagtcgcaacctgcgccggaagcagaaagcactgtcccgtaagaaaaaagggagcgcaaacaggcgcaaagcca

SEQ ID NO: 548168 - DNA, 75 bp, synthetic construct
  source 1..75: mol_type = other DNA
tgatgagtggataaaagatgaacggacagtatatccgtcaagggttatcaaccaagagattgataattgctgcct

SEQ ID NO: 548169 - DNA, 75 bp, synthetic construct
  source 1..75: mol_type = other DNA
accaagagattgataattgctgccttcaaaaaatgcaaaaatttcttctgaagagaggaaaatggtcttttctct

SEQ ID NO: 548170 - DNA, 75 bp, synthetic construct
  source 1..75: mol_type = other DNA
tgcgtaaaggtgctaaagccattcgcgttgatgttcacctgacgagcaagaccgcaagtcgcgaggaattagaag

SEQ ID NO: 548171 - DNA, 75 bp, synthetic construct
  source 1..75: mol_type = other DNA
ttcacatcaaaaaacatgcttaccagagacacggagtaaatttaagtccgcgtaacgatctgaaaccgttgttgt

SEQ ID NO: 548172 - DNA, 75 bp, synthetic construct
  source 1..75: mol_type = other DNA
agataatgggatgttttgggctgtgatgcgtgaaccagtgaatctcctttctgatacattagataatatgcttgt

SEQ ID NO: 548173 - DNA, 75 bp, synthetic construct
  source 1..75: mol_type = other DNA
atcgatatttcgacaataaacattatccacgtgggttctctcgtcatggtgatttcaccatcaaagaggcacaac

SEQ ID NO: 548174 - DNA, 75 bp, synthetic construct
  source 1..75: mol_type = other DNA
gtattaagcgtccaaaacgttttcacaccctttccggcggtaaaccgcaggttgaaggtgctgaagactacaccg

SEQ ID NO: 548175 - DNA, 75 bp, synthetic construct
  source 1..75: mol_type = other DNA
tcagaactgacctttgaaccatgcgactgctgcggcctgaaagccattatcagtcatgtaagcatggactccatt

SEQ ID NO: 548176 - DNA, 75 bp, synthetic construct
  source 1..75: mol_type = other DNA
atttggtgggggatttgtttacagcagataacggtatgttttgggctgtcatgcgtgagccagtaaacttacttt

SEQ ID NO: 548177 - DNA, 75 bp, synthetic construct
  source 1..75: mol_type = other DNA
tgagcaatatcatccgcaccgggatcatctctgaagttgatgagaaatcctggtgcgtgcgggtcctcagcggcg

SEQ ID NO: 548178 - DNA, 75 bp, synthetic construct
  source 1..75: mol_type = other DNA
atatctcgcacagcggcggtgatttcacctccaacggtgtgacgctgcacacgcacaaacacagtggcgtgaaga

SEQ ID NO: 548179 - DNA, 75 bp, synthetic construct
  source 1..75: mol_type = other DNA
ccagtccggcacccggcaaaagcctgaaagaaatcgtgatcagcgcgccggacggcgcggtgttccgctacgacg

SEQ ID NO: 548180 - DNA, 75 bp, synthetic construct
  source 1..75: mol_type = other DNA
atatcacgcacagcggcggcaatttcacctcaaacggcatcacagtgcatacgcataaacacggtggcgttaaag

SEQ ID NO: 548181 - DNA, 75 bp, synthetic construct
  source 1..75: mol_type = other DNA
gacggcgcggtgttccgctacgacgcggacgcaggcgcactgagcgccagcggcatgaaaacagccaccctgcag

SEQ ID NO: 548182 - DNA, 75 bp, synthetic construct
  source 1..75: mol_type = other DNA
gacatcaaacggcgtggtcgcacacacccacacacactcaggcgtccagtccggtgggagccagacaggaggccc

SEQ ID NO: 548183 - DNA, 75 bp, synthetic construct
  source 1..75: mol_type = other DNA
aaaatctggcttcctccttctcgcggtgaacaggttttactgctctgccctggcggtaaccctgaaatggcaatg

SEQ ID NO: 548184 - DNA, 75 bp, synthetic construct
  source 1..75: mol_type = other DNA
atgaataaacatattctgagtacggtcacccggcagaactctaaagagctttcagcatggaaacaagatgaaaaa

SEQ ID NO: 548185 - DNA, 75 bp, synthetic construct
  source 1..75: mol_type = other DNA
atgacaaaaattactaattctaatgagttggagttactgtacaaacagtcagtaatcattccatcatacaaagag

SEQ ID NO: 548186 - DNA, 75 bp, synthetic construct
  source 1..75: mol_type = other DNA
tctgaccctgcccacgctggatgaggccgtgaacaccctgaaaccctggtggccgggattatttgacggtgacac

SEQ ID NO: 548187 - DNA, 75 bp, synthetic construct
  source 1..75: mol_type = other DNA
acagaacatatcacacaggaagaagaacagtatgcgcaggcgcgcctggaaaaggtgcgcagacagaaccggatc

SEQ ID NO: 548188 - DNA, 75 bp, synthetic construct
  source 1..75: mol_type = other DNA
gtggttttggtcacttttaccattacgcaccggtgaaaattgagtacgccatcaaccgctttaccatggaagcca

SEQ ID NO: 548189 - DNA, 75 bp, synthetic construct
  source 1..75: mol_type = other DNA
cggtacgtgttactggaagacatatcgcggaggaatatcccgctttcgcataaaaaactgcgcagggcgctgaag

SEQ ID NO: 548190 - DNA, 75 bp, synthetic construct
  source 1..75: mol_type = other DNA
acggagcatatttctcaggaggaggaagtgtatgcggcagagcgtctggataaaatccgccgccagaacaggata

SEQ ID NO: 548191 - DNA, 75 bp, synthetic construct
  source 1..75: mol_type = other DNA
ggggatggagagaggtgataagaataagatctccgatcttgtggcaaacaggctggctgacagatttttcgagca

SEQ ID NO: 548192 - DNA, 75 bp, synthetic construct
  source 1..75: mol_type = other DNA
ttcagcatggaaacaagacgaaaaaacagtctatccctcacgattagtcaatatgggaattgataagttttgcgc

SEQ ID NO: 548193 - DNA, 75 bp, synthetic construct
  source 1..75: mol_type = other DNA
atctggcagacagatttttcgaaaaacatattagtagtaatattaacataaaaaaattacagaatgatgtaggaa

SEQ ID NO: 548194 - DNA, 75 bp, synthetic construct
  source 1..75: mol_type = other DNA
aagtgtatgcggcagcgcgtctggagaaaatccgtcgccagaaccggataaaggcagaactacaggccgtgctcg

SEQ ID NO: 548195 - DNA, 75 bp, synthetic construct
  source 1..75: mol_type = other DNA
ttcaatacatggataatttaacggaagaaccaataccagttgaagatgatcttatttcctatgctttagacacag

SEQ ID NO: 548196 - DNA, 75 bp, synthetic construct
  source 1..75: mol_type = other DNA
agctggcagacagattttttgagaaacatattgatagcaaaatagacataaaaaaattacaggatagcgtagaaa

SEQ ID NO: 548197 - DNA, 75 bp, synthetic construct
  source 1..75: mol_type = other DNA
atgtaccaggatcttatttgtaacgaactgaacgaagcggcggaaacgctggctaattttttaaaagatgacgcc

SEQ ID NO: 548198 - DNA, 75 bp, synthetic construct
  source 1..75: mol_type = other DNA
ttaagataagaaacaagaaagaattcaccgaatacacaatagaatccaactccttgttttttttagcaaaaaaca

SEQ ID NO: 548199 - DNA, 75 bp, synthetic construct
  source 1..75: mol_type = other DNA
gcgaccgacacctttgacatcgctctgccggttaaccagtcctttgatgtatgggcaaccatcattcgtggcaaa

SEQ ID NO: 548200 - DNA, 75 bp, synthetic construct
  source 1..75: mol_type = other DNA
gtggacaaaccctgagtctgaagcgcaaagagtttattgaggcggcacaagttggcggtgtatctacgccgggca

SEQ ID NO: 548201 - DNA, 75 bp, synthetic construct
  source 1..75: mol_type = other DNA
aactgaacgaagcggcggaaacgctggctaactttttaaaagatgacgccaatattcactccattcagcgcgcgg

SEQ ID NO: 548202 - DNA, 75 bp, synthetic construct
  source 1..75: mol_type = other DNA
cggtcctgttagcagatagctttaaagccggtggtaaggtgctttcctgcggtaatggcggttcccattgcgacg

SEQ ID NO: 548203 - DNA, 75 bp, synthetic construct
  source 1..75: mol_type = other DNA
tgtgctacgtccgtgatgaaaatccgggtaaagcaggcttcgtgactggtgatgctgtcccggccatcccgttcc

SEQ ID NO: 548204 - DNA, 75 bp, synthetic construct
  source 1..75: mol_type = other DNA
gcattgagaagttcatccgtgaacgtcctgtggaaaaaatacggcaatggcgacaacggtattcccggccgatag

SEQ ID NO: 548205 - DNA, 75 bp, synthetic construct
  source 1..75: mol_type = other DNA
aaatgcgaatcgctggccgggatgcaacgctccctgttcgaagaggatgttgacgcggatatcgcagaaatctca

SEQ ID NO: 548206 - DNA, 75 bp, synthetic construct
  source 1..75: mol_type = other DNA
caccctgttcccaagccagttcgttatcgcggctgagcacacggtacaggcggcgtatgaagcacagcgtgaatt

SEQ ID NO: 548207 - DNA, 75 bp, synthetic construct
  source 1..75: mol_type = other DNA
aatctatgccgcgtccggaaattctggcctcctgccaccagacgctggaaaactgcctgattgagtccacccgca

SEQ ID NO: 548208 - DNA, 75 bp, synthetic construct
  source 1..75: mol_type = other DNA
gcgtgtaactctgactatggccaaaaatggcggaattaacttcctgaccggtaacatgattgatgccggtgactc

SEQ ID NO: 548209 - DNA, 75 bp, synthetic construct
  source 1..75: mol_type = other DNA
cggcattaatgaactgattgatgacctgatggagcacatcagcctggaaaacaatgtgctgttcccgcgcgcgct

SEQ ID NO: 548210 - DNA, 75 bp, synthetic construct
  source 1..75: mol_type = other DNA
aaccgctgccgaactgactcgcgaagaaaagagcgccatttcccaccgtggtcaggcgttgaaactgctgctgga

SEQ ID NO: 548211 - DNA, 75 bp, synthetic construct
  source 1..75: mol_type = other DNA
cggcctgacctttatcgaaaacgcgattctgaaagcgcgccatgcggcaaaagtgaccggtttaccggcaattgc

SEQ ID NO: 548212 - DNA, 75 bp, synthetic construct
  source 1..75: mol_type = other DNA
ggcgtcgctgcttagcgacttcggtcttgatatcgtggcccaaacagacctcggcgtagattccgctgaagaaac

SEQ ID NO: 548213 - DNA, 75 bp, synthetic construct
  source 1..75: mol_type = other DNA
ttaacgacatcttgttgaaagcgggtgcgactgacgtccgtctggcacaggacgaagcagagcgcgtacgtttct

SEQ ID NO: 548214 - DNA, 75 bp, synthetic construct
  source 1..75: mol_type = other DNA
gacgctgggatcggacgcgctggattcgcctggttttgacctgctggcgctgttcaccggatcggaaggtatgct

SEQ ID NO: 548215 - DNA, 75 bp, synthetic construct
  source 1..75: mol_type = other DNA
cggactgacttttatcgaaaacgcgattctgaaagcgcgccacgcagcaaaggtgactggcttgccggcgattgc

SEQ ID NO: 548216 - DNA, 75 bp, synthetic construct
  source 1..75: mol_type = other DNA
aaccacgtggaagcggcagaactgctgcgtgtgactgctgaagcaatccagaacgaagtgcaggagatccactaa

SEQ ID NO: 548217 - DNA, 75 bp, synthetic construct
  source 1..75: mol_type = other DNA
ggctacccggcgattgccatctctgacgtcagccatatttcctgcgtcggtaacgattttggtttcaatgatatt

SEQ ID NO: 548218 - DNA, 75 bp, synthetic construct
  source 1..75: mol_type = other DNA
ctgaacaaccgattgagaaagactggcgtagcgccccgctggcagaaatcatcgaccatatcatcgtgcgctacc

SEQ ID NO: 548219 - DNA, 75 bp, synthetic construct
  source 1..75: mol_type = other DNA
tagcctgacgtgtcatatcacatcccgccagctaaaccacgtcgaagcggcagagctgctgcgtgtgactgctga

SEQ ID NO: 548220 - DNA, 75 bp, synthetic construct
  source 1..75: mol_type = other DNA
ccaaaagcggcccagatgatgctggccttaaccagctgctgacggatgcgcgtatggaagaacgccgagcgcgtg

SEQ ID NO: 548221 - DNA, 75 bp, synthetic construct
  source 1..75: mol_type = other DNA
tagcctggcgtgtcatatctcatcccgccagctaaaccacgtggaagcggcagaactgcttcgtgtgactgctga

SEQ ID NO: 548222 - DNA, 75 bp, synthetic construct
  source 1..75: mol_type = other DNA
gtacaaggccagcagggagccccgtgcagccatggcgctgagaaaaatcgccggcctttaccgcattgagaagct

SEQ ID NO: 548223 - DNA, 75 bp, synthetic construct
  source 1..75: mol_type = other DNA
ctatcggtcaacaaagcgcggcgattctgttctgcgtagaaggcgaagccacgctaaataaagactctcagcagt

SEQ ID NO: 548224 - DNA, 75 bp, synthetic construct
  source 1..75: mol_type = other DNA
gtttattgccgccaacgaatcaccggtgacagtgaaaggccacggccgtttagcccgtgtttacaacaagctgta

SEQ ID NO: 548225 - DNA, 75 bp, synthetic construct
  source 1..75: mol_type = other DNA
gtgaactggcgctctctatccctcgcgcttcagctctgtttcgtaaatatgatatggattactgctgtggcggta

SEQ ID NO: 548226 - DNA, 75 bp, synthetic construct
  source 1..75: mol_type = other DNA
cgcgaacgtgctggccaggaacatctggtagcaaaatatcttgatggcattaccgtgcgtaaagtgatttacgta

SEQ ID NO: 548227 - DNA, 75 bp, synthetic construct
  source 1..75: mol_type = other DNA
tggtagcaaaatatcttgatggcgttactgtacgtaaagtgatttacgtacccggtaaactcctcaatctggtcg

SEQ ID NO: 548228 - DNA, 75 bp, synthetic construct
  source 1..75: mol_type = other DNA
gccgccggagatatcgtttcactgcgtgatgtgattgagagtgataaatcgactctgctcggagaggccgttgcc

SEQ ID NO: 548229 - DNA, 75 bp, synthetic construct
  source 1..75: mol_type = other DNA
ctcgtatagatgaaacactgaaaaatgaagctgcagtagtgcttgccggaatgggcttaaccgtttccgatctgg

SEQ ID NO: 548230 - DNA, 75 bp, synthetic construct
  source 1..75: mol_type = other DNA
tgaagatgatctggctcagtttatactcttgtttgattcattgagtgagtcagatagaaagaaaatattagacca

SEQ ID NO: 548231 - DNA, 75 bp, synthetic construct
  source 1..75: mol_type = other DNA
tgttaaggcagcacaaagttctattaatcatactataatgggaagtgcttctttttgcaagaaaatggatgctct

SEQ ID NO: 548232 - DNA, 75 bp, synthetic construct
  source 1..75: mol_type = other DNA
cggcgaccatcgcagccagtgaaaaaggcgttgatgtacaccgcgcagacgatgctaacgacctgtttgaaaaat

SEQ ID NO: 548233 - DNA, 75 bp, synthetic construct
  source 1..75: mol_type = other DNA
aacggcaccaaatggtggaccgtcggtattcgtccgatgtacaagtggacgcctatcatgagtaccttgatggag

SEQ ID NO: 548234 - DNA, 75 bp, synthetic construct
  source 1..75: mol_type = other DNA
ctaataccatcgctaacagtgagaaaggcgtagacgttcatacagctaaagatgctgatgatctgtttaatcagc

SEQ ID NO: 548235 - DNA, 75 bp, synthetic construct
  source 1..75: mol_type = other DNA
ccgatcggctgggacgcgtttggtctgcctgcggaaggcgcggcggtaaaaaacaacaccgctccggcaccgtgg

SEQ ID NO: 548236 - DNA, 75 bp, synthetic construct
  source 1..75: mol_type = other DNA
aacggctaagctcaatggtctggagccacatgcctggctgacggatgtactgaagagactgccgttatggcccga

SEQ ID NO: 548237 - DNA, 75 bp, synthetic construct
  source 1..75: mol_type = other DNA
ccacctgcctctgtatcgccagcaacaggtctttgcccgttcagatgtcgggctgcccgtcagttcgatggctga

SEQ ID NO: 548238 - DNA, 75 bp, synthetic construct
  source 1..75: mol_type = other DNA
tggagaaaaagatcagcagccgtcccgtggagaaaatccgccagtggcgacagcgttatgcccggccgatagtga

SEQ ID NO: 548239 - DNA, 75 bp, synthetic construct
  source 1..75: mol_type = other DNA
tgctgggcccacgccagaaggggcttcgccgacctgtataaaatgaacaaagatccacgggcagccatcgcggtg

SEQ ID NO: 548240 - DNA, 75 bp, synthetic construct
  source 1..75: mol_type = other DNA
atgcgctggcgcggcgtgtggaactgagtctgttcctggaggatggcgcggtccccctcgacaataacccttgtg

SEQ ID NO: 548241 - DNA, 75 bp, synthetic construct
  source 1..75: mol_type = other DNA
gcacatatcctcccgaaaagtgccgttgagccatcagtcatcgcacaggtgatcatcaataaatacggtgaccac

SEQ ID NO: 548242 - DNA, 75 bp, synthetic construct
  source 1..75: mol_type = other DNA
aacgctgaactggttgttctggttacagggcgctgcgccgttcctcggcggtggttttggtcacttttaccatta

SEQ ID NO: 548243 - DNA, 75 bp, synthetic construct
  source 1..75: mol_type = other DNA
aaagaagtggtccacagatagtcagcttcgactgccagaccgggcgtggtcatgaacatcctgaaaactggcttc

SEQ ID NO: 548244 - DNA, 75 bp, synthetic construct
  source 1..75: mol_type = other DNA
catcttccccgtgctgaaaaggttatcccgccagctgaggaacgttgtcctgactgtgatgcccccctgcacttc

SEQ ID NO: 548245 - DNA, 75 bp, synthetic construct
  source 1..75: mol_type = other DNA
aatgcgctggtgatgaactttactgccgattgctggctggaagttactgatgctaccggtaaaaaactgttcagc

SEQ ID NO: 548246 - DNA, 75 bp, synthetic construct
  source 1..75: mol_type = other DNA
atggcaaaggcatgggatatagaaccgtcaatatttgccgggatgattgaggaagatgtgggactgaaaattcgc

SEQ ID NO: 548247 - DNA, 75 bp, synthetic construct
  source 1..75: mol_type = other DNA
ctggtatcgttacagcacccagattttagtatatctgataatgtggatccgaatggcacgattgcacttcaacgt

SEQ ID NO: 548248 - DNA, 75 bp, synthetic construct
  source 1..75: mol_type = other DNA
ctttttgttaacccctaccccacgcgtacaaccgcgtggggagacgacgcggatttttaactatgcgtatccccc

SEQ ID NO: 548249 - DNA, 75 bp, synthetic construct
  source 1..75: mol_type = other DNA
acgatcgtctggaaattcatgatgttattgggccagacgaatataccgaacatgtcaataataatgcatacacca

SEQ ID NO: 548250 - DNA, 75 bp, synthetic construct
  source 1..75: mol_type = other DNA
gcgcaaagttatcagttctggcgggaggggactgaaatcgatcttggtgctgatccgcatagctgtgatgacggt

SEQ ID NO: 548251 - DNA, 75 bp, synthetic construct
  source 1..75: mol_type = other DNA
acgccaatggtacgcagcatattggccttcatccgatcccggatcgttccggcctgtggcgctatctcagcacca

SEQ ID NO: 548252 - DNA, 75 bp, synthetic construct
  source 1..75: mol_type = other DNA
gaacagatcaacaatatttcactcggtattatcgacctggtctatcccgcacactggcagccatacattgctcag

SEQ ID NO: 548253 - DNA, 75 bp, synthetic construct
  source 1..75: mol_type = other DNA
gcgagcgcgacgaacgtattgcgaagatgcaaggcaatcataacccgtatgtgcaacgcgcttgccaggcgcgaa

SEQ ID NO: 548254 - DNA, 75 bp, synthetic construct
  source 1..75: mol_type = other DNA
gagttacgaccaacttcttgcagcatcaacagaaaactggcgtcaatggtggcagaaacgtcgtatcacggtaaa

SEQ ID NO: 548255 - DNA, 75 bp, synthetic construct
  source 1..75: mol_type = other DNA
aaccccatttcagccagcatacactgaacaaatatgcttcactgatggcgcaggggaacggctatcttgggcttc

SEQ ID NO: 548256 - DNA, 75 bp, synthetic construct
  source 1..75: mol_type = other DNA
cagttgttgctgccaggtgagtggtgatgtgcagcaatgctataccgccaaagagcgccgcttgctgcaacatac

SEQ ID NO: 548257 - DNA, 75 bp, synthetic construct
  source 1..75: mol_type = other DNA
cgccagccgtcgctttgtttcggcagaacaactttcgctgatggcgctggaaatcagcattacgccgttggatgc

SEQ ID NO: 548258 - DNA, 75 bp, synthetic construct
  source 1..75: mol_type = other DNA
attgccataaatggtgaggttttctcgttatcccgcgaagcctggcagcgtgagcttgactttgccagtggcgaa

SEQ ID NO: 548259 - DNA, 75 bp, synthetic construct
  source 1..75: mol_type = other DNA
gaacatgtcaataataacgccttcaccagctatatggcgtattacaacgtccagcaggcgctgaacatcgctcgt

SEQ ID NO: 548260 - DNA, 75 bp, synthetic construct
  source 1..75: mol_type = other DNA
gggaaactcgatggcgtgaatgtgttattacgcccggtgagtgcggaatcgctggataacctggtggcaacctcc

SEQ ID NO: 548261 - DNA, 75 bp, synthetic construct
  source 1..75: mol_type = other DNA
tatcgcgatttatcagaacgaattaaacctcctgtctgatgtggtcaatttacttgttaaacgcgctgtatttca

SEQ ID NO: 548262 - DNA, 75 bp, synthetic construct
  source 1..75: mol_type = other DNA
cccgtcaacgcaggcgtcgattcgcggtgaagaaagcgaacaaatcgaactgctcaatattcgcaaagaaacgca

SEQ ID NO: 548263 - DNA, 75 bp, synthetic construct
  source 1..75: mol_type = other DNA
aaagatgattgtgttcggttgaaaaatgcgctggtgaatctcggcaacagtaaggactgggacgcactggtaaaa

SEQ ID NO: 548264 - DNA, 75 bp, synthetic construct
  source 1..75: mol_type = other DNA
gatatcacccagcgagcgttagaggtattacaggccgttgatctgattgccgccgaggatactcgtcacaccggt

SEQ ID NO: 548265 - DNA, 75 bp, synthetic construct
  source 1..75: mol_type = other DNA
cctgcccgccagtcatcaggcgatatttttcccggtatccggtttgaaaaaatggcgttatgacctggaatataa

SEQ ID NO: 548266 - DNA, 75 bp, synthetic construct
  source 1..75: mol_type = other DNA
tggtggaatcaactatagccatttatgcggataaattaaatctcctgtctgatgtggtcaatttacttgttaaac

SEQ ID NO: 548267 - DNA, 75 bp, synthetic construct
  source 1..75: mol_type = other DNA
accgcgccgtttatcacgcatgaaacggcgcgagcggcacaatcactaaacagtccggcccccggcggattcctg

SEQ ID NO: 548268 - DNA, 75 bp, synthetic construct
  source 1..75: mol_type = other DNA
atgccaatggcacacagcatatcggcttgcaccctatcccggatcgttccggcctgtggcgctatctcggtacca

SEQ ID NO: 548269 - DNA, 75 bp, synthetic construct
  source 1..75: mol_type = other DNA
cagacgcgcaaacgcgcaaactcacacctgaagaacgtagcgccgttgaaaattatcttgagagcctgacgcagg

SEQ ID NO: 548270 - DNA, 75 bp, synthetic construct
  source 1..75: mol_type = other DNA
aacgccgttgaaaattatctcgacagcctgacgcaggttttgcaggttcctggtccgacgggcgccagcacggcc

SEQ ID NO: 548271 - DNA, 75 bp, synthetic construct
  source 1..75: mol_type = other DNA
gtacccgtatgctaaaaattcaggaatactacgaaaactgcctgaattcgaaactgctgacatcttcagaaagcc

SEQ ID NO: 548272 - DNA, 75 bp, synthetic construct
  source 1..75: mol_type = other DNA
gtggcctgcggtttcgctttatgattatccgccacaagagcagtggaacgccttccagaagctggcacaaatgtt

SEQ ID NO: 548273 - DNA, 75 bp, synthetic construct
  source 1..75: mol_type = other DNA
ggcacaacttgcctggcgcgcaggagaaagcgcgacgcaacggctggcagggcgcgctatttccgtgggaaagcg

SEQ ID NO: 548274 - DNA, 75 bp, synthetic construct
  source 1..75: mol_type = other DNA
gcaggcaaaagctttcgcattgggaaaagtccgcgacgcgcttagtcagcaggttaatcagcacctggaatcctg

SEQ ID NO: 548275 - DNA, 75 bp, synthetic construct
  source 1..75: mol_type = other DNA
aggcaaaagccttcgcgctgggaaaagtccgtgatgcgctcagtcagcaggttaatcagcatgtggaatcgtggc

SEQ ID NO: 548276 - DNA, 75 bp, synthetic construct
  source 1..75: mol_type = other DNA
ttgtccttcaattctgacagagaaaggagttgcaatgtttatacgccatcaaggcatcgtaatacagataatatt

SEQ ID NO: 548277 - DNA, 75 bp, synthetic construct
  source 1..75: mol_type = other DNA
gaaaatcatgacggtgaaaaacacttcgccgaaatcgtgaaagattttggtgaaaccagtatgactgataacggt

SEQ ID NO: 548278 - DNA, 75 bp, synthetic construct
  source 1..75: mol_type = other DNA
gttttggtgtaccactcaaaaaacaactttctgccggtgaggttgccgaaagtcagtcgctacgtggtagtcgct

SEQ ID NO: 548279 - DNA, 75 bp, synthetic construct
  source 1..75: mol_type = other DNA
ggggcgaatatttgcggctatcagcaaactattatcagccgtttgctgcatggcatgaacagacagccatacaag

SEQ ID NO: 548280 - DNA, 75 bp, synthetic construct
  source 1..75: mol_type = other DNA
tgttatggacactgttaaagaagcccttaatccagaagggactctgtttatgaacattggtgatacatattattc

SEQ ID NO: 548281 - DNA, 75 bp, synthetic construct
  source 1..75: mol_type = other DNA
cttccaagcggtagcattgattgtgcaataacatcgccaccctatttttggcttagagactatggtgttgatggt

SEQ ID NO: 548282 - DNA, 75 bp, synthetic construct
  source 1..75: mol_type = other DNA
cgaactgatcgagcaggacacggtaagtgaagtgttctcgcatccgaaaacgccgctggcgcagaagtttattca

SEQ ID NO: 548283 - DNA, 75 bp, synthetic construct
  source 1..75: mol_type = other DNA
tgctgaactttaaagaccgcattctgattaagggggaagaaggtaccggcaagtcaactctcctgactgaaataa

SEQ ID NO: 548284 - DNA, 75 bp, synthetic construct
  source 1..75: mol_type = other DNA
ctgggcatggccttctggcatgatttagcggctccggtcattgctggcattcttgccagtatgatcgtgaactgg

SEQ ID NO: 548285 - DNA, 75 bp, synthetic construct
  source 1..75: mol_type = other DNA
aacacctgccgtaactgcgccagcaccagctgttgatccgcaacagaatgcggttgtttcgccttcacaggcaaa

SEQ ID NO: 548286 - DNA, 75 bp, synthetic construct
  source 1..75: mol_type = other DNA
ctgcgtctgtcggcaaattattatcagccttttgcctcatggcatgaacagactgcctcgctcgagcagcgtatg

SEQ ID NO: 548287 - DNA, 75 bp, synthetic construct
  source 1..75: mol_type = other DNA
tcaacagaaaactggcgtcaatggtggcagaaacgtcgtatcacggtaaacggcggcgatgcgcacgatcagcaa

SEQ ID NO: 548288 - DNA, 75 bp, synthetic construct
  source 1..75: mol_type = other DNA
cgtcaatggtggcagaaacgtcgtatcacggtaaatggcggcgatgcgcacgatcagcaagcgttagattatgcg

SEQ ID NO: 548289 - DNA, 75 bp, synthetic construct
  source 1..75: mol_type = other DNA
tgatccgcatagctgtgatgacggtatccacgctgccgcaactggcgcaatctggttgggggcgattcagggttt

SEQ ID NO: 548290 - DNA, 75 bp, synthetic construct
  source 1..75: mol_type = other DNA
aaatcactattactccactggacgccgacgcgtcagtgctgatttcaacaggtattgacgccacgcaaaccaacc

SEQ ID NO: 548291 - DNA, 75 bp, synthetic construct
  source 1..75: mol_type = other DNA
tcgctgaagaatctgttttctgtttgggggattttattttgcccttcaatgggaccgctaccacgcatcaggagg

SEQ ID NO: 548292 - DNA, 75 bp, synthetic construct
  source 1..75: mol_type = other DNA
ctctgttctggcagggctgcgaattacaggtcactctcgacgcgcagcgtattgcgattcgaacttctgcgcccg

SEQ ID NO: 548293 - DNA, 75 bp, synthetic construct
  source 1..75: mol_type = other DNA
ttacgatcgccgaattacccatgatggtatcggagctattacaaccgttggttgattcccctcgcttattattca

SEQ ID NO: 548294 - DNA, 75 bp, synthetic construct
  source 1..75: mol_type = other DNA
tggtaaccggtgcaagccgcgggattggccgcgcaatcgctgaaacgctcgcagctcgtggcgcaaaagttatcg

SEQ ID NO: 548295 - DNA, 75 bp, synthetic construct
  source 1..75: mol_type = other DNA
ttactatgaccgctcagcataaacaaggcgaaagtggagaaagccaaaataatctcgggctgaatattaactacc

SEQ ID NO: 548296 - DNA, 75 bp, synthetic construct
  source 1..75: mol_type = other DNA
acaaatattacatgtgcctggcttttgggctgaattatcctggcatttacgccaacgtactacctcaaagacgaa

SEQ ID NO: 548297 - DNA, 75 bp, synthetic construct
  source 1..75: mol_type = other DNA
acttatcacggcccaggtcagcaggtaatgtacgttttgtttaatcttaaacgccgcaaactgggtgtgcgtgag

SEQ ID NO: 548298 - DNA, 75 bp, synthetic construct
  source 1..75: mol_type = other DNA
aaaaagataacatgatgatcaccggcgatgcgctgctggattttggcgacgggcataaaattaagcgtagtgcta

SEQ ID NO: 548299 - DNA, 75 bp, synthetic construct
  source 1..75: mol_type = other DNA
taggcgcaatccggcgtgtggtggagccgctcggctatctgattgaggtgagggagtggtggcagctcaacgagg

SEQ ID NO: 548300 - DNA, 75 bp, synthetic construct
  source 1..75: mol_type = other DNA
ggagcatcagacaggtcttcctggatgttgctgccgggttatgtggaggggatgagcagtcgccggaaaagcgcc

SEQ ID NO: 548301 - DNA, 75 bp, synthetic construct
  source 1..75: mol_type = other DNA
ccggaaaagcgccccataattttagaggcgcagaatgtgtggataacctacaaaggaaagctaccgggaagaatt

SEQ ID NO: 548302 - DNA, 75 bp, synthetic construct
  source 1..75: mol_type = other DNA
cgaatatattgaattaatgaatgtcgctccggcgatgttgccgcgcgatccgctggagtcgttgcgagtgcgcaa

SEQ ID NO: 548303 - DNA, 75 bp, synthetic construct
  source 1..75: mol_type = other DNA
cgatggcacactcaaaaccgatacggtcaatctggcgactatcgccattgcctgtgccgtcggatatctcaattt

SEQ ID NO: 548304 - DNA, 75 bp, synthetic construct
  source 1..75: mol_type = other DNA
ctgcaggtgtcactgcgtgacttgtggaatccggcaacctgtccggtcagtttcctgccttatctcgcctgggcg

SEQ ID NO: 548305 - DNA, 75 bp, synthetic construct
  source 1..75: mol_type = other DNA
ttattaattggtctgctggcagcgatatttgtgcttcgtattttgcgccgcctccagtcaccgcatcaccgactg

SEQ ID NO: 548306 - DNA, 75 bp, synthetic construct
  source 1..75: mol_type = other DNA
gcccttcccggagatgaatatttcgatcatcacctgggcttcaacgaaaatgttgcagaaaggctggcatcggca

SEQ ID NO: 548307 - DNA, 75 bp, synthetic construct
  source 1..75: mol_type = other DNA
ccagatggtgtattgaaaatactgccctgaaatttacccagcctcatttctggaacagcggtttttttgctgata

SEQ ID NO: 548308 - DNA, 75 bp, synthetic construct
  source 1..75: mol_type = other DNA
attgaaaaactggagggcagcgtcgctgatctgaataaaaaattgtcggtgctgattccttctgaagatgaaaaa

SEQ ID NO: 548309 - DNA, 75 bp, synthetic construct
  source 1..75: mol_type = other DNA
ggatatcgggatatttctgacggtgtggcaaaacaggtcagggatgaagtcagaaatgaggtgcagaagctggac

SEQ ID NO: 548310 - DNA, 75 bp, synthetic construct
  source 1..75: mol_type = other DNA
cgcatatcatcgaaatggcaaaaacgctgaagctgaaaatggtggcggaaggcatcgaaaccagcaaacaggaag

SEQ ID NO: 548311 - DNA, 75 bp, synthetic construct
  source 1..75: mol_type = other DNA
attgaaaacgccggcagataccggtgacagtatcggtgtcgtcttcgctaatggcgcaattatggatggcgagga

SEQ ID NO: 548312 - DNA, 75 bp, synthetic construct
  source 1..75: mol_type = other DNA
ctgaagatgtcgcaaacggagtgcaaacaaagtcgcatccgatgaacgcagcgcaatgggatcacttccgtttct

SEQ ID NO: 548313 - DNA, 75 bp, synthetic construct
  source 1..75: mol_type = other DNA
tgaaaaactcacagaaccgccttgctacatgggttccatccattggtgacatgatggctgaagactggcaaatca

SEQ ID NO: 548314 - DNA, 75 bp, synthetic construct
  source 1..75: mol_type = other DNA
accgatcgctttgatggctacgttagctggagtccaaaagaagtattcgaaaaggcttatcgtccggtatcagga

SEQ ID NO: 548315 - DNA, 75 bp, synthetic construct
  source 1..75: mol_type = other DNA
cggcatgaaaacggccactttgcaggcatccgtcagcgtgacactggatacgcccgtcgtggaatgcacaaacct

SEQ ID NO: 548316 - DNA, 75 bp, synthetic construct
  source 1..75: mol_type = other DNA
gcatccgtcagcgtgacactggacacgcccgtcgtggaatgcacagaccttctgagaacggcgacgcttgacgtc

SEQ ID NO: 548317 - DNA, 75 bp, synthetic construct
  source 1..75: mol_type = other DNA
attgccggacttatcgtcgcgctgattgtcgctatctggtgggcgggcgatatcaaacctgcgaatatctccttt

SEQ ID NO: 548318 - DNA, 75 bp, synthetic construct
  source 1..75: mol_type = other DNA
gaaatgtatcaggagcttgagcgactgattgaagacgccaaaccggcaagtcgccacctgaccgggctggctatc

SEQ ID NO: 548319 - DNA, 75 bp, synthetic construct
  source 1..75: mol_type = other DNA
atgaatagtctgatgccaccgggttcaacttcactggagcgacgactggcgcaaacctgcagcgggatttctgat

SEQ ID NO: 548320 - DNA, 75 bp, synthetic construct
  source 1..75: mol_type = other DNA
atggcgcaattatggatggcgaggaaactcaggggaatgttggcggtgataccactgcggcacaaatccgcgacg

SEQ ID NO: 548321 - DNA, 75 bp, synthetic construct
  source 1..75: mol_type = other DNA
agacaccaccaccattaacttcagccacagtacggcatctgatgacctggggaataccaccactaacccgaagac

SEQ ID NO: 548322 - DNA, 75 bp, synthetic construct
  source 1..75: mol_type = other DNA
accgccactgtaagggcatgtgaggctcatccgctgctcctcgcactggaagacaccaccactgtcagcgccagt

SEQ ID NO: 548323 - DNA, 75 bp, synthetic construct
  source 1..75: mol_type = other DNA
ttatttgtaatcctggcaccgatgctttcccagtttgcctatgacgatactgactgggcgatgatgtccagcgcc

SEQ ID NO: 548324 - DNA, 75 bp, synthetic construct
  source 1..75: mol_type = other DNA
caaggccgcttatggcgaaaaagcatcattattttgctgaaggtgaatcaacaagtatttgcggtggctggatgt

SEQ ID NO: 548325 - DNA, 75 bp, synthetic construct
  source 1..75: mol_type = other DNA
gtaactttgtagtgacctgcgctctggcaaacaagctggccagaatagcctgggcactgacaacacgacagcaga

SEQ ID NO: 548326 - DNA, 75 bp, synthetic construct
  source 1..75: mol_type = other DNA
cgatttcgtcgatgccgaggccatctgtgaagcggcgtcgcgtccatcaatgcgtttcgtacagcccctaacgga

SEQ ID NO: 548327 - DNA, 75 bp, synthetic construct
  source 1..75: mol_type = other DNA
gccgttattagtcgactgagtacccttcttgaggacagtagtttgcctctttatctcagccagttactgctgaaa

SEQ ID NO: 548328 - DNA, 75 bp, synthetic construct
  source 1..75: mol_type = other DNA
tgtgaagcggcgtcgcgtccatcaatgcgtttcgtacagcccctaacggaatctcagcaggcaatgcgggctctt

SEQ ID NO: 548329 - DNA, 75 bp, synthetic construct
  source 1..75: mol_type = other DNA
cgaggcgatgatgtggatggagttcgacaggtatccccgctgggtgatgagcgcggggatatccgtaatgcacag

SEQ ID NO: 548330 - DNA, 75 bp, synthetic construct
  source 1..75: mol_type = other DNA
tggatggagttcgacagggtgtctccgctgggcgatgagcgcggggatatccgtaatgcgcagatcgtgaaagcg

SEQ ID NO: 548331 - DNA, 75 bp, synthetic construct
  source 1..75: mol_type = other DNA
gaaaaccgtcgcaaaggcgaaatggtgctgattgtcgaaggccataaagcgcaggaaaatggacttgcctgctga

SEQ ID NO: 548332 - DNA, 75 bp, synthetic construct
  source 1..75: mol_type = other DNA
ttgaagcggagccgcgcacgctgattttttatgaatctacccaccgtctgttagacagcctggaagatatcgttg

SEQ ID NO: 548333 - DNA, 75 bp, synthetic construct
  source 1..75: mol_type = other DNA
gatatcacccagcgtgcgttggaggtattacaggccgttgatctgattgccgccgaggatacgcgtcacaccggt

SEQ ID NO: 548334 - DNA, 75 bp, synthetic construct
  source 1..75: mol_type = other DNA
caggataaggtaaaaacaactaatcagatgcatgcttttttgctggaatttggtatcagcgttccacgaggttct

SEQ ID NO: 548335 - DNA, 75 bp, synthetic construct
  source 1..75: mol_type = other DNA
tatcttgttgagcagattaaagatctggaatctcagttgaaacgaaagttggacgaagatgaggttggacagcgc

SEQ ID NO: 548336 - DNA, 75 bp, synthetic construct
  source 1..75: mol_type = other DNA
gccgctaccggggccgtgtgctgccattacagcattaagcgccgcgggtttgccatcagatcgtttttgttatga

SEQ ID NO: 548337 - DNA, 75 bp, synthetic construct
  source 1..75: mol_type = other DNA
ctttaagccgcgagaaccacagcgacagatggcggtagccgtcacccaggcgatagaaaaaggccagccgctggt

SEQ ID NO: 548338 - DNA, 75 bp, synthetic construct
  source 1..75: mol_type = other DNA
tccagatcaactaaaggagttcttagagggctacattttcaaagcaagcatcctcagggtaagcttgtacgtgtt

SEQ ID NO: 548339 - DNA, 75 bp, synthetic construct
  source 1..75: mol_type = other DNA
ctcacgcttgtgcatccgctatagcaatatgtggattttaccagtttccagtatggaagagtttctggaaggggc

SEQ ID NO: 548340 - DNA, 75 bp, synthetic construct
  source 1..75: mol_type = other DNA
ccgttttcaccgattagtgtggagggggatgaaacgcaggacttttatcaagaacaactgataactgacttggcc

SEQ ID NO: 548341 - DNA, 75 bp, synthetic construct
  source 1..75: mol_type = other DNA
acttttatgacccaaatgatgaaggggggattatatggaatgactcttcattatcgattgaatggcctgttaatg

SEQ ID NO: 548342 - DNA, 75 bp, synthetic construct
  source 1..75: mol_type = other DNA
tgaagccgattatggatctgcgtaagcagtacggcgaagcgtttgaaaaacgtcacggtatccgcttgggcttta

SEQ ID NO: 548343 - DNA, 75 bp, synthetic construct
  source 1..75: mol_type = other DNA
cgacgaattattatcatcctgagagtgatagagggattatttgggatgatcctgaactacaaattaagtggccgg

SEQ ID NO: 548344 - DNA, 75 bp, synthetic construct
  source 1..75: mol_type = other DNA
tgtggtggtggtaaaccatcatctctttctggcggatatggtggttaaagagagtggatttggcgaactgatccc

SEQ ID NO: 548345 - DNA, 75 bp, synthetic construct
  source 1..75: mol_type = other DNA
ctggtgatgcgcccttacggcgcgacgtttctcgccagtctgccgcccgcgccacgcacccgtgacattgcccgt

SEQ ID NO: 548346 - DNA, 75 bp, synthetic construct
  source 1..75: mol_type = other DNA
agcgtggcggataaattcaaagagttaatggcgcaaaagcccggtagctggatcttcacctcagcaacgctgtcg

SEQ ID NO: 548347 - DNA, 75 bp, synthetic construct
  source 1..75: mol_type = other DNA
ctggggcgttccgccttgctggatgcggcatttgaacgcgccacgttatatcgcactcggctgaaacggctaaaa

SEQ ID NO: 548348 - DNA, 75 bp, synthetic construct
  source 1..75: mol_type = other DNA
aaaacctacgcttacctggcccctgcgttgcgggcgaaaaagaaagtcattatctcgacgggctcaaaagcgtta

SEQ ID NO: 548349 - DNA, 75 bp, synthetic construct
  source 1..75: mol_type = other DNA
cgtggcgctgctgaaagggcgctcaaactacctctgcctcgaacgtctcgaacagcaggcgctggcggggggcga

SEQ ID NO: 548350 - DNA, 75 bp, synthetic construct
  source 1..75: mol_type = other DNA
atgtggctgaaaatgccggcggcgtccactgcctgaaatatggtctgaccgtacataacctgctgaaaattgaag

SEQ ID NO: 548351 - DNA, 75 bp, synthetic construct
  source 1..75: mol_type = other DNA
gtattccgtcatcgtgagcatatgcaacgtctgcatgactctgccaaaatttaccgcttcccggtttcgcagagc

SEQ ID NO: 548352 - DNA, 75 bp, synthetic construct
  source 1..75: mol_type = other DNA
aacagttaaaaaatgtccttacgttgctccaacaaggcaaactggcaatcccgcaaccacagcaacgcacaccaa

SEQ ID NO: 548353 - DNA, 75 bp, synthetic construct
  source 1..75: mol_type = other DNA
cctttccctccgctgatggatacgtttaaatccttcaccgggagtaccgggttggttttaatggcgttcttaatt

SEQ ID NO: 548354 - DNA, 75 bp, synthetic construct
  source 1..75: mol_type = other DNA
gcgtgatatttttccggcagattgggtaatccagtgcgcccttgaaacgggtacctcgcttaattggctaacaac

SEQ ID NO: 548355 - DNA, 75 bp, synthetic construct
  source 1..75: mol_type = other DNA
aatggcagtgctgggaacctgatgtcgaatgggtgcgtcagcccccgcaagatgcgataaccgatcctgactttt

SEQ ID NO: 548356 - DNA, 75 bp, synthetic construct
  source 1..75: mol_type = other DNA
tttctggcggcaaagactctggtttaatgctgcatctgacagccgaacttgctcgacaaatgggcaaaaaaatct

SEQ ID NO: 548357 - DNA, 75 bp, synthetic construct
  source 1..75: mol_type = other DNA
atcgagagtcggtagcgagacagagcaagattcaccgttcctggatttgtatcgggtagcggaacaggtagtact

SEQ ID NO: 548358 - DNA, 75 bp, synthetic construct
  source 1..75: mol_type = other DNA
agcgcaaagcatgggcgtggtggaaatcgagagtcggtagcgagacagaacaagattcaccgttactggatttgt

SEQ ID NO: 548359 - DNA, 75 bp, synthetic construct
  source 1..75: mol_type = other DNA
tttgtacaggctgctattaccgctctgattgacggtgcgccagccacgctggacacgctgaaggaaattgcagca

SEQ ID NO: 548360 - DNA, 75 bp, synthetic construct
  source 1..75: mol_type = other DNA
gaggtttaccacatccatatgcacttgttgggtggccgtccgctgggaccaatgctggcgcataaaggtctgtaa

SEQ ID NO: 548361 - DNA, 75 bp, synthetic construct
  source 1..75: mol_type = other DNA
ccatagtgaaatgctaaatgtcgaacaatccgggctgtttcgcgcgtggtttgtgcgcattgcacaggaacagct

SEQ ID NO: 548362 - DNA, 75 bp, synthetic construct
  source 1..75: mol_type = other DNA
gaagatgcccgttattattattgcgcgcaacggctgtactgtggcgagggggaaagcctgattgccgatctttgt

SEQ ID NO: 548363 - DNA, 75 bp, synthetic construct
  source 1..75: mol_type = other DNA
aatgaacaagcagcagctgtgactactcaacaagatgttgataattttaaacatgattttgaaatgatgcttgct

SEQ ID NO: 548364 - DNA, 75 bp, synthetic construct
  source 1..75: mol_type = other DNA
tctgctgttcctgggtatcgcgactcccccagttgccggaatttatatcgctgactttttcctttatcgccgtaa

SEQ ID NO: 548365 - DNA, 75 bp, synthetic construct
  source 1..75: mol_type = other DNA
tgacattcgctgcatggatcataggcgcagcggttggctttatgaccgtaaaaggcttattcaccctgacgacga

SEQ ID NO: 548366 - DNA, 75 bp, synthetic construct
  source 1..75: mol_type = other DNA
ttgtgcataaccgcaaacatgcgctgattgccgcaggcgtgacgtttctggttgcctaccctctgctctactggg

SEQ ID NO: 548367 - DNA, 75 bp, synthetic construct
  source 1..75: mol_type = other DNA
ggtcgtagcagccgcgggtacagaagcgaagtggagcagtggatgcagcagcgaattgaggaatcacgaggagca

SEQ ID NO: 548368 - DNA, 75 bp, synthetic construct
  source 1..75: mol_type = other DNA
ctaaacccatcaaactggggcgcagcagccgctggtacaaaagtgaagtggagcagtggatgcagcagcgaattg

SEQ ID NO: 548369 - DNA, 75 bp, synthetic construct
  source 1..75: mol_type = other DNA
ggctgacctggaaaacgccatcacccgtggtgcgcagggctttatcgtctccccgaacgatgtgaacgcggtctc

SEQ ID NO: 548370 - DNA, 75 bp, synthetic construct
  source 1..75: mol_type = other DNA
cgtaaaactgatgaagatcttgaggctatagccacaagtggcattgaaatggatagcggtctctggaccgtaaaa

SEQ ID NO: 548371 - DNA, 75 bp, synthetic construct
  source 1..75: mol_type = other DNA
tcgaaaccgggaaagttgccgcaaagctgggtctcgcacaggcaatatgtaatgctctggataagcctctaaacg

SEQ ID NO: 548372 - DNA, 75 bp, synthetic construct
  source 1..75: mol_type = other DNA
aagaaaatatttcacactgttatttatcagcagcagatgggaagatgttatataaattcacatatcaaaaaccaa

SEQ ID NO: 548373 - DNA, 75 bp, synthetic construct
  source 1..75: mol_type = other DNA
acagcgtatggctgcgtgacgacgatcccctgatcgacatgagcttcatcaccagcttcactggcatgaccgaca

SEQ ID NO: 548374 - DNA, 75 bp, synthetic construct
  source 1..75: mol_type = other DNA
accgctctgtcgacagccagaaaaaagtgccgcactttggtgccaacaactacaagggcggccaggcgattggcg

SEQ ID NO: 548375 - DNA, 75 bp, synthetic construct
  source 1..75: mol_type = other DNA
atatcggccagttgaatgctttttttgacgcgctggattgcgagcctgaaaccacggatcgttttatgataaccg

SEQ ID NO: 548376 - DNA, 75 bp, synthetic construct
  source 1..75: mol_type = other DNA
aggctcagcattacccgttggtgtccctgttccctggccttctgtcacacctccgacaggctggctgaaatgcaa

SEQ ID NO: 548377 - DNA, 75 bp, synthetic construct
  source 1..75: mol_type = other DNA
accggaagagatgccggattatctcttccgtcaactcggttttaatcagacctggcatgagtggaagcgggacga

SEQ ID NO: 548378 - DNA, 75 bp, synthetic construct
  source 1..75: mol_type = other DNA
aacgcggcgttgatgatgcggtcattctcacccctgcgaatgcaccgtcctggtgtggtgaccgttccgttctct

SEQ ID NO: 548379 - DNA, 75 bp, synthetic construct
  source 1..75: mol_type = other DNA
ttgcttctgctgcctaccgttccggctctgtcatacccgatgaccgtaccggattaatccacgattacacccgta

SEQ ID NO: 548380 - DNA, 75 bp, synthetic construct
  source 1..75: mol_type = other DNA
tcgggtttaatcagacctggcatgagtggaagcaggacgaacagcacaggcaacaacaacgacgcccgggacact

SEQ ID NO: 548381 - DNA, 75 bp, synthetic construct
  source 1..75: mol_type = other DNA
gaaagaacgggacattcccgcccgtcgtcaggcctttgaaacgcagtggaatacgtggattgcgccgggaatggc

SEQ ID NO: 548382 - DNA, 75 bp, synthetic construct
  source 1..75: mol_type = other DNA
ccgatgtggcgttccatcacatggaccggaccaatccccatgcgcacatcatgctgaccacgagagctgtcgggg

SEQ ID NO: 548383 - DNA, 75 bp, synthetic construct
  source 1..75: mol_type = other DNA
gcagtccaggccgtttaccggaaagcgcatttcagccgcggcggatcatccggcgattctgtcgtagtgcattga

SEQ ID NO: 548384 - DNA, 75 bp, synthetic construct
  source 1..75: mol_type = other DNA
cggcaattgatgcgcatgatgatgcagtccaagccgtttaccggaaagcgcatttcagcggcggcggttcttccg

SEQ ID NO: 548385 - DNA, 75 bp, synthetic construct
  source 1..75: mol_type = other DNA
ccaccgacgctgatgccggtcatgagttctgtcgaccgggaaacccgccagcttcagcttttgctggtcatgggc

SEQ ID NO: 548386 - DNA, 75 bp, synthetic construct
  source 1..75: mol_type = other DNA
ggtaccaggcaaggactggaataatcagcagaacatctatcaccgctggttgaaaggtgaaacaaaagcgcaaag

SEQ ID NO: 548387 - DNA, 75 bp, synthetic construct
  source 1..75: mol_type = other DNA
tgaaaaagggcaggcatgggtagccaatgcaattactgaagaatatctgcgccaagggggcggcgaattgcccct

SEQ ID NO: 548388 - DNA, 75 bp, synthetic construct
  source 1..75: mol_type = other DNA
gcagtccaggccgtttatcgtaaagcacatttcagcggcggcgggtcgcccggcgactctgtcgtagtgcattga

SEQ ID NO: 548389 - DNA, 75 bp, synthetic construct
  source 1..75: mol_type = other DNA
tctccgttgttccaggagatggggcgcgctgcggcggcacaaccggatgaactggtctttgctgcactgcgtgac

SEQ ID NO: 548390 - DNA, 75 bp, synthetic construct
  source 1..75: mol_type = other DNA
tttacctttgagatagataacggcctcaaggtgtctggcaacgaagatcagctacgcagtgcgatttcgaacctg

SEQ ID NO: 548391 - DNA, 75 bp, synthetic construct
  source 1..75: mol_type = other DNA
gcgcctgaccgagcgtttttatcgtgtagacaaagcgcgttcccgacaaacaggcggtagcggactggggttagc

SEQ ID NO: 548392 - DNA, 75 bp, synthetic construct
  source 1..75: mol_type = other DNA
cagcggatggaggggctggtaaagcagttgctgacactgtcaaaaattgaagctgcaccaacgcagttgctgaat

SEQ ID NO: 548393 - DNA, 75 bp, synthetic construct
  source 1..75: mol_type = other DNA
tgagtggaaaggatgtagctggtcttctcgcataccttggtttgggagaaggttcggcattacccgttggtgtgc

SEQ ID NO: 548394 - DNA, 75 bp, synthetic construct
  source 1..75: mol_type = other DNA
aatgtcagcggttcgactccggtatcaccagaacttcgtccgcgtaatattgcatttaactatatcgtgagggcc

SEQ ID NO: 548395 - DNA, 75 bp, synthetic construct
  source 1..75: mol_type = other DNA
ataacgggagtgcctgctgcctcgctgacggcaaaaggcaccgtacaattgagcagtgccatcaacagcacgtct

SEQ ID NO: 548396 - DNA, 75 bp, synthetic construct
  source 1..75: mol_type = other DNA
acggcttctggcagatggcctacatgatgcagtcaccgctgacgctggatgcactgtggcacggctggtcagcca

SEQ ID NO: 548397 - DNA, 75 bp, synthetic construct
  source 1..75: mol_type = other DNA
acggacagccattcgataaagacttaagcgcacgattgcagcgggaggtccggctggcaaatgacgccaattgtc

SEQ ID NO: 548398 - DNA, 75 bp, synthetic construct
  source 1..75: mol_type = other DNA
gcaccaaaactgaagtgattgcactgggcgatgcaggggagcagttgtaccgccatcgtctgcccacgccgcgtg

SEQ ID NO: 548399 - DNA, 75 bp, synthetic construct
  source 1..75: mol_type = other DNA
tctgacaggttcggtcgacatcccacgtgatttgttcaatttcttccctacccctgagaatttagtcacagatat

SEQ ID NO: 548400 - DNA, 75 bp, synthetic construct
  source 1..75: mol_type = other DNA
ctgtggctgcttctgcagcaatatccggttctgccatggcgtggactccgaatggcaacggtggttctgttcaac

SEQ ID NO: 548401 - DNA, 75 bp, synthetic construct
  source 1..75: mol_type = other DNA
tcaaaatgttaaatttattaataaaaagggtaactgctactatttcggacaggcattgttaatttctattcaaaa

SEQ ID NO: 548402 - DNA, 75 bp, synthetic construct
  source 1..75: mol_type = other DNA
caaaaatcatgtcgcagatggccatgatgcaggcagttaaggggattggttcggcgtttggctgggggagtgcag

SEQ ID NO: 548403 - DNA, 75 bp, synthetic construct
  source 1..75: mol_type = other DNA
cccagcttgaacagatccgtgtgctcggagagcaggggcgcaccagtgacgccgcccggatagccatgtctgcac

SEQ ID NO: 548404 - DNA, 75 bp, synthetic construct
  source 1..75: mol_type = other DNA
ggactgcaggagctgcagcgtattcagcagcaggtccgtcaggccagaaacaatggtggcatcgcgcagcaggat

SEQ ID NO: 548405 - DNA, 75 bp, synthetic construct
  source 1..75: mol_type = other DNA
aacggtgcaaaacgcgcgttcatgaattttactgccgacgcggataatgctgccgggactgcagaacagatgttt

SEQ ID NO: 548406 - DNA, 75 bp, synthetic construct
  source 1..75: mol_type = other DNA
tggttaaccgcccgacgttttttgcctttgcaaaaggcgcgggggtgatgggagaagcggggcctgaagccattc

SEQ ID NO: 548407 - DNA, 75 bp, synthetic construct
  source 1..75: mol_type = other DNA
ttacaacctggggaaaagggctgcagaagattttatgcaacaacagtcccgtgatggcgggcagttaagcggagt

SEQ ID NO: 548408 - DNA, 75 bp, synthetic construct
  source 1..75: mol_type = other DNA
aaattttcagcctgatcaaactcgctgcgcaggacaaagacgtcacccgcatttttgttaatccggcgattaaac

SEQ ID NO: 548409 - DNA, 75 bp, synthetic construct
  source 1..75: mol_type = other DNA
ctgccgatacagtccgaacattatcaggtgatgcgtaccgatcagcgtcgctatttcggtcacccggatctggtc

SEQ ID NO: 548410 - DNA, 75 bp, synthetic construct
  source 1..75: mol_type = other DNA
tcgttacagtggcacggtggttaaccgtccgacgttttttgcttttgcaaaaggcgcgggtgtgatgggggaagc

SEQ ID NO: 548411 - DNA, 75 bp, synthetic construct
  source 1..75: mol_type = other DNA
ggcagataggtccggctgccctgaaggtggtttatgaccttgggaaaaaagcggcagcggactttatgcaacagc

SEQ ID NO: 548412 - DNA, 75 bp, synthetic construct
  source 1..75: mol_type = other DNA
gggcctgaggctatcctgcccttgcgcaggggggctgacggtaagctgggtgttgtggcagcgacctgtggttcg

SEQ ID NO: 548413 - DNA, 75 bp, synthetic construct
  source 1..75: mol_type = other DNA
cgatgtcgctgaatttactgctgatcgccgccggtattgtcactaccgtaccgctgttgtgttttactgcggctg

SEQ ID NO: 548414 - DNA, 75 bp, synthetic construct
  source 1..75: mol_type = other DNA
taacgacggtacgaacgggcagataggtccggctgccctgaaggtggtttatgacctcgggaaaaaagctgcagc

SEQ ID NO: 548415 - DNA, 75 bp, synthetic construct
  source 1..75: mol_type = other DNA
gtgaaactgaaaatgcaggatttgaggctgtttaatatcgtgttcgagagcgatcctggctggatactggatttc

SEQ ID NO: 548416 - DNA, 75 bp, synthetic construct
  source 1..75: mol_type = other DNA
cgatcctggctggatactggatttctctaaccgcaccttgtctgcttttttcgatgaagaattgaacattgatat

SEQ ID NO: 548417 - DNA, 75 bp, synthetic construct
  source 1..75: mol_type = other DNA
cgcgctggggctggcgtttagttttgccttctacggcctggtacgcaagaagattgctgttgaagcgcaaaccgg

SEQ ID NO: 548418 - DNA, 75 bp, synthetic construct
  source 1..75: mol_type = other DNA
gcggaaatttaggtgcgctgaggggatccggaataacgctggctaaccgtgccgggtggatagacacactgatgt

SEQ ID NO: 548419 - DNA, 75 bp, synthetic construct
  source 1..75: mol_type = other DNA
aaaacaaagatcgctgatgccctgagacaaacatatcccctgacagaattactgcatgttctgggccttgcccgt

SEQ ID NO: 548420 - DNA, 75 bp, synthetic construct
  source 1..75: mol_type = other DNA
aagccggtgataaatacgccacgatacgtacgatgctgacagatatatttaacagtaattatcagtgttatggct

SEQ ID NO: 548421 - DNA, 75 bp, synthetic construct
  source 1..75: mol_type = other DNA
ttttaaggcggagcaacctaatcagaaatggctgacagatatcacggagttccagctccctgcaggtaaagtctg

SEQ ID NO: 548422 - DNA, 75 bp, synthetic construct
  source 1..75: mol_type = other DNA
aaaaaagccattaagaaaaaaacatctgaaaaccgcaatgatgaagccacccggttgctgttgcagtacagtcag

SEQ ID NO: 548423 - DNA, 75 bp, synthetic construct
  source 1..75: mol_type = other DNA
attttacagaggatgcggataacgcggcgggtaccgctgagcagttgtttaataccgcgttcagcagcatgggca

SEQ ID NO: 548424 - DNA, 75 bp, synthetic construct
  source 1..75: mol_type = other DNA
gatgatcctgtaaatgccgcgaagtctctggacaatgagctgcattttcttactgccactcagcttgagcagata

SEQ ID NO: 548425 - DNA, 75 bp, synthetic construct
  source 1..75: mol_type = other DNA
gtcgggcatcacgccagaaaagttcatgcagcaagtggatgcttacatcagatggtataacgagcggcgtataaa

SEQ ID NO: 548426 - DNA, 75 bp, synthetic construct
  source 1..75: mol_type = other DNA
ctggaaagagtgaatgcagcaggtcttattcgctcaatgtcccgtaaaggatgttcacctgataatgccgcatgc

SEQ ID NO: 548427 - DNA, 75 bp, synthetic construct
  source 1..75: mol_type = other DNA
aggcgatgcgattcaggactttgccgagcgtctgctggaagatccggtggaagtttctgccaatccgtccacccg

SEQ ID NO: 548428 - DNA, 75 bp, synthetic construct
  source 1..75: mol_type = other DNA
tatattgtggcgcattcgctttgccctgcatctggtcgtcagccgttacgataatcgcctgctgtttgatcgcca

SEQ ID NO: 548429 - DNA, 75 bp, synthetic construct
  source 1..75: mol_type = other DNA
agcccaaatcaactggcctggcacgctcgccatttattacagcatgatttaagcaagccgctggtattacttagc

SEQ ID NO: 548430 - DNA, 75 bp, synthetic construct
  source 1..75: mol_type = other DNA
atgaatacccttccagaacagtacgcaaacaccgctctccccaccctgcccggtcaaccgcaaaatccatgcgcc

SEQ ID NO: 548431 - DNA, 75 bp, synthetic construct
  source 1..75: mol_type = other DNA
tgaggttattcggtttggtctggagcaggtgctgacgcaaagtagctggcagccaccgcagccccgtcgccaacc

SEQ ID NO: 548432 - DNA, 75 bp, synthetic construct
  source 1..75: mol_type = other DNA
agtttgatctgttccacgcctacacggtggatgaacatactatccgcgtgatgctgaaactggagagttttgcca

SEQ ID NO: 548433 - DNA, 75 bp, synthetic construct
  source 1..75: mol_type = other DNA
agtttgacctgttccacgcctacacggtggatgaacatactattcgcgtgatgctgaaactggagagttttgcca

SEQ ID NO: 548434 - DNA, 75 bp, synthetic construct
  source 1..75: mol_type = other DNA
gaatcaagcgtcgccctgcggagtaaacgcgatccggtcggaaacggtggtgttcctcgtgtgctttgggaaatc

SEQ ID NO: 548435 - DNA, 75 bp, synthetic construct
  source 1..75: mol_type = other DNA
aacggtggtgttcctcgtgtgctctgggaaatcaggagaatgagtaccactggcattcgcatcaaaggagagtga

SEQ ID NO: 548436 - DNA, 75 bp, synthetic construct
  source 1..75: mol_type = other DNA
atgaggttcggatcccggaaaaagtcacagggactgctgcgggtctgatctctttactgacctatttcccggaaa

SEQ ID NO: 548437 - DNA, 75 bp, synthetic construct
  source 1..75: mol_type = other DNA
gcacttaataacgagttgcagcaggaagtgcatcagcggttgacagaggccctcaatccaaacgataaagggtga

SEQ ID NO: 548438 - DNA, 75 bp, synthetic construct
  source 1..75: mol_type = other DNA
gcgaaggattctggccttccgacaagttctacgcggcgaaagttgaagaacagaaccagcgccatcagcgttacc

SEQ ID NO: 548439 - DNA, 75 bp, synthetic construct
  source 1..75: mol_type = other DNA
cctgttgcccgccactttgacgatgggctgacactggaggtcaatcgtacctgtactactggtgaacgtaacgct

SEQ ID NO: 548440 - DNA, 75 bp, synthetic construct
  source 1..75: mol_type = other DNA
tcgatgaagctattctcgcgctccccgctgacgaaaaaccccgtccgattgacgatgaatttcagctacgcggta

SEQ ID NO: 548441 - DNA, 75 bp, synthetic construct
  source 1..75: mol_type = other DNA
agatttttatctggagcccggaccgcccctatctgtttgccgccgtgtgtgccgagttagaccgccgcaatttaa

SEQ ID NO: 548442 - DNA, 75 bp, synthetic construct
  source 1..75: mol_type = other DNA
tcgagcggatgatgaaggattacttccgcgttacacgccgcgtcagtgaactcaaccaaatgctgctgcaactgt

SEQ ID NO: 548443 - DNA, 75 bp, synthetic construct
  source 1..75: mol_type = other DNA
taatcgccaccgccgaccgacgtgcgcttaataatgagttgcagcaggaagtgcatcagcggttgacagaggccc

SEQ ID NO: 548444 - DNA, 75 bp, synthetic construct
  source 1..75: mol_type = other DNA
attgatgagttacgcccgaaaacgcgtgcgccaagcgagaagcagaccggcaagccatcgaagaaagtactggca

SEQ ID NO: 548445 - DNA, 75 bp, synthetic construct
  source 1..75: mol_type = other DNA
gctgcgcgaagcgggcatcaacaactgctatctcgaaggtgagatggtacaaggcaagcgtaacgaagcgatcaa

SEQ ID NO: 548446 - DNA, 75 bp, synthetic construct
  source 1..75: mol_type = other DNA
tgaagagccaattaaagctcgcgtaattgatgagttacgcccgaaaacgcgtgcgccaagcgagaagcagaccgg

SEQ ID NO: 548447 - DNA, 75 bp, synthetic construct
  source 1..75: mol_type = other DNA
aaaatcgtctgcgttatctggtatgcctgacggtagccgatatatgcgccaccaacgaaacattgtggaatagct

SEQ ID NO: 548448 - DNA, 75 bp, synthetic construct
  source 1..75: mol_type = other DNA
agtttgacctgtttcacgcgtacacggtggatgaacatactgttcgcgtgatgttgaaactggagacttttgcca

SEQ ID NO: 548449 - DNA, 75 bp, synthetic construct
  source 1..75: mol_type = other DNA
gcgaaaactgtttttaagcattcttcgtcaccccggcgcggtgcgtcgcgggctgttgccgatgcatcgtcacag

SEQ ID NO: 548450 - DNA, 75 bp, synthetic construct
  source 1..75: mol_type = other DNA
caaacaccgctctccccacccttcccggtcaaccgcaaaaccctggcgtctggccccgagatgaattaaccgtct

SEQ ID NO: 548451 - DNA, 75 bp, synthetic construct
  source 1..75: mol_type = other DNA
cggtggctacggtcgtggcgagctgcatccgctttcagacgtcgatttactgatcttaagccgtaagaaactccc

SEQ ID NO: 548452 - DNA, 75 bp, synthetic construct
  source 1..75: mol_type = other DNA
cgctaaattacgtcactttactgtagaaactgaagtaacgtttttgccgacgcataccgagcgaaaatccttcct

SEQ ID NO: 548453 - DNA, 75 bp, synthetic construct
  source 1..75: mol_type = other DNA
acaggccatgagtgataccaacctggtgatcgtcaccgataagcgcacctataacatcgtcctccatttcatcgg

SEQ ID NO: 548454 - DNA, 75 bp, synthetic construct
  source 1..75: mol_type = other DNA
gctatcgccggtgtggctacccacattgttgtcgcgcctgacgaaacctatatcactcatgcttttggcgattct

SEQ ID NO: 548455 - DNA, 75 bp, synthetic construct
  source 1..75: mol_type = other DNA
aacgggtggcgatactgcgaagtacgcgctggaaaacaaactggtcgacgcgctggcaacgaatgccgaaattga

SEQ ID NO: 548456 - DNA, 75 bp, synthetic construct
  source 1..75: mol_type = other DNA
cctgggcagggatctccatgttctttatgcgctttatgctgggattctcggaagcgccatcattcccggcgaacg

SEQ ID NO: 548457 - DNA, 75 bp, synthetic construct
  source 1..75: mol_type = other DNA
ttacaacccaaatctaggggcgatcagtaccggcactacgtcaccagatgttaagcgcgtgaaaaagggtgaggg

SEQ ID NO: 548458 - DNA, 75 bp, synthetic construct
  source 1..75: mol_type = other DNA
accgcaggtctacatgatctcggccagtggcaaagaaacgctgcctaactctcatgttgtgggtgagaaccgcaa

SEQ ID NO: 548459 - DNA, 75 bp, synthetic construct
  source 1..75: mol_type = other DNA
tggcctcagtggcttcgaccgtgaaaagcgaaagcgacaaactggcggcctttaacgatccacaaaaccgttacg

SEQ ID NO: 548460 - DNA, 75 bp, synthetic construct
  source 1..75: mol_type = other DNA
gctcagcaggtattccctggcgcgcaaggtttgcttgatggtttaaccaaaaccggcggcgatactgcgaagtac

SEQ ID NO: 548461 - DNA, 75 bp, synthetic construct
  source 1..75: mol_type = other DNA
ttggcaaagccctgaaagagtttcgtgacagcggtaaaccggtttatgccattggcgagaattacagtcaggggc

SEQ ID NO: 548462 - DNA, 75 bp, synthetic construct
  source 1..75: mol_type = other DNA
ggcggcagcgttacggcctctgaggtgatccgctctgaactggcagcagccagagcagcgggcaaacctgtggtt

SEQ ID NO: 548463 - DNA, 75 bp, synthetic construct
  source 1..75: mol_type = other DNA
tgtggctgctaatcgtcagatcaccgcccagcaagtattccctggcgcacaaggggtgcttgatggcttaaccaa

SEQ ID NO: 548464 - DNA, 75 bp, synthetic construct
  source 1..75: mol_type = other DNA
acgaccgcaatatcaccggtatcgtgatggatctgaaaaacttcgcgggcggcgatcagccttccatgcagtaca

SEQ ID NO: 548465 - DNA, 75 bp, synthetic construct
  source 1..75: mol_type = other DNA
cagcaagcggtcccaaactgcattacatcaagcaattgctctctaaccgcatgatgctgggcgtatttttcggac

SEQ ID NO: 548466 - DNA, 75 bp, synthetic construct
  source 1..75: mol_type = other DNA
gcaactggatgcgctcggaagggatgcgcattgtcgaaagcgttttaccgtcgctgccaaaacgtccgcaggtga

SEQ ID NO: 548467 - DNA, 75 bp, synthetic construct
  source 1..75: mol_type = other DNA
ttgtaaccaataaaataactgcgacgatcctgctatcgctaatcagcgctaaagcatattctgttgagtttaata

SEQ ID NO: 548468 - DNA, 75 bp, synthetic construct
  source 1..75: mol_type = other DNA
tcgggctggacagtggtggaggacagaaaacacagggacaggtgagtggttattacggtcacagtagcccgctgg

SEQ ID NO: 548469 - DNA, 75 bp, synthetic construct
  source 1..75: mol_type = other DNA
tgttcgtctgtccgtgccgtggggaaccggtacggccagctacagcggcagcatgagcaacgaccgttacaccaa

SEQ ID NO: 548470 - DNA, 75 bp, synthetic construct
  source 1..75: mol_type = other DNA
aacgtgcgtgagaaaaaaactatcaccggggcggactatccgccgacgctgatcaccaaagagaacctgcaacag

SEQ ID NO: 548471 - DNA, 75 bp, synthetic construct
  source 1..75: mol_type = other DNA
atggacactccatacattgagttattcgcaggcagtcagcaggtcgccacgacgctggtacattttgccgctgat

SEQ ID NO: 548472 - DNA, 75 bp, synthetic construct
  source 1..75: mol_type = other DNA
tgctcacaatatcagcgcggcacaagtattgttggcgtgggtgatcagtcatcagggtgtgatggcgattccaaa

SEQ ID NO: 548473 - DNA, 75 bp, synthetic construct
  source 1..75: mol_type = other DNA
tccacggatgttacccaatccgtggctcgacttgaggatgaaacaaaacaaggtaagtcctggcgtttaagttat

SEQ ID NO: 548474 - DNA, 75 bp, synthetic construct
  source 1..75: mol_type = other DNA
aaattcgcccaaatacggcacaaggtatgcttcacattaacatgccacaagcgtggctggagtactctgatgcgt

SEQ ID NO: 548475 - DNA, 75 bp, synthetic construct
  source 1..75: mol_type = other DNA
cagttccgtgcgcgggcgtctggatgttgaaattattgaacagaatggacagaaaaaaacattccaggtcaatac

SEQ ID NO: 548476 - DNA, 75 bp, synthetic construct
  source 1..75: mol_type = other DNA
atgagaaaaatcacgtccttgtcagagttacaggagatgaatatgagcattgaattaagaacgtcttatgaatat

SEQ ID NO: 548477 - DNA, 75 bp, synthetic construct
  source 1..75: mol_type = other DNA
gaggtcgaactttcgtcagcggaattagctatgctggataaggcatatccggcaccaaaaggaaaaactgcgctg

SEQ ID NO: 548478 - DNA, 75 bp, synthetic construct
  source 1..75: mol_type = other DNA
gattggtgttcatactgatggtgtctcaacttcaccgctggcggatgtttctatcaccagggcactgccgccgga

SEQ ID NO: 548479 - DNA, 75 bp, synthetic construct
  source 1..75: mol_type = other DNA
ataccgaagtcgaaaaactcattaatttatacataaagaaggaaagtcaccccatatctcctccccgtatgacca

SEQ ID NO: 548480 - DNA, 75 bp, synthetic construct
  source 1..75: mol_type = other DNA
atgaactgggccacgtcgcgttgggtcactcgctggctgaaatgaaagcttcttatgcgatcgttgccgcacgtg

SEQ ID NO: 548481 - DNA, 75 bp, synthetic construct
  source 1..75: mol_type = other DNA
gttttataaatagaacaccagattggttaaccattcacgaggctgtagatttaataaacaaaatatcggagatca

SEQ ID NO: 548482 - DNA, 75 bp, synthetic construct
  source 1..75: mol_type = other DNA
attgaaacgggcgctgaaatagcaggtcttcgtttaattgacagatttgtcggtaccatagcgccgatttttaga

SEQ ID NO: 548483 - DNA, 75 bp, synthetic construct
  source 1..75: mol_type = other DNA
cgttagagaggcatactttcagaccgtttctaactcatcatggtctcactatggttatcttgtagctgcaagcat

SEQ ID NO: 548484 - DNA, 75 bp, synthetic construct
  source 1..75: mol_type = other DNA
aagaagaattgaatgcagaaactctaaaaagagctctggaacgtgggtcaccatcctctacatccttattcagtt

SEQ ID NO: 548485 - DNA, 75 bp, synthetic construct
  source 1..75: mol_type = other DNA
ggcagcgaatgaactggggaaagataaattcgaaatcgtcacgccgagtgagtctatcctcgcagagccaaccgt

SEQ ID NO: 548486 - DNA, 75 bp, synthetic construct
  source 1..75: mol_type = other DNA
gctgataaaacaccgtggcagaatatgacaaaacgccagcgtaaaaaccgcaagcgtataaatcgtcttgtggaa

SEQ ID NO: 548487 - DNA, 75 bp, synthetic construct
  source 1..75: mol_type = other DNA
acgtggcgttaggccatgtgaaaaaaggaatgcaggtggcacttggtacaaatgccgtgcgagtagctgcggcct

SEQ ID NO: 548488 - DNA, 75 bp, synthetic construct
  source 1..75: mol_type = other DNA
ggcaagaaaaactaaccatggtattatagtaagattttcagaggagctttttcaaattttcgaaacgatgagttg

SEQ ID NO: 548489 - DNA, 75 bp, synthetic construct
  source 1..75: mol_type = other DNA
catttttgctggcagcgaccagcgtgatggcaaaggatattcagttacttaacgtttcgtatgatccaacgcgcg

SEQ ID NO: 548490 - DNA, 75 bp, synthetic construct
  source 1..75: mol_type = other DNA
accattgatgaagagttcggcggctggacgaaagcgcaaaaagagcatttctctaacggcggtacgtttgaccaa

SEQ ID NO: 548491 - DNA, 75 bp, synthetic construct
  source 1..75: mol_type = other DNA
tagacagatcatcaattcgtatggcggagctattgaagtcaagaggtttgtatcgtgcaactacctcaaataata

SEQ ID NO: 548492 - DNA, 75 bp, synthetic construct
  source 1..75: mol_type = other DNA
taaatagcttgcttgtcacaaaagcagagcgtctggaaagggctgaacgccaaatcatgctactggttgcgaaat

SEQ ID NO: 548493 - DNA, 75 bp, synthetic construct
  source 1..75: mol_type = other DNA
atcgcggcgcttctgcatgatgtggtcgaagacaccaatgtaaccatagagatggttcgtgatcacttcggtgag

SEQ ID NO: 548494 - DNA, 75 bp, synthetic construct
  source 1..75: mol_type = other DNA
ttctaaaaatattgttttatcaaagagggagagcatattgcgtaaattatcgagatatgacaataggaataacgt

SEQ ID NO: 548495 - DNA, 75 bp, synthetic construct
  source 1..75: mol_type = other DNA
aatattatctcgccagtttcgccaataaaatttggctgtcaccgcaaggcgtggtggatctgcacggctttgcca

SEQ ID NO: 548496 - DNA, 75 bp, synthetic construct
  source 1..75: mol_type = other DNA
cattcttgcgcgggtatatccgctcttatgcgcgtctggttcatattccggaagaagaactgctgccgggactgg

SEQ ID NO: 548497 - DNA, 75 bp, synthetic construct
  source 1..75: mol_type = other DNA
aaataagtcagtacttacttatgatcgtggtgcagcccaagaaagcgggcaagatcaaccccgagggaatgggga

SEQ ID NO: 548498 - DNA, 75 bp, synthetic construct
  source 1..75: mol_type = other DNA
cgagtatccttatgttgagctatttcgagatctggcagcagcaactagccgtccaaatagcacattagtcactta

SEQ ID NO: 548499 - DNA, 75 bp, synthetic construct
  source 1..75: mol_type = other DNA
tggtagcgcacccgatgcggcgctgtactggtatgcgcgaattattaccgccggtggcgatccgttatatgtcgc

SEQ ID NO: 548500 - DNA, 75 bp, synthetic construct
  source 1..75: mol_type = other DNA
aaatagcacaaacacgctattatttcccgacaaacaggggccttgaaggcaagattggcgaaaagctcacctggc

SEQ ID NO: 548501 - DNA, 75 bp, synthetic construct
  source 1..75: mol_type = other DNA
ttaatcgcggtactgagctacctggtgctggtgggcgatatcaagcgtatcgagctgaaacctgtcgcggggcaa

SEQ ID NO: 548502 - DNA, 75 bp, synthetic construct
  source 1..75: mol_type = other DNA
acaggacccggcgatcgcccatccgctgacctacgcccgtctgggatataacaatctgagccgcctggcgcgcga

SEQ ID NO: 548503 - DNA, 75 bp, synthetic construct
  source 1..75: mol_type = other DNA
tgctagttattctctgcgagaattcttaaaaaaagaactattacgaattttctttcttgcctctatcatttttgt

SEQ ID NO: 548504 - DNA, 75 bp, synthetic construct
  source 1..75: mol_type = other DNA
atcgccaatctggtgtacagcaaacgcatggggaacaatgcccctggtgatggctggaactaccgtgggcgcgga

SEQ ID NO: 548505 - DNA, 75 bp, synthetic construct
  source 1..75: mol_type = other DNA
cggctcgtagcgcggcgtggttcttcgccagcaaaggatgcatgaagtataccggcgatattgcacgtgtaactc

SEQ ID NO: 548506 - DNA, 75 bp, synthetic construct
  source 1..75: mol_type = other DNA
tattgctcatgtcgggcatgagtctggtggcttcaccaggttgcaggagaatttcaactacagcgttaccggact

SEQ ID NO: 548507 - DNA, 75 bp, synthetic construct
  source 1..75: mol_type = other DNA
tctgcctctggaacgccagcgcgcgatcgccaacctagtgtacagcaagcgctacggtaacaatgcgcctggtga

SEQ ID NO: 548508 - DNA, 75 bp, synthetic construct
  source 1..75: mol_type = other DNA
atttcaactacagcgtcagcggactggctaactttgttcgggctgggcgtctcactcagggacaggccaacgcat

SEQ ID NO: 548509 - DNA, 75 bp, synthetic construct
  source 1..75: mol_type = other DNA
ctccagcaaaggctgcatgaagtataccggcgatattgcacgtgtaactctgattatcaatggtggccggaacgg

SEQ ID NO: 548510 - DNA, 75 bp, synthetic construct
  source 1..75: mol_type = other DNA
cacgccgcgcgtaccgcgcatgaagaggtgctgtatcgtctgcgtctggcacaggcccggcttaagggcgtacag

SEQ ID NO: 548511 - DNA, 75 bp, synthetic construct
  source 1..75: mol_type = other DNA
gctgtataaaaaaggcctggtatataaaaagacttctgcggtcaactggtgcccgaacgaccagaccgtactggc

SEQ ID NO: 548512 - DNA, 75 bp, synthetic construct
  source 1..75: mol_type = other DNA
aaatatcttgatggcgttaccgtacgtaaagtgatttacgtaccgggtaaactcctcaatctggtcgttggctaa

SEQ ID NO: 548513 - DNA, 75 bp, synthetic construct
  source 1..75: mol_type = other DNA
tgattatcaatggtggccggaacggcatcgacgaccggcgcgcgcggtacatcactgccagtaaggtgctggcgg

SEQ ID NO: 548514 - DNA, 75 bp, synthetic construct
  source 1..75: mol_type = other DNA
actggctttacccagctcgttgagagcttcaattacagcgtggcggggctggctgatttcgtccgtgccgggagg

SEQ ID NO: 548515 - DNA, 75 bp, synthetic construct
  source 1..75: mol_type = other DNA
cgctcgctgccacaacatcgatccggaaacccagcgcccgcgtaaagtgttcgacaccatttctgataacgccgc

SEQ ID NO: 548516 - DNA, 75 bp, synthetic construct
  source 1..75: mol_type = other DNA
tcactcgctggctgaaatgaaagcttcttatgcgatcgttgccgcacgtgatgcgatttccgctaccagcggtgt

SEQ ID NO: 548517 - DNA, 75 bp, synthetic construct
  source 1..75: mol_type = other DNA
tgcatgtcatcaccgccaaagctgaagaagaaggtttcgacgtgatattgcagacgtcggtgatgactctaactt

SEQ ID NO: 548518 - DNA, 75 bp, synthetic construct
  source 1..75: mol_type = other DNA
tgattatcaatggtggcaggaacggcatcgacgaccggcgcgctcggtacatcactgccagtaaggcgctggcgg

SEQ ID NO: 548519 - DNA, 75 bp, synthetic construct
  source 1..75: mol_type = other DNA
cttatccagattaccggtttgaataactatcgtgactgcggaaacggtctgaaagttgacctgctggagaatcct

SEQ ID NO: 548520 - DNA, 75 bp, synthetic construct
  source 1..75: mol_type = other DNA
atccagtcgctgagccagcaaatggaaaaattgcgacagcattaccggaaggtggagaaacaggacattcccgcg

SEQ ID NO: 548521 - DNA, 75 bp, synthetic construct
  source 1..75: mol_type = other DNA
atccctccggtctgggatacccgtgacaaaattcgcccattagccgcggcgacaaagggtgaaccgttgcattaa

SEQ ID NO: 548522 - DNA, 75 bp, synthetic construct
  source 1..75: mol_type = other DNA
cacgcgttgtgaaaaaatgtatttcgataatctggaaaaatggtttggacattattgtcatatccattgccaggt

SEQ ID NO: 548523 - DNA, 75 bp, synthetic construct
  source 1..75: mol_type = other DNA
tgattatcaatggtggcaggaatggcatcgacgaccggcgcgtgcggtacatcactgccagtaaggtgctggcgg

SEQ ID NO: 548524 - DNA, 75 bp, synthetic construct
  source 1..75: mol_type = other DNA
ctagatatcttttctatttcctgcagaccaattacgcaaaacagtattttgaaaatcaaaaaacaggttcaacta

SEQ ID NO: 548525 - DNA, 75 bp, synthetic construct
  source 1..75: mol_type = other DNA
ttaggtgatatcgcagaaggcgctatcaatgctaaatactcccgtgataaagagtccgaagcagatgatttctcc

SEQ ID NO: 548526 - DNA, 75 bp, synthetic construct
  source 1..75: mol_type = other DNA
tgattatcaatggtggccggaacggcattgatgaccggcgcgcgcgatacatcactgccagtaaggtgctggcgg

SEQ ID NO: 548527 - DNA, 75 bp, synthetic construct
  source 1..75: mol_type = other DNA
cttatccaggttaccggtttgaataactatcgtgactgtggaaacggtcttaaggttgacctgctggagagtcct

SEQ ID NO: 548528 - DNA, 75 bp, synthetic construct
  source 1..75: mol_type = other DNA
agatcattaatggtgggcagaacggcatcgatgaccggcgcgcgcggtatatcaccgccagtaaggtgcttttat

SEQ ID NO: 548529 - DNA, 75 bp, synthetic construct
  source 1..75: mol_type = other DNA
ttgaacgttatggtgcggacaccgttcgtctgtttatgatgttcgcatctccggcagatatgacgctcgaatggc

SEQ ID NO: 548530 - DNA, 75 bp, synthetic construct
  source 1..75: mol_type = other DNA
gtcctgaaaggaagtcgtctgtttgccgtgctgcgtctggcagacaacagtcatccgccgtttggtgccagcgtg

SEQ ID NO: 548531 - DNA, 75 bp, synthetic construct
  source 1..75: mol_type = other DNA
gcgaaaccctgaatgtgggctgggacggccggacacagtgtgtggttgatattccgaaaaaaatggacccggcac

SEQ ID NO: 548532 - DNA, 75 bp, synthetic construct
  source 1..75: mol_type = other DNA
catcccgcgctggcgcgcaaatctcactctgggtgagaactatatcaattctgagatttttagctcctggcacta

SEQ ID NO: 548533 - DNA, 75 bp, synthetic construct
  source 1..75: mol_type = other DNA
cggcgtgaccaccgaagtaacggtgaagctgttgccgaagccgcccgtggcgcgggttctgttagccagctttga

SEQ ID NO: 548534 - DNA, 75 bp, synthetic construct
  source 1..75: mol_type = other DNA
tcgtgatttcgcagcagggacgcatcctctatgactccaccgtgccggcaggtccgttcaccattcaggacctgg

SEQ ID NO: 548535 - DNA, 75 bp, synthetic construct
  source 1..75: mol_type = other DNA
tttcagataacgtttcttgaaccacctttttcggattcggataacgagaaaccgttaccagaaccctgcctgaca

SEQ ID NO: 548536 - DNA, 75 bp, synthetic construct
  source 1..75: mol_type = other DNA
tatctgctgacgtgacccagtccgtggcccgcattccgggagaagatacaaagcagggtaaatcctggcgtctga

SEQ ID NO: 548537 - DNA, 75 bp, synthetic construct
  source 1..75: mol_type = other DNA
tgcgggttaccgcttctctgaacgcaattacatgacgatggaccagtacctcaatgcccgttaccggaatgactt

SEQ ID NO: 548538 - DNA, 75 bp, synthetic construct
  source 1..75: mol_type = other DNA
gtaatggtgtcagcagcagtggagacaactacaacgattccgtttttttgcgcttgtctgtgccatgggggaccg

SEQ ID NO: 548539 - DNA, 75 bp, synthetic construct
  source 1..75: mol_type = other DNA
gctggcgaacctttctgccagcttctcatctgtggagaaaggttacacctcgttcggggtaagtgcatcaggggg

SEQ ID NO: 548540 - DNA, 75 bp, synthetic construct
  source 1..75: mol_type = other DNA
atcagtaacaagtggtcactttacggtggcggtatcgttgccggagattacaacgccatggctatgggtctgggg

SEQ ID NO: 548541 - DNA, 75 bp, synthetic construct
  source 1..75: mol_type = other DNA
tgagaaggagctgtatacagccacattcaacaaaagcttcgaggactggaagacctcggtcaacctgcagtacag

SEQ ID NO: 548542 - DNA, 75 bp, synthetic construct
  source 1..75: mol_type = other DNA
cgcgccgtgcgctgcctggcgtactggaaggcattgcccgtttatcgcagcaatatgatttacgcgtcgccaacg

SEQ ID NO: 548543 - DNA, 75 bp, synthetic construct
  source 1..75: mol_type = other DNA
gttaacggtaaagtccgtgccaaaatcaccgttccggtggacgcaacggaagaacaggttcgcgaacgtgctggc

SEQ ID NO: 548544 - DNA, 75 bp, synthetic construct
  source 1..75: mol_type = other DNA
gtatgcttaacccgttcacgccgcacatctgcttcacgctgtggcaggagttgaaaggcgaaggcgatatcgata

SEQ ID NO: 548545 - DNA, 75 bp, synthetic construct
  source 1..75: mol_type = other DNA
cagtcatggcggttccgggtcacgaccagcgtgactacgaatttgcctctaaatacggcctgaacatcaaaccgg

SEQ ID NO: 548546 - DNA, 75 bp, synthetic construct
  source 1..75: mol_type = other DNA
cagcgaaacagctgctgtgtcaggggatggtgctggcagatgccttctactatgtaggcgaaaacggcgaacgta

SEQ ID NO: 548547 - DNA, 75 bp, synthetic construct
  source 1..75: mol_type = other DNA
gcaggtatggtgaactctgacgaaccagcgaaacagttgttgtgtcagggcatggtgctggcagatgctttctac

SEQ ID NO: 548548 - DNA, 75 bp, synthetic construct
  source 1..75: mol_type = other DNA
aaaaccagctcaaaatgctgggatttggttatgactggagccgcgagctggcaacctgtacgccggaatactacc

SEQ ID NO: 548549 - DNA, 75 bp, synthetic construct
  source 1..75: mol_type = other DNA
gtacataacctgctgaaaattgaagtgcaaacgctggacggagagacgctgacactgggatcggacgcgctggat

SEQ ID NO: 548550 - DNA, 75 bp, synthetic construct
  source 1..75: mol_type = other DNA
gaagattttattcatgccggttatcccgtcgatgccgaagcgattttgttatgcgagctggacggcgtggagtct

SEQ ID NO: 548551 - DNA, 75 bp, synthetic construct
  source 1..75: mol_type = other DNA
ggcgagaaaaaatcaatcaaatgtgcgcccagttcaatagcgatgaaatcacgaccttccatgcggtcaaggcgg

SEQ ID NO: 548552 - DNA, 75 bp, synthetic construct
  source 1..75: mol_type = other DNA
aattcccgtttgggcagcaaacttcgtattgatggagtacggcacgggcgcagttatggcggttccggggcacga

SEQ ID NO: 548553 - DNA, 75 bp, synthetic construct
  source 1..75: mol_type = other DNA
gtcccgcgcggtaaaaaagctgaccagcagtgatggcggggagaacaacgcggaaaacaaaagcaccgcgaaaac

SEQ ID NO: 548554 - DNA, 75 bp, synthetic construct
  source 1..75: mol_type = other DNA
tcaaaggcggcgaaagcggaactgaaaaagacgctgctgccggatttttccggctggattgacggcacgctggag

SEQ ID NO: 548555 - DNA, 75 bp, synthetic construct
  source 1..75: mol_type = other DNA
ttcctgataccctgccggactacacggaatatggccgggacaacggtatccgtctgtctgccgtgtggctgacac

SEQ ID NO: 548556 - DNA, 75 bp, synthetic construct
  source 1..75: mol_type = other DNA
agatgagggctatgtctccatcacgccgctgcatgtggatttaactgcgcatagcgcgcaagatgtggtttcaga

SEQ ID NO: 548557 - DNA, 75 bp, synthetic construct
  source 1..75: mol_type = other DNA
gacgggcataaacattatgacactgcggcggcggtaacctgttccattttgcgcgcactgtgtaaagagccgctg

SEQ ID NO: 548558 - DNA, 75 bp, synthetic construct
  source 1..75: mol_type = other DNA
gcattaccttagttcgcgacggcaaaatagtgaataaaatcgagatttcccgcctggacatgctgcttgatgaaa

SEQ ID NO: 548559 - DNA, 75 bp, synthetic construct
  source 1..75: mol_type = other DNA
tctgggggcgcggattggtaaaggcttcgtgttgccccaccattcaggtgtcgtcattcacggtaatgtaaagat

SEQ ID NO: 548560 - DNA, 75 bp, synthetic construct
  source 1..75: mol_type = other DNA
tgctggtgagcctctctaccatattaacggcgagcattttaacgggcagggatccggtactctagctgccatgag

SEQ ID NO: 548561 - DNA, 75 bp, synthetic construct
  source 1..75: mol_type = other DNA
aaattccctgacgctggaatcctcgcttcgtacttttacttttgaaaatggcgatattgcagtacagatgggcac

SEQ ID NO: 548562 - DNA, 75 bp, synthetic construct
  source 1..75: mol_type = other DNA
ccaggaagcgcaagactttgctctcatttcgcacatcgcgacgctgaaaagccgcgtgccatttattcatttctt

SEQ ID NO: 548563 - DNA, 75 bp, synthetic construct
  source 1..75: mol_type = other DNA
accaacttttggcaaatgggttggggtgaatttatctgcagagaataagcgccagttatggatccctgaaggatt

SEQ ID NO: 548564 - DNA, 75 bp, synthetic construct
  source 1..75: mol_type = other DNA
gcgggctgcattatcagttggaaccttatgcacaaggaaaattggtgcgttgcgttgtcggtgaagtttttgacg

SEQ ID NO: 548565 - DNA, 75 bp, synthetic construct
  source 1..75: mol_type = other DNA
tcattcttaaacattcagtggccatttactcctaatattatttcagagaaagatctccaggcatctaaagttgaa

SEQ ID NO: 548566 - DNA, 75 bp, synthetic construct
  source 1..75: mol_type = other DNA
cgaataatttttactcgcctgaatgtgagagaacaataaaatgggacgataatgatttaaatattaaatggccgc

SEQ ID NO: 548567 - DNA, 75 bp, synthetic construct
  source 1..75: mol_type = other DNA
caactaattattatagtccaaaacatgagcgtagcataatatggaatgatcctatattaaatattcattggccga

SEQ ID NO: 548568 - DNA, 75 bp, synthetic construct
  source 1..75: mol_type = other DNA
ctgacagcagagaaaattatattgttattggtgataatgtcgatgtaggtgcccatacgtgtattatcgggctta

SEQ ID NO: 548569 - DNA, 75 bp, synthetic construct
  source 1..75: mol_type = other DNA
tggataagctgtagtgagcgaatgccaaatgatggtcagcacgtaattattttatgtgatggcgcattcgttctt

SEQ ID NO: 548570 - DNA, 75 bp, synthetic construct
  source 1..75: mol_type = other DNA
acgcaattgaatatatccgcagtatcgcttttcacatcgatgaagacgattaccacggcaagcatattgcgtatt

SEQ ID NO: 548571 - DNA, 75 bp, synthetic construct
  source 1..75: mol_type = other DNA
ggaagaagcaactccggaaaacgtagaaatgctctctggctatgtttccacgtacaaattaaccgatagcgagcg

SEQ ID NO: 548572 - DNA, 75 bp, synthetic construct
  source 1..75: mol_type = other DNA
gttggataagctgtagtgatcgaatgccggagaaatacgatttcgatatctgggtattctctccatccagaggcg

SEQ ID NO: 548573 - DNA, 75 bp, synthetic construct
  source 1..75: mol_type = other DNA
cgtggagttgagcgacggcactttatcctggttagggaacgccttgttctggatgctgctaccagaacctcccca

SEQ ID NO: 548574 - DNA, 75 bp, synthetic construct
  source 1..75: mol_type = other DNA
ctgccacgctgccatgcttcagggtagccaacctgtaagccaaacttacaagttgccagttaatacaccttgcca

SEQ ID NO: 548575 - DNA, 75 bp, synthetic construct
  source 1..75: mol_type = other DNA
taataactcacgcagaggagactattgaagcacagagactgtgcataccaggcacaatcgaccatgacatcatcc

SEQ ID NO: 548576 - DNA, 75 bp, synthetic construct
  source 1..75: mol_type = other DNA
aactttcgggaaaataagaattcgtcaaccaataattttcgggaaatcgcggaaacgtcaaccaactatccggta

SEQ ID NO: 548577 - DNA, 75 bp, synthetic construct
  source 1..75: mol_type = other DNA
ggggcatcctgacgctaatgatgggtggataattcctggtgcgtcgtggaaaccgtcacactggatgccgctacc

SEQ ID NO: 548578 - DNA, 75 bp, synthetic construct
  source 1..75: mol_type = other DNA
gctccccccgttccagtagtaccggaagaaaaaccaatgcctaatcctcttagcatgtacgcggttgatgctgtt

SEQ ID NO: 548579 - DNA, 75 bp, synthetic construct
  source 1..75: mol_type = other DNA
tggtcgctctcttcattaacgagtctgcttagcagcggcaaccaggcgttaagcgcagacaatatgaacaatgcc

SEQ ID NO: 548580 - DNA, 75 bp, synthetic construct
  source 1..75: mol_type = other DNA
tgtgctgtgccattgccgccagcgcattaatttccaccggggtgcatgctgcgtcctggaaagatgcgctctcca

SEQ ID NO: 548581 - DNA, 75 bp, synthetic construct
  source 1..75: mol_type = other DNA
ctgatgtactgatttttgaaccgaaagtttttggtgatgagcgtggtttcttttttgagagctttaaccagaagg

SEQ ID NO: 548582 - DNA, 75 bp, synthetic construct
  source 1..75: mol_type = other DNA
gtcaacaaaagatcaaattcaaaaacagaagctcggatatggtgacattgtcattacacgttcaggttcaggaac

SEQ ID NO: 548583 - DNA, 75 bp, synthetic construct
  source 1..75: mol_type = other DNA
gtggaaaagacaactcaatacctgtgcgtattgagggagccaacggtgaaacattcaagtgcgaggcaacccctg

SEQ ID NO: 548584 - DNA, 75 bp, synthetic construct
  source 1..75: mol_type = other DNA
tttttcagcgaaactactcggacgaaaccactcaaccattatcgcattcccgcgagtaaaaaaggagccaatccc

SEQ ID NO: 548585 - DNA, 75 bp, synthetic construct
  source 1..75: mol_type = other DNA
gatattccacaatttattattccgaagtatgagcaactagtccaaaaatacatcggagataaagttcgccaagcc

SEQ ID NO: 548586 - DNA, 75 bp, synthetic construct
  source 1..75: mol_type = other DNA
tgttactgcataaaattagctatggtgctgtgcaaccacaaatagggcaagaagagttgctagctctgaatattc

SEQ ID NO: 548587 - DNA, 75 bp, synthetic construct
  source 1..75: mol_type = other DNA
agccgttaaagtacatgccttagataaaggctgcgcaattagtagccatctaatccgattagaattcgaagatga

SEQ ID NO: 548588 - DNA, 75 bp, synthetic construct
  source 1..75: mol_type = other DNA
caccgttttgaacgcgggctggagaaagtgaccgcgacgtatagcctgcgggatgacggcggcctgaatgtcatt

SEQ ID NO: 548589 - DNA, 75 bp, synthetic construct
  source 1..75: mol_type = other DNA
tcgataccaaacgctatctgggtacatggtatgagattgcccgttttgatcaccgttttgaacgcgggctggaga

SEQ ID NO: 548590 - DNA, 75 bp, synthetic construct
  source 1..75: mol_type = other DNA
gaatgtggcagcagagtgaagggaaagcgtactttaccggcgcaccaactcgcgctgcgctgaaagtgtcattct

SEQ ID NO: 548591 - DNA, 75 bp, synthetic construct
  source 1..75: mol_type = other DNA
tagtattaagtggcacattcttgttggtcagccgacctgaatgggggctgatgcccggctggttaatggcaggtg

SEQ ID NO: 548592 - DNA, 75 bp, synthetic construct
  source 1..75: mol_type = other DNA
gtcgccgtctgcgtccaaccgaagtagtgcgtgagtatgaaaaaacgctgatagatgaactgaatttgctgcggg

SEQ ID NO: 548593 - DNA, 75 bp, synthetic construct
  source 1..75: mol_type = other DNA
ttatgattgagcgggtcgaaatgattgcgcgtctgacggctgaagggacttgtcaggaaagagaccgtgaaatcg

SEQ ID NO: 548594 - DNA, 75 bp, synthetic construct
  source 1..75: mol_type = other DNA
gctatggtgctgtgcaaccacaaatagggcaagaagagttgctagctctgaatattcctgagtacgtactaaatg

SEQ ID NO: 548595 - DNA, 75 bp, synthetic construct
  source 1..75: mol_type = other DNA
tatccatatggaatagtagatttcagtatagtaaaacaagccaaaggacatacatcagatgggcgcatcgtttgg

SEQ ID NO: 548596 - DNA, 75 bp, synthetic construct
  source 1..75: mol_type = other DNA
ctttaagatgccggaaaattcagagtctggaatgcgatgttttgctatcggtgaggtctttaatgtgtatcacgg

SEQ ID NO: 548597 - DNA, 75 bp, synthetic construct
  source 1..75: mol_type = other DNA
tgaatgatgatggacaagctatcttctatggcgcttatagtatcggaacagctttagccgaaattaatgcaaaag

SEQ ID NO: 548598 - DNA, 75 bp, synthetic construct
  source 1..75: mol_type = other DNA
ctgggaattcatatcaatatccatagaagtgaatctattaagaacgtggggaaccctggcaccatttttgtaacc

SEQ ID NO: 548599 - DNA, 75 bp, synthetic construct
  source 1..75: mol_type = other DNA
gcgggaagaaaaatactgatgaaaggtacctgtgtttttcctctgggagaaccggttaagggaacacataatatt

SEQ ID NO: 548600 - DNA, 75 bp, synthetic construct
  source 1..75: mol_type = other DNA
gagtcgattgcggattattttgacgtggtgggagattttgactgtgatgaaccgccccgggtttcctggagagtg

SEQ ID NO: 548601 - DNA, 75 bp, synthetic construct
  source 1..75: mol_type = other DNA
taaccatccagcccggtggcttaattaatgataagagcgccggttccggtggtgctgtttatctggatgttaact

SEQ ID NO: 548602 - DNA, 75 bp, synthetic construct
  source 1..75: mol_type = other DNA
gcacgcccagggcaaactggtccgctgtgtggaaggcgaggtatttgacgtggcggtagatatccgtcgttcatc

SEQ ID NO: 548603 - DNA, 75 bp, synthetic construct
  source 1..75: mol_type = other DNA
ctggcgttagccaagatgtatatcaggatgcgactaagtatcaagctaaagacaaaatgatcgttgtcggtatgg

SEQ ID NO: 548604 - DNA, 75 bp, synthetic construct
  source 1..75: mol_type = other DNA
agaccaatttttagagcgcgaaagtgcccaaatgaatgcggatataataacatcagtgaaatatatccccctcca

SEQ ID NO: 548605 - DNA, 75 bp, synthetic construct
  source 1..75: mol_type = other DNA
tgcgcatggatttttggtgttgagtgaaacggctgagtttttgtataagacgacaaattattatcatcctgatgc

SEQ ID NO: 548606 - DNA, 75 bp, synthetic construct
  source 1..75: mol_type = other DNA
tggttagatcgcaacgtggaaccgtaccaccgcgagcaaaaccagattcgtatcgggacgaagtatttcttctga

SEQ ID NO: 548607 - DNA, 75 bp, synthetic construct
  source 1..75: mol_type = other DNA
gccaaacggacggcaatcaataaaaccaaaattgatgatgtaaaagccattgcggatgcctggcaaattaccggc

SEQ ID NO: 548608 - DNA, 75 bp, synthetic construct
  source 1..75: mol_type = other DNA
aagaactccgcctgttacaggagtccgcccgtattggtcttgttctgatggggaatcaccgcgtttattcaaaca

SEQ ID NO: 548609 - DNA, 75 bp, synthetic construct
  source 1..75: mol_type = other DNA
gactgcgcacgcttgtagaaagtgaaaaagcgacttatgcacaaattgcacgcgagtctggcgtggccgcaggaa

SEQ ID NO: 548610 - DNA, 75 bp, synthetic construct
  source 1..75: mol_type = other DNA
agcagccacttctgcatccaccgcgaccacgaaagcgtcagaagctgccacctcagcccgggatgcgtcagcttc

SEQ ID NO: 548611 - DNA, 75 bp, synthetic construct
  source 1..75: mol_type = other DNA
gcaggcattctgcaatactgcgcgaagcaaaagctggcgtcggtaaccgatgccgaaaacatcaagaaccaggtg

SEQ ID NO: 548612 - DNA, 75 bp, synthetic construct
  source 1..75: mol_type = other DNA
tacacgcatgattctgtcagcaaaagaagagttagctaatgaatcgcatccgattgatggcctgtccggtgaata

SEQ ID NO: 548613 - DNA, 75 bp, synthetic construct
  source 1..75: mol_type = other DNA
gggctgaatctgtcccgtcatgcgcatatcaggcagtcagccattaaccggttatggggctgggcagttttttcc

SEQ ID NO: 548614 - DNA, 75 bp, synthetic construct
  source 1..75: mol_type = other DNA
ctgtgcagggaaatcattaccccgtttctggcccggggatgttttccctgtcttctatatttgtcatcttactgt

SEQ ID NO: 548615 - DNA, 75 bp, synthetic construct
  source 1..75: mol_type = other DNA
gttcaaaaagaacaactgcaaaaaatgatcgtccgtaaaggtgaattgtctttttacgatatttttacccttgct

SEQ ID NO: 548616 - DNA, 75 bp, synthetic construct
  source 1..75: mol_type = other DNA
gactgcgcacgcttgtagaaagcgaaaaaacaacttatgcgcaaatcgcccgtgaatctggagttgccgcaggaa

SEQ ID NO: 548617 - DNA, 75 bp, synthetic construct
  source 1..75: mol_type = other DNA
gcttaaccttgccaccagtgatgccgcggcggtggccggccttgtgatgacggtgctgaccgttggtctggtgtc

SEQ ID NO: 548618 - DNA, 75 bp, synthetic construct
  source 1..75: mol_type = other DNA
atcattaccccgtttctggcccggggattttttcccgacgttctatgcctgccatcttactgtgctgggcgttct

SEQ ID NO: 548619 - DNA, 75 bp, synthetic construct
  source 1..75: mol_type = other DNA
gatattgcatccgccgtggcgctggaggatgcgagcacgacgaaaaaggggatagtacagctcagcagtgcaaca

SEQ ID NO: 548620 - DNA, 75 bp, synthetic construct
  source 1..75: mol_type = other DNA
gcattttattggtcatgtagccctgatgatttactggtagagttagtattatcgcaggaaaaaaatatgcagtaa

SEQ ID NO: 548621 - DNA, 75 bp, synthetic construct
  source 1..75: mol_type = other DNA
ggggaaatatcgacatttaaaaattctgtgttttcagaggcaagaattgttgatttaacatacaatcattatgag

SEQ ID NO: 548622 - DNA, 75 bp, synthetic construct
  source 1..75: mol_type = other DNA
acgttgtggcttgctcttaagcgatttaattccggacataaaaatgtatctggcatcaatgataaacgcggctct

SEQ ID NO: 548623 - DNA, 75 bp, synthetic construct
  source 1..75: mol_type = other DNA
agatggaaaagcaaatgatccgcgaggcgctttcacgtcataacagcaagaaggaagttgctgatgaactgggca

SEQ ID NO: 548624 - DNA, 75 bp, synthetic construct
  source 1..75: mol_type = other DNA
ggatcggtttatcctggcattgctcctgatgtcgtcgaaatattgcgtaagcatcgttggcccggaaacctgcgc

SEQ ID NO: 548625 - DNA, 75 bp, synthetic construct
  source 1..75: mol_type = other DNA
aattctgcgaagatctcttctaccgacttaatgttatcccgataactcttccaccgctgcgtgaacgtcaggaag

SEQ ID NO: 548626 - DNA, 75 bp, synthetic construct
  source 1..75: mol_type = other DNA
actggcaacaaatataactcattttggtatagcgctgtatcagggaaaaggaatgtcaacacctcttatattagg

SEQ ID NO: 548627 - DNA, 75 bp, synthetic construct
  source 1..75: mol_type = other DNA
ggcagccacttctgcatccgccgcgaccacgaaggcgtcagaagcagccacctcagcccgggatgcggctgcctc

SEQ ID NO: 548628 - DNA, 75 bp, synthetic construct
  source 1..75: mol_type = other DNA
ggctgcttcagccggtgcacatacccattcgatgacatttgtttcaggtggttccagtggtgctccgggaagtgg

SEQ ID NO: 548629 - DNA, 75 bp, synthetic construct
  source 1..75: mol_type = other DNA
tcgtgactcagaatctcaaaaggtcaatttgtggcttgctattaaacgttttaattccgcgcatacaaatgtatc

SEQ ID NO: 548630 - DNA, 75 bp, synthetic construct
  source 1..75: mol_type = other DNA
acccaaaagaagattgcattttattggtccagtgttcctgataatttacttgtagagttagttatgttgcaggaa

SEQ ID NO: 548631 - DNA, 75 bp, synthetic construct
  source 1..75: mol_type = other DNA
gatatttatgttaagttaacttcaaatctttttaagaataatgatgcaattgcattgtcagagattaaaattgcg

SEQ ID NO: 548632 - DNA, 75 bp, synthetic construct
  source 1..75: mol_type = other DNA
aactctgccgcgcttctggccccgggatttttttccggtgttttacatcctgcatctgactgtgctgggcattct

SEQ ID NO: 548633 - DNA, 75 bp, synthetic construct
  source 1..75: mol_type = other DNA
ctgtgcagggaaatcattaccccgtttctggcccggagattttttcccgactttctatgcctgccatctggctgt

SEQ ID NO: 548634 - DNA, 75 bp, synthetic construct
  source 1..75: mol_type = other DNA
ttgtccggcaccagttacggcattgccgggctgctgatgctggctgtcagccaccggctgtaccgggcggaagac

SEQ ID NO: 548635 - DNA, 75 bp, synthetic construct
  source 1..75: mol_type = other DNA
caatgtccaattacactggagcagcctgaaaaaggtatttttgtgaagaattcagatggttcagatgtatgtact

SEQ ID NO: 548636 - DNA, 75 bp, synthetic construct
  source 1..75: mol_type = other DNA
ttccgctgtttgccctggtgtgggggctgaatctgtcccgtcatacgcatatccggcaacaggccattaaccggc

SEQ ID NO: 548637 - DNA, 75 bp, synthetic construct
  source 1..75: mol_type = other DNA
gacgacgcagaacgaggtggttttgatgatgccgttaagtttctacgcagtgaagcgtctggtgtacgtttgttc

SEQ ID NO: 548638 - DNA, 75 bp, synthetic construct
  source 1..75: mol_type = other DNA
ctggtgtcactgatgatgttgctgcttctgctcagaaagcttctcaagtagctgaagaggctgctgatgctgctc

SEQ ID NO: 548639 - DNA, 75 bp, synthetic construct
  source 1..75: mol_type = other DNA
tgatgcccggttatgagtttgcgcagaaaaactcagaattgcaggccgtgctaggagtggcaaaagactccgccg

SEQ ID NO: 548640 - DNA, 75 bp, synthetic construct
  source 1..75: mol_type = other DNA
ccggtaattccaggtgaggtgctgtcagcaattatgaaggttgccagggttcgtgccgatttcgatgattttgac

SEQ ID NO: 548641 - DNA, 75 bp, synthetic construct
  source 1..75: mol_type = other DNA
agcacctttcggagcggagatgcaacgattaagccgggtaatggtattgagcaagcaactcactggatgccacta

SEQ ID NO: 548642 - DNA, 75 bp, synthetic construct
  source 1..75: mol_type = other DNA
cgtcaaccaataattttcgggaaatcgcggaaacgtcaaccaactatccggtaattcctagtgaagtgttgtccg

SEQ ID NO: 548643 - DNA, 75 bp, synthetic construct
  source 1..75: mol_type = other DNA
acacgggcgtcatgttcgggcaggcactggctgacgcgctgatgctgccgcttaatgcgttcaacaaactgcgca

SEQ ID NO: 548644 - DNA, 75 bp, synthetic construct
  source 1..75: mol_type = other DNA
atgagtaacaatgtaaaattacaggtattgctcagggctgttgaccaggcatcccgtattgaggggttccgcaag

SEQ ID NO: 548645 - DNA, 75 bp, synthetic construct
  source 1..75: mol_type = other DNA
gctgtttgccctggtgtgggggctgaatctgtcccgtcatgcgcatatccggcaaccggccattaaccggctgtg

SEQ ID NO: 548646 - DNA, 75 bp, synthetic construct
  source 1..75: mol_type = other DNA
gggctgaatctgtcccgtcatgcgcatatccggcaaccggccattaaccggctgtggggatggggaattattgcc

SEQ ID NO: 548647 - DNA, 75 bp, synthetic construct
  source 1..75: mol_type = other DNA
cagttcgcatattatctggccggctttccttggtatgaggggaatatcctgtttgcctttgcagttgcggcacag

SEQ ID NO: 548648 - DNA, 75 bp, synthetic construct
  source 1..75: mol_type = other DNA
tcaccggctgtaccgggcggaagacagagcggaacgtctggcgctgcttgcatgcctgctggccgttattccggc

SEQ ID NO: 548649 - DNA, 75 bp, synthetic construct
  source 1..75: mol_type = other DNA
caccagttacggcattgccgggctgctgatgctggcagtcagccaccggctgtaccgggcggaagacagaacgga

SEQ ID NO: 548650 - DNA, 75 bp, synthetic construct
  source 1..75: mol_type = other DNA
tcccgtcatgcgcatatccggcaaccagccattaaccggctgtggggatgggggattattgctcagttcgcatat

SEQ ID NO: 548651 - DNA, 75 bp, synthetic construct
  source 1..75: mol_type = other DNA
ggatgtttctggtcgggcgtggggcctttccgctgtttgccctggtgtgggggctgaatctgtcccgtcatgcgc

SEQ ID NO: 548652 - DNA, 75 bp, synthetic construct
  source 1..75: mol_type = other DNA
tatgtaacggagcatatttctcaggaagaggaagcgtatgcggcagagcgtctggcgaaaattcgccgtcagaac

SEQ ID NO: 548653 - DNA, 75 bp, synthetic construct
  source 1..75: mol_type = other DNA
cggaaaaccatcatcaatgtcaccacgccaccaaaatggaaggtgaaaaagcagaacctggccgagaaagcagcc

SEQ ID NO: 548654 - DNA, 75 bp, synthetic construct
  source 1..75: mol_type = other DNA
gcacccgattgatggcctgtccggtgaatatgcggagaaatctcttggggaatgggcggaacagattcgcaaagg

SEQ ID NO: 548655 - DNA, 75 bp, synthetic construct
  source 1..75: mol_type = other DNA
caataagtctttacgtgaagttttcgacgttacacgcatgattctgtcagcgaaagaagagttggctaatgaacc

SEQ ID NO: 548656 - DNA, 75 bp, synthetic construct
  source 1..75: mol_type = other DNA
gttgcttctggcagtgtggttgcctttctctggtaccagttacggcattgccgggctgctgatgctggctgtcag

SEQ ID NO: 548657 - DNA, 75 bp, synthetic construct
  source 1..75: mol_type = other DNA
atatcatcaaaacggtggcactggtgctgatggttctggaccatgcaaaccgcattctgcatctggaccagtcgt

SEQ ID NO: 548658 - DNA, 75 bp, synthetic construct
  source 1..75: mol_type = other DNA
gggattatttcaccctcagagagcgaatcgtcacagtgacgaaacaggttggatatttgcaggaatacatcaaag

SEQ ID NO: 548659 - DNA, 75 bp, synthetic construct
  source 1..75: mol_type = other DNA
ggagcgtgaccaggcgaaagccaccgttactgacatgcagcagcgccagcgcgatgttgctgctcttgatgccaa

SEQ ID NO: 548660 - DNA, 75 bp, synthetic construct
  source 1..75: mol_type = other DNA
aacgggattatttcatcctcagagaacggttgatgacaatgcagaagcagctggaaggggcgcaggaatatatcc

SEQ ID NO: 548661 - DNA, 75 bp, synthetic construct
  source 1..75: mol_type = other DNA
cgggattatttcaccctcagagaacggttgatgacgatgcagaagcaactggaaggggcgcaggaatatattcgc

SEQ ID NO: 548662 - DNA, 75 bp, synthetic construct
  source 1..75: mol_type = other DNA
cacctgtgcaaagtcaacggccggagccagcagcatgggcgatggagaaagcccaagacttacagcagatgctga

SEQ ID NO: 548663 - DNA, 75 bp, synthetic construct
  source 1..75: mol_type = other DNA
ctgacgttgccgctggtcgtaagcgcctgcggatcaacgccacctgtccaggctccgtgcgtgaagcccccgcca

SEQ ID NO: 548664 - DNA, 75 bp, synthetic construct
  source 1..75: mol_type = other DNA
tgctgaactcaattattaccgtctccgaagtggaatcgacaagataaccgcgcaggttaactacctgcaggaata

SEQ ID NO: 548665 - DNA, 75 bp, synthetic construct
  source 1..75: mol_type = other DNA
agcgcctgcaagtcgccgccacctgtgcaaagtcaacgaccggagccagcagcatgggcgatggagaaagcccag

SEQ ID NO: 548666 - DNA, 75 bp, synthetic construct
  source 1..75: mol_type = other DNA
ccgctctggttatctgcatcatcatctgtctgtcatgggctgttaatcactaccgtgataacgccatcgcctaca

SEQ ID NO: 548667 - DNA, 75 bp, synthetic construct
  source 1..75: mol_type = other DNA
ccaccagcatggataatgcaaccagcccccgactggcagacaccgctgaacgggattatttcaccctcagagaac

SEQ ID NO: 548668 - DNA, 75 bp, synthetic construct
  source 1..75: mol_type = other DNA
ctcggtatcagagacggaatcatcagcgaccaggcagcattgagaacgcttcaggaatatatccgtactcagtgc

SEQ ID NO: 548669 - DNA, 75 bp, synthetic construct
  source 1..75: mol_type = other DNA
tgaggaagaaaaacaacacttcattaagagatctcttcctgcaattcgatttggtttaaaaactgtactaaaagc

SEQ ID NO: 548670 - DNA, 75 bp, synthetic construct
  source 1..75: mol_type = other DNA
caggcaggaataccagcggctggagaaagaactcgcctttcagcgcgcctatgacgcggcctggcaacgcctgta

SEQ ID NO: 548671 - DNA, 75 bp, synthetic construct
  source 1..75: mol_type = other DNA
accaggcagcacagcaaaaatgacttttggttcagtcttctttggtaacagtaaaggaaccctgaataatgacat

SEQ ID NO: 548672 - DNA, 75 bp, synthetic construct
  source 1..75: mol_type = other DNA
acaccccgctggcagaaaggttagatacgatctcgcaacagcatcatttaagcggttcagatttagcgcgtatcg

SEQ ID NO: 548673 - DNA, 75 bp, synthetic construct
  source 1..75: mol_type = other DNA
caccgacaggcaaagcatatgatgccctcaaagagttgggtgttaaaacctcggacagaaaaggcaatacgcgcc

SEQ ID NO: 548674 - DNA, 75 bp, synthetic construct
  source 1..75: mol_type = other DNA
ttgggcgagatggcgttctggttattttggaggccatgaaggcaacaggaaatatgccagccaccgatgctttcc

SEQ ID NO: 548675 - DNA, 75 bp, synthetic construct
  source 1..75: mol_type = other DNA
cggaggtggcactccgctatccaatatggtcaaagaggttgctgctgattttgcggcgaagcttcgcaaaggagg

SEQ ID NO: 548676 - DNA, 75 bp, synthetic construct
  source 1..75: mol_type = other DNA
tagaccctgatttactaagagcaatatcatggaaagaatcccgttatcgggttaatgccatcggtattaatccga

SEQ ID NO: 548677 - DNA, 75 bp, synthetic construct
  source 1..75: mol_type = other DNA
cgggataaagagcagtaaaggcatccaggttccgaccacgaagaaatcactcccccaaattaacagtgtgcagaa

SEQ ID NO: 548678 - DNA, 75 bp, synthetic construct
  source 1..75: mol_type = other DNA
ttttaacgaactggcccgctacggaattaagccagaacatctgacaacagatccctgcatgaacatttataccgg

SEQ ID NO: 548679 - DNA, 75 bp, synthetic construct
  source 1..75: mol_type = other DNA
tcagtgtttatattggtgttgtctgttcttatttgctcagttaaaattaattccccgcaatattttatattgttc

SEQ ID NO: 548680 - DNA, 75 bp, synthetic construct
  source 1..75: mol_type = other DNA
gcgctggcagcggagaatgcggggctgaacaagttcatcaaagatgattgctggatttgggatgacaaaagtgaa

SEQ ID NO: 548681 - DNA, 75 bp, synthetic construct
  source 1..75: mol_type = other DNA
atgaaccaagtagctaaattggacctcgcccaaatccgtcaacaagccatcaatgatggtctgctggtggaccaa

SEQ ID NO: 548682 - DNA, 75 bp, synthetic construct
  source 1..75: mol_type = other DNA
atgatgttgccgctggtcgtcgtcggttgcgcatcaaagcagtctgtcagtctgatcctacccacgtaatatgga

SEQ ID NO: 548683 - DNA, 75 bp, synthetic construct
  source 1..75: mol_type = other DNA
ccccagcgccatcttacttggtgcgcttcatggcctggaaccagggcactcaaaaacgatgatggcggcgtttat

SEQ ID NO: 548684 - DNA, 75 bp, synthetic construct
  source 1..75: mol_type = other DNA
atgaaccgtgtactgtgcgtggtcatcattgccctgctggtggcctgtggtgcgcttagtctggggctgaatcat

SEQ ID NO: 548685 - DNA, 75 bp, synthetic construct
  source 1..75: mol_type = other DNA
cctatttttccagtctgttaattggtttagtcggggtgtatatgggagtgcatggctttatgggtattatgagat

SEQ ID NO: 548686 - DNA, 75 bp, synthetic construct
  source 1..75: mol_type = other DNA
tggcaaaacgctggagcggctttaacacactcgccaaaaaagccccctatttttccagcctgttaattggcttag

SEQ ID NO: 548687 - DNA, 75 bp, synthetic construct
  source 1..75: mol_type = other DNA
cgtcagtttcagcatcggtctggcactaacgctggttacagtaggcgttggagcggcaatcagtgttcaacaagt

SEQ ID NO: 548688 - DNA, 75 bp, synthetic construct
  source 1..75: mol_type = other DNA
tgcgtgaagcagctgagagcgccagtaaaattaactggacaggccttgaagatgatttgaacgctgatggatata

SEQ ID NO: 548689 - DNA, 75 bp, synthetic construct
  source 1..75: mol_type = other DNA
atatggaccgcaaattgttgctggcggtaatcgataagttctttggtgggccggtaggtctggataacctggcgg

SEQ ID NO: 548690 - DNA, 75 bp, synthetic construct
  source 1..75: mol_type = other DNA
acgatggcaccatctcggcagatatcgctgctcaggcgctggatatgttgaatgtcgatgctgaaggtttcgatt

SEQ ID NO: 548691 - DNA, 75 bp, synthetic construct
  source 1..75: mol_type = other DNA
atgattgaagcagaccgtctgatttctgccggtacgaccttgccggaagatgtggtagatcgcgctattcgcccc

SEQ ID NO: 548692 - DNA, 75 bp, synthetic construct
  source 1..75: mol_type = other DNA
actggtcgtcagtttcagcattggcctggcgttaacgctggtcaccgtaggcgttggcgcagcaatcagcgttca

SEQ ID NO: 548693 - DNA, 75 bp, synthetic construct
  source 1..75: mol_type = other DNA
taccgttgttggtcagaaaaaagccaaaccaggtcaggacttcttcccgctgaccgttaactatcaggagcgtac

SEQ ID NO: 548694 - DNA, 75 bp, synthetic construct
  source 1..75: mol_type = other DNA
gctgcccgcgtgggttacatcaatgatcagtacgtattgaacccgacccaggacgagctgaaagagagcaaactg

SEQ ID NO: 548695 - DNA, 75 bp, synthetic construct
  source 1..75: mol_type = other DNA
taccgttgtcggccagaaaaaagccaaaccaggtcaggacttcttcccgctgaccgttaactatcaggagcgtac

SEQ ID NO: 548696 - DNA, 75 bp, synthetic construct
  source 1..75: mol_type = other DNA
ctcagagcgcgactgataataatgcaaaaacaacttgaaggggcacagctatacattcgagagcaatgcctcaga

SEQ ID NO: 548697 - DNA, 75 bp, synthetic construct
  source 1..75: mol_type = other DNA
aagcccagcgcgataaaaatgccagagaactgaagctggcaaactcgacaattactgatatgcaggtgcgccagc

SEQ ID NO: 548698 - DNA, 75 bp, synthetic construct
  source 1..75: mol_type = other DNA
tctggggctgaatcattaccgcgataacgccatcacctacaaagcgcagcgcgataaaaaagccagagagctgga

SEQ ID NO: 548699 - DNA, 75 bp, synthetic construct
  source 1..75: mol_type = other DNA
gtgctgtctaagaaagaaaagggtattacattgcttaatccgatcgttcgtaaattccagtacggccaacacacc

SEQ ID NO: 548700 - DNA, 75 bp, synthetic construct
  source 1..75: mol_type = other DNA
gaaaccatcgcgacgctgcttgctgaagacgaaaccctggacgaaaacgaactgggtgaaattctgcacgctatc

SEQ ID NO: 548701 - DNA, 75 bp, synthetic construct
  source 1..75: mol_type = other DNA
ggaaggggcgcaggaatatatccgcactcagtgcactaagctggctttttatacccggagatacatgaagaatta

SEQ ID NO: 548702 - DNA, 75 bp, synthetic construct
  source 1..75: mol_type = other DNA
tccagtacggtcaacacaccgtgactctggaaaccggcatgatggctcgtcaggctactgctgctgttatggtta

SEQ ID NO: 548703 - DNA, 75 bp, synthetic construct
  source 1..75: mol_type = other DNA
gatctggttgttgccggtactgaagccgctgtactgatggttgaatctgaagctgaactgctgagcgaagaccag

SEQ ID NO: 548704 - DNA, 75 bp, synthetic construct
  source 1..75: mol_type = other DNA
cggcggtaaagaaggtctggtccacatctctcaaatcgctgacaaacgcgttgagaaagtgaccgattacctgca

SEQ ID NO: 548705 - DNA, 75 bp, synthetic construct
  source 1..75: mol_type = other DNA
caactaatgagtgggagagcctcgtttggagaaaaggctgccagaagaatagagcaaacatacgggatgccggaa

SEQ ID NO: 548706 - DNA, 75 bp, synthetic construct
  source 1..75: mol_type = other DNA
aaagataaaactctgccacccaaagagaagagctacctatctcaattaatgagtgggagagcctcgtttggagaa

SEQ ID NO: 548707 - DNA, 75 bp, synthetic construct
  source 1..75: mol_type = other DNA
acccctaaccaattagaattgctacaaatatttagtgctttccctgataatgagcagcaggagatcataaaagaa

SEQ ID NO: 548708 - DNA, 75 bp, synthetic construct
  source 1..75: mol_type = other DNA
actcctaaccaattggaattgttgcaaatatttagtgcttttcctgacgctgagcagcaggaaatcataaaagag

SEQ ID NO: 548709 - DNA, 75 bp, synthetic construct
  source 1..75: mol_type = other DNA
tttatcgccgtcggtttattaataagtatgccctcctctaaaaaatcacgcaggaaacggaagtcccgcccatga

SEQ ID NO: 548710 - DNA, 75 bp, synthetic construct
  source 1..75: mol_type = other DNA
tttcagcatcaccgttgactgcagcaaagcaaatccgaatccaggtagtacagctaaaatgaccttcggttctgt

SEQ ID NO: 548711 - DNA, 75 bp, synthetic construct
  source 1..75: mol_type = other DNA
cgtctaaaactgcaacctacgattttaaagcatcctatgttcgtgctgatgcaagcaaagcagcaactgccggtt

SEQ ID NO: 548712 - DNA, 75 bp, synthetic construct
  source 1..75: mol_type = other DNA
aaggttctgctatcaaacaggttaaaatcaacaaccctggcgatatctattccaaagcactggatgcaacttcta

SEQ ID NO: 548713 - DNA, 75 bp, synthetic construct
  source 1..75: mol_type = other DNA
ggtacgccagcgccagtgcgaagaatatgaagcctgcaagcgggcttcatctgacaatggagactttgaatcatg

SEQ ID NO: 548714 - DNA, 75 bp, synthetic construct
  source 1..75: mol_type = other DNA
ggcgtgcaggcgggcgatctgtttattgccaccaccggttacaccggtgaagcgggctacgaaattgcgctgccc

SEQ ID NO: 548715 - DNA, 75 bp, synthetic construct
  source 1..75: mol_type = other DNA
ggatgcaacgacaaaatctgctgtttatgattttaaagcgtcttacgttcgtgccgtcgcagaccaaacagcaac

SEQ ID NO: 548716 - DNA, 75 bp, synthetic construct
  source 1..75: mol_type = other DNA
aaccgacggtttacctgttggatgtaaggctagcacacaaaattcacgggggatgattcatgaaaatcaggcatg

SEQ ID NO: 548717 - DNA, 75 bp, synthetic construct
  source 1..75: mol_type = other DNA
tattcttctgactactgcgatcgaaagctttatgcagattgcaaatgagcaagaaccctacgcacaaagtcagtg

SEQ ID NO: 548718 - DNA, 75 bp, synthetic construct
  source 1..75: mol_type = other DNA
ctgttcacttccctggggatctttgataaacagtctcacagcactaacagtattcttctgactactgcgatcgaa

SEQ ID NO: 548719 - DNA, 75 bp, synthetic construct
  source 1..75: mol_type = other DNA
ccggaaatatggcctcagtgggcgctgccggtgtggggattgctgctgcgggaacgatggccggagttaagctgc

SEQ ID NO: 548720 - DNA, 75 bp, synthetic construct
  source 1..75: mol_type = other DNA
cagcgacagcggcatttctggtcgttgcctgtagttcacctacaccgccgcgtggcgttactgtggtaaataatt

SEQ ID NO: 548721 - DNA, 75 bp, synthetic construct
  source 1..75: mol_type = other DNA
ctggaacgcctctaaacgtcaggaatggtcaaacaaacttttccagatgaaacacgtcggcagtattaacgctgt

SEQ ID NO: 548722 - DNA, 75 bp, synthetic construct
  source 1..75: mol_type = other DNA
ggaatcacagtttgcaggtcaaggtgatattgatttactggaaggtgatgctaaaactaccgcccctgcaatcga

SEQ ID NO: 548723 - DNA, 75 bp, synthetic construct
  source 1..75: mol_type = other DNA
tcggtgaagatttccggctttcccagcaggatttcagccgctttgtgctggattttctggtgttcggtaatgcgt

SEQ ID NO: 548724 - DNA, 75 bp, synthetic construct
  source 1..75: mol_type = other DNA
atgcccggttatgagtttgcgcagaaaaactcagaattgcaggccgtgctaggtgtggcaaaagactccgccgaa

SEQ ID NO: 548725 - DNA, 75 bp, synthetic construct
  source 1..75: mol_type = other DNA
acggggtacatgcacccggtatacaaacgttggcgaaagccttgcgtgagtttgctgacgttcaggtggtcgccc

SEQ ID NO: 548726 - DNA, 75 bp, synthetic construct
  source 1..75: mol_type = other DNA
ccggaaatatggcctcagtgggcgctgccggtgtggggattgcggcggcgggaacgatggccggagttaagctgc

SEQ ID NO: 548727 - DNA, 75 bp, synthetic construct
  source 1..75: mol_type = other DNA
taatgcgttcaacaaactgcgcagcggtattgactgggtactggaaaaactcggtgttatcaacaaagagtcaga

SEQ ID NO: 548728 - DNA, 75 bp, synthetic construct
  source 1..75: mol_type = other DNA
ggcaaaacttaacgcagtcaaacagcgttatcaggcaggaaaggaactggccggaaatatggcctcagtgggcgc

SEQ ID NO: 548729 - DNA, 75 bp, synthetic construct
  source 1..75: mol_type = other DNA
ggtcagttaaatatcagtggtctggttgttgataacacctgtgaaacccgcgttgacggcggtaataaagatggt

SEQ ID NO: 548730 - DNA, 75 bp, synthetic construct
  source 1..75: mol_type = other DNA
cactgcgtaagctgacgcagacggccacgcaatatgtgctcaggctcgacggctggatccagaaaaatcaggggc

SEQ ID NO: 548731 - DNA, 75 bp, synthetic construct
  source 1..75: mol_type = other DNA
gcgacgcgctgacctatgccgcgccggtagcaaaaaatgccggggtgagcatcgagcaaaccgccgcaatggtcg

SEQ ID NO: 548732 - DNA, 75 bp, synthetic construct
  source 1..75: mol_type = other DNA
atcaatgccatcatcgcggcagcaggcgcaatgggggcaatcttcacgacggttggcagtgctgttatgacggcc

SEQ ID NO: 548733 - DNA, 75 bp, synthetic construct
  source 1..75: mol_type = other DNA
tgctgctgaacgcagtcgaccgggcaagccgcccgcttaaagcgattcagaacgccagcaaatccctgtctggtg

SEQ ID NO: 548734 - DNA, 75 bp, synthetic construct
  source 1..75: mol_type = other DNA
agtggcgaaaaatgccggggtaagtatcgaagaaaccgccgcaatggtgggggcgctacacgattccaaaatcac

SEQ ID NO: 548735 - DNA, 75 bp, synthetic construct
  source 1..75: mol_type = other DNA
cgtatcgacggattccgaaaagccagcgcacagcttgccgtgaccggtcacgcgcttgataaagcgaaacaggag

SEQ ID NO: 548736 - DNA, 75 bp, synthetic construct
  source 1..75: mol_type = other DNA
tgctgctgaaagctgtcgaccaggcgacccgaccctttaaagcgctccagacggcgagcaaatcgctgtctggcg

SEQ ID NO: 548737 - DNA, 75 bp, synthetic construct
  source 1..75: mol_type = other DNA
acgggttatatcaaggtgccaacagcggaaacagctccagaccttgagacaattcgcattgctatatcaccacaa

SEQ ID NO: 548738 - DNA, 75 bp, synthetic construct
  source 1..75: mol_type = other DNA
caatctgttgtgtccagaccttgatggcactatccgtgactttgctgcccagcttcgcaaaggaggcaaccagtg

SEQ ID NO: 548739 - DNA, 75 bp, synthetic construct
  source 1..75: mol_type = other DNA
atcacatcagcctgaccggtggtactgcgccggggacacagcttgaccgccagttacaggatgcgctcgaaaaat

SEQ ID NO: 548740 - DNA, 75 bp, synthetic construct
  source 1..75: mol_type = other DNA
cggggcgttgcttatccgtaaatactgggagcctgtcagcacattctttggcggtgtgatggaagggctgaaagc

SEQ ID NO: 548741 - DNA, 75 bp, synthetic construct
  source 1..75: mol_type = other DNA
agtggcgaaaaatgccggggtaagtatcgaagaaaccaccgcaatggtgggggcgctgcacgattccaaaatcac

SEQ ID NO: 548742 - DNA, 75 bp, synthetic construct
  source 1..75: mol_type = other DNA
ctagatagctgcaaaaatgtcggcgttatatttggtcaggcactggccgatgcgctgatgttgcctctgaatatt

SEQ ID NO: 548743 - DNA, 75 bp, synthetic construct
  source 1..75: mol_type = other DNA
gcgctggctgcggagaatgcggggctgaagtcggtgtgtgaagaccgtcgcacgttcatcatgaatggggtgcag

SEQ ID NO: 548744 - DNA, 75 bp, synthetic construct
  source 1..75: mol_type = other DNA
cgttacttatccgtaaatactgggagcctgtcagcgcattctttggcggtgtggttgaagggctgaaagcggcat

SEQ ID NO: 548745 - DNA, 75 bp, synthetic construct
  source 1..75: mol_type = other DNA
ttgcgccggtcggggaaatgttcgcgccgctggcacccgtctttgacggcctcagcgagaaacttcgcggtgtct

SEQ ID NO: 548746 - DNA, 75 bp, synthetic construct
  source 1..75: mol_type = other DNA
acaaaaacgctggacgctacgactaaatctgcaacctatgattttaaagcatcctatgtccgtgctgaagcaagc

SEQ ID NO: 548747 - DNA, 75 bp, synthetic construct
  source 1..75: mol_type = other DNA
gtgatgcactgacttacctcggtccggttgcgaggacggcaggtgtaagtcttgagcaggcagcggccatgacag

SEQ ID NO: 548748 - DNA, 75 bp, synthetic construct
  source 1..75: mol_type = other DNA
ggatcgccgcacgttcattatgaatggcgtgcagcttggttttatcaaggtgccaacagtggaaactgatccagc

SEQ ID NO: 548749 - DNA, 75 bp, synthetic construct
  source 1..75: mol_type = other DNA
tcgataaactcaccgctacgataaaggcctcagatggtaaaaccgaggagttggtcaaggttatgcaggataacc

SEQ ID NO: 548750 - DNA, 75 bp, synthetic construct
  source 1..75: mol_type = other DNA
atatccgggacactcaaaaatcactgcgtgaactgaatggccaggcatcccgtattgacgggtttcgcaaggcaa

SEQ ID NO: 548751 - DNA, 75 bp, synthetic construct
  source 1..75: mol_type = other DNA
cgcagattattatcgcaaaaggtggtggtgatgctgaagctatagcggccatgacgcctgtgactctcaacctgt

SEQ ID NO: 548752 - DNA, 75 bp, synthetic construct
  source 1..75: mol_type = other DNA
agcatctgacggtaaaacggctgagcttgtcaaggtcatgcaggacaacctcggcggcgactttaaagagttcca

SEQ ID NO: 548753 - DNA, 75 bp, synthetic construct
  source 1..75: mol_type = other DNA
cgctgataaagatgggattctggcgcaaacccccgccattctgaatatgtcgctggcgaataaaaaaaccatgga

SEQ ID NO: 548754 - DNA, 75 bp, synthetic construct
  source 1..75: mol_type = other DNA
gtgattgaaggcatcatcagcgcctttgcaccggtcggggaaatgttcgctccactggcccccatttttgacggc

SEQ ID NO: 548755 - DNA, 75 bp, synthetic construct
  source 1..75: mol_type = other DNA
ccaaatgctcgcgcaggcgacaagctggttttcattcctgagttcaatcgcggtgtgcgtgaggcgttttataac

SEQ ID NO: 548756 - DNA, 75 bp, synthetic construct
  source 1..75: mol_type = other DNA
aactactggcggaagtacagtccatttgcccgccgggcgtgaccattatgaacgtgcgtcagggtgaacctttag

SEQ ID NO: 548757 - DNA, 75 bp, synthetic construct
  source 1..75: mol_type = other DNA
attgacctatccggtaaaagctgtacggcagagcgtaaagctcgtgatcgtctgccatggaacgtcacctgggta

SEQ ID NO: 548758 - DNA, 75 bp, synthetic construct
  source 1..75: mol_type = other DNA
gtgctgggcgagggttcatgatgactgcagaaggcccaacattaaccggttttaattccgcttacagaactgcat

SEQ ID NO: 548759 - DNA, 75 bp, synthetic construct
  source 1..75: mol_type = other DNA
actgggctataaaacgccgctacctgccattattgatgcctgcgccgcacgcggtattggcgcgattgccccctg

SEQ ID NO: 548760 - DNA, 75 bp, synthetic construct
  source 1..75: mol_type = other DNA
cgtctgtcgctgtatgccgatgagcgcattttaagtgcggcaatcgccacgcgcaccgagcggcgtagcgggctg

SEQ ID NO: 548761 - DNA, 75 bp, synthetic construct
  source 1..75: mol_type = other DNA
tgatcgacgacgccagtgccgacccgctgcgctacaaccttgctgccatgattgcgcgcttcaacgaaacgggcc

SEQ ID NO: 548762 - DNA, 75 bp, synthetic construct
  source 1..75: mol_type = other DNA
cgagcgtggatcgcgatggtgctggcccaggaaacggcaattatgctgctcgacgaacccacgacctggctggat

SEQ ID NO: 548763 - DNA, 75 bp, synthetic construct
  source 1..75: mol_type = other DNA
taccctttctggcggacaacgccagcgagcgtggatcgcgatggtgctggcccaggaaacggcaattatgctgct

SEQ ID NO: 548764 - DNA, 75 bp, synthetic construct
  source 1..75: mol_type = other DNA
ggtacgctagtcatttgattgcactgcgggaagggaaaattgtcgctcagggagcaccaaaagagattgtcactg

SEQ ID NO: 548765 - DNA, 75 bp, synthetic construct
  source 1..75: mol_type = other DNA
attcagcaccaccattaacaatgcgctggcaggtaaacaaccgctggacaatacgctgactaatttgagtggaaa

SEQ ID NO: 548766 - DNA, 75 bp, synthetic construct
  source 1..75: mol_type = other DNA
atcagccgttgtttacccgctggcggaaagaagatgaagaggcggttacaaaagcgatgcaggccacgggaatta

SEQ ID NO: 548767 - DNA, 75 bp, synthetic construct
  source 1..75: mol_type = other DNA
ctggtggcgcgtgggcgttacccgcatcaaccgctgtttacccgctggcgcaaagaagatgaagacgcggtaacg

SEQ ID NO: 548768 - DNA, 75 bp, synthetic construct
  source 1..75: mol_type = other DNA
cgtgccggaaaacgcatcctcgcgtttcatgtttccgactggctggtgccaaccaccgatttagtcaatgatcgg

SEQ ID NO: 548769 - DNA, 75 bp, synthetic construct
  source 1..75: mol_type = other DNA
cagaaacaagttcaacttgccgtgacaaataatgatgaaaacagcacttatttaattcaatcatgggtagaaaat

SEQ ID NO: 548770 - DNA, 75 bp, synthetic construct
  source 1..75: mol_type = other DNA
agaaaaattaagatttcgtcgtagcgcgaattctctgacgctgattaacccgacaccctattacctgacggtaac

SEQ ID NO: 548771 - DNA, 75 bp, synthetic construct
  source 1..75: mol_type = other DNA
aaagcgattccgtcaatggataaatcaaaattgactgagaatacgctacagctcgcaattatcagccgcattaaa

SEQ ID NO: 548772 - DNA, 75 bp, synthetic construct
  source 1..75: mol_type = other DNA
gtgaagtatggcttacgcaacctgaaagaaggggcgaagttccgtaaagggattgagaagctgttaagcgaataa

SEQ ID NO: 548773 - DNA, 75 bp, synthetic construct
  source 1..75: mol_type = other DNA
gcagccaggtgctggcaaaacgtatgccgggtgacctctctgaatactccgtcatccagaccaaagaaccgctgg

SEQ ID NO: 548774 - DNA, 75 bp, synthetic construct
  source 1..75: mol_type = other DNA
tatggggtctggcaaaacgattagccttgccgggccgtcgatcattttcgtttatatgatcatcggttttatgct

SEQ ID NO: 548775 - DNA, 75 bp, synthetic construct
  source 1..75: mol_type = other DNA
attgaactggaaatattctcgccgtattggtggcagaaagatattaacaacacgctggatattagcgtcgatcgt

SEQ ID NO: 548776 - DNA, 75 bp, synthetic construct
  source 1..75: mol_type = other DNA
gccgcctgttatatgcaggtggttggcgggttaccgcagggaacaaaagatttgtacgaagcgcgggaacaagta

SEQ ID NO: 548777 - DNA, 75 bp, synthetic construct
  source 1..75: mol_type = other DNA
tctatatgaagcgcgagaacaagtgaaacaagggattcgccagttgctgccacattcgaaagatgtcggcgtgcc

SEQ ID NO: 548778 - DNA, 75 bp, synthetic construct
  source 1..75: mol_type = other DNA
gtttttgttgctgtgttttgcctctttgccagatcgcgctcattcctcagcctcatcccgcgatgtctgcgtatg

SEQ ID NO: 548779 - DNA, 75 bp, synthetic construct
  source 1..75: mol_type = other DNA
gtccacgctacacaccaattccaccactgaaacgctggtacgtttacagcaaatgggggtcgcccgctggatgct

SEQ ID NO: 548780 - DNA, 75 bp, synthetic construct
  source 1..75: mol_type = other DNA
ggtggtgaaaaggtggtattaaggttgttacagcaggtgagccaggcactggatgttaacacgctgggaatgcag

SEQ ID NO: 548781 - DNA, 75 bp, synthetic construct
  source 1..75: mol_type = other DNA
gataccggatatgtcagcctggaaaagaaatccgagttctaatcgctggagaaaattgcctgatggaaccatcat

SEQ ID NO: 548782 - DNA, 75 bp, synthetic construct
  source 1..75: mol_type = other DNA
ttctcgatccgcaaaaactgcctgatgggcagcgcgaaacattgcaatcaagaatgccgcaagatctgccgccgg

SEQ ID NO: 548783 - DNA, 75 bp, synthetic construct
  source 1..75: mol_type = other DNA
cccattacgctataaacctgaagattgttcgtctcgcggatgccgcagacgcggtgaaacgcattcagaccgaag

SEQ ID NO: 548784 - DNA, 75 bp, synthetic construct
  source 1..75: mol_type = other DNA
cgggctgggcggagactctgcccaactggcgctatgtcgacacacagctgccggtgcgggaagatttttcagtgc

SEQ ID NO: 548785 - DNA, 75 bp, synthetic construct
  source 1..75: mol_type = other DNA
ttacatgggtgcgctccatgactaatgcgcaggcatttattgatgttaagcccgcagatcaaaaccccgcagctt

SEQ ID NO: 548786 - DNA, 75 bp, synthetic construct
  source 1..75: mol_type = other DNA
tctgactgcgccagtctatgcagagatggggaacagtaccgtttctctcggatttgctcatcttcagctctctgg

SEQ ID NO: 548787 - DNA, 75 bp, synthetic construct
  source 1..75: mol_type = other DNA
atccggcagcttcagcgagaactgatatcagggctaattactggagtctactatccggtccttcgtggcggttta

SEQ ID NO: 548788 - DNA, 75 bp, synthetic construct
  source 1..75: mol_type = other DNA
attaaaaatgagattaaggatctaggttattatcttttagtttatcgtaaaaaaatgcgcaatattatgcggcgt

SEQ ID NO: 548789 - DNA, 75 bp, synthetic construct
  source 1..75: mol_type = other DNA
gcgcagtgaagggttgcacacgctcaatgacttttatttattggcggagagaaaaactttacgatttgttcatac

SEQ ID NO: 548790 - DNA, 75 bp, synthetic construct
  source 1..75: mol_type = other DNA
taaaattcagcaatcaattaattccttacatcaacatggcatggtttctggcgacccccatcgtggtaacttcat

SEQ ID NO: 548791 - DNA, 75 bp, synthetic construct
  source 1..75: mol_type = other DNA
tgcatccgtatttgtggcgcgaaggaaaggatttcccgccttcgcccgcgcggatggatgctctgctgaaagccg

SEQ ID NO: 548792 - DNA, 75 bp, synthetic construct
  source 1..75: mol_type = other DNA
gtactggctgaaccgcacgcaggttgggtaaatgcgctggaacaagaatggctacaccgttacggtacgcattaa

SEQ ID NO: 548793 - DNA, 75 bp, synthetic construct
  source 1..75: mol_type = other DNA
acggaaaacattacgttttgtccatacttatatcatgcttatcgaatatatcgatggcgtagagttgtgtgatat

SEQ ID NO: 548794 - DNA, 75 bp, synthetic construct
  source 1..75: mol_type = other DNA
ttacatggacgcgttctctcactaactcacagacatttattgatgtgcagtcagccgatcataccaggaagatta

SEQ ID NO: 548795 - DNA, 75 bp, synthetic construct
  source 1..75: mol_type = other DNA
ttacgccgcggtgtcactcagtatttaatgctgccaaatcgggcgctgggctttttgtccttttcccgttgcagc

SEQ ID NO: 548796 - DNA, 75 bp, synthetic construct
  source 1..75: mol_type = other DNA
tcttcacagggggatgcaataagaaatattgagggattcgcagatggcgggatcggtatgtcttttgatgcaatc

SEQ ID NO: 548797 - DNA, 75 bp, synthetic construct
  source 1..75: mol_type = other DNA
agctcttagctcgcgtagtgttaaacgttatggtgaaattagtggaaatgtaggtacagaaacccgtccacgaaa

SEQ ID NO: 548798 - DNA, 75 bp, synthetic construct
  source 1..75: mol_type = other DNA
gagaaaccatattgccgcacaggatcctcatacccagtatgcacagaaacataatccgacatttaccggagaacc

SEQ ID NO: 548799 - DNA, 75 bp, synthetic construct
  source 1..75: mol_type = other DNA
ggctaacgcgacgatgctcggcagtaagctgaatctgacgcaaatggccgttggtgatgcaaatggtgtgttacc

SEQ ID NO: 548800 - DNA, 75 bp, synthetic construct
  source 1..75: mol_type = other DNA
cacattcgaaagaggtcggcgtgccgattgcgctggagccgctacacccgatgaccgcagccgatcgttcctgtt

SEQ ID NO: 548801 - DNA, 75 bp, synthetic construct
  source 1..75: mol_type = other DNA
caagaacgttccggggctgattagaggcgcagagatatgcgtaagtattgctgaacagcttcgtaaaggagtcat

SEQ ID NO: 548802 - DNA, 75 bp, synthetic construct
  source 1..75: mol_type = other DNA
cagagttttgctttccaggaccatgcgcacgctctgccaaccggagtgggtaatccgtcagaccagatggaaagc

SEQ ID NO: 548803 - DNA, 75 bp, synthetic construct
  source 1..75: mol_type = other DNA
ctgaagaatacccggaactggcaaaggcttacccgacaaataaattgccagatttacgtggtgagtttattcgtg

SEQ ID NO: 548804 - DNA, 75 bp, synthetic construct
  source 1..75: mol_type = other DNA
ggcaaaggcttacccaacattaaaattaccagatttacgcggtgaatttattcgtggctgggatgatgggcgcgg

SEQ ID NO: 548805 - DNA, 75 bp, synthetic construct
  source 1..75: mol_type = other DNA
gccttcagccacaccgccaacaggctggctgaaatgcaacggtgcagctttttctgctgaagaatacccggaact

SEQ ID NO: 548806 - DNA, 75 bp, synthetic construct
  source 1..75: mol_type = other DNA
aacaccgccatattgttgttgccaatgatggttacgacacaaaagatgaatgggaactggctacgattttcaaaa

SEQ ID NO: 548807 - DNA, 75 bp, synthetic construct
  source 1..75: mol_type = other DNA
catctgattggtcgggcaacgaaaaccaaaatcgagctggatcaagattacatcgatgaacgtctgccggtcgca

SEQ ID NO: 548808 - DNA, 75 bp, synthetic construct
  source 1..75: mol_type = other DNA
tacacagaacttaaaggaaaagtggttcagcgtcatcaccgtctcaatgctattgcccgtattgagaagatgata

SEQ ID NO: 548809 - DNA, 75 bp, synthetic construct
  source 1..75: mol_type = other DNA
gctttgcaaggtactgacttgaaagagaaattctatgattatcttgtgaagcaccataatgaagcgagatattta

SEQ ID NO: 548810 - DNA, 75 bp, synthetic construct
  source 1..75: mol_type = other DNA
ggggtatggctgctgcagtggcaggactatgccttcggtctcatgccgattgccctgcctgccgccatgttcttg

SEQ ID NO: 548811 - DNA, 75 bp, synthetic construct
  source 1..75: mol_type = other DNA
cgcggcgatgaatattcagatgctggaatgggcgctggacgtcaccaaaggctcaaaaggcgatttactggagct

SEQ ID NO: 548812 - DNA, 75 bp, synthetic construct
  source 1..75: mol_type = other DNA
caagccgtcagtcgccgccgcgcaatacaacattgccgctaaccatattgataacgtacaaattattcgtatggc

SEQ ID NO: 548813 - DNA, 75 bp, synthetic construct
  source 1..75: mol_type = other DNA
gtactgcggcaacggtaacttttcattagcgctggcgcgcaattttgatcgggtattagccaccgaaatcgccaa

SEQ ID NO: 548814 - DNA, 75 bp, synthetic construct
  source 1..75: mol_type = other DNA
agcttccccgccgccagtgaacttatcaaccagttgatgacggcgatgattgcgggtgtgcgtaataatcccgtt

SEQ ID NO: 548815 - DNA, 75 bp, synthetic construct
  source 1..75: mol_type = other DNA
aaattacttaatggttattaatgaatacccttatcgtaacactcatattggtattaacgattttactgagtatca

SEQ ID NO: 548816 - DNA, 75 bp, synthetic construct
  source 1..75: mol_type = other DNA
aaagacgtacctcttaaacaaaagcacgtccaaggaaaaagagataatctgtcaggctttatgcttgagcagctt

SEQ ID NO: 548817 - DNA, 75 bp, synthetic construct
  source 1..75: mol_type = other DNA
tcgccgaaatgaaatccagagatttatcaggaatggcggagagattaagtgtataagccagttatccgataaaga

SEQ ID NO: 548818 - DNA, 75 bp, synthetic construct
  source 1..75: mol_type = other DNA
ttgtcaattaaaaatataaagcgcattattacggcctggaaaccatctacattcgaaacgtacaaaaaaactttt

SEQ ID NO: 548819 - DNA, 75 bp, synthetic construct
  source 1..75: mol_type = other DNA
atggttgatttccacgagcgcaaacgcctcattcaagaagaaattgatcgctgtcttgccgaatctaagatgaga

SEQ ID NO: 548820 - DNA, 75 bp, synthetic construct
  source 1..75: mol_type = other DNA
tccggcatcaccgtttgaaaatacggcacccgcgcgcccgacatcaagtacggcaacggctgcaaccagcaagcc

SEQ ID NO: 548821 - DNA, 75 bp, synthetic construct
  source 1..75: mol_type = other DNA
tgtttaccgtctttgtggacggtgacaacaagctgggcaaggtggcgtcttttaccccgccaaaactgacccgta

SEQ ID NO: 548822 - DNA, 75 bp, synthetic construct
  source 1..75: mol_type = other DNA
cctaccagcttactgcggttgcggtagatgaagccggtaataccacgacaaaggtcagccggttccgttatgtac

SEQ ID NO: 548823 - DNA, 75 bp, synthetic construct
  source 1..75: mol_type = other DNA
tgggcgctaacgaagggatgaaccatgtgaaagtcttctcgcagctggcgcgcaaactggtgaataaaaacttcc

SEQ ID NO: 548824 - DNA, 75 bp, synthetic construct
  source 1..75: mol_type = other DNA
aagagaacccgttcctcggctatcgtgctgtgcgtatttacccggaatttgctggcctgttccgtacccagctac

SEQ ID NO: 548825 - DNA, 75 bp, synthetic construct
  source 1..75: mol_type = other DNA
cgaaccgccacaagccgttcaaccaccaccggagccggtggtagagccagaaccggaacctgagccgatccctga

SEQ ID NO: 548826 - DNA, 75 bp, synthetic construct
  source 1..75: mol_type = other DNA
atgtggaggctgagcggataattcgcacctccccgaaatttatcgacgattactactggggctggactgcggcag

SEQ ID NO: 548827 - DNA, 75 bp, synthetic construct
  source 1..75: mol_type = other DNA
tcatttgcggtccactgggttaaatctgaaatccatgaatatgtcttacgtaactggcggattgtgaaggtagcc

SEQ ID NO: 548828 - DNA, 75 bp, synthetic construct
  source 1..75: mol_type = other DNA
ccgcaaggggcggtaattaccgttagcacgaatagagggattgctcatcttcgttatagacgcttgagcaaccgc

SEQ ID NO: 548829 - DNA, 75 bp, synthetic construct
  source 1..75: mol_type = other DNA
ccgcctgttgtcgatatcagttttgagggaaagcaggctgacggagcactggtcaaaggctggaaaatctggtga

SEQ ID NO: 548830 - DNA, 75 bp, synthetic construct
  source 1..75: mol_type = other DNA
gtccgtaaagatgcggctttcgcggtcagtatgaatggggtgactgtcgtatccggggattcgaaagacataagt

SEQ ID NO: 548831 - DNA, 75 bp, synthetic construct
  source 1..75: mol_type = other DNA
aaaaagtaatcaataaaattgctgaaaagttgagcgattataaatatcctccggctgaaggtatgaactctgaac

SEQ ID NO: 548832 - DNA, 75 bp, synthetic construct
  source 1..75: mol_type = other DNA
gtattaacgattttactgagtatcaattaacacaagaaaataaaatagagcgagttttcaatccgcatgacttta

SEQ ID NO: 548833 - DNA, 75 bp, synthetic construct
  source 1..75: mol_type = other DNA
gcgacaattcacagcaatatcgtgcaggaatacaacacccttaaagggtatagctggaaatggctgggtggggtg

SEQ ID NO: 548834 - DNA, 75 bp, synthetic construct
  source 1..75: mol_type = other DNA
tggttgaggtctcactttgggcttcgcttggctggtgggttgtcgcgttattgctggtgttattctatcccggtt

SEQ ID NO: 548835 - DNA, 75 bp, synthetic construct
  source 1..75: mol_type = other DNA
tctttacgtcatttttcatctggcgctggaaacagcaatgcgacaaggtgaaatcttgtcattgcgttgggaaca

SEQ ID NO: 548836 - DNA, 75 bp, synthetic construct
  source 1..75: mol_type = other DNA
atggggctgctgattcgcatccttggcagcattttccagaaagctcttaacatcagcaaaatcgaatcttttgtc

SEQ ID NO: 548837 - DNA, 75 bp, synthetic construct
  source 1..75: mol_type = other DNA
tcacgctcttgttgtccgttgagcatttgaaaaacactgcgatagaacaacagaaagcggttgcagacacgctgg

SEQ ID NO: 548838 - DNA, 75 bp, synthetic construct
  source 1..75: mol_type = other DNA
aaaacaggtcagggatgaagtcagaaatgaggtgcagaagctggacgtggcaggactgataggtgagcgcatcag

SEQ ID NO: 548839 - DNA, 75 bp, synthetic construct
  source 1..75: mol_type = other DNA
ggtatttcaaagaaaaaaaccaggctctttacgtcatttttcatctggcgctggaaacagcaatgcgacaaggtg

SEQ ID NO: 548840 - DNA, 75 bp, synthetic construct
  source 1..75: mol_type = other DNA
gctgcgctacaaccttgctgccatgattgcgcgcttcaacgaaacgggccgtagccaggtgctggcaaaacgtat

SEQ ID NO: 548841 - DNA, 75 bp, synthetic construct
  source 1..75: mol_type = other DNA
ctgccacaacagataaacggcaatgtgttcagttacacctcatccggtttcaaaagcgcctggcgtaccgcactt

SEQ ID NO: 548842 - DNA, 75 bp, synthetic construct
  source 1..75: mol_type = other DNA
acattgaatgtcattgaagttgccgctatttcaggccatcgctccctgaacatgttgaaacgatacacacacctt

SEQ ID NO: 548843 - DNA, 75 bp, synthetic construct
  source 1..75: mol_type = other DNA
atgtttcgaaaaatcaaaattcgcaaaatgactctcaaccgggcgctggacaaatacctgaaaaccgtttccgtc

SEQ ID NO: 548844 - DNA, 75 bp, synthetic construct
  source 1..75: mol_type = other DNA
cgatttcaggccatcgctccctgaacatgttgaaacgatacacacaccttcgggcttatcaacttgtcagtaaac

SEQ ID NO: 548845 - DNA, 75 bp, synthetic construct
  source 1..75: mol_type = other DNA
tggtattttgtttgcacgtattcttagcccggccaccgagccttcacaggtcacatttgaaaatctgtcgttcag

SEQ ID NO: 548846 - DNA, 75 bp, synthetic construct
  source 1..75: mol_type = other DNA
gatgttgcaatattccatgtatatgacgtcgcaaggaatgacacgcgaaactgcacgcaaactcaagcctagcca

SEQ ID NO: 548847 - DNA, 75 bp, synthetic construct
  source 1..75: mol_type = other DNA
agaacgtaacgctgctttggttgatagttttttcgacgcttcattattacaaaagctcaagagcggacaattggg

SEQ ID NO: 548848 - DNA, 75 bp, synthetic construct
  source 1..75: mol_type = other DNA
cgagcgtctgggtgtcgatgcctacacgctactggaagagatggcttcacgggtccccgcaggtgcctggggagt

SEQ ID NO: 548849 - DNA, 75 bp, synthetic construct
  source 1..75: mol_type = other DNA
ttattgctgataacaatgagtatcaactaacccaggaaaataagatagagcgagtgttcaacccgcatgactttg

SEQ ID NO: 548850 - DNA, 75 bp, synthetic construct
  source 1..75: mol_type = other DNA
cgcacaatggaaaaaagataagattcagcatctaaaaaattcagttatgatgtcaaaatattatgagcagttaaa

SEQ ID NO: 548851 - DNA, 75 bp, synthetic construct
  source 1..75: mol_type = other DNA
tgaagctacaacggcaaatgcggcaagggataaaacacctgagtgggaaaaaaattatacaccagaagagatggt

SEQ ID NO: 548852 - DNA, 75 bp, synthetic construct
  source 1..75: mol_type = other DNA
aatccgcagccggccgcccgtatcagtatgctgctggagcttgtcgggcgaggcgatattcccgccccggacgaa

SEQ ID NO: 548853 - DNA, 75 bp, synthetic construct
  source 1..75: mol_type = other DNA
tattggtggagttggcggctggtttggttttgccaatgtctctctggaaagcattttcggctatgtgctggcccc

SEQ ID NO: 548854 - DNA, 75 bp, synthetic construct
  source 1..75: mol_type = other DNA
cgtattcttagtccggcgacggaaccttcgcaagttacgtttgaaaatctgtcgtttagcgaaacaccgccaaaa

SEQ ID NO: 548855 - DNA, 75 bp, synthetic construct
  source 1..75: mol_type = other DNA
tctctctcctgtaaaagaaactggaacccaattgggaaaagtgaccgttcaggctgccgagcagtgcggactgaa

SEQ ID NO: 548856 - DNA, 75 bp, synthetic construct
  source 1..75: mol_type = other DNA
gtcagcagatatgccgcttgttggctgtgttttgactttgtcactgttggttttgcttatatttatggcagcaaa

SEQ ID NO: 548857 - DNA, 75 bp, synthetic construct
  source 1..75: mol_type = other DNA
aagcgttatctctatgctaatatggaagttaacggacaacgattttcttatgggattaccggtgggaatgttttt

SEQ ID NO: 548858 - DNA, 75 bp, synthetic construct
  source 1..75: mol_type = other DNA
ctggctggaagaactgacggtatattgtgcgatggagctggctgcaggatattatggggccaccaaccgctatgg

SEQ ID NO: 548859 - DNA, 75 bp, synthetic construct
  source 1..75: mol_type = other DNA
tatggggtggcgccgttgccgcacaccaactggaaggcggctggaatgatggcggaaaaggtataagtatcgccg

SEQ ID NO: 548860 - DNA, 75 bp, synthetic construct
  source 1..75: mol_type = other DNA
ccagccttcgaagctggctgcgcggggttcgagtcctcgatggcggtccattatctgcattatgcgttgttggtt

SEQ ID NO: 548861 - DNA, 75 bp, synthetic construct
  source 1..75: mol_type = other DNA
gcgtctggaatgatatcatctggaacattaaaatccacagggttaacagatataggaggacaattattagttact

SEQ ID NO: 548862 - DNA, 75 bp, synthetic construct
  source 1..75: mol_type = other DNA
aataatattactatggctggacaattaacttatagggtaggatataatagtgctttatattctgttttccttcgt

SEQ ID NO: 548863 - DNA, 75 bp, synthetic construct
  source 1..75: mol_type = other DNA
gttaaaaatgcgctcagatgcggaaggcgctgttgtgggcttcgatggcctggctgcgcggattgcccgcgtgca

SEQ ID NO: 548864 - DNA, 75 bp, synthetic construct
  source 1..75: mol_type = other DNA
ccgaaaccgatcactctaacccggatccggaaatcgtggaaattgcctgcggtcgctcatcagccccgatgccgc

SEQ ID NO: 548865 - DNA, 75 bp, synthetic construct
  source 1..75: mol_type = other DNA
ggcgtgtttgatactgaattctgcaaccgctatgaaaaaggcggggaagatggcatcaccatgatggctataccc

SEQ ID NO: 548866 - DNA, 75 bp, synthetic construct
  source 1..75: mol_type = other DNA
aaatatcagaaactgcgtgcagaactccatgaagccaagaaaaacattccacccaaaaatcctgtcgatgcagat

SEQ ID NO: 548867 - DNA, 75 bp, synthetic construct
  source 1..75: mol_type = other DNA
gtgtcgtgccggtatgggccgttcatcgctgattatggaggcgcagggctggtccctgcgccgtacccggccggt

SEQ ID NO: 548868 - DNA, 75 bp, synthetic construct
  source 1..75: mol_type = other DNA
aaattccagttaaacataatgaggacacgcaatcactggaaaatgtctcatctgtagaaacgaaataccaggaac

SEQ ID NO: 548869 - DNA, 75 bp, synthetic construct
  source 1..75: mol_type = other DNA
acatgcactggtaaccgcgctatcaacggtgctgcctgcctgtgtactgggtgaccccatgcaggccatttttgg

SEQ ID NO: 548870 - DNA, 75 bp, synthetic construct
  source 1..75: mol_type = other DNA
cctaagccaaaacctaagccggtgaaaaaggtggagcagccaaaacgcgatgtcaaacccgtagagtcgcgtccg

SEQ ID NO: 548871 - DNA, 75 bp, synthetic construct
  source 1..75: mol_type = other DNA
gtgtcgccgttagaactactgaacatccctctcacgatgttctggatgctcagtcgtaacatcgaccgtctacgt

SEQ ID NO: 548872 - DNA, 75 bp, synthetic construct
  source 1..75: mol_type = other DNA
atgttctggatgctcagtcgcaatatagaccgtctgcgtgcggaagaggatgtccgcaacttacaagtcgctcgt

SEQ ID NO: 548873 - DNA, 75 bp, synthetic construct
  source 1..75: mol_type = other DNA
gcagacgccaccgctgataaatccgccgactataccaaagaatccctggtcacttacaaatctgtttctttctcc

SEQ ID NO: 548874 - DNA, 75 bp, synthetic construct
  source 1..75: mol_type = other DNA
gcactaaaggagagtggtgtgcctacattattcagaaaagaatatccgcgaaaaaacagagtagtagaatttctg

SEQ ID NO: 548875 - DNA, 75 bp, synthetic construct
  source 1..75: mol_type = other DNA
atgacatgcataaacgccgttattttaatgacacaatggatattattaattataatcgaaaaacaataagatata

SEQ ID NO: 548876 - DNA, 75 bp, synthetic construct
  source 1..75: mol_type = other DNA
ttattcagggatatttcttttcccgccccctacccgccgaagaaattccaggctggatgagcagtgtgttaccgc

SEQ ID NO: 548877 - DNA, 75 bp, synthetic construct
  source 1..75: mol_type = other DNA
gtgggcacatgccgcctgactacaacctgctggaatatcatcgggggggcgattacggccccggccgggtgcggt

SEQ ID NO: 548878 - DNA, 75 bp, synthetic construct
  source 1..75: mol_type = other DNA
ttccactgattggtgagctcaatcatccatggcgctgggctaacgcaggggcgccggagctcggtcgctggcttc

SEQ ID NO: 548879 - DNA, 75 bp, synthetic construct
  source 1..75: mol_type = other DNA
agagcaatttgagatgctacgcaagatccactgtcgcgttattcagggatttttctttccccgccccctacccgc

SEQ ID NO: 548880 - DNA, 75 bp, synthetic construct
  source 1..75: mol_type = other DNA
gcagaaaatttttgctggtcgatctgtaacaatacacaattctttcaggaatttttataaaatacgcaatgcaat

SEQ ID NO: 548881 - DNA, 75 bp, synthetic construct
  source 1..75: mol_type = other DNA
tcatttacacgagtcatgttgatgcataaaaagcaacgcgcccgttggataagcccagatcgtggtattctgaga

SEQ ID NO: 548882 - DNA, 75 bp, synthetic construct
  source 1..75: mol_type = other DNA
ttacagccctctctttgccgggtaaaaccgtgtcagatgattttatgcatgctgttctcagtaactgcgccacaa

SEQ ID NO: 548883 - DNA, 75 bp, synthetic construct
  source 1..75: mol_type = other DNA
tcgcgctgttagtggttggcgtggtcattgcagtcagagcaaaaccagaaaaacccttaactgaatctgtctcag

SEQ ID NO: 548884 - DNA, 75 bp, synthetic construct
  source 1..75: mol_type = other DNA
ggggatgacgctggcgaaagcgtttgaagccgagccgcagctgccggaaatctacgaagcggatgaagaagttaa

SEQ ID NO: 548885 - DNA, 75 bp, synthetic construct
  source 1..75: mol_type = other DNA
gcggtatcgcagatcatcaccttcggtacaatggcggcgaaagcggtgatccgcgacgtaggccgcgtgctgggg

SEQ ID NO: 548886 - DNA, 75 bp, synthetic construct
  source 1..75: mol_type = other DNA
cttggtttgcgtacgctcaccatcatcaactgggcgctggagatgatcaacaagcggcgggcgaagaacggcgag

SEQ ID NO: 548887 - DNA, 75 bp, synthetic construct
  source 1..75: mol_type = other DNA
tgcgggtgcacagcgactactcgatgatcgatggcctggccaaaaccgcaccgctggtaaaaaaggcggcagcgt

SEQ ID NO: 548888 - DNA, 75 bp, synthetic construct
  source 1..75: mol_type = other DNA
ccgccgctaatgacgctgagcggtatcgcgctgttagtgattggcgtggtcatcgcggtcagagcaaaaccagaa

SEQ ID NO: 548889 - DNA, 75 bp, synthetic construct
  source 1..75: mol_type = other DNA
atggtcaggagatggacgaaaccatctctcctttagccgccaacatgggctggaccatcgcctgggaaccggcag

SEQ ID NO: 548890 - DNA, 75 bp, synthetic construct
  source 1..75: mol_type = other DNA
atgctgggtttcgtggtgataatttcgccatggaaaagttgtcagccccgcttattcaatgaggacaagatggca

SEQ ID NO: 548891 - DNA, 75 bp, synthetic construct
  source 1..75: mol_type = other DNA
atttgtatagtcaggagatggacgaaaccatctctcctttagccgccaatatgggctggactatcgcctgggaac

SEQ ID NO: 548892 - DNA, 75 bp, synthetic construct
  source 1..75: mol_type = other DNA
ttgacctgctgttcgaacgtttccttaacccggaacgtgtctccatgcctgacttcgacgttgacttctgtatgg

SEQ ID NO: 548893 - DNA, 75 bp, synthetic construct
  source 1..75: mol_type = other DNA
cggctatcagaatctgacgttgctgatctcaaaagcgtatcagcgcgggtacggtgccgccgggccgatcatcga

SEQ ID NO: 548894 - DNA, 75 bp, synthetic construct
  source 1..75: mol_type = other DNA
gagccgattctcggccttgatgtgctacaaaccgccacgcggggtgaatggtataagggcgatttttttgcgccg

SEQ ID NO: 548895 - DNA, 75 bp, synthetic construct
  source 1..75: mol_type = other DNA
taaaagcgacgttgaatacgccgggctggtgaagttcgacttcctcggtttgcgtacgctcaccatcatcaactg

SEQ ID NO: 548896 - DNA, 75 bp, synthetic construct
  source 1..75: mol_type = other DNA
gtgaagaaaatcatttgtcttgtcgttacgctgctaatgacactccccgcttatgcgaagttaacggcccatgaa

SEQ ID NO: 548897 - DNA, 75 bp, synthetic construct
  source 1..75: mol_type = other DNA
cgtcatcgattaccgggaagccgtatatcgtgaagatgccggtaagagcgatgagaacgcacagccttttttaca

SEQ ID NO: 548898 - DNA, 75 bp, synthetic construct
  source 1..75: mol_type = other DNA
gagcgtcattgcccatatgaacgagttgttaatcgccctgagtgatgacgcagagttaagccgggaagatcgcta

SEQ ID NO: 548899 - DNA, 75 bp, synthetic construct
  source 1..75: mol_type = other DNA
gcactggtagaagagaagctgaaggctactactgaacttctccagtctgagggctttgaagtaagccttgaggcc

SEQ ID NO: 548900 - DNA, 75 bp, synthetic construct
  source 1..75: mol_type = other DNA
gaagcccgtatcaacgccatgctggagggattagcacagaaaaaggatttgatatttgtgcgtaacggtgatgaa

SEQ ID NO: 548901 - DNA, 75 bp, synthetic construct
  source 1..75: mol_type = other DNA
tttatccctgcggctatggaagtgactgggttatcgctggagaagttgcacgtcgatggtttggatcctgttgat

SEQ ID NO: 548902 - DNA, 75 bp, synthetic construct
  source 1..75: mol_type = other DNA
tgatatagtctcaccattgtttgagcgtacgactttcccatttgaaatctccccatcccaaaacccaattaccat

SEQ ID NO: 548903 - DNA, 75 bp, synthetic construct
  source 1..75: mol_type = other DNA
gtgaagttctacggagcgggacatggcgcagggattaagcccatcgtcggggcggattttaacgtccagtgcgac

SEQ ID NO: 548904 - DNA, 75 bp, synthetic construct
  source 1..75: mol_type = other DNA
cggatatatctattcactgcaaaccagtatgttgctcataacgctgattggtttcttcctgattactttcgtcta

SEQ ID NO: 548905 - DNA, 75 bp, synthetic construct
  source 1..75: mol_type = other DNA
gtaatgaaaaacaggccagagagggggaatttgatgcagtgatgctggcaccgaagtcaacgcagatggtgaaat

SEQ ID NO: 548906 - DNA, 75 bp, synthetic construct
  source 1..75: mol_type = other DNA
taatctaaatgaatttttatccacacctctttatgtttcattattattttgtgcatataaattcaaaccgataat

SEQ ID NO: 548907 - DNA, 75 bp, synthetic construct
  source 1..75: mol_type = other DNA
aaaatgcattattgcacgcgacatcattggcaatcgtcgttactcgcgggtatttgagaaagcgtatgtggtaaa

SEQ ID NO: 548908 - DNA, 75 bp, synthetic construct
  source 1..75: mol_type = other DNA
cacccgcacatggcaatatcgctgtaacgttctctgacattgaaaaacgagtacttggtgcatggcgcgacaatg

SEQ ID NO: 548909 - DNA, 75 bp, synthetic construct
  source 1..75: mol_type = other DNA
ttcttataaccgcacggaaagtatggatgccagcagcagggaatggctgggctccggcaatcctgacacactcat

SEQ ID NO: 548910 - DNA, 75 bp, synthetic construct
  source 1..75: mol_type = other DNA
tgacagaaaaacagtacaaaatgacgtacagttctggtaccagtacgctcctgtggataacagcctcatcaatgt

SEQ ID NO: 548911 - DNA, 75 bp, synthetic construct
  source 1..75: mol_type = other DNA
ttcgtcacagaaatttattttcactttgtgctgatattgattactcatctttcagatcaagtataataaaatgct

SEQ ID NO: 548912 - DNA, 75 bp, synthetic construct
  source 1..75: mol_type = other DNA
atttcatcgccacagttatataccgaaaaccggattgacctgcgtactgacggtctgccggacgatatcgtactg

SEQ ID NO: 548913 - DNA, 75 bp, synthetic construct
  source 1..75: mol_type = other DNA
ctcccgtctgcggaactactcgccgtccatccggggatttgcgcgcacacaggcggttgtggtggtaacccagaa

SEQ ID NO: 548914 - DNA, 75 bp, synthetic construct
  source 1..75: mol_type = other DNA
ttttgtttcgaaaacggatacagctcgttatatctgggaaaataaactgaaaagcagaatgacatttagcctcag

SEQ ID NO: 548915 - DNA, 75 bp, synthetic construct
  source 1..75: mol_type = other DNA
gctatagacgatgctcatgatctggtaaaggctcgtaaagctgcacaggctaaagctgatgttaaagcgtcagac

SEQ ID NO: 548916 - DNA, 75 bp, synthetic construct
  source 1..75: mol_type = other DNA
cgcccagtactacaaaacgttgcaatacatcaaagcacaaacggcagcgtatgagaaaggcgctataagtcaggc

SEQ ID NO: 548917 - DNA, 75 bp, synthetic construct
  source 1..75: mol_type = other DNA
ctctaccggcgggatgattctggattccatcggtttccggggtgtccggctctacagtaatgatgacatgctgaa

SEQ ID NO: 548918 - DNA, 75 bp, synthetic construct
  source 1..75: mol_type = other DNA
atgtatatgaacataatcagaaacgtcatttgtacattaatcatactcccgatcgggttacaggcagcgatcagt

SEQ ID NO: 548919 - DNA, 75 bp, synthetic construct
  source 1..75: mol_type = other DNA
atcgtttcggcagcgattctggcattggtcagttagctgcggcgattaaccgtggtgataaaacggcagtgaaaa

SEQ ID NO: 548920 - DNA, 75 bp, synthetic construct
  source 1..75: mol_type = other DNA
gccctgtttgcgaaaggctctgtcagtattacagacagtaacaaagcaggtgccagcttacgcctctaccggaat

SEQ ID NO: 548921 - DNA, 75 bp, synthetic construct
  source 1..75: mol_type = other DNA
cccccacaatggcagaaatgtacagggatgatgtacatttttaccgcaagggtaaacccaattactgggtaccta

SEQ ID NO: 548922 - DNA, 75 bp, synthetic construct
  source 1..75: mol_type = other DNA
acaatgaaaagctacccggttaacattatcgtcggttcccgctatgaccggtacaagagcttcaatccccgtgcc

SEQ ID NO: 548923 - DNA, 75 bp, synthetic construct
  source 1..75: mol_type = other DNA
tacctgctttattatgtgcaatagcttccattatgctggctgttggaatgataaatattttacgtaatcgttata

SEQ ID NO: 548924 - DNA, 75 bp, synthetic construct
  source 1..75: mol_type = other DNA
attgctgggcgcgcagccgggtagccagcgtttacgtcatcatgccggtaacccgctgcatcttgatgtgctggt

SEQ ID NO: 548925 - DNA, 75 bp, synthetic construct
  source 1..75: mol_type = other DNA
ccaaatcatagactaatttataacattacttatttgttatctaaagttgacgatattgaatctttggtttgctca

SEQ ID NO: 548926 - DNA, 75 bp, synthetic construct
  source 1..75: mol_type = other DNA
tatcccacctgaatcaatatgttatattgagaaaaatacagtcattgatgtaacacttaacgtgttaggtaaagg

SEQ ID NO: 548927 - DNA, 75 bp, synthetic construct
  source 1..75: mol_type = other DNA
ctgtttgcgaaaggctctgtcagtataacagacagtaacaaagcaggtgccagcttgcgtctctaccagaataac

SEQ ID NO: 548928 - DNA, 75 bp, synthetic construct
  source 1..75: mol_type = other DNA
gacttcagaactgccgatgctgcagattttcttccccccggagagacaaatggtgtaagtctgtggggaaatatc

SEQ ID NO: 548929 - DNA, 75 bp, synthetic construct
  source 1..75: mol_type = other DNA
gcggaccaaactccagtctgtacggcagtggcgggctggggggggtggtggacttcagaactgccgatgctgcag

SEQ ID NO: 548930 - DNA, 75 bp, synthetic construct
  source 1..75: mol_type = other DNA
ggatgggatattcagggaaattaccagtctgattatgttgactggatgctttcttataaccggacggaaagtatg

SEQ ID NO: 548931 - DNA, 75 bp, synthetic construct
  source 1..75: mol_type = other DNA
aaagatatcattatatctagttacgtatgggtagggagaaatgtctctataatgaaaggggtatctgttggaagc

SEQ ID NO: 548932 - DNA, 75 bp, synthetic construct
  source 1..75: mol_type = other DNA
ttgcatcggcatcgcgctataacgcatggcgactgccttcaaacaaagttaagcatcgctatcaacaacagggtt

SEQ ID NO: 548933 - DNA, 75 bp, synthetic construct
  source 1..75: mol_type = other DNA
gaagaatatcctgattcaggtgaaaatattgttgatgcgctggcagcgttcctgcgccggttgcattcgattcct

SEQ ID NO: 548934 - DNA, 75 bp, synthetic construct
  source 1..75: mol_type = other DNA
caaaccctttctggggttgccagtaaggttcgccactatgtcaaactgctggaaggcaccaacacgcagttgctg

SEQ ID NO: 548935 - DNA, 75 bp, synthetic construct
  source 1..75: mol_type = other DNA
ggactggcctggccggagggggatagtgggcaacaactgattatcccctggctgcgttggcataacattgaaccg

SEQ ID NO: 548936 - DNA, 75 bp, synthetic construct
  source 1..75: mol_type = other DNA
caataccggtacggcgcatttgatggcgatatcgggcttacatatcgcctttgcggcattgctggcagcggggct

SEQ ID NO: 548937 - DNA, 75 bp, synthetic construct
  source 1..75: mol_type = other DNA
atgccattgcccagcatcagccgctgaccggccgctttctgcaggcaagtgtcattgaaccgaattgtagcctgc

SEQ ID NO: 548938 - DNA, 75 bp, synthetic construct
  source 1..75: mol_type = other DNA
tctggcgaatgcggtagggcgaatcagtggtattgccgcaccttatgccgttgcagtgctgctcagtagttatgg

SEQ ID NO: 548939 - DNA, 75 bp, synthetic construct
  source 1..75: mol_type = other DNA
atgatgacgcttgcacctggtcgatcgaatgttccagcgccggacaagtaaccgtcgatgatctcccggcagagg

SEQ ID NO: 548940 - DNA, 75 bp, synthetic construct
  source 1..75: mol_type = other DNA
ttggtggtttagcattttttctctcaatatatgcaacaataaaaaccatcaagttcaatgaaagacaaaaggcat

SEQ ID NO: 548941 - DNA, 75 bp, synthetic construct
  source 1..75: mol_type = other DNA
agatgacggcgatatcattaaagccaatcaactgctatttgaactggaagggccatcccgcgtgctgttgacggg

SEQ ID NO: 548942 - DNA, 75 bp, synthetic construct
  source 1..75: mol_type = other DNA
tattcctgacggtgtacaggactcatggattagagcaactgaaagcattatgtcaaatgtttttcttgcaccagg

SEQ ID NO: 548943 - DNA, 75 bp, synthetic construct
  source 1..75: mol_type = other DNA
tctggagtggcttttgtaggaggattaagtgatgcagagttcgctaaatatagttacactaaagatggctcacct

SEQ ID NO: 548944 - DNA, 75 bp, synthetic construct
  source 1..75: mol_type = other DNA
cctgggcgttggatccactggcaaatgccattaattggtggaatctgctgtgctgctttctatgcctggctgacg

SEQ ID NO: 548945 - DNA, 75 bp, synthetic construct
  source 1..75: mol_type = other DNA
aattatcgctgataccgaaaattgggtggttttatctatccgttcgctgtcaccgcttgaagtgctggaatacat

SEQ ID NO: 548946 - DNA, 75 bp, synthetic construct
  source 1..75: mol_type = other DNA
gattagcagcctcagggagcaaattttacctcgttggtatcatcagtggtttggcgtgccagtggataacgggta

SEQ ID NO: 548947 - DNA, 75 bp, synthetic construct
  source 1..75: mol_type = other DNA
ctgcgtgcacagtatctggcgtcattacaaacaacgctgcaaccctatatgtggaatgcggttattcttggttta

SEQ ID NO: 548948 - DNA, 75 bp, synthetic construct
  source 1..75: mol_type = other DNA
atttaggggtgataataattacgtaagaatacataaaaacagtaagattaaaggtgatattgtcgcaacaaaagg

SEQ ID NO: 548949 - DNA, 75 bp, synthetic construct
  source 1..75: mol_type = other DNA
gtactgtattccgtctcctcggtgctgattaacgtcttcgtcagcagcaaagagttgaaatttactggcggatcg

SEQ ID NO: 548950 - DNA, 75 bp, synthetic construct
  source 1..75: mol_type = other DNA
tttattctggatgaacgttaaagcgattccgtcaatggataaatcaaaattgactgagaatacgctacagctcgc

SEQ ID NO: 548951 - DNA, 75 bp, synthetic construct
  source 1..75: mol_type = other DNA
ttttgcaattcccctggtgacatttatcacggttccgttgatcctcgccgcgatggttgtgcatttaagcgggcc

SEQ ID NO: 548952 - DNA, 75 bp, synthetic construct
  source 1..75: mol_type = other DNA
atggcgactgccctctaacaaagttaagcatcgctatcaacaacaaggttatacgtggcttgatactcctcatca

SEQ ID NO: 548953 - DNA, 75 bp, synthetic construct
  source 1..75: mol_type = other DNA
gggaacatcatcagctgtgtgcgtggcgaagcgtggcaatggcaaggattgcgtttcagcgcgcactggccttta

SEQ ID NO: 548954 - DNA, 75 bp, synthetic construct
  source 1..75: mol_type = other DNA
caataccggtacagcgcatttaatggcgatatcgggattacacattgcttttgtggcattactggcggcagggct

SEQ ID NO: 548955 - DNA, 75 bp, synthetic construct
  source 1..75: mol_type = other DNA
gaacgttggcaatggatatcattttttccctggttattactggtaggatggcgactaaacgcatggcgaacgttg

SEQ ID NO: 548956 - DNA, 75 bp, synthetic construct
  source 1..75: mol_type = other DNA
gcattatttgcggaatttttccgctgctgattttgccgcaattgcctggaacattaccccttgcgtgtctgactg

SEQ ID NO: 548957 - DNA, 75 bp, synthetic construct
  source 1..75: mol_type = other DNA
gaatgaagaaacagacctggacactgttgatgttctccagtcatcagaaacacaaactgatgcagtggaaactga

SEQ ID NO: 548958 - DNA, 75 bp, synthetic construct
  source 1..75: mol_type = other DNA
atctggaaaaaacgtcgcgaaggtgaacgcaaggaaaccggaaaatacacgtctgttgttgatctcgcccgcgcc

SEQ ID NO: 548959 - DNA, 75 bp, synthetic construct
  source 1..75: mol_type = other DNA
aatggctggcagttcgcaacgtacattaccgacagtttctgaaggagcattagggaaggtgcgaacaagttcctg

SEQ ID NO: 548960 - DNA, 75 bp, synthetic construct
  source 1..75: mol_type = other DNA
acctgacgacaaagggcgtgtttgaaaatgaagaaacaaaccagagcacaactgatactctccagtcaccagaaa

SEQ ID NO: 548961 - DNA, 75 bp, synthetic construct
  source 1..75: mol_type = other DNA
gtatcacgtggtgaatttgttgcagggattagcgacccgaatgatccgaaatgggtgaaggggattgaaacccgc

SEQ ID NO: 548962 - DNA, 75 bp, synthetic construct
  source 1..75: mol_type = other DNA
aagcggaacaaaacagcccaaatgcgttacaaaacgagccagaaacgaaacagcctgaaccagtagcgcaacagg

SEQ ID NO: 548963 - DNA, 75 bp, synthetic construct
  source 1..75: mol_type = other DNA
ttgctgatcgaagcgcaaaatcttggtctgggtgcgcagtttggtggtaaatacttcgctcacgacatccgcgtg

SEQ ID NO: 548964 - DNA, 75 bp, synthetic construct
  source 1..75: mol_type = other DNA
aggctccttttccactcaaaaaagatgatactgagtattacctgctaaccagtgaacacgttagcgtatctgaat

SEQ ID NO: 548965 - DNA, 75 bp, synthetic construct
  source 1..75: mol_type = other DNA
cggtgcgcgttgaccttaaccgtccgatgaaagagatcctcgcacagttgtcgcagtatcccgtttctacacgct

SEQ ID NO: 548966 - DNA, 75 bp, synthetic construct
  source 1..75: mol_type = other DNA
tgggggcagtaaaaataaaacccagtgaaaatagcctgctaaaattaggtcggattatagttatggtagcttacc

SEQ ID NO: 548967 - DNA, 75 bp, synthetic construct
  source 1..75: mol_type = other DNA
ttatttgcctgacggctgcctctggccttacctctgcttacgcggcgcaactggctgacgatgaagcgggactac

SEQ ID NO: 548968 - DNA, 75 bp, synthetic construct
  source 1..75: mol_type = other DNA
atgtcaaacaaaccctttcattatcaggctcctttcccactcaaaaaagatgatactgagtattacctgctaacc

SEQ ID NO: 548969 - DNA, 75 bp, synthetic construct
  source 1..75: mol_type = other DNA
acctgactacaaagggcgtgtttgaagatgaaggaacaaatcagagcgcaactgatactctctcgtcgccagtac

SEQ ID NO: 548970 - DNA, 75 bp, synthetic construct
  source 1..75: mol_type = other DNA
ctggcgcttccgttatcaacgtccagtgacaaaacagcggacaatgatgggactaggtgctttccccgctctttc

SEQ ID NO: 548971 - DNA, 75 bp, synthetic construct
  source 1..75: mol_type = other DNA
aaaacatgccgactctgcggccagaagaattaccgaagctgatgcgttctttggttatgtctaatctgtctgttc

SEQ ID NO: 548972 - DNA, 75 bp, synthetic construct
  source 1..75: mol_type = other DNA
cgcaagcaccgctctaaatgaagcgaacttcaatcctgatgtgattgaatctgccctggctcactccgataaaaa

SEQ ID NO: 548973 - DNA, 75 bp, synthetic construct
  source 1..75: mol_type = other DNA
atgccgtaaacactggtttgattgatgccaatccagcatccggtgtagggatggcctttgagaagcccaaaaagc

SEQ ID NO: 548974 - DNA, 75 bp, synthetic construct
  source 1..75: mol_type = other DNA
ggttttaattcagatgtgattgaagcagcactcgctcatagtgataaaaatgaagtgcgaaaagcttataatcgc

SEQ ID NO: 548975 - DNA, 75 bp, synthetic construct
  source 1..75: mol_type = other DNA
gaaatgatccaaagcaagcgatgaatagtcagactgcaaatgccgcgttaaaacgaattggatatggaggtaaat

SEQ ID NO: 548976 - DNA, 75 bp, synthetic construct
  source 1..75: mol_type = other DNA
cgatgatgcaatggtgggcaaattttgtgatggcagcggatcgtggaagcatgattgaaggtgggataaaaggaa

SEQ ID NO: 548977 - DNA, 75 bp, synthetic construct
  source 1..75: mol_type = other DNA
caatgatgcagtggtgggctgacttcgttatggctgctgatcgcggaagtatcattgatggtgggacaaaaggaa

SEQ ID NO: 548978 - DNA, 75 bp, synthetic construct
  source 1..75: mol_type = other DNA
ccagcgatagtgaaactggcgaggcgacagatcccttaattgcggtgaacggtcatcacgttatcacatccacca

SEQ ID NO: 548979 - DNA, 75 bp, synthetic construct
  source 1..75: mol_type = other DNA
ttgattatgtctaatctgtctgttccgacacgttgtcttattgagtggcaactactgacccttgtacgcccttct

SEQ ID NO: 548980 - DNA, 75 bp, synthetic construct
  source 1..75: mol_type = other DNA
ctggcagttccgttactatcgaccgctgacaaaacagcgaaccaaacagagcttcggtgcctaccctgcagtctc

SEQ ID NO: 548981 - DNA, 75 bp, synthetic construct
  source 1..75: mol_type = other DNA
ggagatgatgaagccactaagtggtaatcgagaattcatttttccaagccgtgttaagccgaaccagtctatgaa

SEQ ID NO: 548982 - DNA, 75 bp, synthetic construct
  source 1..75: mol_type = other DNA
gcaccgcgattatcgttggtaaaaaagggcagcgcgtatggacaggtggtggcgacgaagcggctttggcgcgcg

SEQ ID NO: 548983 - DNA, 75 bp, synthetic construct
  source 1..75: mol_type = other DNA
aaacactggatgacgaactggcctacgctctctggcctggtgatgtggatgccggaaacattgacggcagcatcc

SEQ ID NO: 548984 - DNA, 75 bp, synthetic construct
  source 1..75: mol_type = other DNA
cgccagtaccagaaactgatgcagtggaaacggcaattccgggcaacgaaaaaaccgaatgcaaagtggaagtcg

SEQ ID NO: 548985 - DNA, 75 bp, synthetic construct
  source 1..75: mol_type = other DNA
tggcatcacaatgacatttatcggcccttccccctcagttcaggacaaaccagccagcactgacaataccaacat

SEQ ID NO: 548986 - DNA, 75 bp, synthetic construct
  source 1..75: mol_type = other DNA
cgccaaagccaatcaacagtacactgaaaattcaacaggaaaaatcagcccggtcattgctgccattcatcgcga

SEQ ID NO: 548987 - DNA, 75 bp, synthetic construct
  source 1..75: mol_type = other DNA
tgtcccgaatgagactgaatccgatccgatgaacgtcacttttgacaagctggcccctgaagtacagaacgctgt

SEQ ID NO: 548988 - DNA, 75 bp, synthetic construct
  source 1..75: mol_type = other DNA
gatcgaccttgaaaccatgggaaaaaatcctgatgccccgatcatctcaataggtgcaatatttttcgatccgca

SEQ ID NO: 548989 - DNA, 75 bp, synthetic construct
  source 1..75: mol_type = other DNA
tggtgctgtccggcggcggggcggtgggcgcttatcaggcgggagtggttaaggcactggcagagtgcggcgcac

SEQ ID NO: 548990 - DNA, 75 bp, synthetic construct
  source 1..75: mol_type = other DNA
actcagccgttgttgtcagatgagcccctgacagcgctgatggatcattatcttgatactgatgctctggcagac

SEQ ID NO: 548991 - DNA, 75 bp, synthetic construct
  source 1..75: mol_type = other DNA
cgacaaatgaggttatcgacaaggatcgcgaagactggaagcgtatctcagcatcaatgcgcaaacaacccgaag

SEQ ID NO: 548992 - DNA, 75 bp, synthetic construct
  source 1..75: mol_type = other DNA
gcaagaccatcgatctggatactgctggcggagtcattgatcgtgacgtcattaaatggtggcttaagcaatcac

SEQ ID NO: 548993 - DNA, 75 bp, synthetic construct
  source 1..75: mol_type = other DNA
gatgtggagattgcagcggccacacttccgatggattttaatatttatgaaattccgggcagcgtttatcgtcgc

SEQ ID NO: 548994 - DNA, 75 bp, synthetic construct
  source 1..75: mol_type = other DNA
ggatgcaatatggtgattgtgacgcatctgagtgacggttctttatgggatcgccaggcttttccggacaccaca

SEQ ID NO: 548995 - DNA, 75 bp, synthetic construct
  source 1..75: mol_type = other DNA
gatccgcaaaccggagatatgggaccggaatttagtaagactatcgatctggaaactgctggcggagtcattgat

SEQ ID NO: 548996 - DNA, 75 bp, synthetic construct
  source 1..75: mol_type = other DNA
gtccactattctctcaggaatttcaggatctgccagacggtgctgagacgacgcttacctttatttgcgccgcca

SEQ ID NO: 548997 - DNA, 75 bp, synthetic construct
  source 1..75: mol_type = other DNA
cagcctgacgccgataagttacttgctgtatcgcgtggtgaatttgttgaggggattagcgcccctaatgatccg

SEQ ID NO: 548998 - DNA, 75 bp, synthetic construct
  source 1..75: mol_type = other DNA
caccgataaggatggcgaaaaatatggtcgtgcaaacaaactttctggtctgaataaggcgctggctgcaggggc

SEQ ID NO: 548999 - DNA, 75 bp, synthetic construct
  source 1..75: mol_type = other DNA
gacattactgctggcaatcagtgccttctcgttgtgtctactggggactttcctggtgcgttccggcgtgctggt

SEQ ID NO: 549000 - DNA, 75 bp, synthetic construct
  source 1..75: mol_type = other DNA
ctgctgatgagcggctggacctttgcggtggcgatttttagtcagcgtattccgctggatattgtggcccgcgta

SEQ ID NO: 549001 - DNA, 75 bp, synthetic construct
  source 1..75: mol_type = other DNA
gcaaaaacggaacatacacggacttaccgcaaaatgtggataccgctgaagattccgtacaaccggagccggtaa

SEQ ID NO: 549002 - DNA, 75 bp, synthetic construct
  source 1..75: mol_type = other DNA
agatgctgaatgagggcattacccccaccgcaatgctggttgctaacgatcagatggcgctgggtgcaatgcgcg

SEQ ID NO: 549003 - DNA, 75 bp, synthetic construct
  source 1..75: mol_type = other DNA
tcaacagtattattttctcccatgaagacggtacgcgactgggcgtggagcatctggtcgcattgggtcaccagc

SEQ ID NO: 549004 - DNA, 75 bp, synthetic construct
  source 1..75: mol_type = other DNA
ctccgaacgcgcaagcagcctctccccgcgaattggccgattctttaatgcaactggcgcgacaaatttcccgac

SEQ ID NO: 549005 - DNA, 75 bp, synthetic construct
  source 1..75: mol_type = other DNA
gccacaatcaacttaagccaatagcagagcttgaaggtgactggagcgcaatatcgggttttcagcaaaccatgc

SEQ ID NO: 549006 - DNA, 75 bp, synthetic construct
  source 1..75: mol_type = other DNA
gtcatcaactacccgctggatgagcaagatgccattgctgtggaagccgcctgtggtaacgtgcccgttttgttt

SEQ ID NO: 549007 - DNA, 75 bp, synthetic construct
  source 1..75: mol_type = other DNA
cgtaaaaccaccctgccacccaatacgcaaaccgcctctccccgcgcgttggcggattcattaatgcagctggca

SEQ ID NO: 549008 - DNA, 75 bp, synthetic construct
  source 1..75: mol_type = other DNA
agcagaagaactgcgtggcaatcgtcttcagtggctgtatgccgtcgatgtgctgattgaaacacagggcgaggt

SEQ ID NO: 549009 - DNA, 75 bp, synthetic construct
  source 1..75: mol_type = other DNA
ctacttaaactactccatgtacgtaatcatggaccgtgcgttgccgtttattggtgatggtctgaaacctgttca

SEQ ID NO: 549010 - DNA, 75 bp, synthetic construct
  source 1..75: mol_type = other DNA
cgagagctgtattgaagcattccatgaggctgaaaccaacctgaatcacactgttttccgtcgtaatcaatggga

SEQ ID NO: 549011 - DNA, 75 bp, synthetic construct
  source 1..75: mol_type = other DNA
caacatggctttggacagtaagctacggggctgtgatctggttaaactaaaagtatcagatgttgcatatggtag

SEQ ID NO: 549012 - DNA, 75 bp, synthetic construct
  source 1..75: mol_type = other DNA
agtgcggttatcagttcccatccagggaagcagccaacttcctgtctttattacagggagatggcgcaacagagc

SEQ ID NO: 549013 - DNA, 75 bp, synthetic construct
  source 1..75: mol_type = other DNA
atgcgctgccaggcgttacttattcaactgctccataacggctggcgctatcaggaacagagtgctattcgtgag

SEQ ID NO: 549014 - DNA, 75 bp, synthetic construct
  source 1..75: mol_type = other DNA
cgcgccgcctgccagaccgcctttaaacaggcagttagcgagacgaacggcacgagacgtgagtcgtacaggtgt

SEQ ID NO: 549015 - DNA, 75 bp, synthetic construct
  source 1..75: mol_type = other DNA
taggatttacatttcttctcactgcaatacaggcacaggcaagtgttgtacttggtggtacacgcattgtctatc

SEQ ID NO: 549016 - DNA, 75 bp, synthetic construct
  source 1..75: mol_type = other DNA
aaataaagaaagccttcctcaagatagagaaagtttgtttttagcaaatataaaatctatttctgctatgccgga

SEQ ID NO: 549017 - DNA, 75 bp, synthetic construct
  source 1..75: mol_type = other DNA
gaaatttactacggcactaacccactggcctttgccgcgccgggagaaggcgacgagatccttacctttgatatg

SEQ ID NO: 549018 - DNA, 75 bp, synthetic construct
  source 1..75: mol_type = other DNA
ccaaagtcgcagcagaccagtacccgtttcgcattatcggggtaacggttaagccaaagaaagcgggtggcgggt

SEQ ID NO: 549019 - DNA, 75 bp, synthetic construct
  source 1..75: mol_type = other DNA
cgcgcttcctgccaggccgcttttaaagggcagctatcgagacgaacgacgcaaggcgtgagtcgtccatgcatt

SEQ ID NO: 549020 - DNA, 75 bp, synthetic construct
  source 1..75: mol_type = other DNA
catccaacttctgttgggtcataagaaactggaaagcacgatccgttatctgggcattgaagtcgatgatgcgtt

SEQ ID NO: 549021 - DNA, 75 bp, synthetic construct
  source 1..75: mol_type = other DNA
ttaccgagttctatcaggaatacagcaaagccgctctgtataagctgcctaagctcagtaaaggcagtgttgagt

SEQ ID NO: 549022 - DNA, 75 bp, synthetic construct
  source 1..75: mol_type = other DNA
cgctgtggggagacttttgacaccgttatttcagcaaatcccgcaacctatgatggaagtacagaggcgctaaaa

SEQ ID NO: 549023 - DNA, 75 bp, synthetic construct
  source 1..75: mol_type = other DNA
gtaacgtcggcttcatgtccaaaatcctgaacaagtctgatcacaaaatttgtcatagccaggccaaagaggttt

SEQ ID NO: 549024 - DNA, 75 bp, synthetic construct
  source 1..75: mol_type = other DNA
cactttgaggttgtcagtgcgctgttaaatgcgggggtgcatgtttgtgttgataaaccgctggcggaaaatctg

SEQ ID NO: 549025 - DNA, 75 bp, synthetic construct
  source 1..75: mol_type = other DNA
caatatactgtttacacctctgccgcctgcaactgtcgatttccactcatcgcttaaatacgttgcccgccttcc

SEQ ID NO: 549026 - DNA, 75 bp, synthetic construct
  source 1..75: mol_type = other DNA
ttatttcagcaaatccagcaacctatgatggaagtacagaggcactaaaaagcgcaaaatcagcagcggaagact

SEQ ID NO: 549027 - DNA, 75 bp, synthetic construct
  source 1..75: mol_type = other DNA
gcattattttgcattcaaatacaacaactagacgtgaaatgaaggcattattttatctttctgaaaaaaactata

SEQ ID NO: 549028 - DNA, 75 bp, synthetic construct
  source 1..75: mol_type = other DNA
caatatggccctggacagtaagcttcgaggctgtgatctggtcaaactcaaagtatcggatgtggcatatggtag

SEQ ID NO: 549029 - DNA, 75 bp, synthetic construct
  source 1..75: mol_type = other DNA
gtaccctcgagcagcgtggatttgttggctgcgcgcatcatttcatcgaatgcgtgcaaaatcagacagttccac

SEQ ID NO: 549030 - DNA, 75 bp, synthetic construct
  source 1..75: mol_type = other DNA
caggccatgctccagaacgtgtctcgtgaagaattactttccgattttatagtgccgtcgattattccgggtgtt

SEQ ID NO: 549031 - DNA, 75 bp, synthetic construct
  source 1..75: mol_type = other DNA
tatagagatcgcttcgataaagccttcactatttttgtatgtaaccttaaaggtggtggttccaagacggtttct

SEQ ID NO: 549032 - DNA, 75 bp, synthetic construct
  source 1..75: mol_type = other DNA
atgaaagagaataaagtacagcaaatcagtcataaactgattaatatcgttgtttttgtcgcaattgtagaatac

SEQ ID NO: 549033 - DNA, 75 bp, synthetic construct
  source 1..75: mol_type = other DNA
aaaaacgtcgcgaaggtgaacgcaaggaaaccggaaaatacacgtctgttgttgatctcgcccgcgccagagcca

SEQ ID NO: 549034 - DNA, 75 bp, synthetic construct
  source 1..75: mol_type = other DNA
agagcaagcgtcagagcaacgtcagattgagctggatagtattttctcaacagtggccgccaactggttcaaaat

SEQ ID NO: 549035 - DNA, 75 bp, synthetic construct
  source 1..75: mol_type = other DNA
gcacatggtttacgttcgattgcaagtacggcaatgaatgaagccggttttaatgctgatgtaattgaggctgct

SEQ ID NO: 549036 - DNA, 75 bp, synthetic construct
  source 1..75: mol_type = other DNA
cgccaaagccaaccgacagcacactgaaaacccagcagaaaaaatccctcctgtaactgccgccattcatcgcga

SEQ ID NO: 549037 - DNA, 75 bp, synthetic construct
  source 1..75: mol_type = other DNA
tagagagggacattttccctgctatcggtgagattcctgttcaggaaataaaagcccgcacattaattgaagccc

SEQ ID NO: 549038 - DNA, 75 bp, synthetic construct
  source 1..75: mol_type = other DNA
gtatcaaaacagagaaccatgattagtttaggaacgttccccgccctatctctggctgaggccagaaacgtgcgt

SEQ ID NO: 549039 - DNA, 75 bp, synthetic construct
  source 1..75: mol_type = other DNA
agaattgccgaagctaatgcgttctttggtcatgtcaaacttatctgttccgactcgctgtctaattgaatggca

SEQ ID NO: 549040 - DNA, 75 bp, synthetic construct
  source 1..75: mol_type = other DNA
agccaatatcagccagcctgacgccgataagttgcttgctgcatcacgtggtgaatttattgaagggattagcga

SEQ ID NO: 549041 - DNA, 75 bp, synthetic construct
  source 1..75: mol_type = other DNA
agatgatgcactactgcaattgcgggaatttatcgacgaaaactccggtgaattttttgttcaggtctggggtaa

SEQ ID NO: 549042 - DNA, 75 bp, synthetic construct
  source 1..75: mol_type = other DNA
aaacgtattgggtataatggaaagctcgttgcgcatggtttacgttctatagcaagtaccgcgatgaatgaagct

SEQ ID NO: 549043 - DNA, 75 bp, synthetic construct
  source 1..75: mol_type = other DNA
tctgatgatcgaccttgaaaccatgggaaaaaatcccgatgccccgattatctcaataggtgcaatatttttcga

SEQ ID NO: 549044 - DNA, 75 bp, synthetic construct
  source 1..75: mol_type = other DNA
cgccgttcatacgaacgacagggtatcccctgcccgtggcgctactgcaacgatcgcgatgtacgcacaatcgtt

SEQ ID NO: 549045 - DNA, 75 bp, synthetic construct
  source 1..75: mol_type = other DNA
tggcggagtcattgatcgggacaccattaaatggtggcttaagcaatcacgcgaagcgcaatctgccattatgac

SEQ ID NO: 549046 - DNA, 75 bp, synthetic construct
  source 1..75: mol_type = other DNA
agtgattatcttgagcaacgtcgtccgatgatgcaatggtgggctgatctcgtaaaagcagcagatagtggtagc

SEQ ID NO: 549047 - DNA, 75 bp, synthetic construct
  source 1..75: mol_type = other DNA
ccccgccctgccctcgattcctgggatgctgaatatatgcaggaaaaccgctgggatgaggagtctgcttccttt

SEQ ID NO: 549048 - DNA, 75 bp, synthetic construct
  source 1..75: mol_type = other DNA
caggtatggggcaatggtgcaactttcgacaacactattttacgaacctcgtacgaacgcctgaacatcccctgc

SEQ ID NO: 549049 - DNA, 75 bp, synthetic construct
  source 1..75: mol_type = other DNA
ccttaattgcggtgaacggtcatcacgttatcacatccaccagcagagtgtggtaccacctgatgatcgaccttg

SEQ ID NO: 549050 - DNA, 75 bp, synthetic construct
  source 1..75: mol_type = other DNA
agcccaaatgcgttacaaaacagcccaactgctttacaaaacgagccggaaacgaaacagcctgaaccagcagtg

SEQ ID NO: 549051 - DNA, 75 bp, synthetic construct
  source 1..75: mol_type = other DNA
caattccggacaacgaaaaaaccgaatgcaaagtggaagtcgaaccatctgtagagcgtgaggggccgttctact

SEQ ID NO: 549052 - DNA, 75 bp, synthetic construct
  source 1..75: mol_type = other DNA
ccattccggacgaacaggcaataaaggaagaaggtgcagtcgctgtagccactgccattgaagctggcgacgaac

SEQ ID NO: 549053 - DNA, 75 bp, synthetic construct
  source 1..75: mol_type = other DNA
ttgtgtggagtgagcatcaagccccaattattgtgagcatctatctagctcaaacacaggcttcaatggcagagc

SEQ ID NO: 549054 - DNA, 75 bp, synthetic construct
  source 1..75: mol_type = other DNA
tcgtttcacacggcttacgttctatcgccagtacggcactcaatgaggaaggatttccacctgatgtcattgaag

SEQ ID NO: 549055 - DNA, 75 bp, synthetic construct
  source 1..75: mol_type = other DNA
tagttgccgagcgttggtggaatgtgaagaaagccagcgtaacagaggactatgccgacgatatctggcgctcgc

SEQ ID NO: 549056 - DNA, 75 bp, synthetic construct
  source 1..75: mol_type = other DNA
gatcgacattcataaagatcccgtggcgctgaacaaatacatcactgaatacctgactacaaagggcgtatttga

SEQ ID NO: 549057 - DNA, 75 bp, synthetic construct
  source 1..75: mol_type = other DNA
gttgaggcattgatgaaaatgcctgaagttaacgtcatgtattcagaactaaagctgctcgccatcgggtgggtt

SEQ ID NO: 549058 - DNA, 75 bp, synthetic construct
  source 1..75: mol_type = other DNA
tgatgcgctgctgcaattcagagaattcatcagcgagcattcagatgaaaaactcgtgcaggtatggggcaatgg

SEQ ID NO: 549059 - DNA, 75 bp, synthetic construct
  source 1..75: mol_type = other DNA
catccaccagcagagcggggattcatctgatgatcgaccttgaaaccatgggaaaaatcccgatgccccgattat

SEQ ID NO: 549060 - DNA, 75 bp, synthetic construct
  source 1..75: mol_type = other DNA
gttaccattcgccaggatctcaacactctcgaaaaacttagctatctgcgccgcgcgcatggtttcgccgtatcg

SEQ ID NO: 549061 - DNA, 75 bp, synthetic construct
  source 1..75: mol_type = other DNA
gcaaaatttcactggcaattcctggaacattatccggctgctcaggactgcgcttataaatttattgtctgcgag

SEQ ID NO: 549062 - DNA, 75 bp, synthetic construct
  source 1..75: mol_type = other DNA
tcatgccagcgatagtgaaactggcgaggcgtcagatcccttaattaaggcgaacagtcatcataatctcacatc

SEQ ID NO: 549063 - DNA, 75 bp, synthetic construct
  source 1..75: mol_type = other DNA
ccacaatgcgctggacgatgcccgtcaccaggcaaaacaagtttcagcaatctggcaaaaactgttcccgaatca

SEQ ID NO: 549064 - DNA, 75 bp, synthetic construct
  source 1..75: mol_type = other DNA
cccgttagatgatgcactgttacaattgcgggaatttatcgacgaaaactccggtgaattttttgttcaggtctg

SEQ ID NO: 549065 - DNA, 75 bp, synthetic construct
  source 1..75: mol_type = other DNA
gctggcacagcacggcagcaaaaaaccgatcacacacgtttcgcgggacgaactgcgcgcattacataacgcaca

SEQ ID NO: 549066 - DNA, 75 bp, synthetic construct
  source 1..75: mol_type = other DNA
aacgattatgatgaagacgactttaaaaaacccgtccgcgtccatttacccgttgtgaatgaccttccacctgaa

SEQ ID NO: 549067 - DNA, 75 bp, synthetic construct
  source 1..75: mol_type = other DNA
ccaacttcgacaacacgattttgcgccgttcatacgaacggcaggagatcccctgcccgtggcgctaccacaacg

SEQ ID NO: 549068 - DNA, 75 bp, synthetic construct
  source 1..75: mol_type = other DNA
gatatcccaaaaaatgaaaccgcgccggaagctgaaccatctgtagagcgtgaggggccgttctatttcctcttc

SEQ ID NO: 549069 - DNA, 75 bp, synthetic construct
  source 1..75: mol_type = other DNA
gaaatattcgatggagagaatcagcctgaagttcaggaaaatgatccggaggaaatggaaggcactgcgcatcag

SEQ ID NO: 549070 - DNA, 75 bp, synthetic construct
  source 1..75: mol_type = other DNA
cgcaactcgaaccgctggagattcgcgatctccacaaactggtgcgagacactgacaaagttttccccgcccccg

SEQ ID NO: 549071 - DNA, 75 bp, synthetic construct
  source 1..75: mol_type = other DNA
atgggtgacacaacataccaggaaatattcgatgaagagaatcagcctgaagttcaggaaaatgatccggaggaa

SEQ ID NO: 549072 - DNA, 75 bp, synthetic construct
  source 1..75: mol_type = other DNA
gaaggcgcttattttgtggcgaacagaatgctggctgcctgggaagctggttttattgatgatactgcgaagaac

SEQ ID NO: 549073 - DNA, 75 bp, synthetic construct
  source 1..75: mol_type = other DNA
tatcaacgattactggcggctggcgattaagcatcaggcgtatggcgtccatctggggcaggaagatttgcaagc

SEQ ID NO: 549074 - DNA, 75 bp, synthetic construct
  source 1..75: mol_type = other DNA
tcgccgtcgtcagcgccattactcaagccgcagactggcgtttggcaacggcacagttgctggaaattgcaggag

SEQ ID NO: 549075 - DNA, 75 bp, synthetic construct
  source 1..75: mol_type = other DNA
gcatcacaatagcgataatgaaactggcgagacggcagatcactcaattaaggtgaacggtcatcacgaaatcac

SEQ ID NO: 549076 - DNA, 75 bp, synthetic construct
  source 1..75: mol_type = other DNA
cctgcggtcagagcggtggcggcaactgccctgattgtggtgcggtgatgggcgacgcaacataccaggaaacat

SEQ ID NO: 549077 - DNA, 75 bp, synthetic construct
  source 1..75: mol_type = other DNA
tttatcgacgaaaactccggtgagttttttgttcaggtctggggtaatggggccaacttcgacaacactattttg

SEQ ID NO: 549078 - DNA, 75 bp, synthetic construct
  source 1..75: mol_type = other DNA
gtgccaaatggcccgaaattcaggctgaattacgtaactggaaaaagtaactggaaaaaacggcaggacgcagag

SEQ ID NO: 549079 - DNA, 75 bp, synthetic construct
  source 1..75: mol_type = other DNA
cattgacggcagcatccatcgccgggcaaaaaatgaagttatcgacaaagatcgcgaagactggaagcgcatttc

SEQ ID NO: 549080 - DNA, 75 bp, synthetic construct
  source 1..75: mol_type = other DNA
cgctgacgaagtaaacaaaattatgcaggcagccaatatcagccagcctgacgccgataagttgcttgctgcatc

SEQ ID NO: 549081 - DNA, 75 bp, synthetic construct
  source 1..75: mol_type = other DNA
gcatctgacacgaccgcacaaccagacctggtaaaagttaccgctgacgaagtaaacaaaattatgcaggcagcc

SEQ ID NO: 549082 - DNA, 75 bp, synthetic construct
  source 1..75: mol_type = other DNA
cgcgattctgtgaaccagaaccagcaagaaacggaacagaacgaccagaaagcggaacaaaacagcccaaatgcg

SEQ ID NO: 549083 - DNA, 75 bp, synthetic construct
  source 1..75: mol_type = other DNA
agtgcaacaggaaccggaaaaaatctgcaccgcctgcgatcagagcggtggtggcaactgccctgattgtggtgc

SEQ ID NO: 549084 - DNA, 75 bp, synthetic construct
  source 1..75: mol_type = other DNA
ttataaccttcatccggcacaagctaaacgcattgaggaaattatcgctgaaaataaaccgcccttttctgtttt

SEQ ID NO: 549085 - DNA, 75 bp, synthetic construct
  source 1..75: mol_type = other DNA
agatgaaggaacaaatcagagcgcaactgatactctctcgtcgtcagtaccagaaactgatgcagtggaaacggc

SEQ ID NO: 549086 - DNA, 75 bp, synthetic construct
  source 1..75: mol_type = other DNA
catggcaacattcaacggacatatcgttgaagcgttgatgaaaatgccagaagttaacgccatgtatccggagct

SEQ ID NO: 549087 - DNA, 75 bp, synthetic construct
  source 1..75: mol_type = other DNA
ctgctgtagctgcgtcagtattaatggcgatgtctgctcaagcagcagagatttataacaaagacagcaacaaac

SEQ ID NO: 549088 - DNA, 75 bp, synthetic construct
  source 1..75: mol_type = other DNA
cactggtggatgccggatgcaatattgtgattgtgtcgcatctgagtgacggttctttatgggatcgtcgggctt

SEQ ID NO: 549089 - DNA, 75 bp, synthetic construct
  source 1..75: mol_type = other DNA
tgccattatcgcggcctctcccgatctgtcagaagccgccgcacgcctggaggctctctggaagcatctgggaga

SEQ ID NO: 549090 - DNA, 75 bp, synthetic construct
  source 1..75: mol_type = other DNA
tggtatgcgtgtagtacgcggcgacgctgaactggcacaatccatctccatgacccgtgcggaagcgaaagccgc

SEQ ID NO: 549091 - DNA, 75 bp, synthetic construct
  source 1..75: mol_type = other DNA
tgtcaggttcggtacacatgaaaacatcaccgtggatatggtcatcaatgcaagcgggcttctcggcgatgacga

SEQ ID NO: 549092 - DNA, 75 bp, synthetic construct
  source 1..75: mol_type = other DNA
gctttgatgtcagaatggctattccattcgaaggtgtaccccacaatgcacttgatgatgcacgtcaccaggcaa

SEQ ID NO: 549093 - DNA, 75 bp, synthetic construct
  source 1..75: mol_type = other DNA
cagtaccagaaactgatgcagtggaaacggcaatgccggacaacgaaaaaaccgaatgcgaagtggaagacgaac

SEQ ID NO: 549094 - DNA, 75 bp, synthetic construct
  source 1..75: mol_type = other DNA
ctgctgtagctgcatcaattctgatggcgatgtctgcacaggcagcagaaatttataacaaagatagcaacaaac

SEQ ID NO: 549095 - DNA, 75 bp, synthetic construct
  source 1..75: mol_type = other DNA
taaattcgcagattactttgtggctaataaagcacaaaacttcgaagctgttgcacaatatcagttcgatttcgg

SEQ ID NO: 549096 - DNA, 75 bp, synthetic construct
  source 1..75: mol_type = other DNA
catctgtagagcgtgaggggccgttctacttcctcttcaccgacaaggatggcgaaaaatacggtcgcgcaaaca

SEQ ID NO: 549097 - DNA, 75 bp, synthetic construct
  source 1..75: mol_type = other DNA
taaattcagacctgggactgatgacatcttttatcgaagcatacctgaacgctgactacaccgatcgcggtctgc

SEQ ID NO: 549098 - DNA, 75 bp, synthetic construct
  source 1..75: mol_type = other DNA
accgcgccggaagctgaaccatctgtagagcgtgaggggccgttctatttcctcttcgcagataaggacggagaa

SEQ ID NO: 549099 - DNA, 75 bp, synthetic construct
  source 1..75: mol_type = other DNA
caaaactatcgatctggaaaccgcaggcggagtcatcgatcgggacaccattaagtggtggctgaaacagtcacg

SEQ ID NO: 549100 - DNA, 75 bp, synthetic construct
  source 1..75: mol_type = other DNA
ttgaccttgaaacaatgggcaaaaatcctgatgccccaataaacgctctggccggtaagttttttgatccggcaa

SEQ ID NO: 549101 - DNA, 75 bp, synthetic construct
  source 1..75: mol_type = other DNA
aacatcaccgttgatatggtgattagtgctcaggaattactgcaggaagacatggcaacattcgatgggcatatc

SEQ ID NO: 549102 - DNA, 75 bp, synthetic construct
  source 1..75: mol_type = other DNA
actgggatgaggaatccgcttcctttattccggtcgaaccagaatccgatccgatgaacgtcaattttgacaagc

SEQ ID NO: 549103 - DNA, 75 bp, synthetic construct
  source 1..75: mol_type = other DNA
tgatactctctcgtcgccagtaccagaaactgatgcagtggaaacggcaattccagacaacgaaaaaaccgaatg

SEQ ID NO: 549104 - DNA, 75 bp, synthetic construct
  source 1..75: mol_type = other DNA
gttacttgctgtatcgcgtggtgaatttgttgaggggattagcgacccgaatgatccgaaatgggtcaaagggat

SEQ ID NO: 549105 - DNA, 75 bp, synthetic construct
  source 1..75: mol_type = other DNA
cgacctccacaaactggttcgtgacactgacaaaattttccctaatcctggtaattcagacctgggactaataac

SEQ ID NO: 549106 - DNA, 75 bp, synthetic construct
  source 1..75: mol_type = other DNA
aactccaggcattacacattgcacgggctgaggaactaccagctgttacttccctggctgtttcccacaaaacca

SEQ ID NO: 549107 - DNA, 75 bp, synthetic construct
  source 1..75: mol_type = other DNA
ttacagtgagtagttacattgcgcatttactgaaagacgccccctgtgaagtcatcttacttggcggcgtgtatc

SEQ ID NO: 549108 - DNA, 75 bp, synthetic construct
  source 1..75: mol_type = other DNA
gagtaattatacgctgaagcgtgaactcgccgagtttgctgcctcactggttcaaccgggtgaaaccatctttat

SEQ ID NO: 549109 - DNA, 75 bp, synthetic construct
  source 1..75: mol_type = other DNA
tacactcttactccatcggtcctgtggagagaatcaagcgtgttataaccgattcgaagattcgcgccagcgata

SEQ ID NO: 549110 - DNA, 75 bp, synthetic construct
  source 1..75: mol_type = other DNA
tacgttattgctgtttgtcatttgtacgttgatgtggggttcaaatagcctgtacatcatcaacatgccgctatt

SEQ ID NO: 549111 - DNA, 75 bp, synthetic construct
  source 1..75: mol_type = other DNA
atggcgcattcacctgccattctgttgggcttgcagctgctaaatgctattttattggcattctgggcggcatcg

SEQ ID NO: 549112 - DNA, 75 bp, synthetic construct
  source 1..75: mol_type = other DNA
atttttaccgtcgatgcaaaaagaggttccgctggcgaccggcacggttgaagcgccgcgccgtaatcgtcgcga

SEQ ID NO: 549113 - DNA, 75 bp, synthetic construct
  source 1..75: mol_type = other DNA
tggcgagacagcaaatcccttaattaaggtgaacggtcatcgtgaaatcacatccaccagcaggttgtggcacca

SEQ ID NO: 549114 - DNA, 75 bp, synthetic construct
  source 1..75: mol_type = other DNA
tgtcccggtcgagactgaatccgatccgatgaacgtcacttttgacaacctagcccctgaagtacagaacgctgt

SEQ ID NO: 549115 - DNA, 75 bp, synthetic construct
  source 1..75: mol_type = other DNA
gtggcgttactacaacgatcgcgatgtacgcacaatcgttgagctggggaaagccatagacttcgatgccagaac

SEQ ID NO: 549116 - DNA, 75 bp, synthetic construct
  source 1..75: mol_type = other DNA
ttaagcaatcacgcgaagcgcaatctgccattatgaccgatgaaatcccgttagatgatgcactgttacaattgc

SEQ ID NO: 549117 - DNA, 75 bp, synthetic construct
  source 1..75: mol_type = other DNA
tcgaaggtgagcgccataatgcacttgatgacgcccgttaccaggcaaaatacgtttcagcaatctggcaaaaac

SEQ ID NO: 549118 - DNA, 75 bp, synthetic construct
  source 1..75: mol_type = other DNA
caaacagcctgatgcccttcgctacgaccgccagactatttttggccttgtccgtgaacgtccgatcgacattca

SEQ ID NO: 549119 - DNA, 75 bp, synthetic construct
  source 1..75: mol_type = other DNA
cttccgctggcgaccggcacggttgaagcgccgcgccgtaaccgtcgcgatacgctactgctgtttgtcatttgt

SEQ ID NO: 549120 - DNA, 75 bp, synthetic construct
  source 1..75: mol_type = other DNA
gataagcgtggcgatcgtaaatcactgattgtcttttgctgcctgttaggcgtgctggcctgcaccctttttgcc

SEQ ID NO: 549121 - DNA, 75 bp, synthetic construct
  source 1..75: mol_type = other DNA
taccgatgaagtgcacgcccgtccggcgatggtgggattcttctttaccggcagtgctgtcatcgggattctggt

SEQ ID NO: 549122 - DNA, 75 bp, synthetic construct
  source 1..75: mol_type = other DNA
cagtcacgcgaagcacaatccgccattctgaccgatgaaatcccgttggatgatgcactgctgcaattccgggaa

SEQ ID NO: 549123 - DNA, 75 bp, synthetic construct
  source 1..75: mol_type = other DNA
cgcacaatcgttgagctggggaaagccatagacttcgatgccagaacggctattccattcgaaggtgagcgccat

SEQ ID NO: 549124 - DNA, 75 bp, synthetic construct
  source 1..75: mol_type = other DNA
tggggaaagccgtagacttcgatgccagaactgctatcccattcgaaggtgagcgccacaatgcgctggatgatg

SEQ ID NO: 549125 - DNA, 75 bp, synthetic construct
  source 1..75: mol_type = other DNA
atacaagcagacatggaaaacactggatgacgaactggcctacgctctctggcctggtgatgcggatgccggaaa

SEQ ID NO: 549126 - DNA, 75 bp, synthetic construct
  source 1..75: mol_type = other DNA
cagcctgatgcccttcgctacgaccgccagactatttttggccttgtccgtgaacgtccgatcgacattcacaaa

SEQ ID NO: 549127 - DNA, 75 bp, synthetic construct
  source 1..75: mol_type = other DNA
tgggcactgttgatgttctccagtcatcagaaacacaaactgatgcagtggaaactgaggtatctgatatcccaa

SEQ ID NO: 549128 - DNA, 75 bp, synthetic construct
  source 1..75: mol_type = other DNA
tccgatgtgttatcgctgaaatgggagcagattggaaacgacggaatctttatccagcaagggaaaacaggaaaa

SEQ ID NO: 549129 - DNA, 75 bp, synthetic construct
  source 1..75: mol_type = other DNA
agttaccgctgacgaagtaaacaaaattatgcaggcagccaatatcagccagcctgacgccgataaattgcttgc

SEQ ID NO: 549130 - DNA, 75 bp, synthetic construct
  source 1..75: mol_type = other DNA
aaaaaaatgaaatcctggtggaagctgaaccatctgtagagcgtgaaggaccgttttatttcgtctttaccgata

SEQ ID NO: 549131 - DNA, 75 bp, synthetic construct
  source 1..75: mol_type = other DNA
gcggcaactgccctgattgtggcgcggtgatgggcaacgcaacctaccaggaaacactcgatgaagaaaatcagg

SEQ ID NO: 549132 - DNA, 75 bp, synthetic construct
  source 1..75: mol_type = other DNA
ttgtctgcgaggataaacccggcataccccgccctgccctcgattcctgggataccgaatatatgcaggaaaacc

SEQ ID NO: 549133 - DNA, 75 bp, synthetic construct
  source 1..75: mol_type = other DNA
tttatttgcgcctccattcctgacgaacaggcaataaaaaacgaggtcgctgttgctttggcctcagccattgaa

SEQ ID NO: 549134 - DNA, 75 bp, synthetic construct
  source 1..75: mol_type = other DNA
atgtcagaatggctattccattcgaaggcgtaccccacaatgcgctggacgatgcccgtcaccaggcaaaacaag

SEQ ID NO: 549135 - DNA, 75 bp, synthetic construct
  source 1..75: mol_type = other DNA
ggaaatggaaggcactgaacatccacacaaggagaaccctggcggcaatcagcatcacgatagcgatagtgaaac

SEQ ID NO: 549136 - DNA, 75 bp, synthetic construct
  source 1..75: mol_type = other DNA
ggctactgaaatcacgaaagaagaatatttcgcccgcaaaaacggcacatactcaggttcacaacaaaatactgg

SEQ ID NO: 549137 - DNA, 75 bp, synthetic construct
  source 1..75: mol_type = other DNA
ggttgacgctcttattcaatttcgggaattcatcaatgagtactcgaatgaaaaattcgttcaggtatggggcaa

SEQ ID NO: 549138 - DNA, 75 bp, synthetic construct
  source 1..75: mol_type = other DNA
gaaacattcgatgaagagaatcaggttgaagttcaggaagatgatccggaggaaatggaaggcgctgaacatcca

SEQ ID NO: 549139 - DNA, 75 bp, synthetic construct
  source 1..75: mol_type = other DNA
agcggaacaaaacagcccaaatgcgttacaaaacgagccagaaacgaaacagcctgaaccagtggcgcaacagga

SEQ ID NO: 549140 - DNA, 75 bp, synthetic construct
  source 1..75: mol_type = other DNA
gctccgctctattgtgagttaaaaacacaacttacgactgccgcctcgctaagaatggataaacatcgcgccgat

SEQ ID NO: 549141 - DNA, 75 bp, synthetic construct
  source 1..75: mol_type = other DNA
gccgtgactgacggtgcgctcatcgacattacggatatgcgcgaatggcgtgaggagcgcgggcagggcgtggtg

SEQ ID NO: 549142 - DNA, 75 bp, synthetic construct
  source 1..75: mol_type = other DNA
tgcaccgcctgcggtcagaccagcggcggcaactgccctgattgtggctcagtaatgggtgacgcaacataccag

SEQ ID NO: 549143 - DNA, 75 bp, synthetic construct
  source 1..75: mol_type = other DNA
tcataaaatcacatccaccagcagaatgtggcaccacatgatgatcgaccttgaaaccatgggaaaaaatcccga

SEQ ID NO: 549144 - DNA, 75 bp, synthetic construct
  source 1..75: mol_type = other DNA
caggaaaatgatccgaaggaaatggaaggcgctgaacatccacacaaggagaatgctggcagcgctcaggatcac

SEQ ID NO: 549145 - DNA, 75 bp, synthetic construct
  source 1..75: mol_type = other DNA
gataagttgcttgctgcctctcgcggagaatttgttgcagggattagcgccccgaatgatccgaaatgggtgaag

SEQ ID NO: 549146 - DNA, 75 bp, synthetic construct
  source 1..75: mol_type = other DNA
cataaaccgattcctggttggcagagcacgcttgagcaacgtggatttgtcggctgtgcgcggcacttcattgaa

SEQ ID NO: 549147 - DNA, 75 bp, synthetic construct
  source 1..75: mol_type = other DNA
gtgcacaggaactgttgcaggaagacatggcaacattcgacggacatatcgttgaagcgttgatgaaaatgccag

SEQ ID NO: 549148 - DNA, 75 bp, synthetic construct
  source 1..75: mol_type = other DNA
ggatccagacccgcgattctatgaaccaaaaccagcaagaaacggaacagaacgaccagaaagcggaacaaagca

SEQ ID NO: 549149 - DNA, 75 bp, synthetic construct
  source 1..75: mol_type = other DNA
gcgatagtgaaactggcgagacggcagatcccttaattacggtgaacggtcatcacgttatcacatccaccagca

SEQ ID NO: 549150 - DNA, 75 bp, synthetic construct
  source 1..75: mol_type = other DNA
aaatcagagcgcaactgatactctctcgtcgccagtaccagaaactgatgcagtggaaacggcaattccgggcaa

SEQ ID NO: 549151 - DNA, 75 bp, synthetic construct
  source 1..75: mol_type = other DNA
gccaacttcgacaacacgattttgcgccgttcatacgaacggcaggggatcccctgcccgtggcgttactacaac

SEQ ID NO: 549152 - DNA, 75 bp, synthetic construct
  source 1..75: mol_type = other DNA
acgagccagaaacgaaacagcctgaaccagtggcgcaacaggaagtggaaaaagtctgcaccgcctgcggtcaga

SEQ ID NO: 549153 - DNA, 75 bp, synthetic construct
  source 1..75: mol_type = other DNA
gcggcaactgccctgaatgtggtgcggtgatgggcgacgcaacataccaggaaacattcgatgacaagaaccagg

SEQ ID NO: 549154 - DNA, 75 bp, synthetic construct
  source 1..75: mol_type = other DNA
acacgtctgttgttgatctcgccagcgccagagtcaatcaacagcacactgaaaactcagcaggaaaaatcaacc

SEQ ID NO: 549155 - DNA, 75 bp, synthetic construct
  source 1..75: mol_type = other DNA
gaataaatcctgatgccccgattatctcaataggtgcaatatttttcgatccgcaaaccggagatatgggaccgg

SEQ ID NO: 549156 - DNA, 75 bp, synthetic construct
  source 1..75: mol_type = other DNA
gcatcacgccagcgatagtgaaactggcgagacggcagatcccttaattacggtgaacagtcatcacattatcac

SEQ ID NO: 549157 - DNA, 75 bp, synthetic construct
  source 1..75: mol_type = other DNA
acaaggagaacactggcggcaatcagcatcacgccagcgatagtgaaactggcgagacggcagatcccttaatta

SEQ ID NO: 549158 - DNA, 75 bp, synthetic construct
  source 1..75: mol_type = other DNA
atcagaaccagcatgaatcggaacggaactaccaaaaagcggaacaaaacagcccaaatgcgttacaaaacgagc

SEQ ID NO: 549159 - DNA, 75 bp, synthetic construct
  source 1..75: mol_type = other DNA
cctcttcaccgacaaggatggcgaaaaatacggtcgcgcaaacaaactttctggtctggaaaaagcactagcctt

SEQ ID NO: 549160 - DNA, 75 bp, synthetic construct
  source 1..75: mol_type = other DNA
tcgggccaacattttatatcgttatcagcctggttgacgctatggacacgggtgctgttcctgatggttccacca

SEQ ID NO: 549161 - DNA, 75 bp, synthetic construct
  source 1..75: mol_type = other DNA
tcatggcgaccgttctgcgagataaaccgttttacgatcgcagcggcggcggtttaacactttccggtggtgagc

SEQ ID NO: 549162 - DNA, 75 bp, synthetic construct
  source 1..75: mol_type = other DNA
tttttggtcttgttcgcgaacgtccgctcaacattcacaaagatcccgtggcgctgaacaaatacatcactgaat

SEQ ID NO: 549163 - DNA, 75 bp, synthetic construct
  source 1..75: mol_type = other DNA
aatggaaggcgctgaacatccacacaaggagaatgctggcagcgctcaggaccacgccagcgatagtgaaactgg

SEQ ID NO: 549164 - DNA, 75 bp, synthetic construct
  source 1..75: mol_type = other DNA
tccggtcgaccctgaaccggatacagaaactgttaactttaatcagttatctgaagacaagcgggctgctgtcct

SEQ ID NO: 549165 - DNA, 75 bp, synthetic construct
  source 1..75: mol_type = other DNA
aactccggtgagttttttgttcaggtctggggcaacggaaccagtttcgacaacgtaattttacgccgttcatac

SEQ ID NO: 549166 - DNA, 75 bp, synthetic construct
  source 1..75: mol_type = other DNA
cgaaggcgtaccccacaatgcgctggacgatgcccgtcaccaggcaaaacaagtttcagcaatctggcaaaaact

SEQ ID NO: 549167 - DNA, 75 bp, synthetic construct
  source 1..75: mol_type = other DNA
agatgttgctctccggctattcatagaatttatcgaaaaaaactccggcgggcgttttgtccaggtatggggaaa

SEQ ID NO: 549168 - DNA, 75 bp, synthetic construct
  source 1..75: mol_type = other DNA
gttcctggcgttacaaaccatgggtactgaaacggcacgccaggatgcgcgagcgctgaagaaaaccgttctggc

SEQ ID NO: 549169 - DNA, 75 bp, synthetic construct
  source 1..75: mol_type = other DNA
gagtcatacatcttcgccaaagcggcccatgcaccgtttatttcgcatccagacgagttttgtcaacagttggtg

SEQ ID NO: 549170 - DNA, 75 bp, synthetic construct
  source 1..75: mol_type = other DNA
aaggtcaggggaatgttcatcttgtgctgctgcacggatggggactgaatgccgaagtgtggcgttgcattgacg

SEQ ID NO: 549171 - DNA, 75 bp, synthetic construct
  source 1..75: mol_type = other DNA
cgatagtgaaactggcgagacggcagatcccttaattacgatgaacggtcatcacgttatcacatccaccagcag

SEQ ID NO: 549172 - DNA, 75 bp, synthetic construct
  source 1..75: mol_type = other DNA
ttcagcaaaactatcgatctggaaaccgcaggtggggtcatcgatcgggacaccattaagtggtggctgaaacag

SEQ ID NO: 549173 - DNA, 75 bp, synthetic construct
  source 1..75: mol_type = other DNA
gattttatttttgcatatggatgctgggcattaataattctcccattactctggctatatctgagaaccagagcg

SEQ ID NO: 549174 - DNA, 75 bp, synthetic construct
  source 1..75: mol_type = other DNA
tctgtagagcgtgaggggccgttctacttcctcttcaccgacaaggatggcgaaaaatacggtcgcgcaaacaaa

SEQ ID NO: 549175 - DNA, 75 bp, synthetic construct
  source 1..75: mol_type = other DNA
acgtaactggaaaaaacggcaggacgcagagcgcaaagagactggaaaatacacgtctgctgttgatctcgcccg

SEQ ID NO: 549176 - DNA, 75 bp, synthetic construct
  source 1..75: mol_type = other DNA
cagcccgaatcggaacaaaacgaccagaaagcggaacataacagcccaaatgcgttacaaaacgagccagaaacg

SEQ ID NO: 549177 - DNA, 75 bp, synthetic construct
  source 1..75: mol_type = other DNA
gacaaggcgctggctgccggggctactgaaatcacgaaagaagaatattttgcccgcaaaaacggcacatacacg

SEQ ID NO: 549178 - DNA, 75 bp, synthetic construct
  source 1..75: mol_type = other DNA
gctggctgccgcagacatcattgtcgccaataaatccgaccgtgcgacgcctgaaagcgagcaagcgctacagcg

SEQ ID NO: 549179 - DNA, 75 bp, synthetic construct
  source 1..75: mol_type = other DNA
accgcatgcggtcagaccggtggcggcaactgtcctgactgtggtgcggtgatggggaacgcaacctacctggaa

SEQ ID NO: 549180 - DNA, 75 bp, synthetic construct
  source 1..75: mol_type = other DNA
gaaattcaggcagagatgcgcacctggaaaaaacgtcgcgaagcagaacgaaaagaaaccgggaaacatacttct

SEQ ID NO: 549181 - DNA, 75 bp, synthetic construct
  source 1..75: mol_type = other DNA
ttgtctgcgaggataaacccggtataccccgccctgccctcgattcctgggatactgaatatatgcaggaaaacc

SEQ ID NO: 549182 - DNA, 75 bp, synthetic construct
  source 1..75: mol_type = other DNA
tgcttttttcgaagcatacctagacgctgactacactgatcggggtttgctgacaaaagagtggatgaaaggaaa

SEQ ID NO: 549183 - DNA, 75 bp, synthetic construct
  source 1..75: mol_type = other DNA
acgcaagcgggcttcttggcgatgacgacatgatgacctttgacggacacctcgcagaggcaattatccggacta

SEQ ID NO: 549184 - DNA, 75 bp, synthetic construct
  source 1..75: mol_type = other DNA
cagaaacgaaacagcctgaaccagtagcgcaacaggaagtggaaaaagtctgcaccgcctgcggtcagaccggcg

SEQ ID NO: 549185 - DNA, 75 bp, synthetic construct
  source 1..75: mol_type = other DNA
tgaagttatcgacaaggatcgcgaagactggaaacgtatctctgcatcaatgcgcaaacaacctgatgcacttct

SEQ ID NO: 549186 - DNA, 75 bp, synthetic construct
  source 1..75: mol_type = other DNA
atgcgcaaacaacctgatgcgcttcgctacagccgccagactatttttggccttgtccgtgaacgcccgatcgac

SEQ ID NO: 549187 - DNA, 75 bp, synthetic construct
  source 1..75: mol_type = other DNA
ctctaggatttaccggcatgatgcttacagagccatatatagaaacagatattcaagcatatctatatacttatg

SEQ ID NO: 549188 - DNA, 75 bp, synthetic construct
  source 1..75: mol_type = other DNA
gcggatgcggtgtttacgacggttctgaaatacatgaagccgtgctgacgcttctggcgatagcgcgtagcggcg

SEQ ID NO: 549189 - DNA, 75 bp, synthetic construct
  source 1..75: mol_type = other DNA
gcgaatgcaccgttgaccgtgaattaaaggcgctggcacaagcgatgcatcaggccggaaaaccgcttggtttta

SEQ ID NO: 549190 - DNA, 75 bp, synthetic construct
  source 1..75: mol_type = other DNA
gtgttgattatgccttgtttaaagaatcaattaaaaacatacatgtatttgattacatgttagatgataaaaagg

SEQ ID NO: 549191 - DNA, 75 bp, synthetic construct
  source 1..75: mol_type = other DNA
ataagattgtcactacaccggcttatatgttggcacagaacattgcggaagcggcgaacggcattgataagctgg

SEQ ID NO: 549192 - DNA, 75 bp, synthetic construct
  source 1..75: mol_type = other DNA
cgtcctctggctcaggccgataccggcgaactggatgcgttgattgtgcctggtggctttggtgcggcgaagaat

SEQ ID NO: 549193 - DNA, 75 bp, synthetic construct
  source 1..75: mol_type = other DNA
catttaaccggcgaggcgatgacggaatcgcgcaatgcgctgattgaagccgcgcgtattgcgcgtggtgagatc

SEQ ID NO: 549194 - DNA, 75 bp, synthetic construct
  source 1..75: mol_type = other DNA
gcgggtgcgggtaacgaagagcgtgttgacgcgctggttgccgcaggcgttgacgttctgctgatcgactcctcc

SEQ ID NO: 549195 - DNA, 75 bp, synthetic construct
  source 1..75: mol_type = other DNA
cctggttctatctgtacgacgcgtatcgtgactggtgtcggtgttccgcagatcccaccgccgttgctgatgcag

SEQ ID NO: 549196 - DNA, 75 bp, synthetic construct
  source 1..75: mol_type = other DNA
ttgtacgtatcagcggtgcgggtattaaggaaagccacgttcacgacgtgaccattactaaagagtccccgaact

SEQ ID NO: 549197 - DNA, 75 bp, synthetic construct
  source 1..75: mol_type = other DNA
gccagcaacaggtgccggaaatgtatcttgacgttctggcgagtcgtttggggatgcatgatgcttccgatgaag

SEQ ID NO: 549198 - DNA, 75 bp, synthetic construct
  source 1..75: mol_type = other DNA
ttgccgcctatcctcatctgaaaggagatgacctggccgagcaagcgcaggctttgtcaaaccgcgcctatgaag

SEQ ID NO: 549199 - DNA, 75 bp, synthetic construct
  source 1..75: mol_type = other DNA
tcgtgactggcgtcggtgttccgcagatcaccgccgttgctgatgcagtagaagccctggaaggtaccggcattc

SEQ ID NO: 549200 - DNA, 75 bp, synthetic construct
  source 1..75: mol_type = other DNA
gggggggtttggtgcggcgaagaatttaagcaactttgcccgtctggggagtgaatgcaccgttgagcgtgaatt

SEQ ID NO: 549201 - DNA, 75 bp, synthetic construct
  source 1..75: mol_type = other DNA
ggaaaacaacaagaatgagcaatgggaaattgtccggatacccaaaaacgccagtctacggcaggtgcttttacg

SEQ ID NO: 549202 - DNA, 75 bp, synthetic construct
  source 1..75: mol_type = other DNA
acgcagccaaacgcccggtgctttatctgggcggtggtgtgatcaacgcgcccgcgcgggtgcgtgaactggcgg

SEQ ID NO: 549203 - DNA, 75 bp, synthetic construct
  source 1..75: mol_type = other DNA
atgcgattatcaccaccgatgttggtcagcatcaaatgtggacggcgcaggcctatccgctcaatcgtccgcgtc

SEQ ID NO: 549204 - DNA, 75 bp, synthetic construct
  source 1..75: mol_type = other DNA
cacgtggatatgagtacaaggaacgtttcccgcagatgattcggtatcgggttaaagagtgggaaaaagttgccg

SEQ ID NO: 549205 - DNA, 75 bp, synthetic construct
  source 1..75: mol_type = other DNA
agaagaggcaaaatacactgccaaatccgaactaccctttatcagggctgtccgtgcatgggtgaatgataatgt

SEQ ID NO: 549206 - DNA, 75 bp, synthetic construct
  source 1..75: mol_type = other DNA
gagcaaggtaagccccagtggccacctgtctggcacagtgatgagatccccaatgcactagaagattttggttat

SEQ ID NO: 549207 - DNA, 75 bp, synthetic construct
  source 1..75: mol_type = other DNA
cgcgcctgcctttagtgaagagagcattcgtgacgcggcagcgatgattaacgcagccaaacgcccggtgcttta

SEQ ID NO: 549208 - DNA, 75 bp, synthetic construct
  source 1..75: mol_type = other DNA
aatcaggccgccctggcccggtgtggatagacattcctaaggatgtgcaaacagcggtttttgagattgaagaac

SEQ ID NO: 549209 - DNA, 75 bp, synthetic construct
  source 1..75: mol_type = other DNA
ctggtctggtgctcacctgaagaggcgctgcgatatccgctggcccctgctgacattccattattagaggcgttt

SEQ ID NO: 549210 - DNA, 75 bp, synthetic construct
  source 1..75: mol_type = other DNA
atttgtgatgcggcagcgatgattaacgctgccaaacgtccgatactttatctgggcggcggtgtgatcaacgca

SEQ ID NO: 549211 - DNA, 75 bp, synthetic construct
  source 1..75: mol_type = other DNA
cggatcgcaaagtgttgtgtttctccggcgacggcagcctgatgatgaatattcaggagatggcgaccgccagtg

SEQ ID NO: 549212 - DNA, 75 bp, synthetic construct
  source 1..75: mol_type = other DNA
acgcgattattaccactgatgttggtcagcatcagatgtggacggcgcaggcctatccgctcaatcgcccacgtc

SEQ ID NO: 549213 - DNA, 75 bp, synthetic construct
  source 1..75: mol_type = other DNA
tgaaatcctccgggatttgcggaagcgatgtccactatatctatcatcaacaccgtgccacagcggcggcacccg

SEQ ID NO: 549214 - DNA, 75 bp, synthetic construct
  source 1..75: mol_type = other DNA
ttattaccgtctccgaggtggaatcgacaagataaccgcgcaggttaactacgtgcaggactacatcaggacgca

SEQ ID NO: 549215 - DNA, 75 bp, synthetic construct
  source 1..75: mol_type = other DNA
ttattaccgtctccgacgtggaatcgacaagataaccgcgcaggttaactacgtgcaggagtacatcaggacgca

SEQ ID NO: 549216 - DNA, 75 bp, synthetic construct
  source 1..75: mol_type = other DNA
atgaaacaaatgacgctaattgagatggatggatttctgaaaggtaaatgcatcccacgagatttaaaggttaac

SEQ ID NO: 549217 - DNA, 75 bp, synthetic construct
  source 1..75: mol_type = other DNA
gcggctgcgggtcaaagcaaactgttcagcaaacggagcgaccggcaccggtggcatgggcgatgcttcctcccc

SEQ ID NO: 549218 - DNA, 75 bp, synthetic construct
  source 1..75: mol_type = other DNA
ctgcctgtcatgggcggttaatcattaccgtgataacgccatcacttacaaaaagcagcgtgataaggccacatc

SEQ ID NO: 549219 - DNA, 75 bp, synthetic construct
  source 1..75: mol_type = other DNA
tcgcaccaggcgtggcaatgcctcatgcgcgaccagaatgtggggcgcttaaaaccgggggtgatgctgccaact

SEQ ID NO: 549220 - DNA, 75 bp, synthetic construct
  source 1..75: mol_type = other DNA
cgctgaacgggattatttcaccctcagagcgcgactgataataatgcaaaaacaacttgaaggggcacagctata

SEQ ID NO: 549221 - DNA, 75 bp, synthetic construct
  source 1..75: mol_type = other DNA
tattaccgtctccgaagtggaatagacaggataaccgcgcaggttaactacctgcaggagtacatcagggctcag

SEQ ID NO: 549222 - DNA, 75 bp, synthetic construct
  source 1..75: mol_type = other DNA
tgcaaagtcaacgaccggagccagcggcatgggcaatggagaaagcccaggacttacagcagatgctgaactcaa

SEQ ID NO: 549223 - DNA, 75 bp, synthetic construct
  source 1..75: mol_type = other DNA
gaaatactcgaacaactcttaacagcatcatcagaaaaaataattagcggacattatcagccgcggataattact

SEQ ID NO: 549224 - DNA, 75 bp, synthetic construct
  source 1..75: mol_type = other DNA
tgggcaatgatgccagcgtcgaactctctcaagttgctggacgaaacgttctcggtatcagagacggaatcatca

SEQ ID NO: 549225 - DNA, 75 bp, synthetic construct
  source 1..75: mol_type = other DNA
acacagttgaacgggattatttcactctcagagagcggttgatgctgatgcagaagcagctggaaggggcacagg

SEQ ID NO: 549226 - DNA, 75 bp, synthetic construct
  source 1..75: mol_type = other DNA
tgaacgggattatttcaccctcagagaacggttgatgacgatgcagaagcaactggaaggggcacagctatacat

SEQ ID NO: 549227 - DNA, 75 bp, synthetic construct
  source 1..75: mol_type = other DNA
ccgctggtcgtaagcgcctgcggatcaacgccacctgctccggtaccgtgcgtgaagccaccggcacctccggcg

SEQ ID NO: 549228 - DNA, 75 bp, synthetic construct
  source 1..75: mol_type = other DNA
tatttcatcctcagagaacggttgatgacaatgcagaagcagctggaaggggcgcaggactatatccgcactcag

SEQ ID NO: 549229 - DNA, 75 bp, synthetic construct
  source 1..75: mol_type = other DNA
gcggggctgaaggattacctggcccctatagggctgaaggttgaagggactccaaccaccgacgctttcctggct

SEQ ID NO: 549230 - DNA, 75 bp, synthetic construct
  source 1..75: mol_type = other DNA
ttcgtattgtggccattgctgttctggtctgggcaatccgttggtggtgatatgaaccgtgttctgtgtgtggtg

SEQ ID NO: 549231 - DNA, 75 bp, synthetic construct
  source 1..75: mol_type = other DNA
caactggaaggggcacaggactatatccgcactcagtgtactaagcaggctttttattatccggaggatgtatga

SEQ ID NO: 549232 - DNA, 75 bp, synthetic construct
  source 1..75: mol_type = other DNA
cgggattatttcaccctcagagagcggttgatgctgatgcagaagcagctggaaggggcacaggactatatccgc

SEQ ID NO: 549233 - DNA, 75 bp, synthetic construct
  source 1..75: mol_type = other DNA
gcaagcagaccaaagaatgtcggagtcgtgcgcagttcgggaggcacttgggtttaatcggtcagctgacgacgt

SEQ ID NO: 549234 - DNA, 75 bp, synthetic construct
  source 1..75: mol_type = other DNA
cggaactgaccaggctggatttgggcaattttgatgacagactgttgctgtatgtggcgttacaactggatgaag

SEQ ID NO: 549235 - DNA, 75 bp, synthetic construct
  source 1..75: mol_type = other DNA
cactatgcgcattatcgataccaatattaacgtgatggacgcacgtgggcgcattatcggcagcggcgatcgtga

SEQ ID NO: 549236 - DNA, 75 bp, synthetic construct
  source 1..75: mol_type = other DNA
gtattgcccgatcctatcgtacggcgaaaacgacgatggtggtgggtaacagcggatgccagaaagtcgctgcta

SEQ ID NO: 549237 - DNA, 75 bp, synthetic construct
  source 1..75: mol_type = other DNA
atttcggatagtcgatggtgtcggagatatcatcgagtggtgggggaaactggatgccgaaacgaaaaccctgat

SEQ ID NO: 549238 - DNA, 75 bp, synthetic construct
  source 1..75: mol_type = other DNA
ttaaagatgtgtatctaaaagataaatcttatttggatgatgatacattatccaaaattgatctttttatatatc

SEQ ID NO: 549239 - DNA, 75 bp, synthetic construct
  source 1..75: mol_type = other DNA
aaccgtatctctgaattgaccgggctggatttgggtaattttgatgacaggctgttgctgtatgtggcgttgcaa

SEQ ID NO: 549240 - DNA, 75 bp, synthetic construct
  source 1..75: mol_type = other DNA
cgctgatgcagttatttagcttccgagatcataagtcgctttattcgctgcttgcaaaaatggagcgaatggggt

SEQ ID NO: 549241 - DNA, 75 bp, synthetic construct
  source 1..75: mol_type = other DNA
ccacttgtgccgtggggtgaactgacgatgccggtgccggggctggaacttgcctcgtggattgaagcgcgtctg

SEQ ID NO: 549242 - DNA, 75 bp, synthetic construct
  source 1..75: mol_type = other DNA
gggcgcgccttgcgccagtcggacgtgtaaaaggtgtgatgcggataccggaaggccttgtgcgtatcaaccgtc

SEQ ID NO: 549243 - DNA, 75 bp, synthetic construct
  source 1..75: mol_type = other DNA
cggaactcacaggcttagatctggggaattttgatgacaggttattgttgtatgtggcgttacaactggatgaac

SEQ ID NO: 549244 - DNA, 75 bp, synthetic construct
  source 1..75: mol_type = other DNA
cgttcgaatttacaatgaagtcgatggcaaagcgccaaatgaccctgaagttcgttctaaaaatcaaaatagaga

SEQ ID NO: 549245 - DNA, 75 bp, synthetic construct
  source 1..75: mol_type = other DNA
aaactaagcaaagtatacagtgtccattgtgtattctacttaaaggaaaacatgatttgtcatcagttaaagtca

SEQ ID NO: 549246 - DNA, 75 bp, synthetic construct
  source 1..75: mol_type = other DNA
agtatttttttgcccgcttattgcgacctgacacccagagctgctattgcacagcggtaaatcagtttacccact

SEQ ID NO: 549247 - DNA, 75 bp, synthetic construct
  source 1..75: mol_type = other DNA
tcagagacggaatcatcagcgaccaggcagcattgagaatgcttcaggaatatatccgcactcagtgtattaact

SEQ ID NO: 549248 - DNA, 75 bp, synthetic construct
  source 1..75: mol_type = other DNA
ctacgcaagcagagcggctcagtggtctgatgaattgttagctgagcttaatgaattcgccactcagcttcgcga

SEQ ID NO: 549249 - DNA, 75 bp, synthetic construct
  source 1..75: mol_type = other DNA
tggatggttttctgaaaggtaaatgcatcccacgagatttaaaggttaacgaaacaaacgctgaatatctggttc

SEQ ID NO: 549250 - DNA, 75 bp, synthetic construct
  source 1..75: mol_type = other DNA
aaagtctctgcaatcagacaccccagccaccgatgctttcctggctgaaattgaacgcaaagcaatccgcaagtt

SEQ ID NO: 549251 - DNA, 75 bp, synthetic construct
  source 1..75: mol_type = other DNA
gaaacaaacgctgaatatctggtgcgtaaatttgctgaagcggaggccaagtgcgcggcgctggcagcggagaat

SEQ ID NO: 549252 - DNA, 75 bp, synthetic construct
  source 1..75: mol_type = other DNA
atcaaagacatgcagatccgccagcgtgatgtagcggctctggatgccaaatacacgaaggacttagctgatgct

SEQ ID NO: 549253 - DNA, 75 bp, synthetic construct
  source 1..75: mol_type = other DNA
tgcaaagtcaacgaccggagccagcagcatgggcgatggagaaagcccaggacttacagcagatgctgaactcaa

SEQ ID NO: 549254 - DNA, 75 bp, synthetic construct
  source 1..75: mol_type = other DNA
tgcaaagtcaacgaccggagccagcggcatgggcgatggagaaagcccaagacttacagcagatgctgaactcaa

SEQ ID NO: 549255 - DNA, 75 bp, synthetic construct
  source 1..75: mol_type = other DNA
attactgacatgcagcagcgccagcgtgatgttgctgcactcgatgcaaaatacacaaaggagttagccgatgcg

SEQ ID NO: 549256 - DNA, 75 bp, synthetic construct
  source 1..75: mol_type = other DNA
aaagtctatgcaatcagacaccccagccaccgacgctttcctggctgaagtacgggccagcgaacttgatagctt

SEQ ID NO: 549257 - DNA, 75 bp, synthetic construct
  source 1..75: mol_type = other DNA
tttgcagctgccaacgctggagaagctggggctaatcaacgcattaggttatgcgcctggagatatgcagccgtc

SEQ ID NO: 549258 - DNA, 75 bp, synthetic construct
  source 1..75: mol_type = other DNA
tgcgccgcgttctggcgcttatgacaacggtttccaggtcgtgcatatgggctatggcgtcgatgaaaaagtgca
